(19) United States
(12) Patent Application Publication
(10) Pub. No.: US 2026/0167953 A1
(43) Pub. Date: Jun. 18, 2026

(54) PREPARATION OF LONG READ NUCLEIC ACID LIBRARIES

(71) Applicant: Illumina, Inc., San Diego, CA (US)

(72) Inventors: Heather Meinholz, Cottage Grove, WI (US); Daniel Gerhardt, Madison, WI (US); Joshua Burgess, Sun Prairie, WI (US); Leigh Graham Monahan, Stanmore (AU); Jennifer Dennin, Mt. Horeb, WI (US); Stephen Paul Bruinsma, Madison, WI (US); M. Maggie O'Meara, Madison, WI (US); Aaron Earl Darling, Hornsby (AU); Johnathan Parker, Dane, WI (US); Stewart MacArthur, Cambridge (GB); Denise Raterman, Madison, WI (US); Feng Chen, Castro Valley, CA (US); Tina Huang, Los Altos, CA (US); Tiffany Truong, San Francisco, CA (US); Brian Hawks, San Diego, CA (US); Esther Musgrave-Brown, Cambridge (GB); Susan C. Verity, Cambridge (GB); Andrew Slatter, Cambridge (GB); David Tse, San Diego, CA (US)

(21) Appl. No.: 18/867,376

(22) PCT Filed: May 25, 2023
(86) PCT No.: PCT/US2023/067468

§ 371 Date: Nov. 19, 2024

Related U.S. Application Data
(60) Provisional application No. 63/365,361, filed on May 26, 2022.
(60) Provisional application No. 63/366,222, filed on Jun. 10, 2022.
(60) Provisional application No. 63/366,516, filed on Jun. 16, 2022.
(60) Provisional application No. 63/366,896, filed on Jun. 23, 2022.
(60) Provisional application No. 63/373,685, filed on Aug. 26, 2022.
(60) Provisional application No. 63/483,213, filed on Feb. 3, 2023.

(51) Int. Cl. C12N 15/10; C12Q 1/6806; C12Q 1/6853; C12Q 1/686; C12Q 1/6874

(52) U.S. Cl. CPC C12N 15/1031; C12N 15/1093; C12Q 1/6806; C12Q 1/6853; C12Q 1/686; C12Q 1/6874

(57) ABSTRACT

Some embodiments of the methods and compositions provided herein relate to obtaining long read information from short reads of a target nucleic acid. Some embodiments include steps to selectively generate, mark, and amplify long nucleic acid fragments. Some embodiments include enriching for certain sequences in the long fragments with selection probes directed to certain pharmacogenetic (PGX) genes. Some embodiments also include fragmenting the long nucleic acid fragments into shorter fragments for sequencing, and informatically reconstructing a sequence of the target nucleic acid.

### RELATED APPLICATIONS

[0001] This application claims priority to U.S. Prov. App. No. 63/483,213 filed Feb. 3, 2023; U.S. Prov. App. No. 63/373,685 filed Aug. 26, 2022; U.S. Prov. App. No. 63/366,896 filed Jun. 23, 2022; U.S. Prov. App. No. 63/366,516 filed Jun. 16, 2022; U.S. Prov. App. No. 63/366,222 filed Jun. 10, 2022; and U.S. Prov. App. No. 63/365,361 filed May 26, 2022, which are each entitled “PREPARATION OF LONG READ NUCLEIC ACID LIBRARIES” and which are each incorporated by reference herein in its entirety.

### REFERENCE TO SEQUENCE LISTING

[0002] The present application is being filed along with a Sequence Listing in electronic format. The Sequence Listing is provided as a file entitled ILLINC736WO5, created May 20, 2023, which is approximately 80,820,000 bytes in size. The information in the electronic format of the Sequence Listing is incorporated herein by reference in its entirety.

### FIELD OF THE INVENTION

[0003] Some embodiments of the methods and compositions provided herein relate to obtaining long read information from short reads of a target nucleic acid. Some embodiments include steps to selectively generate, mark, and amplify long nucleic acid fragments. Some embodiments include enriching for certain sequences in the long fragments with selection probes directed to certain pharmacogenetic (PGX) genes. Some embodiments also include fragmenting the long nucleic acid fragments into shorter fragments for sequencing, and informatically reconstructing a sequence of the target nucleic acid.

### BACKGROUND OF THE INVENTION

[0004] Current protocols for next-generation sequencing (NGS) of nucleic acid samples routinely employ a sample preparation process that converts DNA or RNA into a library of fragmented, sequenceable templates. Sample preparation methods often require multiple steps, material transfers, and expensive instruments to effect fragmentation, and therefore are often difficult, tedious, expensive, and inefficient.

[0005] In one approach, nucleic acid fragment libraries may be prepared using a transposome-based method where two transposon end sequences, one linked to a tag sequence, and a transposase form a transposome complex. The transposome complexes are used to fragment and tag target nucleic acids in solution to generate a sequencer-ready tagmented library. The transposome complexes may be immobilized on a solid surface, such as through a biotin molecule appended at the 5′ end of one of the two end sequences. Use of immobilized transposomes can provide advantages over solution-phase approaches by reducing hands-on and overall library preparation time, cost, and reagent requirements, lowering sample input requirements, and enabling the use of unpurified or degraded samples as a starting point for library preparation. However, certain portions of a genome may be underrepresented in libraries prepared using such transposomes.

### SUMMARY OF THE INVENTION

[0006] Some embodiments of the methods and compositions provided herein a method for preparing a nucleic acid library, comprising: (a) obtaining a plurality of transposomes comprising transposon adaptors, wherein the plurality of transposomes is immobilized on a solid support; (b) contacting a plurality of nucleic acid fragments with the plurality of transposomes to obtain a plurality of polynucleotides; (c) amplifying the plurality of polynucleotides to obtain amplified polynucleotides; and (d) adding library adapters to each end of the amplified polynucleotides, thereby obtaining the nucleic acid library.

[0007] In some embodiments, the solid support comprises a bead. In some embodiments, the plurality of the transposomes is immobilized on the bead at a density such that an average length of the plurality of polynucleotides is greater than about 1 kbp, 2 kbp, 5 kbp, 10 kbp, 15 kbp, 20 kbp, or 40 kbp; and/or wherein the average length of the plurality of polynucleotides is in a range from about 1 kbp to about 40 kbp, 1 kbp to about 30 kbp, 1 kbp to about 20 kbp, 5 kbp to about 20 kbp, 5 kbp to about 15 kbp, or 7 kbp to about 12 kbp. In some embodiments, the number of transposomes immobilized on the bead is no more than about 100 transposomes, 50 transposomes, 40 transposomes, 30 transposomes, 20 transposomes, or 10 transposomes. In some embodiments, the number of transposomes immobilized on the bead is no more than about 30 transposomes. In some embodiments, the plurality of the transposomes immobilized on the bead comprise a total activity such that an average length of the plurality of polynucleotides greater than about 1 kbp, 2 kbp, 5 kbp, 10 kbp, 15 kbp, 20 kbp, or 40 kbp; and/or wherein the average length of the plurality of polynucleotides is in a range from about 1 kbp to about 40 kbp, 1 kbp to about 30 kbp, 1 kbp to about 20 kbp, 5 kbp to about 20 kbp, 5 kbp to about 15 kbp, or 7 kbp to about 12 kbp. In some embodiments, the plurality of the transposomes immobilized on the bead comprise an activity in a range from about 0.05 AU/μl to about 0.25 0.05 AU/μl. In some embodiments, the plurality of the transposomes immobilized on the bead comprise an activity of about 0.075 AU/μl. In some embodiments, the transposon adapters comprise the same sequence. In some embodiments, the transposomes of the plurality of transposomes are the same. In some embodiments, the transposomes of the plurality of transposomes are B15 transposomes. In some embodiments, the transposon adapters comprise the nucleotide sequence: SEQ ID NO:01 (GTCTCGTGGGCTCGG).

[0008] In some embodiments, the step (c) comprises a mutagenesis PCR, such that mutations are introduced into amplified polynucleotides. In some embodiments, the mutagenesis PCR comprises amplifying the plurality of polynucleotides with a low bias DNA polymerase, and/or with a nucleotide analogue. In some embodiments, the nucleotide analogue comprises dPTP, and/or 8-oxo-dGTP. In some embodiments, the low bias DNA polymerase is a Thermococcal polymerase, or a functional derivative thereof. In some embodiments, the Thermococcal polymerase is derived from a Thermococcal strain selected from the group consisting of T. kodakarensis, T. siculi, T. celer and T. sp KS-1. In some embodiments, the mutagenesis PCR comprises no more than 12 cycles, 10 cycles, 9 cycles, 8 cycles, 7 cycles, 6 cycles, 5 cycles, 4 cycles, 3 cycles, or 2 cycles. In some embodiments, the mutagenesis PCR comprises no more than 6 cycles.

[0009] In some embodiments, a first end of a polynucleotide of the plurality of polynucleotides is capable of annealing to a second end of the polynucleotide of the plurality of polynucleotides; and/or, wherein a first end of an amplified polynucleotide is capable of annealing to a second end of the amplified polynucleotide. In some embodiments, step (c) further comprises a suppression PCR. In some embodiments, the suppression PCR comprises use of a single amplification primer. In some embodiments, the amplified polynucleotides have an average length greater than about 1 kbp, 2 kbp, 3 kbp, 4 kbp, 5 kbp, 10 kbp, 15 kbp, or 20 kbp. In some embodiments, the suppression PCR comprises no more than 16 cycles, 14 cycles, 10 cycles, 9 cycles, 8 cycles, 7 cycles, 6 cycles, 5 cycles, 4 cycles, 3 cycles, or 2 cycles. In some embodiments, the suppression PCR comprises no more than 6 cycles.

[0010] Some embodiments also include enriching for target nucleic acids in the amplified polynucleotides. Some embodiments also include enriching for target nucleic acids in the plurality of polynucleotides. In some embodiments, the enriching for target nucleic acids in the amplified polynucleotides is performed after performing the mutagenesis PCR, and before performing the suppression PCR. In some embodiments, the enriching for target nucleic acids in the amplified polynucleotides is performed after performing the suppression PCR. Some embodiments also include amplifying the target nucleic acids.

[0011] In some embodiments, step (d) comprises contacting the amplified polynucleotides with an additional plurality of transposomes comprising the library adapters. In some embodiments, the library adapters comprise (i) indexes, (ii) bridge amplification primer binding sites, and/or (iii) sequencing primer binding sites. Some embodiments also include enriching for target polynucleotides in the nucleic acid library.

[0012] In some embodiments, the enriching comprises hybridizing a plurality of selection probes with the amplified polynucleotides, the plurality of polynucleotides, and/or the nucleic acid library, wherein the selection probes of the plurality of selection probes comprise different nucleotide sequences from one another. In some embodiments, an average distance between two adjacent nucleotide sequences of the selection probes on a reference sequence of a genome is in a range from about 300 consecutive nucleotides to about 7,000 consecutive nucleotides; optionally, wherein the range is from about 500 consecutive nucleotides to about 5,000 consecutive nucleotides; optionally, wherein the range is from about 750 consecutive nucleotides to about 2,500 consecutive nucleotides; optionally, wherein the range is from about 750 consecutive nucleotides to about 1,500 consecutive nucleotides; and optionally, wherein the range is from about 900 consecutive nucleotides to about 1,200 consecutive nucleotides. In some embodiments, an average distance between two adjacent nucleotide sequences of the selection probes on a reference sequence of a genome is about 750, 1000, 1500, or 2000 consecutive nucleotides. In some embodiments, an average number of sites in a genome that each selection probe of the plurality of selection probes is capable of hybridizing to is no more than 50 different sites in the genome, to no more than 40 different sites in the genome, to no more than 30 different sites in the genome, to no more than 20 different sites in the genome. In some embodiments, each selection probe of the plurality of selection probes is capable of hybridizing to no more than 50 different sites in a genome, to no more than 40 different sites in a genome, to no more than 30 different sites in a genome, to no more than 20 different sites in a genome. In some embodiments, a selection probe capable of hybridizing to a site in the genome comprises at least 50, 60, 70, or 80 consecutive nucleotides complementary to at least 90% of a nucleotide sequence at the site in the genome.

[0013] In some embodiments, the plurality of selection probes comprise at least 50, 100, 200, 500, 1000, 5000 different selection probes. In some embodiments, each selection probe of the plurality of selection probes comprises a nucleotide sequence capable of hybridizing to a gene selected from TABLE 1B; and/or a nucleotide sequence within, no more than 10 kbp 5′ or no more than 10 kbp 3′ of a gene selected from TABLE 1B. In some embodiments, each selection probe of the plurality of selection probes comprises a nucleotide sequence having at least 90%, 95%, or 100% sequence identity to any one of SEQ ID NOs: 02-85,141. In some embodiments, each selection probe of the plurality of selection probes comprises a nucleotide sequence having at least 90%, 95%, or 100% sequence identity to any one of SEQ ID NOs: 02-16847. In some embodiments, each selection probe of the plurality of selection probes comprises a nucleotide sequence having at least 90%, 95%, or 100% sequence identity to any one of SEQ ID NOs: 02-8154. In some embodiments, the plurality of selection probes is attached to a substrate. In some embodiments, the substrate comprises a plurality of beads; optionally wherein the beads are magnetic.

[0014] Some embodiments also include amplifying the target polynucleotides. In some embodiments, an amount of the plurality of nucleic acid fragments is less than about 100 ng, 50 ng, 30 ng, 20 ng, 10 ng, 5 ng, or 1 ng. In some embodiments, the plurality of nucleic acid fragments is mammalian. In some embodiments, the plurality of nucleic acid fragments is human. In some embodiments, a plurality of nucleic acid fragments comprises genomic DNA.

[0015] Some embodiments of the methods and compositions provided herein a method for preparing a nucleic acid library, comprising: (a) obtaining a plurality of transposomes comprising transposon adaptors, wherein the plurality of transposomes is immobilized on a bead, wherein the transposomes of the plurality of transposomes are the same; (b) contacting a plurality of nucleic acid fragments with the plurality of transposomes to obtain a plurality of polynucleotides, wherein the plurality of the transposomes immobilized on the bead comprise a total activity such that an average length of the plurality of polynucleotides greater than about 1 kbp, 2 kbp, 5 kbp, 10 kbp, 15 kbp, 20 kbp, or 40 kbp; (c) amplifying the plurality of polynucleotides to obtain amplified polynucleotides by: (i) performing a mutagenesis PCR, such that mutations are introduced into amplified polynucleotides, and (ii) performing a suppression PCR; and (d) adding library adapters to each end of the amplified polynucleotides by contacting the amplified polynucleotides with an additional plurality of transposomes, thereby obtaining the nucleic acid library.

[0016] Some embodiments also include enriching for target nucleic acids in the amplified polynucleotides, and/or enriching for target nucleic acids in the nucleic acid library. In some embodiments, enriching for target nucleic acids in the amplified polynucleotides is performed prior to performing the suppression PCR. In some embodiments, enriching for target nucleic acids in the amplified polynucleotides is performed after performing the suppression PCR. In some embodiments, the enriching comprises hybridizing a plurality of selection probes with the amplified polynucleotides and/or the nucleic acid library.

[0017] In some embodiments, the enriching comprises hybridizing a plurality of selection probes with the amplified polynucleotides, the plurality of polynucleotides, and/or the nucleic acid library, wherein the selection probes of the plurality of selection probes comprise different nucleotide sequences from one another. In some embodiments, an average distance between two adjacent nucleotide sequences of the selection probes on a reference sequence of a genome is in a range from about 300 consecutive nucleotides to about 7,000 consecutive nucleotides; optionally, wherein the range is from about 500 consecutive nucleotides to about 5,000 consecutive nucleotides; optionally, wherein the range is from about 750 consecutive nucleotides to about 2,500 consecutive nucleotides; optionally, wherein the range is from about 750 consecutive nucleotides to about 1,500 consecutive nucleotides; and optionally, wherein the range is from about 900 consecutive nucleotides to about 1,200 consecutive nucleotides. In some embodiments, an average distance between two adjacent nucleotide sequences of the selection probes on a reference sequence of a genome is about 750, 1000, 1500, or 2000 consecutive nucleotides. In some embodiments, an average number of sites in a genome that each selection probe of the plurality of selection probes is capable of hybridizing to is no more than 50 different sites in the genome, to no more than 40 different sites in the genome, to no more than 30 different sites in the genome, to no more than 20 different sites in the genome. In some embodiments, each selection probe of the plurality of selection probes is capable of hybridizing to no more than 50 different sites in a genome, to no more than 40 different sites in a genome, to no more than 30 different sites in a genome, to no more than 20 different sites in a genome. In some embodiments, a selection probe capable of hybridizing to a site in the genome comprises at least 50, 60, 70, or 80 consecutive nucleotides complementary to at least 90% of a nucleotide sequence at the site in the genome.

[0018] In some embodiments, the plurality of selection probes comprise at least 50, 100, 200, 500, 1000, 5000 different selection probes. In some embodiments, each selection probe of the plurality of selection probes comprises a nucleotide sequence capable of hybridizing to a gene selected from TABLE 1B; and/or a nucleotide sequence within, no more than 10 kbp 5′ or no more than 10 kbp 3′ of a gene selected from TABLE 1B. In some embodiments, each selection probe of the plurality of selection probes comprises a nucleotide sequence having at least 90%, 95%, or 100% sequence identity to any one of SEQ ID NOs: 02-85,141. In some embodiments, each selection probe of the plurality of selection probes comprises a nucleotide sequence having at least 90%, 95%, or 100% sequence identity to any one of SEQ ID NOs: 02-16847. In some embodiments, each selection probe of the plurality of selection probes comprises a nucleotide sequence having at least 90%, 95%, or 100% sequence identity to any one of SEQ ID NOs: 02-8154. In some embodiments, the plurality of selection probes is attached to a substrate; optionally, wherein the substrate comprises a plurality of beads; optionally wherein the beads are magnetic.

[0019] Some embodiments of the methods and compositions provided herein a method for determining a sequence of a target nucleic acid, comprising: performing any one of the foregoing methods; sequencing the nucleic acid library to obtain sequence reads; and assembling sequence reads to obtain the sequence of a target nucleic acid. In some embodiments, the assembling comprises comparing the sequence reads to a reference sequence. In some embodiments, the comparing comprises determining mutations introduced into the amplified polynucleotides during the mutagenesis PCR. In some embodiments, the reference sequence is obtained from the same nucleic acid sample as the plurality of nucleic acid fragments.

[0020] Some embodiments of the methods and compositions provided herein a kit comprising: a first bead-linked transposomes (BLT-1) reagent, wherein the BLT-1 transposomes comprises a first adaptor sequence; a mutagenesis reagent comprising a first primer, dPTPs, dNTPs, and a polymerase; a second bead-linked transposomes (BLT-2) reagent, wherein the BLT-2 transposomes comprise the first adaptor and a second adaptor; an amplification reagent comprising a first primer, a second primer, dNTPs, and a polymerase; wherein BLT-1 has a lower transposome density as compared to BLT-2; and wherein the first primer hybridizes to the first adaptor sequence and the second primer hybridizes to the second adaptor sequence. In some embodiments, BLT-2 has more than 10, 20, 50, 100, or 1000 times the transposome density as compared to BLT-1. In some embodiments, the first adaptor is B15 and the second adaptor is A14.

[0021] Some embodiments of the methods and compositions provided herein a system for preparing a nucleic acid library, comprising: (a) a first plurality of transposomes comprising transposon adaptors for tagmenting a plurality of nucleic acid fragments, wherein the first plurality of transposomes is immobilized on a first plurality of beads at a first density; (b) reagents for amplifying the plurality of polynucleotides to obtain amplified polynucleotides, wherein the amplifying comprising a mutagenesis PCR and/or a suppression PCR, wherein: (i) the first reagent for performing mutagenesis PCR comprise a low bias DNA polymerase and/or a nucleotide analogue; optionally, wherein the nucleotide analogue comprises dPTP, and/or 8-oxo-dGTP; and/or the low bias DNA polymerase is a Thermococcal polymerase, or a functional derivative thereof, optionally, wherein the Thermococcal polymerase is derived from a Thermococcal strain selected from the group consisting of T. kodakarensis, T. siculi, T. celer and T. sp KS-1, and (ii) the first reagents for performing suppression PCR comprise amplification primers having the same nucleotide sequence capable of hybridizing to the transposon adaptors; (c) a plurality of selection probes for enriching for target polynucleotides in the amplified polynucleotides; and (d) a second plurality of transposomes comprising library adaptors for adding library adaptors to each end of the amplified polynucleotides, wherein the second plurality of transposomes is immobilized on a second plurality of beads at a second density, wherein the first density is less than the second density.

[0022] Some embodiments of the methods and compositions provided herein a system for preparing a nucleic acid library, comprising: (a) a first plurality of transposomes for tagmenting a plurality of nucleic acid fragments to obtain a plurality of polynucleotides, wherein the first plurality of transposomes comprises transposon adaptors, wherein the first plurality of transposomes is immobilized on a solid support, optionally, wherein the solid support comprises a first plurality of beads; wherein: the first plurality of the transposomes is immobilized on the first plurality of beads at a density such that on contacting the first plurality of transposomes with the plurality of nucleic acid fragments the plurality of polynucleotides has an average length of the plurality of polynucleotides is greater than about 1 kbp, 2 kbp, 5 kbp, 10 kbp, 15 kbp, 20 kbp, or 40 kbp; and/or wherein the average length of the plurality of polynucleotides is in a range from about 1 kbp to about 40 kbp, 1 kbp to about 30 kbp, 1 kbp to about 20 kbp, 5 kbp to about 20 kbp, 5 kbp to about 15 kbp, or 7 kbp to about 12 kbp; the number of transposomes immobilized on the bead is no more than about 100 transposomes, 50 transposomes, 40 transposomes, 30 transposomes, 20 transposomes, or 10 transposomes, optionally, wherein the number of transposomes immobilized on the bead is no more than about 30 transposomes; the plurality of the transposomes immobilized on the bead comprise a total activity such that on contacting the first plurality of transposomes with the plurality of nucleic acid fragments the plurality of polynucleotides has an average length greater than about 1 kbp, 2 kbp, 5 kbp, 10 kbp, 15 kbp, 20 kbp, or 40 kbp; and/or wherein the average length of the plurality of polynucleotides is in a range from about 1 kbp to about 40 kbp, 1 kbp to about 30 kbp, 1 kbp to about 20 kbp, 5 kbp to about 20 kbp, 5 kbp to about 15 kbp, or 7 kbp to about 12 kbp; and/or the plurality of the transposomes immobilized on the bead comprise an activity in a range from about 0.05 AU/μl to about 0.25 0.05 AU/μl, optionally, wherein the plurality of the transposomes immobilized on the bead comprise an activity of about 0.075 AU/μl; (b) first reagents for amplifying the plurality of polynucleotides to obtain amplified polynucleotides; and (c) second reagents for adding library adaptors to each end of the amplified polynucleotides. In some embodiments, the transposon adapters comprise the same sequence, optionally, wherein the transposon adapters comprise the nucleotide sequence: SEQ ID NO: 01 (GTCTCGTGGGCTCGG); and/or wherein the transposomes of the plurality of transposomes are the same, optionally, wherein the transposomes of the plurality of transposomes are B15 transposomes.

[0023] In some embodiments, the first reagents comprise reagents for performing mutagenesis PCR comprising a low bias DNA polymerase and/or a nucleotide analogue; optionally, wherein: the nucleotide analogue comprises dPTP, and/or 8-oxo-dGTP; and/or the low bias DNA polymerase is a Thermococcal polymerase, or a functional derivative thereof, optionally, wherein the Thermococcal polymerase is derived from a Thermococcal strain selected from the group consisting of T. kodakarensis, T. siculi, T. celer and T. sp KS-1. In some embodiments, the first reagents comprise reagents for performing suppression PCR comprising amplification primers having the same nucleotide sequence; optionally, wherein the amplification primers are capable of hybridizing to the transposon adaptors.

[0024] In some embodiments, the second reagents comprise a second plurality of transposomes comprising the library adaptors; and optionally, wherein the second plurality of transposomes has an activity such that on contacting the second plurality of transposomes with the amplified polynucleotides a library of nucleic acids is obtained and comprises the library adaptors and having an average length less than about 1 kb, 900 bp, 800, bp, 700 bp, 600 bp, 500 bp, 400 bp, 300 bp, 200 bp, or 100 bp. In some embodiments, the first plurality of the transposomes is immobilized on the beads at a density less than a density at which the second plurality of transposomes are immobilized on the second plurality of beads.

[0025] Some embodiments also include third reagents for enriching for target polynucleotides in the amplified polynucleotides, comprising a plurality of selection probes; optionally, wherein the plurality of selection probes is attached to a third plurality of beads. In some embodiments, an average distance between two adjacent nucleotide sequences of the selection probes on a reference sequence of a genome is in a range from about 300 consecutive nucleotides to about 7,000 consecutive nucleotides; optionally, wherein the range is from about 500 consecutive nucleotides to about 5,000 consecutive nucleotides; optionally, wherein the range is from about 750 consecutive nucleotides to about 2,500 consecutive nucleotides; optionally, wherein the range is from about 750 consecutive nucleotides to about 1,500 consecutive nucleotides; and optionally, wherein the range is from about 900 consecutive nucleotides to about 1,200 consecutive nucleotides; and optionally, wherein an average distance between two adjacent nucleotide sequences of the selection probes on a reference sequence of a genome is about 750, 1000, 1500, or 2000 consecutive nucleotides. In some embodiments, an average number of sites in a genome that each selection probe of the plurality of selection probes is capable of hybridizing to is no more than 50 different sites in the genome, to no more than 40 different sites in the genome, to no more than 30 different sites in the genome, to no more than 20 different sites in the genome. In some embodiments, each selection probe of the plurality of selection probes is capable of hybridizing to no more than 50 different sites in a genome, to no more than 40 different sites in a genome, to no more than 30 different sites in a genome, to no more than 20 different sites in a genome; and optionally, wherein a selection probe capable of hybridizing to a site in the genome comprises at least 50, 60, 70, or 80 consecutive nucleotides complementary to at least 90% of a nucleotide sequence at the site in the genome. In some embodiments, the plurality of selection probes comprise at least 50, 100, 200, 500, 1000, 5000 different selection probes. In some embodiments, each selection probe of the plurality of selection probes comprises a nucleotide sequence capable of hybridizing to a gene selected from TABLE 1B; and/or a nucleotide sequence within, no more than 10 kbp 5′ or no more than 10 kbp 3′ of a gene selected from TABLE 1B. In some embodiments, each selection probe of the plurality of selection probes comprises a nucleotide sequence having at least 90%, 95%, or 100% sequence identity to any one of SEQ ID NOs: 02-85,141. In some embodiments, each selection probe of the plurality of selection probes comprises a nucleotide sequence having at least 90%, 95%, or 100% sequence identity to any one of SEQ ID NOs: 02-16847. In some embodiments, each selection probe of the plurality of selection probes comprises a nucleotide sequence having at least 90%, 95%, or 100% sequence identity to any one of SEQ ID NOs: 02-8154.

[0026] In some embodiments, the plurality of nucleic acid fragments is mammalian. In some embodiments, the plurality of nucleic acid fragments is human. In some embodiments, the plurality of nucleic acid fragments comprises genomic DNA.

[0027] Some embodiments of the methods and compositions provided herein a kit comprising: a plurality of at least 50, 100, 1000, 2000, 3000, 4000, 5000, 10000, 20000, 30000, or 40000 selection probes, wherein the selection probes are different from one another, and comprise a nucleotide sequence having at least 90%, 95%, or 100% sequence identity to any one of SEQ ID NOs: 02-85,141; and optionally: (i) a first plurality of transposomes comprising transposon adaptors for tagmenting a plurality of nucleic acid fragments, wherein the first plurality of transposomes is immobilized on a first plurality of beads at a first density; and (ii) a second plurality of transposomes comprising library adaptors for adding library adaptors to each end of the amplified polynucleotides, wherein the second plurality of transposomes is immobilized on a second plurality of beads at a second density, wherein the first density is less than the second density. In some embodiments, each selection probe of the plurality of selection probes comprises a nucleotide sequence having at least 90%, 95%, or 100% sequence identity to any one of SEQ ID NOs: 02-16847, or to any one of SEQ ID NOs: 02-8154.

### BRIEF DESCRIPTION OF THE DRAWINGS

[0028] FIG. 1 depicts an example embodiment of a workflow which includes: fragmenting long input DNA by high molecular weight (HMW) fragmentation and adding adapters, such as by tagmentation using low density bead linked transposomes (BLTs); long range PCR mutagenesis to introduce a signature into long fragments; further library preparation steps, such as additional tagmentation to obtain small fragments with adapters; sequencing and assembly of sequencing reads.

[0029] FIG. 2 depicts an example embodiment of a workflow which includes a long-read (iLR) pathway, and a reference pathway. The long-read pathway includes steps for: tagmentation; mutagenesis; bottlenecking (suppression) PCR. Both the long-read pathway and reference pathway share steps including: standard library preparation, such as tagmentation; sequencing; and assembly of sequencing reads.

[0030] FIG. 3A is a graph which relates to a purified bottlenecking PCR product run on an Agilent Bioanalyzer using a High Sensitivity DNA Kit.

[0031] FIG. 3B is a graph which relates to a purified final library prep product run on an Agilent Bioanalyzer using a High Sensitivity DNA Kit.

[0032] FIG. 4A depicts a graph of results using transposomes in solution at various concentration.

[0033] FIG. 4B depicts a graph of results for size distribution using BLTs.

[0034] FIG. 4C depicts graphs for a Staphylococcus aureus 4 Mb genome view, with samples at 4 million reads, GC content: 32.9%, size: 2.8 Mb. A: Nextera XT (soluble transposomes); B: Flex (BLT): 1 ng; C: Flex (BLT): 100 ng; D: Flex (BLT): colony direct.

[0035] FIG. 5 depicts a schematic for workflow steps including HMW fragmentation; and mutagenesis and suppression PCR in which smaller products form hairpins.

[0036] FIGS. 6A-6C depict graphs related to activity and fragment length. FIG. 6A is a graph of actual activity units (AU)/μl and median AU/μl versus build AU/μl for soluble transposomes (TSM), and BLTs having various densities/activities of transposomes: BLT at low density (BLT-LR) at 0.075 AU/μl, and TDER-BLT comprising A14 and B15 TSMs at 0.1 AU/μl, 0.2 AU/μl, and 0.5 AU/μl. In FIG. 6A, “TDER-BLR” is “TDER-BLT”. FIG. 6B is a graph of fragment size. FIG. 6C is a graph for average size for soluble TSM, and BLTs containing A14 and B15 TSMs, or B15 TSM only.

[0037] FIGS. 7A-7C depict graphs related to mutagenesis PCR for soluble TSM, and BLTs containing A14 and B15 TSMs, or B15 TSM only. FIG. 7A is a graph of mean yield (ng/μl). FIG. 7B is a graph for average size. FIG. 7C is a graph for mean average size.

[0038] FIGS. 8A-8C depict graphs related to bottleneck (suppression) PCR for soluble TSM, and BLTs containing A14 and B15 TSMs, or B15 TSM only. FIG. 8A is a graph of mean yield (ng/μl). FIG. 8B is a graph for size distribution. FIG. 8C is a graph for mean average size.

[0039] FIG. 9 depicts a graph for a sequencing metric (GC coverage) for soluble TSM, and BLTs containing A14 and B15 TSMs, or B15 TSM only.

[0040] FIGS. 10A and 10B depict graphs for a N50 sequencing metric for soluble TSM, and BLTs containing A14 and B15 TSMs, or B15 TSM only. N50 is the length of the shortest contig for which longer and equal length contigs cover at least 50% of the assembly. FIG. 10A depicts a graph for N50. FIG. 10B depicts a graph for N50 by regions.

[0041] FIG. 11 depicts a graph for a sequencing metric (fraction of bases with no coverage, left panel; and fraction of bases with <10× coverage, right panel) for soluble TSM, and BLTs containing A14 and B15 TSMs, or B15 TSM only.

[0042] FIG. 12 depict graphs of various BLT activities (Build AU/μl), and product average size (lower panel), total yield (middle panel), or fluorescent resonance energy transfer (FRET) (upper panel).

[0043] FIG. 13 depicts graphs of various BLT activities (Build AU/μl), and sequencing metrics including SLR coverage depth (lower panels), total bases (middle panels), or N50 (upper panels).

[0044] FIG. 14 depicts graphs of various BLT activities (Build AU/μl), and sequencing metrics including percent duplicated reads (lower panels), fraction of bases with <10× coverage (middle panels), or fraction of bases with no coverage (upper panels).

[0045] FIG. 15 depicts graphs of various BLT activities (AU/μl), and sequencing metrics including SLR coverage depth (lower panel), total bases (lower middle panel), redundancy (upper middle panel), or N50 (upper panel) with three different operators.

[0046] FIG. 16 depicts graphs of tagmentation yield (left panel) or tagmentation fragment length (right panel) for various amounts of input DNA.

[0047] FIG. 17 depicts graphs for various amounts of input DNA and mutagenesis yield (upper left panel), bottleneck yield (middle left panel), library yield (lower left panel), mutagenesis fragment length (upper right panel), bottleneck fragment length (middle right panel), and library fragment length (lower right panel).

[0048] FIG. 18 depicts graphs for various amounts of input DNA and sequencing metrics including: total bases (upper left panel), insert size (middle left panel), percent duplicated reads (lower left panel), total bases (upper right panel), insert size (middle right panel), and library fragment length (lower right panel). The right panels show the same data as the left panels, but without the 1000 ng data point.

[0049] FIG. 19 depicts graphs for various amounts of input DNA and sequencing metrics including: number of MQ0 reads (upper left panel), error rate (upper middle left panel), redundancy (lower middle left panel), N50 (lower left panel), number of MQ0 reads (upper right panel), error rate (upper middle right panel), redundancy (lower middle right panel), N50 (lower right panel). The right panels show the same data as the left panels, but without the 1000 ng data point.

[0050] FIG. 20 depicts graphs for various amounts of input DNA and sequencing metrics including: mode coverage (upper left panel), fraction of bases with no coverage (middle left panel), fraction of bases with <10× coverage (lower left panel), mode coverage (upper right panel), fraction of bases with no coverage (middle right panel), fraction of bases with <10× coverage (lower right panel). The right panels show the same data as the left panels, but without the 1000 ng data point.

[0051] FIG. 21 depicts a graph for various amounts of input DNA and sequencing metric (GC bias).

[0052] FIG. 22 depicts graphs for various input DNAs subjected to shearing for different periods of time, control input DNA, and HMW input DNA, and fragment size.

[0053] FIG. 23 depicts graphs for various input DNAs subjected to shearing for different periods of time, control input DNA, and HMW input DNA, and tagmentation yield (left panel) or tagmentation fragment length (right panel).

[0054] FIG. 24A depicts graphs for various input DNAs subjected to shearing for different periods of time, control input DNA, and HMW input DNA, and mutagenesis yield (left panel) or normalization yield (right panel).

[0055] FIG. 24B depicts graphs for various input DNAs subjected to shearing for different periods of time, control input DNA, and HMW input DNA, and bottleneck PCR yield (left panel) or post-bottleneck fragment length (right panel).

[0056] FIG. 25 depicts graphs for various input DNAs subjected to shearing for different periods of time, and HMW input DNA, and sequencing metrics: N50 (left panels) or redundancy (right panels).

[0057] FIG. 26 depicts graphs for various input DNAs subjected to shearing for different periods of time, and HMW input DNA, and sequencing metrics: SLR coverage (upper left panel), fraction with no coverage (middle left panel), fraction with <10× coverage (lower left panel), insert size (upper right panel), percent duplicated reads (upper middle right panel), insertion per 100 kb (lower middle right panel), or MQ0 (lower right panel).

[0058] FIG. 27 depicts graphs for various input DNAs subjected to shearing for different periods of time, and HMW input DNA, and a sequencing metric (GC bias).

[0059] FIG. 28 depicts an example overview for enrichment of ‘long fragments’ or ‘short fragments’ in a workflow.

[0060] FIG. 29 depicts an example timeline for enrichment of ‘long fragments’ or ‘short fragments’ in a workflow.

[0061] FIG. 30 depicts selection of probes with higher specificity in long fragments.

[0062] FIG. 31 depicts design of probes in regions adjacent to problematic regions of the genome.

[0063] FIG. 32 depicts embodiments including an example work flow for whole genome sequencing (WGS) with optional enrichment steps, and parallel standard short read (SR) library preparation.

[0064] FIG. 33 depicts use of 80mer probes with long fragments in problematic target regions, compared to use of probes with short fragments (upper panel); use of 80mer probes with flanked long difficult regions, compared to use of probes with short fragments (middle panel); and use of 80mer probes with long fragments in regions with infrequent probe coverage, compared to use of probes with short fragments (lower panel).

[0065] FIG. 34 depicts results of sequencing coverage for a targeted region using a method with long fragments and enrichment (ICLR with enrichment).

[0066] FIG. 35 depicts results of sequencing coverage for a targeted a 722 kb region in the MHC locus using a method with long fragments and enrichment.

[0067] FIG. 36 depicts results of sequencing coverage for a targeted a 426 kb region in the MHC locus that covered HLA-A, HLA-G, HLA-F using a method with long fragments and enrichment.

[0068] FIG. 37A depicts a graph for SNV precision and recall for methods which included (i) on market long reads; (ii) PCR free (tagmentation to provide short fragments); (iii) long fragments with enrichment using an MHC selection probe panel (ICLR-MHC enrichment); and (iv) long fragments without enrichment (ICLR-WGS).

[0069] FIG. 37B depicts a graph for Indel precision and recall for methods which included (i) on market long reads; (ii) PCR free (tagmentation to provide short fragments); (iii) long fragments with enrichment using an MHC selection probe panel (ICLR-MHC enrichment); and (iv) long fragments without enrichment (ICLR-WGS).

[0070] FIG. 38 depicts a graph for coverage in ACMG genes using methods which included long fragments with enrichment using an ACMG selection probe panel (enrichment) or long fragments without enrichment (WGS).

[0071] FIG. 39 depicts results of sequencing coverage for a TNNT2, a 22 kb gene which was fully phased in one phase block, using a method with long fragments and enrichment with an ACMG panel of selection probes.

[0072] FIG. 40A depicts results of sequencing coverage for APOB which was fully phased in one phase block, using a method with long fragments and enrichment with an ACMG panel of selection probes.

[0073] FIG. 40B depicts results of sequencing coverage for TMEM127 which was fully phased in one phase block, using a method with long fragments and enrichment with an ACMG panel of selection probes.

[0074] FIG. 41 depicts results of sequencing coverage for MSH6 using a method with long fragments and enrichment with an ACMG panel of selection probes (ICLR with enrichment), and a method with long fragments without enrichment (ICLR WGS).

[0075] FIG. 42A depicts a graph for SNV precision and recall for methods which included (i) on market long reads; (ii) PCR free (tagmentation to provide short fragments); (iii) long fragments with enrichment using an ACMG selection probe panel (ICLR-ACMG enrichment); and (iv) long fragments without enrichment (ICLR-WGS).

[0076] FIG. 42B depicts a graph for Indel precision and recall for methods which included (i) on market long reads; (ii) PCR free (tagmentation to provide short fragments); (iii) long fragments with enrichment using an ACMG selection probe panel (ICLR-ACMG enrichment); and (iv) long fragments without enrichment (ICLR-WGS).

[0077] FIG. 43A depicts a graph for SNV precision and recall for methods which included (i) on market long reads; (ii) PCR free (tagmentation to provide short fragments); (iii) long fragments with enrichment using a PGX selection probe panel (ICLR-PGX enrichment); and (iv) long fragments without enrichment (ICLR-WGS).

[0078] FIG. 43B depicts a graph for Indel precision and recall for methods which included (i) on market long reads; (ii) PCR free (tagmentation to provide short fragments); (iii) long fragments with enrichment using a PGX selection probe panel (ICLR-PGX enrichment); and (iv) long fragments without enrichment (ICLR-WGS).

[0079] FIG. 44A depicts three graphs comparing use of a first selection probe panel (SYD-C2-CMRG-230 bp) and a second selection probe panel (SYD-C2-CMRG-1 kb) for (i) total mutations in bases in region (upper left panel); (ii) percentage DUP mutant reads (upper right panel); and (iii) percentage on target unique mapped reads (lower panel).

[0080] FIG. 44B depicts a graph of normalized coverage between use of a first selection probe panel (SYD-C2-CMRG-230 bp) and a second selection probe panel (SYD-C2-CMRG-1 kb).

[0081] FIG. 44C depicts a comparison between results of sequencing coverage for HBG1 using a method (i) with long fragments and enrichment with an CMRG panel of selection probes (ICLR with enrichment); (ii) with long fragments without enrichment (ICLR WGS); and (iii) tagmentation with short reads (PCR free short read).

[0082] FIG. 45A depicts a graph for SNV precision and recall for methods which included (i) on market long reads; (ii) PCR free (tagmentation to provide short fragments); (iii) long fragments with enrichment using a CMRG selection probe panel (ICLR-CMRG enrichment); and (iv) long fragments without enrichment (ICLR-WGS).

[0083] FIG. 45B depicts a graph for Indel precision and recall for methods which included (i) on market long reads; (ii) PCR free (tagmentation to provide short fragments); (iii) long fragments with enrichment using a CMRG selection probe panel (ICLR-CMRG enrichment); and (iv) long fragments without enrichment (ICLR-WGS).

### DETAILED DESCRIPTION

[0084] Some embodiments of the methods and compositions provided herein relate to obtaining long read information from short reads of a target nucleic acid. Some embodiments include steps to selectively generate, mark, and amplify long nucleic acid fragments. Some embodiments include enriching for certain sequences in the long fragments with selection probes directed to certain pharmacogenetic (PGX) genes. Some embodiments also include fragmenting the long nucleic acid fragments into shorter fragments for sequencing, and informatically reconstructing a sequence of the target nucleic acid.

[0085] Prior fragmentation methods typically generated a very wide distribution of fragment sizes such that even when aiming for large fragments, inevitably short fragments were included. Such short fragments are ‘wasted’ space, giving very little new information. Some embodiments provided herein preserve long (about 2,000-40,000 bp) fragments, mark them, and carry them through into a short-read portion of a workflow so they can then be reconstructed into their parent long fragments informatically. Shorter fragments are generally much less desirable, and may take up valuable sequencing space and informatics volume if they are included. Use of long fragments enables the use of a smaller number of selection probes to enrich for target sequences in the long fragments.

[0086] In prior short read library preps, most size selection was done by a combination of (1) initial fragmentation and (2) Solid-Phase Reversible Immobilization (SPRI)-based size selection. However, SPRI size selection primarily works on fragments smaller than about 60 Gbp in length. In contrast, suppression (“bottlenecking” or “bottleneck”) PCR acts on larger fragments. Suppression PCR entails appending complementary sequences on 5′ and 3′ ends of the same DNA molecule, such that during a PCR annealing step, there is a direct competition between annealing of a primer and annealing of opposite ends of the same DNA fragment. When the PCR primer anneals, extension proceeds as normal, and the fragment is amplified. When opposite ends anneal, for example by forming a hairpin, there is no templated 3′ hydroxyl to extend, and so amplification does not occur. A key to suppression PCR and size selection is that for shorter fragments, the opposite ends of the same fragment are closer together and therefore more likely to find each other and anneal. Under optimized conditions, this leads to preferential amplification of longer fragments. Aspects of suppression PCR useful with embodiments provided herein are described in Dai, Z-M, et al (2006) J. of Biotech 128:435-443; and Rand K. N. et al., (2005) N.A. Res. 33:e127 which are incorporated by reference in their entireties.

[0087] In some embodiments provided herein, complementary 5′ and 3′ ends are achieved by an initial tagmentation step with B15 transposomes only. Typically, tagmentation would be performed with a combination of A14 and B15 transposomes so that the different sequences can be used for read 1 and read 2 primers during subsequent sequencing. However, because the initial tagmentation in certain embodiments provided herein is used to provide a landing spot for PCR, different sequences for read 1 and read 2 primers do not need to be added at this stage. In contrast to SPRI size selection, it was observed that by adding cycles of suppression PCR, the number of smaller fragments under 2000 bp in length can be dramatically reduced.

[0088] In some embodiments provided herein a workflow includes: fragmenting long input DNA by high molecular weight (HMW) fragmentation and adding adapters, such as by tagmentation using low density bead linked transposomes (BLTs); long range PCR mutagenesis to introduce a signature into long fragments; further library preparation steps, such as additional tagmentation to obtain small fragments with adapters; sequencing and assembly of sequencing reads (FIG. 1). In some embodiments provided herein a workflow includes a long-read (“ILR” or “ILR”) pathway, and a reference pathway. The long-read pathway includes steps for: tagmentation; mutagenesis; bottlenecking (suppression) PCR. Both the long-read pathway and reference pathway share steps including: standard library preparation, such as tagmentation; sequencing; and assembly of sequencing reads (FIG. 2).

[0089] Certain aspects useful with embodiments of the methods and compositions provided herein are disclosed in U.S. Pat. Nos. 9,040,256; 9,683,230; and U.S. 2021/0010008 which are each incorporated by reference in its entirety.

### Definitions

[0090] As used herein, the term “nucleic acid” refers to a polynucleotide sequence, or fragment thereof. A nucleic acid can comprise nucleotides. A nucleic acid can be exogenous or endogenous to a cell. A nucleic acid can exist in a cell-free environment. A nucleic acid can be a gene or fragment thereof. A nucleic acid can be DNA. A nucleic acid can be RNA. A nucleic acid can comprise one or more analogs (e.g., altered backbone, sugar, or nucleobase). Some non-limiting examples of analogs include: 5-bromouracil, peptide nucleic acid, xeno nucleic acid, morpholinos, locked nucleic acids, glycol nucleic acids, threose nucleic acids, dideoxynucleotides, cordycepin, 7-deaza-GTP, fluorophores (e.g., rhodamine or fluorescein linked to the sugar), thiol containing nucleotides, biotin linked nucleotides, fluorescent base analogs, CpG islands, methyl-7-guanosine, methylated nucleotides, inosine, thiouridine, pseudouridine, dihydrouridine, queuosine, and wyosine. “Nucleic acid”, “polynucleotide, “target polynucleotide”, and “target nucleic acid” can be used interchangeably. As used herein, “kbp” can refer to kilobase pairs and relates to a length of a double-stranded nucleic acid. The length of a nucleic acid may also be referred to in terms of a number of nucleotides, such as consecutive nucleotides.

[0091] As used herein “transposome” includes a complex comprising of at least one transposase enzyme and a transposon recognition sequence, such as a transposon adapter. In some such systems, the transposase binds to a transposon recognition sequence to form a functional complex that is capable of catalyzing a transposition reaction. In some aspects, the transposon recognition sequence is a double-stranded transposon end sequence. The transposase, or integrase, binds to a transposase recognition site in a target nucleic acid and inserts the transposon recognition sequence into a target nucleic acid. In some such insertion events, one strand of the transposon recognition sequence (or end sequence) is transferred into the target nucleic acid, resulting also in a cleavage event. Exemplary transposition procedures and systems that can be readily adapted for use with the transposases of the present disclosure are described, for example, in WO10/048605, U.S. 2012/0301925, U.S. 2012/13470087, or U.S. 2013/0143774, each of which is incorporated herein by reference in its entirety.

[0092] In some embodiments, the transposome complex is a dimer of two molecules of a transposase. In some embodiments, the transposome complex is a homodimer, wherein two molecules of a transposase are each bound to first and second transposons of the same type (e.g., the sequences of the two transposons bound to each monomer are the same, forming a “homodimer”). In some embodiments, the compositions and methods described herein employ two populations of transposome complexes. In some embodiments, the transposases in each population are the same. In some embodiments, the transposome complexes in each population are homodimers, wherein the first population has a first adaptor sequence in each monomer and the second population has a different adaptor sequence in each monomer.

[0093] As used herein “solid surface,” “solid support,” and other grammatical equivalents refer to any material that is appropriate for or can be modified to be appropriate for the attachment of the transposome complexes. As will be appreciated by those in the art, the number of possible substrates is multitude. Possible substrates include, but are not limited to, glass and modified or functionalized glass, plastics (including acrylics, polystyrene and copolymers of styrene and other materials, polypropylene, polyethylene, polybutylene, polyurethanes, TEFLON, etc.), polysaccharides, nylon or nitrocellulose, ceramics, resins, silica or silica-based materials including silicon and modified silicon, carbon, metals, inorganic glasses, plastics, optical fiber bundles, beads, paramagnetic beads, and a variety of other polymers. In some such embodiments, the transposome complex is immobilized on the solid support via the linker. In some further embodiments, the solid support comprises or is a tube, a well of a plate, a slide, a bead, or a flowcell, or a combination thereof. In some further embodiment, the solid support comprises or is a bead. In one embodiment, the bead is a paramagnetic bead. In some of the methods and compositions presented herein, transposome complexes are immobilized to a solid support. In one embodiment, the solid support is a bead. Suitable bead compositions include, but are not limited to, plastics, ceramics, glass, polystyrene, methylstyrene, acrylic polymers, paramagnetic materials, thoria sol, carbon graphite, titanium dioxide, latex or cross-linked dextrans such as Sepharose, cellulose, nylon, cross-linked micelles and TEFLON, as well as any other materials outlined herein for solid supports.

[0094] As used herein, “tagmentation: includes to the modification of DNA by a transposome complex comprising transposase enzyme complexed with adaptors comprising transposon end sequence. Tagmentation results in the simultaneous fragmentation of the DNA and ligation of the adaptors to the 5′ ends of both strands of duplex fragments. Following a purification step to remove the transposase enzyme, additional sequences can be added to the ends of the adapted fragments, for example by PCR, ligation, or any other suitable methodology known to those of skill in the art.

### Certain Methods for Preparing Nucleic Acid Libraries

[0095] Some embodiments of the methods and compositions providing herein include preparing a nucleic acid library. Some such embodiments include (a) obtaining a plurality of transposomes comprising transposon adaptors, wherein the plurality of transposomes is immobilized on a solid support; (b) contacting a plurality of nucleic acid fragments with the plurality of transposomes to obtain a plurality of polynucleotides; (c) amplifying the plurality of polynucleotides to obtain amplified polynucleotides; and (d) adding library adapters to each end of the amplified polynucleotides, thereby obtaining the nucleic acid library. In some embodiments, an amount of the plurality of nucleic acid fragments is less than about 100 ng, 50 ng, 30 ng, 20 ng, 10 ng, 5 ng, or 1 ng.

[0096] Some embodiments include an initial tagmentation step which fragments the plurality of nucleic acids fragments and adds an adaptor to each end of the products of the tagmentation. The initial tagmentation is limited such that the products of the tagmentation are longer than a tagmentation where the activity of transposomes is not limited.

[0097] Certain aspects useful with embodiments of the methods and compositions provided herein are disclosed in U.S. Pat. Nos. 9,115,396; 9,080,211; 9,040,256; U.S. patent application publication 2014/0194324, each of which is incorporated herein by reference in its entirety.

[0098] In some embodiments, the solid support comprises a bead. In some such embodiments, the transposomes are bead-linked transposomes (BLTs). In some embodiments, the activity of the transposomes on the beads is such that a tagmentation reaction with the BLTs and the plurality of nucleic acid fragments results in long polynucleotides, such as polynucleotides an having average length of the plurality of polynucleotides greater than about 1 kbp, 2 kbp, 5 kbp, 10 kbp, 15 kbp, 20 kbp, or 40 kbp; and/or wherein the average length of the plurality of polynucleotides is in a range from about 1 kbp to about 40 kbp, 1 kbp to about 30 kbp, 1 kbp to about 20 kbp, 5 kbp to about 20 kbp, 5 kbp to about 15 kbp, or 7 kbp to about 12 kbp. For example, the transposomes can be bound at a low density on the beads; and/or have a low tagmentation activity. In some embodiments, the number of transposomes immobilized on the bead is no more than about 100 transposomes, 50 transposomes, 40 transposomes, 30 transposomes, 20 transposomes, or 10 transposomes. In some embodiments, the number of transposomes immobilized on the bead is no more than about 30 transposomes. In some embodiments, the plurality of the transposomes immobilized on the bead comprise a total activity such that an average length of the plurality of polynucleotides greater than about 1 kbp, 2 kbp, 5 kbp, 10 kbp, 15 kbp, 20 kbp, or 40 kbp; and/or wherein the average length of the plurality of polynucleotides is in a range from about 1 kbp to about 40 kbp, 1 kbp to about 30 kbp, 1 kbp to about 20 kbp, 5 kbp to about 20 kbp, 5 kbp to about 15 kbp, or 7 kbp to about 12 kbp. In some embodiments, the plurality of the transposomes immobilized on the bead comprise a tagmentation activity in a range from about 0.05 AU/μl to about 0.25 AU/μl. In some embodiments, the plurality of the transposomes immobilized on the bead comprise a tagmentation activity of about 0.075 AU/μl.

[0099] In some embodiments, the transposomes on the beads are the same. For example, in some embodiments, the transposon adapters comprise the same sequence. In some embodiments, the transposomes of the plurality of transposomes are B15 transposomes. In some embodiments, the transposon adapters comprise the nucleotide sequence: SEQ ID NO:01 (GTCTCGTGGGCTCGG).

[0100] Some embodiments also include steps to add a signature to the products of the initial tagmentation. For example, a signature can be added into the sequence of the library products by steps that include limited mutagenesis. In some embodiments, step (c) comprises a mutagenesis PCR, such that mutations are introduced into amplified polynucleotides. In some embodiments, the mutagenesis PCR comprises amplifying the plurality of polynucleotides with a low bias DNA polymerase, and/or with a nucleotide analogue. In some embodiments, the nucleotide analogue comprises dPTP (such as, 6H,8H-3,4-Dihydro-pyrimido(4,5-c)(1,2) oxazin-7-one-8-β-D-2′-deoxy-ribofuranoside-5′-triphosphate), and/or 8-oxo-dGTP. dP contains the bicyclic pyrimidine analog 3,4-dihydro-8H-pyrimido-[4,5-C][1,2]oxazin-7-one. In some embodiments, the low bias DNA polymerase is a Thermococcal polymerase, or a functional derivative thereof. In some embodiments, the Thermococcal polymerase is derived from a Thermococcal strain selected from the group consisting of T. kodakarensis, T. siculi, T. celer and T. sp KS-1. In some embodiments, the mutagenesis PCR comprises no more than 12 cycles, 10 cycles, 9 cycles, 8 cycles, 7 cycles, 6 cycles, 5 cycles, 4 cycles, 3 cycles, or 2 cycles. In some embodiments, the mutagenesis PCR comprises no more than 6 cycles.

[0101] Some embodiments also include a bottlenecking or suppression PCR step to enrich for longer polynucleotides. For example, shorter amplified polynucleotides form hairpins, while longer amplified polynucleotides may be further amplified. In other words, the bottlenecking or suppression PCR can be biased against the amplification of shorter nucleic acids in a mixture of nucleic acids of different lengths. Some such embodiments can enrich for longer fragments. In some such embodiments, a first end of a polynucleotide of the plurality of polynucleotides is capable of annealing to a second end of the polynucleotide of the plurality of polynucleotides; and/or, wherein a first end of an amplified polynucleotide is capable of annealing to a second end of the amplified polynucleotide. In some embodiments, the suppression PCR comprises use of a single amplification primer. In some embodiments, the amplified polynucleotides have an average length greater than about 1 kbp, 2 kbp, 3 kbp, 4 kbp, 5 kbp, 10 kbp, 15 kbp, or 20 kbp. In some embodiments, the suppression PCR comprises no more than 16 cycles, 14 cycles, 10 cycles, 9 cycles, 8 cycles, 7 cycles, 6 cycles, 5 cycles, 4 cycles, 3 cycles, or 2 cycles. In some embodiments, the suppression PCR comprises no more than 6 cycles.

[0102] Detailed descriptions of certain embodiments of suppression PCR are found in, e.g., U.S. Pat. No. 5,565,340 and Siebert et al., Nucleic Acids Res., 23 (6): 1087-1088 (1995). Briefly, the inverted repeat sequences function as suppression tails by competing with the suppression PCR primer for complementary binding. The inverted repeats tend to anneal each other, thereby preventing PCR primer binding. Since shorter amplicons undergo inverted repeat annealing more often than longer amplicons, the suppression PCR favors generating long amplicons.

[0103] Some embodiments also include enriching for target nucleic acids in the amplified polynucleotides, such as products of the suppression PCR. In some embodiments, the enriching comprises hybridizing a plurality of selection probes with the amplified polynucleotides. In some embodiments, the plurality of selection probes lack sequences capable of hybridizing to a repetitive genomic DNA element. In some embodiments, the repetitive genomic DNA element is selected from a tandem repeat, an Alu repeat, a short interspersed nuclear element (SINE), a long interspersed nuclear element (LINE), an integrated viral sequence, a viral long terminal repeat (LTR), and a transposon. Some embodiments also include amplifying the target nucleic acids.

[0104] Some embodiments also include preparing a library of shorter fragments from the products of the suppression PCR, and/or the enrichment. For example, the products of the suppression PCR, and/or the enrichment can undergo an additional tagmentation. In some embodiments, step (d) comprises contacting the amplified polynucleotides with an additional plurality of transposomes. In some embodiments, the additional plurality of transposomes comprise transposon adapters comprising (i) indexes, (ii) bridge amplification primer binding sites, and/or (iii) sequencing primer binding sites. An example of a bridge amplification primer binding site includes a sequence capable of binding a capture probe on a surface, wherein the capture probe comprises a primer extended during bridge amplification on the surface.

[0105] Some embodiments also include enriching for target polynucleotides in the library of nucleic acids. In some embodiments, the enriching comprises hybridizing a plurality of selection probes with the library of nucleic acids, wherein the plurality of selection probes is capable of specifically hybridizing with the target polynucleotides. Some embodiments also include amplifying the target polynucleotides.

[0106] Some embodiments include methods for preparing a nucleic acid library, comprising: (a) obtaining a plurality of transposomes comprising transposon adaptors, wherein the plurality of transposomes is immobilized on a bead, and wherein the transposomes of the plurality of transposomes are the same; (b) contacting a plurality of nucleic acid fragments with the plurality of transposomes to obtain a plurality of polynucleotides, wherein the plurality of the transposomes immobilized on the bead comprise a total activity such that an average length of the plurality of polynucleotides greater than about 1 kbp, 2 kbp, 5 kbp, 10 kbp, 15 kbp, 20 kbp, or 40 kbp; and/or wherein the average length of the plurality of polynucleotides is in a range from about 1 kbp to about 40 kbp, 1 kbp to about 30 kbp, 1 kbp to about 20 kbp, 5 kbp to about 20 kbp, 5 kbp to about 15 kbp, or 7 kbp to about 12 kbp; (c) amplifying the plurality of polynucleotides to obtain amplified polynucleotides by: (i) performing a mutagenesis PCR, such that mutations are introduced into amplified polynucleotides, and (ii) performing a suppression PCR; and (d) adding library adapters to each end of the amplified polynucleotides by contacting the amplified polynucleotides with an additional plurality of transposomes, thereby obtaining the nucleic acid library. An example embodiment of a workflow is depicted in FIG. 32 which includes whole genome sequencing (WGS) which includes: fragmenting genomic DNA into long fragments by limited tagmentation; land-marking or adding a signature to the long fragments; amplifying the long fragments with a bias against shorter fragments; tagmenting products prior to sequencing. Optional steps include enrichment of the amplified long fragments with a panel of selection probes, such as capture probes with certain sequences. A parallel workflow includes tagmenting the genomic DNA to form a library of short fragments, such as a standard short read (SR) library, and sequencing the library of short fragments.

[0107] Some embodiments also include enriching for target nucleic acids in the amplified polynucleotides. In some embodiments, the enriching comprises hybridizing a plurality of selection probes with the amplified polynucleotides, wherein the plurality of selection probes is capable of specifically hybridizing with the target nucleic acids. In some embodiments, the plurality of selection probes lack sequences capable of hybridizing to a repetitive genomic DNA element. In some embodiments, the repetitive genomic DNA element is selected from a tandem repeat, an Alu repeat, a short interspersed nuclear element (SINE), a long interspersed nuclear element (LINE), an integrated viral sequence, a viral long terminal repeat (LTR), and a transposon. Some embodiments also include amplifying the target nucleic acids.

[0108] Some embodiments also include enriching for target polynucleotides in the library of nucleic acids. In some embodiments, the enriching comprises hybridizing a plurality of selection probes with the library of nucleic acids, wherein the plurality of selection probes is capable of specifically hybridizing with the target polynucleotides. Some embodiments also include amplifying the target polynucleotides.

[0109] Some embodiments also include methods for determining a sequence of a target nucleic acid, comprising preparing a nucleic acid library by any one of the embodiments above, sequencing the library of nucleic acids to obtain sequence reads; and assembling sequence reads to obtain the sequence of a target nucleic acid. In some embodiments, the assembling comprises comparing the sequence reads to a reference sequence. In some embodiments, the reference sequence is obtained from the same nucleic acid sample as the plurality of nucleic acid fragments.

### Target Enrichment

[0110] Certain embodiments provided herein include enriching for target nucleic acids during preparation of a nucleic acid library, such as pharmacogenetic (PGX) genes. FIG. 32 shows an example work flow which includes steps for whole genome sequencing (WGS) with additional enrichment steps. In some embodiments, the nucleic acid library is prepared from a nucleic acids sample with bead-linked transposomes to generate long tagmented polynucleotides. The polynucleotides are marked with methods, such as mutagenesis amplification. In an optional step, suppression/bottlenecking PCR is performed where amplification is biased against shorter self-annealing nucleic acids. Target nucleic acids can then be enriched for in the amplified nucleic acids using selection probes. Additional steps can include a further tagmentation step to generate shorter library nucleic, sequencing the library nucleic acids, and comparing the generated sequence with a reference sequence obtained from the same nucleic acid sample.

[0111] Enrichment efficiency is increased compared to conventional library preparation methods because hybridization of selection probes is to long tagmented polynucleotides. For example, specificity, such as percentage hybridization to target, directly affects the amount of sequencing needed to achieve target coverage depth. High specificity hybridization to target can be difficult to achieve in long repetitive regions and pseudogenes. However, long fragment hybridization has several advantages over short fragment. As shown in FIG. 33, long fragment hybridization allows removal of ineffective probes; allows strategic placement of probes, such as adjacent to problematic genomic regions; and allows the use of fewer probes to cover a region previously covered by many probes. Targeted enrichments can achieve cost-effective human whole genome coverage. For example, genomic regions that may have been typically underrepresented in conventional nucleic acid libraries can be targeted with selection probes. Some embodiments provided herein include the use of certain panels of selection probes, such panels a Major Histocompatibility Complex (MHC) panel directed to the MHC region; an American College of Medical Genetics and Genomics (ACMG) panel directed to genes for which specific mutations are known to be causative of disorders that are clinically actionable; a pharmacogene (PGX) panel directed to genes commonly targeted by pharmacogenetic testing assays; a challenging medically relevant gene (CMRG) panel directed to medically relevant autosomal genes that may be under-represented in certain tests due to repeats or polymorphic complexities; and a comprehensive genome wide (dark) panel directed to genomic regions typically underrepresented in sequencing reads.

### Major Histocompatibility Complex Region (MHC) Panel

[0112] Some embodiments provided herein relate to targeting the MHC region of the human genome. Some such embodiments include generation and/or use of a selection probe panel to target the MHC region. The MHC region is a large locus located on the short arm of human chromosome 6 (6p21.1-6p21.3), and contains highly polymorphic genes that code for cell surface proteins essential for the adaptive immune system. The region is challenging to obtain sequence information due to the presence of a high level of repetitive sequences, sequence homology, pseudogenes, and a wide variety of alleles in the population. Precise genotyping and phasing of the MHC region is challenging but highly clinically desirable for applications such as organ transplantation and drug discovery.

### American College of Medical Genetics (ACMG) Panel

[0113] Some embodiments provided herein relate to targeting a panel of genes, such as an American College of Medical Genetics (ACMG) panel of genes. Some such embodiments include generation and/or use of a selection probe panel to target the ACMG genes. A selection probe panel was generated from a list of genes compiled by ACMG for which specific mutations are known to be causative of disorders that are clinically actionable. Miller D. T., et al., Genet Med. 2022 July; 24 (7): 1407-1414. doi: 10.1016/j.gim.2022.04.006.

[0114] A selection probe panel was designed to precisely call variants and phase in these genes. The panel included 78 unique genes in ACMG SF v3.1, and targeted full genes. The panel size was about 6.8 Mbp. The ACMG genes include those listed in TABLE 1A.

TABLE 1A
ACMG genes

ACTA2, ACTC1, ACVRL1, APC, APOB, ATP7B, BAG3, BMPR1A, BRCA1, BRCA2,
BTD, CACNA1S, CASQ2, COL3A1, DES, DSC2, DSG2, DSP, ENG, FBN1, FLNC, GAA,
GLA, HFE, HNF1A, KCNH2, KCNQ1, LDLR, LMNA, MAX, MEN1, MLH1, MSH2,
MSH6, MUTYH, MYBPC3, MYH11, MYH7, MYL2, MYL3, NF2, OTC, PALB2, PCSK9,
PKP2, PMS2, PRKAG2, PTEN, RB1, RBM20, RET, RPE65, RYR1, RYR2, SCN5A,
SDHAF2, SDHB, SDHC, SDHD, SMAD3, SMAD4, STK11, TGFBR1, TGFBR2,
TMEM127, TMEM43, TNNC1, TNNI3, TNNT2, TP53, TPM1, TRDN, TSC1, TSC2, TTN,
TTR, VHL, WT1

### Pharmacogenetic (PGX) Panel

[0115] Some embodiments provided herein relate to targeting a panel of genes, such as a panel of pharmacogenetic (PGX) genes. Some such embodiments include generation and/or use of a selection probe panel to target the PGX genes. A selection probe panel was generated for genes commonly targeted by pharmacogenetic testing assays. Kalman L. V. et al., Clin Pharmacol Ther. 2016 February; 99 (2): 172-185. doi: 10.1002/cpt.280. Genetic variation is known to influence the way individual respond to therapeutics. Accurately detecting functional haplotypes, such as haplotypes associated with protein activity levels (“star alleles”) in clinically actionable pharmacogenetic genes is crucial to implementation of personalized medicine. The panel was generated to achieve highly accurate genotyping and star allele calling in such genes. The panel included 98 genes that are important in pharmacogenetics, targeting full genes. The panel size was about 8.1 Mbp. The genes include those listed in TABLE 1B.

TABLE 1B
PGX genes

ABCB1, ABCG2, ABL1, ACE, ADH1A, ADH1B, ADH1C, ADRA2A, ADRB1, ADRB2,
AHR, ALDH1A1, ALK, ALOX5, ANKK1, ASL, BCHE, BCR, BRAF, BRCA1,
CACNA1S, CFTR, COMT, CYP1A1, CYP1A2, CYP2A13, CYP2A6, CYP2B6,
CYP2C18, CYP2C19, CYP2C8, CYP2C9, CYP2D6, CYP2E1, CYP2J2, CYP3A4,
CYP3A5, CYP3A7, CYP4F2, DPYD, DRD2, EGFR, ERBB2, F2, F5, G6PD, GRIK4,
GRK4, GRK5, GSTM1, GSTP1, HLA-A, HLA-B, HLA-C, HLA-DPB1, HLA-DQA1,
HLA-DQB1, HLA-DRA, HLA-DRB1, HMGCR, HTR2A, HTR2C, IFNL3, IFNL4,
KCNH2, KCNJ11, KIT, KRAS, MTHFR, NAT1, NAT2, NQO1, NR1I2, NRAS, NUDT15,
OPRM1, P2RY1, P2RY12, PTGIS, PTGS2, RYR1, SCN5A, SLC15A2, SLC19A1,
SLC22A1, SLC22A2, SLCO1B1, SLCO2B1, SULT1A1, TPMT, TYMS, UGT1A1,
UGT1A4, UGT2B15, UGT2B17, UGT2B7, VDR, VKORC1

### Challenging Medically Relevant Gene (CMRG) Panel

[0116] Some embodiments provided herein relate to targeting a panel of genes, such as a panel of challenging medically relevant genes (CMRG). Some such embodiments include generation and/or use of a selection probe panel to target the CMRG. The repetitive nature and complexity of some medically relevant genes poses a challenge for their accurate analysis in a clinical setting (Wagner J., et al., (2022) Nat Biotechnol. 40:672-680). The Genome in a Bottle (GIAB) Consortium has provided variant benchmark sets, but these exclude nearly four hundred medically relevant genes due to their repetitiveness or polymorphic complexity. Multiple regions of the genome are not fully resolved in existing benchmarks due to repetitive sequence, segmental duplications, and complex variants, such as multiple nearby SNVs, INDELs, and/or SVs. Goldfeder R L et al. Genome Med. 8, 1-12 (2016).

[0117] About 5175 gene symbols have been previously identified from the following sources: (1) 4,773 potentially medically-relevant genes from the databases OMIM, HGMD, and Clin Var which includes both commonly tested and rarely tested genes (Mandelker D et al. Genet. Med 18, 1282-1289 (2016). (2) The COSMIC gene census contains 723 gene symbols found in tumors (Tate J G et al. Nucleic Acids Res. 47, D941-D947 (2019)). (3) A focused list of “High Priority Clinical Genes” that are commonly tested for clinical inherited diseases (Wagner J., et al., (2022) Nat Biotechnol. 40:672-680).

[0118] 5,027 have unique coordinates on the primary assembly of GRCh38 and valid ENSEMBL annotations, and 4,697 are autosomal. 70% of these genes are specific to the list from OMIM, HGMD, and Clin Var, which includes genes associated with disease in a small number of studies and are currently tested more frequently in research studies than in high-throughput clinical laboratories. 395 genes included 90% or less on GRCh37 or GRCh38. Many of the 395 medically relevant genes were not covered well by the v4.2.1 small variant benchmark due to SVs, complex variants, and segmental duplications. A CMRG benchmark for 273 of the 395 genes has been previously created. (Wagner J., et al., (2022) Nat Biotechnol. 40:672-680). To be included in the CMRG benchmark, the entire gene including 20 kb flanking sequence on each side and any overlapping segmental duplications needed to have exactly one fully aligned contig from each haplotype with no breaks on GRCh37 and GRCh38. The total size of 391 of the CMRG gene panel is about 22.5 Mbp. The smallest gene is about 66 bp (SNORD64), the largest gene is about 1 Mbp (PTPRN2). CMRG genes include those listed in TABLE IC.

TABLE 1C
CMRG genes

A4GALT, ABCG8, ABO, ABR, ADAMTS10, ADAMTSL2, AFP, AGL, AGRN,
ALOXE3, ANKRD11, ANO7, APOBEC1, APOBEC3H, APOC1, APOC2, APOC4,
ARHGEF10, ASIP, ATPAF2, AXIN1, B3GAT3, BAX, BFSP2, BLOC1S3, BRAF, BSG,
BTRC, C1R, C3, CABIN1, CALR3, CANT1, CASP10, CBR3, CBS, CCL3L1, CD247,
CD320, CD4, CD55, CDH15, CDH17, CEL, CFC1, CFC1B, CFD, CFHR1, CFHR3, CHL1,
CHMP1A, CHRNA4, CLCN7, CLIP2, CNR2, COL18A1, COL6A1, COL6A2, COX14,
COX6B1, CR1, CREB3L3, CRYAA, CTDP1, CYB5R3, CYP2G1P, CYP4F12, CYP4F3,
D2HGDH, DAXX, DAZL, DCLRE1C, DEAF1, DGCR6, DIP2C, DLGAP2, DMPK,
DNAAF4, DNMT3L, DOK7, DPP6, DPY19L2, DRD4, DSPP, DUX4, DUX4L1, ECHS1,
EEF1A2, EHMT1, EIF2B5, EIF4E, ELANE, ELOA3, ENO3, ESPN, ESRRA, ETFB,
ETHE1, EXTL2, F7, FAM20C, FAT1, FCGR1A, FCGR2B, FCGR3A, FGF3, FGFRL1,
FKBP8, FLAD1, FLG, FLT4, FOXN1, FSCN2, FTCD, FUT1, FUT3, FXN, G6PC3, GAK,
GALNT9, GALR1, GALT, GCGR, GCSH, GDF3, GIP, GIPC3, GNPTG, GOLGA3,
GP1BA, GP6, GPI, GPIHBP1, GRIN1, GRK1, GSTM1, GTF2I, GTF2IRD2, GUSB,
GYPA, GYPB, GYPE, H19, HBG1, HBM, HCN2, HCN3, HEATR2, HES7, HLA-B, HLA-
DQB1, HLA-DRB1, HMGCL, HMX1, HNF1A, HOMER2, HOXB8, HPD, HSD11B2,
HYAL1, HYDIN, IFITM3, IFNL3, IGHA1, IGHG1, IGHG2, IGHM, IGHV3-21, IGKC,
IGKV1-5, IKBKB, IKZF1, IMPA1, INPP5D, INPP5E, INSL3, INSR, JAG2, KANSL1,
KATNAL2, KCNE1, KCNJ18, KCNV2, KDM2B, KIR2DL1, KIR2DL3, KIR3DL1,
KISS1, KISS1R, KLF11, KLF14, KLK4, KMT2C, KNG1, KRTAP1-1, LAMB1, LBR,
LCE3B, LHFPL5, LIPN, LIX1, LMF1, LMNB2, LPA, LRIG2, LRPAP1, LZTFL1, MAFA,
MAN1B1, MAP2K3, MARVELD2, MASP2, MBOAT7, MC1R, MDK, MEST, MLC1,
MLPH, MOGS, MPG, MRC1, MST1R, MUC1, MUC16, MUC3A, MUC4, MUC5B,
MUSK, MYO9B, MYOT, MYT1, NACA, NAIP, NAPRT, NBEAP1, NCF1, NCF1C,
NCR3, NDUFA6, NDUFAF1, NDUFB1, NDUFV3, NFKBIL1, NLRP12, NLRP2, NLRP7,
NOD1, NOTCH2, NPM1, NPPA, NSMF, NUTM2B, NUTM2D, OCLN, OPRL1, OR12D2,
OR4F5, OR51A2, ORC6, P2RX2, P2RX5, PADI4, PAPSS2, PCBP1, PCCB, PCDHA10,
PCMT1, PDE4DIP, PDE6B, PDLIM3, PDPK1, PDSS1, PEX5, PGAM5, PGAP6, PHKG2,
PIGV, PKD1, PKN3, PLA2G10, PLTP, PMS2, PNKP, POLG2, PPIA, PPIP5K1, PRG4,
PRKCG, PRODH, PROZ, PRSS2, PSPH, PTEN, PTK6, PTPRC, PTPRN2, PTPRQ, PXDN,
RFX2, RGPD3, RHCE, RHOA, RNF212, RNF213, RPIA, RPL22, RPN1, RPS17,
RXYLT1, SAR1B, SBK3, SDHA, SEC63, SEMG1, SERPINF2, SH2B1, SHANK2,
SHANK3, SIGLEC16, SIRT3, SLC17A5, SLC22A1, SLC22A12, SLC26A9, SLC27A4,
SLC27A5, SLC29A4, SLC5A11, SLC6A18, SLC6A3, SMG1, SMN1, SMN2, SMOC2,
SNORD64, SNTG2, SOHLH1, SPATA31C1, SPI1, SPRN, SRGAP2, SRR, SSTR5,
STK11, STXBP2, SULT1A1, SUZ12, TAPBP, TAS2R46, TBXA2R, TCF3, TERT, TFPT,
THBS2, TJP2, TM4SF19, TMC6, TMEM114, TNNI3, TNNT1, TNNT3, TPCN2, TPO,
TRAPPC10, TRBV9, TRMT1, TRPM4, TTC37, TTLL1, TUBGCP6, TWIST2, TYK2,
TYMS, U2AF1, UGT2A1, UGT2A2, UGT2B17, UGT2B28, UNKL, USP8, UTP4,
UVSSA, VANGL1, VKORC1, VPS53, ZAN, ZNF141, ZNF407, ZNF419, ZNF469,
ZNF479

### Certain Selection Probes

[0119] Some embodiments include enriching for target nucleic acids in the amplified polynucleotides, such as products of mutagenesis PCR, and/or products of suppression PCR. In some such embodiments, the enriching comprises hybridizing a plurality of selection probes with the amplified polynucleotides, wherein the selection probes of the plurality of selection probes comprise different nucleotide sequences from one another. In some embodiments, the plurality of selection probes comprise at least 50, 100, 200, 500, 1000, 5000, or 10000 different selection probes.

[0120] In some embodiments, the selection probes are designed such that an average distance between two adjacent nucleotide sequences of the selection probes on a reference sequence of a genome, such as a human genome, is in a range from about 300 consecutive nucleotides to about 7,000 consecutive nucleotides; a range from about 500 consecutive nucleotides to about 5,000 consecutive nucleotides; a range from about 750 consecutive nucleotides to about 2,500 consecutive nucleotides; a range from about 750 consecutive nucleotides to about 1,500 consecutive nucleotides; a range from about 900 consecutive nucleotides to about 1,200 consecutive nucleotides. In some embodiments, an average distance between two adjacent nucleotide sequences of the selection probes on a reference sequence of a genome is about 750, 1000, 1500, or 2000 consecutive nucleotides.

[0121] In some embodiments, the selection probes are designed such that an average number of sites in a genome, such as a human genome, that each selection probe of the plurality of selection probes is capable of hybridizing to is no more than 100 different sites in the genome, no more than 50 different sites in the genome, no more than 40 different sites in the genome, no more than 30 different sites in the genome, no more than 20 different sites in the genome, no more than 10 different sites in the genome, or no more than 5 different sites in the genome, or any number between any of the foregoing number of different sites. In some embodiments, each selection probe of the plurality of selection probes is capable of hybridizing to no more than 100 different sites in the genome, no more than 50 different sites in a genome, no more than 40 different sites in a genome, no more than 30 different sites in a genome, no more than 20 different sites in a genome, or no more than 10 different sites in a genome, or any number between any of the foregoing number of different sites. In some embodiments, a selection probe capable of hybridizing to a site in the genome comprises at least 50, 60, 70, or 80 consecutive nucleotides complementary to at least 80%, 90%, 95%, 96%, 98%, or 100% of a nucleotide sequence at the site in the genome. In some embodiments, a selection probe capable of hybridizing to a site in the genome comprises at least 50 consecutive nucleotides complementary to at least 90% of a nucleotide sequence at the site in the genome.

[0122] In some embodiments, the plurality of selection probes lack sequences capable of hybridizing to a repetitive genomic DNA element. In some embodiments, the repetitive genomic DNA element is selected from a tandem repeat, an Alu repeat, a short interspersed nuclear element (SINE), a long interspersed nuclear element (LINE), an integrated viral sequence, a viral long terminal repeat (LTR), and a transposon.

[0123] In some embodiments, the selection probes target a plurality of selected genes, such as a panel including pharmacogenetic (PGX) genes, such as the genes listed in TABLE 1B. In some such embodiments, each selection probe of the plurality of selection probes comprises a nucleotide sequence capable of hybridizing to a gene selected from TABLE 1B; and/or a nucleotide sequence within, no more than 10 kbp 5′ or no more than 10 kbp 3′ of a gene selected from TABLE 1B. In some embodiments, each selection probe of the plurality of selection probes comprises a nucleotide sequence having at least 90%, 95%, or 100% sequence identity to any one of SEQ ID NOs: 02-85,141. In some embodiments, each selection probe of the plurality of selection probes comprises a nucleotide sequence having at least 90%, 95%, or 100% sequence identity to any one of SEQ ID NOs: 02-16847. In some embodiments, each selection probe of the plurality of selection probes comprises a nucleotide sequence having at least 90%, 95%, or 100% sequence identity to any one of SEQ ID NOs: 02-8154.

### Certain Compositions, Kits and Systems

[0124] Some embodiments of the methods and composition provided herein include kits and systems for preparing a nucleic acid library. Some embodiments include a kit comprising: a first bead-linked transposomes (BLT-1) reagent, wherein the BLT-1 transposomes comprises a first adaptor sequence; a mutagenesis reagent comprising a first primer, dPTPs, dNTPs, and a polymerase; a second bead-linked transposomes (BLT-2) reagent, wherein the BLT-2 transposomes comprise the first adaptor and a second adaptor; an amplification reagent comprising a first primer, a second primer, dNTPs, and a polymerase; wherein BLT-1 has a lower transposome density as compared to BLT-2; and wherein the first primer hybridizes to the first adaptor sequence and the second primer hybridizes to the second adaptor sequence. In some embodiments, BLT-2 has more than 10, 20, 50, 100, or 1000 times the transposome density as compared to BLT-1. In some embodiments, the first adaptor is B15 and the second adaptor is A14. Some embodiments include population of oligonucleotides, wherein the oligonucleotides comprise at least 10, 100, 1000, 10000 different nucleotide sequences having at least 90%, 95%, or 100% sequence identity to any one of SEQ ID NOs. 02-85,141.

[0125] Some embodiments include system for preparing a nucleic acid library, comprising: (a) a first plurality of transposomes comprising transposon adaptors for tagmenting a plurality of nucleic acid fragments, wherein the first plurality of transposomes is immobilized on a first plurality of beads at a first density; (b) reagents for amplifying the plurality of polynucleotides to obtain amplified polynucleotides, wherein the amplifying comprising a mutagenesis PCR and/or a suppression PCR, wherein: (i) the first reagent for performing mutagenesis PCR comprise a low bias DNA polymerase and/or a nucleotide analogue; optionally, wherein the nucleotide analogue comprises dPTP, and/or 8-oxo-dGTP; and/or the low bias DNA polymerase is a Thermococcal polymerase, or a functional derivative thereof, optionally, wherein the Thermococcal polymerase is derived from a Thermococcal strain selected from the group consisting of T. kodakarensis, T. siculi, T. celer and T. sp KS-1, and (ii) the first reagents for performing suppression PCR comprise amplification primers having the same nucleotide sequence capable of hybridizing to the transposon adaptors; (c) a plurality of selection probes for enriching for target polynucleotides in the amplified polynucleotides; and (d) a second plurality of transposomes comprising library adaptors for adding library adaptors to each end of the amplified polynucleotides, wherein the second plurality of transposomes is immobilized on a second plurality of beads at a second density, wherein the first density is less than the second density.

[0126] Some embodiments include a system for preparing a nucleic acid library, comprising: (a) a first plurality of transposomes for tagmenting a plurality of nucleic acid fragments to obtain a plurality of polynucleotides; (b) first reagents for amplifying the plurality of polynucleotides to obtain amplified polynucleotides; and (c) second reagents for adding library adaptors to each end of the amplified polynucleotides. In some embodiments, the first plurality of transposomes comprises transposon adaptors, wherein the first plurality of transposomes is immobilized on a solid support. In some embodiments, the solid support comprises a first plurality of beads. In some embodiments, the first plurality of the transposomes is immobilized on the first plurality of beads at a density such that on contacting the first plurality of transposomes with the plurality of nucleic acid fragments the plurality of polynucleotides has an average length of the plurality of polynucleotides is greater than about 1 kbp, 2 kbp, 5 kbp, 10 kbp, 15 kbp, 20 kbp, or 40 kbp. In some embodiments, the average length of the plurality of polynucleotides is in a range from about 1 kbp to about 40 kbp, 1 kbp to about 30 kbp, 1 kbp to about 20 kbp, 5 kbp to about 20 kbp, 5 kbp to about 15 kbp, or 7 kbp to about 12 kbp. In some embodiments, the number of transposomes immobilized on the bead is no more than about 100 transposomes, 50 transposomes, 40 transposomes, 30 transposomes, 20 transposomes, or 10 transposomes. In some embodiments, the number of transposomes immobilized on the bead is no more than about 30 transposomes. In some embodiments, the first plurality of the transposomes immobilized on the bead comprise a total activity such that on contacting the first plurality of transposomes with the plurality of nucleic acid fragments the plurality of polynucleotides has an average length greater than about 1 kbp, 2 kbp, 5 kbp, 10 kbp, 15 kbp, 20 kbp, or 40 kbp. In some embodiments, the average length of the plurality of polynucleotides is in a range from about 1 kbp to about 40 kbp, 1 kbp to about 30 kbp, 1 kbp to about 20 kbp, 5 kbp to about 20 kbp, 5 kbp to about 15 kbp, or 7 kbp to about 12 kbp.

[0127] In some embodiments, the first plurality of the transposomes immobilized on the bead comprise an activity in a range from about 0.05 AU/μl to about 0.25 0.05 AU/μl. In some embodiments, the first plurality of the transposomes immobilized on the bead comprise an activity of about 0.075 AU/μl. In some embodiments, the transposon adapters comprise the same sequence. In some embodiments, the transposon adapters comprise the nucleotide sequence: SEQ ID NO:01 (GTCTCGTGGGCTCGG) In some embodiments, the transposomes of the plurality of transposomes are the same. In some embodiments, the transposomes of the plurality of transposomes are B15 transposomes.

[0128] In some embodiments, the first reagents comprise reagents for performing mutagenesis PCR comprising a low bias DNA polymerase and/or a nucleotide analogue. In some embodiments, the nucleotide analogue comprises dPTP, and/or 8-oxo-dGTP. In some embodiments, the low bias DNA polymerase is a Thermococcal polymerase, or a functional derivative thereof. In some embodiments, the Thermococcal polymerase is derived from a Thermococcal strain selected from the group consisting of T. kodakarensis, T. siculi, T. celer and T. sp KS-1. In some embodiments, the first reagents comprise reagents for performing suppression PCR comprising amplification primers having the same nucleotide sequence. In some embodiments, the amplification primers are capable of hybridizing to the transposon adaptors.

[0129] In some embodiments, the second reagents comprise a second plurality of transposomes comprising the library adaptors. In some embodiments, the second plurality of transposomes has an activity such that on contacting the second plurality of transposomes with the amplified polynucleotides a library of nucleic acids is obtained and comprises the library adaptors and having an average length less than about 1 kb, 900 bp, 800, bp, 700 bp, 600 bp, 500 bp, 400 bp, 300 bp, 200 bp, or 100 bp. In some embodiments, the first plurality of the transposomes is immobilized on the beads at a density less than a density at which the second plurality of transposomes are immobilized on the second plurality of beads.

[0130] Some embodiments also include third reagents for enriching for target polynucleotides in the amplified polynucleotides, comprising a plurality of selection probes. In some embodiments, the plurality of selection probes is attached to a third plurality of beads. In some embodiments, an average distance between two adjacent nucleotide sequences of the selection probes on a reference sequence of a genome is in a range from about 300 consecutive nucleotides to about 7,000 consecutive nucleotides. In some embodiments, the range is from about 500 consecutive nucleotides to about 5,000 consecutive nucleotides. In some embodiments, the range is from about 750 consecutive nucleotides to about 2,500 consecutive nucleotides. In some embodiments, the range is from about 750 consecutive nucleotides to about 1,500 consecutive nucleotides. In some embodiments, the range is from about 900 consecutive nucleotides to about 1,200 consecutive nucleotides. In some embodiments, an average distance between two adjacent nucleotide sequences of the selection probes on a reference sequence of a genome is about 750, 1000, 1500, or 2000 consecutive nucleotides.

[0131] In some embodiments, an average number of sites in a genome that each selection probe of the plurality of selection probes is capable of hybridizing to is no more than 50 different sites in the genome, to no more than 40 different sites in the genome, to no more than 30 different sites in the genome, to no more than 20 different sites in the genome. In some embodiments, each selection probe of the plurality of selection probes is capable of hybridizing to no more than 50 different sites in a genome, to no more than 40 different sites in a genome, to no more than 30 different sites in a genome, to no more than 20 different sites in a genome. In some embodiments, a selection probe capable of hybridizing to a site in the genome comprises at least 50, 60, 70, or 80 consecutive nucleotides complementary to at least 90% of a nucleotide sequence at the site in the genome. In some embodiments, the plurality of selection probes lack sequences capable of hybridizing to a repetitive genomic DNA element; In some embodiments, the repetitive genomic DNA element is selected from a tandem repeat, an Alu repeat, a short interspersed nuclear element (SINE), a long interspersed nuclear element (LINE), an integrated viral sequence, a viral long terminal repeat (LTR), and a transposon.

[0132] In some embodiments, the plurality of selection probes comprise at least 50, 100, 200, 500, 1000, 5000 different selection probes. In some embodiments, each selection probe of the plurality of selection probes comprises a nucleotide sequence capable of hybridizing to a gene selected from TABLE 1B, and/or a nucleotide sequence within, no more than 10 kbp 5′ or no more than 10 kbp 3′ of a gene selected from TABLE 1B. In some embodiments, each selection probe of the plurality of selection probes comprises a nucleotide sequence having at least 90%, 95%, or 100% sequence identity to any one of SEQ ID NOs: 02-85,141. In some embodiments, each selection probe of the plurality of selection probes comprises a nucleotide sequence having at least 90%, 95%, or 100% sequence identity to any one of SEQ ID NOs: 02-16847. In some embodiments, each selection probe of the plurality of selection probes comprises a nucleotide sequence having at least 90%, 95%, or 100% sequence identity to any one of SEQ ID NOs: 02-8154.

[0133] In some embodiments, the plurality of nucleic acid fragments is mammalian. In some embodiments, the plurality of nucleic acid fragments is human. In some embodiments, the plurality of nucleic acid fragments comprises genomic DNA.

[0134] Some embodiments include a kit comprising a plurality of selection probes for targeting pharmacogenetic (PGX) genes. In some embodiments the plurality of selection probes comprise at least 50, 100, 1000, 2000, 3000, 4000, 5000, 10000, 20000, 30000, or 40000 or any number between any one of the foregoing numbers of different nucleotide sequences. In some embodiments, each selection probe of the plurality of selection probes comprises a nucleotide sequence capable of hybridizing to a gene selected from TABLE 1B, and/or a nucleotide sequence within, no more than 10 kbp 5′ or no more than 10 kbp 3′ of a gene selected from TABLE 1B. In some embodiments, each selection probe of the plurality of selection probes comprises a nucleotide sequence having at least 90%, 95%, or 100% sequence identity to any one of SEQ ID NOs: 02-85,141. In some embodiments, each selection probe of the plurality of selection probes comprises a nucleotide sequence having at least 90%, 95%, or 100% sequence identity to any one of SEQ ID NOs: 02-16847. In some embodiments, each selection probe of the plurality of selection probes comprises a nucleotide sequence having at least 90%, 95%, or 100% sequence identity to any one of SEQ ID NOs: 02-8154.

### EXAMPLES

### Example 1—Generation of Nucleic Acid Library

[0135] The following describes the preparation of human genome libraries for sequencing with (1) low-density bead-linked transposomes; (2) random mutagenesis; and (3) bottlenecking (suppression) amplification. The workflow included uniquely encoding long DNA templates with steps including highly uniform random mutagenesis and amplification. The long DNA templates were then fragmented and sequenced on a standard short-read (SR) platform. Reads from prepared libraries were used to accurately reconstruct and decode the original long template sequences using an unmutated reference data set which was generated in parallel.

[0136] Unmutated reference data: to reconstruct accurate long read sequences from mutated short reads, an additional unmutated reference data set was used. This was generated from the same genomic starting material as the sample to be mutated, using standard methods for short-read library preparation and sequencing. Paired end reads were generated at a minimum length of 2×150 nucleotides for the unmutated data set, with a recommended 60× genome coverage for isolated bacterial genomes and 40× for pure human cell cultures.

[0137] Input DNA requirements: the workflow was found to be compatible with genomic DNA samples of relatively poor quality, containing unwanted low molecular weight fragments. These low molecular weight fragments were actively excluded by certain steps in the workflow; and the presence of some higher molecular weight material (>20 kb) was included to generate long templates for sequencing. To quantify input DNA for library preparation, a fluorometric-based method such as the Qubit dsDNA HS Assay Kit (Thermo Scientific) was used. Concentrations of input DNA between 12.5 and 50 ng/μl was used.

[0138] The following outlines a workflow which included: high molecular weight tagmentation; mutagenesis PCR; library normalization; bottlenecking (suppression) PCR; library preparation; fragment analysis of products; and sequencing.

### Reagents, Materials and Thermocycler Parameters

| | |
|---|---|
| BLT Long Range | BLT-LR |
| Long Range PCR Mix | LPM |
| Long Range Marking Mix | LMM |
| Long Range Primer Mix 1 | LRP1 |
| Long Range Primer Mix 2 | LRP2 |
| Library Reducing Beads | LRB |
| Binding Buffer | IBB |
| Wash Buffer 1 | IWB1 |
| Stop Tagment Buffer 2 | ST2 |
| Illumina Purification Bead | IPB |
| PW1 (water) | |
| Resuspension Buffer | RSB |
| Ethyl Alcohol, Pure | |
| Enrich BL Transposome, Lg-LT | eBLT-L |
| Enhanced PCR Mix | EPM |
| Tagmentation Buffer 1 | TB1 |
| Tagmentation Wash Buffer | TWB |
| Nextera DNA UD Index Plate | |

Tagmentation parameters

| Step | Temperature | Time |
|---|---|---|
| 1 | 55° C. | 5 minutes |
| 2 | 10° C. | hold |

Mutagenesis PCR parameters

| Step | Temperature | Time |
|---|---|---|
| 1 | 68° C. | 3 minutes |

| | |
|---|---|
| 2 | PCR cycles (12 cycles) |

| | | |
|---|---|---|
| | 98° C. | 10 seconds |
| | 68° C. | 10 minutes |
| 3 | 4° C. | hold |

Bottlenecking PCR parameters

| | | |
|---|---|---|
| Step | Temperature | Time |

| | |
|---|---|
| 1 | PCR cycles (14 or 16 cycles) |

| | | |
|---|---|---|
| 98° C. | 10 | seconds |
| 68° C. | 10 | minutes |

| | | |
|---|---|---|
| 3 | 4° C. | hold |

Index PCR parameters

| Step | Temperature | Time | |
|---|---|---|---|
| 1 | 68° C. | 3 | minutes |
| 2 | 98° C. | 3 | minutes |

| | |
|---|---|
| 3 | PCR cycles (6 cycles) |

| | | | |
|---|---|---|---|
| | 98° C. | 45 | seconds |
| | 62° C. | 30 | seconds |
| | 68° C. | 2 | minute |
| 4 | 68° C. | 1 | minutes |

| | | |
|---|---|---|
| 5 | 4° C. | hold |

### High Molecular Weight Tagmentation

[0139] This step used low density bead-linked transposomes (BLT-LR) to generate long DNA fragments tagged with adapter sequences.

| | |
|---|---|
| 1 | Label a Biorad PCR plate. |
| 2 | Label a 1.7 ml tube and add the following components |
| | in order: BLT-LR; and TB1. |
| 3 | Vortex to mix thoroughly, then briefly pulse centrifuge. |
| 4 | Add 20 μl of mastermix to wells. |
| 5 | Add 30 μl input DNA (50 ng total). |
| 6 | Use a pipette to gently mix then briefly pulse centrifuge. |
| 7 | Place tubes in a thermocycler with a heated lid set to |
| | 80° C. and run the Tagment. |
| 8 | Remove from the thermocycler and add 10 μl of ST2. |
| 9 | Use a pipette set at half of the total rxn volume to gently mix. |
| 10 | Incubate at room temperature for 2 min. |
| 11 | Place the tubes on a magnetic stand or plate for 3 min or |
| | until the solution is clear. Remove and discard the clear |
| | supernatant. Note: If beads become disturbed during |
| | aspiration, redisperse solution into the tube. Maintain tube on |
| | the magnet to let the beads settle. |
| 12 | Remove tubes from the magnet and add 100 μl TWB. Gently |
| | pipette mix until beads are fully resuspended. |
| 13 | Place the tubes on a magnetic stand or plate and incubate for |
| | at least 2 min, or until clear. While samples are incubating, |
| | proceed to the next step. Note: Keep pellets in TWB to |
| | help prevent any chance of over-drying the beads. |

### Mutagenesis PCR

[0140] In this step, long templates were uniquely encoded via random incorporation of the mutagenic nucleotide analogue dPTP during PCR.

| | |
|---|---|
| 14 | Label a 1.7 ml tube and combine the following to prepare |
| | mutagenesis master mix: LMM; LPM; LRP1; and RSB. |
| 15 | Use a pipette to mix thoroughly, then briefly pulse centrifuge. |
| 16 | Remove TWB from each well. |
| 17 | Add 50 μl of master mix to beads. |
| 18 | Gently pipette mix to resuspend beads |
| 19 | Place in preprogrammed thermal cycler and run the |
| | Mutagenesis PCR program. |
| 20 | Remove from thermocycler. |
| 21 | Vortex IPB to resuspend the beads. |
| 22 | Add 30 μl of IPB beads to each well. |
| 23 | Mix the total reaction volume by gently pipetting at least |
| | 10 times and incubate for 2 minutes at room temperature. |
| 24 | Place on the magnetic stand and wait until the liquid is |
| | clear (~5 minutes). |
| 25 | Remove and discard all supernatant. |
| 26 | Wash beads as follows: a. keep on the magnetic stand and add |
| | 180 μl fresh 80% EtOH to each well; b. wait 30 seconds; |
| | and c. remove and discard all supernatant |
| 27 | Briefly spin for 10 seconds and return plate to magnet. |
| 28 | With a 20 μl pipette, remove all residual EtOH. |
| 29 | Dry on magnet for 2 minutes. |
| 30 | Remove from the magnetic stand and add 25 μl RSB to each well. |
| 31 | Pipette mix and incubate at room temperature for 2 minutes. |
| 32 | Place on the magnetic stand and wait until the liquid is |
| | clear (~2 minutes). |
| 33 | Transfer 10 μl supernatant to a new plate and leave |
| | remaining supernatant with SPRI beads |

### Library Normalization

| | |
|---|---|
| 34 | In a new 2 ml tube, combine the following to prepare |
| | normalization master mix: Binding Buffer (IBB); and LRB |
| 35 | Vortex normalization master mix until homogenous |
| | immediately prior to use. |
| 36 | Pipette 10 μL of prepared mastermix into each well |
| | containing 10 μL of DNA. |
| 37 | Seal plate with microseal and put on bioshake for 30 minutes |
| | at 1800 rpm. |
| 38 | Remove plate from bioshake and place on plate magnet for |
| | 1 minute. Removing and replacing plate on magnet may help |
| | to condense beads. |
| 39 | Gently remove supernatant, taking care not to disturb beads. |
| 40 | Remove plate from magnet. |
| 41 | Immediately add 150 μL of IWB1 to each well. |
| 42 | Using a p200 pipette set to 140 μL, pipette mix each well |
| | at least 10 times. |
| 43 | Place on plate magnet for 1 minute. |
| 44 | Gently remove supernatant, taking care not to disturb beads. |
| 45 | Repeat steps 41-44 for a total of two washes. Remove plate |
| | from magnet. |
| 46 | Immediately add 150 μL of 80% EtOH to each well. |
| 47 | Using a p200 pipette set to 140 μL, pipette mix each well at |
| | least 10 times. |
| 48 | Place on plate magnet for 1 minute. |
| 49 | Gently remove supernatant, taking care not to disturb beads. |
| 50 | Briefly spin down plate and use a p20 to remove excess liquid. |
| 51 | Allow to dry for 2 minutes. |
| 52 | Add 80 μL of RSB to each sample well. |
| 53 | Using a pipette set to 50 μL, pipette mix each sample at |
| | least 10 times. |
| 54 | Allow to incubate for 10 minutes. |
| 55 | Place on plate magnet for 1 minute. |
| 56 | Transfer 70 μL of supernatant to new well. |
| 57 | If performing 165 pg input, go to step 62 for next |
| | If performing 55 pg input, dilute 20 ul of eluted material |
| | in 40 μl of RSB in adjacent well. Mix well, then use |
| | 2 μl as stated in step 62. |
| | [Optional] Measure DNA on Qubit using 10 μL |
| | of DNA diluted in 190 μL of Qubit buffer. |

### Bottlenecking (Suppression) PCR

[0141] In this step a defined quantity of the purified mutagenesis product was amplified to create many copies of each unique template. The amount of starting material in the bottlenecking PCR determined the number of long templates available for sequencing, and was controlled through careful dilution of the mutagenesis sample. The following protocol was used to generate between about 10× to about 30× long-read coverage of the human genome (see below). For arbitrary samples, a simple calculator or look up table was provided to guide users on sample dilution and indicate the number of enrichment cycles required for a particular genome size or sample type.

| | |
|---|---|
| 58 | Combine the following volumes to prepare enrichment |
| | master mix: LPM; and LRP2. |
| 59 | Use a pipette to mix thoroughly, then briefly pulse centrifuge. |
| 60 | Add 48 μl of master mix to a new Bio-Rad plate. Place |
| | tubes on ice. |
| 61 | Add 2 μl of DNA to each well. |
| 62 | Gently pipette mix the 50 μl reaction and briefly pulse centrifuge. |
| 63 | Place in preprogrammed thermal cycler and run the |
| | Bottlenecking PCR program. |
| 64 | Note: Perform 16 enrichment cycles for 10x genome |
| | coverage or 14 cycles for 30x. |
| 65 | Remove from thermocycler. |
| 66 | Vortex IPB to resuspend the beads. |
| 67 | Add 30 ul of IPB beads to each well. |
| 68 | Mix the total reaction volume by gently pipetting at least 10 |
| | times and incubate for 2 minutes at room temperature. |
| 69 | Place on the magnetic stand and wait until the liquid is clear |
| | (~5 minutes). |
| 70 | Remove and discard all supernatant. |
| 71 | Wash beads as follows: a. keep on the magnetic stand and |
| | add 180 μl fresh 80% EtOH to each well; b. wait 30 seconds; |
| | and c. remove and discard all supernatant. |
| 72 | Briefly spin for 10 seconds and return plate to magnet. |
| 73 | With a 20 μl pipette, remove all residual EtOH. |
| 74 | Dry on magnet for 2 minutes. |
| 75 | Remove from the magnetic stand and add 25 μl RSB to each well. |
| 76 | Pipette mix and Incubate at room temperature for 2 minutes. |
| 77 | Place on the magnetic stand and wait until the liquid is clear |
| | (~2 minutes). |
| 78 | Transfer 24 μl supernatant to a new plate. |
| 79 | Keep on ice for same day use or store at −20° C. |
| | (safe stopping point). |
| 80 | Determine the concentration of each purified bottlenecking |
| | PCR product with the Qubit dsDNA HS Assay Kit. Use |
| | 1-2 μl of sample DNA per measurement. |

### Library Preparation

[0142] In this step the long, mutated DNA templates were fragmented and adapters were attached to create a library of short, overlapping fragments that are ready for sequencing. 50 ng of each purified enrichment product can be used as input DNA for internal library preparation. A small amount of bottlenecking PCR product was reserved for subsequent analysis of template size.

| | |
|---|---|
| 81 | Bring TB1 and eBLT-L to room temperature and vortex to mix. |
| 82 | Make a dilution using RSB and 50 ng worth of purified |
| | bottlenecking product into each well with a final volume of 30 μl. |
| 83 | Vortex eBLT-L vigorously for 10 seconds, then visually check |
| | the beads for complete resuspension. Repeat as necessary. |
| 84 | Prepare a tagmentation master mix: eBLT-L; TB1. |
| 85 | Vortex the tagmentation master mix thoroughly to make sure |
| | the eBLT-L beads are evenly resuspended in the buffer. |
| 86 | Using fresh tips, transfer 20 μl of tagmentation master mix |
| | to each tube containing 30 μl of DNA. |
| 87 | Pipette mix the 50 μl reaction mix to resuspend. |
| 88 | Place in preprogrammed thermal cycler and run the |
| | Tagment program. |
| 89 | Remove from thermocycler and add 10 μl of ST2 to each |
| | tagmentation reaction. |
| 90 | Use a pipette set at half of the total rxn volume to gently mix. |
| 91 | Incubate at RT for 5 minutes. |
| 92 | Place the tubes on a magnetic stand or plate for 3 min or until |
| | the solution is clear. Remove and discard the clear supernatant. |
| | Note: If beads become disturbed during aspiration, redisperse |
| | solution into the tube. Maintain tube on the magnet to let the |
| | beads settle. |
| 93 | Remove tubes from the magnet and add 100 μl TWB. Gently |
| | pipette mix until beads are fully resuspended. |
| 94 | Place the tubes on a magnetic stand or plate for 3 min or until |
| | the solution is clear. Remove and discard the clear supernatant. |
| 95 | Remove tubes from the magnet and add 100 μl TWB. Gently |
| | pipette mix until beads are fully resuspended (total of 2 washes). |
| 96 | Place the tubes on a magnetic stand or plate and incubate for |
| | at least 3 min, or until clear. While samples are incubating, |
| | proceed to the next step. Note: Keep pellets in TWB to help |
| | prevent any chance of over drying the beads. |
| 97 | Prepare a index PCR master mix: EPM; RSB. |
| 98 | Use a pipette to mix thoroughly, then briefly pulse centrifuge. |
| 99 | Carefully remove the second TWB wash from the samples while |
| | on the magnet. Use a pipette with P10 or P20 tips to remove |
| | excess liquid from the tube. Any remaining foam on the tube |
| | walls does not adversely affect the library. |
| 100 | Remove tubes from the magnet and proceed immediately to |
| | the next step to prevent excessive drying of the beads. |
| 101 | Add 46 μl of the PCR master mix to each sample. Gently pipette |
| | mix to ensure the beads are thoroughly resuspended. |
| 102 | To each sample, add 4 μl Nextera DNA UD Index. Use a unique |
| | combination of indexes for each sample. |
| 103 | Using a pipette set to 40 μl, pipette mix a minimum of 10 times |
| | to mix the entire reaction volume. |
| 104 | Place in preprogrammed thermal cycler and run the Index |
| | PCR program. |
| 105 | Clean up PCR reaction using IPB beads as follows: |
| 106 | Place plate on the magnetic stand and wait until the liquid |
| | is clear (~5 minutes) |
| 107 | Transfer 45 μL of supernatant to a new plate. |
| 108 | Add 55 μL RSB to bring volume to 100 uL. |
| 109 | Perform a double-sided bead purification as follows: |
| 110 | Add 30 μL of IPB beads to the sample. |
| 111 | Mix the total reaction volume by gently pipetting at least |
| | 10 times and incubate for 2 minutes at room temperature. |
| 112 | Place on the magnetic stand and wait until the liquid is clear |
| | (~5 minutes). |
| 113 | Transfer 127 μl of the clear supernatant in new wells. |
| | Discard the remaining beads. |
| 114 | Add 20 μl of IPB beads to the sample. |
| 115 | Mix the total reaction volume by gently pipetting at least |
| | 10 times and incubate for 2 minutes at room temperature. |
| 116 | Place on the magnetic stand and wait until the liquid is clear |
| | (~5 minutes). |
| 117 | Remove and discard all supernatant. |
| 118 | Wash beads as follows: a. keep on the magnetic stand |
| | and add 180 μl fresh 80% EtOH to each well; b. wait |
| | 30 seconds; and c. remove and discard all supernatant. |
| 119 | Briefly spin for 10 seconds and return plate to magnet. |
| 120 | With a 20 μl pipette, remove all residual EtOH. |
| 121 | Dry on magnet for 2 minutes. |
| 122 | Remove from the magnetic stand and add 30 μl RSB to each well. |
| 123 | Pipette mix and incubate at room temperature for 2 minutes. |
| 124 | Place on the magnetic stand and wait until the liquid is clear |
| | (~2 minutes). |
| 125 | Transfer 28 μl to a new plate. |
| 126 | Determine the concentration of each purified enrichment |
| | product with the Qubit dsDNA HS Assay Kit. Use 1-2 μl |
| | of sample DNA per measurement. |
| 127 | Keep on ice for same day use or store at −20° c. |
| | (SAFE STOPPING POINT). |

[0143] Libraries were quantified, normalized and sequenced using standard workflows for libraries. Example additional considerations for quality control, sample index selection and sequencing are provided below.

### Fragment Analysis of Products

| | |
|---|---|
| 128 | Run purified library prep product on appropriate |
| | instrument for fragment analysis. |
| 129 | Record the average fragment length for the purified |
| | library prep product. |

[0144] DNA fragment length: assessing the fragment length profile of the purified bottlenecking PCR product was performed to evaluate the size distribution of long templates as well as to evaluate the final short-read library. To assess the fragment size of the purified bottlenecking PCR product, the following products from Agilent Technologies® were used: Bioanalyzer 2100, TapeStation 4200, and Fragment Analyzer 5300; or equivalent technologies from other providers.

Purified Bottlenecking Product

| | | Recom- | Expected |
|---|---|---|---|
| | | mended | average |
| | | Region | fragment |
| Instrumentation | Kit | (bp) | length (bp) |
| Bioanalyzer 2100 | High Sensitivity DNA | 3,000-10,000 | 7,000-8,000 |
| Fragment Analyzer | DNF-464 HS Large | 3,000-49,000 | 7,000-8,000 |
| 5300 | Fragment | | |

[0145] The peak template length after bottlenecking PCR was expected to be around 7,000-8,000 bp, with virtually no products below ˜3,000 bp. FIG. 3A illustrates purified bottlenecking PCR product run on an Agilent® Bioanalyzer using a High Sensitivity DNA Kit.

Final Library

| | | | Expected average |
|---|---|---|---|
| | | Region | fragment |
| Instrumentation | Kit | (bp) | length (bp) |
| TapeStation | High Sensitivity | 150-1,500 | 800-900 |
| 4200 | D5000 | | |
| Bioanalyzer | High Sensitivity DNA | 150-1,500 | 800-900 |
| 2100 | | | |

[0146] The peak template length after bottlenecking PCR was expected to be around 800-900 bp. FIG. 3B illustrates purified final library prep product run on an Agilent® Bioanalyzer using a High Sensitivity DNA Kit.

### Sequencing

[0147] The final library or library pool was sequenced on a NGS instrument, generating 2×150 nt paired end reads. The aim was to produce at least 400 Gbp of sequence data for mutated samples targeting 10× long-read coverage of the human genome, or at least 1200 Gbp for 30× coverage. This was in addition to the unmutated reference data that was also required for long read reconstruction.

### Example 2—Effects of Immobilizing Transposomes on Beads at Low Densities

[0148] This example illustrates improved long read coverage by changing initial tagmentation from soluble transposomes to low density bead-linked transposomes (BLT-LR); and changing from an A14/B15 mixture of BLT-LRs to B15 BLT-LR only. Nucleic acid libraries were generated and sequenced with a protocol substantially similar to that of Example 1. Different amounts of input DNA were tested. A protocol using bead-linked transposomes was compared with a protocol using transposomes in solution. As shown in FIGS. 4A-4C, a switch from low concentration soluble transposomes to low-density BLT (BLT-LR) provided increased robustness to changes in transposome:input DNA ratio; and a more uniform coverage with BLT vs. soluble.

[0149] FIG. 5 outlines steps of high molecular weight tagmentation followed by mutagenesis and suppression PCR to enrich for longer fragments.

[0150] Protocols were compared that included (i) soluble transposome (TSM) (0.4 AU/μl); (2) BLT-LR made with A14/B15 (0.1 AU/μl build); or (3) BLT-LR made with B15 only (0.075 AU/μl build). Quality control and sequencing metrics were compared for each protocol.

[0151] As shown in FIGS. 6A-6C, soluble TSM had a greater activity than BLT-LR and soluble TSM created longer fragments than BLT-LRs. A14/B15 could not be melted off of the beads due to 5′ attachment of TDE1. In mutagenesis PCR, A14/B15 BLT provided a lower yield than B15 only (FIGS. 7A-7C). The yield with soluble (MTE) yield was also lower and may have been accounted for because only 50% tag product was taken into PCR; 100% used for BLTs. Fragment sizes of BLT-LR were smaller than with soluble TSM. Average sizes of products were 1-48 kb (FIG. 7B). There were larger fragment lengths with soluble TSM (FIGS. 7B and 7C). In bottleneck (suppression) PCR, yields and fragment sizes were more similar, while BLT-LRs still produced smallest products of ˜8 kb in length (FIG. 8A). Average sizes were 1-48 kb (FIGS. 8B and 8C).

[0152] In a sequencing metrics comparison, GC bias was comparable between soluble and BLT-LR with A14/B15 BLT slightly worse (FIG. 9) A higher N50 was achieved with soluble TSM, slightly higher N50 with B15-only compared to A14/B15, slightly higher N50 (350) with eBLT-L compared to BLT (FIGS. 10A and 10B). Sequencing redundancy, SLR depth, and error rate achieved using with A14/B15 BLT or B15 only BLT were measured. Fraction of bases with no coverage achieved using with A14/B15 BLT or B15 only BLT is depicted in FIG. 11.

[0153] BLT-LRs had better coverage than soluble transposomes (fraction of bases with <0/10× coverage). BLT-LRs created shorter fragments, which generated lower N50s in workflow. N50s were still above 5 kb mark so this decrease in performance was acceptable when paired with better coverage metrics and a more robust tagmentation reaction. B15-only TSM BLTs gave a better yield and lower redundancy than A14/B15 BLTs. The change to B15 BLT-LRs created a more efficient mutagenesis suppression PCR.

### Example 3—Effects of BLT Activity on Fragment Size

[0154] BLT-LR activity was investigated for high molecular weight tagmentation. BLT-LR activity should provide: tagment large fragments to provide for mutagenesis PCR; maximize fragment size, ideally >8 kb; yield >4 ng post-high molecular weight (HMW) tagmentation; reproducibility; ease in QC tested; and good sequence quality. A goal was to maximize fragment size while maintaining good yield and downstream sequencing metrics.

[0155] BLT-LRs having different levels of activity were compared. λs transposome activity (AU/μl) decreased, yield decreased and average fragment size increased (FIG. 12).

[0156] BLT-LRs were compared with builds/activities of 0.0025, 0.005, 0.025, 0.05, 0.1, 0.15 AU/μl. N50s were compared. “N50” was the length of the shortest contig for which longer and equal length contigs cover at least 50% of the assembly. Lower build activity maximized N50s but sequencing metrics started to drop at 0.025 AU/μl (FIGS. 13 and 14). There was no apparent cliff-edge on high activity side, but N50s continued to decline, and at 0.075 AU/μl, were well above cliff edge while maximizing N50.

[0157] Results were compared from studies with three different operators testing activities from 0.05 AU/μl to 0.25 AU/μl. Consistent performance between operators was found for BLT-LR activities from 0.05 AU/μl to 0.25 AU/μl (FIG. 15). A BLT-LR activity of 0.075 AU/μl was chosen for BLT-LR which balanced fragment size and yield. It was found that a fluctuation of +/−100% in activity would still provide good sequencing metrics.

### Example 4—Effects of Quantity of Input DNA

[0158] Changing the amount of input DNA used in the initial HMW tagmentation reaction could impact any of the following: amount of DNA tagmented (test BLT-LR saturation); fragment sizes after initial HMW tagmentation (and downstream); biases in what is tagmented/amplified; sequencing metrics including percent duplicates, redundancy, N50, GC bias. Effects of input DNA quantity were tested for a protocol substantially similar to the workflow of Example 1 for amounts: 1 ng, 3, ng, 5 ng, 10 ng, 20 ng, 30 ng, 50 ng, 100 ng, 300 ng, and 1000 ng. Yield and fragment size plateaued after 20-30 ng of input DNA (FIG. 16). Yields reached maximum around 20 ng of DNA input, fragment sizes were unaffected by increased DNA input (FIG. 17).

[0159] Sequencing was performed for input DNAs of 1 ng, 10 ng, 20 ng and 1000 ng to determine cliff edges for metrics. A workflow with 1 ng input DNA provided slightly higher insert sizes and percent duplicated reads compared to workflows performed with higher amounts of input DNA (FIG. 18). Minimal differences were observed in error rates, read quality, redundancy, or N50s (FIG. 19). Similar coverage across all DNA input amounts were observed with all points within normal variation with a slight decrease in mode coverage as fraction with <0/10× increased (FIG. 20). A very slight increase in GC bias between 60-80% was observed in higher inputs, but well within normal variation (FIG. 21).

[0160] In sum, similar sequencing metrics were observed for input DNA amounts of 1 ng to 1000 ng. Inputs as low as 1 ng were found to work within the workflow. BLT-LR saturated at about 30 ng input; input above 30 ng did not bias coverage. DNA input amounts less than 10 ng resulted in low yields in the workflow. There was a slight increase in percent duplicated reads for 1 ng DNA input.

### Example 5—Effects of Quality of Input DNA

[0161] Effects of input DNA quality was tested for a protocol substantially similar to the workflow of Example 1. Preliminary data indicated that vortexing and up to 3 freeze/thaw cycles for input DNA were tolerated; and FFPE DNA was not suitable, or was too degraded, to be used as input DNA. Input DNA was prepared by shearing for 1, 3, 10, 30 and 60 seconds, and compared to control BLT-LR tagmented DNA and HMW DNA.

[0162] Input DNA was sheared for 1, 3, 10, 30 and 60 seconds. There was a noticeable change in size distribution profile after even 1 second, while Control BLT-LR and HMW DNA gave similar size profiles (FIG. 22). In the tagmentation step of the workflow, 1 second sheared DNA had similar fragment size and yield to control, and >1 second shearing quickly reduced size and yield (FIG. 23). In the mutagenesis step of the workflow, mutagenesis PCR yield sharply reduced at >1 second shearing (FIG. 24A). In the bottlenecking PCR step of the workflow, yield also sharply reduced at >1 second shearing (FIG. 24B). For sequencing metrics, N50s declined and redundancy increased at >3 seconds shearing (FIG. 25). Coverage metrics declined >3 seconds shearing (FIG. 26). GC bias correlated with post-tagmentation sizes (FIG. 27).

[0163] In sum, HMW DNA gave better yields and larger fragment lengths coming out of initial Tagmentation but did not result in final higher N50. Highly sheared DNA (30 s or longer) did not amplify well in either PCR step which resulted in not enough DNA to continue with library prep. N50s and coverage/redundancy metrics worsened with DNA sheared >3 seconds. GC bias was impacted by fragment sizes. PCR steps were not suitable for highly degraded DNA, but tolerated mild shearing (1-3 sec) reasonably well.

[0164] BLT-LRs were investigated to create large fragment sizes suitable for the workflow outlined in Example 1. B15-only transposomes improved mutagenesis PCR small fragment suppression and overall yield The workflow gave improved coverage of low MapQ regions of the genome. The workflow was robust to changes in DNA input amount. The workflow tolerated mildly sheared DNA, DNA that has been through freeze/thaw, and DNA that had been vortexed.

### Example 6—Enriching for Long Fragments

[0165] A workflow was performed, as described in Example 1, with an added enrichment step. The workflow included: high molecular weight tagmentation; mutagenesis PCR; library normalization; bottlenecking (suppression) PCR; library preparation; fragment analysis of products; and sequencing. FIG. 32 depicts an example workflow which includes enrichment for long fragments. The additional enrichment step for long fragment enrichment of certain fragments was performed on the products of the bottlenecking (suppression) PCR, and prior to the library preparation step. The fragments that were products of the suppression PCR, are referred to as ‘long fragments’ to differentiate them from fragments that are the products of the library preparation step and referred to in Example 7 as ‘short fragments’.

[0166] An example overview and timeline for long fragment enrichment in the workflow is depicted in FIG. 28 and FIG. 29, respectively. The enrichment step included hybridizing the products with selection probes, capturing the products hybridized to the selection probes with bead-linked capture probes, and amplifying the captured products. An example protocol is described below in the following. However, it should be realized that other protocols using similar enrichment for long fragments are contemplated.

### Hybridization

Bring DNA libraries (HYB Plate), EHB2, and probes to RT.
Vortex and briefly spin down EHB2 and probes before use.
NOTE: Vortex EHB2 thoroughly and allow enough time to bring
up to RT.
Ensure that crystals are fully dissolved. Heat tube in hands if needed.
Preheat NHB2 to 50° C. for 5 m and vortex for 30 sec, ensure
solution is clear and free from precipitate.
NOTE: Vortex NHB2 thoroughly and allow enough time to thaw to
RT and get up to 50° C. prior to use.
Ensure that crystals are fully dissolved. Use while warm to avoid
precipitates from reforming.
Prepare Hyb Master Mix and add 17.5 uL to HYB plate wells. (or
add components individually in order: Library, NHB2, Probes, EHB2)
Pipette mix. Seal HYB plate with Microseal ‘B’.
Centrifuge HYB plate briefly at 280 × g for 30 sec.
Place plate on a thermal cycler and run the LCE HYB program
overnight. (holds at 58° C.)

| | | |
|---|---|---|
| Program name: LCE HYB | Rnx volume: 25μ | Lid: 100° C. |

| Step | Temp | Duration | | Cycles |
|---|---|---|---|---|
| Heat denature | 98° C. | 5 | min | 1 |
| Ramp down | 96° C. | −2° | C./min | 19 |
| | 58° C. | | | |
| Hybridize | 58° C. | 30 | min | 1 |

### Capture

Bring SMB3, EEW, EE1, HP3, ET2, and RSB to RT.
Vortex and briefly spin down ET2, EE1 and HP3 before use.
Vortex EEW and SMB3 thoroughly.
Leave the thermal cycler running at 58 C.
Remove the HYB plate from the thermal cycler.
Centrifuge HYB plate at 280 × g for 30 sec.
Vortex SMB3 thoroughly for 1 min before use.
Add 75 μL of SMB3 to cach sample.
Pipette mix 20x
Seal HYB wash plate with Microseal ‘B’
Incubate plate on thermal cycler running at 58° C. for 15 min.
Centrifuge HYB wash plate briefly at 280 × g for 30 sec.
Place on a magnetic stand for 2 min.
While on the magnetic stand, use a pipettor set to 100 μL
to carefully remove and discard the supernatant.

### Post-Hybridization Wash

Vortex EEW thoroughly for 1 min before use.
Vortex and briefly spin down EE1 and HP3 before use.

| | |
|---|---|
| PERFORM | Remove the HYB plate from the magnetic stand and |
| 2X | add 100 μL of EEW to each sample. |
| | Pipette mix to fully resuspend the beads. |
| | Seal HYB wash plate with Microseal ‘B’ |
| | Incubate in a thermal cycler at 58° C. for 10 min. |
| | Place HYB plate on a magnetic stand for 2 min. |
| | While on the magnetic stand, use a pipettor to |
| | carefully remove and discard the supernatant. |

Use a P20 pipettor to remove any residual supernatant from
the final pellet.
Remove HYB plate from magnet.
Add 100 μL EEW to each well.
Pipette mix to fully resuspend the beads.
Transfer 100 μl of resuspended bead solution to a new PCR plate.
Seal HYB wash plate with Microseal ‘B’
Place on the thermal cycler at 58° C. for 5 min.
Turn off thermal cycler at 58° C.
Remove from thermalcycler and place on magnetic stand
for 2 min or until the solution is clear.
Prepare EE1 + HP3 Elution Mix.
Set pipette to 100 μL and discard all supernatant from each well.
Centrifuge at 280 × g for 30 sec then return to magnet for 10 sec.
Use a P20 pipettor to remove any residual supernatant.
Immediately proceed to Elution to prevent excessive drying of beads.

### Elution

Vortex and briefly spin down ET2 before use.
Vortex EE1 + HP3 Elution Mix to mix well.
Remove the HYB plate from the magnetic stand and add 23 μL
of EE1 + HP3 Elution Mix.
Pipette mix to fully resuspend the beads.
Incubate at RT for 2 min.
Centrifuge at 280 × g for 30 sec.
Place on a magnetic stand for 2 min.
Add 4 μL of ET2 to a new 96-well PCR plate to wells
corresponding to sample layout.
Label the plate, “ELU plate”.
Carefully transfer 21 μL of eluate from the HYB wash
plate to corresponding wells of ET2 in the ELU plate.
Set pipette to 20 μL and gently pipette mix each well 10 times.
Centrifuge at 280 × g for 30 sec.

### Enriched Library PCR

Bring MM reagents to RT.
Prepare RED Master Mix. Mix and spin.
Briefly spin down ELU plate to collect condensation if
needed.
Pipette mix.
Seal ELU plate with Microseal ‘B’
Briefly spin down plate to collect droplets.
Place plate on a thermal cycler and run the SYD_EN PCR
program.
(# cycles depends on Probe Panel used)
(same PCR conditions as Bottleneck PCR)

Enrichment PCR

| | | |
|---|---|---|
| Step | Temperature | Time |

| | |
|---|---|
| 1 | PCR cycles (depend on panel) |

| | | |
|---|---|---|
| 98° C. | 10 | s |
| 68° C. | 10 | min |

| | | |
|---|---|---|
| 3 | 4° C. | Hold |

### PCR Clean Up

Bring IPB and RSB to RT for at least 30 min.
Prepare fresh 80% EtOH wash solution as follows. Vortex to mix well.
Remove ELU plate from thermocycler. Briefly spin down PCR plate to collect droplets.
Vortex IPB to resuspend the beads.
Add 30 ul of IPB beads to each well.
Mix the total reaction volume by gently pipetting at least 10 times and incubate for 2 minutes at
room temperature.
Place on the magnetic stand and wait until the liquid is clear (~5 minutes)
Remove and discard all supernatant
Wash beads as follows: a. Keep on the magnetic stand and add 180 μl fresh 80% EtOH to each
well; b. Wait 30 seconds; and c. Remove and discard all supernatant
Repeat wash for a total of 2 washes.
Briefly spin for 10 seconds and return plate to magnet.
With a 20 μl pipette, remove all residual EtOH.
Dry on magnet for 2 minutes.
Remove from the magnetic stand and add 25 μl RSB to each well.
Pipette mix and incubate at room temperature for 2 minutes.
Place on the magnetic stand and wait until the liquid is clear (~2 minutes).
Transfer 24 μl supernatant to a new plate.
Keep on ice for same day use or store at −20° c. (SAFE STOPPING POINT).
Determine the concentration of each purified recovery product with the Qubit dsDNA HS Assay
Kit. Use 1-2 μl of sample DNA per measurement.
Proceed with 50 ng to BLT prep (next tab)

### Example 7—Enriching for Short Fragments

[0167] A workflow was performed as described in Example 1, and included an enrichment step for short fragments. The workflow included: high molecular weight tagmentation; mutagenesis PCR; library normalization; bottlenecking (suppression) PCR; library preparation; fragment analysis of products; and sequencing. The additional enrichment step for short fragment enrichment of certain fragments was performed on the products of the library preparation step. An example overview and timeline for short fragment enrichment in the workflow are depicted in FIG. 28 and FIG. 29, respectively. Of course, other workflows for such short fragment enrichment are also contemplated.

[0168] The enrichment step included hybridizing the products with selection probes, capturing the products hybridized to the selection probes with bead-linked capture probes, and amplifying the captured products. The enrichment step was substantially the same as that performed in Example 6.

### Example 8—Selection of Probes for Under-Represented Genomic Regions

[0169] This example relates to the generation and use of selection probes to enrich for regions of the genome including those which are typically under-represented in whole genome sequencing methods. Such regions of the genome may provide sequencing data that are systematically impacted by lower quality—such as elevated error rates, low mapping quality or depth anomalies—may fail to deliver consistently accurate variant calls even for SNVs and indels. Many of the reference characteristics that cause these systematic errors are well known, such as, highly repetitive regions have poor mapping quality and homopolymers are known to result in low base accuracy. This knowledge has been used to classify the genome into ‘easy’ and ‘difficult’ regions (Krusche P, et al. Nat Biotechnol. 2019; 37:555-560). Though these classifications can be helpful, they are not a perfect representation of the actual performance within these regions. For example, a large segmental duplication may be comprised of regions of high and low similarity, leading to very different variant calling accuracy.

[0170] Selection probes for use to enrich for targets in long fragments were identified by methods which included: selecting target regions of the genome; designing a probe set within the target regions; and identifying suitable probes within the probe set to generate a panel of selection probes. Briefly, for a panel that was focused on under-represented regions of the genome, target regions included those with low mappability (non-unique) portions of protein-coding regions, including introns and untranslated regions (UTRs). Such regions included those having a low mapping quality score (MAPQ) score, less than 50, in the HG38 reference sequence of the human genome; and those represented in the RefSeq database which includes non-redundant, well-annotated set of sequences, including genomic DNA and transcripts. MAPQ scores quantify the probability that a sequencing read is misplaced in a reference sequence (Li H, et al. (2008) Genome Research 18:1851-8). More regions of interest included certain groups of genes and regions of the genome. Examples included: (i) protein coding regions with low mappability, e.g., low mappability RefSeq sequences; (ii) CMRG genes, e.g., Wagner J., et al., (2022) Nat Biotechnol. 40:672-680; (iii) deCODE Icelandic dark matter regions; (iv) regions with short tandem repeats (STR), e.g., Stevanovski I., et al., Sci Adv. 2022 March; 8 (9): eabm5386; (v) MHC locus; (vi) ACMG genes; (vii) regions reported in Wenger A. M., et al., (2019) Nat Biotechnol. 37:1155-1162; and (viii) PGX genes.

[0171] Probe sets were designed to hybridize within such target regions using software tools including DESIGNSTUDIO (Illumina, Inc., San Diego). Probes were designed to hybridize to target regions having about 1 kb+/−0.2 kb between corresponding sequences in the linear reference sequence. A 400 bp window centered around the 1 kb target spacing was searched. Within the 400 bp window, probes were identified using several parameters including GC bias (e.g. <25% to <75%) and uniqueness or hits in the genome. Suitable probes were predicted to hybridize or to hit less than 20 other regions of the reference genome. A hit was at least 80 consecutive bps of the 120 bp probes match >90%, 198,451 probes were identified. As depicted in FIG. 30, selection probes were identified having increased specificity for a target fragment.

[0172] In an example selection process for a fixed panel, probes were selected using the following steps: (1) Target regions were selected based on several inputs, including focusing on low mappability (non-unique) portions of protein-coding regions (including introns and UTRs), and certain identified groups of genes and genomic regions including: ACMG genes, CMRG genes, PGX genes, MHC locus, deCODE Icelandic dark matter regions. (2) Probes were designed to capture the above regions, aiming for about 1000 bp spacing between probes with the following sub-steps (2A)-(2D). (2A) To select better probes, 500 bp spacing was initially used. This provided two opportunities to find good probes for each region, which was useful to maximize the power of the data in a limited time. (2B) To achieve 1000 bp spacing, the algorithm jumped from one probe to the next in 1000 bp increments, but allowed a window of +/−200 bp to find the ‘best’ probe. (2C) There were multiple parameters within that window to find the ‘best’ probe. Mostly these were typical parameters such as GC content. However, a primary parameter for the panel was number of hits in the genome (minimize this number), and requirements on this parameter were relaxed to permit selection of probes in all regions. (2D) Probes were manufactured as double stranded DNA 80-mers or 120-mers. (3) At least 2 probes were selected per region, even for ‘small’ regions (e.g. 1000 bp, where 1 probe may target based on the above). (4) After probe selection was complete, additional rounds of selection were performed, based on the following sub-steps (4A)-(4D). (4A) Discarding region types that did not belong in the panel, for example, regions that were not low mappability portions of protein-coding regions. (4B) Discarding regions that were identified as “failed to cover” using the following sub-steps. (4B) (i). Regions that “failed to cover” included those that neither of the two panel designs covered at least half of the region 5×. This was calculated from the median of many samples, each with mean coverage in the 30× range. (4B) (ii) There were two designs for this panel which provided a choice of which probes to keep. ‘Panel A’ was kept as a default, because it had more replicates and typically saw better coverage overall, and slightly more probes were in this panel. ‘Panel B’ was kept if panel B gave at least 20% better coverage (calculated by fraction of bases covered >10×). (4C) To be even more rigorous about probes that bit multiple times in the genome, all probes were discarded that hit at least 20 times elsewhere in the genome. A hit included at least 50 consecutive bps of the 120 bp probes match >90%. This resulted in some gaps larger than desired. If there was a gap >1.5 kb or a region with a single probe, the other panel was examined probes from the other panel were added to cover those gaps. (4D) Any corrections that were needed were then made to align probes with coordinates of genomic sequences.

[0173] Additional “spike in” probes were identified in target regions using the following steps. Gaps between probes were identified in the remaining target regions that were larger than 1.5 kb, and target regions were identified that had gaps of larger than 1.5 kb between the first or last remaining probe and the target region start or stop location on the chromosome. For each identified 1.5 kb gap, unselected probes which targeted the region from panel A or panel B were identified and selected to fill the gap, making sure that such selected probes did not bind excessively (more than 20 times) in other parts of the genome. Separately, target regions were identified that were left with a single probe after going through the previous selection criteria. Targets could be left with a single probe because all the other probes assigned to that target region were liable to bind to >20 other places in the genome and had been removed, or because many target regions only had one probe from each uber panel A and uber panel B and only one of the panel batches to use for those targets had been picked. For these single-probe targets, unpicked probes were added that hit that same target from the non-picked panel, provided that those probes were also not labeled to bind excessively in other parts of the genome and that those probes had also met the same coverage criteria in the previous steps. Initial probe panels including ‘Uber A’ and ‘Uber B’ were generated. Probes within these panels were excluded with criteria that included having at least 20 hits in the genome, to generate a ‘final’ panel. TABLE 2A summarizes steps used to generate different batches of selections probes using steps described above.

TABLE 2A

| Step included | Batch | | | | |
|---|---|---|---|---|---|
| in batch | | | Uber A and | First | Second |
| generation | Final | Spike-in | Uber B | order | order |
| (1) | Yes | Yes | Yes | Yes | Yes |
| (2A) | Yes | Yes | Yes | Yes | Yes |
| (2B) | Yes | Yes | Yes | Yes | Yes |
| (2C) | Yes | Yes | Yes | Yes | Yes |
| (2D) | Yes | Yes | Yes | Yes | Yes |
| (3) | Yes | Yes | Yes | Yes | Yes |
| (4A) | Yes | Yes | No | No | No |
| (4B)(i) | Yes | Yes | No | No | No |
| (4B)(ii) | Yes | Yes | No | No | No |
| (4C) | Yes | No | No | No | No |
| (4D) | Yes | Yes | No | No | No |

[0174] TABLE 2B lists certain probes generated by the foregoing methods.

TABLE 2B

| | Characteristic | | |
|---|---|---|---|
| | Size | Approx spacing | No of |
| Batch | (bases) | in genome (kb) | probes |
| Final | 120 | 1 kb | 39953 |
| Uber A | 120 | 1 kb | 81325 |
| Spike-in | 120 | 1 kb | 1491 |

[0175] A series of selection probe panels were developed using methods substantially similar to the foregoing methods. Panels included: (1a) uber A; (1b) uber B; (2) intermediate/dev; and (3) final. Panels (1)-(3) were progressive iterations of a selection probe panel. The panels were used to prepare libraries with a method with long fragments with enrichment, and substantially similar to the WGS with enrichment workflow depicted in FIG. 32. A control included a library prepared with a method with long fragments, without enrichment, substantially similar to the WGS workflow depicted in FIG. 32. TABLE 2C lists certain metrics for data obtained using each method/panel which show that in methods that included enrichment, compared to methods without enrichment, median coverage levels and N50 values were much greater despite a smaller number of paired end reads.

TABLE 2C

| | | | | | | Without |
|---|---|---|---|---|---|---|
| | With enrichment | | | | | enrich- |
| | Panel | Panel | Panel | Panel | Panel | ment |
| Metric | (1a) | (1a) | (1b) | (2) | (3) | None |
| Level of input reads | Low | High | High | Low | Low | High |
| (# paired end reads) | 1.0E+09 | ~5E+09 | ~3E+09 | 6.0E+08 | 5.9E+08 | 5.4E+09 |
| target region size (Mbp) | 76 | 76 | | 40 | 40 | N/A |
| median coverage | 32.2 | 72.2 | 67.5 | 34.4 | 41.9 | 27.3 |
| percent bases with no | 5.2% | 2.3% | 3.7% | 2.3% | 2.4% | 2.0% |
| coverage | | | | | | |
| percent bases with less | 20.1% | | | 15.3% | 12.3% | 11.5% |
| than 10x coverage | | | | | | |
| N50 (bp) | 6089 | 4198 | 4192 | 6677 | 7116 | 7054 |
| percent reads on target | 72% | | | 85% | 85% | N/A |
| f-measure non-SNP type | 0.737 | 0.784 | 0.732 | 0.841 | 0.841 | 0.881 |
| 2 | | | | | | |
| f-measure SNP type 2 | 0.885 | 0.902 | 0.882 | 0.905 | 0.911 | 0.947 |
| precision non-SNP type | 0.841 | 0.878 | 0.847 | 0.848 | 0.869 | 0.889 |
| 2 | | | | | | |
| precision SNP type 2 | 0.923 | 0.92 | 0.892 | 0.952 | 0.947 | 0.96 |
| sensitivity non-SNP | 0.656 | 0.709 | 0.644 | 0.834 | 0.814 | 0.874 |
| type 2 | | | | | | |
| sensitivity SNP type 2 | 0.849 | 0.884 | 0.872 | 0.863 | 0.879 | 0.934 |

[0176] The data in TABLE 2C show that in methods that included enrichment, compared to methods without enrichment, median coverage levels and N50 values were much greater despite a smaller number of input paired end reads.

### Example 9—Major Histocompatibility Complex Region (MHC) Panel

[0177] The MHC region is a large locus located on the short arm of human chromosome 6 (6p21.1-6p21.3), and contains highly polymorphic genes that code for cell surface proteins essential for the adaptive immune system. The region is challenging to obtain sequence information due to presence of high level of repetitive sequences, sequence homology, pseudogenes, and a wide variety of alleles in the population. Precise genotyping and phasing of the MHC region is challenging but highly clinically desirable for applications like organ transplantation and drug discovery.

[0178] Panels of selection probes were prepared which targeted approximately 5 Mbp of the MHC region. A first panel of selection probes was designed such that probes were spaced about 230 bp from one another on the HG38 reference sequence of the MHC region. Probe sequences were designed to hybridize within the target region using software tools, DESIGNSTUDIO (Illumina, Inc., San Diego). Potential probe sequences were evaluated by several criteria including number of hits within the genome, and percentage GC content. Probes having more than about 20 hits within the genome were discarded. A second panel of selection probes was prepared such that probes would be spaced about 1 kb from one another on a reference sequence of the MHC. The second panel was prepared by removing probes from the first panel. Probes included 80-mers and 120-mers. A batch of clinical probes was designed by a method including: targeting a 1 kb window in a reference sequence; identifying potential probes within the 1 kb using software tools, DESIGNSTUDIO (Illumina, Inc., San Diego); selecting a probe within the 1 kb based on criteria including less than 20 hits within the reference genome, and GC content. A hit included probes having at least 90% sequence identity along the full length of the probe with a target complement in the reference sequence. TABLE 3A lists probes generated by the foregoing methods.

TABLE 3A

| | Oligo characteristic | | | |
|---|---|---|---|---|
| | Size | Approx spacing | | No of |
| Batch | (bases) | in genome | | probes |
| Clinical | 120 | 1 | kb | 4966 |
| Final design | 120 | 1 | kb | 5153 |
| Final design | 80 | 1 | kb | 5155 |
| Input4_120_designs | 120 | 230 | bp | 21608 |
| Input4_120_designs | 80 | 230 | bp | 21608 |

[0179] The panels were used to prepare libraries with a method with long fragments and enrichment, and substantially similar to the WGS with enrichment workflow depicted in FIG. 32. Use of the MHC probe panel generated highly specific and efficient enrichment over the target region, with 98.3% long-reads on-target. FIG. 34 depicts an example of coverage for the targeted region. TABLE 3B lists certain sequencing metrics.

TABLE 3B

| Parameter | MHC panel |
|---|---|
| Read N50 | 5932 |
| Error Rate | 0.71% |
| Mean Coverage | 43.05 |
| %0 Coverage | 1.06% |
| % Low Coverage (1-3X) | 0.64% |
| % On Target Reads | 98.3% |

[0180] Use of the MHC selection probe panel resolved haplotype in polymorphic genes. Phasing worked well with use of the MHC probe panel in methods with long fragments and enrichment (e.g. WGS with enrichment workflow depicted in FIG. 32), and was comparable to such methods without enrichment (e.g. WGS without workflow depicted in FIG. 32). TABLE 3C lists certain sequencing metrics. As depicted in FIG. 35, a 722 kb region in the MHC locus was analyzed, and a 580 kb region was encapsulated in one phase block. As depicted in FIG. 36, a 426 kb region in the MHC locus that covered HLA-A, HLA-G, HLA-F, was fully phased.

TABLE 3C

| Parameter | MHC panel |
|---|---|
| % Biallelic Het SNVs Phased | 95.88% |
| Block N50 | 274,215 |
| Switch Error Rate | 0.14% |

[0181] Use of the MHC selection probe panel achieved accurate variant calling in the MHC region. FIG. 37A depicts a graph for SNV precision vs SNV recall for sequence information obtained from nucleic acid libraries prepared by (1) on market long read kits; (2) short read (SR) PCR-free sequencing methods, such as those including simple tagmentation of gDNA; (3) method with long fragments and enrichment, such as the WGS with enrichment workflow depicted in FIG. 32 (ICLR-MHC enrichment); and (4) method with long fragments without enrichment, such as the WGS workflow depicted in FIG. 32 (ICLR-WGS). Use of the MHC panel with long fragment with enrichment methods achieved levels of SNV precision greater than methods without enrichment.

[0182] FIG. 37B depicts a graph for INDEL precision vs INDEL recall for sequence information obtained from nucleic acid libraries prepared by (1) on market long read kits; (2) PCR-free methods; (3) method with long fragments and enrichment, such as the WGS with enrichment workflow depicted in FIG. 32 (ICLR-MHC enrichment); and (4) method with long fragments without enrichment, such as the WGS workflow depicted in FIG. 32 (ICLR-WGS). Use of the MHC panel with long fragment with enrichment methods achieved levels of indel precision greater than methods without enrichment.

### Example 10—American College of Medical Genetics (ACMG) Panel

[0183] A selection probe panel was generated from a list of genes compiled by ACMG for which specific mutations are known to be causative of disorders that are clinically actionable. The panel was designed to precisely call variants and phase in these genes. The panel included 78 unique genes in ACMG SF v3.1, and targeted full genes. The panel size was about 6.8 Mbp. The ACMG genes included those listed in TABLE 1A.

[0184] Panels of selection probes were prepared which targeted the ACMG genes. A first panel of selection probes was designed such that probes were spaced about 230 bp from one another on the HG38 reference sequence of the ACMG genes. Probe sequences were designed to hybridize within the target region using software tools, DESIGNSTUDIO (Illumina, Inc., San Diego). Potential probe sequences were evaluated by several criteria including number of hits within the genome, and percentage GC content. Probes having more than about 20 hits within the genome were discarded. A second panel of selection probes was prepared such that probes would be spaced about 1 kb from one another on a reference sequence of the ACMG genes. The second panel was prepared by removing probes from the first panel. Probes included 80-mers and 120-mers. A batch of clinical probes was designed by a method including: targeting a 1 kb window in a reference sequence; identifying potential probes within the 1 kb using software tools, DESIGNSTUDIO (Illumina, Inc., San Diego); selecting a probe within the 1 kb based on criteria including less than 20 hits within the reference genome, and GC content. A hit included probes having at least 90% sequence identity along the full length of the probe with a target complement in the reference sequence. TABLE 4A lists probes generated by the foregoing methods.

TABLE 4A

| | Characteristic | | | |
|---|---|---|---|---|
| | Size | Approx spacing | | No of |
| Batch | (bases) | in genome | | probes |
| Clinical 1 kb | 120 | 1 | kb | 6935 |
| 120mer_1 kb_Optimized-Final | 120 | 1 | kb | 7513 |
| 80mer_1 kb_Optimized-Final | 80 | 1 | kb | 7520 |
| Clinical 230 bp | 120 | 230 | bp | 29954 |
| ACMG_120mer_designs | 120 | 230 | bp | 29954 |
| ACMG_80mer_designs | 80 | 230 | bp | 29954 |

[0185] Use of the ACMG selection probe panel was highly effective and achieved comparable coverage performance with long read whole genome sequencing methods without the use of the panel (FIG. 38). TABLE 4B lists certain sequencing metrics.

TABLE 4B

| Parameter | ACMG panel |
|---|---|
| Read N50 | 7497 |
| Error Rate | 0.26% |
| Mean Coverage | 59.47 |
| %0 Coverage | 0.04% |
| % Low Coverage (1-3X) | 0.22% |
| % On Target Reads | 87.4% |

[0186] 99.5% of heterozygous SNVs were phased using the ACMG panel. For example, as depicted in FIG. 39, TNNT2, a 22 kb gene was fully phased in one phase block. TABLE 4C lists certain sequencing metrics. Phasing metrics were in target genes only, hence a shorter block N50.

TABLE 4C

| Parameter | ACMG panel |
|---|---|
| % Biallelic Het SNVs Phased | 99.5% |
| Block N50 | 85841 |
| Switch Error Rate | 0.17% |

[0187] 99% of heterozygous SNVs were phased using the ACMG panel. For example, as depicted in FIG. 40A for APOB and in FIG. 40B for TMEM127, genes were fully phased in one phase block.

[0188] Use of the ACMG panel covered and phased highly repetitive MSH6 (70.76% contains repeat elements), and enrichment achieved comparable coverage and phasing compared to long read whole genome sequencing methods without the use of the panel (FIG. 41). 27 kb was fully encapsulated in one phase block. Use of the ACMG panel covered and phased highly repetitive NF2 (45% contains repeat elements), and enrichment achieved comparable coverage and phasing compared to long read whole genome sequencing methods without the use of the panel. 99 kb was fully encapsulated in one phase block.

[0189] Use of the ACMG selection probe panel achieved highly accurate variant calling in the ACMG. FIG. 42A depicts a graph for SNV precision vs SNV recall for sequence information obtained from nucleic acid libraries prepared by (1) on market long read kits; (2) PCR-free methods; (3) method with long fragments and enrichment, such as the WGS with enrichment workflow depicted in FIG. 32 (ICLR-ACMG enrichment); and (4) method with long fragments without enrichment, such as the WGS workflow depicted in FIG. 32 (ICLR-WGS). Use of the ACMG panel with long fragment with enrichment methods achieved levels of SNV precision greater than methods without enrichment. FIG. 42B depicts a graph for INDEL precision vs INDEL recall for sequence information obtained from nucleic acid libraries prepared by (1) on market long read kits; (2) PCR-free methods; (3) method with long fragments and enrichment, such as the WGS with enrichment workflow depicted in FIG. 32 (ICLR-ACMG enrichment); and (4) method with long fragments without enrichment, such as the WGS workflow depicted in FIG. 32 (ICLR-WGS). Use of the ACMG panel with long fragment with enrichment methods achieved levels of indel precision and indel recall greater than methods without enrichment.

### Example 11—Pharmacogenetic (PGX) Panel

[0190] A selection probe panel was generated for genes commonly targeted by pharmacogenetic testing assays. Genetic variation is known to influence the way individual respond to therapeutics. Accurately detecting functional haplotypes (“star alleles”) in clinically actionable pharmacogenetic genes is crucial to implementation of personalized medicine. The panel was generated to achieve highly accurate genotyping and star allele calling in such genes. The panel included 98 genes that are important in pharmacogenetics, targeting full genes. The panel size was about 8.1 Mbp. The genes included those listed in TABLE 1B.

[0191] Panels of selection probes were prepared which targeted the PGX genes. A first panel of selection probes was designed such that probes were spaced about 230 bp from one another on the HG38 reference sequence of the PGX genes. Probe sequences were designed to hybridize within the target region using software tools, DESIGNSTUDIO (Illumina, Inc., San Diego). Potential probe sequences were evaluated by several criteria including number of hits within the genome, and percentage GC content. Probes having more than about 20 hits within the genome were discarded. A second panel of selection probes was prepared such that probes would be spaced about 1 kb from one another on a reference sequence of the PGX genes. The second panel was prepared by removing probes from the first panel. Probes included 80-mers and 120-mers. A batch of clinical probes was designed by a method including: targeting a 1 kb window in a reference sequence; identifying potential probes within the 1 kb using software tools, DESIGNSTUDIO (Illumina, Inc., San Diego); selecting a probe within the 1 kb based on criteria including less than 20 hits within the reference genome, and GC content. A hit included probes having at least 90% sequence identity along the full length of the probe with a target complement in the reference sequence. TABLE 5A lists probes generated by the foregoing methods.

TABLE 5A

| | Characteristic | | | | |
|---|---|---|---|---|---|
| | | Approx | | | |
| | Size | spacing | | No of | |
| Batch | (bases) | in genome | | probes | SEQ ID NOs. |
| Clinical 1 kb | 120 | 1 | kb | 8153 | 02-8154 |
| PGX_80mer_1 kb | 80 | 1 | kb | 8693 | 8155-16847 |
| PGX_80mer_230 bp | 80 | 230 | bp | 35205 | 16848-52052 |
| PGX_80mer_230 | 80 | 230 | bp | 33089 | 52053-85141 |
| bp_v1 | | | | | |

[0192] TABLE 5B lists certain sequencing metrics for methods with long fragments and enrichment with the PGX panel, and shows highly effective target region coverage.

TABLE 5B

| Parameter | PGx panel |
|---|---|
| Read N50 | 7279 |
| Mean Coverage | 57.17 |
| %0 Coverage | 0.12% |
| % Low Coverage (1-3X) | 0.32% |
| % On Target Reads | 88.3% |

[0193] Star Alleles are a nomenclature system used to describe allelic variation. In the case of PGX genes, star alleles describe haplotype patterns associated with protein-level interactions, with *1 usually referring to the wild-type or “fully-functional” haplotype. TABLE 5C lists star alleles called by methods which include long fragments, and enrichment (ICLR PGX enrichment) which were 100% concordant with on market long read methods.

TABLE 5C

| Gene | ICLR PGx Enrichment | On-market Long Reads |
|---|---|---|
| CYP2C19 | *1.002, *1.002 | *1.002, *1.002 |
| CYP2C8 | *1.001, *1.004 | *1.001, *1.004 |
| CYP2C9 | *1.001, *1.001 | *1.001, *1.001 |
| CYP2E1 | *1.002, *7.002 | |
| CYP2J2 | *1.001, *1.001 | *1.001, *1.001 |
| CYP3A4 | *1.002, *1.002 | *1.002, *1.002 |
| CYP3A5 | *3.001, *3.001 | *3.001, *3.001 |
| CYP3A7 | *1.001, *1.001 | *1.001, *1.001 |
| CYP4F2 | *1.001, *4.1001 or | *1.001, *4.1001 or |
| | *2.001, *3.001 | *2.001, *3.001 |
| NUDT15 | *1.001, *1.001 | *1.001, *1.001 |
| SLCO1B1 | *1.002, *1.002 | *1.002, *1.002 |
| TPMT | *1.001, *1.001 | *1.001, *1.001 |
| UGT1A1 | *1, *1 | *1, *1 |

[0194] Use of the PGX selection probe panel achieved highly accurate variant calling in the PGX genes. FIG. 43A depicts a graph for SNV precision vs SNV recall for sequence information obtained from nucleic acid libraries prepared by (1) on market long read kits; (2) PCR-free methods; (3) method with long fragments and enrichment, such as the WGS with enrichment workflow depicted in FIG. 32 (ICLR-PGX enrichment); and (4) method with long fragments without enrichment, such as the WGS workflow depicted in FIG. 32 (ICLR-WGS). Use of the PGX panel with long fragment with enrichment methods achieved levels of SNV precision and indel recall greater than methods without enrichment. FIG. 43B depicts a graph for INDEL precision vs INDEL recall for sequence information obtained from nucleic acid libraries prepared by (1) on market long read kits; (2) PCR-free methods; (3) method with long fragments and enrichment, such as the WGS with enrichment workflow depicted in FIG. 32 (ICLR-PGX enrichment); and (4) method with long fragments without enrichment, such as the WGS workflow depicted in FIG. 32 (ICLR-WGS). Use of the PGX panel with long fragment with enrichment methods achieved levels of indel precision and indel recall greater than methods without enrichment.

### Example 12—Challenging Medically Relevant Genes (CMRG) Panel

[0195] A selection probe panel was generated for genes that are medically relevant autosomal genes that are excluded from the GiaB v4.2.1 variant benchmark due to repeats or polymorphic complexities (Wagner J., et al., (2022) Nat Biotechnol. 40:672-680). These genes have <90% bases included in the benchmark and pose a challenge for their accurate analysis in a clinical setting. The selection probe panel was generated to rescue coverage gap in these genes. The panel targeted 389 genes, with a panel size of 22.5 Mbp. The average overlap with repeat: 36.6%, and the average overlap with segdup was 19.7%. The genes include those listed in TABLE 1C.

[0196] Panels of selection probes were prepared which targeted the CMRG genes. A first panel of selection probes was designed such that probes were spaced about 230 bp from one another on the HG38 reference sequence of the CMRG genes. Probe sequences were designed to hybridize within the target region using software tools, DESIGNSTUDIO (Illumina, Inc., San Diego). Potential probe sequences were evaluated by several criteria including number of hits within the genome, and percentage GC content. Probes having more than about 20 hits within the genome were discarded. A second panel of selection probes was prepared such that probes would be spaced about 1 kb from one another on a reference sequence of the CMRG genes. The second panel was prepared by removing probes from the first panel. Probes included 80-mers and 120-mers. A batch of clinical probes was designed by a method including: targeting a 1 kb window in a reference sequence; identifying potential probes within the 1 kb using software tools, DESIGNSTUDIO (Illumina, Inc., San Diego); selecting a probe within the 1 kb based on criteria including less than 20 hits within the reference genome, and GC content. A hit included probes having at least 90% sequence identity along the full length of the probe with a target complement in the reference sequence. TABLE 6A lists probes generated by the foregoing methods.

TABLE 6A

| | Characteristic | | | |
|---|---|---|---|---|
| | Size | Approx spacing | | No of |
| Batch | (bases) | in genome | | probes |
| Clinical | 120 | 1 | kb | 22545 |
| CMG_80mer_1 kb | 80 | 1 | kb | 21333 |
| CMG_80mer_230 bp | 80 | 230 | bp | 96721 |

[0197] Methods using long fragments with enrichment with either the first selection panel (230 bp spacing), or the second selection panel were compared. As depicted in FIG. 44A, use of the second selection probe panel (SYD-C2-CMRG-1 kb) compared to use of the first selection probe panel (SYD-C2-CMRG-230 bp), resulted in increased identification in sequence data for (i) total mutations in bases in region; (ii) percentage DUP mutant reads; and (iii) percentage on target unique mapped reads. FIG. 44B compares normalized coverage between use of the first selection probe panel (SYD-C2-CMRG-230 bp) and the second selection probe panel (SYD-C2-CMRG-1 kb).

[0198] Coverage of certain genes, including CFC1, HBG1, OR51A2, RGPD3, and CYP4F3 was compared using methods with long fragment and enrichment (ICLR with enrichment), methods with long fragments without enrichment (ICLR WGS), and PCR free short reads (SR). FIG. 44C depicts an example with respect to HBG1 and shows that enrichment with the CMRG panel rescued a SR coverage dip in the gene. With regard to other genes, for CFC1, enrichment with the CMRG panel increased coverage in the gene. For HBG1, enrichment with the CMRG panel rescued a SR coverage dip in the gene. For OR51A2, enrichment with the CMRG panel rescued a SR coverage gap in the gene. For the RGPD3 gene, enrichment with the CMRG panel rescued an SR coverage dip in the gene. For the CYP4F3 gene, enrichment with the CMRG panel resolved SVs missed by SR in the gene.

[0199] TABLE 6B lists certain metrics which shows that methods with long fragments and enrichment with the CMRG panel achieved highly effective target region coverage.

TABLE 6B

| Parameter | CMRG panel |
|---|---|
| Read N50 | 6432 |
| Mean Coverage | 47.68 |
| %0 Coverage | 2.74% |
| % Low Coverage (1-3X) | 0.92% |
| % On Target Reads | 80.5% |

[0200] Use of the CMRG selection probe panel achieved highly accurate variant calling in the CMRG genes. FIG. 45A depicts a graph for SNV precision vs SNV recall for sequence information obtained from nucleic acid libraries prepared by (1) on market long read kits; (2) PCR-free methods; (3) method with long fragments and enrichment, such as the WGS with enrichment workflow depicted in FIG. 32 (ICLR-CMRG enrichment); and (4) method with long fragments without enrichment, such as the WGS workflow depicted in FIG. 32 (ICLR-WGS). FIG. 45B depicts a graph for INDEL precision vs INDEL recall for sequence information obtained from nucleic acid libraries prepared by (1) on market long read kits; (2) PCR-free methods; (3) method with long fragments and enrichment, such as the WGS with enrichment workflow depicted in FIG. 32 (ICLR-CMRG enrichment); and (4) method with long fragments without enrichment, such as the WGS workflow depicted in FIG. 32 (ICLR-WGS).

[0201] The term “comprising” as used herein is synonymous with “including,” “containing,” or “characterized by,” and is inclusive or open-ended and does not exclude additional, unrecited elements or method steps.

[0202] The above description discloses several methods and materials of the present invention. This invention is susceptible to modifications in the methods and materials, as well as alterations in the fabrication methods and equipment. Such modifications will become apparent to those skilled in the art from a consideration of this disclosure or practice of the invention disclosed herein. Consequently, it is not intended that this invention be limited to the specific embodiments disclosed herein, but that it cover all modifications and alternatives coming within the true scope and spirit of the invention.

[0203] All references cited herein, including but not limited to published and unpublished applications, patents, and literature references, are incorporated herein by reference in their entirety and are hereby made a part of this specification. To the extent publications and patents or patent applications incorporated by reference contradict the disclosure contained in the specification, the specification is intended to supersede and/or take precedence over any such contradictory material.

The application's sequence listing, which the Patent Office published only in electronic form, follows.

SEQUENCE LISTING (85141 sequences)

SEQ ID NO: 1 - DNA, 15 bp, synthetic construct
  source 1..15: mol_type = other DNA
gtctcgtgggctcgg

SEQ ID NO: 2 - DNA, 120 bp, synthetic construct
  source 1..120: mol_type = other DNA
ctatacatctgaataatatgcacttcataattgtgcctcaccccacctcctaaaatcttatatcgatctgtgttttgggtttgagagccaccttaatgtggaaatgcaagaatcagcagg

SEQ ID NO: 3 - DNA, 120 bp, synthetic construct
  source 1..120: mol_type = other DNA
agcaatcacaatgcaggtgcggccttctctggctttgtccagggcttcttggacaacctattccataatcacatagattaattctcataatagttcttttccctaattcctcttccataa

SEQ ID NO: 4 - DNA, 120 bp, synthetic construct
  source 1..120: mol_type = other DNA
aacatccttgaaaacagacctcaaatccagctcacagtaaattcaagaagcctgagcaaaggccaaatacagactcccgaatttttttattgtagagaatacctcatactgagttcgtct

SEQ ID NO: 5 - DNA, 120 bp, synthetic construct
  source 1..120: mol_type = other DNA
aacatttttgttgttagagtgctcccaaaattcttcccgtgttgtttcccacaatggataattgtcaccaactattcactatgatgatagggacagcagttaaaggttactcaggagaga

SEQ ID NO: 6 - DNA, 120 bp, synthetic construct
  source 1..120: mol_type = other DNA
ctgtggtagacaaatgccagagaggcaaagtatatttaaaaagatagataatagttactctctgtgtttgtgttttattaacccctagcccagtggttccccaatttgagcctgcaacag

SEQ ID NO: 7 - DNA, 120 bp, synthetic construct
  source 1..120: mol_type = other DNA
ggagccctagaaaagatttcaaccattcactgtaaacaaagtttggggcccatgaaatgtatgacgatgagagattacatgataccatggtcactttaatggttcaacccttattcagag

SEQ ID NO: 8 - DNA, 120 bp, synthetic construct
  source 1..120: mol_type = other DNA
ctcggagccactgaacattcagtcgctttatttctttgccatcaagcagctgaaaacaagagttcacagatcaacttcaggaccagcacactttgaatgtagcacaattaacatcattat

SEQ ID NO: 9 - DNA, 120 bp, synthetic construct
  source 1..120: mol_type = other DNA
gatgcaaatatgtctatcagataggtctgctttgcaagataattttctggcattcaagtgagagagctgttcatcccttctgaagaaggcaccagtgactcagctttgagcttttctaat

SEQ ID NO: 10 - DNA, 120 bp, synthetic construct
  source 1..120: mol_type = other DNA
tttaagtaaaacaagtttagatgcctagaatgtaaaacagatcaaagaagcagagcttctttggctgaggaatggtgttggtctgaggaaagaccaaggaactctggggaatctatgaga

SEQ ID NO: 11 - DNA, 120 bp, synthetic construct
  source 1..120: mol_type = other DNA
tgttttttactagctcttgaggccattctaatattcaccgaagctttagaaccaccatttcaggtcaatgtttttcaacatgggattcaaggtccactgatggtcacgagaatttcctga

SEQ ID NO: 12 - DNA, 120 bp, synthetic construct
  source 1..120: mol_type = other DNA
agtggatggtgacatctttaaatctttcctacatgagttctcatcagagaagtttgagaaccactactcaaactaaactcccatttcagccaaagtgtcctatttgctgcattgggaaca

SEQ ID NO: 13 - DNA, 120 bp, synthetic construct
  source 1..120: mol_type = other DNA
cctgccagacacttccctcatccccagcaactaagacaaaagggcatacttccatgttctttttacatttcccaaatttgttgattctacttttttttcctcagatgatgtttcaatgcc

SEQ ID NO: 14 - DNA, 120 bp, synthetic construct
  source 1..120: mol_type = other DNA
ctgggatgtccggtcgggtgggatagttgaatacaacttcaccaaatgtgacatttccttccaatgtgttctgcaatgagaagaataacagtaaatttgaatgctgcaatactgaaaata

SEQ ID NO: 15 - DNA, 120 bp, synthetic construct
  source 1..120: mol_type = other DNA
ttattaagtttccacttaaaatactttcattcaggagtcaggagtagatcaaacagttgaaacatcaaactcaccggcattaggccttccgtgctgtagctgtcaatcaaaggggttttt

SEQ ID NO: 16 - DNA, 120 bp, synthetic construct
  source 1..120: mol_type = other DNA
gctaacccataggtttgtgggcaaaaatatgtatgtctctgaggtttagtggctggttgttacacagcattattgtggtaatcaacaacggatacagtcagtgatgttggaattacatca

SEQ ID NO: 17 - DNA, 120 bp, synthetic construct
  source 1..120: mol_type = other DNA
aaagccccaatgccagtgatacttggttttgatctctaggccataatcacaaatagcacctgcatatcatttgtccaatgtacatctttaatggaaatttagatgtctttttgggggtca

SEQ ID NO: 18 - DNA, 120 bp, synthetic construct
  source 1..120: mol_type = other DNA
ccaagtaggctccaaaccggaaacatccagcataggaaaaatacatcattgcctgggtgaaggaaaatgtaattccaaagatgtgtgctttcctcaaagagtttctgaaaagaagacatt

SEQ ID NO: 19 - DNA, 120 bp, synthetic construct
  source 1..120: mol_type = other DNA
tcctctctgtgtcccacaggtacctcaaatttcaggttccataaataactcattttcaactagagcaaattatagggtcatatcctacctggacatcagatagtcattctcagcatcatg

SEQ ID NO: 20 - DNA, 120 bp, synthetic construct
  source 1..120: mol_type = other DNA
tgacaattgaagaatgtttggaaaatagtgaaagaatgcaggcaataaaaagtaaattttagatacattcaaaggcttactcctctctgcctgtggacgcttacccctttctgcccgtgg

SEQ ID NO: 21 - DNA, 120 bp, synthetic construct
  source 1..120: mol_type = other DNA
gcagcagtagctacagcagtggcagaagattttaaattactgccaggaaacaaatcttagcaggagataagagccagagaagtgacagggaagctacagtttacaacagatttgtgaact

SEQ ID NO: 22 - DNA, 120 bp, synthetic construct
  source 1..120: mol_type = other DNA
cttccaacaaggcaatctgattaggaaacatacatccttcatcacctctggagtctgagtaaagggatatggaaaaagcaaagaacaccagtgtacaagatgagatttcagcctacatca

SEQ ID NO: 23 - DNA, 120 bp, synthetic construct
  source 1..120: mol_type = other DNA
atagtcactttagaaaatcgtaaaagtgcagaaagcaaaaggtgaggagaaaaaattcaccttcaaattcccaaagacaatccttttgtcagacacattagaaccatcattctcagcaaa

SEQ ID NO: 24 - DNA, 120 bp, synthetic construct
  source 1..120: mol_type = other DNA
taccctcaaataaacaagtttatggcttttatttctgaaaagtaaaaaagcatctacaatggagccttggacaacatgggggttagggagactgacccctcgtgcagttgaaaattcaca

SEQ ID NO: 25 - DNA, 120 bp, synthetic construct
  source 1..120: mol_type = other DNA
agcagaaatttatcgttttaggattacagacttgcatgatgttcttctctctggtggctctctaccatagcattaacaatcctttctgtagagtaccatgtgctttgtgatgagccttaa

SEQ ID NO: 26 - DNA, 120 bp, synthetic construct
  source 1..120: mol_type = other DNA
ttttgcacctgctgttgtagctgcagtgatggcttttacgaattttgtttttgttttgttttgttttcttttacaatggttcttatgctagattcatttatcttgaaatggcaggcaact

SEQ ID NO: 27 - DNA, 120 bp, synthetic construct
  source 1..120: mol_type = other DNA
gtcacctgtattttataaaaatgctcactagtccacaataatgtgctgaaaaactgcagagcacagatcacaggcagggtagaggttatgagcaggttttgacatcatgcagtcagaata

SEQ ID NO: 28 - DNA, 120 bp, synthetic construct
  source 1..120: mol_type = other DNA
atataagaagtactaaatagcagcttgagaagtgtgttcaggtggaagttgattttcaatattatgtggactggttggtgcagatccactactttccctacctacttctgtccctctcat

SEQ ID NO: 29 - DNA, 120 bp, synthetic construct
  source 1..120: mol_type = other DNA
tttccactatgatacagatcatgtgatatcagactgcattctgccatcagaggaactctttgttttataacagaaagagaaacaactttggagcacaactgtctgagcttgaatcccagc

SEQ ID NO: 30 - DNA, 120 bp, synthetic construct
  source 1..120: mol_type = other DNA
ttgactcaccttcccagaaccttctagttctttcttatctttcagtgcttgtccagacaacattttcatttcaacaactcctgctattgcaatgatgggtacaattgctaagagtaacag

SEQ ID NO: 31 - DNA, 120 bp, synthetic construct
  source 1..120: mol_type = other DNA
tgtccaactgtaaaccagatttccaactctgaaaccaaaagtcaagctacaaagtcagtttagtccatcactctataatttagtccagcacatctcctctaccctggaaatattctgtgc

SEQ ID NO: 32 - DNA, 120 bp, synthetic construct
  source 1..120: mol_type = other DNA
cttagaatatcacctagaatcacttctaggtgtgagttcatggcagaggaattacctggctatttaacttttcagacatataaatgtgcagctttggatagtagtgaagggccacagaaa

SEQ ID NO: 33 - DNA, 120 bp, synthetic construct
  source 1..120: mol_type = other DNA
caatgtcacattgcactggttactgttcctttattccaaagactaatgctcactgtctcatgtatattcctcctacagagtaggagtctatagagttgtgaggaccaaaatgaatggaga

SEQ ID NO: 34 - DNA, 120 bp, synthetic construct
  source 1..120: mol_type = other DNA
acttctgtgttcaaaaccctacagtggttttccatctacttctggatataatgctgaccttaacacacttatgactcttcttttcactcactttattccagccactctgtcttctttgca

SEQ ID NO: 35 - DNA, 120 bp, synthetic construct
  source 1..120: mol_type = other DNA
tttcttaatgatgataactaacacccgtaaggagaaaattagtttcatgctggggtccaaaatggccaattaagacaaacaccagtagaaaggaggcacgtacccctttaacttgagcag

SEQ ID NO: 36 - DNA, 120 bp, synthetic construct
  source 1..120: mol_type = other DNA
gtgagctacaggcagccttcagcaggtttgggcagtgggatatgatttgatttctattttagaaaaatgactgtggctgtttttaggtgaatctacaggattgggataaaaatggaggta

SEQ ID NO: 37 - DNA, 120 bp, synthetic construct
  source 1..120: mol_type = other DNA
agtcactagctagcaattcccataaatacattttctttctaaatggtgatgggaggaatggggaagaactgaggaaccagagacagctggtaaaatgtgaatgccctctagaaagcctaa

SEQ ID NO: 38 - DNA, 120 bp, synthetic construct
  source 1..120: mol_type = other DNA
tttacagaagaaactgaggcttagagagcctgataagatccatagcccacagttataaggtcacagagttggaatcttaatccagatgcatgagaatcctaaccagaatgggaatccaga

SEQ ID NO: 39 - DNA, 120 bp, synthetic construct
  source 1..120: mol_type = other DNA
cgctaaggaaacagaggcttagacagtttacttatgtgcccaaggacacaaaatcagaaacaggtacaaggagcacttgaaccaaaaccaatactgtcttgccataccaaacagtattta

SEQ ID NO: 40 - DNA, 120 bp, synthetic construct
  source 1..120: mol_type = other DNA
tctgtcgttttgtttcaggatcatcaattcttgtaaaaacctgtgagaaaacatttaaaggatttttagttcaatcagtgaagaacccatcctggacctgacccatttcccatctggccc

SEQ ID NO: 41 - DNA, 120 bp, synthetic construct
  source 1..120: mol_type = other DNA
accattcctcagggaaagaaaacacgtatctcccttcacagtgggccaaaatcagtcttgtaagatagtaacattcctagcccaggacagacaactttatccttcataaaaaaacaaaca

SEQ ID NO: 42 - DNA, 120 bp, synthetic construct
  source 1..120: mol_type = other DNA
gtagaatcaaaagtcagtgtttagcttatgcttcttgtggtgatcaatctctttctccacaatgttttcagcagttatggcaagggtgtcctcagcttgatgtttggacatatgtcacta

SEQ ID NO: 43 - DNA, 120 bp, synthetic construct
  source 1..120: mol_type = other DNA
tatggagatacgtggattttgttgtttttgtatcccagttcagacacaagcactttattcgttcattcttccatcaggattcacaagtaaatcacacaaatgggcatcacacttacccct

SEQ ID NO: 44 - DNA, 120 bp, synthetic construct
  source 1..120: mol_type = other DNA
ttcattccatgtatcttatcttctcacgccattttttgtgggtgttttgactcaatcaagtttactctggatcagtgctttcaacagaaatatggcacaagccatgctatgagccatgtt

SEQ ID NO: 45 - DNA, 120 bp, synthetic construct
  source 1..120: mol_type = other DNA
taaaaaaataataataatcaggggcttgtacaaaccaacaaattcctacagaccaggcgttggccaatcaaaacaaacacaggccattgtgctgtactgatacacaccggctagtaatca

SEQ ID NO: 46 - DNA, 120 bp, synthetic construct
  source 1..120: mol_type = other DNA
ctaggttgaagaattatggaaaaattgaagagtcacgtaagtctcttttattttcataaaggaacagagccagatatccaggccttgtctgagacttctctaacctttgtaactttccca

SEQ ID NO: 47 - DNA, 120 bp, synthetic construct
  source 1..120: mol_type = other DNA
attagagacagggagagttgaaacaaatatgagttcatctttgaattctactgtgacatctcaacttggaacacctttggttataatgtctccatctccacattctcggtcctcacagaa

SEQ ID NO: 48 - DNA, 120 bp, synthetic construct
  source 1..120: mol_type = other DNA
caatattaacaagaattagtagtagaatgttcttatgcttataaatcaggttggtttgaactaagcctcactgaccttatccagagccacctgaaccactgcttcgctttctgtgtccaa

SEQ ID NO: 49 - DNA, 120 bp, synthetic construct
  source 1..120: mol_type = other DNA
gcaccttcaggttcagacccttcaagatctaccaggacgagtgagaaaaaaacttcaaggcaattcacagacacaggatataggaactgactgttcactaggtttaaatatacatgcact

SEQ ID NO: 50 - DNA, 120 bp, synthetic construct
  source 1..120: mol_type = other DNA
cctcagcctgcaaaagtgctgggatcacaggcatgggccaccacacccagccaagagtaaatttcaaatgtgtcacctcaaaaggtgtcaagtgaggagatagatatgttaattagcttg

SEQ ID NO: 51 - DNA, 120 bp, synthetic construct
  source 1..120: mol_type = other DNA
acacagaaggaactttgctaagtgattctatattcattatctcagttagtcctcaaaacacgctgaaagttagggttcattcctgtcatatcatttggcagaagaggtagcagaggcttg

SEQ ID NO: 52 - DNA, 120 bp, synthetic construct
  source 1..120: mol_type = other DNA
cattaaatggcaagacttctgtgcttgcacaaaggtctataatgcagaaaacttccaaacaatcttttaggaagaggaacaatttatacttccataatttgtgaggtggattagctgcca

SEQ ID NO: 53 - DNA, 120 bp, synthetic construct
  source 1..120: mol_type = other DNA
tactaaaaaaaaaaaaaagggacagtcatttaaatctctgaacattaaggaagtttggagacagtttgctctctgtcctgccttcctctaggactgtcggaatgaccaactgagaggtta

SEQ ID NO: 54 - DNA, 120 bp, synthetic construct
  source 1..120: mol_type = other DNA
gaaacaggacagattgccttaaatctgtctgtattttcttaatcgcaactccctgcagaacctagagcattgccttggatagaggaggagctaataattgttgaaattcatgaacttact

SEQ ID NO: 55 - DNA, 120 bp, synthetic construct
  source 1..120: mol_type = other DNA
cttccctcctgcactgctaatttgaagagaaagccagattaagacctcaattactttatgtagaagcagagaagggaaggagaagaacaggaaagaaaactgattatgtctggtctaaga

SEQ ID NO: 56 - DNA, 120 bp, synthetic construct
  source 1..120: mol_type = other DNA
aaactttaaagaaatggccaacttgggaaggacattaggccatcagtttgtagtcttacgtcaattcttgatctccaagcaaaattagtttcagttctctgaaggagactgccctttcaa

SEQ ID NO: 57 - DNA, 120 bp, synthetic construct
  source 1..120: mol_type = other DNA
aggttagcagtgcccttggtgaatagcagaagcaaacataaatcctgcctgatagaattggacttcaatccagatccatagcaaatttaagatggcactgactgttaggtttatttccat

SEQ ID NO: 58 - DNA, 120 bp, synthetic construct
  source 1..120: mol_type = other DNA
gggttatctctttcttgaagttgtggtagaacttgcctacaaaattatccagacttgttttgtgatttctgcttgtgggagagaagcagtggaaaatggagatttttaactttgaattca

SEQ ID NO: 59 - DNA, 120 bp, synthetic construct
  source 1..120: mol_type = other DNA
aacacatatgcacagttaaaaaaattatgcaatgaatactcatgtaagtatacctgagatcaagaaacagaacactgccagaaccacagaatcccctgctgtgtgttcggctctccttac

SEQ ID NO: 60 - DNA, 120 bp, synthetic construct
  source 1..120: mol_type = other DNA
actcaaacctttcaagttctttcttttgtcctccaaatgcaatcacagttctaattgctgccaagacctcttcagctactgctccagcttttgcatacgctaagagttctttatcagtaa

SEQ ID NO: 61 - DNA, 120 bp, synthetic construct
  source 1..120: mol_type = other DNA
gacagctagaggaatgggtggatgaaggcaaatgaacattgattagttatgttctaagtgcagacattgtgctgcacgtacctagcctctttagtacccaaaataatattccattgattc

SEQ ID NO: 62 - DNA, 120 bp, synthetic construct
  source 1..120: mol_type = other DNA
tgaattctgccaaatgtaaaaagaagagctgataccattcctactgaaaatgttccaaaaaatttaggtggagggactcctctctgacccattctatgaggccagaataatcctgatacc

SEQ ID NO: 63 - DNA, 120 bp, synthetic construct
  source 1..120: mol_type = other DNA
aaacctgccttactctagccggcagttgttccattgaagtttagcatgatagtattggtctacttttgtgagctgtggttccaggagcggtttaatattcagagtgtttgtagtattatt

SEQ ID NO: 64 - DNA, 120 bp, synthetic construct
  source 1..120: mol_type = other DNA
catatcaaatcagtttaaaattaacaccatgttcaccttgaaatggaaaataagttttaaaagatcactggaaacgtgtgctggggtagagagggccacttctacctctctgccttcatg

SEQ ID NO: 65 - DNA, 120 bp, synthetic construct
  source 1..120: mol_type = other DNA
gactgatggccaaaatcacaagggttagcttccaaccacgtgtaaatcctactataaacccagtgaaaaatgttgccattgactgaaagaacattccaattttgtcaccaattccttcat

SEQ ID NO: 66 - DNA, 120 bp, synthetic construct
  source 1..120: mol_type = other DNA
tgatagtcaccatccaactatgtttgcaccaatatggtggaatggttaagaatgatttctgctttggctcaaatcccagctcttcacttcactgttatgtaatcttaggcaagctgctta

SEQ ID NO: 67 - DNA, 120 bp, synthetic construct
  source 1..120: mol_type = other DNA
tattcccactttttaaacttcactacttaccatcttcaaattaaactgtgtgtttgaatcatgcagaagctataaagatggctaggtaacaagcagacagtctctgacattgctgttcac

SEQ ID NO: 68 - DNA, 120 bp, synthetic construct
  source 1..120: mol_type = other DNA
gacattctgtttcattttccccaatgtaaaaaacaatgcctctccacaggaatatttggaggtatttggtcctcagctttcaaaatatgataaagtgtctccattttcggcagggcatgg

SEQ ID NO: 69 - DNA, 120 bp, synthetic construct
  source 1..120: mol_type = other DNA
attcaaatacttctctgctgactgtgtgcaaccacatatacaccaactcagtgatgtttatttgcaagaagaaacccacatttggtaagaggtagtctgtcagcagaaatatcagtgtcc

SEQ ID NO: 70 - DNA, 120 bp, synthetic construct
  source 1..120: mol_type = other DNA
ttcaactggtatggaaaagaggggaaaaactatttctagcaaagtgaacaatatggacaaaagtcaacggcaagtttgaagaatgggtaagcctgtttttgacaggggtaggaagtgtgt

SEQ ID NO: 71 - DNA, 120 bp, synthetic construct
  source 1..120: mol_type = other DNA
cacagaatcctggagaaaactccattaaagggtaagacagaaggtaaggaagaaacaaagagatgcagaagcttagaaaaacatgcaagagggattcttgactgctttgccttatgtcaa

SEQ ID NO: 72 - DNA, 120 bp, synthetic construct
  source 1..120: mol_type = other DNA
cacagcttcagtgactccaaaatatatctagagctattcaaatcctctccctcttcacagttaatgctctggttcaagtccccatcatttcttacctctcctgtaacaagactactgtaa

SEQ ID NO: 73 - DNA, 120 bp, synthetic construct
  source 1..120: mol_type = other DNA
aactatgttggcctccaagacacaccccagggaaaggtgagagctaccccaaaataactgagattgggtttttgccacatttactgaagagggactcaaaatagaaattatgttatacaa

SEQ ID NO: 74 - DNA, 120 bp, synthetic construct
  source 1..120: mol_type = other DNA
tgtcttccacagagacttcatgccaggcatcattccagacactgaagataaacccagaatgagagccactttctctaatatcatcggatttctgttcaagtaagaaatcctttcactttt

SEQ ID NO: 75 - DNA, 120 bp, synthetic construct
  source 1..120: mol_type = other DNA
tgtcaacccgcaagcaattccattatggccacattaattcaacctcctgggcatgtatgtctataaattatgggttcaggctagataacatctaagccccttttcacctacaaaattcta

SEQ ID NO: 76 - DNA, 120 bp, synthetic construct
  source 1..120: mol_type = other DNA
atgtgaagttcgtctttctgtgcctggcttatttcacttaatataatctcctccagttccatttttgttgttgcaaatgacaggatctcatttttttaaggatgaatagtactccattgt

SEQ ID NO: 77 - DNA, 120 bp, synthetic construct
  source 1..120: mol_type = other DNA
caccattttttgaagagacggtcttttccccaatatacattcttagaaactttgtcaaaaatgagttcactgtagatttgtggatttatgtctgcattctctattctgttccattggtct

SEQ ID NO: 78 - DNA, 120 bp, synthetic construct
  source 1..120: mol_type = other DNA
ttgtatcatctgccaacagggataatttgacttcttcctttccaattcagatgcctttttttttctttctcttgtctgattgccctcgctaggactttcagtattatgctgaataactag

SEQ ID NO: 79 - DNA, 120 bp, synthetic construct
  source 1..120: mol_type = other DNA
accttcagatgatttcttattgttcattaacatcattttctttctgattaaagaactccctttagcatttcttgtctagacaggtctggtgttgaataaatccctcagcttttgttcatc

SEQ ID NO: 80 - DNA, 120 bp, synthetic construct
  source 1..120: mol_type = other DNA
tgtagggatgggggagggggggatgatttctggaggcttttgtttggctatcttgttccacctcctccttacattttatcattttttaaccttttaagttttattagagacaaactctca

SEQ ID NO: 81 - DNA, 120 bp, synthetic construct
  source 1..120: mol_type = other DNA
gaaaatcacagtaaagatagcatgctgtctttggaaaggcatggaaggatagacaatggtgaggggagtggaaataaggagtggcagtgagggaaggatattaatcttacttatttaatc

SEQ ID NO: 82 - DNA, 120 bp, synthetic construct
  source 1..120: mol_type = other DNA
tagttggaggatacctaccttccctgaaaggcatggctggtaaccaaggaaattctacttaaagggatgattattcacatcatataataggtactgagtaactttgggtatgtcccaaac

SEQ ID NO: 83 - DNA, 120 bp, synthetic construct
  source 1..120: mol_type = other DNA
acagaattgaagtagttctaccccagggtaaacaatgtactttttagggtcatgaagtggttctgaggacccactgacaagtatcaaaagatccgtatatacccgagattggtatgaata

SEQ ID NO: 84 - DNA, 120 bp, synthetic construct
  source 1..120: mol_type = other DNA
gcatcctcccagtttctagggctaaaaactttagaatcatccccgacttttcgtcttacacccatgttcaatctgttaggaaatctcacaacagattcctacttatcattcaaggttcta

SEQ ID NO: 85 - DNA, 120 bp, synthetic construct
  source 1..120: mol_type = other DNA
ggcctcaagaatgagcagaaaaaagaaaggaatgagtctgatgcatgcttgtcaaggaacattttttctgagaagacagaatatggcaataatgaatgacccacgttggagatctgcata

SEQ ID NO: 86 - DNA, 120 bp, synthetic construct
  source 1..120: mol_type = other DNA
cccatcaccaccaacacaggacattttacctccagaactgtcactggccataataaaaataagtggatcatgaaagtagacatttactgaatgcctattcaatgacagataaaatccaga

SEQ ID NO: 87 - DNA, 120 bp, synthetic construct
  source 1..120: mol_type = other DNA
gggtgtaaagtgtggaaacagaaatagctgactgatcaaaagacacccctcactgagctgggaaaattggaattacatctcttaatcttagactagaaggaaggagattaaagtgagtac

SEQ ID NO: 88 - DNA, 120 bp, synthetic construct
  source 1..120: mol_type = other DNA
gagaagggggtgagaagatttgaagaaagtggtaacataatgctgagtaggacaaaagcctcagtcaaatgccctcactctgtagtttattaggaaggagactttaggggaaaaaaatct

SEQ ID NO: 89 - DNA, 120 bp, synthetic construct
  source 1..120: mol_type = other DNA
tcaaatatttgaaagaacctaataaggtcaggcttggttctaggtactggtaacaacagtgagtaagaaaagctacctatcctcacaaagcatacactctagtgcatacactaaaagggg

SEQ ID NO: 90 - DNA, 120 bp, synthetic construct
  source 1..120: mol_type = other DNA
aagcatttaatggttttaaggtagggaccaaggtgatatgatgtggctgctatgggtaaatttttagaagagcaaaaaggaaggagggatactaggagatgaaagagcagttgagagagt

SEQ ID NO: 91 - DNA, 120 bp, synthetic construct
  source 1..120: mol_type = other DNA
gatagaattttaaaatgtccactgaatgtagagagagacaggaacaggagccaaacttcaataggttgagaactaagtcaatggcgaaatcaagacagaacgcaaaggccacttttgtgt

SEQ ID NO: 92 - DNA, 120 bp, synthetic construct
  source 1..120: mol_type = other DNA
gtgagccacagcacctgaccaagagtgtataatctctaagaagttcattttgtgtagaaattacagcccagctctatgtgtcacatttcctcacttgctttagattttattctacttttg

SEQ ID NO: 93 - DNA, 120 bp, synthetic construct
  source 1..120: mol_type = other DNA
ggaaaaagatgtgaggaaaatctatctaagtagtagagtacttcatcaagagacttagaatatattctctctatcctggccccattgtacatcctcagacaagtgaacatgtctggctcc

SEQ ID NO: 94 - DNA, 120 bp, synthetic construct
  source 1..120: mol_type = other DNA
cagtgagccaagatcacagcactgaggtcatcaaccaaccacacatatatgatacatgtctgattccaagtgtgattaaagaaaagcttctaaaaaaaccactgtgcaaccagaaaatga

SEQ ID NO: 95 - DNA, 120 bp, synthetic construct
  source 1..120: mol_type = other DNA
catttgattaatgatggcagtagacattttatccatccactacccagatattattcttaatccttccctttctagtgaagagaagtggcaattagatgctgggcataactagcctcagaa

SEQ ID NO: 96 - DNA, 120 bp, synthetic construct
  source 1..120: mol_type = other DNA
acttgtccaaggttcacagctataactaagccaatatttaaatgccaagtctgttccctgaccaccaaactataaggtgcaacctcagatttctgagatactgcatcgcatcacattaaa

SEQ ID NO: 97 - DNA, 120 bp, synthetic construct
  source 1..120: mol_type = other DNA
gctaggtgatgttgtttactcaaaatccaagtgatgagtcatttactacagtccattctaccgtgagagataccaggtctgatcactcggttaaggtgctaactgcaaaatctttaattg

SEQ ID NO: 98 - DNA, 120 bp, synthetic construct
  source 1..120: mol_type = other DNA
ttatatacagatatttattgccagttaacaacctaaatgtacttttgaccttctgtctcatcagccaggccacaaacgcgatgtttacatagccatttaccggaagcaagagcctggacc

SEQ ID NO: 99 - DNA, 120 bp, synthetic construct
  source 1..120: mol_type = other DNA
aactatgaaaatgaaacaagctagttaccttttattgttcagtttaaaaaagttcttcttctttgctcctccattgcggtccccttcaagatccattccgacctgaagagaaaccgcagc

SEQ ID NO: 100 - DNA, 120 bp, synthetic construct
  source 1..120: mol_type = other DNA
tccgttgcacctctctagaaagggcaagtagagaaacgcgcatcagctgaatcattggggacatttcaacttatgtagacacgtctttcaaagttcacataagtcttcatatccatataa

SEQ ID NO: 101 - DNA, 120 bp, synthetic construct
  source 1..120: mol_type = other DNA
ttaggcttctaacaggccactattttttccacatgttctaattgcatatgcaagtgtacagcattgttcactgtttaaaggcttaacaacaaccctgtggtccatctggggtaaatgtaa

SEQ ID NO: 102 - DNA, 120 bp, synthetic construct
  source 1..120: mol_type = other DNA
tgcaccttcttgtcctccgctctcatgtagccatttcaccaacttgtctatactctgacaacattaaagatttgcctctctgctgcagtctgttctatatgtatctatgggagtaataat

SEQ ID NO: 103 - DNA, 120 bp, synthetic construct
  source 1..120: mol_type = other DNA
tctgtatttttcctagctcctctatttagcccatctgagtccagattgaaggttcaacatgcttaaagaaggaatgcaactcacctcaatgaagttaattgacctgaggcagagaaagaa

SEQ ID NO: 104 - DNA, 120 bp, synthetic construct
  source 1..120: mol_type = other DNA
aggtgctgagagtatgacatcagaggcagatttatggaaattacactagtaggctaaatgcctaagttatcattagcgtgccttcaaagatccgttgccatgaactatctcccttatcaa

SEQ ID NO: 105 - DNA, 120 bp, synthetic construct
  source 1..120: mol_type = other DNA
tgaagaaatactccactgctcaaaaaccttgatttctgtgtcattcaaataaagacaaaaacagcatattcctagggtttttgtaagaagaaaataaggtaagatttgatgtgtgtttag

SEQ ID NO: 106 - DNA, 120 bp, synthetic construct
  source 1..120: mol_type = other DNA
gtttggagatggggatgagaatgcattttcagaatcctggttattagtatctatctctcagtggagtttgctccttattaagggacactcacattgaatgaaggccaaaattaactggct

SEQ ID NO: 107 - DNA, 120 bp, synthetic construct
  source 1..120: mol_type = other DNA
atgttgcccaggctggctaaaacttttattgatcactatgtggcaagtactttgctagatgctgacaatatgaagatgagccgtgtaaagttcctcaagttctgtgtgtatatgttgtta

SEQ ID NO: 108 - DNA, 120 bp, synthetic construct
  source 1..120: mol_type = other DNA
aaaagagtaaagtattacggtgaaaaacagagcaggggaaagagagtggaagtaccaggtgggcaaagtttacaattttaagtaggatagtcagggcagacctcattaaggagataactt

SEQ ID NO: 109 - DNA, 120 bp, synthetic construct
  source 1..120: mol_type = other DNA
gtggtatctgtagtccaagtatcagataccaaagctggccaactgaggcccgaggtggattttaaggtgcaagatttgaaaaaaaaaatgtgaaggaattgctattacaagttgcacttt

SEQ ID NO: 110 - DNA, 120 bp, synthetic construct
  source 1..120: mol_type = other DNA
agtttctccacatttactctggtcttcttctaattaactcccttcgtaacagccaaagtatttgtaaaatctacataggaccatatcatatccatgggtaaggcctgcaagggcttccca

SEQ ID NO: 111 - DNA, 120 bp, synthetic construct
  source 1..120: mol_type = other DNA
gtcaggttttcccactgaatcttggcacaggtagtattatgattatcttcattttaaagaagagggaactaagattcaatgagttgcaaagtgagtggcaggactgatttgtctgagctc

SEQ ID NO: 112 - DNA, 120 bp, synthetic construct
  source 1..120: mol_type = other DNA
tttttttttttaatctattgtaagggggattgggttcttgatttgattctcagcttggtcattggtgcatagcagtgctactgatttatgtacattgattttgtaacctgagactttact

SEQ ID NO: 113 - DNA, 120 bp, synthetic construct
  source 1..120: mol_type = other DNA
tcccttagccataaaacctatgttcctttagtcaaaaatggatctataaaaagaaattaccagttttggaaagtttattcttatttattaatctagacaaacttggtttgtgttaaatta

SEQ ID NO: 114 - DNA, 120 bp, synthetic construct
  source 1..120: mol_type = other DNA
ttcacaaaggaaggagctctgtctatcttgtccacttctataatccccaaaagcctctacacagagtaagggcttcctcaatattggttcaattaatggataaataaggttgtgctgtgt

SEQ ID NO: 115 - DNA, 120 bp, synthetic construct
  source 1..120: mol_type = other DNA
ctacagagagtaaaaatctaccaaatattttttcctgatggggatggtgagatattcagaagactgagaaagcaagcattgaggagagcataacaagctcatgcgtggctttgctaatac

SEQ ID NO: 116 - DNA, 120 bp, synthetic construct
  source 1..120: mol_type = other DNA
aggagagatgagctcatgggagtgggatacaagttgatttgggttatatattctatgtagcccatgaaattagagttcttcctgagcctgcaatctgggaatcacaaaattagtaaaatg

SEQ ID NO: 117 - DNA, 120 bp, synthetic construct
  source 1..120: mol_type = other DNA
aagggcttctcaacattcttaggataaagatgaaaatgtttaatgtgatcagtgagcctgtgaataaaacaaatcctatcttcctctctggccttctgtctagccatactctcctgatcc

SEQ ID NO: 118 - DNA, 120 bp, synthetic construct
  source 1..120: mol_type = other DNA
aattctttagttaggggtagaagaagtcagaaatttgaatcatgaaatttgatagatggaggaagccatatgcaatgggcttcacagcaacactcagtcaaaagccagccggaaatcagg

SEQ ID NO: 119 - DNA, 120 bp, synthetic construct
  source 1..120: mol_type = other DNA
taagcttgcataagcagaattcagccgtggatatagtaaattggtactaaaatgtcttttaatcctcttaaagattacttgtggattactgagagattgcttgtggattattgagggaac

SEQ ID NO: 120 - DNA, 120 bp, synthetic construct
  source 1..120: mol_type = other DNA
ggcttttcttggtgagagagatgtgtcaaaatgattcttacgtttctatggaagaacagacattccagaattacctaagaacattctgaaagagaataattagggaacactaaccttacg

SEQ ID NO: 121 - DNA, 120 bp, synthetic construct
  source 1..120: mol_type = other DNA
caaacaacgaactgggaaaagtatttgccatacatacaataaacaaatatgatcatgagccactataatgaagactaatattttttggaaaatatgggtaaagggcatgaacgggcaaaa

SEQ ID NO: 122 - DNA, 120 bp, synthetic construct
  source 1..120: mol_type = other DNA
ttaaaaagaaaaatatcctctgttcgaactgagggtcagtatttgccctcctcaaagaaactgtaggaccaaatccactttgtttcaatcagcctttacccaatgactttttacagagaa

SEQ ID NO: 123 - DNA, 120 bp, synthetic construct
  source 1..120: mol_type = other DNA
tcccctttcataactttttaagattgtgtgatactcacttcccactgactttttactcactggaatttggctttcacattcattgtgccactgaaacagtgcttattgatctgcaggagt

SEQ ID NO: 124 - DNA, 120 bp, synthetic construct
  source 1..120: mol_type = other DNA
ttagtaatctagagggagaaagagacccaggacatactacttaggataaatgagaaaagccttatcaaataaggcccccatgtggcagtgtaatgacactccatacatgcaaaacaaaac

SEQ ID NO: 125 - DNA, 120 bp, synthetic construct
  source 1..120: mol_type = other DNA
gaagactctttataagcctccgtgtcacaggagagcagacacgtaatgttctggaagaagtgcactgactagtcacaaacatccatatatagaaatttcgcctgcttttattaacttgaa

SEQ ID NO: 126 - DNA, 120 bp, synthetic construct
  source 1..120: mol_type = other DNA
aaaaatagagatagccacacaaaactatatattctctgacattctttgacagaaacttcaaaagtagaggtgaaagatacatggattttggagccactgaagccgtgaaatttcagtaaa

SEQ ID NO: 127 - DNA, 120 bp, synthetic construct
  source 1..120: mol_type = other DNA
caagaaggagattctacgagcaattcccccctcgggccattgtgttgctgtttattagcccctgggagggcgtcaggacaaaaggaaccctcctcccttcttagtacttaggcccaaggt

SEQ ID NO: 128 - DNA, 120 bp, synthetic construct
  source 1..120: mol_type = other DNA
tttcatttaatgcccattcagctgtcagcgagctttggataaagtggtagttactgtgattgtttactgtgttgcccccaaatcagagtgcatttcgttgttttggcttgtttacattat

SEQ ID NO: 129 - DNA, 120 bp, synthetic construct
  source 1..120: mol_type = other DNA
attgaaaccctaagcatcaatttcttaggaacttctctgagccattaagttgttttaaaattactttcctccatcagactcctaatcatcacctagtgatattcctcttaagaatcagat

SEQ ID NO: 130 - DNA, 120 bp, synthetic construct
  source 1..120: mol_type = other DNA
gatgggtactgttccttttgcttctccatttttgtcttggctggctttaggtcatgtaatgatcatgtgtgcccttatcagagacagttgaaaagaaaaggatttgtatttcaaccttat

SEQ ID NO: 131 - DNA, 120 bp, synthetic construct
  source 1..120: mol_type = other DNA
gcgtgagccaccttgcgcccggcctctttatttttatatctcaaatcagagatgatttgatatttaagttggaaagaagttgatctggtggaaatataactgggttctaggttgacttta

SEQ ID NO: 132 - DNA, 120 bp, synthetic construct
  source 1..120: mol_type = other DNA
agaaacttcccatgcaaagtcataattttcctgttttgtagctaggagggactaataagaggaatataaggagtagtgtgataagcacggtggagacaagtgatgatttcacaattcaag

SEQ ID NO: 133 - DNA, 120 bp, synthetic construct
  source 1..120: mol_type = other DNA
aaaagcacccagaggcctgagttaagtttagtgagctttagaactctgaacttcttaacattctggtgctaactaatcagaaaaactgtctagtctatgcttgaacttggtgggagaaat

SEQ ID NO: 134 - DNA, 120 bp, synthetic construct
  source 1..120: mol_type = other DNA
tcacaaaaggtcattttctcttcccccaaccaaactgcattcatattaattgacaacagagactagctatcccccagtcctttactagggggtatttattttaactttgctgttgctgct

SEQ ID NO: 135 - DNA, 120 bp, synthetic construct
  source 1..120: mol_type = other DNA
agtcatatggcatgcagatattcggcttcagtagatgtgaaagttttcaaaaggagttgtaccaacactcatactagtgagcattgtgtgtaggagttccagttgttctgtatcctaact

SEQ ID NO: 136 - DNA, 120 bp, synthetic construct
  source 1..120: mol_type = other DNA
cagccaaactatatcaaccatactttctccactacactcatgcatcacatttatcttaggtgactggataatttgtggtctgtttctagactttcttttttccaatagtctatttgtctc

SEQ ID NO: 137 - DNA, 120 bp, synthetic construct
  source 1..120: mol_type = other DNA
tgcactggctaggaccactaatgcagtgttgcagaaaacgttcaaaattttattattaaataggatgtttgcagtaggtttttcttacttcccttctatttctaaattgctgagaatttg

SEQ ID NO: 138 - DNA, 120 bp, synthetic construct
  source 1..120: mol_type = other DNA
tttttcaaagaaccagcgtttgactttgttgagtttctctgtcgactcgtgttatgactttgttaattttctctgtcgactcctcagtttatttagaaatctattgtcggctgggcatgg

SEQ ID NO: 139 - DNA, 120 bp, synthetic construct
  source 1..120: mol_type = other DNA
atggagatttagaattgtggtctcttcctagtagtttgattcattgtcatcatgaaatgtccctcattatctctaataatgctagtgccttaaagtctgttttatctgctactaatacag

SEQ ID NO: 140 - DNA, 120 bp, synthetic construct
  source 1..120: mol_type = other DNA
acagtagaaatagaccacagtggagtaaacagatggaatgcaccacttaattttagaaagatatcgccaacagtttactagtacccatggccaatagtgtaggttaatgaccactttgct

SEQ ID NO: 141 - DNA, 120 bp, synthetic construct
  source 1..120: mol_type = other DNA
ttaccaaaagctggccgacagctgtgaatgtgcactaaatgaaagagctcttcttccctgccttcctcttttactctgacactagattgcatattcaaaaacaaatcctccaaaatacat

SEQ ID NO: 142 - DNA, 120 bp, synthetic construct
  source 1..120: mol_type = other DNA
acacctggccctgctttcttcctttatttttaagttgatttttacattgcgtaaaattttttgagataataaaatatcacgaagagagtttcatgtttcagggtacaaatttcagggaag

SEQ ID NO: 143 - DNA, 120 bp, synthetic construct
  source 1..120: mol_type = other DNA
gagaaaataggccttccagtgaacagatatctctgggtattgtgcttattatcacctatagtcactgcttatattatgtttggtgtggattgtgtcatgtctcttggaagccatctcctt

SEQ ID NO: 144 - DNA, 120 bp, synthetic construct
  source 1..120: mol_type = other DNA
gttttaaacagttttggtaaccatctcatttctcttgctatgatgacaaagggaaaaaggtagtccatgctttcttaagttttaaggttttagtcacaatcatgctttctttcttttttt

SEQ ID NO: 145 - DNA, 120 bp, synthetic construct
  source 1..120: mol_type = other DNA
tagctgaaagtgaagcatagactctaagggattgatttgccttctgaaattttgggttgtgttggagggaggagagcaggatatgaatgatgaagcaaagctggagaacattatttttct

SEQ ID NO: 146 - DNA, 120 bp, synthetic construct
  source 1..120: mol_type = other DNA
aatggtatgtaatttgtatcattctcgtttcataggagagttatttcattacacaacaagaatgccatagggtggcatttctgaaagtgtacttctggacccagatgctttcagaggtcc

SEQ ID NO: 147 - DNA, 120 bp, synthetic construct
  source 1..120: mol_type = other DNA
aagtctgtctaggatttgtccctatgcatctgaaaatggataatcaaaaagagtaaattggccaacttgcagagatgaaagtacagaaaagaaatggaaaatgataggccaggcacggtg

SEQ ID NO: 148 - DNA, 120 bp, synthetic construct
  source 1..120: mol_type = other DNA
tctttaacagctccccttatcttcttgattccccactgtcttaggcactcatataccatcctttataggatattactataaagagcatgagggagttgtttgaggtgacaggactgtttt

SEQ ID NO: 149 - DNA, 120 bp, synthetic construct
  source 1..120: mol_type = other DNA
gaaaacagactaatacagacgtattcttctcattaatgctcacgtcctattttattctattttgtgctcagaaactctcaaaagcatttgagtctgcagctcaaatttcttacaagtagt

SEQ ID NO: 150 - DNA, 120 bp, synthetic construct
  source 1..120: mol_type = other DNA
atcatacagtctgtgtgacttagatagccaacattctataatgtgaaatgtcaaatcttttggcctgtgtgactacgaaagagcctctgttctcagatttacacctatttctgggatgca

SEQ ID NO: 151 - DNA, 120 bp, synthetic construct
  source 1..120: mol_type = other DNA
atgagcatctcaggcgtactgtgaagattaattctattctgtactttttgatgctgaaagcatccaggttttaatataagtgtttaaatgagttgagcagtactgtgggcccagagcaaa

SEQ ID NO: 152 - DNA, 120 bp, synthetic construct
  source 1..120: mol_type = other DNA
attaaacttttccagagagagataaaatctcccccagacacagtataggctgtgctgatacaggcaaagtgaagagctgagacagttactttactctaaaagccccgttattgaagaaaa

SEQ ID NO: 153 - DNA, 120 bp, synthetic construct
  source 1..120: mol_type = other DNA
tcttctggaaccaccacagtcttacttagtcttctggcttaccactgatttgttagtattgctcttaaaaatctggttctcagagctgagtaaagtgcttcagataggctaaactctgta

SEQ ID NO: 154 - DNA, 120 bp, synthetic construct
  source 1..120: mol_type = other DNA
aaaattaaaaatagaactgccattagtcttctatgtgattaaataaaaataaaaatagaacctccatgtaaaccagcaatcccacttgtaggtacatagccaaggaaatgaaatcagtgt

SEQ ID NO: 155 - DNA, 120 bp, synthetic construct
  source 1..120: mol_type = other DNA
aagggcagagccctcatgagtggattaatacctctataaaagggcttgacagagggagtttgtccttttttgccattttgctttctgccatttggagacacaacattccttcactctaga

SEQ ID NO: 156 - DNA, 120 bp, synthetic construct
  source 1..120: mol_type = other DNA
tctactatatgcctagcactgttgtaagtgctgggcatacagtagggaattaaacaaaaatccctgccctcattcatagcttctatcatatcaaatggtgggagggaaatgcaatttagg

SEQ ID NO: 157 - DNA, 120 bp, synthetic construct
  source 1..120: mol_type = other DNA
aaaccatgtaggaagcctggactccaagtcccacacagtagtaatgaggatgcccttattgggtgtcagtggaagccaattgggaaacttgaacttcatcctccacttggcagtaatgaa

SEQ ID NO: 158 - DNA, 120 bp, synthetic construct
  source 1..120: mol_type = other DNA
tgctgaaagataactgtcaacacagcagaattattcttcagcaatgaaggaaacattaagaccttctcacaggaaagacaactaaggaaatgtgttgccggcagacttaccctcaaataa

SEQ ID NO: 159 - DNA, 120 bp, synthetic construct
  source 1..120: mol_type = other DNA
ttcctgtatttatagtgtagatacagtttgctaatttgtctagcacacagtccggggtataagaggtaaaaagaaacccagggaacttactgctgtgtcattctctgggttctgaagttt

SEQ ID NO: 160 - DNA, 120 bp, synthetic construct
  source 1..120: mol_type = other DNA
atgcattattgtttcctctgttatatcttctttggctctattatgtttatgttggactcttagcagattaattttcaaatttttctccaactactgctttggctaaatttatgtttgagt

SEQ ID NO: 161 - DNA, 120 bp, synthetic construct
  source 1..120: mol_type = other DNA
cccctatacttttctccatagtggctgtactaatttacattcccaccaacagtgtataagagttcccttttctccacaccctcaccagtattcattattgcttgtcttttggataaaagc

SEQ ID NO: 162 - DNA, 120 bp, synthetic construct
  source 1..120: mol_type = other DNA
cattgaatatgtatactgctttgagtagtatgggcattttaacaatagtcttccaattcactaacatggaatatctttcagtttttttgtgtcctcttaaatttctggcatcagtgtttt

SEQ ID NO: 163 - DNA, 120 bp, synthetic construct
  source 1..120: mol_type = other DNA
acagagaatgagagctctctggtgactctttgtatgatcctactggatgaaggccccacccttatacctcatttcaccttaattaactccttatagtggctatcttgaaatacagatata

SEQ ID NO: 164 - DNA, 120 bp, synthetic construct
  source 1..120: mol_type = other DNA
caaagacatcaaagcagccattataaccctgctccatgatgtaaggtgtaactcttgaaatgaatagaaaaatggaaattctgagtagagaaataaaatcttcaggaagaaccatggaaa

SEQ ID NO: 165 - DNA, 120 bp, synthetic construct
  source 1..120: mol_type = other DNA
tcccgcattatttcacttaggaatgatgatctccagcttgatccatgttgctgcaatagaaatgatctcattcttttttatagctgtatagtactccatggcatatatgtatcacatttt

SEQ ID NO: 166 - DNA, 120 bp, synthetic construct
  source 1..120: mol_type = other DNA
tgtgtagccttatttctgggctctctattctgttccattggtctatgtgcctgtttttgtaccagtaccatgctgttttggtcactgtagccttgtggtatagtttgaagtcaggtaatg

SEQ ID NO: 167 - DNA, 120 bp, synthetic construct
  source 1..120: mol_type = other DNA
gaatatgttgagccaaacttgcatcctggggttgaagcctactcaatcttgatggattagctttttgatgtgctgccagatttggttttccagtattttgttgaggatttttgtattgat

SEQ ID NO: 168 - DNA, 120 bp, synthetic construct
  source 1..120: mol_type = other DNA
attttcatagtcttgacttctatttttattgctctgtgatccaagagtgtgtttggtatgatttcagttcttttacatttgttgaggattgttttattccaattatttggtcagttttag

SEQ ID NO: 169 - DNA, 120 bp, synthetic construct
  source 1..120: mol_type = other DNA
atatgggcccccaatctcttctggcttgtagggtttcagctgagaggtccactgttagcctaatggagttccttttgtaggtcatgtgccctttctctctagctgcctttaaaagtcttt

SEQ ID NO: 170 - DNA, 120 bp, synthetic construct
  source 1..120: mol_type = other DNA
tctggattgtatttctgttatttcagccagtacagcctgattaaaaactcttgttggggaatgggtgtggtcatttggatggcatacaatactctgaacatttgagttactggagctctt

SEQ ID NO: 171 - DNA, 120 bp, synthetic construct
  source 1..120: mol_type = other DNA
gcacctgtaagaggtgggtagagacctgggaggtcccacccagtaagaaggagcaagattgaggacccacttaaaaacgcagtcttaccatgtgttggtagagcagctgttccgtgctgt

SEQ ID NO: 172 - DNA, 120 bp, synthetic construct
  source 1..120: mol_type = other DNA
tttcaattgaaggtgctatattaacttgtctttctctatgagagccatgcacactggctgcttctggtcggccatcctgactactcccctggaattccttttctataagaatgctgcatt

SEQ ID NO: 173 - DNA, 120 bp, synthetic construct
  source 1..120: mol_type = other DNA
aggtgttttcagtccactggtcacaatactcctatgggtggtaccggccaaaccacttcatcgaggtggtggcagtgggattcatgctccttcatgtgtgccagcatctgcagaagtata

SEQ ID NO: 174 - DNA, 120 bp, synthetic construct
  source 1..120: mol_type = other DNA
caaatagtatatgccagtaaagtaggtgaggcaagtctgccttgggggtaagctgtgggtgggctagcatgtattggcaggggctggtctgttggaactctgagatggtcaagaattgtc

SEQ ID NO: 175 - DNA, 120 bp, synthetic construct
  source 1..120: mol_type = other DNA
gacattgttcttggcaaagatatttttggacttaacacccaaagtacaggcaacaaagaaaagataaataagtggaacgacattaaactgagaagtttcaagccaagtgtagtggctcat

SEQ ID NO: 176 - DNA, 120 bp, synthetic construct
  source 1..120: mol_type = other DNA
ttaccatgttccattacctggatcacaactccttgccttatcttaaaatcactcatattcccttccactaaataataaaaatgggcagaggatcagaaaacatacagatggccaactgat

SEQ ID NO: 177 - DNA, 120 bp, synthetic construct
  source 1..120: mol_type = other DNA
atatagggaacaacagttcaagtgaatgcagggttttcaacaggaaccatggaggacagatgacagtgaaatagcatctttagagttctaaaagaaaagcactgctaacccagaattctg

SEQ ID NO: 178 - DNA, 120 bp, synthetic construct
  source 1..120: mol_type = other DNA
agacagaacaaaaccaaagtatgtatgcagctgataacagagtctaaaaagcaaaaggtaacagaactgagaggagaaaatagaaaaatctacattatacttagcaatgtcaacactcct

SEQ ID NO: 179 - DNA, 120 bp, synthetic construct
  source 1..120: mol_type = other DNA
tgtgaaccactgtgcctggccaccccaacatttataattaacatttataaaatactcctcagtggcagaatatatattcttttcgagggcaagtggaacattaaaaaagatcttattctg

SEQ ID NO: 180 - DNA, 120 bp, synthetic construct
  source 1..120: mol_type = other DNA
tcaggaatgaaagagggcatatgactacagaccttacattcaaaggataaaaagttaattgtggaggaaatgggccaatttcttgaaagacaaatcctaacaaaactcataaagaagtag

SEQ ID NO: 181 - DNA, 120 bp, synthetic construct
  source 1..120: mol_type = other DNA
agtggcttacagctataatcccagcacttgggagccaaggcaggaggatcacttgagttccagaccagtctgggcaatatagcaagaccccatctcaacaacaacaacaaagagacagca

SEQ ID NO: 182 - DNA, 120 bp, synthetic construct
  source 1..120: mol_type = other DNA
gcccagatccatcagaagactcattgtctatggaggctagagccttaagaaatatactttttcaatagtaagacttgggtctaaattacttcctgatccctgggctacagattggatgtt

SEQ ID NO: 183 - DNA, 120 bp, synthetic construct
  source 1..120: mol_type = other DNA
gaaatgactgtacataccagtacacctcatggacacagacatcagaatcttcaataaatattgacagatcaaactggaatgcaagaatgcttcagtacttgaaaatggatgtatttcatt

SEQ ID NO: 184 - DNA, 120 bp, synthetic construct
  source 1..120: mol_type = other DNA
gcaaagacaatttcatggaaaagtgataacctttaagaataataggctaggattaattgaatacctgtgtgcaaaaaaaaagtgaaccttgttccttacctcacatttagctcaaggtgg

SEQ ID NO: 185 - DNA, 120 bp, synthetic construct
  source 1..120: mol_type = other DNA
ttgcagggtgggggttgacaagcatcatgatgaaggagtttctttgcatgatgaaactgttatgtgtctcataatcatggttacatgactccctctatttttcaaaactcatagcaacag

SEQ ID NO: 186 - DNA, 120 bp, synthetic construct
  source 1..120: mol_type = other DNA
tgggtgagggaaggctttacacaagaaagaggcatagaagtacctcaaatgaaaattacagttctttaaaatgtcatctgtgactttgattatttatggactgactggtaggccacatag

SEQ ID NO: 187 - DNA, 120 bp, synthetic construct
  source 1..120: mol_type = other DNA
cattttagaatttctctaatccaattgaactgttatgatacctaagcattgctcaggaactctggcttgaacctcaaagctcttcctgacttagatgataaacagttacctccccatgag

SEQ ID NO: 188 - DNA, 120 bp, synthetic construct
  source 1..120: mol_type = other DNA
gttctaaactttagtacactggggaatttttcaggtttattttacatgaacatcactttcaaaatctcttcaaataaaatgattcaaaatttagatttggcttctggggaagggggatta

SEQ ID NO: 189 - DNA, 120 bp, synthetic construct
  source 1..120: mol_type = other DNA
tcccagttcctacatctttctgatgttctaatttcaatgagttgtccttttcaaaatcattttatggtattgttacctcttttccttaaggtgaacaatatcgctgcaagctgctttgct

SEQ ID NO: 190 - DNA, 120 bp, synthetic construct
  source 1..120: mol_type = other DNA
aagatagtctcattgttagctgaattacagtactgtagcatttttatctgttgcttcgctgaaaaattttcctcctatgtaaatacaaagtgaaagattataagcaactcgccttaacag

SEQ ID NO: 191 - DNA, 120 bp, synthetic construct
  source 1..120: mol_type = other DNA
ttccatctcaaataagaaccccttctacaaacaagccctgggccactttgaaataatgtgagctttgtcatacgcttgtttatttaaagagcagcacttctacttcctaaggatttacgt

SEQ ID NO: 192 - DNA, 120 bp, synthetic construct
  source 1..120: mol_type = other DNA
atggaagtaagaggatagagtgaatggcagatgtgtagatgtggcacagctgtatgtatctccttcctttcatttttcatgtcacattactagctctatgtgtttgtcttttattggttt

SEQ ID NO: 193 - DNA, 120 bp, synthetic construct
  source 1..120: mol_type = other DNA
tgaggtgcatcgccagcaagttcagtcaagctgttgctcttctttgaggtctattctactcatcagtttattacatctgagaaagaatgatggaggtaaaagtaaacaggaaacaatttc

SEQ ID NO: 194 - DNA, 120 bp, synthetic construct
  source 1..120: mol_type = other DNA
ctctgtgtggacttcagccgtcatgtacgatttcattccaccagtactttaagccttatgttaataatgctggtggaagggaaaaaacaaaacgtttgttctccatttcagagagagtaa

SEQ ID NO: 195 - DNA, 120 bp, synthetic construct
  source 1..120: mol_type = other DNA
gaccctagagatcacaggcaatttttaggtcctaaagatgaggcaatttagttggaaagataatcacatagctggtcagtaacagattgtcttttagtctagcaaacttttcaccatttg

SEQ ID NO: 196 - DNA, 120 bp, synthetic construct
  source 1..120: mol_type = other DNA
gaaaaggaaggaagccagaatcaagccaagtcatcctcacatctaatttgtagagcagataaatgtgttatgaagatcttggtggttgatttatggccctgaaagtcatgatgatatgcc

SEQ ID NO: 197 - DNA, 120 bp, synthetic construct
  source 1..120: mol_type = other DNA
tccagtaggtactatcgttattttcaatttacagaagaggcccagactcataaagtgaacctaagtcattttttcaagatcccatagctagaaagtgatctagttcaggtccaccggact

SEQ ID NO: 198 - DNA, 120 bp, synthetic construct
  source 1..120: mol_type = other DNA
taagacaaaattcctgccttagtgatcttaccgcctaatatgtgaaataatcaagtaaagaaatacttttgaggagaagtaagcacagggtcctgtgccaacagagggactagctgttgg

SEQ ID NO: 199 - DNA, 120 bp, synthetic construct
  source 1..120: mol_type = other DNA
acggatacatagttagccaaatctgaaagattacaagtttttcatgagttcttaactggaagagagcaaacaaatgacagttaaaggggagctttatagatgagaatggttgggtaggtg

SEQ ID NO: 200 - DNA, 120 bp, synthetic construct
  source 1..120: mol_type = other DNA
aaagtcctcgtagcttctgggactatatcagagtggcttgccggaaagtttcacagaattgtatctgcagcattgaaaatatggaaaatgtcagttcttctagagctaaggtaagacatt

SEQ ID NO: 201 - DNA, 120 bp, synthetic construct
  source 1..120: mol_type = other DNA
aaatgtgtcaacatttgatggaactgcataacttgtattttccaaatgatcagttcgtggaattacaaaatcatgtatgggtaaaaagatcaattcaaagtgcaaggtaggtcagtagat

SEQ ID NO: 202 - DNA, 120 bp, synthetic construct
  source 1..120: mol_type = other DNA
cccgaagtgctggattacaggcgttgagtcaccatgaccaactcattatttttgaattacctaatatttaagtttccagttttgacttgtgatacagtaaatttggtagatatagcctac

SEQ ID NO: 203 - DNA, 120 bp, synthetic construct
  source 1..120: mol_type = other DNA
ccaatcttcaaccaaggggttgtagcaacaaggaacttcctgcttcaatatctttcaactctctcaggttggatcagttttcttctctgtctcacgtatttaagccagtaaatttcttca

SEQ ID NO: 204 - DNA, 120 bp, synthetic construct
  source 1..120: mol_type = other DNA
catgttccaaatcctgcatttatatctttgttttgctcaggcctcaaacagattccatttagtggggaaagagaattatttgagttgcctagttatgctgggaagagtctgtggagaaag

SEQ ID NO: 205 - DNA, 120 bp, synthetic construct
  source 1..120: mol_type = other DNA
tcacactagaatcagcactcttagaaaaatgactttatctcagcaggcactgacttatctcattcttttctgaactcacccatcttccgcatctgctcttgggtcatatgctcttataaa

SEQ ID NO: 206 - DNA, 120 bp, synthetic construct
  source 1..120: mol_type = other DNA
ccatctttgctttagcctaaagttgtttgtctattcacatcctaggtatagagactaagcagaaagttgtggaggtggagatttttatttccttgggcagacaaacagaagttggagctt

SEQ ID NO: 207 - DNA, 120 bp, synthetic construct
  source 1..120: mol_type = other DNA
tacattcttatcatacacccagtggagttatattaaattgaccattttctgagccatagtttatctcagtgaattgcagaggattgaaattgtgtaaagtatgttctctaaccacagtgg

SEQ ID NO: 208 - DNA, 120 bp, synthetic construct
  source 1..120: mol_type = other DNA
atgctgacagctcattccctgaaacaggaaagaaggtggagtgtataggtattaacataattaggctggtcagtttggtggtggtaaaatgaatttcttctcttctaattgtgtctgttt

SEQ ID NO: 209 - DNA, 120 bp, synthetic construct
  source 1..120: mol_type = other DNA
tgctgcttctagcctgacaggttttaactactgcctatattgactcctttgtgacctttcctatcccatagtttggtgaattcactagacttgcagacatttctagagtatgttttttcc

SEQ ID NO: 210 - DNA, 120 bp, synthetic construct
  source 1..120: mol_type = other DNA
tcttcttccttttagggtagagcctggatcagagtagcactcatggaaaaacatttatctgaatacatctctacagctctgagagacttcaaaacaaccaggtttaaaagtccttttaat

SEQ ID NO: 211 - DNA, 120 bp, synthetic construct
  source 1..120: mol_type = other DNA
aaatttagtttctcaagtgctgtatcacatttcagatgtcccattgccacatgtagctaatggtaacccaattggacagatttagagtgttttcctcatcacagaaggttctattggtcg

SEQ ID NO: 212 - DNA, 120 bp, synthetic construct
  source 1..120: mol_type = other DNA
taaccatgctttttcatagaaaggaaatgattcagctctaaaaaagtacatgaagtaaaaatattcctgtaaccatacataaacatacagtcttcaaacagaaacatggcttggcgtaca

SEQ ID NO: 213 - DNA, 120 bp, synthetic construct
  source 1..120: mol_type = other DNA
acaaactaaatgaattccaagatgaccagtgtcagggcgtctatacaccatgatgccccagctcagttaactcctgtaagtgctgaaaagtatttacttttaaaaaagagggctagatga

SEQ ID NO: 214 - DNA, 120 bp, synthetic construct
  source 1..120: mol_type = other DNA
caagaattctattactggactcctggccctctactctacccacagttccaaaccctcagccaagattcctgagatattataccactagacaggaatatcagtaagttctattaactttaa

SEQ ID NO: 215 - DNA, 120 bp, synthetic construct
  source 1..120: mol_type = other DNA
ggactaacgtttaaggaacttgaccaggtttacagagtcatactttgaatcaccaagtttttagcctactcaaatttattggtttccaaatctgtaatgctgctctctccaaagggcaga

SEQ ID NO: 216 - DNA, 120 bp, synthetic construct
  source 1..120: mol_type = other DNA
tcccatttttcccatccacttcatcctgaccaccctgatcaagccaaaagagagggacagaataaagaaaacctctctgtacagaggatttcctgtggacaattcaaaagagtaatttgt

SEQ ID NO: 217 - DNA, 120 bp, synthetic construct
  source 1..120: mol_type = other DNA
agttacaaggattgtttcctgttgcattgagtcctgggcagaagttttgtcccaaaaattcattatgctgcaaagcctataacacaagtgggagcagggcaaggtaaacagttttaaatt

SEQ ID NO: 218 - DNA, 120 bp, synthetic construct
  source 1..120: mol_type = other DNA
tgctgaagtactgaagccatgacagccaagatgcaatggttgtgagattgaccaacagacctgaaaaaatctacaaaaagcaaatactaaaagtcaggcctgcttgagtaatttcatgca

SEQ ID NO: 219 - DNA, 120 bp, synthetic construct
  source 1..120: mol_type = other DNA
gcatctactcctactctagcagacaggacatgttcctgtcaagtatgatgttgaaggggaaaaaaatgtaactggtttcattcacctgttgattcctctatgtgcaaaatttaggggcat

SEQ ID NO: 220 - DNA, 120 bp, synthetic construct
  source 1..120: mol_type = other DNA
tcataacgaagaaggcatctgcctttggcttcaatccttagtcagaaagagaagaagtagttaacccaactgcctaggtcaccgtatgtttgggattgcttattgtgcaaatttaacact

SEQ ID NO: 221 - DNA, 120 bp, synthetic construct
  source 1..120: mol_type = other DNA
gagtgaagcctgagcataatgcacaaatgagtctccacatctaccaaacaagtattttttttttaattaacaagccccaaaaggcaccgtctttctctcattaaagaagcagggatgggt

SEQ ID NO: 222 - DNA, 120 bp, synthetic construct
  source 1..120: mol_type = other DNA
atgacactctgtagtatccgctgatgtattcatgtctatagaacaaaaatacgtatcatacatccaagattagtttaagaagccacagggcaggctagacttgtctgttacagacctctg

SEQ ID NO: 223 - DNA, 120 bp, synthetic construct
  source 1..120: mol_type = other DNA
ctccccacttccaagttgctgcttaatctctaccaagcccctcaaacttttcttgtgaaggtcatcagtatttactaaaaacaaaatatacttttcagtccctttattgcttgctctctc

SEQ ID NO: 224 - DNA, 120 bp, synthetic construct
  source 1..120: mol_type = other DNA
agctctgccatgaaaaggggaaccaaatcaccgcagtcaactcagcattcttagacagattttctacccacaaaactctttccacaaatgacagtgtataaagttaagcaggaaaaaaag

SEQ ID NO: 225 - DNA, 120 bp, synthetic construct
  source 1..120: mol_type = other DNA
gcatgccaacatccctgaaacaccataacaaaacaatataattgacagtaagggtgtgagttgaaactgaaaaagaggtaagtgacacatcatttaaatggcgtaaaaacaagagaacat

SEQ ID NO: 226 - DNA, 120 bp, synthetic construct
  source 1..120: mol_type = other DNA
cttaaattttagcaattctgaaatttacattattatttactgtgttcaccacattgtgcaatgtatctccaaagaaaaatccttattcctcctgtgtaactgaggttttgtaccctttga

SEQ ID NO: 227 - DNA, 120 bp, synthetic construct
  source 1..120: mol_type = other DNA
aatcactaatcatcccaggagggattaaatcatatacacaggccactttaacatagtccaaatgcttatttaaaaaatgatactggggtcaacgagaagcagtgggaggaagaacatcag

SEQ ID NO: 228 - DNA, 120 bp, synthetic construct
  source 1..120: mol_type = other DNA
cactgtgactgaaactaggtaaggatcacaacactaacaaaagtgctaaccatataacaggaaaagctgagtcccacccccatcacacccctaagtcaaacatatatatttaaaaagtga

SEQ ID NO: 229 - DNA, 120 bp, synthetic construct
  source 1..120: mol_type = other DNA
atggaatattattcaaccttacaacggaaagaaatctgacacatgctacatgaatgagccataaagacaacatgctaaaggaaatgagtcagttaccaaagaatatctactgtatgattc

SEQ ID NO: 230 - DNA, 120 bp, synthetic construct
  source 1..120: mol_type = other DNA
gggagaaaataaaacagcatacattatttagactgcttcctaagttaaaaattaagttatctgtgctttggggagagtggtaggacacaaagcacactgctggaaaagctggacttcctc

SEQ ID NO: 231 - DNA, 120 bp, synthetic construct
  source 1..120: mol_type = other DNA
aggacacttttggcatgaagcaaaccgaactgcaaaaacagtaccatcatctgtgataactagtttgtgaagaacctagtctggaaagaacattattccaatgtttctacttatgagctg

SEQ ID NO: 232 - DNA, 120 bp, synthetic construct
  source 1..120: mol_type = other DNA
caatggagtgcacagaccccatctgcttccaagttgagctgttcagaaaacccttggcaccttaaatgaacatgcaatcttctcatacagataatccattcattctaagattttccaaat

SEQ ID NO: 233 - DNA, 120 bp, synthetic construct
  source 1..120: mol_type = other DNA
ttcgtttattattggaatactgccatgttcatttattcatgttatgagcttggctgctttcacactaaaacggtagagctgactacctgagacaaacaccacctgatctgcaaagcctaa

SEQ ID NO: 234 - DNA, 120 bp, synthetic construct
  source 1..120: mol_type = other DNA
aataaaaataacagccccaaaataaccagctaaattgacttctttgaagaatggaccaatgaactgggagtactaatgttttgggtgacagaggggttaagaataacagaaaaggccagg

SEQ ID NO: 235 - DNA, 120 bp, synthetic construct
  source 1..120: mol_type = other DNA
agctccatgagcagagttttatttttgcccattttgttcactactgaattcacatccctaaagcacagcacaggccctataagaacaagttgaatgaatcagtgaacaaaagtgaacagc

SEQ ID NO: 236 - DNA, 120 bp, synthetic construct
  source 1..120: mol_type = other DNA
tttgtagaaggaggagttgacataaatctccgctaatttttctatgagtggcttatcctgcttggaaggctctatgatctctgtggctttgcaatcagtggataaaaaggaaacacaaac

SEQ ID NO: 237 - DNA, 120 bp, synthetic construct
  source 1..120: mol_type = other DNA
aaacaccaacagcactcacagacaacaaaatatttgtgttgactggtatcagaagactgcatcaacagaaattcacaaagccacattttaattagccaccacattgctaaacttcagcca

SEQ ID NO: 238 - DNA, 120 bp, synthetic construct
  source 1..120: mol_type = other DNA
aaagaaaagaaaacactccaagccaaccttggatttgcagggcattttgcattagtgcttggtccttacctatcataattcatgagacctgaaatagctatcagtatgctctggtgctta

SEQ ID NO: 239 - DNA, 120 bp, synthetic construct
  source 1..120: mol_type = other DNA
acctgaaccattcagctttggatgatgagatcatctgaactcagcgtggcctgaagtctgactcttagttcatcccctttattaaaacctaattaagaaacatggccaatgaatatctaa

SEQ ID NO: 240 - DNA, 120 bp, synthetic construct
  source 1..120: mol_type = other DNA
caaaattaagtagcatttccatgagtgctcatcaaggcagaccaacatgtgcaaggggaaaaaattttaaggcctcatctgttatatggtcaagaagacaatcatattaggccttcccaa

SEQ ID NO: 241 - DNA, 120 bp, synthetic construct
  source 1..120: mol_type = other DNA
ggacagtcttcccagacattgaattagaatctctggcagtaggtctagggaatccatattttaagaagcaacccaggtaatctgcaagtatttacaagtttgagaactaactatggactg

SEQ ID NO: 242 - DNA, 120 bp, synthetic construct
  source 1..120: mol_type = other DNA
aagtttggaacctcctagagacttgttgattggctttggctgaaatgctgacagtgatatggacaatgaagtccaggttgaggtggtctcagatggagatgaggaacttgttgggaactg

SEQ ID NO: 243 - DNA, 120 bp, synthetic construct
  source 1..120: mol_type = other DNA
aatccacaaggccagagcctcccaaggccctgggagcccacctcttgcatcagtgtgacttggacgtgagatatggaatcaaagaagataatttcagagctttaagatttgactgcccct

SEQ ID NO: 244 - DNA, 120 bp, synthetic construct
  source 1..120: mol_type = other DNA
cccccctacaccctcatcacagacatccttccctacattcttacctgctttgtttttcttgataatgcttttcatttgttaactgactttcactccaacagaagaggaagaaattacttt

SEQ ID NO: 245 - DNA, 120 bp, synthetic construct
  source 1..120: mol_type = other DNA
tgggaagcttgagcttggtggggggaggggcatccaccattactgaggcttgagtaggccctcacagtgtaaacaaagcctctgggaaattcgaactgggtagagccgaccacagcttgg

SEQ ID NO: 246 - DNA, 120 bp, synthetic construct
  source 1..120: mol_type = other DNA
gaagaacataaatgacctgatgaagctgaaaaacacagcacaagaacttcgtgaagcaaacacaagtatcaatagctgaatcaatcaagcggaagaaaggatataagagattaatgaaat

SEQ ID NO: 247 - DNA, 120 bp, synthetic construct
  source 1..120: mol_type = other DNA
agagatggaggaagatctgtcaagcaaatggaaagcaaaaaaagcaggggttgcaatcccagtctctgataaaacagacttaaaaccaacaaagatcaaaaaagagaaagaagagtatta

SEQ ID NO: 248 - DNA, 120 bp, synthetic construct
  source 1..120: mol_type = other DNA
tacaaaaaattagccgggctaagtggtggaagcctgtagtcccagctacttgggaggctgaggcagaagaatggcgtgaacccaggaggtggagcttgcagtgagctgagactgcaccac

SEQ ID NO: 249 - DNA, 120 bp, synthetic construct
  source 1..120: mol_type = other DNA
ataccaaaacctggcagagacacaacaaaaaaagaaaatttcaggccaatatccctgatcaacatcaatgtgaatatcctcaataaactactggcaaactgaatccagcagcatatcaaa

SEQ ID NO: 250 - DNA, 120 bp, synthetic construct
  source 1..120: mol_type = other DNA
caaaaaaaagcctgtatagccaagacaatcctatgcaaaaagaacaaagctggaggcatcacgtgacctgactttaaactatactacaaggctacagtagccaaaacagcatggtactgg

SEQ ID NO: 251 - DNA, 120 bp, synthetic construct
  source 1..120: mol_type = other DNA
ttataaatcattctactataaagacacatgcacacatgtatttattgcagcactattcacaatagcaaagacttggaaccaacccaaatgcccataatgatagactgaataaagaaaatg

SEQ ID NO: 252 - DNA, 120 bp, synthetic construct
  source 1..120: mol_type = other DNA
gtgccttcacagtctattttccctagatatcctaacaagcaacatagggcaatggctgcctgaaggtaaagaatagagtggaacaaaacaccttactggtaagataaaatcaaacagaac

SEQ ID NO: 253 - DNA, 120 bp, synthetic construct
  source 1..120: mol_type = other DNA
gctgatacagagcaagaatccttggactctcatcacttatcaatcccagaaatatacctcaatagcaatggaacaaagtcccttggaggaagagtgactaaaaggaggaagagaaaaaga

SEQ ID NO: 254 - DNA, 120 bp, synthetic construct
  source 1..120: mol_type = other DNA
aaggtaaagttctagctaatgatgaacctgcagttctgcaaatgacagttaactccatagatgtctgcaaagcctgctataatcatttttcaccccctatctgtacacccaaatagaatg

SEQ ID NO: 255 - DNA, 120 bp, synthetic construct
  source 1..120: mol_type = other DNA
cacagcacctagaaccagacctgacatgcgttgcaaatgctcaataaatacctgctcgcacacaaaaaaaagtggcttttaaaagcacattaaaagtgcacagaaaacgcttacttatac

SEQ ID NO: 256 - DNA, 120 bp, synthetic construct
  source 1..120: mol_type = other DNA
agaagacatcactttggtagggtcatcctttaagaatatgaagacgtggtacatacataagcacgtttcaaacaaagtggatgtctgagggtagtgaatattcagatagagaaggaaggt

SEQ ID NO: 257 - DNA, 120 bp, synthetic construct
  source 1..120: mol_type = other DNA
acgctgcacaaagacaatgggagttaggtaaaccaggagcaagatctaacagaaaaatctcttactctttcagtggactcttccctctaaatgtgtaaaacaacatactaatgattgggc

SEQ ID NO: 258 - DNA, 120 bp, synthetic construct
  source 1..120: mol_type = other DNA
accctcctgcccatgacatacagcacagttgttgtaaaccactgaacatgaacctggaacacagggaataaaatttaccccaaaatttcctgtcacctctattacattttagtggataat

SEQ ID NO: 259 - DNA, 120 bp, synthetic construct
  source 1..120: mol_type = other DNA
tagattttggttttgtaaatatctcctccataaaaatcaacagctgattctaggtctgaggcagggtaagtacacagtgagtctggaactgctcgctgtgccaagcaaatattcaaagaa

SEQ ID NO: 260 - DNA, 120 bp, synthetic construct
  source 1..120: mol_type = other DNA
tccagtggggactgaagttggtgaagtttaatgtagaatggagttctggaataatgtcagtttatctctcctcataacactaatcaattaccaaggggaaagggtgacattatagccaag

SEQ ID NO: 261 - DNA, 120 bp, synthetic construct
  source 1..120: mol_type = other DNA
tttttggaatgtagatgactatctgaatggtgatgctgctatcaaacacaaatcaaaagtaagataaatgacagcagcccttcctctacctccagaaactgtatttagagttggagccag

SEQ ID NO: 262 - DNA, 120 bp, synthetic construct
  source 1..120: mol_type = other DNA
tgagccaccatatccagccacatgtggtgcattttttaaaaaagtctggcagttactttgagagtcaaacatatacctaaaatgtggcccagttatttcactcctagtttagctaaaaca

SEQ ID NO: 263 - DNA, 120 bp, synthetic construct
  source 1..120: mol_type = other DNA
aaaaggatggatgagggttagacttgtctggcttgaaaagcatattatgatataagtcaagtgcagggacagactacatgctcatcatcagaatctctgtattttttttcaagaccagcc

SEQ ID NO: 264 - DNA, 120 bp, synthetic construct
  source 1..120: mol_type = other DNA
gcattatgctctgggaatgtggacaaaccaaaaaaccagtctactcaatcatggcgatctgctcagactgctagaagaaggttaaatccactctctatgaagatatcatccaaattttca

SEQ ID NO: 265 - DNA, 120 bp, synthetic construct
  source 1..120: mol_type = other DNA
acccagcaaattcaaggtacatggctgggttttaatctgtgaacacaatgaatggtaataattagccaaaattctgttctcttgaagcagtgaaagagaaggcacaagtacagtcagcag

SEQ ID NO: 266 - DNA, 120 bp, synthetic construct
  source 1..120: mol_type = other DNA
ttttaaaccatctccccatgtattcagaaaccaaaatacaccaattccaacactagcaatcacttcttctactgccatccccatttgatgttccttcagccactgaggaaaagacttctt

SEQ ID NO: 267 - DNA, 120 bp, synthetic construct
  source 1..120: mol_type = other DNA
ggaagccttcaaatggctttacactttacctgatcccagccgattcatgttatttggcctgattatgtatcttagccaactcaaaaagccctttcaaataagacagaagggatttgcata

SEQ ID NO: 268 - DNA, 120 bp, synthetic construct
  source 1..120: mol_type = other DNA
attttattgcctttaaaaggttgatccatgggctttcatgttatatccgatttgacagatttgtcctgagaggtccagtgttgattatattcaggcccaaagcctgcttgtatggtggtt

SEQ ID NO: 269 - DNA, 120 bp, synthetic construct
  source 1..120: mol_type = other DNA
tgggtcttcagtttgcaacaacgtatcgctgttaggttttcttaaatgttactttagagaagaaaaaatccttttccatctcccctgtgggttccctagctgggttcctagaaattaaac

SEQ ID NO: 270 - DNA, 120 bp, synthetic construct
  source 1..120: mol_type = other DNA
aacagctttaacaattcagcattaaaacgttctgcaagcttgggtcacagagcatgaactttcttcttcttcatgctctttgcccttgtgtctatcctacactaagtacacagaaaaatg

SEQ ID NO: 271 - DNA, 120 bp, synthetic construct
  source 1..120: mol_type = other DNA
gaaaaagctgttctagtaaaggaatgcaaaatccttaatcgaaagagatatgttgggtcatgtataccattcatgaggctggagtttagttttcagaggggggcagtaacaaaatgaggc

SEQ ID NO: 272 - DNA, 120 bp, synthetic construct
  source 1..120: mol_type = other DNA
tgcaatttacatgcgtgttacatcccaaattttcttaatctaatctgcaatttggccagcagtttcccagagggaacggagatgttcaaatcctaaggctgcccataaaatgctatccaa

SEQ ID NO: 273 - DNA, 120 bp, synthetic construct
  source 1..120: mol_type = other DNA
ttgtatctaccactgaccacaggaaggactttggctttgatctgaatggcactggaaggcacaggaaagttctgagtgaagaaatgatatctatatttaaagcaggagtgtccaatcttt

SEQ ID NO: 274 - DNA, 120 bp, synthetic construct
  source 1..120: mol_type = other DNA
gtccttgttctccgtgagtctagtacatgtcaactacatgaagatcaatatccctgctcccttccagtttataattcaatcatcggaattgcagtaaaaattatgaacagaggctgggtg

SEQ ID NO: 275 - DNA, 120 bp, synthetic construct
  source 1..120: mol_type = other DNA
gctactcagctaataaaatgatcctggtttcttaccagagcctaatagatagaagctcacatatgcattatttgttttggaagcactggcagggtttcatttgagaaaaaaatgggagct

SEQ ID NO: 276 - DNA, 120 bp, synthetic construct
  source 1..120: mol_type = other DNA
tgagactggggcctaataaaaaggagcatctatacaggagctcaaatgggctgtattttgtcgcattccgaagacaggcccgaattctgagaagggcaagtggtaaaagtattatccagt

SEQ ID NO: 277 - DNA, 120 bp, synthetic construct
  source 1..120: mol_type = other DNA
cccttgtgtagtgaggaaacctcttgcatagtggtgcaggatatggaaggcatatttagagtcagtataaatattgatgtgtagtccctttgcaagagcaagggcttgacttcaggcaat

SEQ ID NO: 278 - DNA, 120 bp, synthetic construct
  source 1..120: mol_type = other DNA
aattatgacaagataggtaacagatgaggaagaaatttgggtttgactgaagtaatgggggctgtctgtgaagccttgaggcagtacagagccaggatgagccagaaggaggaatttcac

SEQ ID NO: 279 - DNA, 120 bp, synthetic construct
  source 1..120: mol_type = other DNA
tgccttggagaaatggatcattccaaggttgggacatggaaaatacaaaataagcctgagcattctctgatgccagaaatcaagaaatgcattaaaaaagaaaaagagtccgggcatgat

SEQ ID NO: 280 - DNA, 120 bp, synthetic construct
  source 1..120: mol_type = other DNA
ggctgaggaactgtcacagatcagagaaaattaaggatatttagcagttaaatgcaaagtgagatcatcgattggatcctgggcagaaaaaggacagtggaaagacaagtgaaatccaaa

SEQ ID NO: 281 - DNA, 120 bp, synthetic construct
  source 1..120: mol_type = other DNA
taaaaaactcagtcgtctcgtttgaacggttaccgattttctaacaaatatatacacaacgcccaccaacctttccagacacacactctcagcgaaactggttttacaatttactcactc

SEQ ID NO: 282 - DNA, 120 bp, synthetic construct
  source 1..120: mol_type = other DNA
gtggatgcttgcgccccagggcctaaaaaaatcaggcactgaatctaacccaaggaaggaaaggggagaaacttactgaatgaaaatattaccatagtttaaatgttattctttacactc

SEQ ID NO: 283 - DNA, 120 bp, synthetic construct
  source 1..120: mol_type = other DNA
gctcacccagataagtgaaaagaataaaattttatgataccagaaaaaatgaaaacatttccagcaagatctgaaggcactacaggaggagactgaacaaaaatggagaaaacacacacg

SEQ ID NO: 284 - DNA, 120 bp, synthetic construct
  source 1..120: mol_type = other DNA
tgctatccctcccccctcccccgaccccaccacagtccccagagtgtgatattccccttcctgtgtccaagtgatctcattgttcaattcccacctatgagtgagaatatgcggtgtttg

SEQ ID NO: 285 - DNA, 120 bp, synthetic construct
  source 1..120: mol_type = other DNA
gattaaagccagcattttataaatgtattgcactgtatagaaatgagtcattttaacttgtaagttagcattgtttttggagctagccatagaattttagagaaaaaggaccttcctcat

SEQ ID NO: 286 - DNA, 120 bp, synthetic construct
  source 1..120: mol_type = other DNA
ctatcttagggttcagagaaaatattcatttggtttgaattagacagactagaacatgtgtgcatgccaagaggacaagccataaagaaagaaagggttattggtagtgtcaggtccctt

SEQ ID NO: 287 - DNA, 120 bp, synthetic construct
  source 1..120: mol_type = other DNA
gacctcaggtgatccaccacctcggcctcccaaagtactaggattacaggcgtgagctacggctcccagcccatcttgaattgtacttcccataatccccacgtgttgcgggagggacct

SEQ ID NO: 288 - DNA, 120 bp, synthetic construct
  source 1..120: mol_type = other DNA
tgagccaccacatctggccgaggtaaatgttttaattagagaaaattgaaataaatatctggcccataactatactttctctctgaagttgatggatgtgctgagggtatgggtgtgaat

SEQ ID NO: 289 - DNA, 120 bp, synthetic construct
  source 1..120: mol_type = other DNA
accgaacataatcacaaattgtcgtaccatcatttgtttccctaaaagcccatttgtctttccacaaaagtatatttgctttcccatagaaccctttctctcctcctcccttttcccata

SEQ ID NO: 290 - DNA, 120 bp, synthetic construct
  source 1..120: mol_type = other DNA
aatgaactcttagctggacactcttctctaaagaaccaagcagagtaaggttgttggcagaatccatttctttttggttccaagactgagtttcctgtgtccttgctgaatgtcaaccag

SEQ ID NO: 291 - DNA, 120 bp, synthetic construct
  source 1..120: mol_type = other DNA
taagagcccagatgctggagccagaacaccttggttcatgtaatttgctttatacagcagacaagagaccaattaagaagtaattcatttggttataaagtttatttagggccaggtgca

SEQ ID NO: 292 - DNA, 120 bp, synthetic construct
  source 1..120: mol_type = other DNA
ggtcagttaaacccatcatccacaagtatggctaaatggaggcccaaaatgtgaaactattttctccctttgattatgctccaaacggcacaaacaaaccagaaaaatagcaagaagatc

SEQ ID NO: 293 - DNA, 120 bp, synthetic construct
  source 1..120: mol_type = other DNA
acacagctttgagacaaaccacagatgtgttttctgttgtcttgaaatatgcctttgaatgtgttttaacactctattcccttccctttcccaccttatgctctcatgccttatgcacat

SEQ ID NO: 294 - DNA, 120 bp, synthetic construct
  source 1..120: mol_type = other DNA
actgagaaaagaggcatcaaagaaacattgtaaatgaagaatttacagaagctggtgactgagaacactgaaggtgaaagacaaagaagctagagatgacttcaaggtctgattcgttct

SEQ ID NO: 295 - DNA, 120 bp, synthetic construct
  source 1..120: mol_type = other DNA
ccagcctgggcaacaagagcaaagctccgtcacaaaaaaaaaaaaaattgctgggcctagtggctcatgcctataatcccagcactttgggaggcggagctgggcggatcacctgagacc

SEQ ID NO: 296 - DNA, 120 bp, synthetic construct
  source 1..120: mol_type = other DNA
caaggcacacagggactttgaagggtagcttaattgcctggtctctgctcctgttccattagtgatcttagtggactcatctaaacattgaaaagcagtttttaacacattaagtatttt

SEQ ID NO: 297 - DNA, 120 bp, synthetic construct
  source 1..120: mol_type = other DNA
tgtgtctcagacttgtttagttaaaggatcccactcacactctcttatttcccccttacagtttgttatggacagcagtgtgtccttgagaaattcatgttgaagtgctatcttcaatac

SEQ ID NO: 298 - DNA, 120 bp, synthetic construct
  source 1..120: mol_type = other DNA
tcacctcaaggtccagtatgttcaaaacaggcagagtaactgctagattcttttcctttgttttcaaaataacaagtgtgattctatatcacaatccaaaggtgactggccaatgaattg

SEQ ID NO: 299 - DNA, 120 bp, synthetic construct
  source 1..120: mol_type = other DNA
agcacggcattaggttatgaatggataatggttgtggggatactacagacatttgctatgttattcatcctttgtgtatgccatgtttccaatcctccatatataacaacccttgtgaaa

SEQ ID NO: 300 - DNA, 120 bp, synthetic construct
  source 1..120: mol_type = other DNA
ataattgaaatattataaacataaatatttttatgtaataaaaactaagcgggagagacaggaggtggaacaagatcactgaattggagcctccatcaattgtcctccccacgggaacac

SEQ ID NO: 301 - DNA, 120 bp, synthetic construct
  source 1..120: mol_type = other DNA
taaataaactggaaaggcagaataggccacgaaaacagcaattcctggaaaagttttggtgctatgctgggctcaaaaccagtggacttgaagggcaacatgacctagtgagacaccagc

SEQ ID NO: 302 - DNA, 120 bp, synthetic construct
  source 1..120: mol_type = other DNA
aggaagagaacaagagtctctgcctggtaattcagagaattcttccgcatcttatccaagaccaccagattttacctctgtgagtctgcaagagccacagcgcgacagggcttggggtgc

SEQ ID NO: 303 - DNA, 120 bp, synthetic construct
  source 1..120: mol_type = other DNA
tttcagtggaaatctacaggccaggagagagtgacatgacatatttaaagtgctaaaggaaaaaaacttggatcctaggatggtatgtctggagaaaatacccttcaaatatggaaaaat

SEQ ID NO: 304 - DNA, 120 bp, synthetic construct
  source 1..120: mol_type = other DNA
cccatctctactaaaaatacaaaaactagacgagcatggtggtgcgtgcctgtaatcctagctacttgggaggctgaggcaggagaattgcttgaacccaggaggcagaggttgcagtga

SEQ ID NO: 305 - DNA, 120 bp, synthetic construct
  source 1..120: mol_type = other DNA
acccaacactgcagcacccaaatatataaagcaaatattattagagctaaagagagaaatacactccaatatgataacagctggagacttcaacaccccactctcagcattggacagatc

SEQ ID NO: 306 - DNA, 120 bp, synthetic construct
  source 1..120: mol_type = other DNA
gatcagagcaaaataaatgaaactgaaacaaagaaaacaatagacaaaatcaatgaaactgaaagttggttttttgaaaagttaaacaaaattgacaaacctttagccagactaatgaag

SEQ ID NO: 307 - DNA, 120 bp, synthetic construct
  source 1..120: mol_type = other DNA
atcagataagagaaaaaaataaagggcatccaaactgaaaagaaggaagtcaaattatctttgttggcagatgatatgatcccatatttggaaaaactaaagactccagcaaaaacctac

SEQ ID NO: 308 - DNA, 120 bp, synthetic construct
  source 1..120: mol_type = other DNA
aaacattagctgggcgtggttgtgggcacctgtaatcccagctactcgtgaggctgagggaggagaattgcttgaactcaggaggcagaggttgcagtgagctgatattgtgccactgca

SEQ ID NO: 309 - DNA, 120 bp, synthetic construct
  source 1..120: mol_type = other DNA
gcaacaatataaatggaattgaaggtcattatgtcaagtgaaataagccaggcacagaaagacaaacttctcatgttctcacttgtttgcatgagctaaaaaatcaaaacaagcgaactc

SEQ ID NO: 310 - DNA, 120 bp, synthetic construct
  source 1..120: mol_type = other DNA
ggaatgaataagatctagtatttgatagcacaactgggtgattacaggcaacagaaatttattgtacatcttaaaataactaaaaaaatataattgggttgtctgtgacacaaagaaagg

SEQ ID NO: 311 - DNA, 120 bp, synthetic construct
  source 1..120: mol_type = other DNA
ttttagtcatcgtaatatctgggattgctattggcatgtgtggtcatgggttggggagggaaagcatcctgtaaaataagcaacagtgtcatagcctaaaaagcactgctaaatccaatg

SEQ ID NO: 312 - DNA, 120 bp, synthetic construct
  source 1..120: mol_type = other DNA
acttgagttgttctcttagtttcctttttggattgattattcattgctagagtataaaatgcaactaggccaggtgcaatgactcatgcccaggccaagaagggaggatcaagagcttga

SEQ ID NO: 313 - DNA, 120 bp, synthetic construct
  source 1..120: mol_type = other DNA
ataaatctctagtgctatcaggaaatactgattttctcactttatatccctgttctatctgaactcatcagtccctaatctccgtttgacctcaaatccaagccgtgggccttcagaaat

SEQ ID NO: 314 - DNA, 120 bp, synthetic construct
  source 1..120: mol_type = other DNA
ctggcgcgattttggctcactgcgtgcagtgctccaagatcgcgccagtgcactccagcctgggcgacagagtgagactccgtctcaaaaaaaaaaaacaaaaagggcaaaaatttacaa

SEQ ID NO: 315 - DNA, 120 bp, synthetic construct
  source 1..120: mol_type = other DNA
gaaatttgtttggggtttggatgggaaagaaaaatgactacaaatgggcctgaggaatcttttgggggtgatagaaatgtccttaaatggggttcgtaatgactatactattctatatgt

SEQ ID NO: 316 - DNA, 120 bp, synthetic construct
  source 1..120: mol_type = other DNA
ctgactgctagtacatgagtgagattttttctcaatattgtacgatcaaaacaaatacagaaataaatttcagaggcttactacagctgaaatcagtgaacctttctcacaaggtttttg

SEQ ID NO: 317 - DNA, 120 bp, synthetic construct
  source 1..120: mol_type = other DNA
aaacattttcaagaaatcagatgttccacttcctttttcacctgacatttcatagaaacagagtgctctttgccttttcctctttcctgttggctggaattgaagcccagggactggagt

SEQ ID NO: 318 - DNA, 120 bp, synthetic construct
  source 1..120: mol_type = other DNA
taacatatcagaataaagaatgtgttaacttagaagggtttgttccgggctatccagaaaacagatagggtccatataatatgtggtcggcttgttagcagcagaaggtatcctagtcac

SEQ ID NO: 319 - DNA, 120 bp, synthetic construct
  source 1..120: mol_type = other DNA
taactactgtaacagactagagagctctgcattggagcttgcctctgggttttactaacttggagggtgactttgactaaatcagtcatttaaccttcctaatctaccaaaatgtagtca

SEQ ID NO: 320 - DNA, 120 bp, synthetic construct
  source 1..120: mol_type = other DNA
accagaacattctgttctccttaacaagacctgcctttaagataaactatcttatcagaggctaacctattgaggttttatgggcacttaaatgaccttggtgaagggaaatacccaacc

SEQ ID NO: 321 - DNA, 120 bp, synthetic construct
  source 1..120: mol_type = other DNA
cccgtctctactaaaaatacaaaaaactagctgggcatggtggcgcgtgcctgtaatcccagctactcgggaggctgagacaggagaatagcttgaacccaggaggcagaggttgcagtg

SEQ ID NO: 322 - DNA, 120 bp, synthetic construct
  source 1..120: mol_type = other DNA
tggccaaaaacaatatttgaagcaattatgaactgacagtttctcccaaattaatgttagataccaaactacagattcaggaaactcgaagaataccaggaagaataaatcctaagtaaa

SEQ ID NO: 323 - DNA, 120 bp, synthetic construct
  source 1..120: mol_type = other DNA
attacaggcattggccaccatgtgtagccaaaagatgttcttcaaagagaagaaaattgttaaagatcagaaaatcaataaaggtcagaaaatgaaatctacataaagaaaggagaacat

SEQ ID NO: 324 - DNA, 120 bp, synthetic construct
  source 1..120: mol_type = other DNA
tagacattacctggttggccctgtcagtaaaagtttttttaaaaaaagagtggacatcacttaaagaccccacagacattgaaaggatagtaacaaaactattctcacgaatttgataac

SEQ ID NO: 325 - DNA, 120 bp, synthetic construct
  source 1..120: mol_type = other DNA
tcttagaagccaagatcacaaaatgaatatcggtgaagtatcattttgcttacctcaaagggccttatcaatggcactattccatgggctgccatccaacctgctactaatggataaagt

SEQ ID NO: 326 - DNA, 120 bp, synthetic construct
  source 1..120: mol_type = other DNA
caataaagcattgagggtaattcaaaacattgtattgcaaattactaagaactggagaggtgagaagagagtgggggatggaattgaggatgaggcgaaaagatgaaagaactgagggaa

SEQ ID NO: 327 - DNA, 120 bp, synthetic construct
  source 1..120: mol_type = other DNA
tttctctttcctcttccatttctctagttttcttttcttcaagtaggaaatgattttgtttgctttgcaaagacctaacacacctcagctgtaaagaattcaagccggccgggcttggtg

SEQ ID NO: 328 - DNA, 120 bp, synthetic construct
  source 1..120: mol_type = other DNA
ggggcacactaggaaatgtctaatgaattcctgtagttttatttccttcaaattccactggcagagaacttcacagtgtggtgaaatcactaaagatgttagtacttgggcttttcccta

SEQ ID NO: 329 - DNA, 120 bp, synthetic construct
  source 1..120: mol_type = other DNA
tgtaccctgtctccagtataatctttattctagaactatcaaactctttcttcatattgttgcctgttgaaaatctgctagttcttctcccaactgaaagaatcaagtcctggccaggcg

SEQ ID NO: 330 - DNA, 120 bp, synthetic construct
  source 1..120: mol_type = other DNA
agcgtgaaccaatgtgcccagtctcaaagcagtgcatttttatgcataacaagtatttactgctttacttgagacccctgccacactcttcataatccaatggagaaatctctagaacat

SEQ ID NO: 331 - DNA, 120 bp, synthetic construct
  source 1..120: mol_type = other DNA
ataatcattctactcatagctaagatttattactattacaacaatgttgcaaggatacatagctggatgataagggtaagctatagggagagtcggagaaatccatgggcaagcttcctc

SEQ ID NO: 332 - DNA, 120 bp, synthetic construct
  source 1..120: mol_type = other DNA
tccaaacttgtggtattgcaactttaaatcaaaagcctaaattacttatttaattataacatttgaaattggactgacaaaattggtcttaaccaattaacctgggaggcggaggttaca

SEQ ID NO: 333 - DNA, 120 bp, synthetic construct
  source 1..120: mol_type = other DNA
ctctccccagcagccttacctttgccttattttcttgaggtcctatttacattcatcccattcagtgaggatgaaggatgttgttctaaaacaaaaagaatggtagaaataagccccata

SEQ ID NO: 334 - DNA, 120 bp, synthetic construct
  source 1..120: mol_type = other DNA
gccaccacacctgacccatacatacatttttttcaaggaataacagaagccagagttgattttatttgcatttgttaagaagaggcgcagatgccatgttctgcccctgtattcccagct

SEQ ID NO: 335 - DNA, 120 bp, synthetic construct
  source 1..120: mol_type = other DNA
tagtggcctcttcctctctcaaaagtatgattgccctagctttaggtgaaaaccaaaagtaatcatttgctggactctggcgccctcttgtgattaaaatttcactttctgatattgctt

SEQ ID NO: 336 - DNA, 120 bp, synthetic construct
  source 1..120: mol_type = other DNA
cctgtaattatctgattttaaattcttgatcaagaatctcaatgccgggaccctcagtaatgcctgacaactcatactgtacttccctagcccattcactcttctgtttcctatttcaac

SEQ ID NO: 337 - DNA, 120 bp, synthetic construct
  source 1..120: mol_type = other DNA
gggattaccaccactagcccactgttatctatttcccccatcctcaaaaatattcctcttgattccacatcttccaactactgctctatcgttttgttctcttttacaacaaaactcttc

SEQ ID NO: 338 - DNA, 120 bp, synthetic construct
  source 1..120: mol_type = other DNA
cagaatcagaagaagactggggaagagctgagagtgtaaattataagggtgttagaccaatggggataaagtataatattcaagccaaattaattgacctgagtgtactcccccaggatt

SEQ ID NO: 339 - DNA, 120 bp, synthetic construct
  source 1..120: mol_type = other DNA
gacttgaaaacaactaattgaaaaattggtgattagatggactatgcatggaccttttggaatggacacagagggtgggaatatttttgtgccgcgtgtacatccagtagattgtatcac

SEQ ID NO: 340 - DNA, 120 bp, synthetic construct
  source 1..120: mol_type = other DNA
atggtaaaagaagtctcatattctcaaaattcagtatatacctagatcttacagagcagctggcttgatagaacagtgaattggcctgcctaaggcttaattatagtgtgagcagggata

SEQ ID NO: 341 - DNA, 120 bp, synthetic construct
  source 1..120: mol_type = other DNA
cgttccctctacctgaaatactttcctcccagatgatatcttcattccctctcagtctttcttcaaatatttgctcaaatgtcaacctcttaacaaggcctaccccaaccactctgttta

SEQ ID NO: 342 - DNA, 120 bp, synthetic construct
  source 1..120: mol_type = other DNA
gaacctaagcagggagttgatgtgaaaagggaaatattttacacagaggtgcttgtacacttttcttcatgacttctcactccactatcacggctaatactgctttgaagttaaatgttc

SEQ ID NO: 343 - DNA, 120 bp, synthetic construct
  source 1..120: mol_type = other DNA
atataagtggaatcatgtagtatttgtccttatttctcttagcataatgtcttcaaggttcattcatgctgcagtcagaattttcatcccttttgaggctgcataatcctccattctctg

SEQ ID NO: 344 - DNA, 120 bp, synthetic construct
  source 1..120: mol_type = other DNA
caagatcagattggccaacatggtgaaactccatctctactaataatacaaaaattagacaggtgtgttagtgtggacctgtaatcccagctactagggaggctgaggtacaagaatcgc

SEQ ID NO: 345 - DNA, 120 bp, synthetic construct
  source 1..120: mol_type = other DNA
ggacttggtgccctgcatcccagccactccatctgtggctaaaggggccaacgtatagctcaggccattgcctcagtgggtgtaagccccaaagccttggcagcttccatatggtgttgg

SEQ ID NO: 346 - DNA, 120 bp, synthetic construct
  source 1..120: mol_type = other DNA
atttggaatgggtgtatttgcccaatgccattacccccattgtatataggaagcagctaatttgcttttgattttacaggctcataggtggaagggacttgccttttctcagataagact

SEQ ID NO: 347 - DNA, 120 bp, synthetic construct
  source 1..120: mol_type = other DNA
cctcatctggagagggatgaaggagatttttttgtaggaggtatgttcacatggggaggtcagaactaccagaaaggcattttttttttttttcaaataatggccatccttattggggta

SEQ ID NO: 348 - DNA, 120 bp, synthetic construct
  source 1..120: mol_type = other DNA
ccaataaaacttatttataaaaataagcaggaaggatttgtcacaaaggcagtagtttgccaacccctacactagaagtcacagtttggcattttcaaaggcttggaggaaggcaatgtg

SEQ ID NO: 349 - DNA, 120 bp, synthetic construct
  source 1..120: mol_type = other DNA
agtttaagtcttattatttctctctgggactattgcaacagtctattcaaacaggtttctgcctccagcctcactttcttcctacctggcatctatgctacagcaagagacatttctaaa

SEQ ID NO: 350 - DNA, 120 bp, synthetic construct
  source 1..120: mol_type = other DNA
gtgagccttgttcatgccactgcactcccgcctgggtgatacagcaataccctgtctaaaaaaaactaaaaaataaaaacaaatatcacttctgtaatctcagcactttgggaggatgag

SEQ ID NO: 351 - DNA, 120 bp, synthetic construct
  source 1..120: mol_type = other DNA
tccttgacccatatactccaggaaggttgtgaaaaatcaaggggataatgtatgggacagtgctttgtacagttggataatgtggtaatcaggtttcattttctgctgtaacacttcaca

SEQ ID NO: 352 - DNA, 120 bp, synthetic construct
  source 1..120: mol_type = other DNA
acacagttccatgtgttcataccaggcctcaccaggcctgcacactcctctgactatcacttgtatagcccttccttgatttatgacaaatggcttcagcatcttcactagaacaacaaa

SEQ ID NO: 353 - DNA, 120 bp, synthetic construct
  source 1..120: mol_type = other DNA
cccctcaactggggacacaataggtatatttcctcgccattctcttttttcctcttggcttgtttcttttgggttaaatgcaactttcagataactgtaaattgtttgggacaaggaaca

SEQ ID NO: 354 - DNA, 120 bp, synthetic construct
  source 1..120: mol_type = other DNA
agtatgaagattggaaaaaacaaaaacaaacaactcacctcagttatgatgtgtgacgctggaagcaaagcagcccaaatctcagtgcagagacagtggtaatacgaagaagatttctac

SEQ ID NO: 355 - DNA, 120 bp, synthetic construct
  source 1..120: mol_type = other DNA
taatgccctgacttcttccaatgtcacctacggcccccttagtctcagctcagccaaaaactttaatgcaaaggaaaagtctggattggttccacaggccttttaaaaagcggacttaaa

SEQ ID NO: 356 - DNA, 120 bp, synthetic construct
  source 1..120: mol_type = other DNA
ttgtggaacatggtgagtgcttttcaaaatttctgctcatggttttcctcatgcattcatcttaggccttcaaggaactttgaacaacagtacttgcgacagttccttccaattccactt

SEQ ID NO: 357 - DNA, 120 bp, synthetic construct
  source 1..120: mol_type = other DNA
ccaacattgggtgactgcagtcaacaaaggcttctgttggatgaacttgcatttgacagctgaagttttactttcttacgggaaaatattcacttcatctaaataaatccgggtgcttgg

SEQ ID NO: 358 - DNA, 120 bp, synthetic construct
  source 1..120: mol_type = other DNA
tcttcttaatattctgtgggttaaaaaggggggtatgcatcaagcacttctgtacagtaaagtataatgattatctccaggaaaagcactttggtggttgggttgcaaactgaactagcc

SEQ ID NO: 359 - DNA, 120 bp, synthetic construct
  source 1..120: mol_type = other DNA
cagcactgcattccaatttgggcaatagagggagaccgtgtctctggggggtaaaaaaaaaaaaaaatacagttcattggtagagtttcttaaaggcagccagcctttaagaaattcctg

SEQ ID NO: 360 - DNA, 120 bp, synthetic construct
  source 1..120: mol_type = other DNA
attcatttctaatgtggtaactattgatgagataacctacacaaactaagcctcttaggggccttcggttatttttcaagagtgtgacaagggcctgagattaaaaagtttgaggccagg

SEQ ID NO: 361 - DNA, 120 bp, synthetic construct
  source 1..120: mol_type = other DNA
taggctgatctttctagagttggttaatatccatgtaggttagattgaaaaacttgaattcagaaatgtacggtgttggagcagacatggatctggaagccaagaatagcgttggtgttg

SEQ ID NO: 362 - DNA, 120 bp, synthetic construct
  source 1..120: mol_type = other DNA
agggtggccttattggcccatttcaaggattttgactttgattcatatgatgtgggaaggccttggagaattttccgaggggactatactatctgatgtatgtttcagtatgaaatagaa

SEQ ID NO: 363 - DNA, 120 bp, synthetic construct
  source 1..120: mol_type = other DNA
ggctcatgcctgtaatcccagcactttgggaggccaaggcagatggatcacttgagcccaggaattcaagaccagcctgggcaacatggcgaaaccccatctctactaacagtacaaaaa

SEQ ID NO: 364 - DNA, 120 bp, synthetic construct
  source 1..120: mol_type = other DNA
gcctcccaaagcaatgggatcgtacaggtgagccattgcacctggccatgtatgtacattttttataagcattcagttgtttccaatagtctaatacattttgtatggccttcttatttt

SEQ ID NO: 365 - DNA, 120 bp, synthetic construct
  source 1..120: mol_type = other DNA
caacactctcttccagtcccccctcccttctgaaaccatattttacatctctggtcctcattaaattttctgtaacttctgcccttgtaactcttctgcaacacaaatgaatacataatc

SEQ ID NO: 366 - DNA, 120 bp, synthetic construct
  source 1..120: mol_type = other DNA
actgcagcctcgaactcctcaagtaaactgtaagcttgtgaatgcaggtttcatctcattttctgtttccccagcataatgctgaatacataggctctccataaaaaaaattcttgataa

SEQ ID NO: 367 - DNA, 120 bp, synthetic construct
  source 1..120: mol_type = other DNA
ctgtacccattaaaaaataatatcccatttccctctttccccacttcttggtaaccacttttatgctttttctctctatgaatttgctcattctaggacttcatataactataataatac

SEQ ID NO: 368 - DNA, 120 bp, synthetic construct
  source 1..120: mol_type = other DNA
cccccttccagtttcactcctgccttcctcctcctcagagataactactgtcttacgttttagcaccatcgattagtttcccttgtttttgtttttaatattcccttgttatccttttaa

SEQ ID NO: 369 - DNA, 120 bp, synthetic construct
  source 1..120: mol_type = other DNA
accgccccccccccccaaaaaaaagcatttattaggaaacaggaaagactgaacaagaacaagagaactaagcatgtaactcaagaagccagagaaccaaagtaatcccacagtacacag

SEQ ID NO: 370 - DNA, 120 bp, synthetic construct
  source 1..120: mol_type = other DNA
tttctgctgagattcaccatgttttcattcattagacctgtcttttcctctaaatcctagaaggtatttgtaataaagaccgtgcctgctaatttaaatatctgagtcatcttggggtct

SEQ ID NO: 371 - DNA, 120 bp, synthetic construct
  source 1..120: mol_type = other DNA
tatgtttttctctttcctcaagggtcacagccttgccttgccttgcctgtcatctaatgcctgaaaacagtcgtctcaaatattttattcagccatacagttgtttaggacaaaaggata

SEQ ID NO: 372 - DNA, 120 bp, synthetic construct
  source 1..120: mol_type = other DNA
gcgcctagcctccggccagacttttaaatgttagccttgcaggtagttgtgcagtagtatctcccagccttaatttgctcttctttgatgactcatgaggttaagcaccttttcatatgt

SEQ ID NO: 373 - DNA, 120 bp, synthetic construct
  source 1..120: mol_type = other DNA
ctttgtgtctaccctaaggtcacaaagaagtttcactctcttacatctcatgtttatagttggcctggaattgttttttctgtgtaggggcgaaggttcattttttccctcatattgacc

SEQ ID NO: 374 - DNA, 120 bp, synthetic construct
  source 1..120: mol_type = other DNA
ctggtggagccagcagtatcctttatctataatagcttgcttttcatcttttttatatcagtggctgcctgtggcctctcaccaaatctggtggactcattttctctgtgtatttagttt

SEQ ID NO: 375 - DNA, 120 bp, synthetic construct
  source 1..120: mol_type = other DNA
tggaaccttcacttgaacagaattgagttttggcgtgttcacttttaagagaaagaaacaaaggcagccaacccagtatcaagagtttagtcaaaacaaacaactcccagatttgccttg

SEQ ID NO: 376 - DNA, 120 bp, synthetic construct
  source 1..120: mol_type = other DNA
gaaacattactttttgaggatagactaatgcattttgaaaacatttgcatcattgaaatgagtggggtctagctttagaatttaatcaaatttttaattttttcacaatttcgtggtatg

SEQ ID NO: 377 - DNA, 120 bp, synthetic construct
  source 1..120: mol_type = other DNA
gctgcattgaattccactatcttggaagtatcattggttttccaaccagttccctttctggacttttggagtgtttccagtctttagatatgataaacagtgcttcaggggtaacgttat

SEQ ID NO: 378 - DNA, 120 bp, synthetic construct
  source 1..120: mol_type = other DNA
tcccatcgctggtaatacagaggttgccttcatccccaaagcctagctaagagagtgtattgtcaagctttgggactttttccaatctgatatctaagaaatagtattttagtatggttt

SEQ ID NO: 379 - DNA, 120 bp, synthetic construct
  source 1..120: mol_type = other DNA
agtaaggagagactttattgaaaaggatttttgcaaggaggggaaaacgactgttgaaatagggaggacactctgaccataaggaggtgtgcaggcatcttctttttcaaaaaatgtttt

SEQ ID NO: 380 - DNA, 120 bp, synthetic construct
  source 1..120: mol_type = other DNA
agctcattacaggtagttgctggaatgagatagtttgtgtgcatgaagaagaacacacaaaaatattaaaacatgacatgagtgatggtaatacagcaggtccccagataatggcctttc

SEQ ID NO: 381 - DNA, 120 bp, synthetic construct
  source 1..120: mol_type = other DNA
gttagtggtaagctgcctttgtagctctgtgttaccttgagtgagacatgatgtgatgtttagttcgtagcatcctcagcactgtcttattcacaatcattgtcaatctaaatgcatagt

SEQ ID NO: 382 - DNA, 120 bp, synthetic construct
  source 1..120: mol_type = other DNA
tcagccagctcttggctccatttttccatcggtggtggtactatgccacagcaggtgttattatctcaccaccttattctattagacgtatgtttatcacttcgaagaaaaacaatttta

SEQ ID NO: 383 - DNA, 120 bp, synthetic construct
  source 1..120: mol_type = other DNA
ttaccgcactgatgcaccagttaccatgccagagtaacaattatagcactggtataccagctaccatgccagagtaacagttaccacactgatatactagttaccatcccagagtaacag

SEQ ID NO: 384 - DNA, 120 bp, synthetic construct
  source 1..120: mol_type = other DNA
tgatgatgactacatttaaagctttttctccattggctagaagttgagacccatttcaacaaaagcacttccacctctcctgaagtgcattgggaaaactggaggccattactagattta

SEQ ID NO: 385 - DNA, 120 bp, synthetic construct
  source 1..120: mol_type = other DNA
tggctatagattctagccctgcccaggaaaataggtttgaatgcattggtcaggtgagacacagagcagcacagcaagacacatgaaatagcagaagtatttttattacttactgatccc

SEQ ID NO: 386 - DNA, 120 bp, synthetic construct
  source 1..120: mol_type = other DNA
cctggccccttcttgtttttgtagcttgtcacatgatgaatgctttttaccctgggggagaccaagactttgagtaatagtttgcttttataagccagaatttgttctacacatagaagg

SEQ ID NO: 387 - DNA, 120 bp, synthetic construct
  source 1..120: mol_type = other DNA
aggtgttcatgctggcctgcataatagagcgcctgctgtttgattttcagttttctgtagaaggaaaaaaaaaaatcaaaccaacaatagcaaaactcatgatacctcctggtctctctc

SEQ ID NO: 388 - DNA, 120 bp, synthetic construct
  source 1..120: mol_type = other DNA
aattttaagacatttatagatttgtataactaccatcgccaccacaggacataaaatatttccataatcccaataactttcttcgtgctattctgctctcctgcctcctggcaaccactg

SEQ ID NO: 389 - DNA, 120 bp, synthetic construct
  source 1..120: mol_type = other DNA
caaaatcaagtctccctcagtcttcctctttttttgtttgcgtggggacagagtgttgctctgtcgcccaggctggagtgcagtggcacaacctcagctcactgcaacctctgcctcctg

SEQ ID NO: 390 - DNA, 120 bp, synthetic construct
  source 1..120: mol_type = other DNA
atggttttgcttttccctgacagctaatgaggtggattgagcatctttttgtgtgaaaacctcatatcttttaattttcctcctataacctgcataagtatgaggaagaaaagtgtgaac

SEQ ID NO: 391 - DNA, 120 bp, synthetic construct
  source 1..120: mol_type = other DNA
cagtatttcaatctctggaaattgtaaagcccgttatttaacctaaaaacgttaatggctcagaaaacagaattacatggcatttccttgctaacctcccagagcctatcccctccaaag

SEQ ID NO: 392 - DNA, 120 bp, synthetic construct
  source 1..120: mol_type = other DNA
tgggctggtaaaggctttttcattatggatttttcagtttatttcttctaagttttgtcagttgaacagtagggataaattaaagaggaggaaaaaaaatccccatcatccttccttccc

SEQ ID NO: 393 - DNA, 120 bp, synthetic construct
  source 1..120: mol_type = other DNA
gccaaacctactatttttaatgggaaggggtttattatagatattatatagctaacagttatggggagggctgaaaaagcaggttcttggttgggcttcatgagtgattcccagatggaa

SEQ ID NO: 394 - DNA, 120 bp, synthetic construct
  source 1..120: mol_type = other DNA
actttctcatctttaagatagggttctgaggatacttttatggaggtttcatggtaccagcatcctactgggaactgtaactcctgctgcctaccaaatatctataatatctttggcttg

SEQ ID NO: 395 - DNA, 120 bp, synthetic construct
  source 1..120: mol_type = other DNA
agaggtgaacttggctatcacttcctctgttcccactgcatgctgtgctattgctgtgctgtttatcacagtggtgtttactgtcttatacttgcctctctctcatctcttctttttttt

SEQ ID NO: 396 - DNA, 120 bp, synthetic construct
  source 1..120: mol_type = other DNA
aaaaaaatttactatcatgtaaaggggagttggtctcaccctacactgctttggaaggcacaattaggagctgcggatggaagtcacaaaataaggcacatttggactcagtatgaaaag

SEQ ID NO: 397 - DNA, 120 bp, synthetic construct
  source 1..120: mol_type = other DNA
cctcagtgctttctgcatatgtgttgctcactcatcactatctgcatgttcgtggtctctggaaagaatcaactataatgatcagaataattgcctggtaggacgtatttcctttgagtt

SEQ ID NO: 398 - DNA, 120 bp, synthetic construct
  source 1..120: mol_type = other DNA
ttgagtctaaatacagcaaaattggtgcctttttcagctatttttcggcgttgctatattccaagccactgagctctgttttactctgacattttctcttcacttttgggattctgctca

SEQ ID NO: 399 - DNA, 120 bp, synthetic construct
  source 1..120: mol_type = other DNA
tgagaaggcagtttgggacccttttagaagtttgctttataagtgaagaacctgaggccggctgtgttcatattctcagaacttggtgagaatgaggtactttaagataggctctaagat

SEQ ID NO: 400 - DNA, 120 bp, synthetic construct
  source 1..120: mol_type = other DNA
gagatgttgttaatagtacttagatgatttgctaacttatatcaagcacttactctgacccaggtatcggactgggtgcttgacatatattatctctattgtgttttgcagagtggctaa

SEQ ID NO: 401 - DNA, 120 bp, synthetic construct
  source 1..120: mol_type = other DNA
tctgatcaagaaatggtttgttgttgcgtagaggaagagaagacgacacttaaacatgattttttaaaaatttttgctgatgtgggacccgcttaacttcccaatttgcttcaaatgcca

SEQ ID NO: 402 - DNA, 120 bp, synthetic construct
  source 1..120: mol_type = other DNA
ggacactgttggccattaggattcctgttccttttgggtttgtaatagaagctactgtccccctgatcattactgattgaaacaagaaatctgttgttcctggatttctttcagttatct

SEQ ID NO: 403 - DNA, 120 bp, synthetic construct
  source 1..120: mol_type = other DNA
ttttatgaccattcacagcctttggcataccattaaaatctgatcattgacttctaggtgggagaatggcatctctcttttctcctcatgataaggacttagtctgtaaaccttccagtc

SEQ ID NO: 404 - DNA, 120 bp, synthetic construct
  source 1..120: mol_type = other DNA
ttgtttatagtgactttcaaactgagcatttacaaagaaattaacagttgttgggtgtgttgaatgtgcagggttttgctgaacactttacaggggtgtctgatcgagtccatcacttcc

SEQ ID NO: 405 - DNA, 120 bp, synthetic construct
  source 1..120: mol_type = other DNA
caatatgccaggtatattatattggtgttaggttgggctataatattaaaaaggacagtcatggttcttgcccttgaggtctgttagatcaggaattcagaagtgggttagctgagtggt

SEQ ID NO: 406 - DNA, 120 bp, synthetic construct
  source 1..120: mol_type = other DNA
ggactgtgctttgtgcttcttcttgtaacaatgtgtttagcttatttagcagcatcagattctccttctgatatatgcattcgataaacctggacacctgtgcagatttctttttcgtgg

SEQ ID NO: 407 - DNA, 120 bp, synthetic construct
  source 1..120: mol_type = other DNA
tagctagcaggatggaaatcctgtctacatggaaatccttgtggtgttggataggccatgattcatttccctaagcctcaaatgcttctattgtttgtagtttttctcccagaatcttca

SEQ ID NO: 408 - DNA, 120 bp, synthetic construct
  source 1..120: mol_type = other DNA
attgggatacaaatgagtgtgccccgtggttaggaagatgaggaagtgtaggcacttgcaggggccttttcttttgacttagtgagttcccaccaaacctggccttgtctgtttttgatg

SEQ ID NO: 409 - DNA, 120 bp, synthetic construct
  source 1..120: mol_type = other DNA
tttgtcctcttccccttttcatttctttgcagctcatgccatctgaaactacctcattcaattattgatagatctgtttggaattccaggagtccctttgcgatcccattcttctaaaga

SEQ ID NO: 410 - DNA, 120 bp, synthetic construct
  source 1..120: mol_type = other DNA
aacttcctgaaccctgtaagcattagagcttgcagcctctgctttttctgtttccttcttgatgggaagactggcagcaggatttacttggttgctacatttgtgaatttgtaaaataat

SEQ ID NO: 411 - DNA, 120 bp, synthetic construct
  source 1..120: mol_type = other DNA
tggcctggggacgtgagggggaatttttcactctttatttcacatacatctgtcattggcacagaaaattaagcagtaaacctaaagaaacagaatagtgcttgttgtatagttagatca

SEQ ID NO: 412 - DNA, 120 bp, synthetic construct
  source 1..120: mol_type = other DNA
tcagagtctccataggaaaggagcggcacgaaatgcaaattatttggaggttttggaggtttcaaacttttaattacttggcacatatagtgcttactgtgtgcaggcactgttctaaat

SEQ ID NO: 413 - DNA, 120 bp, synthetic construct
  source 1..120: mol_type = other DNA
atctgtattaaaagtgtactaaaaacattcaccacatggtggtgctcccttcaaaagccaaactgaaaattgtaggccagcattgagtattaggcatggagttgataggggcagctgtat

SEQ ID NO: 414 - DNA, 120 bp, synthetic construct
  source 1..120: mol_type = other DNA
tgtttgtccacatgagtacaaggcattgagcttgtgctactgtagactcacagatggtcatgattttcaggaattgaatagagaagatgaaacactgagacactggattcaaatgctaga

SEQ ID NO: 415 - DNA, 120 bp, synthetic construct
  source 1..120: mol_type = other DNA
ctgaaaataagaaagacaagccaaaactgtaaacgtcttggcattgtttgctaatttcagtaatcaagatgcttttttcccccaatgttttgtttttgttgctattgttttgaaataggg

SEQ ID NO: 416 - DNA, 120 bp, synthetic construct
  source 1..120: mol_type = other DNA
actggagacataatcttgggcctatgagtagacagggacttggaattcagactgccctataaagctaagatcattgattggctacactttgagcaaaatgatagactagaaagaataagc

SEQ ID NO: 417 - DNA, 120 bp, synthetic construct
  source 1..120: mol_type = other DNA
agagagatactaggttgctagagttcctagattactacagttcctagttagctggcagaagtcaatgcatatcctcttggactatatctatctttttctcagtcttaacaccagattccc

SEQ ID NO: 418 - DNA, 120 bp, synthetic construct
  source 1..120: mol_type = other DNA
cagctcactcaggaatcataaagctggccttgggataacagagctaaactttagagtcctgagtcctgttaatactcaatcctctgtgaaattcaattaagtgagcttcaagttaaccta

SEQ ID NO: 419 - DNA, 120 bp, synthetic construct
  source 1..120: mol_type = other DNA
tttgtagtttggattatctccagtttcctgaattatctgtttccttcaggataatctgttcatcttggtctttttctgtgatgctctaggctttcctcagcagtctggtaatcctggttg

SEQ ID NO: 420 - DNA, 120 bp, synthetic construct
  source 1..120: mol_type = other DNA
cttgcccatccactttcagatcccccagtttgttgaaatatctagtatgatgacagcttctctgttctcaccattgtcgtggtttataccttttttactccttggctgtaatttaaaggg

SEQ ID NO: 421 - DNA, 120 bp, synthetic construct
  source 1..120: mol_type = other DNA
agatactggaaaagcagcagcacagtttaataacagtcatcgttcatgatggcaaggttgtttactataaaaattccatccttcttgcctctgtgctgccccccaccatttttttatttg

SEQ ID NO: 422 - DNA, 120 bp, synthetic construct
  source 1..120: mol_type = other DNA
gtctcaaaaaagaaattgaacagcccattttgtgaaccacttcaaaaaaaagcaaacacattttcctctggcttttggctgttttaggaagaagccatacggtgaaccaggtgatgctga

SEQ ID NO: 423 - DNA, 120 bp, synthetic construct
  source 1..120: mol_type = other DNA
ctcccgcaatgtcacaatagttttctttgaacattcttgaccctcagtcatgttgacatgcgtttggattttcagtggagaagaattgccagagaagaatcttcctctgattttaaccat

SEQ ID NO: 424 - DNA, 120 bp, synthetic construct
  source 1..120: mol_type = other DNA
tctattttatttcattttgaaaaagataggctgtgactcattagtagtggatctcatgactaagaatggatcctgacccaagtttgaagagactggtaggggtaaatttagagcctgggg

SEQ ID NO: 425 - DNA, 120 bp, synthetic construct
  source 1..120: mol_type = other DNA
tgattgtttactctgtgttagcttggacacttagcttggcagtaatcacaagagctttagggagtgcatcctttgctagttcataaagatgtattctgataacgggggaccaaaaggata

SEQ ID NO: 426 - DNA, 120 bp, synthetic construct
  source 1..120: mol_type = other DNA
tttggcttaaacagtatcttttgggtaaattctggattttttcatatatcctgccatcccccattaaaaaccagcatctggtcttgggggattgtgagatttttgtggaggtgagggagg

SEQ ID NO: 427 - DNA, 120 bp, synthetic construct
  source 1..120: mol_type = other DNA
cttcactctacctgccctttttaagacacatagtaatatagtgggctctaagtagtagacactttgttcatttgctacttctgtacccctgggtcctcttttactcttctgtcatttgtt

SEQ ID NO: 428 - DNA, 120 bp, synthetic construct
  source 1..120: mol_type = other DNA
gagacggaaacagctttggctgtgtgtgagtttgaccctgtgattagactaatggatgccaaatagatgaatacagaatctcagaaaacacagaacgctctcttagcagtatctactttt

SEQ ID NO: 429 - DNA, 120 bp, synthetic construct
  source 1..120: mol_type = other DNA
atcattatatgctgtttctccttaggctctgcaatattccttgctctgagtctactttgtctgataggcacttcagctttcttttgatcacgcttgcataatacaccttttcccatcctt

SEQ ID NO: 430 - DNA, 120 bp, synthetic construct
  source 1..120: mol_type = other DNA
taacctaaaatccgtattccaatttcctcaattctcccagtaatgtcctttctagcaattacccccttgggtgtaggatccagtcctggatcatggattgcattaatttgtcatgatctt

SEQ ID NO: 431 - DNA, 120 bp, synthetic construct
  source 1..120: mol_type = other DNA
tgtagaaactggttttatcctatctgtgtgacctccaatagctgcaagttggaaatcttgatttagagtggacctaggtttttaccatccctgggtgcttgacaaaagcaagtttaagtc

SEQ ID NO: 432 - DNA, 120 bp, synthetic construct
  source 1..120: mol_type = other DNA
aaaatatgtctatactcctaccttgacaaatatgtctctctgatactctagaagatgaggtttaaatgtagagttcttgaactccacagagctctatgctggcacatagcagcacagagt

SEQ ID NO: 433 - DNA, 120 bp, synthetic construct
  source 1..120: mol_type = other DNA
ggaacaggttctaagggtggtaatgagagacaaaaattctctggttcaggaagcccatcaaattccaaagcggcaaagaaggaaaggaaagaaattcatgtctaaacatatcagtaaacc

SEQ ID NO: 434 - DNA, 120 bp, synthetic construct
  source 1..120: mol_type = other DNA
ctaatgtgtcatttttcctttctcttgccactgagttgtttgctcaactagaggattttactttctgcccttcaagttcacatggtagctcgcatggtaacataagtgagtcttggcagt

SEQ ID NO: 435 - DNA, 120 bp, synthetic construct
  source 1..120: mol_type = other DNA
ttctttaaaagttttttccatagatctatttgcccatcacctctccaactcctccagcatctgccccctttcttccgcatacatattgtgatgtctaactgggccttaattatcatgaat

SEQ ID NO: 436 - DNA, 120 bp, synthetic construct
  source 1..120: mol_type = other DNA
aaataaaatgattagtggctgcatttctcaactgcattgttttgattacagtcttactggctgtattgggtgagacattgggaaatgctttcataactggtgatcactgttgacggggtt

SEQ ID NO: 437 - DNA, 120 bp, synthetic construct
  source 1..120: mol_type = other DNA
ttcagatggcactgacctttccttaatacagctggtttcacttaatacattttgtttaaacaaagcctgttcctggaagtggttccagaatagtctgttccttgtagctgttcctttgct

SEQ ID NO: 438 - DNA, 120 bp, synthetic construct
  source 1..120: mol_type = other DNA
acaccactgcacgctagcctgatgaaggaaggagaaacagtgattcatttgttttgataaaatctggccttcaaatgatcgaatggccaggaaatacacatatttctatggtctaaggtg

SEQ ID NO: 439 - DNA, 120 bp, synthetic construct
  source 1..120: mol_type = other DNA
actttgaataaacttcgttgtgtcatattctatcgtaagatttattcttgtctttggagaacttagcttataattaattatattttaatgaataggatactttttgtttgttttgttttt

SEQ ID NO: 440 - DNA, 120 bp, synthetic construct
  source 1..120: mol_type = other DNA
accccacactcatacatgaaagtgaaggctctgcttctcagagtacagtttaatttactttgtggacatcattaacaaaaggcagagaaagacattggaccatactaattgtgggactta

SEQ ID NO: 441 - DNA, 120 bp, synthetic construct
  source 1..120: mol_type = other DNA
aaagaattattgatgggttacaggtgcatcgtttcaggcagattgacactaggaaagagcaaagagcaggtagaggtttgacagtttactcctttaaagtaatccatgtccaataaccca

SEQ ID NO: 442 - DNA, 120 bp, synthetic construct
  source 1..120: mol_type = other DNA
cctttttccagtggattccttccctcagcctctggccccagacaaacacttatccactttctgtgtctgtagttttgtcttttcaagaaattcctatgaatggaaccatataaaagttat

SEQ ID NO: 443 - DNA, 120 bp, synthetic construct
  source 1..120: mol_type = other DNA
agtgcagtggcacacttggctcactgcaacctccacctcctgggttcaagcgagtctcctgcctcagcctcccgagcagctgggactacaggtgcgtgccaccacgcccagttaatttct

SEQ ID NO: 444 - DNA, 120 bp, synthetic construct
  source 1..120: mol_type = other DNA
tctaaattttttctaccccattctccctgtccctctccttttggtattgtagttacccactggaacacgtgacattatgtagcaagtctctgagtctgttcatttttttccttcagtctt

SEQ ID NO: 445 - DNA, 120 bp, synthetic construct
  source 1..120: mol_type = other DNA
ccggctctctttgttattcatagtttcctggcttctcttttctgagccacccagccaaaaatgctttgactttttctatgcatgtttctgtcatgtctgtgcatgacataaatcataata

SEQ ID NO: 446 - DNA, 120 bp, synthetic construct
  source 1..120: mol_type = other DNA
aaattcatgagactaaatcattttaaaaagatgtcttttattacaatttctttcaattaaacagttttatatttttgaaattttaaacaatttgtgcaaacgagatcctactggacctat

SEQ ID NO: 447 - DNA, 120 bp, synthetic construct
  source 1..120: mol_type = other DNA
atgacagaacaattgtttatgattgattgatctccaaagtttcccaagaaaagagaaaaagtaggaggggaaggaagaaagaagtgagcagaagttggcttcagagagataggaagggcc

SEQ ID NO: 448 - DNA, 120 bp, synthetic construct
  source 1..120: mol_type = other DNA
cagatataatttcaacccacaaggagctcacagtctggctcttcttttgaggcaaaaagactaaagctgttgcctttatggtaagataaatctgccttggagtcaatccaaggtgattta

SEQ ID NO: 449 - DNA, 120 bp, synthetic construct
  source 1..120: mol_type = other DNA
aagtttgcttttatatttcatacctgcatggtattctattgtgtgagtaggccatcatccagtggtcttcaaactttcctgtgtactccgtaacagaatttgttgttttgacatgcagtc

SEQ ID NO: 450 - DNA, 120 bp, synthetic construct
  source 1..120: mol_type = other DNA
ggcaggtgggtagatagatagggccttcagacttgcctcgcattcatcttttacataaaataagacagtttcaccttgaacacttctgtggtgagactgtttagtcttgtagctctaaac

SEQ ID NO: 451 - DNA, 120 bp, synthetic construct
  source 1..120: mol_type = other DNA
tttacggagttcacacagggccagaaatagttcctgttcccagtagcagagtagaacatttcatgattcaggggtattgattggagtactaagaagagttgtattagtgaaggttcttga

SEQ ID NO: 452 - DNA, 120 bp, synthetic construct
  source 1..120: mol_type = other DNA
tagggatacaaaaccatctaggaccgagtgtggtaaaatgcacaatgtttaccagccattccagaattactaggtatgagcagaagtagtaacatacaaccaataactgaccagaaatga

SEQ ID NO: 453 - DNA, 120 bp, synthetic construct
  source 1..120: mol_type = other DNA
aaaaaaggaagaatttattaccagtagatatgcagtacaagaaatatcaaaggatgtaattaaagcagaaagagaatgataactggtagaaaactggagccaccaggagtcccaggctgc

SEQ ID NO: 454 - DNA, 120 bp, synthetic construct
  source 1..120: mol_type = other DNA
aaaaaaaactaaacaggaaaagcaaacagagcagatgggacaaatatgaaacaaagagcaagatggtaggttaaaattcatatcaataattaattcaccattaagggccaggcagagtgg

SEQ ID NO: 455 - DNA, 120 bp, synthetic construct
  source 1..120: mol_type = other DNA
aaaaaaaaaagaaagtatgatctctggccacaaggaattaaatgaggaattaataacagaaaggtatctggaagatctttcaaatatttggaaaataacataattttaagtaaatcatgg

SEQ ID NO: 456 - DNA, 120 bp, synthetic construct
  source 1..120: mol_type = other DNA
agctagttatttgagagagcaatgaaactcataaacctctacccagactgatcaggggaaaaaagggaagacaataactgtaatatcagcagtgaaagagatgacatcacacagattcta

SEQ ID NO: 457 - DNA, 120 bp, synthetic construct
  source 1..120: mol_type = other DNA
taaaaataaaaaactgaacttcatatcttgtccccagatctgatatagtcacttcttcctttgttcagttaaacccagcttcatgtttctgcttgcccagggccaataactttgggatct

SEQ ID NO: 458 - DNA, 120 bp, synthetic construct
  source 1..120: mol_type = other DNA
tgctgttctctgccaggaaggtgcttcctccgtagttcactcttcacctcctttgggtctttgctcagttgtcatcttcagtgatggctcttctgatcaccttatttaatttttattttt

SEQ ID NO: 459 - DNA, 120 bp, synthetic construct
  source 1..120: mol_type = other DNA
ctggtctccctcattccttttgttatcagtcatccctcccagccctggcaactgctgctcactttcctgaccttagaattttgcttattacagaatgtcatataagtagaattataaagt

SEQ ID NO: 460 - DNA, 120 bp, synthetic construct
  source 1..120: mol_type = other DNA
cacagtattttacaaagtaagggtgctattttgcattactaccagcagttcacaccatatgtattcacaccagttgctccatttggtcttcgttctgtgacttgtctctattctcttaac

SEQ ID NO: 461 - DNA, 120 bp, synthetic construct
  source 1..120: mol_type = other DNA
aaattttctcatccttttttgtcatcttcatcacagctgcctctctaatgttcgttgaatgaaagggccattcccaaatctctgataagtcaagcatttttaggagagctaaaccagcca

SEQ ID NO: 462 - DNA, 120 bp, synthetic construct
  source 1..120: mol_type = other DNA
attttgatcttaagcaatttaccatgatacttggtttccatgagagatttaacagttggaactgtactgcccataagatgcaggtggggtcatggtatgtagttgggaactctacaaatg

SEQ ID NO: 463 - DNA, 120 bp, synthetic construct
  source 1..120: mol_type = other DNA
tccctttgcagcagtcctacccccacttccagccccaggcgaccattcatttgctttttctatagatttgtcttttccgtacgtttcatgtaaatgaagttttatacaatatatgacctt

SEQ ID NO: 464 - DNA, 120 bp, synthetic construct
  source 1..120: mol_type = other DNA
ggactataggcacacaccagtgtaccaggggttgtctgtcttttgattatagctattggaatgggtgtgaagcagcatctcgtgattttagtttccatttcttgaatgactaatgatact

SEQ ID NO: 465 - DNA, 120 bp, synthetic construct
  source 1..120: mol_type = other DNA
acactgggctgcatgtttcacggggatgatttgggtcactcttcaattttctaaaggttacaggactgtttcaaacacctctccttctattaacagttttcaatggagaaagaaaacaaa

SEQ ID NO: 466 - DNA, 120 bp, synthetic construct
  source 1..120: mol_type = other DNA
taaccaccacacttagggaatatgaaaataacttagacattaaatttgattttggtgttgctgtaaagaatacagatcttaggcaccagctcgtaggaggggtggtaaacaaggaggaca

SEQ ID NO: 467 - DNA, 120 bp, synthetic construct
  source 1..120: mol_type = other DNA
ttcccccacccccaaatgtaacgtgatctcctaggcctgctctgctgcttttgcagattcttttagtcttagagaaagagaggaaaatattaaccattggtttaccaattcaaagttaac

SEQ ID NO: 468 - DNA, 120 bp, synthetic construct
  source 1..120: mol_type = other DNA
tggtaatagatttagcagaatcaaggatgccaaaacctcttctgagagagaccttgattaagagtgagctggtttgcctgtaagaatctgcggaaaggtcagaaattagagacattagta

SEQ ID NO: 469 - DNA, 120 bp, synthetic construct
  source 1..120: mol_type = other DNA
ctaatacctgctagccaggggcctaataaggaagagattgaaatattcttttctagggggaaaaagttgaatgaccctagagaaaagccctacagataccaacatttagggattctcttg

SEQ ID NO: 470 - DNA, 120 bp, synthetic construct
  source 1..120: mol_type = other DNA
aagctatgcatttcccacaaatactgcttaaaaaaaaaagaactattctttgctatccttggagagagagattgcaaatgtcagaaaacaggatgcttttaaaaacaataacaatcagaa

SEQ ID NO: 471 - DNA, 120 bp, synthetic construct
  source 1..120: mol_type = other DNA
cagacaaactgtcaagatagaagaaaggtatttttttagacatgcaccctccctccccacctctgtgaagctactggatgatgaattccagcaaaatgaagaagtcagtcaataagtaga

SEQ ID NO: 472 - DNA, 120 bp, synthetic construct
  source 1..120: mol_type = other DNA
cttactgtaatgagattttctagaaagcggatttactctaaggcagttcagatttggtccccagctgagaattatagcctggaaataccaacagaaaaatcagtgtcatttgaaggacag

SEQ ID NO: 473 - DNA, 120 bp, synthetic construct
  source 1..120: mol_type = other DNA
atcctgaatcctgcctccttcccttgacacacttctatggtgggtgcctgcccaactttttcttaataggactaaattccaaattaaaaaaaaaattcagtctctctcctctaatcatcc

SEQ ID NO: 474 - DNA, 120 bp, synthetic construct
  source 1..120: mol_type = other DNA
cttactcatattatccacctttcacttaaattggaaattttctgccattttacaaagttcaagactttcctaccttcctacctcctggctgtgtgaacttggacagaatacttccccctc

SEQ ID NO: 475 - DNA, 120 bp, synthetic construct
  source 1..120: mol_type = other DNA
tattatagtctgatccaaggcccctgaactttccaaaagggcaacaaaacagacagatactgtattttttcactagttggtactggtggcacccttttgagtgttatttttggcattacg

SEQ ID NO: 476 - DNA, 120 bp, synthetic construct
  source 1..120: mol_type = other DNA
tgcaatacagttaatgaaggtaacatggcacataggaagagcacaatacacgtcagctcttactcttcatggctagaagatgtggactaaacttccccctttacagttttgtgattaaca

SEQ ID NO: 477 - DNA, 120 bp, synthetic construct
  source 1..120: mol_type = other DNA
ggggcgggggcgggcctggcgggcgccctctccgggccctttgttaacaggcgcgtcccggccaggcggagacgcggccgcggccatgggcgggcgcgggcgcgcggggcggcggtgagg

SEQ ID NO: 478 - DNA, 120 bp, synthetic construct
  source 1..120: mol_type = other DNA
aatggaaaaaaagtaaattaagggttatgggtcttcactttcgtagcttctaggtgggtatgaaattgatctgatttgagactggtgctcccagaccattgccttcagcagaaaggctat

SEQ ID NO: 479 - DNA, 120 bp, synthetic construct
  source 1..120: mol_type = other DNA
aggtggagtgggctcacagagcctagcatttggagggtggagattgtttatttgtccctaaaagttgatgtctgagcattccaaatcatcttcaattaatacatcgcttattttttccaa

SEQ ID NO: 480 - DNA, 120 bp, synthetic construct
  source 1..120: mol_type = other DNA
tgaactcatgctatctggcttgggagagcccacttttagccactggatgctctactgatgtctcttttggaattcactgtgattttcaaaatggtatctccagaaactcctccaattaat

SEQ ID NO: 481 - DNA, 120 bp, synthetic construct
  source 1..120: mol_type = other DNA
tacgcttttagaacttgagctttggagaagcttatgcttgctttctgctctctcctgaggtcatcagatacttcccttgttcagtaacaaagaaagtgagactctttctgttacctaata

SEQ ID NO: 482 - DNA, 120 bp, synthetic construct
  source 1..120: mol_type = other DNA
cttcctgtccttgatttttggctgaaaaatgtcttctcttcctcgcaccctctgttattcccgtagtgaatattttcattgtggaagagaaattcccattggctcatggttggcatttta

SEQ ID NO: 483 - DNA, 120 bp, synthetic construct
  source 1..120: mol_type = other DNA
attaggaagaatagcttgctaattataattacttagttttgatagtgtaactttgtcctcagatgggtagaatcgttactctggaacaggggtgtccaatcttggcttccctgggccaca

SEQ ID NO: 484 - DNA, 120 bp, synthetic construct
  source 1..120: mol_type = other DNA
tttccatttcctgccctcaaatgccttcataatagagtctacgtaataaggttatagggattcagtgcagatgaagtgctggcacttgatacgggatcagtaagtattagctattattct

SEQ ID NO: 485 - DNA, 120 bp, synthetic construct
  source 1..120: mol_type = other DNA
gtccggcgagctcactgtggtgtctgttaggaatctggagcaaatcctatttcttttgaaagcacagagaactgtgtttttacattatacctttaggattttggccatggtttatatttc

SEQ ID NO: 486 - DNA, 120 bp, synthetic construct
  source 1..120: mol_type = other DNA
aatggcaggtgttcagaatggccttgaagatagtggcatctctatttatgagtgtctttgtactccatttccagtaattggagactttttcaccgtagattcttggaaggtgacacaatt

SEQ ID NO: 487 - DNA, 120 bp, synthetic construct
  source 1..120: mol_type = other DNA
ggttaacaagtcctgcactaaggaattggctcagtaaaacctcagcattctcacaggaagagcctaaaaaggagactgggataaattagtgagaggtccaaattatgcaattttctttta

SEQ ID NO: 488 - DNA, 120 bp, synthetic construct
  source 1..120: mol_type = other DNA
taatagcgaaggacccacaaaggaaatatgaataaagcagcacaagtttaaataattgaatgtgagcaaaattaaagggaacgtttgtcacgtctgacatgctccatcctcctgtccccc

SEQ ID NO: 489 - DNA, 120 bp, synthetic construct
  source 1..120: mol_type = other DNA
aactagttggggcatcttttttttttgaatgaagccttcagccttctttaggggaatcttgcttcctgacagagggaccggtggaaagtttgtgtcttaagcaagaaagatttaagtaca

SEQ ID NO: 490 - DNA, 120 bp, synthetic construct
  source 1..120: mol_type = other DNA
aatccagatgcggcagaatgtttgatagaagaggtcaaatggcatttgagaagaaaagcatttctgtattcatgactttggtttaatttcctgtgtgggcctggtctgccaaagttgtat

SEQ ID NO: 491 - DNA, 120 bp, synthetic construct
  source 1..120: mol_type = other DNA
taaattctttatagacttctggttcatattccagttgccctcaatttatacacctactactagcattgtatgagagtgcccgtttctctgaaatcttacccacactggctgtcagcgtca

SEQ ID NO: 492 - DNA, 120 bp, synthetic construct
  source 1..120: mol_type = other DNA
tgctgctgcatatgttcctgtccacaagagccagtcatgtttgtttccaagcctggttctttcagatatagctgttgttgtaattacttggttgatatgaaaccaatgaaatgcaagtgt

SEQ ID NO: 493 - DNA, 120 bp, synthetic construct
  source 1..120: mol_type = other DNA
tcctgacctcggggatcacatattttaataaaattgataatccctaatagtgatggcgctaggtgtacttttagagccaatgtaaatagtcgagaaagggggccaaacatatgactaagc

SEQ ID NO: 494 - DNA, 120 bp, synthetic construct
  source 1..120: mol_type = other DNA
ggtgagcctccacgccgggcctctctttttaagataataaaaattactaaacatcataatgacatgatttgggattactctttcagagaaacagttcctaaaggtttacttcagttagtg

SEQ ID NO: 495 - DNA, 120 bp, synthetic construct
  source 1..120: mol_type = other DNA
tattctgtaataataattgccacaaggttaaaaaaaaaaatttacagaagaacatatttgagggtggtcgtgggggcaagaaagctggaaggacgggtggggtgtgttaatagccttgtc

SEQ ID NO: 496 - DNA, 120 bp, synthetic construct
  source 1..120: mol_type = other DNA
atatccaaaacaacaactgcatgtttctaagggagtcgactctccttagaggagttcttgtacaatagccctgggcaaaaacagaacttgccctattttttatactgaaaaggacagctg

SEQ ID NO: 497 - DNA, 120 bp, synthetic construct
  source 1..120: mol_type = other DNA
aaagctcaaccaagaagatgtttaaagaatctttcaggtgggagtcattccattagccttatgaagaccctttattgaggatccgttctgtgatattacaagttcctgggactggtatga

SEQ ID NO: 498 - DNA, 120 bp, synthetic construct
  source 1..120: mol_type = other DNA
cctccacctcccgggttcaagcatttctcctgcctcagccttccaggtagctgggattacaggcatgcaccaccacacccagctaattttgtatttttagtagagacagggtttcaccat

SEQ ID NO: 499 - DNA, 120 bp, synthetic construct
  source 1..120: mol_type = other DNA
ctttatgtgggtgtaagtgtgtgcagataagttgccagaactgactgaaggttatgtgcatcaccaggtcaccctctatagaaattgtacaaatttgttctcccacaaacaatccatgaa

SEQ ID NO: 500 - DNA, 120 bp, synthetic construct
  source 1..120: mol_type = other DNA
tctagtgtgacagctcattagctaggggttgatctaaaatactgttcaaatgggcaaggaaaggcctgcgtatgggatatgtgatttgcagaatttgagattcatccaaagagggagaat

SEQ ID NO: 501 - DNA, 120 bp, synthetic construct
  source 1..120: mol_type = other DNA
taaagttcttagttctgaatgtgtccacacctcattgacttctatgagatgcccctgtcacgttcctcgattccttctagtccttaatagagtctttccttttcttgaaagaaatttgcc

SEQ ID NO: 502 - DNA, 120 bp, synthetic construct
  source 1..120: mol_type = other DNA
ctgttagtgggacacggggaagatggctgtgaaccaaatatgcggtgcctttgggggagaatggttttagtatttagtaagtgtcagtatgtaagttttatgttgaaaaatgaactaagt

SEQ ID NO: 503 - DNA, 120 bp, synthetic construct
  source 1..120: mol_type = other DNA
ccccaggccacagtccttacaccttgagcaagttccccagagtgaagcaatctttctagacaagttttgcgtttctcagaattttattttagtgatattgttaccaaaagattgtaaccc

SEQ ID NO: 504 - DNA, 120 bp, synthetic construct
  source 1..120: mol_type = other DNA
gtacttattacatgttgatttcctgttctcaacattggaatgaagacagcttagggttctgctttcatgaagcttgcatgctcttaggtggagacagacagtaattaagcagataaacag

SEQ ID NO: 505 - DNA, 120 bp, synthetic construct
  source 1..120: mol_type = other DNA
ttttccgtcttatatcattcctgtgtctttgtaggagtggaatcattctcatagtccgagtgtgtttccacatatggtgagagctgacaagcatggaggggttttggtgtaaaaagatta

SEQ ID NO: 506 - DNA, 120 bp, synthetic construct
  source 1..120: mol_type = other DNA
acccaaaggcatagtgaaatgggaagtatgatttctgactggtatgaagtggctgctttagagaaaagatcacattctttagtcctagaaaccaaaggtggcttcctgatgctcttattc

SEQ ID NO: 507 - DNA, 120 bp, synthetic construct
  source 1..120: mol_type = other DNA
acttctaataatttttcccaagagcctaattaacttacgatctcacagttggtaaagaattacaggatgtcattgcgtggatttctgtgggcagtcacccggagtggtatctaattaggg

SEQ ID NO: 508 - DNA, 120 bp, synthetic construct
  source 1..120: mol_type = other DNA
gccaggagtggcagcatcaggatttgaactggggcactcagctccaaagctcagctcttcttttttaaaattgaacccagattcttatttctcaaataccataaaatatttacataagcc

SEQ ID NO: 509 - DNA, 120 bp, synthetic construct
  source 1..120: mol_type = other DNA
aaccaggtgacagcatcccataggcacggatctctgtcttctgttgtccacatcatgtgtcttggcagttgttccttattgatatacataaggttgtcttgtttttgtatggatatattt

SEQ ID NO: 510 - DNA, 120 bp, synthetic construct
  source 1..120: mol_type = other DNA
gaaggaatattggaaataaggataatccctgtggtgtttcactgtgcctgtaacctctctcacctagcatttggttaaccagaaacagatgtggaaactgatctatctgtagataatggc

SEQ ID NO: 511 - DNA, 120 bp, synthetic construct
  source 1..120: mol_type = other DNA
tgttgagtctgggagaatgtatctgtgagaagacaaacaaccctagtattcattaaagaaccagcctttgttttctacaagctatctgttcggtctactcaggaatagagataaactgcc

SEQ ID NO: 512 - DNA, 120 bp, synthetic construct
  source 1..120: mol_type = other DNA
tgtaagagagacagatgagaagagggctgcctttgagagccatgttccttttgcatgtacatacctctcaagattattacatgggtcttttagaagagggtcagtagctataaaagcaaa

SEQ ID NO: 513 - DNA, 120 bp, synthetic construct
  source 1..120: mol_type = other DNA
ttcctcctttggcctttgtagccaggttttcgcagcaaacagaccatatcatttaacacccacctgcttcttgttctgatagtcagttcagtagacagtagcattttttaagtcaaaaag

SEQ ID NO: 514 - DNA, 120 bp, synthetic construct
  source 1..120: mol_type = other DNA
ttttgcattaactagtcaagtacttacccactgaaaagcacttcctgaaataatttcaccttcgtttttttccttctgcaggaggacaccatggaggtggaagagttcttgaaagaagct

SEQ ID NO: 515 - DNA, 120 bp, synthetic construct
  source 1..120: mol_type = other DNA
accagtggagcagctaatccccggagtaaggaatatttcatttttgaaccattttgggctaagtggaatattaaatgaagttcataaaaggcgtccttcctaataatcacagtcccctct

SEQ ID NO: 516 - DNA, 120 bp, synthetic construct
  source 1..120: mol_type = other DNA
ccttgtgatttcatggttaatgttcatgaaccaaagattagactcctacctccctgggagaatcaggaagtgagaggaagcagattatacaggagagagttttttaggatacatttgggt

SEQ ID NO: 517 - DNA, 120 bp, synthetic construct
  source 1..120: mol_type = other DNA
cacccttttttttttttttttaactgtgtatttggcctgaggtccaaatatggtgcacagtgtatctgctgatctgttaagtctcctctataagccccctctccatgtctttatttccct

SEQ ID NO: 518 - DNA, 120 bp, synthetic construct
  source 1..120: mol_type = other DNA
ctggccccaaaatgcttgatttgctatcgtttttttgtgggggtttttttttgagtaatttttggcagttactgatatacagtgcctagatccaatagtttgctaggtattgccaggtag

SEQ ID NO: 519 - DNA, 120 bp, synthetic construct
  source 1..120: mol_type = other DNA
gtgtttcagtccactgcggttattttccctgttgatattcagattgtctcgtctttggccagtgggaacttcacattagctcctagtcattttgacattaactttgtagttttccatgac

SEQ ID NO: 520 - DNA, 120 bp, synthetic construct
  source 1..120: mol_type = other DNA
atcccttctgaggtctgctgcaaaggtaactgattttaaatgtagtgtagtgaaatgctacacatcttgaacagcctttctctttcggttttctttcagcatttggagtattgctttggg

SEQ ID NO: 521 - DNA, 120 bp, synthetic construct
  source 1..120: mol_type = other DNA
taaggtatttatatggccatttcttacactgttttcccacacatgtctttccacgtccatatattcagatctctccctctccctacctcttatttatgtatagctgcccagtactccatt

SEQ ID NO: 522 - DNA, 120 bp, synthetic construct
  source 1..120: mol_type = other DNA
gtctataacaggacatgatgacattcatcgttttgacttgttgcagcaaaagatggttagcaggattggaatgttgctttcattctagacttttccttgagaactgctagccccgtattg

SEQ ID NO: 523 - DNA, 120 bp, synthetic construct
  source 1..120: mol_type = other DNA
aaaaataataatggccaacatttatgtagtgtgcctactacaggccaggctctgttctatgttcatggttgacccccagaaccagcagtccaggttctgctgcagaccagctgaacaaaa

SEQ ID NO: 524 - DNA, 120 bp, synthetic construct
  source 1..120: mol_type = other DNA
tatggtatataaagtacgtatgtccactactgtaggagtagagtgcgtatgttatgtaccaaaacgcacatttaaaaggcttgcatgctaaataagtccaaatttgcaatacttcccgcc

SEQ ID NO: 525 - DNA, 120 bp, synthetic construct
  source 1..120: mol_type = other DNA
ctacagcactgttgtgagaatgcagatgaggttgtaaaggtgaagcacgtgtcacgcttctctcaataaagccatcattgctgttaggattgtcattaggaaaggctttgggccgggtgc

SEQ ID NO: 526 - DNA, 120 bp, synthetic construct
  source 1..120: mol_type = other DNA
atgaagatgagcgccttctccccaaagacaaaaagaccaacttgttcagcgccttgatcaagaagaagaagaagacagccccaacccctcccaaacgcagcagctccttccgggagatgg

SEQ ID NO: 527 - DNA, 120 bp, synthetic construct
  source 1..120: mol_type = other DNA
tcgccatctctaggaactccgagcagatggccagccacagcgcagtgctggaggccggcaaaaacctctacacgttctgcgtgagctatgtggattccatccagcaaatgaggaacaagt

SEQ ID NO: 528 - DNA, 120 bp, synthetic construct
  source 1..120: mol_type = other DNA
tgggagctgaaaaggatcgaggcatggggcatgtcctttccatctgtccacatccccagagcccagctcttgctctcttgtgacgtgcactgtgaatcctggcaagaaagcttgagtctc

SEQ ID NO: 529 - DNA, 120 bp, synthetic construct
  source 1..120: mol_type = other DNA
ctgcctgtctccatgaggtactggtcccttccttttgttaacgtgatgtgccactatattttacacgtatctcttggtatgcatcttttatagacgctcttttctaagtggcgtgtgcat

SEQ ID NO: 530 - DNA, 120 bp, synthetic construct
  source 1..120: mol_type = other DNA
actgcactgtccatccaccctccactcgcccggcctcttttctggtcccaatttctgctccaccattcccatgaggcagattccctccagaaggaggaagcgcggcttccgcaaactaag

SEQ ID NO: 531 - DNA, 120 bp, synthetic construct
  source 1..120: mol_type = other DNA
atttttcttggagatggggtggggagttactttctgttaaaggaagcattctggagtaggaagccaaattcaaatacacttctccctaggctggtttatgagcttctttggaagagttga

SEQ ID NO: 532 - DNA, 120 bp, synthetic construct
  source 1..120: mol_type = other DNA
ccagccccctttatgagcagcttcgaggaaggcactccatccaataggccgctaagtgtctgtctgggttttggcctttgggtgtccccttggtgtcagccaccttaggtggtcatgtct

SEQ ID NO: 533 - DNA, 120 bp, synthetic construct
  source 1..120: mol_type = other DNA
atcctgctgtcactcctggccctgatgctcctctttgcctctgggaacctccaggatctgtttagctggctgtagctaattagaaattgtagagtggcaacccccaagccaattttccag

SEQ ID NO: 534 - DNA, 120 bp, synthetic construct
  source 1..120: mol_type = other DNA
ccttccttatctaggagacatgtgggcccagagctgggaaaacatctacgacatggtggtgcctttcccagacaagcccaacctcgatgtcaccagtactatgctgcagcaggtaagctc

SEQ ID NO: 535 - DNA, 120 bp, synthetic construct
  source 1..120: mol_type = other DNA
aaaaaaagaaaaaaagaagttacttgtttctactgcggcttcatgccccagggcagctccctcctcattcctgtctttcaggtgccaatctgccctgtgccctggccctgccctgttctg

SEQ ID NO: 536 - DNA, 120 bp, synthetic construct
  source 1..120: mol_type = other DNA
tgccttttctacaaaagttaaatccatctgtttgcaacctctaggccctaagacaatttaaccatccttttccagaaccaagtatcaggggatctgtcctcctgttacccgaaacgaaac

SEQ ID NO: 537 - DNA, 120 bp, synthetic construct
  source 1..120: mol_type = other DNA
tgtcatcaaatatttattgagtgggccttctggctggcatggggcgacacaaatgccccctgccaccatcagagagatcccaggccccagggtcttattgccacagtttctgcagtccat

SEQ ID NO: 538 - DNA, 120 bp, synthetic construct
  source 1..120: mol_type = other DNA
cctccccacccccaaacctgagcatgtgcatacacacagagatgctgtcccgctcaccacacagtggggctgccaccacattttaaattgaatatttaaaacaatactcaatttcgggcc

SEQ ID NO: 539 - DNA, 120 bp, synthetic construct
  source 1..120: mol_type = other DNA
cactgttactgttccttggcactttgatctgttgcctcatctttttctcaacagccttgcaaaattggtgagcttattcccattttacagatgggatttgatattaactctgaggttcag

SEQ ID NO: 540 - DNA, 120 bp, synthetic construct
  source 1..120: mol_type = other DNA
tgacttcctcaccttctctgtctttcctgagcccctctcccagcatgtgactgataaggaaattgagtcacacagcccctgaaagcgccagactagaacctgagcctctgattcctctca

SEQ ID NO: 541 - DNA, 120 bp, synthetic construct
  source 1..120: mol_type = other DNA
acattagaacaatgacaaatagaaggggaaatggaaaataaacaggagaaacggttttcccaggacagggtttggcctacaagttgtggatgtgggtacccatgccaagtgtgaggggag

SEQ ID NO: 542 - DNA, 120 bp, synthetic construct
  source 1..120: mol_type = other DNA
ttgcatctggtgccacattcactgcagatctatgtcgggcaagtcaccatggatgggggaagaagttaataatcttgtccaggagaccacggcacccatcacaacattgtgtgatcttag

SEQ ID NO: 543 - DNA, 120 bp, synthetic construct
  source 1..120: mol_type = other DNA
cacctcacttggctaggaaagagccttgagtccaaatctgtttctgagccttccattcatcctgagtttcttccttttcctctgtcgtggagaactaggctcttttcttacactaaactc

SEQ ID NO: 544 - DNA, 120 bp, synthetic construct
  source 1..120: mol_type = other DNA
gatgatgtgtgcctcaaagcttgcaaacagtaggtgctcaagaaatgccactatgattagcaggactgggatctggagcgctcttcctgcaggagggcattgagcctaagtaacatttgt

SEQ ID NO: 545 - DNA, 120 bp, synthetic construct
  source 1..120: mol_type = other DNA
tagttacctattgctgtgcaaccaagcaccccagagcttagccttacgaaacaaccagttgattttgcttatgattttatgtgccaggaattcaggcagtacacagtggaaatggccttt

SEQ ID NO: 546 - DNA, 120 bp, synthetic construct
  source 1..120: mol_type = other DNA
cataaaaaataaataagtaaatgagaacaaggaaggactgacgagagacggtagaaccttctggtttgggcagctctgcagctgccattcatcctggccataagaattcttggggtgaat

SEQ ID NO: 547 - DNA, 120 bp, synthetic construct
  source 1..120: mol_type = other DNA
catgacatcaactttctgatgaagatggcccttgacaagatcgcctttatccccttcagctacctcgtcgatcagtggcgctggagggtatttgatggaagcatcaccaaggagaactat

SEQ ID NO: 548 - DNA, 120 bp, synthetic construct
  source 1..120: mol_type = other DNA
ctgtgattcttttactattattgaacattgtctgcgatacaatttgaattgtacctggaagcccttctagacactaaaatgtaggattggagatcggttaaggtgggaggcagggttgct

SEQ ID NO: 549 - DNA, 120 bp, synthetic construct
  source 1..120: mol_type = other DNA
atttaaaacctcttcagactttaagctggggagaatcctccagccttgactggcagatttctaccagggaattcgtgatgctttggataagatcatgtaggactggcttccctgcccaga

SEQ ID NO: 550 - DNA, 120 bp, synthetic construct
  source 1..120: mol_type = other DNA
gcccaacatgagcgcctcggccatgttgagctacttcaagccgctgctggactggctccgcacggagaacgagctgcatggggagaagctgggctggccgcagtacaactggacgccgaa

SEQ ID NO: 551 - DNA, 120 bp, synthetic construct
  source 1..120: mol_type = other DNA
gtgaatacaattaaaggtcctgccctccccatctgagtctgtgtccctcacagggaagccagggacagggacaggctgctttcctgcctcctggcagtcaagtgggtcccgttactaggt

SEQ ID NO: 552 - DNA, 120 bp, synthetic construct
  source 1..120: mol_type = other DNA
cccatgcattcgggtcaagtgaagtcaaaggaaagctcatcttttttggttttctcttgtgttttcttcaactttaagctcactcacaacattctgagtatgcctgtcatttagacttca

SEQ ID NO: 553 - DNA, 120 bp, synthetic construct
  source 1..120: mol_type = other DNA
cagcagaaagaagaaagtaaaggtaatccataatcccccaacctagaaacaatcattctcaatgtttacttgaatttctatcaacttcttactaggcatatgtacaagttttactgctgt

SEQ ID NO: 554 - DNA, 120 bp, synthetic construct
  source 1..120: mol_type = other DNA
gactctggagctagaaggcagaagttagatataactgcctgtttccagttgtgcctcatgtaaatgcaggtgacaaaattcattttattagctggttgtgagagttaagtgttagagaca

SEQ ID NO: 555 - DNA, 120 bp, synthetic construct
  source 1..120: mol_type = other DNA
ttccagactgcaacgactgaggttaataagagatacagtacctcaataagcttttacaggctcagacttaaaaaaaaatcacagataaacaagggtccctggttattctctctcccacag

SEQ ID NO: 556 - DNA, 120 bp, synthetic construct
  source 1..120: mol_type = other DNA
tggtttaggattgccccaagatatgtaatgattagttctttgattttggattctgacctttgggagaccagacatcctcagaacatgtggctgtcagatatttggtatcttgagataagg

SEQ ID NO: 557 - DNA, 120 bp, synthetic construct
  source 1..120: mol_type = other DNA
ctgttgacttttcaaagtattcagtcctactagtattgggctctagttttgtgccaggtactgtccagtttctgtgataaaatatagtaatgcatttgagcttcactttccttagggcat

SEQ ID NO: 558 - DNA, 120 bp, synthetic construct
  source 1..120: mol_type = other DNA
cccaggccaaacacagcacaggtagagcctggggtgacctgtgttttcagaaaatgcaaaaatggattataaaaactttataaagtgccatgcttagtgtttatcaaaagctgctcaaac

SEQ ID NO: 559 - DNA, 120 bp, synthetic construct
  source 1..120: mol_type = other DNA
tctcagctctcatattaaccagcagtgagactttgggcaaatatctttatatctctgggcctcggtttcataaaataaagcatactactagattttcagcctactcagataagaagcctt

SEQ ID NO: 560 - DNA, 120 bp, synthetic construct
  source 1..120: mol_type = other DNA
aacctactcgtttttcaagcagtagttgctctccgggtttttacaaattctgcattttccacactgaggaatagcgagtgggatgactttatcacctggagagggataaaacaaattctt

SEQ ID NO: 561 - DNA, 120 bp, synthetic construct
  source 1..120: mol_type = other DNA
cctctggaaatttcaaccctccacaataagttaggcacttttaggataagaactgactttgaaatgtttttagctgataatttgtgaattatctacttttcctgttacagtggagggagc

SEQ ID NO: 562 - DNA, 120 bp, synthetic construct
  source 1..120: mol_type = other DNA
atttaagcatggctgaaagtaataaggcagacattgttgatggtggatggctctttctatgtttctttcatttcctttcacctagtctgcttcattgattccttgctcaggaagagagac

SEQ ID NO: 563 - DNA, 120 bp, synthetic construct
  source 1..120: mol_type = other DNA
cttaaatacaaatggaaaaatgtatttcaccttaatacgaacttcatgggccttaggaggtgcaacctccacctcctcaatggaaaagggtttctttaactcccatagcacagctgcttt

SEQ ID NO: 564 - DNA, 120 bp, synthetic construct
  source 1..120: mol_type = other DNA
atcaatgccaaataaatatcagaatacttggaagtaaagtactaatagtaggagttcctgattatcaggtgcctatgatgtgacaggcacattgtggcctgtgctcggtgagttatttgc

SEQ ID NO: 565 - DNA, 120 bp, synthetic construct
  source 1..120: mol_type = other DNA
ttacagctgaaataattgaggatccattgactcagtgattaactaatttctctaaagtctcaaagctggctttccagagaataaagatgaatctagccttatgttttcactactcggtgt

SEQ ID NO: 566 - DNA, 120 bp, synthetic construct
  source 1..120: mol_type = other DNA
gttccataggattactctggaaattgcctgaattgtgtcctactagacccttttaaatcagaatttgaatgttgatgttgtcttgattaaccttgatgattctaatgctgtgagaccaat

SEQ ID NO: 567 - DNA, 120 bp, synthetic construct
  source 1..120: mol_type = other DNA
tgtcttcagtcctgtgtctgtcactctcataatcctgtttcagcacctatgaaggcacttctgtggaatacttgattacagacccagccaatactttctacactggaatacatatatata

SEQ ID NO: 568 - DNA, 120 bp, synthetic construct
  source 1..120: mol_type = other DNA
ccaccccgctttagcatttttgacaaaacaatcaggttacccacatttacatggcccttcttaattggcgaagctctttcattaacatcatcccatttaatcttggttaagctgtaatgg

SEQ ID NO: 569 - DNA, 120 bp, synthetic construct
  source 1..120: mol_type = other DNA
gatttggtacatttttattagaaaaaggaaaatgtcgacagtgaaaactgagacagagttagaagacttcaatcacaatggcccagcatgtgtatgttcagggcaagtaaaagggtcccc

SEQ ID NO: 570 - DNA, 120 bp, synthetic construct
  source 1..120: mol_type = other DNA
aagaggtaggttcccatattatgtccattttagagattataaaaactgagacttagaaagatttgtaacttgctctggtagcacatctagtatggagtgttgggattcaaacccaaatac

SEQ ID NO: 571 - DNA, 120 bp, synthetic construct
  source 1..120: mol_type = other DNA
atgactactgttttccatatgtacatgcactcttgaggggcggtgtggtttaatagaaagtgaatcgatttgctaaaaacaagatctacttttgaattctgcctccccttcctaccactt

SEQ ID NO: 572 - DNA, 120 bp, synthetic construct
  source 1..120: mol_type = other DNA
tttttgtggggttttttttgggcaaatgtgagtgttctcttttcaggaaggctgagtggctctgatcattcagatttgcagtaatcaacgtaatttgactccagcagaataggaaatgca

SEQ ID NO: 573 - DNA, 120 bp, synthetic construct
  source 1..120: mol_type = other DNA
cagtcacaagtacaaaaacagatggagattaaaggtcctgggttatggtgacaacagaaaaaagtctatattgggaccttctgtctgcattagttccatatctagttgatttggagactg

SEQ ID NO: 574 - DNA, 120 bp, synthetic construct
  source 1..120: mol_type = other DNA
aaaatggatgaaaatatagaaaaggagcataaagagaaaagctgtagccctggaaaaagttgaattctcttgacattttattcctctgtggcatctgtcctaggtcaaggctgccgagag

SEQ ID NO: 575 - DNA, 120 bp, synthetic construct
  source 1..120: mol_type = other DNA
tgctgacttttcaaagtattcagtccaactaatattgggtactagctatgtgccaggcactgtccagtttctgtgataaaatacagtgatgtcttaaagcagtcaatttccttagggcat

SEQ ID NO: 576 - DNA, 120 bp, synthetic construct
  source 1..120: mol_type = other DNA
gagatccagatggcagtgattacaatcttgaagggactgtcaattgctgaaatcccttgatagccagcttcagtaactcatacatacacaacggcaatatttggaaaacaaaataagtgg

SEQ ID NO: 577 - DNA, 120 bp, synthetic construct
  source 1..120: mol_type = other DNA
tatatgtgtgtgttcatgccaggggagttagttttagcagtgaaatcccataatgagtgaattatgcatcactgagtctttattactttccgtctaagaatccacagagtgggtgagcct

SEQ ID NO: 578 - DNA, 120 bp, synthetic construct
  source 1..120: mol_type = other DNA
aatagagttcaataataactatgtcatctttcaatgcctgccacagcattgttttcagtttgagtttataagtgcctgaggattcctactgagaaatcgcaaatgtgggagaccacacag

SEQ ID NO: 579 - DNA, 120 bp, synthetic construct
  source 1..120: mol_type = other DNA
atgaaataattagtaatctgtaaccagttgcatttaagcatggctgaaggtaacaaggcagacattgttgatggtgggatggttccttctacgtttctttcatttcctttcacctagcct

SEQ ID NO: 580 - DNA, 120 bp, synthetic construct
  source 1..120: mol_type = other DNA
tgccactaaccacgtggtcatctgtgtgacagattcctacagccaccatctacagaataaagagaagctgttcagattcagaaaagattgtaactagatgaatttaacatacccaaattc

SEQ ID NO: 581 - DNA, 120 bp, synthetic construct
  source 1..120: mol_type = other DNA
cctgcgcacaatgacatttctttctctccctatttgcttattgtcctcttttaattttctctctccactacttctgtgtgctacttgtttcctactcatttgaaacttagctttggcagc

SEQ ID NO: 582 - DNA, 120 bp, synthetic construct
  source 1..120: mol_type = other DNA
cgtcctctagctccatcaaccagtcttattgatatgagcctgtttgtcacacaatgcagagagaagcctcagaacctttaaattgaattatcatagtgagatattttacagtgtggtaca

SEQ ID NO: 583 - DNA, 120 bp, synthetic construct
  source 1..120: mol_type = other DNA
tgtcgtttctgtcttctctgcccaccagcagactgtgagtctttgtggatttcttctctgcttgagtgcataaagcagatatattgcacagatatttattttgtttgcttgtgtaacatc

SEQ ID NO: 584 - DNA, 120 bp, synthetic construct
  source 1..120: mol_type = other DNA
ctattcagaatgaaggactcaggggaggcattgtagaggaacaggcatttgtggcagattttaaataattgtgagaaatggagcaaaatcctcactggatcatttccattaccctttgat

SEQ ID NO: 585 - DNA, 120 bp, synthetic construct
  source 1..120: mol_type = other DNA
atgtgtacaataggtgtttaatgaaagattgttgaattcttgtgctcctttatgttaggacacgcactgttctatgagcagtcccataatccagaagatctggtgtctcctctttaaggg

SEQ ID NO: 586 - DNA, 120 bp, synthetic construct
  source 1..120: mol_type = other DNA
tttctctctctgtgtgtgtctctgtaagccagcccgattctatattacatttccaccaactactatattataaatgcagcttatccagagagatgatatgcttgcttcagtttgggtcag

SEQ ID NO: 587 - DNA, 120 bp, synthetic construct
  source 1..120: mol_type = other DNA
ctggaattcttccatgaagagcgtgtgtgagagaacaaaatgtttgtttacattcctcctgtgaaggcagttgggaaataatctaagaagcccaatccaaaaacagagatgttccatcca

SEQ ID NO: 588 - DNA, 120 bp, synthetic construct
  source 1..120: mol_type = other DNA
ttccctcttctcagggtgagagcatcagcttctcagataccacatctttctttgaattaatttatcagttttggggcacttcattagtaatcttctggagaaaaagttacaccaaggggt

SEQ ID NO: 589 - DNA, 120 bp, synthetic construct
  source 1..120: mol_type = other DNA
tgtctgccattgataatcttagattcctgaatgatccagtaagaaaacatttctatgactctattactccataatgcataacatcttcttaaggctttagaggtgaccgagacagtttat

SEQ ID NO: 590 - DNA, 120 bp, synthetic construct
  source 1..120: mol_type = other DNA
tgccacagcctcctagaatgctggaatcacaggtgtgcctgacatccgactccctagtttttaaaagattcacttaccattcaaaatagggagttatcattccttattttgccaatcagt

SEQ ID NO: 591 - DNA, 120 bp, synthetic construct
  source 1..120: mol_type = other DNA
taataatttataggaacttgacatcgagagcatcctcatgaattctattgccatgttgtgtgctatggactgaagtttcgtgttccaccaaaattcacgtgttgaagtctaatccccagt

SEQ ID NO: 592 - DNA, 120 bp, synthetic construct
  source 1..120: mol_type = other DNA
aggaaagccttcagaaagaggagagaatttggacaaactttttcatgatataaaaaagactggtgagtagagatgccagtgtcacttgggataagattttcacttgtaggaaggcatggg

SEQ ID NO: 593 - DNA, 120 bp, synthetic construct
  source 1..120: mol_type = other DNA
gcacctcccattctgaacgggaggtagactttgcataaaaaactgcatttgaaaatcctagagggccttcaaactcatcaagtccatttcccaaactttaccattgtgatggtttgaata

SEQ ID NO: 594 - DNA, 120 bp, synthetic construct
  source 1..120: mol_type = other DNA
cctcaccctctctattcttctcctcacctctaatacaccctcctcaaggccaaaagaatgagtttaatatgccaatctgatcatatcatcaatcttctccaaaaagttttaacagcgttc

SEQ ID NO: 595 - DNA, 120 bp, synthetic construct
  source 1..120: mol_type = other DNA
cttttgttttgcttccaatttcctgaggttttaattaaggttcaaaataagtatttagtcttgaagttatttctgagctcttttctcccacctacctaaaacatggtatcatctaagtga

SEQ ID NO: 596 - DNA, 120 bp, synthetic construct
  source 1..120: mol_type = other DNA
gatagtgccgtgcaggtgatctggaccctgagatctaagtaaaagaaatgagcaaaccaagttaatatatgtaaacatccatctcattaaatcagtgtttggtaccagctccacttttac

SEQ ID NO: 597 - DNA, 120 bp, synthetic construct
  source 1..120: mol_type = other DNA
tgtcttgaccctgagtatctccttcagcatttttgaccaaacaatcacatgttctctacatttaggatgcccttcccagttggcaaaactctttcattaatatcatcacatttagcctcg

SEQ ID NO: 598 - DNA, 120 bp, synthetic construct
  source 1..120: mol_type = other DNA
gtacattttatttaaaaaaggaaaatgcagacagtgaaaattgagatagagttagaagacttcaagcaccatagcccagcatgtgtatattcaggacaagtgaagggtcccctccactgg

SEQ ID NO: 599 - DNA, 120 bp, synthetic construct
  source 1..120: mol_type = other DNA
gcatttgggtcaagtcaagtgaagggaagttcatgttttttggttttctcttgtgttttcttcaatcttaagctcactcaaaacctcctgagtatgcctgtcatttagacttcagatcta

SEQ ID NO: 600 - DNA, 120 bp, synthetic construct
  source 1..120: mol_type = other DNA
ataacaagatcttccttcgaattctggctctccttcctaccacctgatgattttgaccaagtcatgccttctctgcttcttagttttctcttctctaagataatgagattgagactgaca

SEQ ID NO: 601 - DNA, 120 bp, synthetic construct
  source 1..120: mol_type = other DNA
ctttttttggagggggatgggggccaaagtgagtgttctcttttaaagaaggctgaatgactctgatcattcagttatgctataatcaacataatttgccttcagcagaataggaaatgc

SEQ ID NO: 602 - DNA, 120 bp, synthetic construct
  source 1..120: mol_type = other DNA
tgttatatatttccatggcctactagaaatttccttgccttacgcagtcacaagtacaaaaagaggtggagatgaaagtcctggttaatagtgacatcagaaaagtctatcttggggctg

SEQ ID NO: 603 - DNA, 120 bp, synthetic construct
  source 1..120: mol_type = other DNA
cctctaggtatataatgattagttctttgattttggattctgatctttgggagactgacatcctcagaacatgtggctgtcagacatttggtgtcttgagataatgtacactccagttcc

SEQ ID NO: 604 - DNA, 120 bp, synthetic construct
  source 1..120: mol_type = other DNA
caatgccatgagatatgtagctcttaacttttgcgggtggtaaaatctgttgactttatttaaagcattcagtccaagtaatactgggtactagttttgtgtcaggcactgtccagttgc

SEQ ID NO: 605 - DNA, 120 bp, synthetic construct
  source 1..120: mol_type = other DNA
cttgtagggactctcaattgctgaaatcccttgatagccagcttcagtatctcatacatacaccaaggcaatattcggaaaataaaataagtggaaaaggctactccaggagactgaaaa

SEQ ID NO: 606 - DNA, 120 bp, synthetic construct
  source 1..120: mol_type = other DNA
ctactagattttcagtctactcagatgaggagcctttaaagaatttctgcttgaaatttaccacttctgaatacatatgtgtgttcatgccaggggagttagttttagcagtgaaatgtc

SEQ ID NO: 607 - DNA, 120 bp, synthetic construct
  source 1..120: mol_type = other DNA
ctgtgcaaagaaagcatcagaaacttactcatttttcaagcagtagttgctttctgggtttttacaaattctgcattttccacactgaggagtaaagagcgggatgactttatcacctgc

SEQ ID NO: 608 - DNA, 120 bp, synthetic construct
  source 1..120: mol_type = other DNA
cagtcacatttaagcatggccaaaggtaataaggcagacattgttgatggtggatggctcctgctatgtttctttcattttctttcacctagtcagtttcattgattccatgctcaggaa

SEQ ID NO: 609 - DNA, 120 bp, synthetic construct
  source 1..120: mol_type = other DNA
caggttgccactaaccacatgctcatctgaacgacagattcctgcagccaccatctacagaataaagagaagatgtttagattcagaaaagattatgactgtcagatggacttaacaaac

SEQ ID NO: 610 - DNA, 120 bp, synthetic construct
  source 1..120: mol_type = other DNA
acgcttgcagtcagaaattgtgtcttttcatctttgtacatgcaacattgagtcccatgtctggcacctaacaagtgttgcatagaaatgaagtcctctggtttataaagagaataagag

SEQ ID NO: 611 - DNA, 120 bp, synthetic construct
  source 1..120: mol_type = other DNA
tgatattttctaacactgtcctgaagacaactgtttacccacaactattggctggtacatgttctaagtcacctttactttgctgacagagtcagtgtctgtccaaaatacactgctttc

SEQ ID NO: 612 - DNA, 120 bp, synthetic construct
  source 1..120: mol_type = other DNA
tggtccatgccaaaataaatatcagaatacttggaaataaagttctaatagtaggagtttctgattgtcaggtgcctatgatgtgacaggtgcactgtggcttgtgctgagtgagttaca

SEQ ID NO: 613 - DNA, 120 bp, synthetic construct
  source 1..120: mol_type = other DNA
tgtcacaatttaggattgaggaaaataaaatgcaggacgggtaaacataaatgaaatgctgtcaaaaagctaagttattgatgttgcactcaagaggggaggattatctatttcatcagt

SEQ ID NO: 614 - DNA, 120 bp, synthetic construct
  source 1..120: mol_type = other DNA
agatactgttccataagatttctgtggaaattgcctgaattgtgtcataatgggccccctttaaacggaatttgaatgtgatgtcttgcttaaccttgatgattctaatgctgtgagatc

SEQ ID NO: 615 - DNA, 120 bp, synthetic construct
  source 1..120: mol_type = other DNA
cttcccatccctatgcatttgggtcaagtcaagtgaagggaagttcatgttttttggttttctcttgtgttttcttcaatcttaagctcactcaaaacctcctgagtatgcctgtcattt

SEQ ID NO: 616 - DNA, 120 bp, synthetic construct
  source 1..120: mol_type = other DNA
gaatacaggacagaagaagccgctaaaaaaaatctgtaatcttacgacctcggagtaatcatggtcaatgttttcttgaattctatcagctttttctagatacagatacactttctattg

SEQ ID NO: 617 - DNA, 120 bp, synthetic construct
  source 1..120: mol_type = other DNA
ttgggaatcacatgagaaaatgcatgtaagacacttagtagaacagctggtgctctgtgggtgctagtgtctttccttcctcaagaatatttgtcggataaagtatctagtatgatagtt

SEQ ID NO: 618 - DNA, 120 bp, synthetic construct
  source 1..120: mol_type = other DNA
ttattgttatatatttccatggcctactagaaatttccttgccttacgcagtcacaagtacaaaaagaggtggagatgaaagtcctggttaatagtgacatcagaaaagtctatcttggg

SEQ ID NO: 619 - DNA, 120 bp, synthetic construct
  source 1..120: mol_type = other DNA
ggaagagatcatgtcttttgctccttcattccccctttctttgcataggataatgctgtggatgtagcaaatgcccagaaaatggtttttgaatgaaagcatggacgaataaatttgtgt

SEQ ID NO: 620 - DNA, 120 bp, synthetic construct
  source 1..120: mol_type = other DNA
tgctgctccctgttacccacactgctggaccttctagaaaacctcagcaatggaaacttttttgtttctggagactttttcagtaggagtctagataattctggataggtaaaatatagc

SEQ ID NO: 621 - DNA, 120 bp, synthetic construct
  source 1..120: mol_type = other DNA
ccattcatcattaaaaatatcctttatacataatacgtatattctactgcctaaatgcatcctccaggttgcagaggcagaaatttcagggcatgtcacggatcataccatggtgtcaag

SEQ ID NO: 622 - DNA, 120 bp, synthetic construct
  source 1..120: mol_type = other DNA
atctgttgttatgagtatcctcagcttctgttcttgggtaggctcacttagactacccattaaaatagatgaggcaattgaacaagggagtaagtgctaaagtcaccgaaatttggaaaa

SEQ ID NO: 623 - DNA, 120 bp, synthetic construct
  source 1..120: mol_type = other DNA
acaaaaataatttctgattcttgcaagaaattgcttcccttttggttcctgacagtctgcgtgtaaccggttttatcatccattgtcatttctaccttggcaactttgactgcagaccca

SEQ ID NO: 624 - DNA, 120 bp, synthetic construct
  source 1..120: mol_type = other DNA
agggtctagtcacaactatgtcatttgtcattgcctgccaaggcattgttttttagtttgggtttataagtgcctgaagaatcctaaagagaaaatacaagtgtgggaaacaagatggat

SEQ ID NO: 625 - DNA, 120 bp, synthetic construct
  source 1..120: mol_type = other DNA
aaatcggtaaaggagctgcataggtcacctaaggaaaggtcatgtttcttcagccataaccatgcagcctccattttgtgaactcagcacagaacagtgtccatacttatgttttttttt

SEQ ID NO: 626 - DNA, 120 bp, synthetic construct
  source 1..120: mol_type = other DNA
taaaattaaatacaaatggaaaaagtatttcaccttaatgcgaacttcatgagccttaggaggtgcaacctctacctcctcaatggaaaagggtttctttaactcccatagcacagctgc

SEQ ID NO: 627 - DNA, 120 bp, synthetic construct
  source 1..120: mol_type = other DNA
tttggttttttgttcttgcgatagtttactgagaatgatgatttccagcttcatccatgtccctacaaaggacatgaactcatcattttttatggctgcatagtattccatggtgtatat

SEQ ID NO: 628 - DNA, 120 bp, synthetic construct
  source 1..120: mol_type = other DNA
ctccaaagatgtttaatcctgatattttctaacactgtcctgaagacaactgtttacccacaactattggctggtacatgttctaagtcacctttactttgctgacagagtcagtgtctg

SEQ ID NO: 629 - DNA, 120 bp, synthetic construct
  source 1..120: mol_type = other DNA
ggtccatgccaaaataaatatcagaatacttggaaataaagttctaatagtaggagtttctgattgtcaggtgcctatgatgtgacaggtgcactgtggcttgtgctgagtgagttacat

SEQ ID NO: 630 - DNA, 120 bp, synthetic construct
  source 1..120: mol_type = other DNA
gtcacaatttaggattgaggaaaataaaatgcaggacgggtaaacataaatgaaatgctgtcaaaaagctaagttattgatgttgcactcaagaggggaggattatctatttcatcagtt

SEQ ID NO: 631 - DNA, 120 bp, synthetic construct
  source 1..120: mol_type = other DNA
gatactgttccataagatttctgtggaaattgcctgaattgtgtcataatgggccccctttaaacggaatttgaatgtgatgtcttgcttaaccttgatgattctaatgctgtgagatca

SEQ ID NO: 632 - DNA, 120 bp, synthetic construct
  source 1..120: mol_type = other DNA
ccgcacacggtaagacctcttgctttcgctcaggctcaagattcaagatacagatattgatatgtatatatatatttaatttcctgtcatccttccaagttatcaggccaccgatgattt

SEQ ID NO: 633 - DNA, 120 bp, synthetic construct
  source 1..120: mol_type = other DNA
ccatcagcctggaccgctactggtccatcacacaggccatcgagtacaacctgaagcgcacgccgcgccgcatcaaggccatcatcatcaccgtgtgggtcatctcggccgtcatctcct

SEQ ID NO: 634 - DNA, 120 bp, synthetic construct
  source 1..120: mol_type = other DNA
ccctaatcactattgcttcctaaaggtattttcaccctcttcgcctggtacagccctcacagctcttcagagcaagcactggactacaagggcatggctcacaaaaggttaatggatggg

SEQ ID NO: 635 - DNA, 120 bp, synthetic construct
  source 1..120: mol_type = other DNA
atcttttagctgctgtttttagactccaaggagtggaaattatgtggaagaagcaaacctgatacaatttgcccaaggtaaacagtttgaaaagacaaatgggcctgccaaactgtacag

SEQ ID NO: 636 - DNA, 120 bp, synthetic construct
  source 1..120: mol_type = other DNA
ggccgcaccgctccccgacggcgcggccaccgcggcgcggctgctggtgcccgcgtcgccgcccgcctcgttgctgcctcccgccagcgaaagccccgagccgctgtctcagcagtggac

SEQ ID NO: 637 - DNA, 120 bp, synthetic construct
  source 1..120: mol_type = other DNA
gccgccctcgccctcgccctcgcccgtccccgcgcccgcgccgccgcccggacccccgcgccccgccgccgccgccgccaccgccccgctggccaacgggcgtgcgggtaagcggcggcc

SEQ ID NO: 638 - DNA, 120 bp, synthetic construct
  source 1..120: mol_type = other DNA
aatcctcgtctgaatcatccgaggcaaagagaaaagccacggaccgttgcacaaaaaggaaagtttgggaagggatgggagagtggcttgctgatgttccttgttgttttttttttcttt

SEQ ID NO: 639 - DNA, 120 bp, synthetic construct
  source 1..120: mol_type = other DNA
ttatattaaacagcttatttatgtatcaatattagttggaaggaccaggcgcagagcctctctctgtgacatgtgactctgtcaattgaagacaggacattaaaagagagcgagagagag

SEQ ID NO: 640 - DNA, 120 bp, synthetic construct
  source 1..120: mol_type = other DNA
tcactggcctgtgctgatctggtcatgggcctggcagtggtgccctttggggccgcccatattcttatgaaaatgtggacttttggcaacttctggtgcgagttttggacttccattgat

SEQ ID NO: 641 - DNA, 120 bp, synthetic construct
  source 1..120: mol_type = other DNA
tgcccttcttcatcgttaacattgtgcatgtgatccaggataacctcatccgtaaggaagtttacatcctcctaaattggataggctatgtcaattctggtttcaatccccttatctact

SEQ ID NO: 642 - DNA, 120 bp, synthetic construct
  source 1..120: mol_type = other DNA
atctacctcactattcaagtattaggggtaatatattgctgctggtaatttgtatctgaaggagattttccttcctacacccttggacttgaggattttgagtatctcggacctttcagc

SEQ ID NO: 643 - DNA, 120 bp, synthetic construct
  source 1..120: mol_type = other DNA
aaaagcatgggacatgctgtttatcctggggcaaagaaagattacccccactggatatattttaaaaggcgacaggaagcaaaaaataaagttgtgttttgcatacaacatgagttgtgc

SEQ ID NO: 644 - DNA, 120 bp, synthetic construct
  source 1..120: mol_type = other DNA
ttaagctttgactgaattctgaatacaactggtgcttaggagttaaatgaacttacctgtctaaatggcttgaatgagggccacctgcatgttcagtggtttcaggttatctaccttgat

SEQ ID NO: 645 - DNA, 120 bp, synthetic construct
  source 1..120: mol_type = other DNA
accctagattgtacccttgctaacaaagggataactcaagccctaaagccacttggggcaagcgcagcatttcggatatctaaccataagttgaaatggttatataataaattctctatc

SEQ ID NO: 646 - DNA, 120 bp, synthetic construct
  source 1..120: mol_type = other DNA
atgtttattcaagttctttgcccccaatgattttttaaaatagcattataaggataagacttgagaggagagaatcgtggttaggctcttcaaagctgttaaaaacaggccgggcacggt

SEQ ID NO: 647 - DNA, 120 bp, synthetic construct
  source 1..120: mol_type = other DNA
ctgtcttttttgtacttcctgttcttttccttatagttttattgccttgtcaatgtcttgcactgaaaagtctctgggagagaacctgattcctttggttggtcactgtccttcttgaag

SEQ ID NO: 648 - DNA, 120 bp, synthetic construct
  source 1..120: mol_type = other DNA
gttcattaatatttaacaaatcatgctgcaggaggcacagtggattcctccagagcagcatacattagaaggccctctctttctgaaagagtatgcggtatttagtcttagaaattacct

SEQ ID NO: 649 - DNA, 120 bp, synthetic construct
  source 1..120: mol_type = other DNA
aggcctggtggcctcagcctgctaacaatttgagcatgcctcattgtaaaatccgcattttaaaatccttgctttggctataatctatttctccctaatcaatacaaatcaccctttgaa

SEQ ID NO: 650 - DNA, 120 bp, synthetic construct
  source 1..120: mol_type = other DNA
tttacaatatgatgtagagagtaattgattaactcccaggtagcagaatcgagctggaaccaggttttctgacatgtgtttctacaagagctttgtgatcatggatctcagcagtttgct

SEQ ID NO: 651 - DNA, 120 bp, synthetic construct
  source 1..120: mol_type = other DNA
taggaagaaagcaagtgaggattcaggagatatggttctactcctagctccaactattctgcaccttgggccaattgctttctctctgtatggccaatttctttacttgttaattaggaa

SEQ ID NO: 652 - DNA, 120 bp, synthetic construct
  source 1..120: mol_type = other DNA
agcacacattttgcatttgtaaccagagaagggaatgatgacgtggtagcattgtcctttgagtctcatcttctcaaaggcagaggtcacattttctagtgttgtacctaacctagtttt

SEQ ID NO: 653 - DNA, 120 bp, synthetic construct
  source 1..120: mol_type = other DNA
attatagaatgaaggtcacaagggaaaaggaacatattctcttcctcactcagtaaatttatgacagcaaggatccagaaatcctagggaacacaggccaaatacaccttttgcatgagg

SEQ ID NO: 654 - DNA, 120 bp, synthetic construct
  source 1..120: mol_type = other DNA
caatgcatattaactattattagtgctattttaatcaacactgcatctgggtggtagaacattcctcccttgctaattgcaccttcttctcttttccttcctttagggagggcttccctg

SEQ ID NO: 655 - DNA, 120 bp, synthetic construct
  source 1..120: mol_type = other DNA
ggcattccctttctgtcttacgtacttcgaatgagagatgacaccatgcatatggtacttctatcatgatccaatcagattatgtttaccaaggacttggtacaatgtccatacctccat

SEQ ID NO: 656 - DNA, 120 bp, synthetic construct
  source 1..120: mol_type = other DNA
tgacagcttggcttcctttactgtttatttttatgttgtgtaaaatgccgacttactgatgcataagacaaatgtttaattgactgctcctctccctcctcctttcacatgtaacatgtg

SEQ ID NO: 657 - DNA, 120 bp, synthetic construct
  source 1..120: mol_type = other DNA
tttccatttgtcgggcacaggccgagtagattcggtataattcccaaggactctaggattttcagcagcacagatgagcattgacttcaagtcatcagctgctttccctcctaataagag

SEQ ID NO: 658 - DNA, 120 bp, synthetic construct
  source 1..120: mol_type = other DNA
gtcaagatctttcacctgaactatatcctctcttccgaatattctttcccagcatgatgttcctatttgattctcactgtcagacatagctgatatggcatagaaacctctttccggttt

SEQ ID NO: 659 - DNA, 120 bp, synthetic construct
  source 1..120: mol_type = other DNA
ttgagtggtttaggcctgtttgcttttagagagaactttgcatttctcctggtattctttgcagctgcttcactcttactagtgagaggatattttcaggctgagctgaatgaacatctt

SEQ ID NO: 660 - DNA, 120 bp, synthetic construct
  source 1..120: mol_type = other DNA
caacaacaaaaaatgcctaaaatactttacattaggcctcttctaggttgtcatctgagccagaaaacattgtcagaacagtggacattttcatggtgccattttcccaagtggaaaacc

SEQ ID NO: 661 - DNA, 120 bp, synthetic construct
  source 1..120: mol_type = other DNA
tgtgtgttcatcctacagtaaggttataaaggaaaacaatgactccctaattaaggcatattcttgacaaaacttggacccaacccttaaacccatgggctacttcaagattacactccc

SEQ ID NO: 662 - DNA, 120 bp, synthetic construct
  source 1..120: mol_type = other DNA
agcaggtaaggacatatttaggctacactttacctatgcttagtctcttgagaggcagggagcaggaagaaagtgctctatttagagagatgtagacaagatatgaagaattactcatct

SEQ ID NO: 663 - DNA, 120 bp, synthetic construct
  source 1..120: mol_type = other DNA
caatgttaagagttacaacatggagggtccagaaatggaaaacaaagaaaaacggggggtgaaaatcaaaagaaaagaaaggcaaatttcccacagctaaagagagaactgaggcttcag

SEQ ID NO: 664 - DNA, 120 bp, synthetic construct
  source 1..120: mol_type = other DNA
caagtaccagtcaggtttcagtgtggaaaaaacactgaatagtcttttaaggagaatgaattttatggcaggggatgaggtacttacataatcatcgaaggggctgaagggtgaagatta

SEQ ID NO: 665 - DNA, 120 bp, synthetic construct
  source 1..120: mol_type = other DNA
gctgtaggtatattcttttgagtagaagagataaccagtatgagaaataaaaacagaaacagaagtaggaagtggtgggagtgggtgggtagaggttgggctcaatatttttgcttttca

SEQ ID NO: 666 - DNA, 120 bp, synthetic construct
  source 1..120: mol_type = other DNA
tttggttgatttttgccttctctattccaagcaagtaaagctactgggatccatgaaactaagctaaacggaaaagactctctttctcaaagcacacaacaaagaaaagttccaagtccg

SEQ ID NO: 667 - DNA, 120 bp, synthetic construct
  source 1..120: mol_type = other DNA
tttagacaagaaacagctgatgttatctagtctagacaggacttccttttagttaattggaagctttgtggcaggaactcaggcaagccataggaaagaaagaataggaacacacaaagg

SEQ ID NO: 668 - DNA, 120 bp, synthetic construct
  source 1..120: mol_type = other DNA
catatgaatcaggaaaaaaaagtaaaggactacctcttgtgcatcccatgatgtagccacgtgttgtactccaagattcttatttatgacttttgtgttgactggccagaagcaagagtt

SEQ ID NO: 669 - DNA, 120 bp, synthetic construct
  source 1..120: mol_type = other DNA
cacgtgcacagtaaggagtaggcaacatggcatgagtcaggtagagacccatttgcggaagaagattacggtggggtgggcagcttctttgcgccctatgtaaacatcacacctgatcca

SEQ ID NO: 670 - DNA, 120 bp, synthetic construct
  source 1..120: mol_type = other DNA
caattccagacacaacaccacttcacaggtgacagattggcaaggaagctgtggcactatgcaaattctagtgagtgtccatgaaaacaggcagtgagagtgtcagtggtgtcaaatgtg

SEQ ID NO: 671 - DNA, 120 bp, synthetic construct
  source 1..120: mol_type = other DNA
aaaagtcagattatgcattctgtctcagacaggaaatctccattttacatgaaataaagtgaacatgtgaaaagagggagtagagaaaatgaggctatgacacagggagttgcacatggg

SEQ ID NO: 672 - DNA, 120 bp, synthetic construct
  source 1..120: mol_type = other DNA
aatgaagctatggacctctgggtggagggcttgatgtataggcagggtggatagactctcagaggccctttttctatttttctttctcctattttattttctcatttccttacatagaaa

SEQ ID NO: 673 - DNA, 120 bp, synthetic construct
  source 1..120: mol_type = other DNA
gttatttggaatcatctggtaaatcacaactgtcataaatatatcatcaactaatatttgagcttgtccatcgtcatggagggtacatgtcaggcattgtaagaaatgagtaatgatgac

SEQ ID NO: 674 - DNA, 120 bp, synthetic construct
  source 1..120: mol_type = other DNA
aatgtgggaaagtttggaacttcctagagacttgttgaatggctttgagaaaaatgctgatagtaatatgaacaataaggttcaggctgagatggtctcagacggagatgacgaacttgt

SEQ ID NO: 675 - DNA, 120 bp, synthetic construct
  source 1..120: mol_type = other DNA
ccaatctgtgaaagcagctgggagggaggctgcaccctgtagagtcacaggagaagagttgcccaagaccatgggagcccacctcttgcatcaatcagcatgacctggatgtgagatatg

SEQ ID NO: 676 - DNA, 120 bp, synthetic construct
  source 1..120: mol_type = other DNA
acaggtgtagaatagaattgaatgtgtacttccagaccatgtaagaagtcaaggagataaaattgcactttcactctgctaaagccaacagctatttacaaggtttcctgcaggagcagg

SEQ ID NO: 677 - DNA, 120 bp, synthetic construct
  source 1..120: mol_type = other DNA
gcatacatgtgtggggaaaggatgatggttccagttggattgtctagctcattgtaacctatattaaatttaggttgtggaagttctctttatctcctgatgtctccatctactcttgtc

SEQ ID NO: 678 - DNA, 120 bp, synthetic construct
  source 1..120: mol_type = other DNA
atgagagattccaacaggggataagtgtcttgctcaatgctctgtgtgttcccgagaaatcaaaactctcttcatctgttctttctttcatttctaaatcaggaagagaagcggagtatt

SEQ ID NO: 679 - DNA, 120 bp, synthetic construct
  source 1..120: mol_type = other DNA
ggtgatggacctaggcctgtctttagcctaaaggagaacttcgcttcttaaatataacaaacttgctatgaataggagctttgtatgtatttgggtccaagcctttactttaaattttgg

SEQ ID NO: 680 - DNA, 120 bp, synthetic construct
  source 1..120: mol_type = other DNA
atttttgcagaccaagctcaagtttagcaatatattgtgatggtaaacataccaggtgacacctattcttgggtctgccacaggcaccactttcaacatctggaatggttaaagaataac

SEQ ID NO: 681 - DNA, 120 bp, synthetic construct
  source 1..120: mol_type = other DNA
ataaccatattattaatagctgaagaaacacctatttttgcaaagtagagcttcggtcacaggtcagcttggagtgtatgacttagactagatgtttaagtggaacttcctcccccatcc

SEQ ID NO: 682 - DNA, 120 bp, synthetic construct
  source 1..120: mol_type = other DNA
cacacatggttcatcaaacgagtctctccataaaactctcttaaactaggacccaaacatgtgtccaggctcattgaggtattggttgaagtaacagccatcatttagtgtctaggtaaa

SEQ ID NO: 683 - DNA, 120 bp, synthetic construct
  source 1..120: mol_type = other DNA
ttttgcaaaggagacaagagccttgataataaggagcattgtggccaactactggaagctgacaatgaccaactgagagcaatcatcgaagctgatcctttcacgactgcaggagaagtt

SEQ ID NO: 684 - DNA, 120 bp, synthetic construct
  source 1..120: mol_type = other DNA
tccccgcttaagtaggcctcggtgtgtgttgtttccttctttgtgtttgtaagttcttattatttagttcccacttataagtgagaacatatggtatttggcttactgttcctttgttag

SEQ ID NO: 685 - DNA, 120 bp, synthetic construct
  source 1..120: mol_type = other DNA
tttttttttcttgcaaagttgtttaagttccttatagacattggacactagacctctgtcagatggataaattacaaatattttctcccattctgtggttgtctgtttactctgttgata

SEQ ID NO: 686 - DNA, 120 bp, synthetic construct
  source 1..120: mol_type = other DNA
gttgtttaccagctgaaggagcttttgggctgagactatggggttttcttttctgctctttttttttttttttttttcgtgatggagtcctgctctgtcacccaggctggagtgcagtgg

SEQ ID NO: 687 - DNA, 120 bp, synthetic construct
  source 1..120: mol_type = other DNA
tggtagaattcagctgtgaatcatctcttataaaatgatgagataattataacattagaatctctttttggaaatgtctgaaatattaacaagttttgaaactcatcaactaatgcactc

SEQ ID NO: 688 - DNA, 120 bp, synthetic construct
  source 1..120: mol_type = other DNA
taggaaacataaaagctgcagagaagggcctggtagagctctattttgggtctacaaagtaaatgctaaactatgtagtgaatcacaggcttttggatggccaataaaggcagttgaaat

SEQ ID NO: 689 - DNA, 120 bp, synthetic construct
  source 1..120: mol_type = other DNA
gagactaagggtataagctttggaactaaatggatctacttaggttcaaggcctggttctagcttggttcaagaactttctaatttggctggctttggcaatttaaccgtttttgctgaa

SEQ ID NO: 690 - DNA, 120 bp, synthetic construct
  source 1..120: mol_type = other DNA
gttagaggcagagtgaaagagttggaaagtggcaaaagggcactaggagttgagtatttagcagaaatcttgtgtcaacagctctctaagacaaacaaccaaagaaaattcctgtataag

SEQ ID NO: 691 - DNA, 120 bp, synthetic construct
  source 1..120: mol_type = other DNA
caaagccaaaatgagaccacttgctttacatattgtagatgagaaaaccaaactagttgactgaaatctgctttaccaaatggtggaggtagcagcattgcaatcattacatcttggccc

SEQ ID NO: 692 - DNA, 120 bp, synthetic construct
  source 1..120: mol_type = other DNA
tctgcccaacaaataatttctactgattaattgatcaaaggccatctttctgtgaatccttcctggattccctcagttgaatgtgtatatgctatgttcctactgagaggtgaagcgagc

SEQ ID NO: 693 - DNA, 120 bp, synthetic construct
  source 1..120: mol_type = other DNA
caagcagggaacaaaatatggctaattaatccagttggatgattgatgttaacagacattagttgctgaacagtgggtactcagagaggtgtgggcggctattttaaacctgtattttag

SEQ ID NO: 694 - DNA, 120 bp, synthetic construct
  source 1..120: mol_type = other DNA
cctctggaatcacttcaagtactccatagggattcatagagctggacttgtagggctggactcactaaatcaacaaatatttagcatgttctgggagctttagtgcatatcaaactttta

SEQ ID NO: 695 - DNA, 120 bp, synthetic construct
  source 1..120: mol_type = other DNA
aagtttttgttttaattagagaaacatatgacaaaaataacgttttaagcagatttatgcagcagctgtgcaaaggaggctttggaaggaggagcagctgaagtctgaggccagtgagga

SEQ ID NO: 696 - DNA, 120 bp, synthetic construct
  source 1..120: mol_type = other DNA
ttggaaccttacatacttgaagttgtctagcatctaccccttcacgtctgtcttctttgctcagttttatggctgtgagatgttatcttttctaatttgacacatgggctattcagaatg

SEQ ID NO: 697 - DNA, 120 bp, synthetic construct
  source 1..120: mol_type = other DNA
tttagacctaatagggccgcattcttcgcctttctaataagttattcaagcattcacctgcctttttagtaggtacttcggttcttccttccaagtcaacaccctcctcttcaattatac

SEQ ID NO: 698 - DNA, 120 bp, synthetic construct
  source 1..120: mol_type = other DNA
gtaaggataattggataggttcttggaaaaagtgaggggagttagttttgaaggagaggacagacaactctttattcaaaacagaaagcaaagaagactcactcagaccaaatgcagcag

SEQ ID NO: 699 - DNA, 120 bp, synthetic construct
  source 1..120: mol_type = other DNA
tctcaaagtgatgggattacgagtgcaagccactgctcccagccttgattttcttaatagaaggttactagctagcaaagcatttagttgtgatttctctcttgacactagcatagaaaa

SEQ ID NO: 700 - DNA, 120 bp, synthetic construct
  source 1..120: mol_type = other DNA
taagttgcatagcacaatataaatctacaaaaatcaatagactttctctactagctatacacacctagagttggaatataaaaaattgtattaaaatatagatgagccaggcgcagtggc

SEQ ID NO: 701 - DNA, 120 bp, synthetic construct
  source 1..120: mol_type = other DNA
agatttgagtgtggacagagccaaactgtatcaaaaagctaatgcccaggaatagaagaatgtgtcaatgtgtgagtataaagtgtatataatatcccattttggtaaaaccagtaatgt

SEQ ID NO: 702 - DNA, 120 bp, synthetic construct
  source 1..120: mol_type = other DNA
aaagtgaggtattcttcctcctatactgaaaatctaaatctcagaatgaaaatgctgaggggtgcttgttggaggagtggattatgatcatgtaggtagagtagactgtgagatccagtt

SEQ ID NO: 703 - DNA, 120 bp, synthetic construct
  source 1..120: mol_type = other DNA
gatacttctaaggaataagtgcatggcttcatataattcacttgtcctgattgtggaagaaaaaagtaaggcttgtgtctcaacatgtgtccggtacttttatggcatccaagccacaga

SEQ ID NO: 704 - DNA, 120 bp, synthetic construct
  source 1..120: mol_type = other DNA
gtttaaaaaacatgtctcgtttttccccagaaaccttttccagcattaattaccttttttatgagaagaccacagcttagttatcatgtgtacgtcttcaaagtgcagcaagtcgcccag

SEQ ID NO: 705 - DNA, 120 bp, synthetic construct
  source 1..120: mol_type = other DNA
atgggatgctttttggtgctttcaaatggaaaaagcagagttgttccaggcactgacagaaatctgtgctgttgatttttgtttccttcctggacttcccaaaggaaatacaaaagaaga

SEQ ID NO: 706 - DNA, 120 bp, synthetic construct
  source 1..120: mol_type = other DNA
agttaggcatcttagtgtgctttgttttttgtaatggtttctgtgtatctttactggagtctttagcttccccctctctttactcctcttttgagattcagacttactcaaccagaacag

SEQ ID NO: 707 - DNA, 120 bp, synthetic construct
  source 1..120: mol_type = other DNA
accagacacgtaactgcgtaccagagagagggaaaagcagaatgaggcacaaacaaatgcatttcagagaatgcaggtatgttcccagttgttctttgaacattattaatgctatcaaaa

SEQ ID NO: 708 - DNA, 120 bp, synthetic construct
  source 1..120: mol_type = other DNA
gaggttcttgatgtccattaaaatgtgaaaatcttggtctgggggaaggggattgacacgatgggaaggagaggatgtcactgtatttcattgacagttaacttccctcttttttttttt

SEQ ID NO: 709 - DNA, 120 bp, synthetic construct
  source 1..120: mol_type = other DNA
tttttttaaccttcctttctgttttcctcatggtgcagtgtttcagtgtgaccagcagaggacactatgctgcagcaagtctgggcatcaactatctaaaagataaattgctgattgaat

SEQ ID NO: 710 - DNA, 120 bp, synthetic construct
  source 1..120: mol_type = other DNA
aaacaggttgggcaactggaagagaatgccctgtgactttgggtaattttcttagagctagctcaaagtagacaggtacccaacatatttttaatactattaaataggtggcagtacctg

SEQ ID NO: 711 - DNA, 120 bp, synthetic construct
  source 1..120: mol_type = other DNA
tttgtttttatttgtggaggggactttaaaagggaaaagctaggatcatagtctaggccatgtatagaaaagattgcttgacagtagttacggggtaatgcctgagagtcctcatgtttg

SEQ ID NO: 712 - DNA, 120 bp, synthetic construct
  source 1..120: mol_type = other DNA
aatgaattcttaactagatatgagttaatatgagcctctccttttgcaagaaaaagggctagttgcatcacctaggaaaaaggagacagacctttccagcattgtgaacaggtacccagg

SEQ ID NO: 713 - DNA, 120 bp, synthetic construct
  source 1..120: mol_type = other DNA
gtacattgtcctttcaaaatgaggaagtacacagtttacaatgttgccatcacaagttgaacttatggggacattaggtcctatgactttatccagagagttggattcatctcctgctaa

SEQ ID NO: 714 - DNA, 120 bp, synthetic construct
  source 1..120: mol_type = other DNA
cctatgctgcctgatgtccaatgtctggaaatcacagtttcatatattacgtccatatttttagttgtttcatgggaggggataaatttagtccctcttgctctgtcttgtctggaaata

SEQ ID NO: 715 - DNA, 120 bp, synthetic construct
  source 1..120: mol_type = other DNA
tttgtggcaagtgaatatggtatgtgtgtccgtgtatgtacaatgtgttgaaaatgaaaacatgactggcacagatgacatgagtgggaacactgcaaatttggtgaagtcctaagaatt

SEQ ID NO: 716 - DNA, 120 bp, synthetic construct
  source 1..120: mol_type = other DNA
gatttagaaagcactcaggaaagcaaagctgctcttgtcctgaaggaaagtttgtgactgtgtattctttgcagaaagtaaggactatggatctcattaaaatgtccccaacctcaggat

SEQ ID NO: 717 - DNA, 120 bp, synthetic construct
  source 1..120: mol_type = other DNA
agattttgaggacagatatggtggggttggaaaacgtaaggatatttgtaggtgagaaggaaatccatctaaagacataaaaagtactggattggaagactcctaagcagggccaggatt

SEQ ID NO: 718 - DNA, 120 bp, synthetic construct
  source 1..120: mol_type = other DNA
cagtgaattgcattacatgagatgaacccaaaatctaggaaccaaagtgttttataatgggcaaatcagaaggcctggccttgctctgcagagggatattattttttgtagactgaacag

SEQ ID NO: 719 - DNA, 120 bp, synthetic construct
  source 1..120: mol_type = other DNA
cagacaggaaacacatcgttttttacagaggctgtctctgagagtatcctgtggcataaattgcttgtgtgtcctgtaatttgaggtgctgaaattttgaaaaagccttattttcccgta

SEQ ID NO: 720 - DNA, 120 bp, synthetic construct
  source 1..120: mol_type = other DNA
ggaaggagttgaataacccaaagcgcaggctatcacaaagaccactgattatctcaagaaatccattgttcttctccttctccaacataaaactgcaaattcactttaagggcctattga

SEQ ID NO: 721 - DNA, 120 bp, synthetic construct
  source 1..120: mol_type = other DNA
gggcatagtaccttgtcatactcactgggacctataagatattaataattgatacatcagggatcttgctgaagggacagtagtaggctcaattatttgtaccatatgacgctacctatt

SEQ ID NO: 722 - DNA, 120 bp, synthetic construct
  source 1..120: mol_type = other DNA
tgttgctgagtttcctgcagctgttgagcaaccatttttgtttctatatggcaaggtaagactgagttattgggttttccgcttcctttatcttttgcgcaactcttcctccgatatata

SEQ ID NO: 723 - DNA, 120 bp, synthetic construct
  source 1..120: mol_type = other DNA
cagttctgttttaatttctttgagaaatcccaaaactgccttccatggtggttgaactaattttcattcccaccaacagtgtgtaagtgttccctttttccctctgcagccttgccagca

SEQ ID NO: 724 - DNA, 120 bp, synthetic construct
  source 1..120: mol_type = other DNA
aattttaaaatagtttttttctaattccttgaaaaataatgttgatagtttgatagagtagcattgaatctgtagattgctttgggtggtatggcataggggaaactgcccccatgattc

SEQ ID NO: 725 - DNA, 120 bp, synthetic construct
  source 1..120: mol_type = other DNA
cttgaatctacattcttaagcactatgtgttagtgactgtatttaccttgaagctttccagtcacactccccactgataagtagctccaagctgtggcaaagtataaatagttagcatct

SEQ ID NO: 726 - DNA, 120 bp, synthetic construct
  source 1..120: mol_type = other DNA
caagcatatcacagaatgaagagctgaatgaaagtacgtgcattggcacacaagacctaattagcttggaagcattggtgtttactgaaagtatgataggttaacacatttccttcctcc

SEQ ID NO: 727 - DNA, 120 bp, synthetic construct
  source 1..120: mol_type = other DNA
atcacctcaaaacatttcttcaaaagtcccttttgaagtcaattcctccttttgtccataaactctggtacctattgattctgataacactatgacctgtaggtgactgtatcgtactgt

SEQ ID NO: 728 - DNA, 120 bp, synthetic construct
  source 1..120: mol_type = other DNA
tgtttccagtttctagtgattatgaataattctactataaacatttatacataagtctttgtgtgaacataacttttcatttcttcagggtaaatacctagatgtggcttgctaggtcat

SEQ ID NO: 729 - DNA, 120 bp, synthetic construct
  source 1..120: mol_type = other DNA
tctcaaaaaaaaaaagttttgcttttttcattcttatttaacctcttgatagttttaaatggcatcatttgactttctcttttaactatacaacaatttattatattcttcattagccta

SEQ ID NO: 730 - DNA, 120 bp, synthetic construct
  source 1..120: mol_type = other DNA
tgaagttttgggcacgcactgtcactgataacaccttatcaggagacagggtttgagagcagacaaccggtctgaccaaaatttattaggaaggaatttccttgtcctaataagcctggg

SEQ ID NO: 731 - DNA, 120 bp, synthetic construct
  source 1..120: mol_type = other DNA
ctctattgttggctttctttgtaagttgctcttgagaattatggttggcttgtcttactcttatacctaatttgctcttttttgtctggagggcctgcatgtggatttttgttctttctg

SEQ ID NO: 732 - DNA, 120 bp, synthetic construct
  source 1..120: mol_type = other DNA
tgaagggaaattgaagttcatagtattcttggtctcttagtaatgctgaaaatgtgggtcaagtttcatttgatttgagctcctttttcttttcttccctgttcctccccttctcctcct

SEQ ID NO: 733 - DNA, 120 bp, synthetic construct
  source 1..120: mol_type = other DNA
tataatcattaaggttttttggggggatagttggattcctgagagaaaaattttccaatgcccccactgtacagacaaaaaatgaataatcgaaaccgaccttgtccaacctatggcctg

SEQ ID NO: 734 - DNA, 120 bp, synthetic construct
  source 1..120: mol_type = other DNA
aagcagaacaagagtcaaaggcttatggcaaattgtttatgtaagaagagatcttaggaagcagggagactgagaaaaaaaaaggcagaccaatataagtgtgtattttccaggccactg

SEQ ID NO: 735 - DNA, 120 bp, synthetic construct
  source 1..120: mol_type = other DNA
tgtgtgccacagtattccatatcttagacacactttgattatagctcttatctcactgagtttggaacacgtgtataccagtctacctctctatttcaaagccaacattgagaggagaaa

SEQ ID NO: 736 - DNA, 120 bp, synthetic construct
  source 1..120: mol_type = other DNA
ggtacctctttggttgctaaaaatggtgcataaaactgttttactctaatcaacatggtctacatcctcttccttttccctgcctcactctcttaatgacaccttggccatttgaaaaca

SEQ ID NO: 737 - DNA, 120 bp, synthetic construct
  source 1..120: mol_type = other DNA
gaacaatttttattttgtttttggggatggaaacaaggcagatgcattagtatcatcagtgatacggtttcctgtgctttgcttactgacatagtgacttcctgtgattgccttaagggc

SEQ ID NO: 738 - DNA, 120 bp, synthetic construct
  source 1..120: mol_type = other DNA
gccacttcacctggcccacacctaaactactacaatagttcttcagtttctctatcttcagcattttgtactcaaatccatatttctcaaaacaacttaaaaatctcaacacccttttca

SEQ ID NO: 739 - DNA, 120 bp, synthetic construct
  source 1..120: mol_type = other DNA
tatttcatttgtgtaataaaagagctgaaaaaaatattccaattgagcattctctggacacccacagtcccttggccctgaagaaacagttgaccttactctgggatggggcattaacaa

SEQ ID NO: 740 - DNA, 120 bp, synthetic construct
  source 1..120: mol_type = other DNA
aataagggcctaattaagaggatttatttgcaatttgggctactggtcctgatttcttccctttgcctcactccactcatgtcctttacatcagcaaaatgggtgtcctttatttctgta

SEQ ID NO: 741 - DNA, 120 bp, synthetic construct
  source 1..120: mol_type = other DNA
ctcaccacagtttctaagaaagtgagtaggaaaaatccagtgttttttcaaacggcctccagaatgattctcaagtggtagttgaatagtgagagaatcataagagaattcaagtgtgag

SEQ ID NO: 742 - DNA, 120 bp, synthetic construct
  source 1..120: mol_type = other DNA
gtcatgctgtctggcaaaaataaaaaagagcagcgtttttggaaacggactttttgtggcttgggctgtcttttaagtctcaccggaagttaattaaaatgagctggggttttttttgtt

SEQ ID NO: 743 - DNA, 120 bp, synthetic construct
  source 1..120: mol_type = other DNA
tgtctcaaggttagctaggcttttctcaaaacagaacagcctctgtgttgtagcagtgtacccacagactacaaacagagagaatttcagatatctctaatgcttttttgaagaggtttc

SEQ ID NO: 744 - DNA, 120 bp, synthetic construct
  source 1..120: mol_type = other DNA
ccttgaagaggtccttcacatcccttgtaaggtggattcctaggtattttattctctttgaagcaattgtgaatgggagttcactcatgatttggctctctgtttgtctgttgttggtgt

SEQ ID NO: 745 - DNA, 120 bp, synthetic construct
  source 1..120: mol_type = other DNA
gcaaagacttggaaccaacccaaatgtccaacagtgatagactggattaagaaaatgtggcacatatacaccatggaatactatgcagccataaaaaatgatgagttcgtgtcctttgta

SEQ ID NO: 746 - DNA, 120 bp, synthetic construct
  source 1..120: mol_type = other DNA
ccattcagctgttggcataataatggattacagtgtggtgaaggaaagagttggggtttcagattaatacttgagttttcaatccctgcttttataattactaactgtgggaccttggac

SEQ ID NO: 747 - DNA, 120 bp, synthetic construct
  source 1..120: mol_type = other DNA
actgcatgattccacttgtatgagagatctttatagtcaacatcatagaagtagtgagtgcaatagggcttgccaggggctgcaatgttattcatcaggtatgctagatgaatatgttct

SEQ ID NO: 748 - DNA, 120 bp, synthetic construct
  source 1..120: mol_type = other DNA
acagtgtttctggaactttctttcttttcattcctcagtagctttccggactctatcctgaactgaatcttcttttgtgaaagttacctttgacctgtgacttgactaagcatgggcttt

SEQ ID NO: 749 - DNA, 120 bp, synthetic construct
  source 1..120: mol_type = other DNA
tctcaaaccctaacctgactctaacctctctttccaatcccatcttttcaatatattcatcctgtaattcagtaactgcagatgtctcaagtgccctgaacactccgtattctttttttc

SEQ ID NO: 750 - DNA, 120 bp, synthetic construct
  source 1..120: mol_type = other DNA
gctgtgagttccatctccaaacatcgttttcccatgggtctcactgaatcctcagcccaaaaagcatttctagtaggcttcttagataactaccttattaaaatgattcacaaacttaag

SEQ ID NO: 751 - DNA, 120 bp, synthetic construct
  source 1..120: mol_type = other DNA
acaaaggggccaaatttgtctttgcaagacatttttacattctaactaaccttcaagatccaactcaggtaccatcacttcctaaattttctttcccctctttgtttatatgtatagtct

SEQ ID NO: 752 - DNA, 120 bp, synthetic construct
  source 1..120: mol_type = other DNA
atgggtcatcactgcttccattaagattctccatctctgtcctggaatttaccctatcattgaaatcatggttatgtgtaatgaacaagctaactgctctagcgtggaaacacaaaacct

SEQ ID NO: 753 - DNA, 120 bp, synthetic construct
  source 1..120: mol_type = other DNA
aaaacctctctcagttgctatcctggctaagtgggtgaatctgatgtttttgggttgcatccactgggtctgaagttaaatgttgtggtttactacttattatctgaagatcagagatct

SEQ ID NO: 754 - DNA, 120 bp, synthetic construct
  source 1..120: mol_type = other DNA
atcatttgtggatcttggatctgaattccagaagctccacaatattattctcacaacagcacatgccaaaagatgtccccactggtagccactcattcatattgcttctgtctacattca

SEQ ID NO: 755 - DNA, 120 bp, synthetic construct
  source 1..120: mol_type = other DNA
cagctcgctagggtttttcttccttagagcgtaccaaaatctaagcttcactaaggcagtattacttctgttttcatcatcattgtatactcaggagtgaatacagtgcctggtacaata

SEQ ID NO: 756 - DNA, 120 bp, synthetic construct
  source 1..120: mol_type = other DNA
ggcacttaatattgcaaagggccttcgattcaacccacttgccctcggctattttcttaatgagaaagtggatcctacaaactttaatcccatttaccgaaatatcaaagcaatctgtac

SEQ ID NO: 757 - DNA, 120 bp, synthetic construct
  source 1..120: mol_type = other DNA
atgaaaatgaccagaaactgaaagaagttcacagtgtggcaactgcacaatctcagttaaatagccttgaagaccacaggttaatcggttggatccttggttattgaaaaactggttgaa

SEQ ID NO: 758 - DNA, 120 bp, synthetic construct
  source 1..120: mol_type = other DNA
aaaattaaatacctttccttttattttaggatctcagataatcctccgcagaagagcccatatgtaggatctatgtgtctggacacaaattcaaaagtcccatccctccttgaccaacca

SEQ ID NO: 759 - DNA, 120 bp, synthetic construct
  source 1..120: mol_type = other DNA
aaaccagtctggcatggaactaagagggaaggtggttccttctcagttaagctttatgttagtgctgcattgaagaggtagcatcacatcagcaatagcttgtaacaaaaaataatcatg

SEQ ID NO: 760 - DNA, 120 bp, synthetic construct
  source 1..120: mol_type = other DNA
ggccaggcctccaccccaggtacatgccacagctaagctgtgcaactcagaagggtataatttaatgtatttttacctgcagtatgtgaacttacttataaacagtattgataatgttac

SEQ ID NO: 761 - DNA, 120 bp, synthetic construct
  source 1..120: mol_type = other DNA
taaaggacagatgatggaactaccaatatccagctcttttggggcccaagagaaagtagctttcataactgttgctattatttcaaccactactcatactctaatactactacatccacc

SEQ ID NO: 762 - DNA, 120 bp, synthetic construct
  source 1..120: mol_type = other DNA
aagcttaccaagagaagagtgtggctttctgctcttagtgtagtaggttgattctggtttactcctagtggagaagacattaattcagacttctggatatggctctatgtttacacactt

SEQ ID NO: 763 - DNA, 120 bp, synthetic construct
  source 1..120: mol_type = other DNA
gcatcgattttgtgtgtctttttctctgtctatgatctcaaattggctattcttttctgtaagctattatctgcgtccacaatatattgctgactattgcatttgcatggattgtgtcac

SEQ ID NO: 764 - DNA, 120 bp, synthetic construct
  source 1..120: mol_type = other DNA
agtattcacttttctaacatgtgctatttcatgtttctcaccacatgtggcaaaagtggtagtggaaacatggaaagagagcaacacagtttctggtaagaagacgaagctcaacttgtc

SEQ ID NO: 765 - DNA, 120 bp, synthetic construct
  source 1..120: mol_type = other DNA
ctgagctttgtgccctccctactgttcttgtactatatgctgctttctaacgtgctatgcttagatatttagtttttggtaaagttcaagtcctggttttaggtgggccaaaataagtga

SEQ ID NO: 766 - DNA, 120 bp, synthetic construct
  source 1..120: mol_type = other DNA
taaacactccagctttcttgccattgctggtacagtactgaagaatgttctgtacagcttcttagagaatctcagtgagactgagcctacattcccatagtggtaatttgctgattaaca

SEQ ID NO: 767 - DNA, 120 bp, synthetic construct
  source 1..120: mol_type = other DNA
tgaatccgtgtgctttagaaacgtttgctccaagaactctttccttaaagagaagaggaaagcatttggaaagcatttaggtggtctgaaggacttctggtaatagttactgatacaggt

SEQ ID NO: 768 - DNA, 120 bp, synthetic construct
  source 1..120: mol_type = other DNA
tcagagggatctactgaatggacaggagccacaaatacacacatcactactgaacagaaaggtagttgaacaattaaaaccaggtagcagcatagttcaaatcaaaacaaagtgatgcct

SEQ ID NO: 769 - DNA, 120 bp, synthetic construct
  source 1..120: mol_type = other DNA
aatgagtggaagacagctatctccacccaaacttgtagagagctgttttcctaagacattaaaagtgagaagaggcaaaattttgcttccttgtaaaccttgaatttagcagcagacaca

SEQ ID NO: 770 - DNA, 120 bp, synthetic construct
  source 1..120: mol_type = other DNA
agcacttgcctaaaatgaatatactctgacatggaaactaaagctctgtttctggagagggcagaatagaaccagtgagtggaaattatatagacacagattttagctccatctgaggca

SEQ ID NO: 771 - DNA, 120 bp, synthetic construct
  source 1..120: mol_type = other DNA
ggattttaaggatatttatgagacagaggagtgaggtagtctgaagtatgaggaaaagtcattggcagtaaagaagagtgaggttatcagtgaactatgcaagcatagccaagcttcatg

SEQ ID NO: 772 - DNA, 120 bp, synthetic construct
  source 1..120: mol_type = other DNA
taaaaacaattcatagtcaaacacaatcccaactaatatgggcaccttataggaaggctaaaggcagcctgtctccatttctaagattgacacttagcattcctagtagtggaggaacat

SEQ ID NO: 773 - DNA, 120 bp, synthetic construct
  source 1..120: mol_type = other DNA
tgcattttggaatatagacttggattatttcaaagtcctagacattttctacacggttctgtttgcccagtaggctttgagcccagttggaatatagtccagcaaaaggagaactcttgc

SEQ ID NO: 774 - DNA, 120 bp, synthetic construct
  source 1..120: mol_type = other DNA
ccacacattttgttcttctatgaatggaaattcttcctctgccctctatgacagaaatccaaagcctccttaacctgcttctcatattgacacccatggataatcccaactatacaagga

SEQ ID NO: 775 - DNA, 120 bp, synthetic construct
  source 1..120: mol_type = other DNA
gtcagaggatagggaaatctcctggccttccacccaggctcacaaataaaagaggaatttcttcccaaataggacaaggttcagatgttgagtagttaaaaagtattctaacaaacaatg

SEQ ID NO: 776 - DNA, 120 bp, synthetic construct
  source 1..120: mol_type = other DNA
acctacttttaaagaataacaataggttataatcatctttccatgtcaataggtctatttctgcaccatcatgatttatggctatatagaattccacttggaggatatacacagctgatt

SEQ ID NO: 777 - DNA, 120 bp, synthetic construct
  source 1..120: mol_type = other DNA
aaatgggattccattacaaataaaataaaatatgcatttactactattaccaataagtttctacatgatgtggttcctgtatgcctctctgatcccaactatgaaatcttccagtcttct

SEQ ID NO: 778 - DNA, 120 bp, synthetic construct
  source 1..120: mol_type = other DNA
ctagggtttttatggtttcaggtctaatatttaagtcttcaatccatcttgaattaatttttgtataaggtgtaaggaagggatcccgtttcagctttctacatatggctagccagtttt

SEQ ID NO: 779 - DNA, 120 bp, synthetic construct
  source 1..120: mol_type = other DNA
attcagtacgatattggctgtgagtttgtcatagatagctcttattattttgagatatgtcccatcaatacctaatttattgagagtttttagcatgaagcgttgttgaattttgtcaaa

SEQ ID NO: 780 - DNA, 120 bp, synthetic construct
  source 1..120: mol_type = other DNA
actgggaggcactccccagtaggggcagactgatacctcacatggccgggtactcctctgagacaaaaattccagaggaacgatcaggcagcaacatttgctgctcaccaatatccgctg

SEQ ID NO: 781 - DNA, 120 bp, synthetic construct
  source 1..120: mol_type = other DNA
ggacgtggaactaagcaccacactgaactaagcaccacactgtgatggacaaatactgtatgggaaaaaataacttggtttttaaataccattcagactttggggttgcttattagtaca

SEQ ID NO: 782 - DNA, 120 bp, synthetic construct
  source 1..120: mol_type = other DNA
tcatctgaaagaggctcagcacttgcgccagatgacaactattctttggtcttaacacatgttgagttagagtaactattagcagctgtatatgttggtatcttctcaatcagcatatgc

SEQ ID NO: 783 - DNA, 120 bp, synthetic construct
  source 1..120: mol_type = other DNA
aatccagggcctggctcatagtgagtactaaacaaatggcaactattatcttgcagagagtaatggcacatacctaaaagattagtgttccagagattgtgatttcatcaatgctgtaac

SEQ ID NO: 784 - DNA, 120 bp, synthetic construct
  source 1..120: mol_type = other DNA
gtcagccctaaggcttttggcctaaacaaatgcaggatggaatcgccattcttcaggtaaattggaacaagtgtcaagggatgcattaggagtttaactcaaagcacatcaaagaaagaa

SEQ ID NO: 785 - DNA, 120 bp, synthetic construct
  source 1..120: mol_type = other DNA
caagaagaaatgaggagatgagtcaccaactgactctgtgaccaaaaagtcatagaggaaattcagaaacagaagctggattaggggaactgaaacaatcatcaaagaaataaagtatgc

SEQ ID NO: 786 - DNA, 120 bp, synthetic construct
  source 1..120: mol_type = other DNA
tgggctcacagaaagaataactatctatctgattgccaccggagcattatattttatattagttgactgaatacagtttgaccagatcatggcaaacttgcttgtctgttggttccctac

SEQ ID NO: 787 - DNA, 120 bp, synthetic construct
  source 1..120: mol_type = other DNA
aaaagcacgcctatcacctttttattgcctgaagaggtcttcaaaccttggccttctgcagatctgaccattcaccttcatctttttaatttcctcattatgtaggtcagtgaatagaag

SEQ ID NO: 788 - DNA, 120 bp, synthetic construct
  source 1..120: mol_type = other DNA
agactctggtcaggtgcataaaaaggctgcacttgtctaggagagcactcaatatttccttaacaggtagatgtaaaatgacttggttattcatcaatttcatactagccagtacggaag

SEQ ID NO: 789 - DNA, 120 bp, synthetic construct
  source 1..120: mol_type = other DNA
acccactcatccaggctttcttctttgctcatggagccccaaattcgttcaagtatttacctcttcaagagctgggccctttccttcattttaagaggaaattctgattagtctaatatt

SEQ ID NO: 790 - DNA, 120 bp, synthetic construct
  source 1..120: mol_type = other DNA
tgctgggacaaactttttgctttcctccatttctgaatcaacttcttgctacttctggccattcagttctaataaggagaagagagaaggcatttgcaggaggacattggaatgagtttt

SEQ ID NO: 791 - DNA, 120 bp, synthetic construct
  source 1..120: mol_type = other DNA
atttcacttgaggggacattttacactatgttttctaaagttatttatccaaggagaaattgcccctcccctgcttccttctatagggaatcttacaggactaggattccatagtagaca

SEQ ID NO: 792 - DNA, 120 bp, synthetic construct
  source 1..120: mol_type = other DNA
tagagttctgcacagatttcagatcttgtgttaatgctagccaccagccaggcaatgtagaattgagtacatgtggctgtacatttgtaccaatattcttttagtccagattttctcctt

SEQ ID NO: 793 - DNA, 120 bp, synthetic construct
  source 1..120: mol_type = other DNA
tataaacataagaatagttggcttccatatttaagactattagtccagatgatggctgggtaagacccctcaggggaaaagacttcctgaggtacttgttcaggtattcttaaacagtgg

SEQ ID NO: 794 - DNA, 120 bp, synthetic construct
  source 1..120: mol_type = other DNA
cacgtgtgtgtgtttgcaacaataaacctctcaatagaccttttggtgatatctgacaaaccagagttataagtcccaaggctctcagtttggggaagaaatgcttctattcatgtatcc

SEQ ID NO: 795 - DNA, 120 bp, synthetic construct
  source 1..120: mol_type = other DNA
cttaattacactgagcctgaattgcctagtgcataacctacattatatatagtaagcaccatctgctagcatgctagcagtcatcaaagagaatcatcaagacacacaccacattccagt

SEQ ID NO: 796 - DNA, 120 bp, synthetic construct
  source 1..120: mol_type = other DNA
agccttgagaatgtagcataacttgtcagaaacagcttacagacccatttcttaaccattttgctgtttcttaaccattttgctgctttgtttgtggatccttggaatggaaaggtatgc

SEQ ID NO: 797 - DNA, 120 bp, synthetic construct
  source 1..120: mol_type = other DNA
actggaggccttcatgtgttaaaactccttaggtttctgcttcaaatgggaaaggcttctttcagggtgatcaaagaagtgctgctcctcttctaaagtcttgactaagatgttagtaaa

SEQ ID NO: 798 - DNA, 120 bp, synthetic construct
  source 1..120: mol_type = other DNA
tcttaaacgcatttttcaatttatgggatcatagttgttctcctaggcccctgggttatagtacataggcctctggattacagtacaatttcctatgcaaaccaggttatttcctgacag

SEQ ID NO: 799 - DNA, 120 bp, synthetic construct
  source 1..120: mol_type = other DNA
ggacctgtggatagtgtttccatactttcctgttcctcctagtttataggaatttcacacttgtcaacatatatccgctccataaaggatgtctgaagtacaatcatcttaagagaggtc

SEQ ID NO: 800 - DNA, 120 bp, synthetic construct
  source 1..120: mol_type = other DNA
ccctgtgaagaaaagcagcctactaggaacacccaggtcggactgtggtataaccgagaaataaacttttgttgcaggctgttgaaactttggagttagtatagcaactagtgttattta

SEQ ID NO: 801 - DNA, 120 bp, synthetic construct
  source 1..120: mol_type = other DNA
ctgatttatattcctaccaacaatgcaaggattcccttttcatcacatacttaccaacatttatctttttatttgtaataaaagccaccctcacagctgtaaggtaatatcttattgtgg

SEQ ID NO: 802 - DNA, 120 bp, synthetic construct
  source 1..120: mol_type = other DNA
tatgtttcgctgagcttttttctgtcttgcagtgggttaaaggaaaaggcaagttagtcatctgagatgagccatacaatgtactcttgtaggtcaagatggagacatgttaatggagaa

SEQ ID NO: 803 - DNA, 120 bp, synthetic construct
  source 1..120: mol_type = other DNA
gggctctagagttcaggattaaaatccagtgctccatggaaacaaccgtttagaagaaaaatttaggaaattaagtgacaggagtctcacagtgacatttgtacagtatattccacagca

SEQ ID NO: 804 - DNA, 120 bp, synthetic construct
  source 1..120: mol_type = other DNA
gttcaccataaatgcacaaatttattccttgactttaaagcctgacattttaagctttgtatgaaatactgttgccttgagggaaaggaaggacagaaatgggtagaggtcaggataaat

SEQ ID NO: 805 - DNA, 120 bp, synthetic construct
  source 1..120: mol_type = other DNA
tcctacatccttctgtcttcaagtgctgtcaatcttcctttgaaatatgggcatagtaggttctcccatttctgcttccagatttagactcttttaatccctcatgcagtgtgtcataat

SEQ ID NO: 806 - DNA, 120 bp, synthetic construct
  source 1..120: mol_type = other DNA
atgtcctttgccaattttacaattaaattctttaggttcatcttttttaaaaaaattttccagtcacgttttgagagttctttacttatcctagatactaatccttttgcctaatatatg

SEQ ID NO: 807 - DNA, 120 bp, synthetic construct
  source 1..120: mol_type = other DNA
gtattttgtgaccttgcggagctcactttttaattttaggagattttttctttgcatgatccataggattttctatttcaataataatgccaactgcacacagcacagtttatccctttt

SEQ ID NO: 808 - DNA, 120 bp, synthetic construct
  source 1..120: mol_type = other DNA
atttacactggtcttctttttatagattcttgaggagcaagcttgaattactgatttgaagcattgtctctaccctaatctaagtgctatctatacatctggtgctataaatttccctct

SEQ ID NO: 809 - DNA, 120 bp, synthetic construct
  source 1..120: mol_type = other DNA
cagttgttggataggggtgttgaaatttccaactttagtcgtggagttgtatagttttccttttagtgatattgcttttcatttcacatcttttgcatcttggttgtttgatacgtatac

SEQ ID NO: 810 - DNA, 120 bp, synthetic construct
  source 1..120: mol_type = other DNA
tgctctaggtgttacattatacacacaaaacttaccacagtctaatggtagtatgattttaccagtttgagtgaagttcagaagacttaattcactttatattcatttaccttcccccat

SEQ ID NO: 811 - DNA, 120 bp, synthetic construct
  source 1..120: mol_type = other DNA
ctgaatatttggaatatcatgttataagagtctggaactcacttaaaccttctgttttagcttatttactgtaaccccacctcagtaagacaaagatgggggtacctcatcactgtccag

SEQ ID NO: 812 - DNA, 120 bp, synthetic construct
  source 1..120: mol_type = other DNA
gagcataagtggagctgtaggttttttcttccctccccgcctctggtgtttagctggaatagtcattgtctaaatatttgtttttgtctttatttcgatttggtcttagactgcctcttt

SEQ ID NO: 813 - DNA, 120 bp, synthetic construct
  source 1..120: mol_type = other DNA
actaaatctcgtgtcctgagagttttccagcctgcttaggcagataccaggaacgtttgttttgttcctgaacacgttaaacaccaaaaaatatcacagagttaagcattaactagacag

SEQ ID NO: 814 - DNA, 120 bp, synthetic construct
  source 1..120: mol_type = other DNA
atcattttactcaggagactttcctgtgcattgaaaataagaatatacaaataatctgtccacttctctcacctccattccaccatcattactcttgaccagtggtcttcaaagtgcagt

SEQ ID NO: 815 - DNA, 120 bp, synthetic construct
  source 1..120: mol_type = other DNA
tctcacgcctctctactggcttatcccaattctttcctgattgattatctctaacacaccctttaggagaaatctatttttcaggaaagtcttctgtagctttccaggttaagagtctcc

SEQ ID NO: 816 - DNA, 120 bp, synthetic construct
  source 1..120: mol_type = other DNA
gattcactatgtaagcagtaatttgtttatttttttctctcaacactcccacttctgccaaattcaaatgtttttcaccagcccaaaaccttccgcatccccctctaaaatttaggacag

SEQ ID NO: 817 - DNA, 120 bp, synthetic construct
  source 1..120: mol_type = other DNA
acatgcgcatatataggggcacatacctattttattaaaagactaaaggcagcaaagtggagctgtaaacatgaaggataaatcatttcatacctggaagagtgctgtctaaacactgcc

SEQ ID NO: 818 - DNA, 120 bp, synthetic construct
  source 1..120: mol_type = other DNA
caggaaagttcccagagcatattcggagtttgtctagactcaggaagtatgcctaagtctagaaacatcctagagagctatgtccaagaaatcatccgatatttatactttcagtactga

SEQ ID NO: 819 - DNA, 120 bp, synthetic construct
  source 1..120: mol_type = other DNA
ccgaaccgctaggattacaggtatgaatcatggtgtccagctgcaacattaactctgctccaactggacctgaagtggaaaaaaattgttaacttgcctgtagtatttattttatacata

SEQ ID NO: 820 - DNA, 120 bp, synthetic construct
  source 1..120: mol_type = other DNA
gcatcttcctggaagacacacacaatgacttctgcttggctactccaagagagtcaagaaaatgagtctttagctgagttcatcaagagtttactgtggtctataaaacaaatgatcaaa

SEQ ID NO: 821 - DNA, 120 bp, synthetic construct
  source 1..120: mol_type = other DNA
acagcagtcgttgggcacttgcaatataccatgtactgtaccagcacaagataagacaaaaataaagtatcaggaaaaaggctagatttcttaaacccacttgcccacgtcatcatgtta

SEQ ID NO: 822 - DNA, 120 bp, synthetic construct
  source 1..120: mol_type = other DNA
tgccatgtgcaaaccaccgtggaggatcatgaagatgtaagacaaacatcctgatctttgatgagctacagtttcattgggtagacatgatcaatatacaggaaagaggacaaaaaatga

SEQ ID NO: 823 - DNA, 120 bp, synthetic construct
  source 1..120: mol_type = other DNA
gttgagtaacaaaacacaccttttctttgcacctgctttaactgaagaattcaggaggctaaagaaatcggcttcccttcctttccccattctgtaatttttcatccaccaaataggatt

SEQ ID NO: 824 - DNA, 120 bp, synthetic construct
  source 1..120: mol_type = other DNA
caccttcacctgttgacattaaaatatcctcagctcccaggtctgtgttttcaattcatgtatattaaatgattcagagtctggcaggaggaaacactcgtaggagtgttttgtttagtt

SEQ ID NO: 825 - DNA, 120 bp, synthetic construct
  source 1..120: mol_type = other DNA
taccatttgttcaatggtaataattgctttagagggggaaaaaacaggatagaaggactagcaagtgcctgaagggtaaggattgtggggtgtggtttataattttaaagtggctgtttg

SEQ ID NO: 826 - DNA, 120 bp, synthetic construct
  source 1..120: mol_type = other DNA
aatcgggaacattcctttatacctgtgcccatgtaaatcctctccctgagttttcagctatagtcatttattgcacaacctgttagtgaccttgccaaagtcctccttatccattactca

SEQ ID NO: 827 - DNA, 120 bp, synthetic construct
  source 1..120: mol_type = other DNA
gtatagcagaaagagcacaggtataatgtggagatgaacaaattggatttgaattacaactctgcattttacttggctgggtatgtggaaaggtactattgctgctacaactgagtattg

SEQ ID NO: 828 - DNA, 120 bp, synthetic construct
  source 1..120: mol_type = other DNA
catataagagatatatccaggcttaaccccatgccaagttccattaaaagtcatcattgattattttgtcacccattgccttataatgtcgcaatctttctactccttagctcagctagg

SEQ ID NO: 829 - DNA, 120 bp, synthetic construct
  source 1..120: mol_type = other DNA
ttaatggggaaatatattgtgaaggctaatgttctaacctaggttcagctctataactcctctatgattactcagggatggaaatcttgagaaccacctgctagtgggattatgggatct

SEQ ID NO: 830 - DNA, 120 bp, synthetic construct
  source 1..120: mol_type = other DNA
tgcactgtccttgattgttcccacgtctatctcccactgaggatgtaagttgtagtttcctcatttttaacatctgtatagaaaacactgccaggcctcgaatgaatgagtaaagaaaca

SEQ ID NO: 831 - DNA, 120 bp, synthetic construct
  source 1..120: mol_type = other DNA
ccacaggggcatctcgttgttataaatcatagtgctgagtatgctgcaggacatgaatgtgcactagtcaatttccacttagaaaatggtaaactaaaaaccaacgttgagaccttcaga

SEQ ID NO: 832 - DNA, 120 bp, synthetic construct
  source 1..120: mol_type = other DNA
gacatgaatgttgtcattgtcttttggtaaacacaggtgtcctgtcgaatacatttctaagaatgaaattgtgggatcatcggatatgtgtctttagctagaagctttagtaatttctgc

SEQ ID NO: 833 - DNA, 120 bp, synthetic construct
  source 1..120: mol_type = other DNA
cctaatattaaccatcgcagtgtcttttgaagaacagaaattatagtatcattttagcatagtccaattaatcattctcttttatttaacccttttagaatgtgtgaaaggaaaataaat

SEQ ID NO: 834 - DNA, 120 bp, synthetic construct
  source 1..120: mol_type = other DNA
cttggcgtgtgtaatggtaaaagggagctacaaagttagggatggctgagcagtttacagggagtggtcttggctgttgttatttattttttttctccttggaagttgtttaaggatctt

SEQ ID NO: 835 - DNA, 120 bp, synthetic construct
  source 1..120: mol_type = other DNA
tttatgtcacgtctacttgccagagtttatgtaaaacgaaagtaatatggtcttcgaacacatttacattaaagaaaaagatccctaaggtcagtctccaaactatagagttcctaagtt

SEQ ID NO: 836 - DNA, 120 bp, synthetic construct
  source 1..120: mol_type = other DNA
actaagtctcttctctcaaagaatgaagcttttcaccttttaaaaaaatccttgactttatcactttggtcaaatgaattacttattttacaatgaagtgtgataccaagtgttttaagc

SEQ ID NO: 837 - DNA, 120 bp, synthetic construct
  source 1..120: mol_type = other DNA
gctttgactgggatggtgtgcttttctttaaggaatcaattgacttatacagcaaataaaagccccttgggaaaactggcctcatgccttgtctacacagtccttacacatcattcctga

SEQ ID NO: 838 - DNA, 120 bp, synthetic construct
  source 1..120: mol_type = other DNA
atcgagtggggaatgtgaaaggaaaataaatcttggggcccccaaatcactaagctaaagagaaaagtcaagctgggaactgcttaggtaaaacctgtctcccattctatcaaagtcacc

SEQ ID NO: 839 - DNA, 120 bp, synthetic construct
  source 1..120: mol_type = other DNA
tgactggtttgtatgttgtgaggcagggatcaaaatttattttttacatagatatttggatgatccggcatgcctattgaaaagtccatcttttctgtaaaagacttttttcccagctgc

SEQ ID NO: 840 - DNA, 120 bp, synthetic construct
  source 1..120: mol_type = other DNA
tgatcccaaacagtgaccttatatctagagatcttaacctcaattcagttaattctaatggcttgagtgtgtattagttgtctttttgtcactattttcatgtatgctcccaagttatct

SEQ ID NO: 841 - DNA, 120 bp, synthetic construct
  source 1..120: mol_type = other DNA
cttttgctttgcagaagctctttggtttgattagatcccatttgtcaattttggtttttgttgcaattgcttttggcattttagtcatgaagtgtttgcctatgcctatgttctgaatgg

SEQ ID NO: 842 - DNA, 120 bp, synthetic construct
  source 1..120: mol_type = other DNA
gcaggtaatacctcagaagttttccaggcattactgtctggtaatgtgtagataaaacagactgttgtgttcttacactttggataacaggaatttctacaacttctccaggcttcacaa

SEQ ID NO: 843 - DNA, 120 bp, synthetic construct
  source 1..120: mol_type = other DNA
acaataggcaaactgagtcatccaaaaatgagaaataaagtagcagcaggtcacagcagaactaactagaactggaaattcaaacacgagtttacagattccaccctgaaaaggcttatc

SEQ ID NO: 844 - DNA, 120 bp, synthetic construct
  source 1..120: mol_type = other DNA
aggttactctttattgactccacatcttgaaaggagaagggattattttgtttagcgagtttgaaataacttgttgagcatgctctgctagcacctttctcctgactgtgttcagttgtg

SEQ ID NO: 845 - DNA, 120 bp, synthetic construct
  source 1..120: mol_type = other DNA
attaaatatggagtgactattatggggaaacactgtcagtttctgtgcagaatcccatgatagacatttctagtagtttcaacaatgtctggggctcctacccttctaggctaatgtgaa

SEQ ID NO: 846 - DNA, 120 bp, synthetic construct
  source 1..120: mol_type = other DNA
attctaatgggcttacatatctgtattctccattaaggatagctcatggaaggtagtgccctgtcttatttgtcattgtttccctaatacttagcccagtgtctggcatactaaatgcct

SEQ ID NO: 847 - DNA, 120 bp, synthetic construct
  source 1..120: mol_type = other DNA
tcaaattgatcctgatcttctgaacaccactaaatctcctggttattggcactacttcttggcactatggccatttctattggataccaccttttatttattaccaggaaacatcagctc

SEQ ID NO: 848 - DNA, 120 bp, synthetic construct
  source 1..120: mol_type = other DNA
tggaaccaatggttgagcagtcttcattgcgtgaaagagtttctctcgagtttctcagacccacagtggatgttgcataaataagagaaatgagaaatactgtttttctgagttaagcca

SEQ ID NO: 849 - DNA, 120 bp, synthetic construct
  source 1..120: mol_type = other DNA
tttggaatatttcttccctgtaagcacctcacgacatcaaattgtagactggcttttctattacagtcagagaagacccttcatgcggcatttctatagagagaaatttcactgtggtgg

SEQ ID NO: 850 - DNA, 120 bp, synthetic construct
  source 1..120: mol_type = other DNA
gattgcacacacaatttaaaattctgatttctgagtatcaagcctacttgtgaggttggacaatccctaaggttatctagggcatttgaaatataccacaactcctggggaaacccctat

SEQ ID NO: 851 - DNA, 120 bp, synthetic construct
  source 1..120: mol_type = other DNA
atcccaaggagaaatatgatgtgtcgatggttaaaagaattcgtctgatttttgagggtaggtaatgagaaatgaaagtttccatctcgttctctttggatactctgctttggggctctg

SEQ ID NO: 852 - DNA, 120 bp, synthetic construct
  source 1..120: mol_type = other DNA
tagtcatgggcagagtcagtataagaacctatttctccctgcttccaattctgatatacctgccttctaactgaagaagttctgtccaggagtggcaatcaaaaaataggatatgcagat

SEQ ID NO: 853 - DNA, 120 bp, synthetic construct
  source 1..120: mol_type = other DNA
acagacttgcagtctgatctgaaagtattttatgagacactaagcacaaggagaagcacacatgtcttctgagtgctctgataactcaagatgattattctcacctctttacctttgctc

SEQ ID NO: 854 - DNA, 120 bp, synthetic construct
  source 1..120: mol_type = other DNA
gcaacctagaatcgatcagcatcttgatgcaattttatgtggctctttaattgctgattttgtagtgttcgaaccttctaatgatgtaacagctgaaagaggatgtgcaaaaaggcattg

SEQ ID NO: 855 - DNA, 120 bp, synthetic construct
  source 1..120: mol_type = other DNA
tgtgtgccataggtcccataatgccatttgatattaaccatctccagtaacatcaatagttgcaggaaatcagtagaaaggaaggactattgagagaacaatttggccatctctttgctt

SEQ ID NO: 856 - DNA, 120 bp, synthetic construct
  source 1..120: mol_type = other DNA
acagttgctttctgcctgctgctttcttgaacagggagacacttgtctaagtgatctgcattagaggagtgcagatcacaaacaaagacggatttatgtgagtaaagaattatatatacc

SEQ ID NO: 857 - DNA, 120 bp, synthetic construct
  source 1..120: mol_type = other DNA
agctaggtcaacatccagattcctttaccaactatgtgagaatctactaaaagcattctctaataatacagtcagccctgggaaagacatctgagctttaattaagcaatgtatgtgggg

SEQ ID NO: 858 - DNA, 120 bp, synthetic construct
  source 1..120: mol_type = other DNA
cctatgtcacgaatggaacacaagcaaataaggctcagacatttaaaagccgatggcaatgtacatcaggataagattatgttaaaataaggattgtagactctgtgtgatagtcttcgt

SEQ ID NO: 859 - DNA, 120 bp, synthetic construct
  source 1..120: mol_type = other DNA
ttggcttaataattccctaatactaatgtgcacaacaaactcatggactgcttgtttaagatgcatatttccaggccccatcccaggcattctgattcattcaatctagtgtgaggcatt

SEQ ID NO: 860 - DNA, 120 bp, synthetic construct
  source 1..120: mol_type = other DNA
aagccagacagaaaagaaaaatattgcgtgatcttagttatacatggaataaaaaaggtcaatgatacagataaagaataaaacaatggttaccagggcaaggtgggaaggaggaaatgg

SEQ ID NO: 861 - DNA, 120 bp, synthetic construct
  source 1..120: mol_type = other DNA
ggaacccaggcctgctgaccaccttgacttttggcctggtgaaacagattttagactcctcaccttcaaaactataataaagtcatgccattttaagcaccaagtttatgataatttgtt

SEQ ID NO: 862 - DNA, 120 bp, synthetic construct
  source 1..120: mol_type = other DNA
gccactatgtacagcctgcatggaaggagtggggagttatgttctgacttcttgaatgtagagtatctacacaagttatttggaatttttctacatgggatgtttgtctattctcttcca

SEQ ID NO: 863 - DNA, 120 bp, synthetic construct
  source 1..120: mol_type = other DNA
ctgtgggtacagtgtcatagagccatcattttagttccatatatgatggtttatccacccccaaaactcctgtttcacctatgtaaccactctttagtccctagcaccactgatctatta

SEQ ID NO: 864 - DNA, 120 bp, synthetic construct
  source 1..120: mol_type = other DNA
gttatagaagcaatggaaatccaatacatgtacacagagtttcttttaaagaatatggaaatgtttgtgtttatcttctggtccacatccaattatgtcttccttaggggctgaatgcca

SEQ ID NO: 865 - DNA, 120 bp, synthetic construct
  source 1..120: mol_type = other DNA
aaggtaaaatatgatcactatcataaaataaagggtttgatgacctcaaaggaaagagaaagtgtgtctccttgagggaaccaggctaagtctcaaggaggagagaccatttgggttgga

SEQ ID NO: 866 - DNA, 120 bp, synthetic construct
  source 1..120: mol_type = other DNA
gcttcttatcctcctaatgtcttaaaagcctggttgggctgctaagagagattacaggaaaagaatacagatgagtttgaattctcccagggcagggatattaactaatttgtctcttgt

SEQ ID NO: 867 - DNA, 120 bp, synthetic construct
  source 1..120: mol_type = other DNA
ccattatatcacggcatacattttcacaatgtaaatagctatttaatggaaatgatgaggccactaatgtagacaaagtagctattgtctgagagcccctgagtcatcttgtgtcacaga

SEQ ID NO: 868 - DNA, 120 bp, synthetic construct
  source 1..120: mol_type = other DNA
gtgtttgccatatgtttatcatctaggcatatgctgaactgttgtgtatgttcaataaataataagaatatgaatgtattttagatttgcttagaaatataatcaacataggctgggtgc

SEQ ID NO: 869 - DNA, 120 bp, synthetic construct
  source 1..120: mol_type = other DNA
taactgcaggccccagtcctgtaactaaagctaagaagacccctccttgccccaacaaaaaagaagtgtgttttcactttcactttcacattcttcacaatgttcaatataaacactgaa

SEQ ID NO: 870 - DNA, 120 bp, synthetic construct
  source 1..120: mol_type = other DNA
catgaaacaagtaaaatgattcccaacaggctcttctaccagggtacaaatcacacccaaacatgatggcattgggcaaagcttaggctccaacagagattttctattaaagttagattg

SEQ ID NO: 871 - DNA, 120 bp, synthetic construct
  source 1..120: mol_type = other DNA
cacggagagatggagaagggcttgattaagaagctgcgaagttgccttaacattgttgttttcaaactcacactgcagacacaatgctttgcgaacttaagataatcatatttcagatag

SEQ ID NO: 872 - DNA, 120 bp, synthetic construct
  source 1..120: mol_type = other DNA
ctatagcctcctattctcttctaaaagaattgcatagaaacagtccctttcctagtgcccgctcatgagctcctttattttgtccttctctgttttcctaatactgtgtttctatatggt

SEQ ID NO: 873 - DNA, 120 bp, synthetic construct
  source 1..120: mol_type = other DNA
tattacagcaaattaacatggccttacaaatatttcatactgataacttccaaatgtacttctccaacgcagatttctcccccaaactctagatcaggagttagcaaactgcagccctca

SEQ ID NO: 874 - DNA, 120 bp, synthetic construct
  source 1..120: mol_type = other DNA
cctggtcatcttatttacgactgcaaactgtcatccttccagcacctcctccaaagtctttatcccttcccttcctctattttctccacagtacttactatccttattgtatataattta

SEQ ID NO: 875 - DNA, 120 bp, synthetic construct
  source 1..120: mol_type = other DNA
tgaagcaaagattataatagttaccctttactgaggaagtgcaagcttggggcagggatggtagaaaattgatagtaagacaaggaaagatgcaaagcaatgcaacacaatgggctattg

SEQ ID NO: 876 - DNA, 120 bp, synthetic construct
  source 1..120: mol_type = other DNA
ggaggcctagcccatactcaggaaagtctccaacacttatctgctttgtctgttcctacttctgggttgccaagcatactagaaaaactcacataaatgttatgcaaatttatacattca

SEQ ID NO: 877 - DNA, 120 bp, synthetic construct
  source 1..120: mol_type = other DNA
caggtgctagcagtaaaagtgatttgagtaagtgcctagaatttgaccaggaagcataattcaacaagcaagtaagctcatgttcctttaggagacaaaaactgagttgagatgcaacct

SEQ ID NO: 878 - DNA, 120 bp, synthetic construct
  source 1..120: mol_type = other DNA
aacagcagcatgtaggaagagggaactccatagctctctctaggggaactgactttatttggaacagaacatgggaagctttactcttaaatgtgttctcaaaaacactggaaatttcag

SEQ ID NO: 879 - DNA, 120 bp, synthetic construct
  source 1..120: mol_type = other DNA
gccctctgctttctgccatgggatgacttggcaacaaggccaccagatgtcagccccttaatctaggactttccagtctctgaaattgtgaggaaataagtttcagttctctataaatta

SEQ ID NO: 880 - DNA, 120 bp, synthetic construct
  source 1..120: mol_type = other DNA
tatctgttcaacaaaatcttaataaatgaaaaacagctgatggaatgtaataagaaaggtttctcaaaaggcgccccccacccccgccattttttgccatgtggaccatgccatgttttg

SEQ ID NO: 881 - DNA, 120 bp, synthetic construct
  source 1..120: mol_type = other DNA
ataggtgcaaaatcattaacaaaacactatcaaaatgaatgtagcaacacatacacaaaaggattacacatcaagaccaagtgagatttattcaggagtccatggttcgtttaacacccc

SEQ ID NO: 882 - DNA, 120 bp, synthetic construct
  source 1..120: mol_type = other DNA
tgttaaaatgctaatacaatcctcccttgatatttgtgggaagattggtttcaggagcccctgtggatagcacatgcatatctgtgcaatagaatgttatttggacataaggaatgaagt

SEQ ID NO: 883 - DNA, 120 bp, synthetic construct
  source 1..120: mol_type = other DNA
tctgtaatcatggcggagatattagcaaatctttcccagtaccttcatagatcaagtaaacaaagatagcagaaattactagacgattaagcacatccctaaagagtttaaagaaaccca

SEQ ID NO: 884 - DNA, 120 bp, synthetic construct
  source 1..120: mol_type = other DNA
gcaagaatagaccccaagaatccacgatggtaaccacataaaccatattttcctcaaaggtatgtgaaggtctcctaagagcagaaacttttttttttctggtagaagcagactttcagt

SEQ ID NO: 885 - DNA, 120 bp, synthetic construct
  source 1..120: mol_type = other DNA
atgaaagactccacgttttcccttcttcccgtatctgaggtgagaacgatatagattaggtaaaatgctgttcccatttcaaatattcagcctgacaaagcaacactgctttctcaagca

SEQ ID NO: 886 - DNA, 120 bp, synthetic construct
  source 1..120: mol_type = other DNA
ttcaatctgtctctcagaggtggaaacacctacttgtaactaaaaagtcactggggcttgtgtattgatgccagtaagactcattcatcattgttgatgatgttggtgcacctgtttata

SEQ ID NO: 887 - DNA, 120 bp, synthetic construct
  source 1..120: mol_type = other DNA
tagacagctaagaacaaatgtgtggcctaattttattagtggaaagggcactgtgtaatctagtgttctgttatccttagtcctgcctttattttacatcgttatctttgattctttttc

SEQ ID NO: 888 - DNA, 120 bp, synthetic construct
  source 1..120: mol_type = other DNA
gtccttgagatagtttgctgagaatgatggcttccagtttcatccatgtccctgcaaaggacatgaactcatcattttttatggctgcatagtattccatggtgtatatgtgccacattt

SEQ ID NO: 889 - DNA, 120 bp, synthetic construct
  source 1..120: mol_type = other DNA
ccccatttcttgtttttgtcaggtttgtcaaagatcagataggtgtagatatgtggcattatttctgagggctctgttctgttccattggtctatatctctgttttggtaccagtaccat

SEQ ID NO: 890 - DNA, 120 bp, synthetic construct
  source 1..120: mol_type = other DNA
ctgataccaaagcctggcagagacacaacaacaaaaaaaagaattttaaaccaatatccttgatgaacattgatgcaaaaatcctcaataaaatactggcaaaccgaatccagcagcaca

SEQ ID NO: 891 - DNA, 120 bp, synthetic construct
  source 1..120: mol_type = other DNA
actcaccagatcaaacaaaatttaataaatgatggaataaacacactgttatttcaaaaaataggcaagttagatctagggctgcattatcctatagagtagccactacctacatgtggc

SEQ ID NO: 892 - DNA, 120 bp, synthetic construct
  source 1..120: mol_type = other DNA
ggagaaatcggaaacaaggtgatatgcaatataattgtactgtgcatgcaaatcaaaagggaccagaaataaatattcaaaataacattggtgtgctgagacaataaaagtataagtgat

SEQ ID NO: 893 - DNA, 120 bp, synthetic construct
  source 1..120: mol_type = other DNA
ctattgctatcatgtgttggctgctatcaacaaattgacatttcagctccaattttactctttgatgtctgttctgtgaaaatgagaatgggcctaggtctgccttagttttagtgctgc

SEQ ID NO: 894 - DNA, 120 bp, synthetic construct
  source 1..120: mol_type = other DNA
ctcagtgttaaccatcacaatgagccacagacctcatgtctacaatccccctatatctttacacctgcctacaaccatcagcttgcctgaatgaacagaagttctttccttttttgtttg

SEQ ID NO: 895 - DNA, 120 bp, synthetic construct
  source 1..120: mol_type = other DNA
gggggagtctggagacccatagaggatttcagttgaatcttcagttgagtatttatcagtgtacatttgagaagaaactctgagtctgagtaaaaagaaaaccacatgaaaggattagag

SEQ ID NO: 896 - DNA, 120 bp, synthetic construct
  source 1..120: mol_type = other DNA
tcccctgaagcacgtaataaaggctagaaagaatcctctgaccttctgtcccaatgcaggtcataaaacttagaaataatattctcacctttccttggaggatattataagaccctcata

SEQ ID NO: 897 - DNA, 120 bp, synthetic construct
  source 1..120: mol_type = other DNA
atccttcagacagaagcagagtgataacaaatgagatctgtacctagaaagaggaatgaagaatatagtcatctttcagtattcatgagggactggttctaggatccctgttggatacca

SEQ ID NO: 898 - DNA, 120 bp, synthetic construct
  source 1..120: mol_type = other DNA
ttggctatattaatatcaaagtaggtgtcagggcagaggatgttaccagggataagaaagttgtttcataataataaaggggtgaatttatcaagtggcattaacaatcctaaatattta

SEQ ID NO: 899 - DNA, 120 bp, synthetic construct
  source 1..120: mol_type = other DNA
caaggatgcagcagacacagtgcgtagaagtaaacctgtagcagagaaagcctatattagaaaaagaagaaacttctgaagtcagagtttcatatttaaggaaggaagaaaagcaactca

SEQ ID NO: 900 - DNA, 120 bp, synthetic construct
  source 1..120: mol_type = other DNA
caggctttagagcagagttcctgatagaactttctgcaattgtggaaaaattttatatctgtgcttttcaatatgctagcgacttgctacttgtgactgatgagcagttgaaatgtggtc

SEQ ID NO: 901 - DNA, 120 bp, synthetic construct
  source 1..120: mol_type = other DNA
tgtcttttagtcgatttattaggtgcttgtagtttatcaaatcacctctcaggatttactccttgctcgtgatgtctctagagctacccttccctcgcttcaaaactcagtagtgtctgt

SEQ ID NO: 902 - DNA, 120 bp, synthetic construct
  source 1..120: mol_type = other DNA
atagcgtggaggtagcggccagctttccctcacatcttgcgccaatcctggatatcataaatgatattgtcatttttaagcccaacaaagttttttttatactcccttcaaaggaactaa

SEQ ID NO: 903 - DNA, 120 bp, synthetic construct
  source 1..120: mol_type = other DNA
gaattttttccaatggataccttactccataaagacaatctcaaaaaggaagctgctcagatctgttctatactagactcaagcagagaatttctggagctggtgataccaatgggctgg

SEQ ID NO: 904 - DNA, 120 bp, synthetic construct
  source 1..120: mol_type = other DNA
gcacagatgatgctaaacgtaccagtttggactttgtactttgaatttggcactggaaggtgaaacactatctctttcagcctttttgacttcctttgagcttcttttctctgagattca

SEQ ID NO: 905 - DNA, 120 bp, synthetic construct
  source 1..120: mol_type = other DNA
aattggccatttgaaatcaggaaatataaatttccccaagtcaaatctgagagacagagctcactcgaaggttctttaacatcatcacagtacaggcctgccactttgaattctgtagct

SEQ ID NO: 906 - DNA, 120 bp, synthetic construct
  source 1..120: mol_type = other DNA
ttttttgtcttacatgttactgaagataaaatctcccaataggctaattggacaaaaattccggttgtggccacctcttactgtgtgagaggttatggcattaagaatgttcaggccctg

SEQ ID NO: 907 - DNA, 120 bp, synthetic construct
  source 1..120: mol_type = other DNA
gacctcatcctgggacaacctctgagaactcattgattcctattcgacagtttattatttgctttcatgttgcctgtaatataaatgcacccagcataaaaagtttttaggtacccattt

SEQ ID NO: 908 - DNA, 120 bp, synthetic construct
  source 1..120: mol_type = other DNA
gaaactcttattacccctgtttatgcagggaagaaaagagaggttcaaagaatttaagcagcttgtccaaagtacccaggtggtaagcagtggagtcagcattttacactagactttata

SEQ ID NO: 909 - DNA, 120 bp, synthetic construct
  source 1..120: mol_type = other DNA
gatggccaaaacttggatctatgggctcctgagtcactcatttatttactgaatgcatctctacttctctcctttctcagggctgtttttgtctgcaccgtttatttgacatttcttatt

SEQ ID NO: 910 - DNA, 120 bp, synthetic construct
  source 1..120: mol_type = other DNA
atgcagtcagagtccaatttggggatatgctaaaagcacataattggggaagcttgtgctagtgctcatgaagtataattcttttgagaaatgacacagtgcctcttaaaaactatcgag

SEQ ID NO: 911 - DNA, 120 bp, synthetic construct
  source 1..120: mol_type = other DNA
taatacgcaactatattggattggatgtgctaaagacagctgagaactaaatatctgccattaagtccccagagctcatatcagaaatggcatgttgtcctcatagagatgtggactcaa

SEQ ID NO: 912 - DNA, 120 bp, synthetic construct
  source 1..120: mol_type = other DNA
aaaaaaaactttcaagttccaacaaaataaaaaataggtcatggctttctccgtgctttcttcagtttccaagagtgtatgtctaacatgtgatttggtcggactggcctcctgtggact

SEQ ID NO: 913 - DNA, 120 bp, synthetic construct
  source 1..120: mol_type = other DNA
ccctgaaaactgctggcttttctctctgacactagtgccttctcatttagacttgcttttatctcatgttccaatcatgactggcttgataatatgaaacttacagatcctcagatcatc

SEQ ID NO: 914 - DNA, 120 bp, synthetic construct
  source 1..120: mol_type = other DNA
aactgagctgaccactgcatatgtctcaataatttcttgctctttagcaaaactctatgagcttcaggggggttatgaggggggtgttcttaataatttctagaagttaatccatgatac

SEQ ID NO: 915 - DNA, 120 bp, synthetic construct
  source 1..120: mol_type = other DNA
ctggtgaatctgaaattggtaccaggaaaccctcactgtgaaggtaaccaatacttacgaaggactactggataaaataatttggtgattggtactccttatcttcaccaggagagaaaa

SEQ ID NO: 916 - DNA, 120 bp, synthetic construct
  source 1..120: mol_type = other DNA
ttatttcgctggtggatgttcagttttcccaacattatttgttgaagaaactaccttttccctattgtgtaaccttcacacctttgtgaccatatatgtgagggttatctctgggttctc

SEQ ID NO: 917 - DNA, 120 bp, synthetic construct
  source 1..120: mol_type = other DNA
ttgagattctggagctctctccattttgctttatcacctagaaataggaaactacttttatgtccctaaacatggtatattgtttcatgcctgtatgagtgtgctcctgctgctccttct

SEQ ID NO: 918 - DNA, 120 bp, synthetic construct
  source 1..120: mol_type = other DNA
tttgatcctatagtgtggcttttatggaaggcagtcttcaccacagaccttgatgaaagactatgcttatcacatgaaagattggcattaggcaagcagtttgaagtgtcaggtatttgt

SEQ ID NO: 919 - DNA, 120 bp, synthetic construct
  source 1..120: mol_type = other DNA
tcaaaaggaataactgaccttggtgcaaaagttgaaacaatgcccctaattctgttaggccactttatgaaatctggggattaagagctttgtatagcaaaatgctatggggccagaaag

SEQ ID NO: 920 - DNA, 120 bp, synthetic construct
  source 1..120: mol_type = other DNA
actcagcccaatagtggaatggataaagaaaatgtggtacatataatcatggaacactacactgttataaaaaaatgaaataatgtcctttgtagcaacatggatatagctgcaggctgt

SEQ ID NO: 921 - DNA, 120 bp, synthetic construct
  source 1..120: mol_type = other DNA
aaactctaataatgttaaaaatacttgttcaaggtcgccgtggaagagctgaaatatagtggagatctgcctgcctgcagagcccaaatatttaaactgagcacactgccttctatttta

SEQ ID NO: 922 - DNA, 120 bp, synthetic construct
  source 1..120: mol_type = other DNA
ttttacgaagtatttgacacctgtccacagctctattttgacctgggacaaatccagaaaaatatggaaacttcaccagtgcctttccaataggtgtttcccaagcttcatagacaagta

SEQ ID NO: 923 - DNA, 120 bp, synthetic construct
  source 1..120: mol_type = other DNA
aggtacagagaagtttatatttcttgattcataagtcaggattggcaccaagatattctagctccagagaccacagaattaaccactgcttttcagaactggccttagtatagagaggag

SEQ ID NO: 924 - DNA, 120 bp, synthetic construct
  source 1..120: mol_type = other DNA
tactctattggagttgcttgaatatgtctgtctgtgaaagactagaagcttgtgcaggaatggtccatgttcgttgtctctctgttctactcccagcggtaggtagtaatatttaaaata

SEQ ID NO: 925 - DNA, 120 bp, synthetic construct
  source 1..120: mol_type = other DNA
tctgatgcccagatatttaggttttaaaaagcttccacttgatttaaatgcatagcagctaaatttgggaagcactgggagtatgggttcctgtggcaaagttacctctagatagggaat

SEQ ID NO: 926 - DNA, 120 bp, synthetic construct
  source 1..120: mol_type = other DNA
cgtacccttagaattccagtttcattctgaatgcttttatgataggttttctaccatgtaggtgggaaattttcaaagtgtgctctcctaagataatcagagtggccgtaggggaaaaaa

SEQ ID NO: 927 - DNA, 120 bp, synthetic construct
  source 1..120: mol_type = other DNA
ttttgcattggaaatagacctctatatgccatccacctcttagaagattgctctgtcctgctaattgccttctctgaagtgtgattctttccagaagcagtacataaccattcccttttt

SEQ ID NO: 928 - DNA, 120 bp, synthetic construct
  source 1..120: mol_type = other DNA
catgagcttggaatgtttttctatttgtttgtgttgtctctgatttctttcagcagtgtttcgtaattctccttgtagagatcttccttggtaagctacattcctagatatcattctttt

SEQ ID NO: 929 - DNA, 120 bp, synthetic construct
  source 1..120: mol_type = other DNA
caaatatgtgtttgcttgttgggcttgttggatgttccaggtattgtgctacgtgctagggtagcatagttaagctaataatgagcaagacatagttaagaaacgttccgtttcttcact

SEQ ID NO: 930 - DNA, 120 bp, synthetic construct
  source 1..120: mol_type = other DNA
ttcatgctggtaaagatgtggagaatgtactagagagtgaagactggaggctgggaaagagttaggaagatgccttgaatagttcagggaagaaattttaaggcttagaaacagggaatt

SEQ ID NO: 931 - DNA, 120 bp, synthetic construct
  source 1..120: mol_type = other DNA
actctgcttaaatcttccttgggaactcatattctttttctctagcaatggttggagcatgtgttttggagcacccctgggaataaaaagaaacaaaacctattctgccattggcatttg

SEQ ID NO: 932 - DNA, 120 bp, synthetic construct
  source 1..120: mol_type = other DNA
tcaactgtactttaatctccatgttcatcagccaaatataccatgcaattgcaaaattccaaaatcagtatttcctcctggggaatttccttaacatttactctcattcttgttgcctag

SEQ ID NO: 933 - DNA, 120 bp, synthetic construct
  source 1..120: mol_type = other DNA
gatataggcacatcaagtgttagcatggtgcctcatatatggtggttaattattacaagtaagataataacacttggttactgtacttactagtgctactctttgaccaccttgggggga

SEQ ID NO: 934 - DNA, 120 bp, synthetic construct
  source 1..120: mol_type = other DNA
ggggcccagtgtaacataaaaatgtgaggccccttattaaaaaatgttttagaacttcgagatggtgacagccaatcattaaatgaaggatcaggctcttttaagtatggaaccctgtga

SEQ ID NO: 935 - DNA, 120 bp, synthetic construct
  source 1..120: mol_type = other DNA
gcaccttgagatctgttcaggaacttgaggctaaacaaatccttgctctgaaacaaagcttctgttgctgatcctgaaggactcaaagggagctattttaaaacagaaataaagatatag

SEQ ID NO: 936 - DNA, 120 bp, synthetic construct
  source 1..120: mol_type = other DNA
cagagccacagtctgagccctccactatgctgttctatttttcccttatgatcaaaaagtaaactgtgtagtacaactatagcattgtatagagcttcaattctccttcaaccatttacc

SEQ ID NO: 937 - DNA, 120 bp, synthetic construct
  source 1..120: mol_type = other DNA
taagattggagaggcttcctgtgtctctaagatctgggtggcctcgttatctcctcctggcttcttagttattccattacctatgtagcttattctctaaattacatacccttttgaaaa

SEQ ID NO: 938 - DNA, 120 bp, synthetic construct
  source 1..120: mol_type = other DNA
tgtatttataagatagattcctagaaacaggattgctggttcaaagtgtaaatgcatgtggactctggttagatttggcaaattctcctccacagggcttgtaccttactggaatcctac

SEQ ID NO: 939 - DNA, 120 bp, synthetic construct
  source 1..120: mol_type = other DNA
gactgcattcattttaattattgcttttggcagggttcaaagagtttaatctttcctaaatccctcggtaatgtctgctctctaaaaggttcagttaccctggacaagatcttcatcagc

SEQ ID NO: 940 - DNA, 120 bp, synthetic construct
  source 1..120: mol_type = other DNA
ttgcaggtcaggcggaagcctgtgtttttatttttatactcaaattctctgactttgtcaacatgaatataatatctaaaagagagatgtgcccttatgatgagtcaagaggcacaatag

SEQ ID NO: 941 - DNA, 120 bp, synthetic construct
  source 1..120: mol_type = other DNA
attagagatcaaaacaaggtaggcaccatgaattctaagatgtttcaaaggagaaaacagtttgccttacatttgcctacagtttgcaaaatcatctagcaacacagtacactgttgagt

SEQ ID NO: 942 - DNA, 120 bp, synthetic construct
  source 1..120: mol_type = other DNA
accctaatactgtgcttttccaacagtcttagcaaacggcacaccaggagattatatcctgtgcctggctcggagggtactacccccacggaccctcacttattgctagcacagcagtct

SEQ ID NO: 943 - DNA, 120 bp, synthetic construct
  source 1..120: mol_type = other DNA
tgatggagctgaaaaccaccgcatgagaactatgtgacaaatgcacaggcctcagtagccgattcgatcaactggaagaaagggtatcagtgatggaagatcaaatgaatgaaatgaagc

SEQ ID NO: 944 - DNA, 120 bp, synthetic construct
  source 1..120: mol_type = other DNA
taccaagcaaatggaaaacaaaaaaaaaggcaggggttgcaatcctagtcttggataaaacagactttaaaccaacaaagatcagaagagacaaagaaggccattacataatggtagagg

SEQ ID NO: 945 - DNA, 120 bp, synthetic construct
  source 1..120: mol_type = other DNA
atgacaaaggggatatcaccaccaatcccacagaaatagaaactaccatcagagaatactataaacacctctatgcaaataaactagaaaatctagaagaaatggataaattcctcgaca

SEQ ID NO: 946 - DNA, 120 bp, synthetic construct
  source 1..120: mol_type = other DNA
agtctcaggatataaaatcaatgtgcaaaaatcacaagcatccttatacaccaataacagacaaacagagagccaaatcatgagtgaactcccattcacaattgcttcaaagagaataaa

SEQ ID NO: 947 - DNA, 120 bp, synthetic construct
  source 1..120: mol_type = other DNA
ttacaagaaaagaacaaacaaccccatcaaaaagtgggcaaaacatatgaacagacatttctcaaaagaagacatttatgcagccaacagacacatgaaaaaatgctcatcatcactggc

SEQ ID NO: 948 - DNA, 120 bp, synthetic construct
  source 1..120: mol_type = other DNA
agttttactcaaaaaaaagaagaaaaggaaatgaatggactgtaaacacccaagttcctgaacaagaaatataaatattcacattattcaagttaacaaataaatgtaataaaagctcat

SEQ ID NO: 949 - DNA, 120 bp, synthetic construct
  source 1..120: mol_type = other DNA
tcttatttcctaagtgccccattttttagaaaagcaactttaacaacagggtggtggttaagtctatggattcttgggatgacagacaatgggtctccatcacttgatgagtctccatca

SEQ ID NO: 950 - DNA, 120 bp, synthetic construct
  source 1..120: mol_type = other DNA
gtgccatgtgagattatctaggtgatattacacagtaggtaggtattaggaacactttataagtgtgcacttatgcactgctgattagattaccttttgatgcaactgttctgaggggga

SEQ ID NO: 951 - DNA, 120 bp, synthetic construct
  source 1..120: mol_type = other DNA
acacagtagaaaaagtggaaggtcttgtctgcctgatgtgctcccaatgtgatgtggtatatttgaaagagatccagttgttatcaaggtacttttcttggtattcttctacctgtcatc

SEQ ID NO: 952 - DNA, 120 bp, synthetic construct
  source 1..120: mol_type = other DNA
gccagctctattctttttccaaaagaaagctgaactcatgtgaatacataatgcaaaaactggaaagtataataattatacaaagaaatagagaagctaaaaaatcggcattcagtcatt

SEQ ID NO: 953 - DNA, 120 bp, synthetic construct
  source 1..120: mol_type = other DNA
aaataagattatcagaacttcttgcatggattggcacaggactctgggataaattatcctggtaagaattttgagacttactactctggacaagaaagataaactacagaggatgctggc

SEQ ID NO: 954 - DNA, 120 bp, synthetic construct
  source 1..120: mol_type = other DNA
agcatgtagtagcaatgtctgaggcattcacgaaaactgtagtaagcctcaaaggaagctttaataccttcccaaaagcgcaatatcacattgtctgtattttctatggtagaggaaaac

SEQ ID NO: 955 - DNA, 120 bp, synthetic construct
  source 1..120: mol_type = other DNA
tctcctcaggagtcatcttgaaattacgctaaaatgcaattttcctttgaaactggaaaatccactaaatgagacaacatttggtaattggtattcttcagcaactagtaggctgcatag

SEQ ID NO: 956 - DNA, 120 bp, synthetic construct
  source 1..120: mol_type = other DNA
tcagctttccaccaccaaaactagaatacaaaaactggttttgaataattatttgttgtgatggcctctcaactgccttcccacttttgggcctataaggcaggtcatactccttaacat

SEQ ID NO: 957 - DNA, 120 bp, synthetic construct
  source 1..120: mol_type = other DNA
actaaaaccatctatcttcaaactaggtatagacttagagacagtaaaaccaggaacttttaacaaaagggtaccctccccaccccaatcagtattgtaggtacctgccaattttgacag

SEQ ID NO: 958 - DNA, 120 bp, synthetic construct
  source 1..120: mol_type = other DNA
gtcatcaatcatccctctaagcgttcttgagagacttgactgccaaatgaacaaggatgttgtccagaaaacactcaggtagaagaacatctagatgacaactttcaatagagtattgta

SEQ ID NO: 959 - DNA, 120 bp, synthetic construct
  source 1..120: mol_type = other DNA
ttgcgagtaccctgacaaagaaacagtaggtggaatgagcaatttatctcatacgtcttggttgataggcctgttgcagaacttcagtagtgattggctaagaagcaggctaattttttt

SEQ ID NO: 960 - DNA, 120 bp, synthetic construct
  source 1..120: mol_type = other DNA
ctaagcataaaaaatatcaggcatcccatacctctcagacaaggctttatgtaagaacagctgagagcttccttctgccctcatgaaaccataaagagaaaatgtgttatcttaacaggg

SEQ ID NO: 961 - DNA, 120 bp, synthetic construct
  source 1..120: mol_type = other DNA
ctttcttatgtaactgacatttagtccgttagccatttttaataaaagagtagagaagttactctactgcggcttttgctggtactttttatagccgtcgtgtggtaggaagtaggcccc

SEQ ID NO: 962 - DNA, 120 bp, synthetic construct
  source 1..120: mol_type = other DNA
ctgccaccagggacctaatcaaaactctttaatagttcaatggcttcttgaggaccatgacttatttattattgtatctgcagcacccatcatggtgcctgacctacagaatatgttcaa

SEQ ID NO: 963 - DNA, 120 bp, synthetic construct
  source 1..120: mol_type = other DNA
tctcgggccctgatctcagagcatcaaaactcattgtttcgcaagtcctcaggctcaaaaatgttaagtgagttcatgtttttcgattctgaaggtatgttcattgtattgtttttgtca

SEQ ID NO: 964 - DNA, 120 bp, synthetic construct
  source 1..120: mol_type = other DNA
tcatctccccaaaactctaacctctgagttttcctctccctcctttcctctccttcataccccaattagcatagtgtattggaaaaagtggatgttcaatgaaagtttgaaatgaatcag

SEQ ID NO: 965 - DNA, 120 bp, synthetic construct
  source 1..120: mol_type = other DNA
gttctgcctagctgtacgacccaggacaagccaataatcactctaaagagggggcaaaaaattacttcaatcgccagtactctgcactatatgtaatggtttgcttttattactactttg

SEQ ID NO: 966 - DNA, 120 bp, synthetic construct
  source 1..120: mol_type = other DNA
ggagtggaaaagacgaggcagagacagaggtcttatgatggtgacccttgaggccatttcacagaatttggtgacactgtattatgaaaaaataaagaaatatcaaccatagagagatga

SEQ ID NO: 967 - DNA, 120 bp, synthetic construct
  source 1..120: mol_type = other DNA
tcttctgctgggaaccggggatgggaaattagaggtagagatgattagaccactcttaactgttctctcattttttcattttacacaataatgagacttttcccttttgcagctcctagt

SEQ ID NO: 968 - DNA, 120 bp, synthetic construct
  source 1..120: mol_type = other DNA
agcacgtagttaaaaaaaggcacacaaggttggtctatgtgtttatttttcagaaacattgttttcttaggaccattccagtgaccttggttaatacggcttttgaatcccgcatggcca

SEQ ID NO: 969 - DNA, 120 bp, synthetic construct
  source 1..120: mol_type = other DNA
catctagcaatctctctatacatagacatttaattctcttccagttcttggctgttagaaataagacggtgcaatgaacaagcttgtacatgcctctttttgcacctaagcaagtagctc

SEQ ID NO: 970 - DNA, 120 bp, synthetic construct
  source 1..120: mol_type = other DNA
tttacccatttaaaatgccacttttatcattgagtaaataatcatatatattttagttcattcttagattcctagcccactcctttgatctagttttcaattcctgtcccagcactacat

SEQ ID NO: 971 - DNA, 120 bp, synthetic construct
  source 1..120: mol_type = other DNA
gaagtgtctgagaacagacatcttaaaagtattgaaacttcccattcacgaacaaaattgttttcctcacttatttaggttttcttttatgcccttcagtaaagtcttgtcaggattgtt

SEQ ID NO: 972 - DNA, 120 bp, synthetic construct
  source 1..120: mol_type = other DNA
agtgagacactgtctcacaccaaaacaataacaacaaaaaaatacttgctcataaaaaaatctgagtctggaaccttagtgggggctgagaggtagggaaaatcattactttatgaccac

SEQ ID NO: 973 - DNA, 120 bp, synthetic construct
  source 1..120: mol_type = other DNA
atgagcatatattttattaaagtatttggcctttgttcttggttcctgaagcagcttcagaatagtttcagagcaataacggtaaaagatagtatcttgttgtaatgttggggcacttta

SEQ ID NO: 974 - DNA, 120 bp, synthetic construct
  source 1..120: mol_type = other DNA
actcatctacagtagggtgggagcaccctaactccatgcgaatggaagctcctgcacttggtaccttttcaaacctcgcactatgaatttctttatctggctttttatttatatccttta

SEQ ID NO: 975 - DNA, 120 bp, synthetic construct
  source 1..120: mol_type = other DNA
aacaccatgaccttttcaccaccaagttttaagaattacctgttagaccactgtatgataccactagcaagtaaagtactggggatatatgaagttatcaggcagagcagtatttgttcc

SEQ ID NO: 976 - DNA, 120 bp, synthetic construct
  source 1..120: mol_type = other DNA
tggagacagattgtgactgtatttactgatttttactagaaagttgctcaactcactacttaacccttgcctaaatggttgtgtgttagcatatacaaattaagtgtacatatcagatct

SEQ ID NO: 977 - DNA, 120 bp, synthetic construct
  source 1..120: mol_type = other DNA
gttttatacctttccatgttctttacacagtagattgtattttgattcttatggttattaaacacagagcctatagctacttggctgttgtttgtttgtctagacacagggtcttgctgt

SEQ ID NO: 978 - DNA, 120 bp, synthetic construct
  source 1..120: mol_type = other DNA
tatgagtcctgttttgcaaattggcatagagaggttaattagagtacccaaggtcatacagatagtaatagtgacatcaggattcactcaaattatctaactccagagcctagagcctag

SEQ ID NO: 979 - DNA, 120 bp, synthetic construct
  source 1..120: mol_type = other DNA
tccagtctatcaggcagtttcccagtgctggcaaaacctgtacacatttgtattacacaaattccacatatgtttctgattcatcccagttattagtaattaatatttttgctggtcttt

SEQ ID NO: 980 - DNA, 120 bp, synthetic construct
  source 1..120: mol_type = other DNA
ggcagcacctggagacattcgtctctatttattccctgattcaaaataaaagaattactcctcaactgaagctatgaccctgtggattactccttcctccttgacactatttctttagct

SEQ ID NO: 981 - DNA, 120 bp, synthetic construct
  source 1..120: mol_type = other DNA
agaacagatcaatggttttcagggaaggaagaagggagaaacatgactctaaggggatagcatgagaaggatttttggggtggcagaacttttctgtatcctattttatatgaacctata

SEQ ID NO: 982 - DNA, 120 bp, synthetic construct
  source 1..120: mol_type = other DNA
gtggtggccacgggtcaggtctcacagtgtagtccatttaaagagtgagtgagtgagatgcaaaaccactcgcagttttaaagaacagattcatgatctgaaatgtgttttaaaaataat

SEQ ID NO: 983 - DNA, 120 bp, synthetic construct
  source 1..120: mol_type = other DNA
tgcatgtttcacaggccaaagttcaactcatcatttaaaacttttactcaagaccttatagaatcaagtcatgctttctacaagtcaaaacatctgctggtgcgctgttcacctccttgt

SEQ ID NO: 984 - DNA, 120 bp, synthetic construct
  source 1..120: mol_type = other DNA
tgaacttgtgcatgtcatggtttaggagagaaatctgggctaaagatgcaggtttgtgtcaaaggatattggtgctagatgcagctatgtatgtggaaaaataaggacatatgaggaaga

SEQ ID NO: 985 - DNA, 120 bp, synthetic construct
  source 1..120: mol_type = other DNA
gaaggaaatgagccttttagagatacatttgcacacatggttctctctgctcagtatcttttccaaagtttgttcatcctgcaaggcgcaacttattgccattttcttataagagtcttc

SEQ ID NO: 986 - DNA, 120 bp, synthetic construct
  source 1..120: mol_type = other DNA
ctaaatccattagagtattagtccctggtaaaatgagcagtatcttagaggccctcttcttcagccattatctaaatggtatttgcagtttgggagcatacagcttatttgacatcacag

SEQ ID NO: 987 - DNA, 120 bp, synthetic construct
  source 1..120: mol_type = other DNA
gctactgtctgtcagcacactgccttttagaatatctttccttctctgcgtttttgttgaaattcgcctaatttccactaaattcccaagtccgactatgggaaaaaaacattcacaagg

SEQ ID NO: 988 - DNA, 120 bp, synthetic construct
  source 1..120: mol_type = other DNA
aggttgtaaatgtcgagaaataccagactatcaccctggactctgtagtgtgattgtttaatgtgtatgtggtttcatacccaaatgagtcattctgccaagaaccttgagaatatcggt

SEQ ID NO: 989 - DNA, 120 bp, synthetic construct
  source 1..120: mol_type = other DNA
caatttcactgcatgctactctttgggggctccaatctttagaagagtttggactcaacttggtaaacacattttgaacccagtacacctctcaagaaacatcttgatgagcatgatata

SEQ ID NO: 990 - DNA, 120 bp, synthetic construct
  source 1..120: mol_type = other DNA
gcattgagacaggaacaacgcagtctggactgagacatcaaacatgcaaaagcacctgtgaactgtggagagttaagatatattacttcttcctgaagtgtacttagacaaaatattgaa

SEQ ID NO: 991 - DNA, 120 bp, synthetic construct
  source 1..120: mol_type = other DNA
tgtatggtattttgctataatagcaacaatggactaggacacgactattgctgactttaatgatggatgaaggggaccatgaaccaaagaatgtgagcagctttaaaagcttgaaaaggc

SEQ ID NO: 992 - DNA, 120 bp, synthetic construct
  source 1..120: mol_type = other DNA
tctgttggttgtctttttatttggttgattgtttgcttggctatgcagaaactttttattttgatgtagtcccagttggttatttttgcttttgttgcctgtgtttttgttgtcaaatcc

SEQ ID NO: 993 - DNA, 120 bp, synthetic construct
  source 1..120: mol_type = other DNA
cgattgctgtagtaggacttccagtactatattgaacagaaagtagtgagagtaggcacccttgtctcaggttcctgatcttaggagaaatgctttcagctttttacctttaagtatgat

SEQ ID NO: 994 - DNA, 120 bp, synthetic construct
  source 1..120: mol_type = other DNA
ttccatggggtgtaaaattagaatatttgagatatttatttgtcttcatgtaggtatttattgccacaaatatcatcttagaaatgctttcgatgcataccatagctttggtatgttgta

SEQ ID NO: 995 - DNA, 120 bp, synthetic construct
  source 1..120: mol_type = other DNA
agcctatttgtgtctttaaaggtgaggtaagtctccttaatcagtacataaatgggtcttatttgttaaaattcattagaccactctgctattgattaacttaatctgtttatatttaaa

SEQ ID NO: 996 - DNA, 120 bp, synthetic construct
  source 1..120: mol_type = other DNA
cgttagattcctagattccttggtatgtcacaaggttgttttttctctttctgctttcgaattctcttttatttttttacagattatgtgtcattgaagacctctttggtttgaagctgc

SEQ ID NO: 997 - DNA, 120 bp, synthetic construct
  source 1..120: mol_type = other DNA
attgtgcttccttgattgtttcatgtttcttgttccttgcattgatgtctgcccatttgatggagcagtcacctcttctagactttacagactggttttggtgaaaaagaccttcacatg

SEQ ID NO: 998 - DNA, 120 bp, synthetic construct
  source 1..120: mol_type = other DNA
gatgcatggctgacattggtagtccctgcttttctttgttactagccatcttcagatgtctcaagtatactgctctctccagcaatcctttctgtgctgttattatctgttttttacttc

SEQ ID NO: 999 - DNA, 120 bp, synthetic construct
  source 1..120: mol_type = other DNA
tgaaagattagatattttctttacagactgagaagtaggcactatgacatgtggcctgaatctaggcctcataacaacccaataaatccaaaactgggcatgcctcctgttaaagaaacc

SEQ ID NO: 1000 - DNA, 120 bp, synthetic construct
  source 1..120: mol_type = other DNA
acaagtcactttccctctctcttccttgatttcatcgtctataaataggaaactaggaagcatatatactttacagcgtagtagtcagagtcaaaggagaacgatggtgaaagcgcattt

SEQ ID NO: 1001 - DNA, 120 bp, synthetic construct
  source 1..120: mol_type = other DNA
cttctagaaaagcagacactgctgcttctgtctcatataatggtctctttatttcctatcgagtctctccaatgtgacaggaagtggttttcctaaagctatgattaatagcctctatgg

SEQ ID NO: 1002 - DNA, 120 bp, synthetic construct
  source 1..120: mol_type = other DNA
cttactggtcttgttgctctcttctcttggcaaatttatctatgctgatggcttcagtgaccatgtcaatgttaatgatccccaaatcttggtctttattcctgatcactcatgaacctt

SEQ ID NO: 1003 - DNA, 120 bp, synthetic construct
  source 1..120: mol_type = other DNA
ataccaggtattttgtttggttctgagaataaaatgtgaaatctaataggcccacactgtgccttcatagagtggggaggacagataccggacaaacaattacaaagaagtttgaggagt

SEQ ID NO: 1004 - DNA, 120 bp, synthetic construct
  source 1..120: mol_type = other DNA
acactgatgttttatttaatttgtttccaggccccagctcaaagtgctttaaaatgtggattctggaatctaccctaactgtgaaaactgtggccagttacttagaatctcagtgctcag

SEQ ID NO: 1005 - DNA, 120 bp, synthetic construct
  source 1..120: mol_type = other DNA
tggggactgtagggtttcacctgaggaagaacttccagtgagtctcgtgaaccaatgatgaaatgtatgatgaatcaagaatcatgataaatctaatttggaatacttgagggtcatgaa

SEQ ID NO: 1006 - DNA, 120 bp, synthetic construct
  source 1..120: mol_type = other DNA
ccattatattttcatttctgatgccagaatccacctgtgactattaaagatgtagagaggtctgtttgccttacatcattccctagttcttgctgagcatgtacttaatgggaagctgca

SEQ ID NO: 1007 - DNA, 120 bp, synthetic construct
  source 1..120: mol_type = other DNA
tcaggttcagcagacaatttgtactcagtatgtccaaaaccaaattcactcccccatatacacacatatactcctgaattccctctctcttaatggcatcattatctgcccaatcattga

SEQ ID NO: 1008 - DNA, 120 bp, synthetic construct
  source 1..120: mol_type = other DNA
caggtgtcactttttctttgacatttccatgacaccgtccaatcccctggctcaaagagatgaggagaatccaataagtcaataagaaaaaccttacttcatcaatagaaactagataga

SEQ ID NO: 1009 - DNA, 120 bp, synthetic construct
  source 1..120: mol_type = other DNA
ggccaattcattggatttggcactggaaagacaaggcggcctgccttcaaagacatttttatacaactatcctttactgagcacataatgtgttctaggaattgtgctacatattttacc

SEQ ID NO: 1010 - DNA, 120 bp, synthetic construct
  source 1..120: mol_type = other DNA
ggggagaggagctatgttaggtttctcttgcgccagtgatggtagtgcattacctagaacatatggcaggttattcagtaagtgtttgtataatgaatagtattcaatctttatctgcct

SEQ ID NO: 1011 - DNA, 120 bp, synthetic construct
  source 1..120: mol_type = other DNA
gatgtagaaaaatttggactttcatatgttgctgatgggaatgtaaaaaggtatagccacttggaaaacagtttggcagttcctcaaaaagttaaacatatagttatcatataacacagt

SEQ ID NO: 1012 - DNA, 120 bp, synthetic construct
  source 1..120: mol_type = other DNA
aagggaccactttatccacattttcctgactagtgaaatttgcgctaatgtaggtacaccaagctgtacttcttataagtatcactacaataacaaacacctagggatggacacagcact

SEQ ID NO: 1013 - DNA, 120 bp, synthetic construct
  source 1..120: mol_type = other DNA
ggacaagtggactccagacaaaagacaaaaataggtaacttaggtagatacaacagttttagaaaattctgttcctgaggtggtgggatttttagggaacttacctttctcaagaacata

SEQ ID NO: 1014 - DNA, 120 bp, synthetic construct
  source 1..120: mol_type = other DNA
ttacctaggaaagtaatgagcacttagtgtaattctcctgttttctgagttcacctattgaggaaaactgaagagtgttttcatagtcaagtttcaactgaatttaagtcctgagggatg

SEQ ID NO: 1015 - DNA, 120 bp, synthetic construct
  source 1..120: mol_type = other DNA
caggagggcaacaaatcaagtcaggaaataactgatatgaagcacatcggtgccttaatagtggctgaatatgtgggctagtttaaaggtgaaaaagtctcttgacgccataaatataac

SEQ ID NO: 1016 - DNA, 120 bp, synthetic construct
  source 1..120: mol_type = other DNA
agcaacaaacttgaattcaaagattttggccacttgcccagtgctctttccactacatcagtctacagcactgattactctctgaagacatttgccaaaggagacatattttcaaatctt

SEQ ID NO: 1017 - DNA, 120 bp, synthetic construct
  source 1..120: mol_type = other DNA
gcacacaaagcagtgaaggctgtgattaacctcaagagaagtttggggtgcttactagagaaaacaattgatcctgagatttttctgaacatttctatttgtcattggaatccgtctttt

SEQ ID NO: 1018 - DNA, 120 bp, synthetic construct
  source 1..120: mol_type = other DNA
tttgtgtgtgtgtacttgctttttaaacagacttatgttggacatatatttcaatgtcaaagacagtgcttttcattattctttaggtaaaataatgaggtgtacatgactctagtaaga

SEQ ID NO: 1019 - DNA, 120 bp, synthetic construct
  source 1..120: mol_type = other DNA
tcttttagaaggattgagtgtttgtgtgcctaaaaaccacgacctacttcataactggctaataccttcagtatgaacaaactttttaagaataaactgctgtatgtgaggctacttctt

SEQ ID NO: 1020 - DNA, 120 bp, synthetic construct
  source 1..120: mol_type = other DNA
aattatgtaaccagatctccttcatcaacttaccgattaggtaatggcaggtatttctgatgcttggtatggggtctgagtgaggagggtcctaaaaatattacttatgcagctgttttg

SEQ ID NO: 1021 - DNA, 120 bp, synthetic construct
  source 1..120: mol_type = other DNA
ctctacaggtgatagaggtatataaccacaatacctctatcacctgtaaaatcccgattccaggacacaacatagataaattaaataaaaatttttgtagtggagccaaggatccgtaat

SEQ ID NO: 1022 - DNA, 120 bp, synthetic construct
  source 1..120: mol_type = other DNA
atgggatgtgcacatctgttgggcacttcataacttctcaaacttaggaataaacttggaaaccgctaccctcattcctgttctacagtaattttcccatagtccttgtgttttattaca

SEQ ID NO: 1023 - DNA, 120 bp, synthetic construct
  source 1..120: mol_type = other DNA
tttcgcaggagaaagaaacccatacacatacagctgcatctgaaacctcagaaactaagctcaacccaattgattaaaaggatgttctttggataaggtaatcaaatgttcaccgactct

SEQ ID NO: 1024 - DNA, 120 bp, synthetic construct
  source 1..120: mol_type = other DNA
tcatttttctgatccaaaatttagtagcctactatatctcacccactgtccttctttcctccagctatggtagagaactgctcctccaactttatgtacatttgaatcacctgggagttc

SEQ ID NO: 1025 - DNA, 120 bp, synthetic construct
  source 1..120: mol_type = other DNA
cttagccacaagttagctgacccaccgtctctcaaacaggtgaagttaagctcaatatttggcatatcttgatatactttgtacagtctagctacaataagtttgcctatgcacgaagat

SEQ ID NO: 1026 - DNA, 120 bp, synthetic construct
  source 1..120: mol_type = other DNA
ccctctcacatttgcaactttgttctttctgatttggtcctgatttgttgacagctctgatctgccttgggctaatggattagttagtataaacctgtcttgaaatctccttccactttt

SEQ ID NO: 1027 - DNA, 120 bp, synthetic construct
  source 1..120: mol_type = other DNA
gagtacaaacttgcttttgtcgttgtcggttgattttggtggaatatttgtgtgagatggccaattttttgtgtgtgtcagaaaaaactatccgtgctcaaaacatttcctgttgtgagg

SEQ ID NO: 1028 - DNA, 120 bp, synthetic construct
  source 1..120: mol_type = other DNA
ctaccagtttgtggcctaatgagccccaaaacatgccaacattggggaaaatagatcttgttttgagctgaaaatgctatccagacctacttaactttgacctcttaaatgagagccatt

SEQ ID NO: 1029 - DNA, 120 bp, synthetic construct
  source 1..120: mol_type = other DNA
ttggcaaataataggtgttgagaaaaggggatctacactttaaaatgataccagctgtagtggtgattaagccattatgaagtgtcagaactggaagtcacttctgagccttagctgatc

SEQ ID NO: 1030 - DNA, 120 bp, synthetic construct
  source 1..120: mol_type = other DNA
ttgtcatttcccatacataatttgtacttgctcatccccatacttgtgtttttacgtcctttcctcttagagtcttttctcctgtcttattgatttgctacccacctcccttcctcttta

SEQ ID NO: 1031 - DNA, 120 bp, synthetic construct
  source 1..120: mol_type = other DNA
tattgatttcttttctaccatcttcctgtttattagcatctgggtttagctgtcacttaggttcatcggagacagagtttgtgtttctggctcctgcttttcttgttttggtgtggtttt

SEQ ID NO: 1032 - DNA, 120 bp, synthetic construct
  source 1..120: mol_type = other DNA
gaaatgaagaatgaatggggttaagagttgggctttattgggtgtaggtagtatggtagggggattttattgaggaatacttcagatttcctagctgttagatggagagtagcaccatag

SEQ ID NO: 1033 - DNA, 120 bp, synthetic construct
  source 1..120: mol_type = other DNA
ctttcttctatgacctccaaaatattctaccctggtttttttccgtctatcatttcttctctgtgtctatgcctcttccatagccctatacctaaatgttggtattactgaggtctatcc

SEQ ID NO: 1034 - DNA, 120 bp, synthetic construct
  source 1..120: mol_type = other DNA
ttcatgaaagtgatctacttgagcggggacttgaaaccaatgggacataacaaggaggttgtatgaaagcactaaaccacatgttgtaactgtaagtaatttcttagctctggggtagaa

SEQ ID NO: 1035 - DNA, 120 bp, synthetic construct
  source 1..120: mol_type = other DNA
tcagataccaccttttctgtaaaatcttttttcaagcagttgctgcttctgcttagctcccataacactttttgaatagttaggagaaaagtgtttacctgggctgtacaggatgtgatg

SEQ ID NO: 1036 - DNA, 120 bp, synthetic construct
  source 1..120: mol_type = other DNA
ggaccacattagatggctggaggaccatctgcaggtgtcagaggggctttgggacattatctctaatgagttgaaagtaaataaatacagaaagctggtgatatgaagataaatacttta

SEQ ID NO: 1037 - DNA, 120 bp, synthetic construct
  source 1..120: mol_type = other DNA
gttcttaggctcagcgtcagttacctgagagccaagagcttctttgatggtaagacagaagggtttaatttgtctacaataacgtataaaaaatacttgtactagatatagctgtttctg

SEQ ID NO: 1038 - DNA, 120 bp, synthetic construct
  source 1..120: mol_type = other DNA
cagttgcctctataccaaacccttcatcttgggagaagagttacgcagtattcagtgatggtctgtaagtatgtgtgtattagctatagtcatttagctgacatagttggaactagaact

SEQ ID NO: 1039 - DNA, 120 bp, synthetic construct
  source 1..120: mol_type = other DNA
ttgccacccttagagattctggagtctagaagccaaggaggcattattctctgactctgataaagctttattgacttgagtcattttacctttccatttcttgttcctttgtaatgggga

SEQ ID NO: 1040 - DNA, 120 bp, synthetic construct
  source 1..120: mol_type = other DNA
gggaaacagtatagcgaagcgaagggaagctcaaagtgaataacaggatgcaaacagggggtgtgtaaattcctgcggaaagaacaatataaacgagtaatcatacaatcttgttagaaa

SEQ ID NO: 1041 - DNA, 120 bp, synthetic construct
  source 1..120: mol_type = other DNA
gagaattcgggaatgactacttttgttttctgtttacatacaaacacctaatgagcctgacaaaatggagcttagggatccgagtttctgatttcaaagtcttgcatttgcagctgtcat

SEQ ID NO: 1042 - DNA, 120 bp, synthetic construct
  source 1..120: mol_type = other DNA
aatggatttctctttgatcattacctagtcttgcatggttctagaatccttgcttatttggccatgaacaggtcattagtcatcattttttttctttttagggagactaccgtgggctaa

SEQ ID NO: 1043 - DNA, 120 bp, synthetic construct
  source 1..120: mol_type = other DNA
tacagaaaaataataacactagagaaggtgatttctgttccttgtttgtccatagaggccaaaaagccattcagttgttagcagtgggagattaagagggagacaaatgtctgggctctg

SEQ ID NO: 1044 - DNA, 120 bp, synthetic construct
  source 1..120: mol_type = other DNA
aagaagtatgagggaattcaatccagaacatacgtgagttatttcctaaatcctgaggttctaagtctctgtttctcaaagaatggcacctcattctcagcatcactggggaacttgtta

SEQ ID NO: 1045 - DNA, 120 bp, synthetic construct
  source 1..120: mol_type = other DNA
atcttaacattctactgaatgttcagagtctgattctcacactttggaaagtggtacatatcctcactgatggggaagattttaacaaatgcccattacggtacagcagatacttcccag

SEQ ID NO: 1046 - DNA, 120 bp, synthetic construct
  source 1..120: mol_type = other DNA
tatgaagattaaataggatataatacgtggaaagtgctaggtgtacagtgtgtgcccaatatcacatatgagtactaagtaaggtcactccaatggtaggaagcagctcttgtgacagtg

SEQ ID NO: 1047 - DNA, 120 bp, synthetic construct
  source 1..120: mol_type = other DNA
ggttttagtgcattcaagcaaatgtggccattagtaagcaagcaacaacataacttaccgaatagaaagggagaaaaggccattctctcttctgccattctctctgtgtacagattaaac

SEQ ID NO: 1048 - DNA, 120 bp, synthetic construct
  source 1..120: mol_type = other DNA
gagacaggctcaaataactcccacttttagtaaatgtcagaggtaaggtttgagcccaattctgtcagttaccaatatccacatgcttttaagtgagataatatttgaaagtgcttggca

SEQ ID NO: 1049 - DNA, 120 bp, synthetic construct
  source 1..120: mol_type = other DNA
ttccatagttgcattaaaatcctcccctactgaaagaaacggaggccaggataactgtagagcagcaaatttcagagaaggcctgaacttacaagaaggagaattcttattacaggtaaa

SEQ ID NO: 1050 - DNA, 120 bp, synthetic construct
  source 1..120: mol_type = other DNA
ataaagatgtgtgccatgtgtgctgtcaccgctatgtgatcattatcagtttcacccactgaactgactagaaaaacttcaccattgttacaaaaagtaaccctaagtttcggtaactcc

SEQ ID NO: 1051 - DNA, 120 bp, synthetic construct
  source 1..120: mol_type = other DNA
caaccgacggttatcagccaattaccactacagtgtgaaaggtgttaccagaggttctgtataccatatggcctaaaacttttgaggagaaatattttcctttgcttaacaaaggcatat

SEQ ID NO: 1052 - DNA, 120 bp, synthetic construct
  source 1..120: mol_type = other DNA
aagttcttatgggtagaatcaccattgtttatcctaagagaattgccaggtattacatatcatatttgcagtcaaaaacctgagagcctgcttgtggttaaagggacatggatggagccg

SEQ ID NO: 1053 - DNA, 120 bp, synthetic construct
  source 1..120: mol_type = other DNA
accatataacattgtaccttattacactgagtgctggctctgtgccaagcattgagttaggtgggatatcgtcattatatctacctgatgaagtgccagtttttgaaataacactgaagc

SEQ ID NO: 1054 - DNA, 120 bp, synthetic construct
  source 1..120: mol_type = other DNA
catcagtgcttgaaatgtctttgtacaagaagagttttctattaatgttcccagtttaagaatctaatcaacatctttgcctcctgtttccctctaaaaaaaagcagtgtgatagactat

SEQ ID NO: 1055 - DNA, 120 bp, synthetic construct
  source 1..120: mol_type = other DNA
gcttgctattctcatatatctggttctcaaattgtactgtgcacaagaatcacctgaagaccttgataaaacttggtcatccctgtgagccccattgtcagatattctgaatcagtagtt

SEQ ID NO: 1056 - DNA, 120 bp, synthetic construct
  source 1..120: mol_type = other DNA
ttgcagttaaaaaaaaaggaaaactctggtttaagcactaaggactcagcaccgtagtaaatggtgagaggcaagagaaggaaagtgggtttaatatggtaaaggcacaatcccttgctc

SEQ ID NO: 1057 - DNA, 120 bp, synthetic construct
  source 1..120: mol_type = other DNA
aaagatgtaaagtctgcaatcataggccacagctaggtcacaaagagcctgatgagctaaggaatattttggcaaatgagagccatttaatgagtttcaggcaacagagtattgccatag

SEQ ID NO: 1058 - DNA, 120 bp, synthetic construct
  source 1..120: mol_type = other DNA
attgtatattcatgattgtggaatcatcatttgataggagatgctgttttcttgttacaaagtctgaacacctgcataggagttgactgtagggaacagcttaggattcctcagagtgga

SEQ ID NO: 1059 - DNA, 120 bp, synthetic construct
  source 1..120: mol_type = other DNA
ccaaaagaaggcattgttatcacaggagatgacagctccatgcatgttattgcccccgcagaccttccagtgggacaagatgtagaggtggaagataggatcattaatgatcctcaccct

SEQ ID NO: 1060 - DNA, 120 bp, synthetic construct
  source 1..120: mol_type = other DNA
gtatgtctgaggtggaatatctgtgtgcaggagggccttttcctccttgtgctgctattattttgatgtcagaaccatcccttggactggttgatattgttttaagcaattaaatatatc

SEQ ID NO: 1061 - DNA, 120 bp, synthetic construct
  source 1..120: mol_type = other DNA
agccccagaagttttagtaactttcagaaaattgtgagcaggagtctgatattaaacatttatatcatatcaaacatatcagtgcttttctcctttctaatgtgggaatgcagagaggta

SEQ ID NO: 1062 - DNA, 120 bp, synthetic construct
  source 1..120: mol_type = other DNA
tttagtgattaagactggagaaagtggcatgatagttttccggcttcttacaaaaaacaaccgatggacttgggtccagtctaatgcacgcctgctttataaaaatggaagaccagatta

SEQ ID NO: 1063 - DNA, 120 bp, synthetic construct
  source 1..120: mol_type = other DNA
attgaaaagatgatttaccgagaaggtcattgtttcccggctgcgctgtattttgatcaggggattttgtctgtggttctctgtctggattgtgttgttctattaatagctccattagtg

SEQ ID NO: 1064 - DNA, 120 bp, synthetic construct
  source 1..120: mol_type = other DNA
tctggatggatttcagtttttttgaaatttgtggtgacttattttatgatctaatacatggtctatgttggtaaaatatcccatgtaatcctatgaagaatacatgttctgtagtttggg

SEQ ID NO: 1065 - DNA, 120 bp, synthetic construct
  source 1..120: mol_type = other DNA
tgcaccaccatgcctggcccctaaattctcgtagtctgtttttatgtgtagatatttattccacacaaatttattatttttttctttttttgcagggtgtcaggtagggatgtaacctga

SEQ ID NO: 1066 - DNA, 120 bp, synthetic construct
  source 1..120: mol_type = other DNA
tcaggatgtgaactcatttgctggaggtcacccagggctctttcaagatagtaaaaacagtgacttgtacagcataatgaaaaacctaggcattgattttgaagacatcagacacatgca

SEQ ID NO: 1067 - DNA, 120 bp, synthetic construct
  source 1..120: mol_type = other DNA
cacccacgtgggtcagatgcagtacaatccagtactgccaggccaacaggcatttttaaacaaggtaagggtgttatcaaactgaattaaatctttcagtgattctttttaccttataga

SEQ ID NO: 1068 - DNA, 120 bp, synthetic construct
  source 1..120: mol_type = other DNA
gaataaggagttgcatgagtaccacataagttctttgcagtgttttcccctcactacttttcactgcttctttgtaaataaccaaataattctatagacctacatatgttccagagtaca

SEQ ID NO: 1069 - DNA, 120 bp, synthetic construct
  source 1..120: mol_type = other DNA
ctggtcaaagcaaacctacttatgatagagaatatttaactgtaatttgtgacttgtgctgtttgacccatcaattcctacctgacccaaaggcaatctgaaatgagacagctgcatcac

SEQ ID NO: 1070 - DNA, 120 bp, synthetic construct
  source 1..120: mol_type = other DNA
tggtatcaaaattacatatactacagtcaagatagaaagggtgctgccacggagtggtgaggtaccgtctacatttcacattattctgggcaccacaaaatatacaaaactttatcaggg

SEQ ID NO: 1071 - DNA, 120 bp, synthetic construct
  source 1..120: mol_type = other DNA
tcgcttcttagaacagtggaaactatgtgtttttctcatatttgaggagtgttaagattgcagatagcaaggtttggtgcaaagtattgtaatgagtgaattgaatggtgcattgtatag

SEQ ID NO: 1072 - DNA, 120 bp, synthetic construct
  source 1..120: mol_type = other DNA
cgttaaaccaaatacacgtttgtctgtattgttaagtgccaaacaaaggatacttagtgcactgctacattgtgggatttatttctagatgatgtgcacatctaaggatatggatgtgtc

SEQ ID NO: 1073 - DNA, 120 bp, synthetic construct
  source 1..120: mol_type = other DNA
ggagatgcttagctattgaagagcttctctccactcttgtattttctttatgagttcttctgagagattttcactgtgactgttttgacctctgtatattcatggaaaccgtactctccc

SEQ ID NO: 1074 - DNA, 120 bp, synthetic construct
  source 1..120: mol_type = other DNA
caacccaaatgatcaggaattaactcagtcaatcagtttggattttgggatcttgttatcaggtttatggagacctcccaccagttttagaaactgactgatttaccccttgttgaagag

SEQ ID NO: 1075 - DNA, 120 bp, synthetic construct
  source 1..120: mol_type = other DNA
aattcatttgtgttctcactatacgaccattagtttacacttccttgctcccttttctatgggacaggaggaaaaaaatatggtgggaggggctaagagccaatcaagtttaaaatggca

SEQ ID NO: 1076 - DNA, 120 bp, synthetic construct
  source 1..120: mol_type = other DNA
ttcagctggtcagactccagtaatgttttctcagctacgccatgcatttttgatgggctaactttttgttctacttcagcaacatcctaaatatatccatggcttttcactactccacta

SEQ ID NO: 1077 - DNA, 120 bp, synthetic construct
  source 1..120: mol_type = other DNA
gctcggtactttaattgcttctctacctccataggatatggaatcccagtgtattactacttatttcatagtgtatgtaggttattttgcatgtcctgccaccacagctatgtagagcat

SEQ ID NO: 1078 - DNA, 120 bp, synthetic construct
  source 1..120: mol_type = other DNA
cttgaatccaccaaaggggcactgggcacttaccacgccatagcaattcaccctgaaggaaaagaaaagtgcattatagacaatacttaaggtgtgaaaaaaaaatcctttttggcagtt

SEQ ID NO: 1079 - DNA, 120 bp, synthetic construct
  source 1..120: mol_type = other DNA
cactatcccagttcccgaagttccacattctcactggaccataaagttcttaactatgtctctcatcctggagggataattcctttaataaatttacacttacaaaaggcagtattgtct

SEQ ID NO: 1080 - DNA, 120 bp, synthetic construct
  source 1..120: mol_type = other DNA
cccattaggcccacttcctattgctgttacaatggcatttaaattgccacatgggctttggaggagaaatttaaactatacactgatataatttgtgttaatgtataccctcccctgccc

SEQ ID NO: 1081 - DNA, 120 bp, synthetic construct
  source 1..120: mol_type = other DNA
cctagagtaagaaggccgatataagaatatctgcatacacaagggtaccaagtaaatattgttcttactcttttacctccctgtatacagcatagtaccacgtgctcagaaattacttgg

SEQ ID NO: 1082 - DNA, 120 bp, synthetic construct
  source 1..120: mol_type = other DNA
attcactctctagtttttcttatcttccaagtcactacacatagtaacaagtcccagaaagcaatctactggataaatgaataggcaatgataatctgctggataaatgaataggcaatg

SEQ ID NO: 1083 - DNA, 120 bp, synthetic construct
  source 1..120: mol_type = other DNA
cacatatatacactcaccaaacacttaactgcaatatacaaaatcaggaagtctaacagctgaaacaaataggactaagagcacatagaaggtagggagtgatagaggggatgaatgctg

SEQ ID NO: 1084 - DNA, 120 bp, synthetic construct
  source 1..120: mol_type = other DNA
acactttgtatacacacaaacagacaaaacatggcaacaaaaagaacagaacagaatgaagccatttacctcctctttggcaatgcgcatctcatctgtaacattagagaacactgtggg

SEQ ID NO: 1085 - DNA, 120 bp, synthetic construct
  source 1..120: mol_type = other DNA
gggttggagggtggaagctcttgtaggtttaacttcccactacttgaaaagttttatgtttcactttctcttactcttctctgactctgcaaatcttctttatcttccaaagccaagaaa

SEQ ID NO: 1086 - DNA, 120 bp, synthetic construct
  source 1..120: mol_type = other DNA
tgggccattggcctatgggctagtctatgaaatgtattaggtaggtcatgatatggtaacagtctcaaaggaaacattttaaggtgtttgaatgggtaaattctttgattccttaggctt

SEQ ID NO: 1087 - DNA, 120 bp, synthetic construct
  source 1..120: mol_type = other DNA
ccctggatgaggcaataggctaaagcttagtgagtgagtatcccctttgcgtaagttttttctcctaacaatagatgaatatttaatggtaaaggagcccagggctttttagtcttttgt

SEQ ID NO: 1088 - DNA, 120 bp, synthetic construct
  source 1..120: mol_type = other DNA
ctctagaacaagacccaaagggcaggaagaaattcacaaccaaagatccagaagcttaaacaaacaatgaacagagaactatgcaaggaagagggaaagatgatctttggataagagaga

SEQ ID NO: 1089 - DNA, 120 bp, synthetic construct
  source 1..120: mol_type = other DNA
atcctggatgcggctatacaacactggccctggtggtagaataccccatggtgtgcaaattcaacagcattgtccactgcgaagaagacattcacattaaagatatattttataaaaatt

SEQ ID NO: 1090 - DNA, 120 bp, synthetic construct
  source 1..120: mol_type = other DNA
tattaggtataattttcttctgatcatttcatttaatgagtgtatgacccagagtgaagggagagggcaaatgtgaaactgctgtctcctcagttggtctcaatccaagtcccattctgg

SEQ ID NO: 1091 - DNA, 120 bp, synthetic construct
  source 1..120: mol_type = other DNA
acttatcatgacccagtcgcaacttagctatttcattttttatccctcttctggcatccagataactctatccagtcaaactgacatattcactacctcttgaatctcatccttcttctc

SEQ ID NO: 1092 - DNA, 120 bp, synthetic construct
  source 1..120: mol_type = other DNA
acagtggaactggatgaaagaaatgggatctgtgcagctacttcagttagctggaatcctacagttctggtttcttctttaatgctagttttcccttttcagaggaagactttgttttca

SEQ ID NO: 1093 - DNA, 120 bp, synthetic construct
  source 1..120: mol_type = other DNA
tgtggcattgccatgtggagcagaagtagcaaatgcccatgaaaatggtctagcttattatgtcttgcataatgtgggtagagttctattttatatgaatctaatgggatattgcggtgg

SEQ ID NO: 1094 - DNA, 120 bp, synthetic construct
  source 1..120: mol_type = other DNA
gggacaggaagcttttttctcacattgtgtaaactagtgtgcgaaattaaaaagtatgggaggaaagaggaaatatggcatgtactgagcgctcagtagggtgataaatgttttactact

SEQ ID NO: 1095 - DNA, 120 bp, synthetic construct
  source 1..120: mol_type = other DNA
gtaacaattcctcaaaacccagagctagttctagtacccatttggacatcatcattccttcttgtgaaccttttttacagcattttgtacatgccttagtaccttatcacaccctgcctg

SEQ ID NO: 1096 - DNA, 120 bp, synthetic construct
  source 1..120: mol_type = other DNA
catgtgagaagaaatggctgcccctgctgtaggcccataaccaggaacaatattcactactccaggaggaaaccctgcctaaaagataaaaagtttaaaagttacagtataagaatttaa

SEQ ID NO: 1097 - DNA, 120 bp, synthetic construct
  source 1..120: mol_type = other DNA
tgtggcccaatattacaaacaagcatattggcatagaggccctttcaaccttacatagattagtttacacaattttgcagaaaacactaggccatcagtggcaggtacaaaccaacttaa

SEQ ID NO: 1098 - DNA, 120 bp, synthetic construct
  source 1..120: mol_type = other DNA
ccaataatattatttagtagcttttatttccaggaaaaataccttgctaaagacaaagatgtccagggtccagaggccaagtacttgggttcaaatctcagctcaatcactgaccagcca

SEQ ID NO: 1099 - DNA, 120 bp, synthetic construct
  source 1..120: mol_type = other DNA
agtaggccccactacattccaccaaaatgctatcctgcagatgtgcagtggagagcaccttgccatatacatgtaaagcttggctcttataaagagtacataatacaacttttaataaaa

SEQ ID NO: 1100 - DNA, 120 bp, synthetic construct
  source 1..120: mol_type = other DNA
tcatcaagatctatttgtgttttaagtgacttctcccattttgtcccggagtaaagtaggacagttctaaagtagccacatttcttagtaccaccgaggtcttactctcctctcaacttt

SEQ ID NO: 1101 - DNA, 120 bp, synthetic construct
  source 1..120: mol_type = other DNA
agttaaaatgacttcctttaggtcaaatagcaagatctgggcacaaagggtagtgagattctgatttctaaaccccagtgctctttctatctcattttgatgttctcctgctaaccagct

SEQ ID NO: 1102 - DNA, 120 bp, synthetic construct
  source 1..120: mol_type = other DNA
ggggtggttacctggcagaaatgcacaggtgatgaactgttaaagctatttgtttctgtactacactctctatcatgtcaaaatttaaccaaatgtgacttttgtatgcctgtacttttc

SEQ ID NO: 1103 - DNA, 120 bp, synthetic construct
  source 1..120: mol_type = other DNA
taggcaagcaaatttaatgccaataaccctgtaaaatagactgtagtgcctcataagcaggcactgtgtctccattatcccaaagtctaacacattgcgcacattcaactactgtatgtt

SEQ ID NO: 1104 - DNA, 120 bp, synthetic construct
  source 1..120: mol_type = other DNA
tgcagatccctgttcagacctcttctgagctcttacagaacatacctactactactgcaaacaccataaaggaatatatcattccagtgttcttttgtacatagaactggccactacatg

SEQ ID NO: 1105 - DNA, 120 bp, synthetic construct
  source 1..120: mol_type = other DNA
caacccagatttgaattctgattcctcttcattagctgtgtaaaccttgaggcatctaaccattcatccctctagctaaaggtttgataaatattcgactctgcagcattctcatcatcc

SEQ ID NO: 1106 - DNA, 120 bp, synthetic construct
  source 1..120: mol_type = other DNA
gtggtgggattacaggcacacagggattataggtgtgtattgctgcacctagcaagttctaatgtattttaatccttcctttcagttttcactgctctgaacaattttaggccctattat

SEQ ID NO: 1107 - DNA, 120 bp, synthetic construct
  source 1..120: mol_type = other DNA
tatggctcatggatatgaaatctagcagacagtagaatcaacctttgatcccacatctgactacaaaatctagttcttacatctctgtaaggctgccctaataatgacctcctttgcaac

SEQ ID NO: 1108 - DNA, 120 bp, synthetic construct
  source 1..120: mol_type = other DNA
gtttataccatcaacattttagttttagtaaccagttgaccagccaactcagttggcattgtgacctgatttgaagcttgggtagatgttaatgagcatccttgatctcttgggtaagca

SEQ ID NO: 1109 - DNA, 120 bp, synthetic construct
  source 1..120: mol_type = other DNA
aacaagccttcctggacattctgagacaggctaaattttgagaatgtctgccatagccaatagtcaggttagtactaaattcctaaggtgaggaatgtggaatgtatggaaattcaacac

SEQ ID NO: 1110 - DNA, 120 bp, synthetic construct
  source 1..120: mol_type = other DNA
gtgatctcatttactggggctaaagtaatggaaaagactgggcaggagactggcaggaacatgtgatcgctataattaactaaaacacattgtcatgaataatattatccttgggtgttg

SEQ ID NO: 1111 - DNA, 120 bp, synthetic construct
  source 1..120: mol_type = other DNA
gcccggccaaccctatcttactttcataataatcacaaagtgaagcagtagccctactaggcacaggttatagtgtcagaggaacagcattttaatgttgaggttattacttattagcaa

SEQ ID NO: 1112 - DNA, 120 bp, synthetic construct
  source 1..120: mol_type = other DNA
cagaaaccatattttcatggcatgtcttttggagcttgcaatggggttcaggagctcagaatggcaaaaaaccaagaaacctggcataaaatgaaactagtgttcagaaactcaccttat

SEQ ID NO: 1113 - DNA, 120 bp, synthetic construct
  source 1..120: mol_type = other DNA
tagctaacacagggagtaaaggaaggtgacatatgtgctggattataacatatatcctaattcagacatcccttcttactggatatctaaagataagttattaatagttcaaccccgagg

SEQ ID NO: 1114 - DNA, 120 bp, synthetic construct
  source 1..120: mol_type = other DNA
ggcatgcctaaataaagggaaaaggggcccaaagctgttcagatgaagagactagatgtgcaaaaatacatatatggggaaatgagaaagatggaagaagtatcaagaaaccctatcaga

SEQ ID NO: 1115 - DNA, 120 bp, synthetic construct
  source 1..120: mol_type = other DNA
ctgcatcagatttattcacttgggaattctgccttctctctgcctaaagattgtattaccaccttagattttgtacctgtaaactaagggaacacagatttcattttggcagagatccag

SEQ ID NO: 1116 - DNA, 120 bp, synthetic construct
  source 1..120: mol_type = other DNA
gtcacagataaggcctgacattgaaaataaagtcaatttgtggcagatcctgatccccagagaaagaagtttaggctctattctggatataaaaagggagagagaccagatcaaatggat

SEQ ID NO: 1117 - DNA, 120 bp, synthetic construct
  source 1..120: mol_type = other DNA
tttctcaaaatatttctggcttggataaagctagttttgactagtggcaaaataaagccctatttgccttatctgctgatatgagattttggagtctgtgggctaaagtggggagcccct

SEQ ID NO: 1118 - DNA, 120 bp, synthetic construct
  source 1..120: mol_type = other DNA
cagccttttcaattgtgtcagggaaagagaaaagatgccacagcatttgttttgagccactccatcactgtgtcctagagatgataacaaaacttgtcagcaacttctgtacatcatata

SEQ ID NO: 1119 - DNA, 120 bp, synthetic construct
  source 1..120: mol_type = other DNA
ctgagagcccttatgaaatggggacaataccctctcttaggacatgtgttctttactttagaattgttaattccattttcttacagtcaggcaggtgccagaaaacaaaacaacttgcca

SEQ ID NO: 1120 - DNA, 120 bp, synthetic construct
  source 1..120: mol_type = other DNA
aatcaaggagagaaaggactaagtagttaataagtgccagccacattccacaaattacctcacttaattctcacagccactttccaaggtagtcattctcattcccaattcacagacaga

SEQ ID NO: 1121 - DNA, 120 bp, synthetic construct
  source 1..120: mol_type = other DNA
ggttaaacaaaaccagaaatctaggaaagcaatctcctactctaaccaaaatcgattccataggagttgaagaaatgtagttcacacagacatttcacatccatgtcaaagtcctctgcc

SEQ ID NO: 1122 - DNA, 120 bp, synthetic construct
  source 1..120: mol_type = other DNA
gtacaaaaaagagtgacagaaaagctaggagaagacgtgaggcatacttgtaggaaacaggtctaggaaaggttgggtaaaagggaatattctggaaaaactggaaaggattcagaaaaa

SEQ ID NO: 1123 - DNA, 120 bp, synthetic construct
  source 1..120: mol_type = other DNA
gcacgagaaatcaaaattcactgacttgtttggagtatttttacccagaaaagttcttaaacacagagcaaaacgcctgctctttgagtcttgccttcttttggacacttaggtcagtca

SEQ ID NO: 1124 - DNA, 120 bp, synthetic construct
  source 1..120: mol_type = other DNA
taaaggcacaatctgatctctgctgctactttcctgaggaaaagagccaatcagctgagcaacttcctcatttgttgtgctttatgaaaatgaaaatgcaacagaccttgggatttcaaa

SEQ ID NO: 1125 - DNA, 120 bp, synthetic construct
  source 1..120: mol_type = other DNA
tgactggctcagcaatttggttctgatagagcacttggctttatttgttccttttttatctgcacgggctaaagtttatttgcatactcggatacgattggatgaacaaactcagagcaa

SEQ ID NO: 1126 - DNA, 120 bp, synthetic construct
  source 1..120: mol_type = other DNA
atgggacttacatagggaaactaaaaatttctgaattgtttgcccaaatcaggtgcagcacttgtttccctttctaccctcatttcatatccccattttagagacatacagagggtgagt

SEQ ID NO: 1127 - DNA, 120 bp, synthetic construct
  source 1..120: mol_type = other DNA
ccaggcattcctgaatgtaggcaaaaggagttgctttggagacaggttaccacacctgcccatttaatttcagcaaatatttactaagtatcatttatgcatccataattctttagccct

SEQ ID NO: 1128 - DNA, 120 bp, synthetic construct
  source 1..120: mol_type = other DNA
ccgtccaatcctcagttcctgaaaagataaaaggaacctaatctgccacccaggacttaaaatttttaaaaaaatgttgaaaaaagtcatatgatgaattaaaaatagcttctgcaatgg

SEQ ID NO: 1129 - DNA, 120 bp, synthetic construct
  source 1..120: mol_type = other DNA
cctctgatttctcctgctctttacatatcttttcattgttcttctctttggcttgtgttactgagataggatagatgcccctctaatctggtctaaccaggacactaactgattagtaag

SEQ ID NO: 1130 - DNA, 120 bp, synthetic construct
  source 1..120: mol_type = other DNA
ttgatcatgcacccgtcattctttgtgtcattcaggtttattgttactatctaaatattctaatttaaataaaggtaagctttctatctgtaccttacaatgaaaaactcatcaggtgtt

SEQ ID NO: 1131 - DNA, 120 bp, synthetic construct
  source 1..120: mol_type = other DNA
ggctctaaccccatttccacttagcacttctctagtagaagtcctatgtgggagctctgcccctgcatcaggttcctgcctgggcaccagtctgaatacctgcagacttaacattgcatg

SEQ ID NO: 1132 - DNA, 120 bp, synthetic construct
  source 1..120: mol_type = other DNA
actgctggtcagataactaagctaaatgccacacctcatcatgttgctgggtttgcaaacctgagagccagcatatttgttttatgtggactgtgcaatactgtacaaattagaaacatt

SEQ ID NO: 1133 - DNA, 120 bp, synthetic construct
  source 1..120: mol_type = other DNA
agttaggattaaatttggctgcctctgatgcaaaacccaaaataaatattcaagatggaaatggattcttctctcacataaacagattgtaagcaggttgtccatggcagccatggtgtc

SEQ ID NO: 1134 - DNA, 120 bp, synthetic construct
  source 1..120: mol_type = other DNA
tttggcccagccatcccattgctgggtatatacccaaaggattataaatcatgctgctataaagacacattcacacgtatgtttattgcagcactattcacaatagcaaagacttagaac

SEQ ID NO: 1135 - DNA, 120 bp, synthetic construct
  source 1..120: mol_type = other DNA
tcttcacttattattcattatttaatctcagtatttccttcttggcttaatttcactatttgagagtctgtagaggttcacattcttgaccagtcttgtcaggagattgtgaactttgct

SEQ ID NO: 1136 - DNA, 120 bp, synthetic construct
  source 1..120: mol_type = other DNA
ccccctaagcatgtctttagcagcatccataagtttctgtatagcattttctcgtttgctcaattcaaaatactttttaactcccattatgatcttttccttgattcatgggttattttg

SEQ ID NO: 1137 - DNA, 120 bp, synthetic construct
  source 1..120: mol_type = other DNA
ccagaacttactcatccatataactgaatatctataccttttgaccaacatattcccattgcccccacttccttcacctggtaaccaacatttttctctttgcttttatgagttccactt

SEQ ID NO: 1138 - DNA, 120 bp, synthetic construct
  source 1..120: mol_type = other DNA
tatacagacagtggcccagctggaaatcgatttttttccctcagcaatgttataatgaaaagatgttgaacaaagcaatgttattggaggacctgctctatacccagaagtgagattgct

SEQ ID NO: 1139 - DNA, 120 bp, synthetic construct
  source 1..120: mol_type = other DNA
attataggcctgagctaagcgcccggccattgactgctttttaaaagttaaaccaatgttccattcctgggataattcttacttggttgtgaagtagtaactttgtatataccttttggg

SEQ ID NO: 1140 - DNA, 120 bp, synthetic construct
  source 1..120: mol_type = other DNA
gtaaccaatgcttagctcccacttataagtgagaacatgtatttatttttctgtttctgcattaatttgcctagaataatggctttcagctgcatccatgttgctgcaaaggacataatt

SEQ ID NO: 1141 - DNA, 120 bp, synthetic construct
  source 1..120: mol_type = other DNA
gctaggccactatctctgcgtcattatactgactagggagtccttttcccattgcttatttttgtcaacttatcaaagatcagacagctgtaggtgtgtggctctatttctgagttctct

SEQ ID NO: 1142 - DNA, 120 bp, synthetic construct
  source 1..120: mol_type = other DNA
ttcaaagaatatgtgtatttgctactgttaaactcctggtgtctctagttcttccaaaataacaccggactctagtattctggcatcaaagtaagtggctttcatcaggacaattcccac

SEQ ID NO: 1143 - DNA, 120 bp, synthetic construct
  source 1..120: mol_type = other DNA
taccacataatcagaactaaatgcaagacataaaattatatctgttcctttgttacctcggaggacgaaggaacattttattctttctttctgatattcctttgatagacatttgggagg

SEQ ID NO: 1144 - DNA, 120 bp, synthetic construct
  source 1..120: mol_type = other DNA
gactgctccccttacttggctattaagctatttggctattaaagctgaaaattctcaagggcaggaataatttgtttaccgcccaattcttagtttcctctttgttcttttgacttcctg

SEQ ID NO: 1145 - DNA, 120 bp, synthetic construct
  source 1..120: mol_type = other DNA
tgatggcagcgaggtactgtcagatgactttatggaagcaaaaaccatggtaagaacccttgctaaaaagaatgaatcaagaaaggagaagcagatgagacatcacatagattggcaatt

SEQ ID NO: 1146 - DNA, 120 bp, synthetic construct
  source 1..120: mol_type = other DNA
gtcctggacccagatttcaaagcctccctctaaaccattgggagatatttatcctatgatctaactttcctagccaaaaaagtaatggaacatttctttcccatatagtccgatatgaag

SEQ ID NO: 1147 - DNA, 120 bp, synthetic construct
  source 1..120: mol_type = other DNA
attccaagtcaatttagtccctacctcctctgactggccacccactacagaaatttgataatcttatcttgatgtatctcttcatctagctcccataaatactctggctcatcattctag

SEQ ID NO: 1148 - DNA, 120 bp, synthetic construct
  source 1..120: mol_type = other DNA
cattgatatgttatttgatcatctccacatttggaagcatattctttacatctccgtttagtgtggattgggctggtgttcttctgctaggtagacaattgttactccctctgagggaga

SEQ ID NO: 1149 - DNA, 120 bp, synthetic construct
  source 1..120: mol_type = other DNA
gtttcttcttttccctatgagttttttatttgcccggaatcgattttgtctttatgttgtcctaacacaatttattaaatggttcctcttctgtccctctttcattctgtcataaattaa

SEQ ID NO: 1150 - DNA, 120 bp, synthetic construct
  source 1..120: mol_type = other DNA
tatgttagttaattacaccaagcttagaatgtgactcctgtagtatctgggaggagatgcacacacaacctttacttcttcacattggctattcaccagcgtgcaataaaccacaaagat

SEQ ID NO: 1151 - DNA, 120 bp, synthetic construct
  source 1..120: mol_type = other DNA
cctgaataatgcagtatattaaaagtatttccttctgggacttgaatcccctggctcccaaccagtactctgcatttctaactacttatatgtgaacagttgctttaagcctcacacatt

SEQ ID NO: 1152 - DNA, 120 bp, synthetic construct
  source 1..120: mol_type = other DNA
actggataccaattatttaggccaagtgggagcctgttaatgatttgccaatgaatccagtccccctgcagtgataatttaccgtaattattgagcagttttccaaaatgccttgtttct

SEQ ID NO: 1153 - DNA, 120 bp, synthetic construct
  source 1..120: mol_type = other DNA
cctaacatgttttgaaaagacttataaaaagactatgctgaaggattaaggaaatgctgactctctcaaacaaaatccagaaccgcgaaagatttatcactggaagcagagttccccacg

SEQ ID NO: 1154 - DNA, 120 bp, synthetic construct
  source 1..120: mol_type = other DNA
tccatctccaccaacccatgccctatggtgcaggcagaatagtctttcaaaataccgaaaggatcactccattcctttgcttaaaactcttcaaaaatttactcttacttgtaggctaaa

SEQ ID NO: 1155 - DNA, 120 bp, synthetic construct
  source 1..120: mol_type = other DNA
attctcacaaaaaaattaaaatactggatcaagtggaaaggatcctgattccagtcaagagtcagtgtctcagttccagccatctgaaagtcaacaatgtaggcctggacaaagagaagt

SEQ ID NO: 1156 - DNA, 120 bp, synthetic construct
  source 1..120: mol_type = other DNA
cacccgcctgaatgcttggtgataggatgtcatcgttaatgatttgagttccctaaagaaagctctgtagcctttggagaaagctaacgatgtgtaatagaaatttactagaaggattca

SEQ ID NO: 1157 - DNA, 120 bp, synthetic construct
  source 1..120: mol_type = other DNA
ggtttgttccaagagagctgtgggcagcaaaatatggaattatttagagactctctgtcagtaacattggaattgtgaggagattgtttaatataactacgtagagtaagtgcctgggag

SEQ ID NO: 1158 - DNA, 120 bp, synthetic construct
  source 1..120: mol_type = other DNA
tgtcctacaagagacattttacttctcaaacagaagcgctaaagctaacttcacaaagaatttgttgatcactctttggcattcagatatacccatttgtaggatcctacaatcagaggg

SEQ ID NO: 1159 - DNA, 120 bp, synthetic construct
  source 1..120: mol_type = other DNA
aatgaattgcaaccatgttcaaaaacccagagtagactagagaagagtgaagaatgtgtcagaacattctaagtacatttgctagctctgtccttgcccatacttatatccgggagctta

SEQ ID NO: 1160 - DNA, 120 bp, synthetic construct
  source 1..120: mol_type = other DNA
cctttgtcactgaaattcactgactcctcatggaattaccagacggttcaacatatttatagtgccatgaattacattactgaaataagtattacaatgccaccctattcggtggacgtc

SEQ ID NO: 1161 - DNA, 120 bp, synthetic construct
  source 1..120: mol_type = other DNA
tgcaattcctctattgtgtcaggggctagcagagtgagtggtgaagaatgaatattctaaattgtgttcataattttatttttcaagttgcaactttaaaaacatatatagagcatcaaa

SEQ ID NO: 1162 - DNA, 120 bp, synthetic construct
  source 1..120: mol_type = other DNA
aactaactgcaccatcctacacagtagtcatgggccccatgtaagtgctgagcacatgaaacatggaaagtatgactgaagaactgatttttaaattttacttcaaaaaaaatgttaagg

SEQ ID NO: 1163 - DNA, 120 bp, synthetic construct
  source 1..120: mol_type = other DNA
acattctcagatgatttctttctgcccaaatcatccaggtggagtgtattactgtaagtaatatgcagtgaaaattctggggccaccttacatttgccaaaggttttactattcccccaa

SEQ ID NO: 1164 - DNA, 120 bp, synthetic construct
  source 1..120: mol_type = other DNA
gaaattcacacctggcctacatcacatagattttgaagaatgttttacctttataacaaaagttggtctcccaaatctatactcctaagcgaagtttcctttcggggtgtcaaatcacac

SEQ ID NO: 1165 - DNA, 120 bp, synthetic construct
  source 1..120: mol_type = other DNA
aaggacaaattgggccacagcttcataaatgttgaaagcaagactaaccaatcaatggctgtagcccatctgaataaatgttcctgactttctagaaggaagaatttcagcacctacaga

SEQ ID NO: 1166 - DNA, 120 bp, synthetic construct
  source 1..120: mol_type = other DNA
ttttccattcaccatttttaggctctttcagttgattttctagtaccctcgcttctctccctctttccccacattagaagtagctataagctctattttctctctctctaacataccagg

SEQ ID NO: 1167 - DNA, 120 bp, synthetic construct
  source 1..120: mol_type = other DNA
gccacagcgcccggccacgatctttcaaatgctctaaccattcctggagagtagatctctaattataatatttcgaatgttaacaattcactctagcaagtagagtacagttaacttatt

SEQ ID NO: 1168 - DNA, 120 bp, synthetic construct
  source 1..120: mol_type = other DNA
aatttagtgactgaaacactgtaaattggaatacaattgtgaccagtacctatgacatacaagagaagacagaaggactcactctggtaaagtgaagtgtccagagccacacagcaaatc

SEQ ID NO: 1169 - DNA, 120 bp, synthetic construct
  source 1..120: mol_type = other DNA
acaatatgttagggtcttgtatttgttttcctggcaaagtcttatttcttcagattccaactcagcatcacctcctctgagcatctatcttacccactttactgggtacactcttctctg

SEQ ID NO: 1170 - DNA, 120 bp, synthetic construct
  source 1..120: mol_type = other DNA
cacaacctttgagcattactgtctccaaagagtatttaccaagtgctgtctggcttgatctcccagacttggttaaatatgcattctgttaatgttgtgtttctgactttctttcctttc

SEQ ID NO: 1171 - DNA, 120 bp, synthetic construct
  source 1..120: mol_type = other DNA
ttaaggatatacaataaattttaacatcatagcaaaattgagtggaaagtgtagagaactcccatacaccctctttctccacagaggcacaactgccagctatttgacttcccacaccag

SEQ ID NO: 1172 - DNA, 120 bp, synthetic construct
  source 1..120: mol_type = other DNA
ttacagttttgccttcttacatttagatctgtggtccacattgagctatttttttgtgaaggctgtaaggcatatacctagacttattttttggcatgcggacttccatttgtcccagca

SEQ ID NO: 1173 - DNA, 120 bp, synthetic construct
  source 1..120: mol_type = other DNA
attaattattgattcaatttctttattacatataagcctattcatattgtctatttattcttgtgtacattttggcacattgtgtctttcaagaaattggtagaattttggggtatagag

SEQ ID NO: 1174 - DNA, 120 bp, synthetic construct
  source 1..120: mol_type = other DNA
tccgacttatagctctgacagatgggtgttaaagtctccaaacatattagttgattcatctatttctcaataaagttgtattagcttttgcctcatatatttggacacttggctgttagg

SEQ ID NO: 1175 - DNA, 120 bp, synthetic construct
  source 1..120: mol_type = other DNA
gttacccttgttttctgtttctattttggtcttccacaccttttccaccttttgtggttttagttaaatcttttatatgatttcgtttctctcctttcttatcatattaattatactttt

SEQ ID NO: 1176 - DNA, 120 bp, synthetic construct
  source 1..120: mol_type = other DNA
ttttcccttgcctttgattttgttgtttgaatatggtatatctaggtgtagggttttgggaatttattctgctcgttattccccgagtttcctagatctttggtttggtttggtgtctga

SEQ ID NO: 1177 - DNA, 120 bp, synthetic construct
  source 1..120: mol_type = other DNA
atgatgttctgaactacctcagggtgctgcagtgtccccactaaaaagaatggtctcaccagatgcaatccctgagcaaattgttaactattcaataatttaagaataggaaagcttttt

SEQ ID NO: 1178 - DNA, 120 bp, synthetic construct
  source 1..120: mol_type = other DNA
gaagttgagcatcttattaatgttgttagccatccataattcctcttctgtgaaatgcaccacctcctcttcttttcagtccaggatcaaagctacttttcttttcaaggtcggagatca

SEQ ID NO: 1179 - DNA, 120 bp, synthetic construct
  source 1..120: mol_type = other DNA
aaaggctatatctgtttgtacttccaccagtgatagatgagagtttccttcctctcttgttaccatgctcatgtttgcctgtctgagtgtgtgtgtggtgatattctattgttacattca

SEQ ID NO: 1180 - DNA, 120 bp, synthetic construct
  source 1..120: mol_type = other DNA
gttagtatgatgaatagctaaagtagtaaaaaaggaacatgaagggaacagagaaattaactgcaggaagtagctttgccagtaggctgagggaaacaagaaggtgttgggatgggttat

SEQ ID NO: 1181 - DNA, 120 bp, synthetic construct
  source 1..120: mol_type = other DNA
aggaagaaagcttatatcactgctcttgtcctcatttctgaaactaatcacgagagcatggttaacgtttctaacttttgtcttttcatgtctattccatgtcccccttgtcctcagcta

SEQ ID NO: 1182 - DNA, 120 bp, synthetic construct
  source 1..120: mol_type = other DNA
atgttccttggtcaagctttcaggctctacaaagatcaaaagcattccagtaactgtttctcaaaaaaagaagcaaatatgttgaagacatagatttgctcccaaacccccctagaggtc

SEQ ID NO: 1183 - DNA, 120 bp, synthetic construct
  source 1..120: mol_type = other DNA
atgtgggtagtgatgagaacagctgggatgtagactggaggaaatggcaaggacattcaacatagatataaatggaattgcttagcagaaaaacttggaatttcttatgctggagcataa

SEQ ID NO: 1184 - DNA, 120 bp, synthetic construct
  source 1..120: mol_type = other DNA
tgggtgtcccatctggatcaccatatcagactgaagagcaagaagaggatgagaaagtatgcttgtgctcttgttcctggaaatgttccatttaaattccaatatttctttcctttcttg

SEQ ID NO: 1185 - DNA, 120 bp, synthetic construct
  source 1..120: mol_type = other DNA
ctggggtgctgaaacttatttaatgccaaaccaaatactaaacttggaattatacgggttatagttttcaggtcatttaggagatgtttgctacttcaaattgctaatcttctcaaataa

SEQ ID NO: 1186 - DNA, 120 bp, synthetic construct
  source 1..120: mol_type = other DNA
tacatatcactggagtctctaatcagtcacaagcactcagtgagtagtacagcataatgatttaaagcactgaccttggaccagattggctagcttcaaattctgcttttgccatttaca

SEQ ID NO: 1187 - DNA, 120 bp, synthetic construct
  source 1..120: mol_type = other DNA
agtcttcacagtttcaacttagcggtaacaaatccttactgagtgcctaaaatgagtgaggcactactaggaaaagtatgctgaaagaaatttaaaaagtagcttcaattaacagtcata

SEQ ID NO: 1188 - DNA, 120 bp, synthetic construct
  source 1..120: mol_type = other DNA
tttatgaaaacattcacccaaattggtcttctattagatcacataaaagacctcattacattccaaagaatagacaatgcaaataatattccctgaacacagttcaactaattagaaagg

SEQ ID NO: 1189 - DNA, 120 bp, synthetic construct
  source 1..120: mol_type = other DNA
aaaagtcagcataatactgctcatattattttgtagcactcaaatgattaatttataatccatctagcctttagctgtagcttcttgtttacaatatgttaatagaggtaggaggaagag

SEQ ID NO: 1190 - DNA, 120 bp, synthetic construct
  source 1..120: mol_type = other DNA
cttttgtaccctgaaattttcatgtcatacacaagaaatcattaacaaatccaatctcataaagttttccactatgcttccttttaagaattttatgtttttaactctcccatttaggtc

SEQ ID NO: 1191 - DNA, 120 bp, synthetic construct
  source 1..120: mol_type = other DNA
tataggaattgagatgatcagtaaatttttgtctgtcattccattcatgtggtggattgcattgtttgatttttatatattgaaatattgttccattccagggataaattctaattggtc

SEQ ID NO: 1192 - DNA, 120 bp, synthetic construct
  source 1..120: mol_type = other DNA
ccttttgtaattcttttaacctccaatttgtaatctttgttcaatttatgagtccttaattgtccagtttcatgttgtgtatcatggctgggccaatgactctttccctgcatggcccca

SEQ ID NO: 1193 - DNA, 120 bp, synthetic construct
  source 1..120: mol_type = other DNA
ctggaggaggaaaacatattccactgatgatggaccactccaagagaaaaagaaatagacaagattcagggctattcatgaacaagaacttcaacaccaattatctcccccaatatagga

SEQ ID NO: 1194 - DNA, 120 bp, synthetic construct
  source 1..120: mol_type = other DNA
tatgaaggtagacacagcatcagaatactgtgtggtattcagaacttagtaccagccacttctctccatctccatcaataccttattctaaaacatcttcatgacagtggccgtatagta

SEQ ID NO: 1195 - DNA, 120 bp, synthetic construct
  source 1..120: mol_type = other DNA
gttgtggtaaatacatgcaggagaaaaaaacacaaagatgtatggaaatcatatgggggagaattaaatgtttgggtaattgctggggaatgaaactatggcgtcattccgcttcctgga

SEQ ID NO: 1196 - DNA, 120 bp, synthetic construct
  source 1..120: mol_type = other DNA
tgtttgcttgtatcactaactggctgtaagtttcatgagggtaggggctctgttgcttgtgtttactgttgtatccctaacttctaagataggatatttgataaataaatggtgggcatt

SEQ ID NO: 1197 - DNA, 120 bp, synthetic construct
  source 1..120: mol_type = other DNA
gggtgacagggcagagttggagattttgccttatggtagggatgatagttaaagtcatgagtttagataagatttctgtgggacaaactctagatgcagcgagaaagaagacagaaaaat

SEQ ID NO: 1198 - DNA, 120 bp, synthetic construct
  source 1..120: mol_type = other DNA
ggcatagggaagaccattcctagtgaagcatttttctatctgtgtgtattgcctggggtgggaggatggtgaaaatggccctaaaaatacataatatggatagaaaagagagacaatgaa

SEQ ID NO: 1199 - DNA, 120 bp, synthetic construct
  source 1..120: mol_type = other DNA
ttaagtttcaatttgcatggtaatggtgacattagaaaaagtagcccaaggcacatagaatttgaaaatacacaggtctctctttagggctcttatgattaatgttggctcatgctacta

SEQ ID NO: 1200 - DNA, 120 bp, synthetic construct
  source 1..120: mol_type = other DNA
atgcacaacctgaacctagtcatgaagaaacaacagacaaagccatatttaacgacagcctaacaaagaattagcctgtactcttctgaagtgtgaaggttatgagagacaaaggctaac

SEQ ID NO: 1201 - DNA, 120 bp, synthetic construct
  source 1..120: mol_type = other DNA
actaggtggacagcaggctattggaggattttcaggatttaagctttcccccctcctttacattttcatgtactgataatgattctctttaactgagaaaaagtttacccctgcttactt

SEQ ID NO: 1202 - DNA, 120 bp, synthetic construct
  source 1..120: mol_type = other DNA
catgcccagtttctctagttattccacagcaacagctgaatgagaaacatataatatgtaacatggaactgtattatgatgttataaactggaaaggaagcccaatgtgtgcagaatttt

SEQ ID NO: 1203 - DNA, 120 bp, synthetic construct
  source 1..120: mol_type = other DNA
ggcaggcctaatacagggccccaaagatgagagctagttaaaaagagggctgaagagagactaactaaagttaggtcagagagagtctagtcaattatatgtaattcaatgttttagttt

SEQ ID NO: 1204 - DNA, 120 bp, synthetic construct
  source 1..120: mol_type = other DNA
accacactgttttgactagtgtaggtttgtgtactttttgaaaagaggaagtgtgagacttcgaactttgtgcttctgtttcaagtgttttagctcttcagggtcccttgtgatttcaca

SEQ ID NO: 1205 - DNA, 120 bp, synthetic construct
  source 1..120: mol_type = other DNA
tttcccaaagacaatcggctaggaccatgctatctttcctcttctatatactttggcattagtaatcccctatttccttttgataccaccatgtctatcatacaagcatgacaagacagg

SEQ ID NO: 1206 - DNA, 120 bp, synthetic construct
  source 1..120: mol_type = other DNA
gtcataatcaatgccacgagtagcttttgtgtgcatgcattttaattcccttggctaatgatctcttcaagataaattccaagatgttggatatttgggtccaagggtagaagcatgatg

SEQ ID NO: 1207 - DNA, 120 bp, synthetic construct
  source 1..120: mol_type = other DNA
gtgtgttgtgatagaggagtggacttggacatatgtgcatgtgatcaggatggaggggcaatgttaataagtaatgcaagtcttctgtatacagaaatttgatacattcagatacagaca

SEQ ID NO: 1208 - DNA, 120 bp, synthetic construct
  source 1..120: mol_type = other DNA
cttaaaaatgtggacaaaattctagacccgtactgactaagaggaaggagagagaatcaaagcagatagtacaagatgaaagtgacccaatagcaaaagatgacactggaaaggcaggta

SEQ ID NO: 1209 - DNA, 120 bp, synthetic construct
  source 1..120: mol_type = other DNA
acaatgagaaacatgtagatggctgaatccacaagaccaagtcactagctgtgggctacaagggagactgaagactcaggaatcactgagattctgatttaagaatattttttttccatg

SEQ ID NO: 1210 - DNA, 120 bp, synthetic construct
  source 1..120: mol_type = other DNA
acttttgaagtctagctatttagaaacccatgatatttttttgaacctgacaccaagtaacacagtaggtcatggcctgaaagttaccatggagggaacatattaggttgagcactcccc

SEQ ID NO: 1211 - DNA, 120 bp, synthetic construct
  source 1..120: mol_type = other DNA
gtgggtttgctgagactgttggatgattatcctgtcaagtagttttcccctaaaaaagtcctcaactggaaatgccccatagtcacattgaaaagcttttgaaaaatgcatccatctcta

SEQ ID NO: 1212 - DNA, 120 bp, synthetic construct
  source 1..120: mol_type = other DNA
acacatacctcccacctactcactactcagctttggaaatgcaactgattattgtcaatgtagaaactggcagttttttgtgtatgctcaagagaaattgaattttctcctgggcaagca

SEQ ID NO: 1213 - DNA, 120 bp, synthetic construct
  source 1..120: mol_type = other DNA
ctgtgtaaggtctttaagataaatatgcctttgatcctaggttctttttctaggagaacaaattggaatagtttttaccaccctgtcactttcatctgaactggaagacaaattcattgc

SEQ ID NO: 1214 - DNA, 120 bp, synthetic construct
  source 1..120: mol_type = other DNA
gaattgagaaagtcaccctaataaacagcctgggaagtccaaggacagagggagtaggcaaacaaccaattagatatccgttaaatggctggtaattcacaaagtactgttttgttttgt

SEQ ID NO: 1215 - DNA, 120 bp, synthetic construct
  source 1..120: mol_type = other DNA
tccttaccttacattaatggagatgaggaagaaatatggagatgtctttctcctcaaacttggcatggtgcctgtcttggtggtaaatggaatggaaatggtgaaacaagtactacataa

SEQ ID NO: 1216 - DNA, 120 bp, synthetic construct
  source 1..120: mol_type = other DNA
tttaaaatccagctatggttgtctggtgtatttctaacttgctgcttctaaaagttgtttaatatttcacgacgtgacccccttgccccatacatttcacccatctcatatggataccct

SEQ ID NO: 1217 - DNA, 120 bp, synthetic construct
  source 1..120: mol_type = other DNA
tataaacttttattcccattctctcaaataccccagccctctctctttctccatggtgcctgaagtgaacacaaaatccttccaatagatttaaaaaccttttattggcaaggtgcggtg

SEQ ID NO: 1218 - DNA, 120 bp, synthetic construct
  source 1..120: mol_type = other DNA
actgtttctagctttttttcatgaatctctgtactcttacaatccaaccatgattgtcaggcatatttccaattggctgcttctaaagttcacgtaatattagacgtctggcacccccca

SEQ ID NO: 1219 - DNA, 120 bp, synthetic construct
  source 1..120: mol_type = other DNA
tctaggatctatgcatttgtgatcatgaattctctctgcaaacagaggcatttgttttgatttgtattatttttcctcatgcaaatgcacgagcccccacatatgtgtgtgtgtatttat

SEQ ID NO: 1220 - DNA, 120 bp, synthetic construct
  source 1..120: mol_type = other DNA
atattagaaattttctgagttaagaaccgaagaagccactggctcactatgagagattgccatgttcaacagatgtgaaaacaggcttacgaagtgaagtttggaaaggagctaactctg

SEQ ID NO: 1221 - DNA, 120 bp, synthetic construct
  source 1..120: mol_type = other DNA
attgaatctggtcaacccttcattatgtgctcatataatgttcaaatttaagtattggctcttccttttatgagttcattcaccttgagcaaaacccataatgtctttgaggttcagtaa

SEQ ID NO: 1222 - DNA, 120 bp, synthetic construct
  source 1..120: mol_type = other DNA
taatttctttaaagatggaaacattgggctgagaccacccagatttgaagacaggaaaattttaccatacacagaagctttcgtaagtgaagtattcagacatgcctcttttcttccatt

SEQ ID NO: 1223 - DNA, 120 bp, synthetic construct
  source 1..120: mol_type = other DNA
aaaaaaaaccacctggaattctcagtgttcgttcttccccctccctttaaatagtgaaggagtgggaatatctctcttcccaggaaactgatgtaatcatttagtaattggtgtgacagc

SEQ ID NO: 1224 - DNA, 120 bp, synthetic construct
  source 1..120: mol_type = other DNA
tttacataccaggtttctgtaaaatagaagcatataacttctatgagtagaatctgagcagctgaatccacagaggcagtgtggacagggatgtgttgagaaagtcaagtggctatgcat

SEQ ID NO: 1225 - DNA, 120 bp, synthetic construct
  source 1..120: mol_type = other DNA
tcgcagaatagataatttgcccaatatcccactgagggcagcatccaaagttcagatttccttgttccaattccattgttccttctacccagtactaaaaggtgtgacattttgtctttc

SEQ ID NO: 1226 - DNA, 120 bp, synthetic construct
  source 1..120: mol_type = other DNA
aaagttagaagttcacccacatcagctatgaaagaaagggctgagatgagagtacctaatgcagtgaaagtgaggataatgacagtggtggtggtgagaatgatgattacagctaatatt

SEQ ID NO: 1227 - DNA, 120 bp, synthetic construct
  source 1..120: mol_type = other DNA
ttaattaatctaaagcataggtcacaaactcaagcacctattgagcaatgaaaaatacgaaaaataagtgaattgcacttggtgaagcactgtgaggaggggaggtcatctgccgcacct

SEQ ID NO: 1228 - DNA, 120 bp, synthetic construct
  source 1..120: mol_type = other DNA
ttggccatgaagccaaaaccatctcaactccaagcagaacttcacatctcaggtagttcatatgcttagattctcagactgagtggagggtttcttatttagttcagaaaaattgatgaa

SEQ ID NO: 1229 - DNA, 120 bp, synthetic construct
  source 1..120: mol_type = other DNA
aaaagtgagtgacagattgaccaggcaggcaaggggactctgtctaccttccctttatgctagcttcaaataaacaagcatactcatctttgctttaaatatggggttcagaataagaaa

SEQ ID NO: 1230 - DNA, 120 bp, synthetic construct
  source 1..120: mol_type = other DNA
caacccatcaatttcagagtcgggggggtgggggacaaaattgagcccataatagcaagttacgagaataaaactggctgctgatttttaaaaatgcttttaaatgtaagattcagcact

SEQ ID NO: 1231 - DNA, 120 bp, synthetic construct
  source 1..120: mol_type = other DNA
ttcaacattctccttgtgaacagacaattgaattgcttgtgcttctctaagagcttttgaaattatttatattaccctcatggcgttgtgtcaaaatgaaactattcttatatttttacc

SEQ ID NO: 1232 - DNA, 120 bp, synthetic construct
  source 1..120: mol_type = other DNA
tattaattaggctgtgaaatctgtcctggtttgcagatggttccaggactctggaagtgtagatacacaatttgatatttcagattcacatgggacctcctcacaaaattcaagtcatgc

SEQ ID NO: 1233 - DNA, 120 bp, synthetic construct
  source 1..120: mol_type = other DNA
gattgaactggctacaaggaggccgaacattcaatccattcacattggtttgaatgttcagtgaatgatggaattaattaatgattaagtgagtggatctagtgagagaacaggaagagc

SEQ ID NO: 1234 - DNA, 120 bp, synthetic construct
  source 1..120: mol_type = other DNA
tcttctggcccttgtcctgggcagaactctgaatcttcacttcctaacctaggattatctaggactcatagagggaaagtctgatcctataatctcaacagacattcatattattagttt

SEQ ID NO: 1235 - DNA, 120 bp, synthetic construct
  source 1..120: mol_type = other DNA
gcccggcctagtataaactttttgcagaaaaagaggctcagaaagatgaatatgcccaagatactcttcaggtaaggcttactgcagcgttaaaatctacatcaaactcaactcaaaact

SEQ ID NO: 1236 - DNA, 120 bp, synthetic construct
  source 1..120: mol_type = other DNA
gagtcaccgtgcccggcctacataaatttttttaacacacgaaaaatcatgctgtattttgtatggacatattcaagtgtttatactatgggaataaatgcttacatgaggatgagaaac

SEQ ID NO: 1237 - DNA, 120 bp, synthetic construct
  source 1..120: mol_type = other DNA
agctggtagagctggtctagagggagagtgaatcctcagactctcagactagacaaccgaactgtgagttgaaactgcaggatatagaagttttgcattaattaaatgaaaacaaaagct

SEQ ID NO: 1238 - DNA, 120 bp, synthetic construct
  source 1..120: mol_type = other DNA
gaaatgagccacttcagttcctgctggtgaaggggttcaagggaattataccatctcaacatgatggatgctttttctttgataagcatatttgtatagctctaccaatttacctctttg

SEQ ID NO: 1239 - DNA, 120 bp, synthetic construct
  source 1..120: mol_type = other DNA
ctcaacagggaggcggtggtctggagcaagttctcagctctggtaactggctgcctggaaatagactcagtgctgttggggggcacagtgggagtgagactggcctttaggactgtgggc

SEQ ID NO: 1240 - DNA, 120 bp, synthetic construct
  source 1..120: mol_type = other DNA
caaggaagcaccagagaaaggcaaagtcgaacttaaagaaataaaaagcatgatacaggatatgaaaggaaaagtcttcactgaaatagtataaataaaagcaaccataacttctggtca

SEQ ID NO: 1241 - DNA, 120 bp, synthetic construct
  source 1..120: mol_type = other DNA
agaattcaccaattaagtttctgctgtcttcagaagactcacctaacacataaagggctcacataaacttaaggtaaacgggtggaaagagatattccatgcaaatggacagcaaaagtg

SEQ ID NO: 1242 - DNA, 120 bp, synthetic construct
  source 1..120: mol_type = other DNA
tggttctttgaaaagataaataaaattgatttaccattagcaagattaaccaagaaaagaagagagatgatccaaataagctcaattagaaaggaaatgggagatattacaactaatacc

SEQ ID NO: 1243 - DNA, 120 bp, synthetic construct
  source 1..120: mol_type = other DNA
ctgtttgctgattatatgatcatatacctataaagccctaaagactcatctgaaaagctcctagaactggtaaatgaatttagcaaagtttcaggatacaaaattagtgtacacaaatca

SEQ ID NO: 1244 - DNA, 120 bp, synthetic construct
  source 1..120: mol_type = other DNA
ccacagagtgagagaaaatcttcacaatctatacacctgacaaaggactaatatccagaatctacaaagaactcaaaccaatcagcaagaaaaaacaaacaatcccatcaaaaagtgggc

SEQ ID NO: 1245 - DNA, 120 bp, synthetic construct
  source 1..120: mol_type = other DNA
caggtataatattagcctttggctttgagataagaaccaaagatgttgtttttcctaggctattggacaacatatatatgaagtccattatcctataaatagaaagttgctgtttgcatt

SEQ ID NO: 1246 - DNA, 120 bp, synthetic construct
  source 1..120: mol_type = other DNA
ttctgttatgaatagtgctgcttgggcattcttgtgcacattttttggtgaacattctttggtacacatttctgttgaccatataaacctaagactggaaccgctgagtcacgaacattc

SEQ ID NO: 1247 - DNA, 120 bp, synthetic construct
  source 1..120: mol_type = other DNA
ttgccatgattggactgaaaaacaggatgtttttttctatcgactcacatttctaaaattccttcttggtcaaaagtgcaagtctgttgaccctttcaacttttgtttgaaagggacatt

SEQ ID NO: 1248 - DNA, 120 bp, synthetic construct
  source 1..120: mol_type = other DNA
cttttcaagagctactggaaagagacggagacatctttattcctggaagagagattttggcaaacatcctgtcatgaggaatctgagaatcacacaacatgaaggaaagtagaatctaag

SEQ ID NO: 1249 - DNA, 120 bp, synthetic construct
  source 1..120: mol_type = other DNA
tgtgattatatgtagggaacttcttttcttcctgttgaaaaatgattgggactcaaataacagtagtactgaccatgtatcactcagtgtgccataacataaattctgcatcattggtca

SEQ ID NO: 1250 - DNA, 120 bp, synthetic construct
  source 1..120: mol_type = other DNA
ctggcatggatcaggatttagaaaagagaatgaacctggagggacaatttgaagatattcagaatgactctgcagatttttcttgagtagctagaactatatgaagatcaggtgtgtgtg

SEQ ID NO: 1251 - DNA, 120 bp, synthetic construct
  source 1..120: mol_type = other DNA
taacgttggtgtggtgatgtaggcaaaagactggctcagaggtacttgacagaaaatggaaaatggggtcaaaatggttgatttgatattcagaaaaaccttttttggtaaagcacattg

SEQ ID NO: 1252 - DNA, 120 bp, synthetic construct
  source 1..120: mol_type = other DNA
ccatgaggctctctcttgattcacatcataaaaacccaaacattattcttttgttgccatgcacacttgcaggtacaaggatgttaaaatctacacacccctccctaattcttatattgc

SEQ ID NO: 1253 - DNA, 120 bp, synthetic construct
  source 1..120: mol_type = other DNA
taaagcattttcaaaatacagcttttttggtggtacttcaaaataggttggcacaaaacaaaacgtgacatttggtctctggtttgtgaaggagccattgcctctctctcctccacggtc

SEQ ID NO: 1254 - DNA, 120 bp, synthetic construct
  source 1..120: mol_type = other DNA
attatttgtattattccagtctagttccactaaaatcgttccaactggaaaaaataaaaataaaagcctatgtgtttgacttcaagagtgatggtggggggctggggggaggaggagagg

SEQ ID NO: 1255 - DNA, 120 bp, synthetic construct
  source 1..120: mol_type = other DNA
acagagttctctgaaagaaccttcaataacgtgatataggaagtctatagataaaaatgccagttcactcacgtgagctgaaaggaataagaggatggagtagtgaggctggaaaatgac

SEQ ID NO: 1256 - DNA, 120 bp, synthetic construct
  source 1..120: mol_type = other DNA
catgttgttatttctccagccaggctctaaactatttgagagcagatgtgttccatacgtctgtgaagcttcaattttggctactaaaacattaggtccccagtagggacttgataaatt

SEQ ID NO: 1257 - DNA, 120 bp, synthetic construct
  source 1..120: mol_type = other DNA
tgtaaaggtatctaacacagacatcctgatgtttatgttaaccacggctgctgtcactccattcctgagttaaagccactttggggacagaatattccaattatatttcccatccacgtt

SEQ ID NO: 1258 - DNA, 120 bp, synthetic construct
  source 1..120: mol_type = other DNA
tctctgaattactagattaggatgtccagccagctgatttcatagtctcttacagttctctgagcttcagtttcatctatcagatgcccactcatcaacttcactggcctattttaatag

SEQ ID NO: 1259 - DNA, 120 bp, synthetic construct
  source 1..120: mol_type = other DNA
tggtgtctagtgtgaggtaaggacctaaattgatttgcttttcaaataactactcttccaacactatgcataagataatttcctccttacccattgactcacgattaaaaacaggtctgt

SEQ ID NO: 1260 - DNA, 120 bp, synthetic construct
  source 1..120: mol_type = other DNA
tcatctgtgtgaaatttcaaagactcttgtgagaaggattgggcaaagatattttccctatttttcaggtgagaaggttgaagcacaggttattatacaactaatccgagacagactgga

SEQ ID NO: 1261 - DNA, 120 bp, synthetic construct
  source 1..120: mol_type = other DNA
ccatccagtggattccaagatctcatacaccaagatctcatacagttctctgatctttagtttcatctatcagatgcccactcattagcttcactggcctattttaataggcaactcaaa

SEQ ID NO: 1262 - DNA, 120 bp, synthetic construct
  source 1..120: mol_type = other DNA
aaaaggaacagagttatctatgtatctagatgttaatcttttgtcttattcttgtcagctctccctttctttatgaagacttagagacagaaagaccccacctccctctctctgctctcc

SEQ ID NO: 1263 - DNA, 120 bp, synthetic construct
  source 1..120: mol_type = other DNA
tctgactatttgtggccgcaccatcttatgacatgatctcagctccaggctttcaaaatgtggaggtttttcattcttgcattgtcttcttatgtttcctgtggtgctgttaagcaattt

SEQ ID NO: 1264 - DNA, 120 bp, synthetic construct
  source 1..120: mol_type = other DNA
aagaaactatgaatacacggagttctcctatacctcacacttgatccctgctactgttagcatcacactagtgcgatacacgtgttacaattaatgaaccacagttaaggcattattgac

SEQ ID NO: 1265 - DNA, 120 bp, synthetic construct
  source 1..120: mol_type = other DNA
tcttggctgtctgttcatattttaagactgggatattaagaagccagtagaaagttctgtgtaacacattggctggtgggtagcttgcttgcttgtttcactagctgtaattttctgtga

SEQ ID NO: 1266 - DNA, 120 bp, synthetic construct
  source 1..120: mol_type = other DNA
agataagggacagccagcaagcttcaggggtgaggggctcagccacaggatttacttattccttaaacagacctttcatgaattttcctgtttgctatacctccccttcttttcttcctc

SEQ ID NO: 1267 - DNA, 120 bp, synthetic construct
  source 1..120: mol_type = other DNA
atatagtctacccattaaaggtctgaaattaaccatgagtccttggcggttcaggaggagagcaggggcacacagatcatttagttaagaactttggtgtcatttaatagaagacaaaac

SEQ ID NO: 1268 - DNA, 120 bp, synthetic construct
  source 1..120: mol_type = other DNA
gaaatggatatatatgcattgcaatatagaaaacacagtaatgcaggtatgtgcaaggctcagtgacacaaatgaagaattgattcattctacttgaggcaggggtagggaaagcttcac

SEQ ID NO: 1269 - DNA, 120 bp, synthetic construct
  source 1..120: mol_type = other DNA
aagttcaataaagctcactttgaaggtctttccacatcaagtatccaagttatcccatgtctcagagcatggccagattacagttggaaccgatggacaacctaattaagaacttggtgt

SEQ ID NO: 1270 - DNA, 120 bp, synthetic construct
  source 1..120: mol_type = other DNA
tactgtcctcattttattttttaaaaagtaagctaaaagtagataacatagggccataaggaatgctatctggccttaggcagatttggtacaaaccacgggctggtttctgccagttgt

SEQ ID NO: 1271 - DNA, 120 bp, synthetic construct
  source 1..120: mol_type = other DNA
gtacaagaataacgggttcaggtaggagattcatgttgttaatgctgctgacctgatccagaaggtttaagttgaattttgaggtggtgtataaaatgcccccataaaaccataaaagca

SEQ ID NO: 1272 - DNA, 120 bp, synthetic construct
  source 1..120: mol_type = other DNA
gctgaaaaactaccttaaaaaaaagaacagaactgatagactcttagaaggagcagatggtaaagctaggcccagctcctttttggcttccattatttctatgaagcagtatgacctgca

SEQ ID NO: 1273 - DNA, 120 bp, synthetic construct
  source 1..120: mol_type = other DNA
aaagagcctgatgatctgttttacttttctgatttcaagctgtcagctgagaaagtcatcagctttcacaaggaaagacatacatgatatatgatgttcacagcatgatgtcccagtcta

SEQ ID NO: 1274 - DNA, 120 bp, synthetic construct
  source 1..120: mol_type = other DNA
agactccgggaagctaggttggagcaggtgttctttcccttttaatttattgtgcacattctctcaccccaatcttcataagcatttgaatacccccaatttataaacaagtttgtgagg

SEQ ID NO: 1275 - DNA, 120 bp, synthetic construct
  source 1..120: mol_type = other DNA
aatcaatcccctttagggccgccccaagaaaggtgtttgtttaagctggtgactcttgagcacctgggcaaactccctgcaggaaattcatgcttgtagctctcctattttgctcttctt

SEQ ID NO: 1276 - DNA, 120 bp, synthetic construct
  source 1..120: mol_type = other DNA
aatatctttttgctcttcaggagcatgctctctgtccctaccagaggaggccctggccctagctgtgctagggccttgaggaagattttcttcctaccagtctctttgtgtcttagcatc

SEQ ID NO: 1277 - DNA, 120 bp, synthetic construct
  source 1..120: mol_type = other DNA
ttgtgtatatgtctgtgtgttgtgtacatgtgtggtgttttgtgtgtgttgcatgttgcatagatgtgttttatgtctgtagtgtgtgatgtacgtgtgtggtgtgttttttgtgtggtg

SEQ ID NO: 1278 - DNA, 120 bp, synthetic construct
  source 1..120: mol_type = other DNA
gagagagagagaatgatctgcctttccttgctggactatgttctttgtaataatattggaatcatctttcatcatcaaaggagagagatgcctttgtctttgagagagggagagagaaag

SEQ ID NO: 1279 - DNA, 120 bp, synthetic construct
  source 1..120: mol_type = other DNA
acacaaattcctcttctcaaggggtaagacagtattcttcttagatactgagatgcgtcacccagtggctaaggtgaaggtattttacatggatcctgactgaaggtggagatcagaata

SEQ ID NO: 1280 - DNA, 120 bp, synthetic construct
  source 1..120: mol_type = other DNA
cttgagtagttacatggctgtcatgaaagttctcctctgtgtttgtctctagtttggttttccagagtcagcaggccatgagaatggatccaggctatagaatgtggatatggtttggat

SEQ ID NO: 1281 - DNA, 120 bp, synthetic construct
  source 1..120: mol_type = other DNA
cacacatgtacacacagccccccaagtgttgaaagactgggtgattagacaccaacataataatggttagttaccaccaagtagtgagatttgagtgatatgggtcttcttcaatataat

SEQ ID NO: 1282 - DNA, 120 bp, synthetic construct
  source 1..120: mol_type = other DNA
atattagaagcacaattactgggattggtgaagggtcttggagggagattatatcttgtactgtcaaagtctagcatgctccatttcttaagaaaaagtgagggaagaagaaccagtgga

SEQ ID NO: 1283 - DNA, 120 bp, synthetic construct
  source 1..120: mol_type = other DNA
acatctgaatgaattttgaggagagccctggttctcctctcattgtataaactccataaactatgggagttaatgtaagccaacatacatggccctgaatgtcaaggcttgtcctcctag

SEQ ID NO: 1284 - DNA, 120 bp, synthetic construct
  source 1..120: mol_type = other DNA
actccccaccctctagggttgtcaatgaaatgaattcaccaacataaaatggttttgaaaaatcctaaagagctctaccaatgtgagtgaccattatcactcctacatgtgaggatgttc

SEQ ID NO: 1285 - DNA, 120 bp, synthetic construct
  source 1..120: mol_type = other DNA
atgtctctgccagcagtaagagctggttgggaccacactgagttctctgtgacctgcaggtcagctcaccttggctcacaggctgaacagaaatatactcagaaaccgattttcctatct

SEQ ID NO: 1286 - DNA, 120 bp, synthetic construct
  source 1..120: mol_type = other DNA
tagtggaacacatgcagaagagggacactggtggggcgggggaagagacacaaaactgcatcttgtatgaactgctgcaaacaaatgggttatttagtctgaagaagagttaaaggagga

SEQ ID NO: 1287 - DNA, 120 bp, synthetic construct
  source 1..120: mol_type = other DNA
tgtttgcttttgagtcagtggtggagagaagcccacgcacatgatctttaggttggctggtgcaggtattgggctattactgttacatttcctaggattctgcctctgcattcatattaa

SEQ ID NO: 1288 - DNA, 120 bp, synthetic construct
  source 1..120: mol_type = other DNA
acccagcttggaaaagaagagcatgtggttaacacaagcatcttacacacagcgtcaatgcaaaacacagacacgaacaccacagagcatgcatgcattcgtcctaatctgtggggagcg

SEQ ID NO: 1289 - DNA, 120 bp, synthetic construct
  source 1..120: mol_type = other DNA
ggaccttcgtttcattaactgcctcccgtcctaacgagaaaagggactcaccagtctttgagcagccacatgtcaaaaccttgcactaaagttccttgcaggaatcctggactaggctga

SEQ ID NO: 1290 - DNA, 120 bp, synthetic construct
  source 1..120: mol_type = other DNA
gttgaatgtagccacaggttgaccacaagaaatctcttctgctaacctttgagattccaggatatcccctatgcctactgttccataggacatttgaatagacatctacagttgtccctc

SEQ ID NO: 1291 - DNA, 120 bp, synthetic construct
  source 1..120: mol_type = other DNA
aacaaaaaacaaaaattgtctctatcactaaacagctcggccctgttgagaaaaaaaaagtcatcatgccttggtgagcccattggctctcctgtaaaacaggaatggtatctgcctgga

SEQ ID NO: 1292 - DNA, 120 bp, synthetic construct
  source 1..120: mol_type = other DNA
actccatccttcatctgaccaggggagacattcagacattgagaaaccgagctgtgcttccccctggagcccctaagctctggtaaattcaacctgactgagggtttgctgttttggggt

SEQ ID NO: 1293 - DNA, 120 bp, synthetic construct
  source 1..120: mol_type = other DNA
gcaaaggctgtgcatggtgaaattgggctgatgtatcagtaagagaagagttctaccctttcctggacagacagactctatatctctctggatctcagtctgctcatctttattttttaa

SEQ ID NO: 1294 - DNA, 120 bp, synthetic construct
  source 1..120: mol_type = other DNA
agaaaatgctaggagaaactgggagagagagagcaaggttttattgctgtgaggactgcttgtaggaggcggcttttagttgagccttgaaggatagggagtttttttttgtttgttttt

SEQ ID NO: 1295 - DNA, 120 bp, synthetic construct
  source 1..120: mol_type = other DNA
cacagctcagacgaattcttcaaacatcagcctgaccttggaggaaagtgacttttctttcacttaatagaaaaaaagccagtaaaacatcacatttccatcgatgctgcttcgtaacca

SEQ ID NO: 1296 - DNA, 120 bp, synthetic construct
  source 1..120: mol_type = other DNA
gagtacctactttgtgccatccctgttacaggaacttgggatatattggtgaacaagagaaagatcttttctgacccatgctcatcccccgcacccctgcttctgatgtctcctttagat

SEQ ID NO: 1297 - DNA, 120 bp, synthetic construct
  source 1..120: mol_type = other DNA
aatgccatagcccttgaattcattgtcttgacccttcccttgtgtccatagattcttctatggtagattcttcacattgcagccagagtgagctttttaacacacataccacattatgtc

SEQ ID NO: 1298 - DNA, 120 bp, synthetic construct
  source 1..120: mol_type = other DNA
acccggcccctgcagtttaattcttagagtccacttcattatcttgagaattgtgtctagacaccattttttctgcctagtgagaactggagatggaggtagtgcctgacaaccgccatt

SEQ ID NO: 1299 - DNA, 120 bp, synthetic construct
  source 1..120: mol_type = other DNA
aagtcccaattatagttgctaaataaaagttggagttgagacattttttatgcaaaaggttgcacttgctaagcttactcctgtcgtttcaccttaaccccgaaggagcagaagggaaaa

SEQ ID NO: 1300 - DNA, 120 bp, synthetic construct
  source 1..120: mol_type = other DNA
ctatatgaatgtggcatattggggtgatggctttctgaatacctaggatttcctcattatggttttctctccttgtcccagatcaatggactcatgtgaccttagacaagtaacttccct

SEQ ID NO: 1301 - DNA, 120 bp, synthetic construct
  source 1..120: mol_type = other DNA
tgtattcagatccaaggtcttttacaaaaaaccaggaagagatgcaaggcagttttgcccatgtgcacatagtagctcctttatctacagttccaggaaatgtcccttcttccaagtgtg

SEQ ID NO: 1302 - DNA, 120 bp, synthetic construct
  source 1..120: mol_type = other DNA
aacactccctcctgatccatgagaaatggacaaggtgataacaataattaaaaggctgagaaaaaggaaggcttattggtgaaaggtaagaggaagcagcattatttagctcagtgaacc

SEQ ID NO: 1303 - DNA, 120 bp, synthetic construct
  source 1..120: mol_type = other DNA
taataatacctaccttggaaggctgttatgataattaaatgagatgatgcttataagggacctacttcagagcccagagggtagccagtgagtgacaaatggcagctgctgtcatcatgt

SEQ ID NO: 1304 - DNA, 120 bp, synthetic construct
  source 1..120: mol_type = other DNA
tagaaactgttacctgatgtaattgagttgtgaatcttttttaaataaagaattagcagcaaatcaaagaggctgcctgccggatcctgaaatgagagcacagctggtgtgtagcacatc

SEQ ID NO: 1305 - DNA, 120 bp, synthetic construct
  source 1..120: mol_type = other DNA
atatctctcctactattgtctagaacctgactggcattgtggactgttattaaacttttctgtcctgtggtctttccagagactgtgaggctccagagtctcaggcctttctaccagtct

SEQ ID NO: 1306 - DNA, 120 bp, synthetic construct
  source 1..120: mol_type = other DNA
gtccattatgtctgaagagcaggtgagctgtgggacgactgccttcgggagctatgggccatgcttgacaaatggtgttatatacgatctgtgtgtgtatggtagtgggtggggaggaga

SEQ ID NO: 1307 - DNA, 120 bp, synthetic construct
  source 1..120: mol_type = other DNA
ggatcttcatcacctttgcacacttggtgtcaggcacagcatcctaattggtgcttactatgggtcactgagatctgcagagcagggggagaatgaagcccaggaacctggacacacaga

SEQ ID NO: 1308 - DNA, 120 bp, synthetic construct
  source 1..120: mol_type = other DNA
taagttatgtgaccaatagactcaggtcatctaagacctgagtctcttccaaggccaaggaggaggtgagggtcaggaatatctgttagagcctttatttggttaaaatataagtattca

SEQ ID NO: 1309 - DNA, 120 bp, synthetic construct
  source 1..120: mol_type = other DNA
gttcatctggcagtccaaatttttcagaatacagggctcatctgaggaagtcagagaaaagtctttggagacaggaaaagtcagaaactaccgcgtatggggtcggcgtgttcttggaaa

SEQ ID NO: 1310 - DNA, 120 bp, synthetic construct
  source 1..120: mol_type = other DNA
atttactgggggtgtgtgggcactgtagcagctaatctgattgtagccaaatctcgttatagcatttctgcccggagtgccatttaaaaagcacttagggctgtccccgtaacacattta

SEQ ID NO: 1311 - DNA, 120 bp, synthetic construct
  source 1..120: mol_type = other DNA
ccataattatccttattagcaataattctgaagctagctcatgcatgcatatcacctccacgaacagcctgtgagtttcttgaggacaaaggacacatcttcttttgttgccatatttca

SEQ ID NO: 1312 - DNA, 120 bp, synthetic construct
  source 1..120: mol_type = other DNA
attaaaaccagcttgcatttggaaatgcaacgaagacagctttcaggctctccaagcaacagagtataaaaaatggaaaaacaggtcaactttgtctttggtgcatgctcctccttttcc

SEQ ID NO: 1313 - DNA, 120 bp, synthetic construct
  source 1..120: mol_type = other DNA
gggcatgaattaccatgcccatcctctatttttattataaagagggcaaacctgctaattcagactctttatagaatgcatttttggcagagctagtttgaccagctgcccttttactca

SEQ ID NO: 1314 - DNA, 120 bp, synthetic construct
  source 1..120: mol_type = other DNA
acatatatgtgtgtgtgtgtattcttctcaatagagtgctagggaagacatctaaaggtatgggcttggcacactacctgagcatctcaccttcagtgggaaccacttcagcctaggtta

SEQ ID NO: 1315 - DNA, 120 bp, synthetic construct
  source 1..120: mol_type = other DNA
atacattagtctccagtggtttccatacacaaaattttgttttgattttcagtgatttcagacggatgggcctagagagggaacgctttctaaagtggattctgtgggaagagaggattt

SEQ ID NO: 1316 - DNA, 120 bp, synthetic construct
  source 1..120: mol_type = other DNA
ctcttgttattctgttttatctatagtgtctctctgaagctgctccatacactattgacctctcttagctgtgcactggactgaggcttgctggggacagactctaattatttccacatc

SEQ ID NO: 1317 - DNA, 120 bp, synthetic construct
  source 1..120: mol_type = other DNA
atctgggatggggggcagaggagggacgtcacctgcctctttcctcttctctcaaacaaacaaacctattctattaatactcatttatgaaagaaaaaaaaaaagaactgccttatctca

SEQ ID NO: 1318 - DNA, 120 bp, synthetic construct
  source 1..120: mol_type = other DNA
ctccatggggcagttcaacatgttctctgtcctgcaaattgccaactagatccttttgcaagactacaggtcatgttctttcatcaggagatactttgtgtctgattattgctctctttt

SEQ ID NO: 1319 - DNA, 120 bp, synthetic construct
  source 1..120: mol_type = other DNA
tttttgtatatgttctttccattctcctgtgattttgtgtactgtactacacatagctgccccgggcagatagccattacatatgcttctctttcctctttatcccttacttcgtcatag

SEQ ID NO: 1320 - DNA, 120 bp, synthetic construct
  source 1..120: mol_type = other DNA
ttttgtgtcttttagctcattttaaaacagaaggttagattctgactcatccaataagcacgtctttctggcatgattttgctttctgtaggcgtgttattccgccctctgtatcctgtt

SEQ ID NO: 1321 - DNA, 120 bp, synthetic construct
  source 1..120: mol_type = other DNA
ggcctgtttctttcctgtcttatatcttgtacagatgctgataccatgcaggtcttgtggttgttggtgctttgacctatctcacttgcattttgaagttttaggggaatgccttatttt

SEQ ID NO: 1322 - DNA, 120 bp, synthetic construct
  source 1..120: mol_type = other DNA
ttacaaccacgataggtcagtagatagggaagggagaagaactgtgacttttgtctcataagtcatgcaatcatgtagaaaagttaagcaattggccagtgattgcaaagtaaacctggg

SEQ ID NO: 1323 - DNA, 120 bp, synthetic construct
  source 1..120: mol_type = other DNA
aaagtcaggaacacaagggagaagagaaaggtcacaggaaaaacactaccctgaaagcagagctgtaaaaattaagttaagggaggcctcagggctaatttggttatttctaacttggct

SEQ ID NO: 1324 - DNA, 120 bp, synthetic construct
  source 1..120: mol_type = other DNA
tagagtaagaagtagcatcttaatattagtagccagtagcattttcctgattctgctcccacgtccttgaaggaacctgaagtttttttccctcgatacttcattgttagggcccacatt

SEQ ID NO: 1325 - DNA, 120 bp, synthetic construct
  source 1..120: mol_type = other DNA
agctgaggggaaagaaatagtcctcttttccaggaaactattttgacgctcagggagtttttctgattctcagttaggttgctggacaaccacacactaagccttgttttctttcttttt

SEQ ID NO: 1326 - DNA, 120 bp, synthetic construct
  source 1..120: mol_type = other DNA
gatcttgataagctttagaagactaaagatcctcttttaaattctacggatgagaggatttttcgggcaatcctctataccccacacaaatcatttatttcccccaaggggagtttgagg

SEQ ID NO: 1327 - DNA, 120 bp, synthetic construct
  source 1..120: mol_type = other DNA
gaagtggaggacccagttgagctgtgtctgatttcctgacctgcagaaactggtataataaatgtgtgttgttatagccactgtgtttacggtcatttgttacaacacaatagataacta

SEQ ID NO: 1328 - DNA, 120 bp, synthetic construct
  source 1..120: mol_type = other DNA
tctgtcagagctgggtgagtctgtgctatttcttaaggagggcctgagtttgggaagttctgaaataatagtgttgatgcctttctatctcacaggacacattttgaaaatgatgattag

SEQ ID NO: 1329 - DNA, 120 bp, synthetic construct
  source 1..120: mol_type = other DNA
tttggacacaggtagtctgtgctcttaaaaaagatgctatattgcttcctgatagtgacatctccctcagggagtctgtgagaatcaaatgaaagagacactgaatgagcttagtgactg

SEQ ID NO: 1330 - DNA, 120 bp, synthetic construct
  source 1..120: mol_type = other DNA
tgaaacgaaaactaacataagaagccagatccctctggaagacctattcagtaatgaaagagagatccctcttgaagacctattcagtaatgaaagagagatccctctcgaagacctatt

SEQ ID NO: 1331 - DNA, 120 bp, synthetic construct
  source 1..120: mol_type = other DNA
aaggatgccgtcatccccagaagggcgtacttggaacataatggctctagctacaaattctattaactctaatagttgttctgtggtgaatggataatgcatttagcagaaatagaccca

SEQ ID NO: 1332 - DNA, 120 bp, synthetic construct
  source 1..120: mol_type = other DNA
taattgtatgtgcaaagctgacaaatgtaatttccctggacttaatacttgccccattttctctttcagcatcttcatctgattagctaaagtgactcagagtcttccgagaatgctgca

SEQ ID NO: 1333 - DNA, 120 bp, synthetic construct
  source 1..120: mol_type = other DNA
attttactcatccctataatggtaaaaacagcaactgtccctgggcctgtgtgaggacaagctgttgtgtgaaataacctaggctatgggaccacgctctatgatctttcctttcctttc

SEQ ID NO: 1334 - DNA, 120 bp, synthetic construct
  source 1..120: mol_type = other DNA
aaggaaaggactccttcaaagacaaagccatgctaatgtctagttcacatgttgagagcagatgtggcaaaggtatggacctcattttttgtactttgtgccaaaaaaggatttcacatt

SEQ ID NO: 1335 - DNA, 120 bp, synthetic construct
  source 1..120: mol_type = other DNA
tgatactccttctaaagactgtttcattctttcagcacagctccccaccctaaagacagcaccaatctttcttctgccttttgcaacaagaagttactgtgctcacatttgtgagctgaa

SEQ ID NO: 1336 - DNA, 120 bp, synthetic construct
  source 1..120: mol_type = other DNA
gtggttaaatattaagcgacttgactatcacccctggaagtgttgtaaccaacacaggggtcataaaagtgttaacaacaaacccattaagatattgtttctttcccccaccctttcata

SEQ ID NO: 1337 - DNA, 120 bp, synthetic construct
  source 1..120: mol_type = other DNA
ttagatgctggcttggttattcctggccagagaacaattactgtttccatggagcaaagccttgaatcccaaaacttttatccgaataactgtgatcgattatgcttaactgaactactc

SEQ ID NO: 1338 - DNA, 120 bp, synthetic construct
  source 1..120: mol_type = other DNA
cctgtaaagctattacatataggtctatggggcattctaagagaaatcgacatgaacgctgcattcaagttacttattgtccagtgtgaagatgaagtgtgtgtaccttggtgtggaata

SEQ ID NO: 1339 - DNA, 120 bp, synthetic construct
  source 1..120: mol_type = other DNA
gctggaatggtttctaaatagaagagtttctaaagtgctctgcgcggcgacagcagtggcagctgctgcttaaaagagtttgattgacactgtgaattgcacatattttgagtcaggaac

SEQ ID NO: 1340 - DNA, 120 bp, synthetic construct
  source 1..120: mol_type = other DNA
actgaggggaggttatggtatatacagatggactactctgggactgagggaacgttttagtgtctaccaggtagtccattctgggattgagtgaaagttttagtatgtaccatgtagacc

SEQ ID NO: 1341 - DNA, 120 bp, synthetic construct
  source 1..120: mol_type = other DNA
ctctttcccagtgcttagcagcagagattttgctcctgacccttcatagttcgtacctgctcagctctttctgtttcttcaaagaggacacttttgattgcatgggttgttgttgctttt

SEQ ID NO: 1342 - DNA, 120 bp, synthetic construct
  source 1..120: mol_type = other DNA
ccaatttctcgctgcacagttaatttgctctgcaaaagtcttctaaaatgggctgtcatgaagcttgggtcgcagtaggcatatctattagaataatatatgtgaagaaaaagccctgcc

SEQ ID NO: 1343 - DNA, 120 bp, synthetic construct
  source 1..120: mol_type = other DNA
tcaggcctcttgcatccctggccaattttcccatcatctcttgcagaaccatccaacttgtcgaatctcatttagtctcatatgtactccgtaccatcggaaaagtagagcaagctcctt

SEQ ID NO: 1344 - DNA, 120 bp, synthetic construct
  source 1..120: mol_type = other DNA
tgtgccccctatagagctagaagctactcaagctggaaaaacattgcatctggacaatgagagagaagtcaagaaagacttaaaataatgaaaagtcttggagaatggtagaactatggg

SEQ ID NO: 1345 - DNA, 120 bp, synthetic construct
  source 1..120: mol_type = other DNA
gaatatattgccttatttgctaccctgccaaccttagggattgacaaacctaattaagttcacttaataattttaagtagcccatgtctacttaagttcgcccaaggctgtcctgagcca

SEQ ID NO: 1346 - DNA, 120 bp, synthetic construct
  source 1..120: mol_type = other DNA
ggaatgccttgtcccttttccatttctctaagacttaaattttcctcaagcaccagtttataaaaagctcattttctccgtgatggttcatctgactgctcctgtatctggacgtcaatg

SEQ ID NO: 1347 - DNA, 120 bp, synthetic construct
  source 1..120: mol_type = other DNA
tctgtgacacaccatctcatttttttttttttttcaaatctaactcacttcttttatttgggcacacagctagactacattccccagcaccctttgcagtaggtgtggccatgtgacttt

SEQ ID NO: 1348 - DNA, 120 bp, synthetic construct
  source 1..120: mol_type = other DNA
atttttaatttcacacgagcaggaaataacatttcttttgtttacagctcctggagtggagatgtaatgttacttcaggtagtgtcaccccctctcacatacatgtggcacatacctagg

SEQ ID NO: 1349 - DNA, 120 bp, synthetic construct
  source 1..120: mol_type = other DNA
ttctcattgataaactaaggtcattaaaatctgacttataatgatgaagataaacgggcacagatgcttggttcagtgagaatgccatccctcttctcctgtcctcgatcattatggccc

SEQ ID NO: 1350 - DNA, 120 bp, synthetic construct
  source 1..120: mol_type = other DNA
tatgtttaatggcaagttcttaaacccctctgggcctctgtcttttcagctgaaattagggaatgacatctaccctagctgctcagatgcgagcctgagtgagaaccttgtgttgtgaag

SEQ ID NO: 1351 - DNA, 120 bp, synthetic construct
  source 1..120: mol_type = other DNA
taaaaaattaaaaaacaacaacaatggctactgtttttcaagtttctgctacatgccaagccccatgcatcacttcctcaggcagtacataggaggcagaccagcctaaagtttaaggga

SEQ ID NO: 1352 - DNA, 120 bp, synthetic construct
  source 1..120: mol_type = other DNA
actatgtatgtagtgtacggctaaaagcctttataatgatagtgctgaggaatggagcctgcacaggtgtgataagttgtgtactttatatttgactgtacaattgcagtgatttgtggg

SEQ ID NO: 1353 - DNA, 120 bp, synthetic construct
  source 1..120: mol_type = other DNA
agtctttcttatgaagtgattccaacaggaatgtgaccagagacaaagaaagcacaggtaccaggcaagtccctaaagataattccttgtcacagagtaacaaatgctgttttggttcat

SEQ ID NO: 1354 - DNA, 120 bp, synthetic construct
  source 1..120: mol_type = other DNA
tctttgtcttttatccatcctatttttctattttccttgcttatgtcttcctctaccttctcctttctcccattttcatcttctagcaatctgggcagctatagctgactctccctgaag

SEQ ID NO: 1355 - DNA, 120 bp, synthetic construct
  source 1..120: mol_type = other DNA
tttctgtaattgtacacttattaggtcacaaggcatcatcaaaccaagctgtcttttgtcggaatccccactggacagtttggtctcagtatcaatactggaaatgttagtctggtaaac

SEQ ID NO: 1356 - DNA, 120 bp, synthetic construct
  source 1..120: mol_type = other DNA
agaagtcaaggatgttgctcaaagtcacagaggccattagtgatagagcccaaataggaactaagaccacaagtagaagcattcctctgtttactgaagaatttgccatcctctttatca

SEQ ID NO: 1357 - DNA, 120 bp, synthetic construct
  source 1..120: mol_type = other DNA
tcctaggataactgaacgaatctgttaattttttttcttgggcagggacaactgatgggcagttttggaactttgttcaggttgatgttatcatcctacctttcacaagattctgcctgt

SEQ ID NO: 1358 - DNA, 120 bp, synthetic construct
  source 1..120: mol_type = other DNA
ccacagacacttcacttacacctttcccatttctccatatcctgggtagcaaatatgcatctctactgagacctcctaggataaatgaatgaatctgttaatttttttttctggcctcac

SEQ ID NO: 1359 - DNA, 120 bp, synthetic construct
  source 1..120: mol_type = other DNA
cctcattactctagcaaaatagagtacccatgtcctttataactctttgaactcttcagagtctcctaaagtgcctctccctctccactctttctctcttccgaattctcttgtatattt

SEQ ID NO: 1360 - DNA, 120 bp, synthetic construct
  source 1..120: mol_type = other DNA
tcaagtcaagagagaatggttttatgataccatatcaaggacttgatacttacccctgcagttttggaaacacggtggattagtgtctgtctcctacctggaaggtctaaagtttgaact

SEQ ID NO: 1361 - DNA, 120 bp, synthetic construct
  source 1..120: mol_type = other DNA
ggttccagactcccctacaccagtctacttgccagatttgcacctgacttgcatttctctgcttctatactttttattcttttgttttctctacctgctttttccttctgtcttcttaaa

SEQ ID NO: 1362 - DNA, 120 bp, synthetic construct
  source 1..120: mol_type = other DNA
tgacacaagataatcgaggcaagacacatgacatcacacagtaaagacttaggtccagacagccactggacccaactgttcagagctaggaacaaataggagaattaaataattaacttc

SEQ ID NO: 1363 - DNA, 120 bp, synthetic construct
  source 1..120: mol_type = other DNA
ttgcaaactatgcatccaagaagggattaatatccagaacctataaggaacttaaacaaatcaagaaaaaaccaaataacttcattaaaaataacacctttgccctttgtctgggcaaag

SEQ ID NO: 1364 - DNA, 120 bp, synthetic construct
  source 1..120: mol_type = other DNA
aacgtaacaaacctgcatgtttatcccctgaatctaggaaaaaaaagatacaagcagtccagagcctatgtctgtcccttggcctacttctcacctgtagttataatcgtagtttcttcc

SEQ ID NO: 1365 - DNA, 120 bp, synthetic construct
  source 1..120: mol_type = other DNA
ttatgaagtatgagatgaagaatgtggaagtagagctcctgtgatattgtgaatgacatggtgaaaccagtggttttcaacctggggtgcaaattagaatcagctttccagacgactaat

SEQ ID NO: 1366 - DNA, 120 bp, synthetic construct
  source 1..120: mol_type = other DNA
gatatgaagtcatttgttaattgactctttactgaatgccaggaagctgaactaggcgcttgcacgtaggcttatctcactgtatactgacaacatccctttgtgtagatattattccac

SEQ ID NO: 1367 - DNA, 120 bp, synthetic construct
  source 1..120: mol_type = other DNA
caggacaatcccttcaacccacagaaaatactgtgtgttcaaaagcctgcagtgatcaaaagagactcagtgacatcaaataatatctattctgcatgcaacacccctaaatgtaggaaa

SEQ ID NO: 1368 - DNA, 120 bp, synthetic construct
  source 1..120: mol_type = other DNA
taatgtttcttttctgagggattatgtagaagccagggaacaccagtggacattcatatgccctctttctaaaaacatgaaggccacatacaaaaataatcaccttgagatctctggctg

SEQ ID NO: 1369 - DNA, 120 bp, synthetic construct
  source 1..120: mol_type = other DNA
tcctttctcctgcatggaaaagagcaggcaggggacactttgttagagataaacagttcacaaaaaacagactacgacagggtgaaaatgctgtgttaaagtttctgtctggtttttttt

SEQ ID NO: 1370 - DNA, 120 bp, synthetic construct
  source 1..120: mol_type = other DNA
tgttgttgttttctcaaattaaaggaagtcacttgcttgaggtcatatggctcctcagtggggcagagctgggatctaaactcaggccatctaaatcaaatcgagtatttatagatttgg

SEQ ID NO: 1371 - DNA, 120 bp, synthetic construct
  source 1..120: mol_type = other DNA
ggtacccaaagccacagggcaaacagggtgtagcttcctggagtgttagccactcaatagtaaataatgaggcatgtttttgtgtccaaacaaataggtatgttaaggaataaaatacag

SEQ ID NO: 1372 - DNA, 120 bp, synthetic construct
  source 1..120: mol_type = other DNA
gaaggcaggctccagccttggtctcagaatcatcactaaagtcagataagaagataataatagtaatggctacaacagagtagcagaaaccacaggttccatttttaagcacctaattgt

SEQ ID NO: 1373 - DNA, 120 bp, synthetic construct
  source 1..120: mol_type = other DNA
agatggtcatccgttctatgcagaaggtaaactggctccaggaaataacaactttatttgcaatcaagcccatgaggcctcctggaatggcttctccttcctgatttgctaaagtaagtt

SEQ ID NO: 1374 - DNA, 120 bp, synthetic construct
  source 1..120: mol_type = other DNA
cctccttttcttgactttccacagaagattttgtcactgagtttaataaactttaaaaacacagcagtcagaaaagttcctctctttttcccatcttcagagtcctatttgcctgctgcc

SEQ ID NO: 1375 - DNA, 120 bp, synthetic construct
  source 1..120: mol_type = other DNA
ataaaaataaaaataacatcagaatatattgtaagtggctccccagtttcctgcagagaagagcttgtggcggagaggaggaacacaaaaagaaaaccaaaaccacagcgttctttcttg

SEQ ID NO: 1376 - DNA, 120 bp, synthetic construct
  source 1..120: mol_type = other DNA
actggggtttagcccgcccgggaggaggaaatcaacttcctgcattctgcatttaggattcacataaaataaatggtagggcttacaaatctagaaatgcatatttctattttggttatt

SEQ ID NO: 1377 - DNA, 120 bp, synthetic construct
  source 1..120: mol_type = other DNA
atcatttctacatcttttccattcttatttgttttctgtctgtgagtttttattttatgagaaactcgaggggcttgattctgcctgcatcccttagcaggggcaatcctgttgtctgtc

SEQ ID NO: 1378 - DNA, 120 bp, synthetic construct
  source 1..120: mol_type = other DNA
catggaaaatctcttctgggtttgattaaatcatggttctactgcaagtagttcagtgcagctgggtatggctgtttaaggcatgattctctgtagatagggctttaccatgttgatgga

SEQ ID NO: 1379 - DNA, 120 bp, synthetic construct
  source 1..120: mol_type = other DNA
tgagtgccattgtgagctcacaacactttagggggccacagaaccccaagcattatactttagtctttcctttctacctttctgcctctctcagtaaaggctgttattaagtaacaaatt

SEQ ID NO: 1380 - DNA, 120 bp, synthetic construct
  source 1..120: mol_type = other DNA
aagagggctatggctttccctgcctctcaatgaattatgtgcctgacacataggacgccctcagcacatacttgttgatggaaaggattattatcgttgttgctattatctttttgttaa

SEQ ID NO: 1381 - DNA, 120 bp, synthetic construct
  source 1..120: mol_type = other DNA
ccctaactgatgcccgtgctggtttacagttttcttatctacagaaaacaaaataggaaaaataactcttcagcatgggtgttgttagtccagttgtatatctgacaaagcagaggctca

SEQ ID NO: 1382 - DNA, 120 bp, synthetic construct
  source 1..120: mol_type = other DNA
tcctggctgtgacagcaccttagtgaattattactcatttcccccagattctctgtgcatttcacacagaggcagaattataaattaaaacaggctgtcactgactttgaacatctcttc

SEQ ID NO: 1383 - DNA, 120 bp, synthetic construct
  source 1..120: mol_type = other DNA
agtattagtgtctattttactgagctggtttgaggataaagtaggggagagagtgtggaaacactttgtaaacagccagagaggtgcaaatgtaaagtggtggtagtgttattaattgcc

SEQ ID NO: 1384 - DNA, 120 bp, synthetic construct
  source 1..120: mol_type = other DNA
cagcagcagctgtgggagctgccaagtataaactccaggccaaatgacactacttcttttccttcctgcgtgacaactctgttaacatttttgataaatatgtgctatacattttcttga

SEQ ID NO: 1385 - DNA, 120 bp, synthetic construct
  source 1..120: mol_type = other DNA
caggttccagaccacctggaaagagctggtgtagtcaagagtattttcctatgatgttggtgttgattctggaaaccatccccctgaagaaaataataacatgaataatactggctaaca

SEQ ID NO: 1386 - DNA, 120 bp, synthetic construct
  source 1..120: mol_type = other DNA
tagggcacacaaataagaaaaaggatattttctaagagttttgctaagatctgagtgggaataactctcctgaattgaacttccctcccagcaactgctttctgtagccaagaacacagt

SEQ ID NO: 1387 - DNA, 120 bp, synthetic construct
  source 1..120: mol_type = other DNA
aaatgaatgtctttattgcttaatttaaatgagaataaatgaaaccttctccaccccccacaaagggtccagatgactgggggcagagggccctgttttaaaacgtattttggaaacttc

SEQ ID NO: 1388 - DNA, 120 bp, synthetic construct
  source 1..120: mol_type = other DNA
gctttatcctgcacattttctctgtgccttgaggatgctgatagcatcacttacaagatcttgtttggttcttgacttatatgactacggaccaggctatttctagaccacaaatcttag

SEQ ID NO: 1389 - DNA, 120 bp, synthetic construct
  source 1..120: mol_type = other DNA
ctgtcccatcctctatcaaaggagggatttctattagattgctaaggtttgctctagtctgaaattcctagataattaattttatccagagggggaagggatgggggcagtttataatga

SEQ ID NO: 1390 - DNA, 120 bp, synthetic construct
  source 1..120: mol_type = other DNA
taatagcactgaaactaacatgaagcccagcttgtttacttctggaatttctccatctactttagcacatctggccctgtgaggaaactagacaggtcttaatgatgtccatttcctaag

SEQ ID NO: 1391 - DNA, 120 bp, synthetic construct
  source 1..120: mol_type = other DNA
agatttagatccacttctcagtgctctaatttgtttttgtgactagacctttgtggtcccctggactattcatctctacctttttcttactcacacagaaggaaaaacaccactccattc

SEQ ID NO: 1392 - DNA, 120 bp, synthetic construct
  source 1..120: mol_type = other DNA
ccaaatcactttttcttatgccttaccacaggagaccattaaatatagttaagaccttattaccctcactcccagccctgccacagaaaacataagtgaacttaaaaatcagccaggcgt

SEQ ID NO: 1393 - DNA, 120 bp, synthetic construct
  source 1..120: mol_type = other DNA
ctagaagttaatccaatttacactcttcaccagctgtgttcatacaggcacatccctcatactacctcctggccaaccctgagttttaccagaatttttatttttaactaaaggtatccc

SEQ ID NO: 1394 - DNA, 120 bp, synthetic construct
  source 1..120: mol_type = other DNA
ctcatctgtgccattttcatggattctcccctccatgaatgtccctttcccttgggtacattacttcttcttacaattaatgtggtagacactgctacatatcattactatggcttgtat

SEQ ID NO: 1395 - DNA, 120 bp, synthetic construct
  source 1..120: mol_type = other DNA
ataaattccaagaaggaatgtatccttggtgaatgattttaatcaagggcctgagttcccaaacagcatcttctctgtggttataaaatgattgttctggcctgcggtgtagagtatcct

SEQ ID NO: 1396 - DNA, 120 bp, synthetic construct
  source 1..120: mol_type = other DNA
tctgatgtcctgttctgggcagtagctgttggtggttgcatgtttatgaggttgattggatagagttagtgtcgactttattaatgctggctgttgttaatgactctcccctgaagcctt

SEQ ID NO: 1397 - DNA, 120 bp, synthetic construct
  source 1..120: mol_type = other DNA
gatttatgtgtcattttaaaaaggcacatttctatcagctttctggccatctcctacctgcttgctcttgcctaactaatgacactcgttaaaggaggaaatttgagtgctgcttcagtg

SEQ ID NO: 1398 - DNA, 120 bp, synthetic construct
  source 1..120: mol_type = other DNA
agatcttgggacagagagaacctttgggtgtcctcatgtcacacagtagagataaggctctgttagatccttgcagcaaaacaataactgaaacaaatgcaagagtcatttccaacataa

SEQ ID NO: 1399 - DNA, 120 bp, synthetic construct
  source 1..120: mol_type = other DNA
catagcaagtgctaatgtatgtagtcaaataatacaaaccagatcaccgagtttcagtagaagaatgtcgtgaggtggggtttccttgcattctgctaggaattactcattcctttgggt

SEQ ID NO: 1400 - DNA, 120 bp, synthetic construct
  source 1..120: mol_type = other DNA
ttgctgaaaacacacaccaataatttcatctgtaatattataaatgacctctgtgtctattttgccattaatctccctgcaaaggggttgcatgtaaccattctgcaccatacctccccg

SEQ ID NO: 1401 - DNA, 120 bp, synthetic construct
  source 1..120: mol_type = other DNA
gggtaatggattcagaagcagggtttatgctttgttcataatataaaattagtatttcagaggacttccacatagccccaactcctgtggctatgtgtgtacaaagctggcatttgttca

SEQ ID NO: 1402 - DNA, 120 bp, synthetic construct
  source 1..120: mol_type = other DNA
agtttttagttcttttctaagcctctcatgtgagggtctgaacttctcagaaccacaagattgggagaaacctaatgaagaaggaaaactggatgataggcaggcaggaaggataaataa

SEQ ID NO: 1403 - DNA, 120 bp, synthetic construct
  source 1..120: mol_type = other DNA
tggaatctaccggtgtgtgaggcactggatatagctggaactacagtgccctggcagtgacgaagcctctgagctaacccgacacggctgtgtgctcagtgatctttttttttttttttt

SEQ ID NO: 1404 - DNA, 120 bp, synthetic construct
  source 1..120: mol_type = other DNA
taaaataggtgtgtgttttggctgtttcaaaacttaactgcaaattctttaaaaatcctctcgagaggactatggagagatggagactttggtattcttctcatgagtcgggcaggctca

SEQ ID NO: 1405 - DNA, 120 bp, synthetic construct
  source 1..120: mol_type = other DNA
aattctaaacaaaagagaaaagataagggaactccaggaacagatgatgccatgctcagggaatagtgacttgtctgtgtgactttagtatgagctgtgtgaagtgatggtcagattcaa

SEQ ID NO: 1406 - DNA, 120 bp, synthetic construct
  source 1..120: mol_type = other DNA
gtaaatttctctaaaagaagcatgagtgagtcagtccttctttttccttcctaggctgatgcttacattctgacgaccccaattcaccctgtttctattccaatacatgacctgtatttc

SEQ ID NO: 1407 - DNA, 120 bp, synthetic construct
  source 1..120: mol_type = other DNA
gcactctccgttttttgtagttcaaggtacatgatttcagttaatactgaaaacaactctatgacatggaactgtcacccccatttatagatgagaaaactggctcaaggtcacatgggt

SEQ ID NO: 1408 - DNA, 120 bp, synthetic construct
  source 1..120: mol_type = other DNA
agtagatctaggatagagcttgataatttgcatttttaattatgcaaattacattggtgctggttctgggactacaccttaagaacctctgccatgagggttttgctgcaagggacagct

SEQ ID NO: 1409 - DNA, 120 bp, synthetic construct
  source 1..120: mol_type = other DNA
taataagagtaccttcttcatgtggcctttgtgaagagcaaatgaattactgtccatcaagttcttagtggtgcctaacacagagtaagtcttgatgaatgttggctgcattactagctc

SEQ ID NO: 1410 - DNA, 120 bp, synthetic construct
  source 1..120: mol_type = other DNA
tggcttagtctttccaagtcttactttatgtatgtgtaaaatgggcataaataatcccggtcctgtctatcctacagggtttctgggattagaactatcctgatacataactccagagca

SEQ ID NO: 1411 - DNA, 120 bp, synthetic construct
  source 1..120: mol_type = other DNA
ctctgagaaaccctggactggagaaatttgggcaacatttaaaaacccaacattcattgctcctatttgaacatgggacacgttttcaccacaacagtgttgggaaacactgagttatat

SEQ ID NO: 1412 - DNA, 120 bp, synthetic construct
  source 1..120: mol_type = other DNA
ctcactgctaaactggtgacaataaagattgtggggaagagcacatgagatgtatatgtgaaagccctttgtaaactgtcaggagtggcatagatttattactgttactggttgtggaaa

SEQ ID NO: 1413 - DNA, 120 bp, synthetic construct
  source 1..120: mol_type = other DNA
ccctgcctgtgcttagaagagcttcaggtctggctgtgtgctactccaggggaagataatgagcttgatgcattattccttcctatcaatcaatcaccaatttttttcactttttgtgta

SEQ ID NO: 1414 - DNA, 120 bp, synthetic construct
  source 1..120: mol_type = other DNA
agaccagcctttcactgacttttatagcttttgtatgaccttcagtgtagtctcatgtgctggccataaggtctttcagaatttcatttctttgtctttaaggggctaagaaaagactgt

SEQ ID NO: 1415 - DNA, 120 bp, synthetic construct
  source 1..120: mol_type = other DNA
cttttctttgtgacaagaatggatacctgataccttccctagcaactgattggtttccaaggtgtttggccgactcatgagcatttagctacttcacagttgagtagagattaacctctt

SEQ ID NO: 1416 - DNA, 120 bp, synthetic construct
  source 1..120: mol_type = other DNA
cccttctgattgtgtctgttccgcagagcaataatagctgacgtttcctgaggactatatatgtgccaggttgtatgctgacattttgcaagtattaactcattttatctccttaaaatc

SEQ ID NO: 1417 - DNA, 120 bp, synthetic construct
  source 1..120: mol_type = other DNA
ggttatagtgaggaatacgagctaacccatttaaatgctgaatgcaaagcttggtccttcactaggactaaatatgagtcagcaatgattagtggtgacaatgcagacactagttagttc

SEQ ID NO: 1418 - DNA, 120 bp, synthetic construct
  source 1..120: mol_type = other DNA
cccagaacgtcagcttgcagaaccagagtccataaccaatatggtactgagtttgtcaggagtacctataaagttgctttgtgtgtcatgaacatttcatgcaagaaaatctgcaaatgt

SEQ ID NO: 1419 - DNA, 120 bp, synthetic construct
  source 1..120: mol_type = other DNA
aaaaagagaatcttctaggtatatctaaaaggatgacccaaaccagaatgtaaaggagcctttagaaaaactaacactgcagcatccacacacaaaccagctgggactagtgtcattcct

SEQ ID NO: 1420 - DNA, 120 bp, synthetic construct
  source 1..120: mol_type = other DNA
atggctatctagaacctttttctaagaatgtgggtctcagggatctctcttcttctcaggcagagcctgaggtgtgcactaaaataaatcaatggctctgagaatgtctcttctctggga

SEQ ID NO: 1421 - DNA, 120 bp, synthetic construct
  source 1..120: mol_type = other DNA
tctagttggtatttatctatgaggtttgtgcaaagatgagtggtcagaagcttacttgttctgggttctcctaagaatggggtatttctctaaatcttcactttggattggaccctccca

SEQ ID NO: 1422 - DNA, 120 bp, synthetic construct
  source 1..120: mol_type = other DNA
ttaacttggtttatgccccatttgaaagctgtcaccattccttcgactgtctttgaaacaaataatctttagcccatcctttttcatcacttcattgttcctcatgagccatagcagacc

SEQ ID NO: 1423 - DNA, 120 bp, synthetic construct
  source 1..120: mol_type = other DNA
atatataatttctcttccattggttcccatttacatgggttgctacaacagtaactccccatctagtatttccatcacatcaccaccattgtgtgtggaaggaaggggaagatgtttctg

SEQ ID NO: 1424 - DNA, 120 bp, synthetic construct
  source 1..120: mol_type = other DNA
tactaatattctacattgaattagaatccttcatggttagagattaacgaaagggaggctattcagatacatgtgtctaagacagccacccaagttctacggcagatacctggtgttttc

SEQ ID NO: 1425 - DNA, 120 bp, synthetic construct
  source 1..120: mol_type = other DNA
tccctataaggttggcattataatgattcctattttgcaatgagaaataccaatgctcagagaggttgagttcggtggatgctgtttgtggctccaaaatttttttcaccgaggtgtgct

SEQ ID NO: 1426 - DNA, 120 bp, synthetic construct
  source 1..120: mol_type = other DNA
tagagagccgctagtgctttttctgcacactactttgggttggggagggcagatacacttgaaaatacagatttttagcagtaagatatggactatttgagagtgaaattacatccttga

SEQ ID NO: 1427 - DNA, 120 bp, synthetic construct
  source 1..120: mol_type = other DNA
ggctgagcttgggccgtcctctttttgaaaatacaagccgagatataaggttctagtgtgcctattatccatttaataatttatctggatgccatgtgttccatttatttcagtgtgtgc

SEQ ID NO: 1428 - DNA, 120 bp, synthetic construct
  source 1..120: mol_type = other DNA
attttgactcactttttcattcactctttcaacattttacaaaaattcatggagcctccattttgtcccaggctttgagccaaacaccagggatgtggagataaaggggatggcttagtg

SEQ ID NO: 1429 - DNA, 120 bp, synthetic construct
  source 1..120: mol_type = other DNA
tcatccatctgttctcaggggtgatatttaaaccctttaaaaccctggcaaaagcctagtcaaaactctgggagtacaaccaagataagctggaacgttcaatatgattttactgaagac

SEQ ID NO: 1430 - DNA, 120 bp, synthetic construct
  source 1..120: mol_type = other DNA
atcgatcctgtgatggtaagacaaggaggaaaacagagaccacttcttcctgtcactttctgctttctcttctaattcaaatcatgtagttcaagaaattttgcaccccaccttcataca

SEQ ID NO: 1431 - DNA, 120 bp, synthetic construct
  source 1..120: mol_type = other DNA
tgtctgccaatgtttcctccccaaacaaatctcaaccagaagggcaaaataaagttccacaaaaaccgtgctctcagcataacttgaagacagaaaatgccagaactttaaaataaccag

SEQ ID NO: 1432 - DNA, 120 bp, synthetic construct
  source 1..120: mol_type = other DNA
attaaaaaatattcctccactccaatcttttggtaaaactgaagctcttgaaagatgagccacactgattctttgggtttgcatgctttgggagcattgctacacatcctgcaggtgcaa

SEQ ID NO: 1433 - DNA, 120 bp, synthetic construct
  source 1..120: mol_type = other DNA
ctggagcatccgtctcattaataactggagcctaatccttcacattcaaagggagtcccattacccaaaacaataatatttttaattacccaggcagagtggcaattgcacattgaatac

SEQ ID NO: 1434 - DNA, 120 bp, synthetic construct
  source 1..120: mol_type = other DNA
aagggatgccagagagaggatgagaatacgtattgtgccaagcattgtgctaggagctctgcacgcaacatctgttttaatttcccaaaaaacctataattatgtatttcctgatgagaa

SEQ ID NO: 1435 - DNA, 120 bp, synthetic construct
  source 1..120: mol_type = other DNA
tatcttttaaatggttcagtccacggtaagttaagggcaggagattttggaaatagggagtttagaaggagagcgtttttaaaatggagttgaacatccacctggagataggcactagaa

SEQ ID NO: 1436 - DNA, 120 bp, synthetic construct
  source 1..120: mol_type = other DNA
cttaaatccaggttttctgattctggttcagtgctcattctgtggtctttctgagaaaggaatgttggaactgctttggaggaagacatttccaggaatggaacacctattcagtactga

SEQ ID NO: 1437 - DNA, 120 bp, synthetic construct
  source 1..120: mol_type = other DNA
acatatccagcacctcaaagccagaacccacctggacaagaacttgccttgtgaaaatggcccatattcaaagtctaatagccttgtgctaagccctaattttttaaataagatacagtt

SEQ ID NO: 1438 - DNA, 120 bp, synthetic construct
  source 1..120: mol_type = other DNA
gaaattatctcagtagagtaaggaaccaagaagattacttcttttgagaaatctgttagtgagctgaatgtggctgtggcctgggaaacctcagatgtgtttttgtaggttcctgaaaga

SEQ ID NO: 1439 - DNA, 120 bp, synthetic construct
  source 1..120: mol_type = other DNA
tgtgctgattgtgtaagctgctctttcactggcctttcagtgaaaaatctcttccaagccatttctacttacagctactttcttttggaagtagtagggtaatagcccaaagctataaaa

SEQ ID NO: 1440 - DNA, 120 bp, synthetic construct
  source 1..120: mol_type = other DNA
gaccagttggctgctgccaaaattcaagtctgcgtatatgaagaatatagaaagaataagacacacagctgggaatatgaagtcagaagggtatatccaagagacagcaacagtagtatt

SEQ ID NO: 1441 - DNA, 120 bp, synthetic construct
  source 1..120: mol_type = other DNA
atatcaagtatctagacagagacagatagaatacaggcaaaagcaagtctagaggtaaaggttctggcaatttgggtgtagtggtaaaaggaacaggaagagtcaaagatgatgctaagg

SEQ ID NO: 1442 - DNA, 120 bp, synthetic construct
  source 1..120: mol_type = other DNA
atttgtctatgcctactgatgcgcacctgaatttgtcttctatgggaaggaaatttagaagttctaagcaaacactgagatcaccttgttcttcactattctctgccttacacatccgta

SEQ ID NO: 1443 - DNA, 120 bp, synthetic construct
  source 1..120: mol_type = other DNA
acacataaaccagttttgattaaacaacgaaaacaaaatacactataaaatttcctgcaaagccagcaataaatgaagagccacaggggcaaaagaagctgggttggtgaggggtcagta

SEQ ID NO: 1444 - DNA, 120 bp, synthetic construct
  source 1..120: mol_type = other DNA
actgaggacagtgattctgacagcaacatgcaaatacttatttccttttagtccaacaaacttagagatccaattcacgaacccagtctcaccactggcattccttttgtcatattctgt

SEQ ID NO: 1445 - DNA, 120 bp, synthetic construct
  source 1..120: mol_type = other DNA
ataaaaagcattgaaaatccaactattcagaaaggctgataatggaaagtaaaagtcacctagaataccattgtccagcaataaccatagtcaccacctaaggaaacaacctgtcaggtt

SEQ ID NO: 1446 - DNA, 120 bp, synthetic construct
  source 1..120: mol_type = other DNA
tgcggtgggtgtctgctgaatgaaggaggtagtcttcttccctatcttttctctctgtagttaattcaggtcactgaagctaattcttcagccatttaataaaagtgtattgagtttccc

SEQ ID NO: 1447 - DNA, 120 bp, synthetic construct
  source 1..120: mol_type = other DNA
tatatctagggtcagatttgtttaagagaacgccaaaaacccagtgaaaaacaaatctaaactctcttcttggtctgcctccattttctttgcttacacccaagtggtcacagaatgagc

SEQ ID NO: 1448 - DNA, 120 bp, synthetic construct
  source 1..120: mol_type = other DNA
ggatagacacactggccagatagtgaaatactttgtcagaaaaatctacaaaaaaatcacaagaagctctgacatggaaacaaaaagaatttctaagcctcccacagctccctaccagct

SEQ ID NO: 1449 - DNA, 120 bp, synthetic construct
  source 1..120: mol_type = other DNA
ttcctgtaggacatgaaaagatgcttggtgtctagttcttggttagcatttgttgagtcgcattccatttctcagatatttactggtgcattgttgcacactagctaaagtattggatgc

SEQ ID NO: 1450 - DNA, 120 bp, synthetic construct
  source 1..120: mol_type = other DNA
atacctgagttctcaactatgacagttaccatctgttgcataaatgttctctccaatgcaggtcaggcttggaccaagtcaatatgaatactacctacagcagcattaataatatgacca

SEQ ID NO: 1451 - DNA, 120 bp, synthetic construct
  source 1..120: mol_type = other DNA
tctgtaataataattacacatggcgtgtggcatggagtcttttatccaagtagccttggctttattattcacttgcccttcatactttcccacaagttagatgaatgtgctctgaagagg

SEQ ID NO: 1452 - DNA, 120 bp, synthetic construct
  source 1..120: mol_type = other DNA
agcggatgctgttgttattattatgctagtgtttcttttctctcctaaatccagtgtggctgatgatcttataagaaggtgaaataagagattgactgtgtggtgggatttgggggtttt

SEQ ID NO: 1453 - DNA, 120 bp, synthetic construct
  source 1..120: mol_type = other DNA
gagtatttaaggttactgtgtttaagatcactcaaagttcaaggtcactgaatgctcaaggtcactgagtgttcaaggtcactgaatgttcaaggtcactgaatgcccaaggttactaag

SEQ ID NO: 1454 - DNA, 120 bp, synthetic construct
  source 1..120: mol_type = other DNA
tgaacatcatggatgaggtgttatgaatgtaatttatgagaaagacaatgaggaactctaatcaacagaccacaccacactaatttggccctacatcaagcactggtggattaacatgca

SEQ ID NO: 1455 - DNA, 120 bp, synthetic construct
  source 1..120: mol_type = other DNA
tttctttcaagccaagtcaatgcagtaggttttttttttttcttcaatacatcatccccatggagaaggataaagacaacattgaaactgaaatgtggccgtttctgtgggatccctcct

SEQ ID NO: 1456 - DNA, 120 bp, synthetic construct
  source 1..120: mol_type = other DNA
ccatgtcatggaaaactttgactaaatacgtttgttttgctttttctctcgttaacctgttttttgttataggtgtgtcagctgtggttgttgtgatgagtgaggagagggatcacacct

SEQ ID NO: 1457 - DNA, 120 bp, synthetic construct
  source 1..120: mol_type = other DNA
ttttggagaaggtggcatgtgccactattggctggcttccttcggtcctagtagggtgggcaggaaaggcagtatcattgtttgaattgtgactcactcaaaaaggtatgtttaagtctt

SEQ ID NO: 1458 - DNA, 120 bp, synthetic construct
  source 1..120: mol_type = other DNA
atactaggaagtgtttgctaacaatgcaggaatcaagggcccattagatttgcccaggctcatgctcacacctttaagccatgcttgaggaaactaatggaatttggaattcagaattca

SEQ ID NO: 1459 - DNA, 120 bp, synthetic construct
  source 1..120: mol_type = other DNA
gacactaactctgtgtcagacgctgggcaggaattcttcacagttatctcatttaatctcttaggagctctaagaggtaggaattgttgttcccattgcacagattaaaaaactgagatt

SEQ ID NO: 1460 - DNA, 120 bp, synthetic construct
  source 1..120: mol_type = other DNA
tgacaggccaggggctggagccccatgttgagttaaatcatatgccactgagtcttctggtgtcaggtacatcatctcatttaaaagattttttttcgttcattttcatgtattataaaa

SEQ ID NO: 1461 - DNA, 120 bp, synthetic construct
  source 1..120: mol_type = other DNA
aaagcagatgtttttggcccacaattaaaccttctttcagcacttagtggctctggttacagagttatgcatttaccccttacaaattgctgtcatcagatacaaagcactaaatggcat

SEQ ID NO: 1462 - DNA, 120 bp, synthetic construct
  source 1..120: mol_type = other DNA
ggccacagtgtggaaataattgaagtcttttaacagaggtgtctaagagagcgattaaaagggaattgcaattattgagcccagaggtaaaatttcagaactggcctataaatcctggtc

SEQ ID NO: 1463 - DNA, 120 bp, synthetic construct
  source 1..120: mol_type = other DNA
agcaaattttaactacttggttgccagaatttagtctgtcatctgtgaagttggctttgctcctgagctttgaatcatcagcagaccaggccactcataaaatgagatgataaccacaca

SEQ ID NO: 1464 - DNA, 120 bp, synthetic construct
  source 1..120: mol_type = other DNA
ttttttattgactcctgaagtaaacacaatcttaaaaatacagcactgacatccttgcatttcaatctaaaaataaaattgtctataaaaggagttgtaggccgggcatgttagctcacg

SEQ ID NO: 1465 - DNA, 120 bp, synthetic construct
  source 1..120: mol_type = other DNA
agaatagataatgctacaggtcagggaagccatttcaaaataagattctttttgacaatgtctctttaaatgacgtgactctggggacttttcctcgctaagcatctgccaccctacaca

SEQ ID NO: 1466 - DNA, 120 bp, synthetic construct
  source 1..120: mol_type = other DNA
caaaggccattaatagatgatgttgatgatgccaataatcagagctaggagctgtgattgtattataagcaaagcatttgaataattgcagagccgacaaggcccagagtgacatttctc

SEQ ID NO: 1467 - DNA, 120 bp, synthetic construct
  source 1..120: mol_type = other DNA
tccttcaactctccagcaaacgtgtctaactgcctacgattcaactttctgatctgaagcagctctttatcttcttagaagagcatgttttctgccaggttcaaccataaataaacctat

SEQ ID NO: 1468 - DNA, 120 bp, synthetic construct
  source 1..120: mol_type = other DNA
tggagctgaaaaaaggaattaagccaaataaagaccaattactaggagagtagctttggaaaccaagaagtcccagagactgtataactagaggcagagaaagatatcccaccatgatca

SEQ ID NO: 1469 - DNA, 120 bp, synthetic construct
  source 1..120: mol_type = other DNA
gaacagaacttgctgatttttccttggaatgcaatttcccagggagaaaggaacatacaagcatttgtttctaggggctgatttatttccgtggctttcatatctcaatccacacctatc

SEQ ID NO: 1470 - DNA, 120 bp, synthetic construct
  source 1..120: mol_type = other DNA
gtgccctgttggctgttcatcttttctctgcttggaccttgaactgggtcaagtacttccagtttcactctttcttgagcctttatcttaatcatatacatcattaaacatatgttcaac

SEQ ID NO: 1471 - DNA, 120 bp, synthetic construct
  source 1..120: mol_type = other DNA
tgttctagaggagctgtcactcttttcagaaatatgttcagggtggatttcttgctttgtttcctctcttcatcacagagttgcttgtaagcagataatgcacgatgaacattcctctct

SEQ ID NO: 1472 - DNA, 120 bp, synthetic construct
  source 1..120: mol_type = other DNA
ggaccaaaaaggtgctatttgaagggagagacaccactttgatcttgggatgaaaatcaccagtaaaaggaggatgtgtgggagcattatcaatagtgaacaaaatcttgaaaggtatgt

SEQ ID NO: 1473 - DNA, 120 bp, synthetic construct
  source 1..120: mol_type = other DNA
cacaagagaaaacgacaccatcaagagacatggtaaacacaagatggatgaggctgctgttggggtaacatggcgtatgttttacagtaaactcttttctttataagtagaaagagcaca

SEQ ID NO: 1474 - DNA, 120 bp, synthetic construct
  source 1..120: mol_type = other DNA
acatgagcaatgcattgtgttatgaggttaggatggctacaacggcactaggtgattgataggaagtttttaacttcattatagtcttatgggacaatggttgataggtggtctgctgtt

SEQ ID NO: 1475 - DNA, 120 bp, synthetic construct
  source 1..120: mol_type = other DNA
cacacacatgtatacacacacatcaaatacagtcacaggctctagtttgcaattaagcttcttcttccctcactataagtgaccatctagaatgccatggtctgaaatcttacatgattc

SEQ ID NO: 1476 - DNA, 120 bp, synthetic construct
  source 1..120: mol_type = other DNA
tatgcaaattcaacaagaagccaggggctttggggaacaagattagggaaagaaactccaatttgcaggagaaccatcttttagctatttcttcaagtgcctcactcatgatttcagata

SEQ ID NO: 1477 - DNA, 120 bp, synthetic construct
  source 1..120: mol_type = other DNA
atccagactccccaaccaatagctacatgaggttgtgctgattacttaaccaagctctctgaacttcaacttttccatctgtaaaatgggattagacaaaagcttcttatgtatcaccag

SEQ ID NO: 1478 - DNA, 120 bp, synthetic construct
  source 1..120: mol_type = other DNA
catggcacccctttaaggtcatgcttcctggcttgcttcccttatgctttacttacagcccataagaagtttgcttttactaattggattcgattcgtcctttaacattttgatttgagt

SEQ ID NO: 1479 - DNA, 120 bp, synthetic construct
  source 1..120: mol_type = other DNA
taaagtgtgcataatatgcaaagcagtgggctttataagtgagagggtatggtagaaatataaaaaatacatagtctgtgctctcaataatcctatattcttgtgcggaagacaaggtat

SEQ ID NO: 1480 - DNA, 120 bp, synthetic construct
  source 1..120: mol_type = other DNA
aaggtagggaccacaactgcaagctccaatgcatcatacaaatccaacttttgatttttaatgaacaattaggttcagatcttctccaactcctgttatgtagggactaaagctagtcag

SEQ ID NO: 1481 - DNA, 120 bp, synthetic construct
  source 1..120: mol_type = other DNA
ttcatggaatgtcttgctttgcaaaaagaaacagataataaccacacggaggagaaatgctagccctgcagcctgttatttaaaaagtctggagaaagagaatgctagccagaccttact

SEQ ID NO: 1482 - DNA, 120 bp, synthetic construct
  source 1..120: mol_type = other DNA
caattcattttacagctaacctctctttttcttaacctccaagagtgcttggaagtagcagttaggttgtttccattctggaattcacccagacaactccattttgataaagcctctcca

SEQ ID NO: 1483 - DNA, 120 bp, synthetic construct
  source 1..120: mol_type = other DNA
atgtcatcaacaatgccaggggagatgagcgtgggtaaggactgctctccatagttttaagaaagagaaatagagggcatattcctgccagaagaaggagaaagaattatttttttctct

SEQ ID NO: 1484 - DNA, 120 bp, synthetic construct
  source 1..120: mol_type = other DNA
ccagcagactccctccttcccctttccctttctatccctagaggtagccattgtaaaagtttggaatatatcttttcaggcctttttttcatgtatcgcacataaatatgtattcacaga

SEQ ID NO: 1485 - DNA, 120 bp, synthetic construct
  source 1..120: mol_type = other DNA
atttgaatacagaccctattctaaaggcattcactgtctggtatcagagagagaaaaataaagaattgcagagggattctacttttgaatgggggaatgaggagccctgcagatctgctc

SEQ ID NO: 1486 - DNA, 120 bp, synthetic construct
  source 1..120: mol_type = other DNA
gagtggcctcaaaaattatgtctgtaaagggactcacatttaattggatcagactgtggcgcaacatttaccccagagctttgccaaaaacaatggaataatcagctgacaattagtaag

SEQ ID NO: 1487 - DNA, 120 bp, synthetic construct
  source 1..120: mol_type = other DNA
aattgtattgctgggcctaaaataaatagaaatgtattatatatttgataataaccgcacaaaggattggggggggcagaaaaggcatacttgagtaaggaaagcacacctgatagtaat

SEQ ID NO: 1488 - DNA, 120 bp, synthetic construct
  source 1..120: mol_type = other DNA
tgtcagaatgggggaaacagaaacccaaaatctgtctatatgctttctacagcaggtatgaataaaaaatcttcttaaatgcacaggaaactttctctgggatagaccatacgctaggtc

SEQ ID NO: 1489 - DNA, 120 bp, synthetic construct
  source 1..120: mol_type = other DNA
aaaaccacagcatcatctcaacagacgcagaaagaagattcaacaaacttgaacaccgtatcatgacagaacagtcaacaagcaagtaatagtaagaaatgttcctaagctaataaaggg

SEQ ID NO: 1490 - DNA, 120 bp, synthetic construct
  source 1..120: mol_type = other DNA
ttgcatctacaacaatgttatgctggcataatgatagacacacagatccatgaaatagaattgaaataaaccctcaaatttgtggttgagtcttgagagggtaccaagacaattccatgg

SEQ ID NO: 1491 - DNA, 120 bp, synthetic construct
  source 1..120: mol_type = other DNA
cactagaaggcaaggcgaggctttttttttttttttcttctgtatctcagggataagagtaagagttcttagaaacataatcacttccaccaaagacagacctggagatgccagacacaa

SEQ ID NO: 1492 - DNA, 120 bp, synthetic construct
  source 1..120: mol_type = other DNA
tgaatcaatctgtgaactatgaaagcttctcccaaaaggttccacaaaacaaataggattgagggcctactaggtaataggcactttggggacccagatacaagtcagatgtgtactcta

SEQ ID NO: 1493 - DNA, 120 bp, synthetic construct
  source 1..120: mol_type = other DNA
ccctgctctgggtttccttatctgtatgagcaggaaatagatagtcaataagatccttcccagctgtaccatctatgatttcacacaattaacaaaaaagtcctctttataggaccctta

SEQ ID NO: 1494 - DNA, 120 bp, synthetic construct
  source 1..120: mol_type = other DNA
ttttaaaactcagagtttttttgcaccaatctctcaagagttggaaccagtcaatgtgctttgtaaagtactgaaaaggcaaagcatggagaaggggatgcttgcttgtgcctggagttt

SEQ ID NO: 1495 - DNA, 120 bp, synthetic construct
  source 1..120: mol_type = other DNA
aaactgaaattcagagaattgaactgatttgcccaaggttacacaattatttaaagcactcagatctcctggttgttaggtcagggctgttcatgaatgcagctgacccatatcaagcaa

SEQ ID NO: 1496 - DNA, 120 bp, synthetic construct
  source 1..120: mol_type = other DNA
cagctagacagacctgggtaactctgacccttaaagaagtaacagtggagtccatttggtcaccttacctcccacttgttaactacgtaattttccacctttgtcttaaggatttttatt

SEQ ID NO: 1497 - DNA, 120 bp, synthetic construct
  source 1..120: mol_type = other DNA
cactctgcacttgtggttccttgatacctcggaattctttaaacctgcttgattagccaccagagataaatggcttagtcattttaaagttttatggaacatctgtgcactgtgatcaca

SEQ ID NO: 1498 - DNA, 120 bp, synthetic construct
  source 1..120: mol_type = other DNA
caggtattattatattaatactcattttccagattaggaatttgctgcaaatggttgaaggctattctcccagattccacctgaccttcagagggctgcctttaggaatatgtaggcgga

SEQ ID NO: 1499 - DNA, 120 bp, synthetic construct
  source 1..120: mol_type = other DNA
gaacttgaaatctgaccacctatcaagcttagaaaaggcacagtctcttctcacatctggaattcatctggactccagggtttctagtactgaaacaacatgtagctgctttaaatagaa

SEQ ID NO: 1500 - DNA, 120 bp, synthetic construct
  source 1..120: mol_type = other DNA
aaaaaaaaggatgggagatacgtgcagagagaaggccatgtcaggccagaagcagaagtgggagggatgtggctgcaaggaatgccaaagactgacggccaccaccagaagctaggaagt

SEQ ID NO: 1501 - DNA, 120 bp, synthetic construct
  source 1..120: mol_type = other DNA
atatgagatcatttaaattatcatagagaactcacagatccttgtgtatggactctgatttgaggggcaagaacatcagattttgtccatttctcgctccctcttgcctttcctgactcc

SEQ ID NO: 1502 - DNA, 120 bp, synthetic construct
  source 1..120: mol_type = other DNA
atcatttccaaacaagctaaattaacactaattgagaagcagatgtccaaatccttctctagagctcgctggtttcatcattaaaatcttcacaggaagcaggctcataggtgcaccgaa

SEQ ID NO: 1503 - DNA, 120 bp, synthetic construct
  source 1..120: mol_type = other DNA
taatttgtaaaaacatagtgttagacaaatgattctcaatgtcccttccaggtcgaagatctctgattctaacttgaaacctgaaagggacaaagcgtgactctaccactgggtaaggtt

SEQ ID NO: 1504 - DNA, 120 bp, synthetic construct
  source 1..120: mol_type = other DNA
aggatgtttcttctgaagggcattctgcgttctccaggttgtaattttatttcttttcctactgtttctaccagattgctcttgttacgcccaatttgcaaaaggagaaactgagtcaca

SEQ ID NO: 1505 - DNA, 120 bp, synthetic construct
  source 1..120: mol_type = other DNA
taattaggcagaggtgggccagtgatagatcacagggagaaaagtctaaaaataaatttcacacaatgcaatgaaaaaggtcccatggagatgcacggagaagaaaagaaatcatcccca

SEQ ID NO: 1506 - DNA, 120 bp, synthetic construct
  source 1..120: mol_type = other DNA
acaacaaaaaaaatgaagaaaacacaacaaccagcaaatagggacattttacctcttctcaaggcaactctggatcaattctcagagcaacaaggctctgaggtccatgaggcctggatt

SEQ ID NO: 1507 - DNA, 120 bp, synthetic construct
  source 1..120: mol_type = other DNA
ttcttttccagtcttcatcagggtatttgatatcatttaagcagagtgtttcattcattaatcacttaaaactgatggtgccaggcacttactcactggaagaggagtaaggaaccaacc

SEQ ID NO: 1508 - DNA, 120 bp, synthetic construct
  source 1..120: mol_type = other DNA
gggtggggtggggagaaagggatgttgcctttgttgcagtttcacaattggtgtagtgaaagggtgaacaaaaactgataaggagtcaaaactatctttttaaatgacaaaggacagtaa

SEQ ID NO: 1509 - DNA, 120 bp, synthetic construct
  source 1..120: mol_type = other DNA
aaaatcatgacatccactgcttgattctcatttcatccagtattgcacaaaggccataaacaatctttctttgcatgacaatcttccaatagctgcaggtagctgtcttgccatgccata

SEQ ID NO: 1510 - DNA, 120 bp, synthetic construct
  source 1..120: mol_type = other DNA
aaatgtgacataattggagaaaggggctgtgttaaattgtaaaagctctttacttgtgtgaaattggaggaaaggtctgcaattatcactgtctggactccccagttacctgtgaattgg

SEQ ID NO: 1511 - DNA, 120 bp, synthetic construct
  source 1..120: mol_type = other DNA
agctgctcgaggtgacttttatgagccctaaagtttacaaaaccctgatttgtgtaaataaacacacacaaagagtgcctgtttttcaacgagcttaattacatcctgtgggtctgatgt

SEQ ID NO: 1512 - DNA, 120 bp, synthetic construct
  source 1..120: mol_type = other DNA
tttgcatatttgtctcctaaacttgaagttcctggagaataagggccataactcattcaactttgcgtatcccctagaaactaacataataaatgacctccagaaaacacacgcagccac

SEQ ID NO: 1513 - DNA, 120 bp, synthetic construct
  source 1..120: mol_type = other DNA
ttcagattgaagaactgtcatacatgggaggaaaataagcagatacgataattaaatgcaatgcaggaaacgggattggctcctgaactggaaaaatgagtaggaaaactggcaacaatc

SEQ ID NO: 1514 - DNA, 120 bp, synthetic construct
  source 1..120: mol_type = other DNA
tcaatttaattcaagtagttaataacttggattaaatgcaatagttggattaacacacgcagtgctcccccaaaagagttctccagcttttggtgggcaggttaataactttggctaccg

SEQ ID NO: 1515 - DNA, 120 bp, synthetic construct
  source 1..120: mol_type = other DNA
agaaactcaaatctagctctctctcattccgagctcttgaaaagggtcctagacgtcatctaatccagctcttcacttcttcgccccatctttcatgtctatttcataatagacatttgc

SEQ ID NO: 1516 - DNA, 120 bp, synthetic construct
  source 1..120: mol_type = other DNA
gtgcaaggaacacagccataagtttgaggccaaagagctctagattaaaactgagcctggtgggaataccactttatatccattaggatgcctattatcaataaacaacaacaacaatgt

SEQ ID NO: 1517 - DNA, 120 bp, synthetic construct
  source 1..120: mol_type = other DNA
acaaaatagaacgacatttctactgcaagatgaccacactcaaagaagaaagaaagtaatcacaagccagtctggagaccctgctttctccattgtatgccttaaaaacaaacagcttct

SEQ ID NO: 1518 - DNA, 120 bp, synthetic construct
  source 1..120: mol_type = other DNA
caatactttaggaagtcaggaaggtctcagatgctactctcaccaatagcctttgtgaaagcttaccggtgtgcttagcttataggaaaaaaagactctaagaatgacaaatggagacat

SEQ ID NO: 1519 - DNA, 120 bp, synthetic construct
  source 1..120: mol_type = other DNA
ccagtcatacaggaccacacttttccattttaataggcttataggtcacttgggaaatgtttcaaaatataagttcctgggactcacctagaggtccaccttcagtaggactgaatttat

SEQ ID NO: 1520 - DNA, 120 bp, synthetic construct
  source 1..120: mol_type = other DNA
tgattaaaatccatgttttgtaaaaagcagcctcagaaaggttatgtgactcactccaaatctctaagcaagtacacagtggatcctcagctggaactcagcttgactcattgcaaatct

SEQ ID NO: 1521 - DNA, 120 bp, synthetic construct
  source 1..120: mol_type = other DNA
ttactcaagggagcacacaaatgataagaaaagtgaaacagacttattgctgctgtgcagaaaagtttcggtgttctgaataggagatcaaatcagccaaaatattctcttcagccaaag

SEQ ID NO: 1522 - DNA, 120 bp, synthetic construct
  source 1..120: mol_type = other DNA
cgaaatatcaacatggacaagagtttagaagaagttgattccatccctcacggatgactttgaggggtttaagacttcattggagaaagcaactgcaggtgtggtagaaacagccagaga

SEQ ID NO: 1523 - DNA, 120 bp, synthetic construct
  source 1..120: mol_type = other DNA
tttagaccttagatggatttttacaggatggtttagatgcccacttctcttaacatgtgaaatacccaaggaaattagtgcttacgtgctcccttgttttggattgactgttgcagcaag

SEQ ID NO: 1524 - DNA, 120 bp, synthetic construct
  source 1..120: mol_type = other DNA
taggtagatctagttactcatgggtcattcagtagagccctcagaaaagttacactttcccagtattaggattaaattagtcccacaataaaggctactctgagtctgacacagcaaaac

SEQ ID NO: 1525 - DNA, 120 bp, synthetic construct
  source 1..120: mol_type = other DNA
tcacaggacagctcccccaacaaagtattaactagcaccaagtgttaatagtgacaaagttgagaaaccttgttgtagaggaacagatcattagacttgaagacaaagcaatagaaacca

SEQ ID NO: 1526 - DNA, 120 bp, synthetic construct
  source 1..120: mol_type = other DNA
ctgatttcttccttcttctttaaaaagccgtgaaaacactagtacagacctcagaaaagaatctcccaagcctctgtgttgacatcttagttcccgtcatctattgtttctatgtccaga

SEQ ID NO: 1527 - DNA, 120 bp, synthetic construct
  source 1..120: mol_type = other DNA
tatctttagtggacatctgtaattttgtgtgatgtgtgatcagtatttcttcttttttgggaactgccgcatctccagttgtttctggtaaggctgttaataatttcacccctcctcccc

SEQ ID NO: 1528 - DNA, 120 bp, synthetic construct
  source 1..120: mol_type = other DNA
ttcctctcaaagtgtggctcgggggccctgagatcttttcagggaccctcaagattaaagctcttctcataataatactaaaatatcatttttcttttctacacacactctctcatgagt

SEQ ID NO: 1529 - DNA, 120 bp, synthetic construct
  source 1..120: mol_type = other DNA
gtaaagatcatactatgaagctttcctaaaggaagctgctcttatttgcagtctgagtggaggagtaggcacctggtcaatgagataatgaaaagatgagtttccagaaccattccacat

SEQ ID NO: 1530 - DNA, 120 bp, synthetic construct
  source 1..120: mol_type = other DNA
ggtttctgcctgccaaaagaaaatgaaacttctctgaagaacaacaacctttagagcttctggaattcaataaaatattaccagaaaggacaggaaacagagccaaatgacccaaagcca

SEQ ID NO: 1531 - DNA, 120 bp, synthetic construct
  source 1..120: mol_type = other DNA
ggataaaagaaaggatggtggctagtggagtttaagtaatcaggttcttgccttgttcaggagtggcaagcatactaatttaagatatactctaatggtcactagggtaaccatgaacag

SEQ ID NO: 1532 - DNA, 120 bp, synthetic construct
  source 1..120: mol_type = other DNA
gttgtggcagactgcattttccaaatatggtcacagcaatatttccgttcccacatgctctcacagaacttgcagagtagaatgcagtggcaatgatgctaaataactttcttttctttt

SEQ ID NO: 1533 - DNA, 120 bp, synthetic construct
  source 1..120: mol_type = other DNA
ggtacttgtgcaaatatagacaaacagagaagtttgtcttctctgaatgaagtccaggaacaaacctattcttaaaaccacctgattcacagcaaagatgccattgcaatgcagtggaga

SEQ ID NO: 1534 - DNA, 120 bp, synthetic construct
  source 1..120: mol_type = other DNA
gttgagactatggagcacattctcaatacattgctgggaggagttaagttggtacaattactttggcaaactgttccagaatatcttctaaagctgactagacacacatttttaccctcc

SEQ ID NO: 1535 - DNA, 120 bp, synthetic construct
  source 1..120: mol_type = other DNA
gtttcacaagacagaactgcagtacagaaacgtattcgtgaattaattttttattctgttggatttggggaggtttagttcaggctgattttctagtgcgatataagtgggggagaggtg

SEQ ID NO: 1536 - DNA, 120 bp, synthetic construct
  source 1..120: mol_type = other DNA
tgagcgcattctaggttctaggcactgcactaagctctgaagatcaaaccaaggcctagtttctggcctggatgatcctacagtacagtagggacataaaattaccacaatcattttaaa

SEQ ID NO: 1537 - DNA, 120 bp, synthetic construct
  source 1..120: mol_type = other DNA
agcatttcttgctgtgatgtcacactgcagaaattagttgtgagatgtatagctaggaatttgttactaatgactctctgggtattgatcaccttgcccttttatcgttggttgacactg

SEQ ID NO: 1538 - DNA, 120 bp, synthetic construct
  source 1..120: mol_type = other DNA
aggcacttctgccagcagataacacgttgattttaagcaaaaaagaaaaagactattttcctgagtctgagttcagtattgatgagctgtgcaaagcactgtccttcttgatgtatgctc

SEQ ID NO: 1539 - DNA, 120 bp, synthetic construct
  source 1..120: mol_type = other DNA
tgaattcagttactgttaagacatgtccccagagactgactagcttcaggaacacagaaataaatctagtttctggccctgcaaagaataggaccctagacctaagtgaatgccgtctaa

SEQ ID NO: 1540 - DNA, 120 bp, synthetic construct
  source 1..120: mol_type = other DNA
tctggtacaggaaatctttgacctaaaatataccagacacataactcaaagttgtttgttcttcctaaacagcccttctcactcccttcaactaaccgttcctgggcattttgttctttc

SEQ ID NO: 1541 - DNA, 120 bp, synthetic construct
  source 1..120: mol_type = other DNA
tcattcacccaagccatgcagctggtaatggcagatctggactagcacttggaatcctggtttgtagttcagtgctttaactattttaccatttcatcattttcctcttagtaagaaaac

SEQ ID NO: 1542 - DNA, 120 bp, synthetic construct
  source 1..120: mol_type = other DNA
tgattttcaaaggctcttaagcctcaattcttcccacaaagaaagaaggtgattaattggctgatgtcctgccttccttaaaagaaagaatatgatcagtgcagtggacctacgaggaaa

SEQ ID NO: 1543 - DNA, 120 bp, synthetic construct
  source 1..120: mol_type = other DNA
ctattcctacgcagttattgggctgagaagactgaatgagcaacatgtgttctagaataggaaacccaaagggcaggaacttggaaaagactgtggtaaatatttgcacttgaaaagaga

SEQ ID NO: 1544 - DNA, 120 bp, synthetic construct
  source 1..120: mol_type = other DNA
aagtaggtaattagatggattgattgatagaatgactttgtcttcttaacatgatttctgttgatccattcttgcattcttgagacaaatcctaatgggtcattacacacacacacacat

SEQ ID NO: 1545 - DNA, 120 bp, synthetic construct
  source 1..120: mol_type = other DNA
ctgcctagttggagtgaaccttttatctaaataattctgcccttcttcggttccagaaaatactcaaattattttcccaagtattgatcctcctccatctcttccaatctcctcttctga

SEQ ID NO: 1546 - DNA, 120 bp, synthetic construct
  source 1..120: mol_type = other DNA
ttccatttctgttctgggtttgagagatggaaacacggtgtctattgttcaggacagttatgtcattcccatgttatctctccttgtgctgcatttagagcagagtagtgcaaaatatac

SEQ ID NO: 1547 - DNA, 120 bp, synthetic construct
  source 1..120: mol_type = other DNA
gcttttctaaagtggagtcctaaaagggtaacaatggcgaatacaatgccaactaactgacctatatcaatgtttccagaagagttagaggggatcattttcttcaggaagcaggactat

SEQ ID NO: 1548 - DNA, 120 bp, synthetic construct
  source 1..120: mol_type = other DNA
cagaggggcccagtgtgattggagttactttgggcttctctgctcagtttattttcttgggttgttattttttttttctgttggactcttttatactagttatacacatatgcacgtgca

SEQ ID NO: 1549 - DNA, 120 bp, synthetic construct
  source 1..120: mol_type = other DNA
gggggagggaatggggccacaagctctgaaaagaaagcaaaagaactaaaagattctgccaaaggagaaccccaaactgatcattgtcaggatctaaaaatagtccacttaaatcagaat

SEQ ID NO: 1550 - DNA, 120 bp, synthetic construct
  source 1..120: mol_type = other DNA
gatgttatattaatctgatgttcaatactgccccaaatagcaaagcatgaaaaatgtgttatttaaggcatgaagcagtgttttacagtgaactccaccaggatgagacaccctggagcc

SEQ ID NO: 1551 - DNA, 120 bp, synthetic construct
  source 1..120: mol_type = other DNA
tacatttcagtgagaagtaatcaaaataaaaatgtcattctttccatccatgttcataggcccctcaattctttccagggtcctctgaggatccatggtccccaaattaagaactacgct

SEQ ID NO: 1552 - DNA, 120 bp, synthetic construct
  source 1..120: mol_type = other DNA
caggctcggagagaagcacaaaatgagagaagagaaacataccaggccttctcttcttctaagcaaaacaaatttttctcaggcacttttcacagatgtctaatgttcttaactaaccac

SEQ ID NO: 1553 - DNA, 120 bp, synthetic construct
  source 1..120: mol_type = other DNA
gatttctaaccagatggtatgggagtatttagaaaagaatgcaggaatcattgaaaagccactgtgggtaaactcagaatcaagcagacaaaccaatctcgttttctcttctgataggct

SEQ ID NO: 1554 - DNA, 120 bp, synthetic construct
  source 1..120: mol_type = other DNA
ccaccaatgtgatgggtggcttagatgagattaggtatttggatttcctggctcagagcctgtcacccagaaggtgcagtataaatggcagttttgtttctattaagatttgtgataata

SEQ ID NO: 1555 - DNA, 120 bp, synthetic construct
  source 1..120: mol_type = other DNA
gacctcagaagggactattttgtttgtttcatgtatttattcattcaaaacatagatatcgctcacctgcgatagcagactgtgctttatgatgctttcacccaagatgctagcatgttc

SEQ ID NO: 1556 - DNA, 120 bp, synthetic construct
  source 1..120: mol_type = other DNA
gaaatgcacatttcagtttcagttaagagaatcctaacctagttgaggaaaagagcacaacctcacatttcctttctaaaagaggaacgttttacagaactcctatgttgagatccccct

SEQ ID NO: 1557 - DNA, 120 bp, synthetic construct
  source 1..120: mol_type = other DNA
tttgctgtcactgctcaaaaaggttgttgtaaggatttcaggatagtgaatccacagcacctggaacaatgaccacaatcatcatcacattccgggcactatagattcaccatcttaaaa

SEQ ID NO: 1558 - DNA, 120 bp, synthetic construct
  source 1..120: mol_type = other DNA
tcaaaatacaatttctaatgccattactactaacttcattaggattcatttcttcctctcccccactctcatttggccaaatgcatttcagtaagtgcacatgggagctgagaggatgat

SEQ ID NO: 1559 - DNA, 120 bp, synthetic construct
  source 1..120: mol_type = other DNA
catttggaagctagaagatcacctactccaaacactcccattttgcagaaaaggagtccaagactcagagtaaacttctcctccccatcaaaaagaaaaggcttgttagttaagttcatg

SEQ ID NO: 1560 - DNA, 120 bp, synthetic construct
  source 1..120: mol_type = other DNA
caacctctttatcagattgttcatcattattgctcaggctgaaaatccaaaccccagctctcctcttccaaccctcatttctccccgggtggactcattttcaccaccgtgaaccacctt

SEQ ID NO: 1561 - DNA, 120 bp, synthetic construct
  source 1..120: mol_type = other DNA
tgtcccttgctaagtcttccttctgtcctctccactgattctttcaagtccccaccatcattccccttccttcactactgaatgtcaatgtcttattcctcatttacttggcattcatcc

SEQ ID NO: 1562 - DNA, 120 bp, synthetic construct
  source 1..120: mol_type = other DNA
catttatctcttgatggacacttaccatttaacaaatttttaatgagctcctctttgccaggtcctgtaataggcacaggtacacgctggagaataaaacaggcatcatccctgctcttg

SEQ ID NO: 1563 - DNA, 120 bp, synthetic construct
  source 1..120: mol_type = other DNA
gagtaaacaggtatgcagtgaatccaaaagcaaaagattaatgcaaagatgctgcagaccaagaactaagacagttcagggtagattgtctttatgcagggtgggcaactaactagtaat

SEQ ID NO: 1564 - DNA, 120 bp, synthetic construct
  source 1..120: mol_type = other DNA
acaaggaaccaaatatattaattaattaccagttgttggtggtgctaaaaggagctaaacacaacactgagacagaggaaaacacagatcacagtgggaattcctgaggtggtggttttc

SEQ ID NO: 1565 - DNA, 120 bp, synthetic construct
  source 1..120: mol_type = other DNA
gaggctcatcagcaaggctggacttgatcccatagcagatagggagccagtgactgatgctaagcagaagaataacacagtcaagctggcattttattaggttggtccaaatgttattgc

SEQ ID NO: 1566 - DNA, 120 bp, synthetic construct
  source 1..120: mol_type = other DNA
tgaatatagaagaaaactcaggcctgacataatgtaagtggctgcatatattgtaataaaacccacatggactcgtgcagcaatcccccgaaataatgagttcaggtttgctacagattt

SEQ ID NO: 1567 - DNA, 120 bp, synthetic construct
  source 1..120: mol_type = other DNA
acaaaacaaaaaaaaaaagttaagcaggatttggatggggtaaagaagaccgaaacagtgttttgggtgggacactggggaatgacccagcttgtaactgacaaagacacttaaaggaag

SEQ ID NO: 1568 - DNA, 120 bp, synthetic construct
  source 1..120: mol_type = other DNA
actgattggtcaaggagtgaattcacaccaatcactgtatgttttattggacatttcaaaatcctattcatgacttacatgtcttgcgtgagtgtggttagcctgagtcctgagcatgtt

SEQ ID NO: 1569 - DNA, 120 bp, synthetic construct
  source 1..120: mol_type = other DNA
catctaattcagcgtctcccaagcgtgcccagtcatggagatcatcaaggtgtgcattattaaaaagatgcccaggctcctttcttggtgattctaattcagtgtgtatttttattttaa

SEQ ID NO: 1570 - DNA, 120 bp, synthetic construct
  source 1..120: mol_type = other DNA
gggctttatttacaaggcaatcgaaaggtagtttttaggtttagcaattgtgatctgtttgtggttcaggtttgggacttggcactttgtaagaagaagaatgaccacccagtggcttta

SEQ ID NO: 1571 - DNA, 120 bp, synthetic construct
  source 1..120: mol_type = other DNA
ggggaaaccagaaacacctatacaaaacaatttgcaaacaaagagagtattggatgtttatagactgaggaaacagagtatggttgaacaacttccaggtattacctgatcaggtgggac

SEQ ID NO: 1572 - DNA, 120 bp, synthetic construct
  source 1..120: mol_type = other DNA
tgggtgcagttttaaactactgtgaataatgctgctcttaattttaatgcataaagttttgtggggacatacgttttcatcctcttgagtaaatgtccagacagggagtagaatggctgg

SEQ ID NO: 1573 - DNA, 120 bp, synthetic construct
  source 1..120: mol_type = other DNA
cacaattgcttcaaagagaataaaaatacctaggaatccaccttacaagggacgtgaaggacctcttcaaggagaactacaaaccactgctcaatgaaataaaagaggatgcaaacaaat

SEQ ID NO: 1574 - DNA, 120 bp, synthetic construct
  source 1..120: mol_type = other DNA
gaaaaaatgctcaccatcactggccatcagagaaatgcaaatcaaaaccacaatgagataccatctcacaccagttagaatggcaatcattaaaaagttaggaaacaacaggtgctggag

SEQ ID NO: 1575 - DNA, 120 bp, synthetic construct
  source 1..120: mol_type = other DNA
taaaaatatcttctcctctttcccacctgtatccaacccatcactaatcctgcccattgtctcttgtacatatctgcaagtcattcacttttctctatgcctcactctgtattcaggact

SEQ ID NO: 1576 - DNA, 120 bp, synthetic construct
  source 1..120: mol_type = other DNA
aggcacaggcaagaggggaaagttcaattagaggaagatgttttcataagccaattagaaaacagggagatattttcacccttcctctggagattttggaaatcctatttacacagctgt

SEQ ID NO: 1577 - DNA, 120 bp, synthetic construct
  source 1..120: mol_type = other DNA
atctctggtcagggatgctactgtttcaggcctgcctggcacaaaatacatcagatatccttatcatcatctactttcactcacacattcgcatgacactaattttgagttttaatttgg

SEQ ID NO: 1578 - DNA, 120 bp, synthetic construct
  source 1..120: mol_type = other DNA
attgcagccttgctttttcaccagttccagaacatcacttaatttttaaactacagcgttggctggtgtcctttgtgtttttgtgtatgctttgttttacctccaaagacttctggccgt

SEQ ID NO: 1579 - DNA, 120 bp, synthetic construct
  source 1..120: mol_type = other DNA
cttcctctgtatgactctagaggacaaatagaggatcaaccagatcatggtgaaataggagaaggaactatcatgtgttgggtgctgatatgattctaggtgctttgtatgcattatcat

SEQ ID NO: 1580 - DNA, 120 bp, synthetic construct
  source 1..120: mol_type = other DNA
caacagaagtcagtgtggttaagtggtgatgtaaagactagtaaactaaggagaaggaggaattgggggaaaattactaagtagaagtcctgactggaagaacaggaaatatgcaggaaa

SEQ ID NO: 1581 - DNA, 120 bp, synthetic construct
  source 1..120: mol_type = other DNA
aggagaagtcactgagatgatcattctaggactgcaaggaacgtcccacagaatgaacagcacaatgcaaaataccaatttgactgtgggttctccttcacactccttttggtgaattga

SEQ ID NO: 1582 - DNA, 120 bp, synthetic construct
  source 1..120: mol_type = other DNA
ctgctctctaaaacaggcctcttctgtgcatcaaagccttataactttgccatttattgcggacaggaaggactgtatgcacaccatagaaaaatgcagctgggatttataaacaataaa

SEQ ID NO: 1583 - DNA, 120 bp, synthetic construct
  source 1..120: mol_type = other DNA
cctggctcatccactgaaacccacttgtgctggtgtaaaaaatagttgtatgcacagattgtccatataggtacttggagttttcgttagggaagaagatactaccagagagaaagtgaa

SEQ ID NO: 1584 - DNA, 120 bp, synthetic construct
  source 1..120: mol_type = other DNA
tttttttttatgcccatcaatgaaagcaatcgtgagtaaaagttgtacctgccaggaaaggaattgtcctttgtacttcatgacaaccttcacagttgaggtgcattttgacagctgctt

SEQ ID NO: 1585 - DNA, 120 bp, synthetic construct
  source 1..120: mol_type = other DNA
ctcacttggcaaactgaacatgcactgtacagatatttaccatgaatattaacaacatagtatctgtttcatgagaacaaaaaggagggctgtggctctgttgttaacctgggacctaga

SEQ ID NO: 1586 - DNA, 120 bp, synthetic construct
  source 1..120: mol_type = other DNA
ttaatcgctgaaggtccagttcctcttaagaggactagcattttagtagttgcttcaatattactacttaaagtggggaggaatatggtaaatccaggtatactcaatgggactggtact

SEQ ID NO: 1587 - DNA, 120 bp, synthetic construct
  source 1..120: mol_type = other DNA
aataaatgatcaccttttttatttctgatctcatttatcatgcaggcaagattcgaagagaacttttgaccatggaggctgaatgccacaggctctgatttcctcagctgtcaagacttg

SEQ ID NO: 1588 - DNA, 120 bp, synthetic construct
  source 1..120: mol_type = other DNA
cctctggactgaggcttatttgtgctttaaaatgccctgacagcttatcttggctcaagcctgagtttcctcaacgacttccggtttaaaatatcttttcaagtattagtaatccaaatg

SEQ ID NO: 1589 - DNA, 120 bp, synthetic construct
  source 1..120: mol_type = other DNA
gccatttcacagctcaccattttacataagtattatcctattcattcagttcatggggactttatggccactaatttctagctaagatgtcctatgcctatgtgactctgtgatcagccg

SEQ ID NO: 1590 - DNA, 120 bp, synthetic construct
  source 1..120: mol_type = other DNA
ttttttttttttttttttgcaagattctttcatatttccctttctctttcccaactccaccctttctccctaagaggcttcaggtctcctggaaagagtccagtttggaccacatcactt

SEQ ID NO: 1591 - DNA, 120 bp, synthetic construct
  source 1..120: mol_type = other DNA
aagatggatatgagtttaggaatggggagagcattctttttgatgtcaagatttcattcctgatgagactgcagcagcttgtagtccttctaagtgcaactaaatacagatgggttaatg

SEQ ID NO: 1592 - DNA, 120 bp, synthetic construct
  source 1..120: mol_type = other DNA
gctcaacctggacctaccgattaaaggacaatcatgagtttgtaagtagatgtcacagactctggaaatgtgtaaccaaaagccaaatcacctggtataaaatcaattttggacatggag

SEQ ID NO: 1593 - DNA, 120 bp, synthetic construct
  source 1..120: mol_type = other DNA
ttaattttacttgctcacttctgctttgaagttttgggccattagatgctgctccttttgcagtagaaatctgtttcaacaagatccctgacttccacagtgggaagcagctaatgagta

SEQ ID NO: 1594 - DNA, 120 bp, synthetic construct
  source 1..120: mol_type = other DNA
agagaaaaacaaagatactggcagaatggactgtgcaaaagttgaagggaagaggagtcaggacaaaggtagatgatgtttggctgcagagtaggacactggagagaagactgagaaata

SEQ ID NO: 1595 - DNA, 120 bp, synthetic construct
  source 1..120: mol_type = other DNA
ttaaagtcagtaagaatttatctctcctctctctctttttggtttctatttattttgctcaggatagcttggggctaggcaaagtctcctggggtcctttctaactaagaaggatggtct

SEQ ID NO: 1596 - DNA, 120 bp, synthetic construct
  source 1..120: mol_type = other DNA
ccaagtcctaaactcttcttctcataattcacctctctgagggttatataccaacagttttaatcgattggccaaatactccatgaactttcccgctaagatgtaaggaagtaagctgtg

SEQ ID NO: 1597 - DNA, 120 bp, synthetic construct
  source 1..120: mol_type = other DNA
agacaaagctaaggaagtatcaaatggaaataaaaaagttattgaaaactggaataaaggtaacctgtgttacacctcagcaaataattgggctgcattcatgttcatgccttagggatc

SEQ ID NO: 1598 - DNA, 120 bp, synthetic construct
  source 1..120: mol_type = other DNA
catggtgtcaaagaagattattttgaagctttaagatttaatgactgccctgctgtgttccacacttgtgtgatgcctattacccctttgttttggtcagtttctccactttggaacaag

SEQ ID NO: 1599 - DNA, 120 bp, synthetic construct
  source 1..120: mol_type = other DNA
agatgaggctatttagtcttcctgccctttcctgtactttttctcttccacacccccctcccaaatcagctgtacttttcctttaccttgtcaagattgtgtaagaatgattaagtattt

SEQ ID NO: 1600 - DNA, 120 bp, synthetic construct
  source 1..120: mol_type = other DNA
cagctactgtccaaaatttgcttcctctttaaggtaattcattgaaaggactctgacaggttctcttgagcacagggtagatcatatcattcgactaggtaaaaaaagttcaagactcta

SEQ ID NO: 1601 - DNA, 120 bp, synthetic construct
  source 1..120: mol_type = other DNA
agtttatagactattccagacattagccttttttccctgtttccatagaaataccttttatttatgatctgtttgcctgcatcatatatagagcctagcctacctgcaatgccacctcct

SEQ ID NO: 1602 - DNA, 120 bp, synthetic construct
  source 1..120: mol_type = other DNA
aagtccccattctttttgtaacttcaagatggcaaataagcttctgcatcccactgaggggtgggttaatcactctgtgactttcctttgtgtgcacattaataaattggtgtgcttttt

SEQ ID NO: 1603 - DNA, 120 bp, synthetic construct
  source 1..120: mol_type = other DNA
tcatccgtggcattttgcaatgcatatagctacagatctgtacaaaaatttatccgtggcatttgctggcctctgtcaatcagaaaacacatgcctctttcatctctagcaaatcttgtt

SEQ ID NO: 1604 - DNA, 120 bp, synthetic construct
  source 1..120: mol_type = other DNA
atgttcaatccacttttctgaaccagaggcctcttaatcatattctctgagtgagaacataaatacacacatgcatggatggatggatttccatctcaatcaatcaaacaggatccaggc

SEQ ID NO: 1605 - DNA, 120 bp, synthetic construct
  source 1..120: mol_type = other DNA
acattccatatctggctttcagaatgtcgtaactagacataaacatgattgtcacgtagcttaatcgcttgttgtactggggagaaaaccaagaagcaaagaagttcaggacttgcccaa

SEQ ID NO: 1606 - DNA, 120 bp, synthetic construct
  source 1..120: mol_type = other DNA
gttagttgtagcctagaagtagtagtacaatttgcacaattaggagcctctgcaaactgaaaaggcaaaacaacctttcgggtcctacttaactgaggcagaagttccctagaaataata

SEQ ID NO: 1607 - DNA, 120 bp, synthetic construct
  source 1..120: mol_type = other DNA
gctaggctgagttctcaaaggttctagaatgttctaggcttctaacagatcttttcacttcaggtctaaacttcctcctcatacattctacacacagaagtcagaaccatcttcttacat

SEQ ID NO: 1608 - DNA, 120 bp, synthetic construct
  source 1..120: mol_type = other DNA
tccttcttttattgagactggaagtttaaaaaaaagacttgatttaaccaggcttccttgcagataggaacagccatgtgacacagttctggtggtgaaatgtgagcagaattatgctcg

SEQ ID NO: 1609 - DNA, 120 bp, synthetic construct
  source 1..120: mol_type = other DNA
agaaggaggaggaggagaagaccagcaggaggaagaagcagaattaatttataaaatatcctcattgtaactctcttttgggaaataacagtggctgctgatctacaggtacacacacac

SEQ ID NO: 1610 - DNA, 120 bp, synthetic construct
  source 1..120: mol_type = other DNA
ctactttaaggattaagtatcttgccctaagcccctggataaaaaagtgcttcaattactattacaattcaggtccctttacaaatctatggctcttcccgctaaactaggacaagtcac

SEQ ID NO: 1611 - DNA, 120 bp, synthetic construct
  source 1..120: mol_type = other DNA
taggttgtttccagtttcttgctattgataaagttgttctcctgcttctgtgaatatcatactctttctggaagatagtccaccaaaatatgtacagtttaaaaaccttaaactgtgcat

SEQ ID NO: 1612 - DNA, 120 bp, synthetic construct
  source 1..120: mol_type = other DNA
cccaatgttgtgcaactatcatcacaacccaattttagatattttcaccatcccaaacaaaacctctgtactcacttaacaataactttccattaatccctcccctcagcacctggtaac

SEQ ID NO: 1613 - DNA, 120 bp, synthetic construct
  source 1..120: mol_type = other DNA
aaacaaaccacagtgacttttgtgcagaattttaaaaagtaaacatcggattgtatccattccctgcttccgtatctcaatctgcctctgggataaaaagttcacactaccagagcatgg

SEQ ID NO: 1614 - DNA, 120 bp, synthetic construct
  source 1..120: mol_type = other DNA
tgcctaatagaactgaactcttgatttatattagctaattgcttaccgatgaggctttatattttgtctatcagtaatgcacggcagtacctgtttcattgcacccctgtctgaactggg

SEQ ID NO: 1615 - DNA, 120 bp, synthetic construct
  source 1..120: mol_type = other DNA
tcttcaatgcttaaaagtcaggaaacagtaaccacttgaatatctggagctgttctggatttggaaaagggaaggaagatctggcaatgttgggcctattgtttcttttttggtggcaat

SEQ ID NO: 1616 - DNA, 120 bp, synthetic construct
  source 1..120: mol_type = other DNA
tgtctttcagactgttaaaagtataatcttgtgtagaaagaaacaatctaaaatgccaggctcaaggatccgaacattcaagaggctggatttgaaatcctgagcatctgtatgccccct

SEQ ID NO: 1617 - DNA, 120 bp, synthetic construct
  source 1..120: mol_type = other DNA
gtttctcaaggcttattactagccctcaagggccatgaggtagcctccatttggtgtttataagcttacactattcagtctgtgtcataagctgtaaatatttctcctccagacaatttg

SEQ ID NO: 1618 - DNA, 120 bp, synthetic construct
  source 1..120: mol_type = other DNA
aacaaaacaaaaggtatacataggtcctaagtgccacataatagtaataatggagattgagattttagggtgtgggttagggtggacatttgcatgtatctagtctcccgtcctctccct

SEQ ID NO: 1619 - DNA, 120 bp, synthetic construct
  source 1..120: mol_type = other DNA
attcagcattcattcattctctgcaccatttattccagttctggcatacggtggacacccataaatgactcctgaattgaactgaaagggactataggggtttagaaatgtgaaataatc

SEQ ID NO: 1620 - DNA, 120 bp, synthetic construct
  source 1..120: mol_type = other DNA
gttcacacattatcctgacttggcttgggattctagataagatatctgggcagaaacactttcacttgctctgtgccatagtgacctcagccccacatggctattaaacatttaaaatgt

SEQ ID NO: 1621 - DNA, 120 bp, synthetic construct
  source 1..120: mol_type = other DNA
gccacggcacccggcccaactctgtaaaatttactaaaaattattgattttttttttttacctaaaacaagtaaattttatagtatacaaattgtacctgaaatgtcattaatatgtaat

SEQ ID NO: 1622 - DNA, 120 bp, synthetic construct
  source 1..120: mol_type = other DNA
tggttaaagcatgtggatgcctcagtcccacccctagatatattgatttaactattctggggtggggtctaagtagtgatgtttcaaaaggttttcaacagatactactgagaatcactg

SEQ ID NO: 1623 - DNA, 120 bp, synthetic construct
  source 1..120: mol_type = other DNA
acagagggcttaacagattcgaaaggattgggtctatcttaagtagggtaccttctatttggggaaatgatttgtttcccaaaggtaagctaagatcaaatgcaaatcacatctcctgca

SEQ ID NO: 1624 - DNA, 120 bp, synthetic construct
  source 1..120: mol_type = other DNA
aaactagccctcaaagagataaggagcatacacacaagtaataatgtttttctaatgatttacagaagcactgtggcctgaccaagggcaaagaagttatgcaacccttttagactcctg

SEQ ID NO: 1625 - DNA, 120 bp, synthetic construct
  source 1..120: mol_type = other DNA
tcatctttccgttgttgctttatttttagtgtgtttgtgtggccacaacttggttcctgcatggttattttctagggttcaatctgagaggacccctgtgttctcttgctttattacaga

SEQ ID NO: 1626 - DNA, 120 bp, synthetic construct
  source 1..120: mol_type = other DNA
gccatctaatagcaccctgcaaaactgacagattgttcctctcaacataaactctgcttcactcctaaaaggattttattacctctcgcataggagtttgatattggcgagattaaatta

SEQ ID NO: 1627 - DNA, 120 bp, synthetic construct
  source 1..120: mol_type = other DNA
tatttttttatgttttaagattcaaggaactctggggtggtgctctatgtaaatgaagaagtcacagtgcaggagggatctttaagaaaagccagctgttctcaacaaccaaaggcaaca

SEQ ID NO: 1628 - DNA, 120 bp, synthetic construct
  source 1..120: mol_type = other DNA
ttttcctgattcattctgctatattttctcaattccaagtttagtttcagagaaagctcagcctattagcgttaaatactaggcttggggatgtgtgtaccttgtgccatctcttggagg

SEQ ID NO: 1629 - DNA, 120 bp, synthetic construct
  source 1..120: mol_type = other DNA
tgcttgaatttatccaacctgtgaggctcatcatcctgcccgtctcaaggaattttgcaagtttcctttcattcacccttagagcatggggttggaaatcaaatagcctgactttctata

SEQ ID NO: 1630 - DNA, 120 bp, synthetic construct
  source 1..120: mol_type = other DNA
agagcctctgggtagagtttatccttcattcctaagggaggctacttaggattatttatttctcattagactctctagggcatgctaagagctgcacaattaaactccttatatcaagga

SEQ ID NO: 1631 - DNA, 120 bp, synthetic construct
  source 1..120: mol_type = other DNA
gtgcagatggcgaacattttatccaaccagggctcatcagcaaagcaaaacttttatttacctgtttctgagaaaggaattagacactgttctctcagcagccttttaaactagaagcag

SEQ ID NO: 1632 - DNA, 120 bp, synthetic construct
  source 1..120: mol_type = other DNA
aaggtgggaagtcaagtcacattttcaagaatctaaggcctgtgttgagtatcatttccaaattgtggcacttgagggtctctctgctgatgtcacttaaagccattttggatttgttta

SEQ ID NO: 1633 - DNA, 120 bp, synthetic construct
  source 1..120: mol_type = other DNA
tatctgggtggttattatattctcatagcagcctctatttcttcaccagagcacctcccacaaatttaacacaataacctttagcgtctatgatcccctttctactgtcatcccttaaag

SEQ ID NO: 1634 - DNA, 120 bp, synthetic construct
  source 1..120: mol_type = other DNA
ggaaggaaacagacagtatacaaataaagactgattcatgcaataagggaaaatggaatgtgatgggcatgggtgggtggtaagaaaagatctcactgaagaaaagatctcactgatgag

SEQ ID NO: 1635 - DNA, 120 bp, synthetic construct
  source 1..120: mol_type = other DNA
tgcaagtccctgtgagagcctctctaaatcagactctatttctgattgcctcaacgttgtatgctgatgaactttgattcatgaagtggcctctctaggtgaaaattttcatagaactca

SEQ ID NO: 1636 - DNA, 120 bp, synthetic construct
  source 1..120: mol_type = other DNA
gactgattggctgctctaggtcatttgaagtgaaacagagacacatttttgagactaagaaatgaatgaagcagagagctaggatgtgctgaaaagcaaatccctaaataatcacaaggc

SEQ ID NO: 1637 - DNA, 120 bp, synthetic construct
  source 1..120: mol_type = other DNA
cgggagcccaagacttcacccacattctcgcaggaagtggcattggatgtttgtaaaataaactctggggtgtttgggttcagatctttggcctgcccttcactctctttgagtcatttt

SEQ ID NO: 1638 - DNA, 120 bp, synthetic construct
  source 1..120: mol_type = other DNA
tgacagttgatgaatcttttctggcaacctaaatggacactataagccaattcgtcagacacccaagacctgtctttttgcaggatatggtcttcaatcctcgaagccagactgtttctt

SEQ ID NO: 1639 - DNA, 120 bp, synthetic construct
  source 1..120: mol_type = other DNA
agaaagtctaaaaagcaatgtcagcaggagaatgcacactcttgaagaagtactagctatctgcactttgatgttctggagagcacctggcttgccaggccctttcttcagcatctctag

SEQ ID NO: 1640 - DNA, 120 bp, synthetic construct
  source 1..120: mol_type = other DNA
aattctaggagtcaacagcttaaggttctgcaccccccagaacccagactcattgtaggaaaagcaatgattcactctgaggcttcagaacagtattaaattacttgtccattattctgt

SEQ ID NO: 1641 - DNA, 120 bp, synthetic construct
  source 1..120: mol_type = other DNA
tgcagaaaacccagataccaggcaacactttaatttgggataataaggaagatgagcaacatgtggcaccgatcatgtaggtgcaagggctgtgatttctaaattacgctaaacagatgt

SEQ ID NO: 1642 - DNA, 120 bp, synthetic construct
  source 1..120: mol_type = other DNA
cttacttctttctttccaaattggaaagactgggcatttgcctctgctgagtttttgctcagtgatggcttaaatgtccatcctgccttgtttccttacctcttaggcagagagaaacat

SEQ ID NO: 1643 - DNA, 120 bp, synthetic construct
  source 1..120: mol_type = other DNA
agaccaagtgtgagagagacagagagagtataaaatacagatgcagagaaagagacagagacggaaccagagagaactagaatttttttccagtgtcaacttcacacaaggaaaagaaca

SEQ ID NO: 1644 - DNA, 120 bp, synthetic construct
  source 1..120: mol_type = other DNA
cctgatttatttactctgtgtctatcaacagtcaccactttctccagctctgcatcttgaacactctttccctggcataaaacaaaaacaattagcttctgtctttcttggatcttagcc

SEQ ID NO: 1645 - DNA, 120 bp, synthetic construct
  source 1..120: mol_type = other DNA
tttcagaccacatacatttttgttaagcagctggtttgttttgctttagctaaactgtgaattttataatggaaagcacttcgtgtgctttgcttcgtgtgtgctgcttaggaggcccac

SEQ ID NO: 1646 - DNA, 120 bp, synthetic construct
  source 1..120: mol_type = other DNA
tacaactgctttacagttgtaaaatatgtttatgttcttgctaacagcataaaaagcatgcctatttcatcacaacctcattggcattattgtgttattacagttaaaaccttcgccatt

SEQ ID NO: 1647 - DNA, 120 bp, synthetic construct
  source 1..120: mol_type = other DNA
ttccaattaataaaaaactaaagcctgagcagttaagtcctctagtcagttcccacaattaagggtgattatttttgaagatgtttagctgagattcccagactcctgggaccagttcca

SEQ ID NO: 1648 - DNA, 120 bp, synthetic construct
  source 1..120: mol_type = other DNA
tctaaaagcaacaacatatagaaatatcaaaatattgatttaacagtgaaggcctggttcaggggaaagaggtgggtagagtagagctctgtagcatgtggaaggccaactttccctgca

SEQ ID NO: 1649 - DNA, 120 bp, synthetic construct
  source 1..120: mol_type = other DNA
accttatcatctctgcagcgttcaaccaccgagcaagcgatgataggtgagatgtatcataagtaatttgctactgataataaactaccaaagcttgcaggtgatttatgcctgtttata

SEQ ID NO: 1650 - DNA, 120 bp, synthetic construct
  source 1..120: mol_type = other DNA
gtattttcagaatgctattacctagatcaaaagaatctaatgaacatttagagacctggcataaagtactttcataagtcagaatcagctgccaagggagtgggtatccctgtgccaggt

SEQ ID NO: 1651 - DNA, 120 bp, synthetic construct
  source 1..120: mol_type = other DNA
aaaaatcccactgcagtggcccctttccctatcatgatggtcctgaacgaagtcttaccatgcttcagcaagaatcatggaataatttttttttcttcaacacagtacccccatattaaa

SEQ ID NO: 1652 - DNA, 120 bp, synthetic construct
  source 1..120: mol_type = other DNA
gagttcattctgggttttactctttctgtcgtctttctcatgagtccgtctttattcttttcggcttgagatcccttgttgccaatcttaagatcactctctatctcaggtacaaagtca

SEQ ID NO: 1653 - DNA, 120 bp, synthetic construct
  source 1..120: mol_type = other DNA
aagttgaataacttatgaaactagagaaataacccttctcctaatatccctatagtgtgttaaacagtgtccctcagaaagatatgtactagtcctaaccgctggtacctgcaagggaga

SEQ ID NO: 1654 - DNA, 120 bp, synthetic construct
  source 1..120: mol_type = other DNA
ctatgtgactatggcaaaccagtgtattcttaggacaagcttctctatagtcaatgctgtgagtgttgagctgaagctgacagtaccagcttttaaagttgattgtgacattttcaggaa

SEQ ID NO: 1655 - DNA, 120 bp, synthetic construct
  source 1..120: mol_type = other DNA
tctttctcacttctttcaaaagaatgcagtgaagctgagacctctatttttctaaacaaaaatggggggtggggggcggggggcaaagaaggttgaaataaatgaagtatctgataaaaa

SEQ ID NO: 1656 - DNA, 120 bp, synthetic construct
  source 1..120: mol_type = other DNA
acaaattttaaaactaagtaagccaatgaaacaagtctgttgggataaagtggtagctcagaaggggaggcacagggaataagttttctgaagctgagagaattccaggactgaagggaa

SEQ ID NO: 1657 - DNA, 120 bp, synthetic construct
  source 1..120: mol_type = other DNA
actttgaaacagacacaaaaaaaatagcactccctcagaggctgagaataagacaaaggcaaccgcattctttaaggccacaggaaagtacctgggaaatatgagcctattattaaaagt

SEQ ID NO: 1658 - DNA, 120 bp, synthetic construct
  source 1..120: mol_type = other DNA
tgtggaaccttagccatgattttaataaaagttttaatatgtacagctgcttagctggagtcatgtttaattaaaaccttgaagactcctggagcgttctctcctcttcaccaagggagg

SEQ ID NO: 1659 - DNA, 120 bp, synthetic construct
  source 1..120: mol_type = other DNA
tactttaaaataacgatgtccaggcacttaagctatgtggtatggaaccctgtaaaatgatatagctgtgtcatcaatagataagttaccctctgaggtagcttaagaaacagtggctgg

SEQ ID NO: 1660 - DNA, 120 bp, synthetic construct
  source 1..120: mol_type = other DNA
aagaaagagacatctcatgagaccaaaatggggattccttaaaccctaaaacatgaaaacaaaaggaacatcaaatgggcaatacgccaatgctctttgcctgtagtaaggacaagacca

SEQ ID NO: 1661 - DNA, 120 bp, synthetic construct
  source 1..120: mol_type = other DNA
actgggttaaaggtttcagaattgggttggtagtctattttatgattcctttctggaagtccaaataaccagaactgcattttcacacagctctgcctacatgcagagaaatttgctctc

SEQ ID NO: 1662 - DNA, 120 bp, synthetic construct
  source 1..120: mol_type = other DNA
ctaattgcctgtggcactactgaggcaacggaaagctgagcaaactcgatatgaatcatatatttttgtttttttcttgatattttgccagcaggatgggatttatcattttcctgggga

SEQ ID NO: 1663 - DNA, 120 bp, synthetic construct
  source 1..120: mol_type = other DNA
gtggaaggactatagctggacaatagaggctaccacatttggaggtgagtttgttgatgaaaaagccaagttctataaaaatatttgaaactgtattccgagccagatgtgaagaccatg

SEQ ID NO: 1664 - DNA, 120 bp, synthetic construct
  source 1..120: mol_type = other DNA
atcagtttgagcttatgattccccctatgcctgggatacttccttttctatccactctttcctggctaaatccttaaatctttgcacccacttgacttgccaattctccaatttaaacga

SEQ ID NO: 1665 - DNA, 120 bp, synthetic construct
  source 1..120: mol_type = other DNA
aaagttggtgaatcctctcttcaatcattcctgttgggatattctgacatatttcactccagccaataaatataggtgatatttaatgacagtgggggccagcgcaatagtaggacacta

SEQ ID NO: 1666 - DNA, 120 bp, synthetic construct
  source 1..120: mol_type = other DNA
acaaaatcaaagtgactcctgcttatcagctgaaatttgctccctgtaagttcaacctgatggtcttggttccatcccttgggtcccaaagaaaaaaatcttcatttcctttccatgaaa

SEQ ID NO: 1667 - DNA, 120 bp, synthetic construct
  source 1..120: mol_type = other DNA
gtagttgcaacagagacaatggctcacaaaatctaagatatttgtatctgactctacagaaaagtctgccaacccctgatcttgttcactctttcctgtattgtatgccttgcaacacta

SEQ ID NO: 1668 - DNA, 120 bp, synthetic construct
  source 1..120: mol_type = other DNA
ctttctctggtcatctcatcctgtctcgtggctttaataccaagcacctgctagcaactcccacatttctttcttttttttttcaatctcagtagaccttcacctgtagtaagtcttata

SEQ ID NO: 1669 - DNA, 120 bp, synthetic construct
  source 1..120: mol_type = other DNA
ataaatcttagacagaggacttctgcagcaggaaagaaatttacccttcacatttaaggcaactttctcagctctccacagtatgactgttaagagctgggtatcttgggtggtttgtga

SEQ ID NO: 1670 - DNA, 120 bp, synthetic construct
  source 1..120: mol_type = other DNA
tggcctagatttactctcatacaattttccttaggttgagataaaaccaacctccctaaagcttccacacattggccctggttttgtccttgacacctattttgagtaaatctcatcgtt

SEQ ID NO: 1671 - DNA, 120 bp, synthetic construct
  source 1..120: mol_type = other DNA
aaaaaatgactccggataagatcatgtcctagttctgcttgtgagttttgtcacttgaatacatttcacttatgctgaaatcagcctggagttgctgacactgtacttcctctaggaccc

SEQ ID NO: 1672 - DNA, 120 bp, synthetic construct
  source 1..120: mol_type = other DNA
aaacagactaatacaataaataaacaaagagacagacaaacaggttctttctctacggtatcaatgccaggaacaccttataggaacagatccagacagggtgactcgctcaccagctca

SEQ ID NO: 1673 - DNA, 120 bp, synthetic construct
  source 1..120: mol_type = other DNA
agtgatgctgtcttccctcctgtcttgctgtagtaccttcggaattttagagttccagactacataacaccttcagaacaattccagaacagtttgggaagaaaggaatcaaaacaaaaa

SEQ ID NO: 1674 - DNA, 120 bp, synthetic construct
  source 1..120: mol_type = other DNA
cgaatttgtactgtctgaacaaaatggctttacatactgccagatgtgattatcaagattgattttctcctgccctgtggtaaccaggttacttagctttgcagattcagctggtcttgc

SEQ ID NO: 1675 - DNA, 120 bp, synthetic construct
  source 1..120: mol_type = other DNA
cttgttggattctgagttgagcacattctccagcccgtatggtgaaacctctgttgcagtcatccggaataaactctgccttacagttctttaacaagtatcatggataatttttttaag

SEQ ID NO: 1676 - DNA, 120 bp, synthetic construct
  source 1..120: mol_type = other DNA
cagttttaatgtgccctccaaggcagtttattttaataggaggcttcaaatagtgcttgagctgcaaggaataccttttgcacttcaccccaggaagtcaaattagctaatattgaggag

SEQ ID NO: 1677 - DNA, 120 bp, synthetic construct
  source 1..120: mol_type = other DNA
gtgagcatggcaacctctgaaattcttacagttaagagaaaaatcacacccttcctaaactttctaacagtaggagccatcaggcaaaatatcagactcctcctaactctgtcttacaac

SEQ ID NO: 1678 - DNA, 120 bp, synthetic construct
  source 1..120: mol_type = other DNA
cttgaatgaagtcttcctcgccattctaacaagtgtcagaataacttctctaacagtatgtgcatgtgactattgccatcatctttcctctctcccagggatcaacagacagtgaaattt

SEQ ID NO: 1679 - DNA, 120 bp, synthetic construct
  source 1..120: mol_type = other DNA
tttagatgaggttaaatatttaagtttagctagctgacttgcaatagtaccaagtaactgatcacaagggtgatctgtgacattggaaacaatgggtggaagttgggatgatctttgcac

SEQ ID NO: 1680 - DNA, 120 bp, synthetic construct
  source 1..120: mol_type = other DNA
gttcattacttggctctccagtagacgttccagccttggaccaatgacccctttcgtaatgcctcaatctcttaatctgctaagtggcaataattagtattaaaagtaggaaaaactttg

SEQ ID NO: 1681 - DNA, 120 bp, synthetic construct
  source 1..120: mol_type = other DNA
caattgtgctatcatctggtcaagtaaaagaacaacatctcagacaagataatagcagacttatctgcctccagggagagttgaatatgcaaagggtgagtgagttggaaacaaatagga

SEQ ID NO: 1682 - DNA, 120 bp, synthetic construct
  source 1..120: mol_type = other DNA
cttgatcttaaatagcttctttacttgctggccttctgatctgaaattccactactggagactctttgggttgaaagaatatctatcctccaggtgaccccctcaagaattcaattgctt

SEQ ID NO: 1683 - DNA, 120 bp, synthetic construct
  source 1..120: mol_type = other DNA
ccatcttggcaaccccaatgtgagacgcggtccctggcacctaggaggttcctaacaatgtttattgtgaatgaacaattttttaaccattaaatttgctgattaaaaagcaacagaact

SEQ ID NO: 1684 - DNA, 120 bp, synthetic construct
  source 1..120: mol_type = other DNA
gatatttataccctagcaagactcttcgtagaaaggtatcaattcactagttgaggaaaaaaatcattgtcagactatgtgttgatgcctttcctttgctcaaacaccagtcctgctctc

SEQ ID NO: 1685 - DNA, 120 bp, synthetic construct
  source 1..120: mol_type = other DNA
tgaaaacaaaaacaaacacataaaagtaggactcattccctctgcaattcccaaatcccacgccaaggcactacaaataagagtgttcctctaactaatacttacaggagggtgttcact

SEQ ID NO: 1686 - DNA, 120 bp, synthetic construct
  source 1..120: mol_type = other DNA
ggctttgaagattcctaaagctgaatcttaaaacataggtttaccaagagagcaagatagatgatggtattttcagctcaggaaacaacccatgcaaaggcaaagaactgagaagccaca

SEQ ID NO: 1687 - DNA, 120 bp, synthetic construct
  source 1..120: mol_type = other DNA
ctcctccaaaccacctgaaatctgcccactagttattagacttgcttctaggagcctggttgcagtttccaaaagagaaagatgccagtgttaggtaatcatgcccatcatcccctaatg

SEQ ID NO: 1688 - DNA, 120 bp, synthetic construct
  source 1..120: mol_type = other DNA
ctttctgtcaggctgcagaaagtaatttattcattaccatttaagcaagaagagatcttgtgtgtttaaagagagaaaagtttagcgtgctccattctcaatggcactgcaaagggccca

SEQ ID NO: 1689 - DNA, 120 bp, synthetic construct
  source 1..120: mol_type = other DNA
agcataataaaacattcacatacagatttagcatgttcaagactcagtgctctcgccacagaaaatggagcacactcaaaactgagaatgaccccatatataggagccagtcattctttc

SEQ ID NO: 1690 - DNA, 120 bp, synthetic construct
  source 1..120: mol_type = other DNA
ttattagtctcattttacaggtcaaagcagtaagtcacactgaggcaggtgatagatctttgaggatttgaatgcaggttggcctgacttcacattcacagttttaaccatgaagccaat

SEQ ID NO: 1691 - DNA, 120 bp, synthetic construct
  source 1..120: mol_type = other DNA
gtggacaaggcttataaactccagcatcacataagccattgttcatgaagatccattactcatccctctctatatagatgtatttagctgcgatttgtatagcacatggtgcttagggtt

SEQ ID NO: 1692 - DNA, 120 bp, synthetic construct
  source 1..120: mol_type = other DNA
ctagtgacctgaatcaggttaccattttctaccatatgacagctatgtattgtgtgttactgtatttcacgtgcacatctcacacatgtatcattcgatcattgtaactcttggaggcag

SEQ ID NO: 1693 - DNA, 120 bp, synthetic construct
  source 1..120: mol_type = other DNA
gaacttctaacctctagaacagaaatctctcttagttacacaacctcatctatggttgttatggaagcctgagcagacatcttacactttgggctggtggtggactaagtccatgatgat

SEQ ID NO: 1694 - DNA, 120 bp, synthetic construct
  source 1..120: mol_type = other DNA
gaatactacaaacaattctacacgtatacatttaacaacatagataaaatgggccaattccttgaaaaacacaaaccaccacaagtcaaccaatatgaaataggtaatttgaacagccct

SEQ ID NO: 1695 - DNA, 120 bp, synthetic construct
  source 1..120: mol_type = other DNA
gagaggaacttcttcaacttgataaatctacaaattaaactctatagctaacactgtatataatagtaaaagactgactactttccttctgagatttaaagcaagatgtccacactaacg

SEQ ID NO: 1696 - DNA, 120 bp, synthetic construct
  source 1..120: mol_type = other DNA
ttttgtattttttttttttaattatactttaagttctagggtacatgtgagggttctatcatgttggccagactggtcacgaactcctgacctcaagtaatccacccacctcgacctccg

SEQ ID NO: 1697 - DNA, 120 bp, synthetic construct
  source 1..120: mol_type = other DNA
aaacaggcaaaagatttaaaggcacattgtatcaaaaaggataaacagctggaaaataagcacacgaaagatgttaaatatcattaactattaggaaaacgcaaattacaaccacactga

SEQ ID NO: 1698 - DNA, 120 bp, synthetic construct
  source 1..120: mol_type = other DNA
tatatgtcaatgaaataagcagagctctagtgttcagatcagagctttttagagggctgtggaatatgttcttctctattgactccgttttccctaaagcacaccttaaacttgagatac

SEQ ID NO: 1699 - DNA, 120 bp, synthetic construct
  source 1..120: mol_type = other DNA
tggaccacatggttgctcctgctctcttagacaagaaataaatgccagctttattgaaaacaaatagggcttctacagcaatactgggcacgtaaggagaattagaaagtagctgaaatt

SEQ ID NO: 1700 - DNA, 120 bp, synthetic construct
  source 1..120: mol_type = other DNA
ttcaaggaagcaaaggtcttcctgacatttaaatctacaagagacatttcttaggtgtgtctttacatagggaacagggagtgctgtcgtgaacagcatcttcgacaacatcctatgaaa

SEQ ID NO: 1701 - DNA, 120 bp, synthetic construct
  source 1..120: mol_type = other DNA
acaccgctaccaatggtgaagtgccaggattatggaaggggtccatatggggtgttgaattagtcaggtagtgaaggagaaatagacatttaagctgaaatcttaaggataagaactaaa

SEQ ID NO: 1702 - DNA, 120 bp, synthetic construct
  source 1..120: mol_type = other DNA
accttcacttagggcagcaaaatgtataagggttatcctttcaggaaagcccctttcatataaacagaaacttttcttcatggaattcaattagtctctgggcctcagttttgctatccc

SEQ ID NO: 1703 - DNA, 120 bp, synthetic construct
  source 1..120: mol_type = other DNA
tttcactgggtccttctcatcctgagctgtgttctgcagtttctctcctgtctcagactcaactctcacctattcagctcttctttaaaaaaagaaaaacaggcaaatcaaaataagcaa

SEQ ID NO: 1704 - DNA, 120 bp, synthetic construct
  source 1..120: mol_type = other DNA
gatctttattctaaagcaataggagcaaccaataactttctaaatagaggagtgacaaagccaagcctgagtctttggaggaaaatgctggctaagagaattggacactgaaaacctaga

SEQ ID NO: 1705 - DNA, 120 bp, synthetic construct
  source 1..120: mol_type = other DNA
aacttctccattcatgtaggaatcaaattgctagccattatgcttgctgatcatttatagaagtttatacccctagcaaccagatatgctcagtttgtctccgacacagatggaagacct

SEQ ID NO: 1706 - DNA, 120 bp, synthetic construct
  source 1..120: mol_type = other DNA
tttcctcctacctcatcatcctttctttaatcacatttactagttccttctcatctccccaagatgctaatattggagttccatggggaccagcctttggtcttctactctttcttagct

SEQ ID NO: 1707 - DNA, 120 bp, synthetic construct
  source 1..120: mol_type = other DNA
tctctgtcacacaaagctttcctgaccaccctttcaaaaattgcaccacaccactcctgccttccttgctttattgtcctttatagcacttatttactttcaacatattgtacattttgc

SEQ ID NO: 1708 - DNA, 120 bp, synthetic construct
  source 1..120: mol_type = other DNA
tgatctatctcagtggcctgcaatctttcatgtttagtggccactcctttgtaattataggtagactcatatatagaacagagcatctctatttgaagctctctctttcatcccacctca

SEQ ID NO: 1709 - DNA, 120 bp, synthetic construct
  source 1..120: mol_type = other DNA
cactcatgtggtagcatgtaacactttcaattcactccactactttcttttgacattatgctaggaattctcttttcctctcttctgaaatggatcctctgtcttctggatcccatgttt

SEQ ID NO: 1710 - DNA, 120 bp, synthetic construct
  source 1..120: mol_type = other DNA
tttcacataagaaagcatatgtatagaccacaaaatctatgcagaggacagagaccctttgggaatcaaactccacatccttaaaaccacaaggaagggaaggaaggaaaagtgtccaac

SEQ ID NO: 1711 - DNA, 120 bp, synthetic construct
  source 1..120: mol_type = other DNA
gcattgcaatagggctacttttaatgtgcttggtaacaattagctcttgaagctgcaacagctgcacaatgctgatgctctccagatgcaccaaacgaattaaatcatgcgataattcaa

SEQ ID NO: 1712 - DNA, 120 bp, synthetic construct
  source 1..120: mol_type = other DNA
cttataattaccataaatatcttttagaacaaatacaatagcctcttgggaagtgagcatcttaactggtgagcagaagtgtgcatgtatgcaagggaacagcctataggcctcgagtgt

SEQ ID NO: 1713 - DNA, 120 bp, synthetic construct
  source 1..120: mol_type = other DNA
tccataatgaaagtttcttggtgtgatattgtgaaatatgtttcattttcgatcccatttcttggcattcaattcctaaaatccttaaaaattccaaagtgatgcatttttgtatgctaa

SEQ ID NO: 1714 - DNA, 120 bp, synthetic construct
  source 1..120: mol_type = other DNA
atgtcaggcaggagcaaagggtggctaaagttttatcagaaggtaaaggaatgggagaagatacacggtatgaggaagaggtgattcaaaatagggagatagagaagatgagaaaaagta

SEQ ID NO: 1715 - DNA, 120 bp, synthetic construct
  source 1..120: mol_type = other DNA
agaaaagatgacgaactggctgcttctgtcattgttcgcttactgtaggctaagaaaacaagttcttttgttctaccaactgaagacatcttcaaaagctgaaagtatctgagctgctga

SEQ ID NO: 1716 - DNA, 120 bp, synthetic construct
  source 1..120: mol_type = other DNA
cttttctgaaggattgtgtttaagcaacttggaacgaatccaggtcaaatatcaagtgacttcatacttcatgcatttctctgctgattgacatatggtcatgctagctggagactgggt

SEQ ID NO: 1717 - DNA, 120 bp, synthetic construct
  source 1..120: mol_type = other DNA
gcgtttgaagctcccatcacagacttctttatccttgctcctcattctccatcctactactccatccctttttgcagggaaaaaaaactgttcaaagaacaaaactcagaaccttttttc

SEQ ID NO: 1718 - DNA, 120 bp, synthetic construct
  source 1..120: mol_type = other DNA
ggggctgtaactaatgaggttattctggttacaaaggaagcattcagccccttaatgaaaaactctttggcaactggtgttagggaaagaaaaaacaaaccagcagcttattattagttc

SEQ ID NO: 1719 - DNA, 120 bp, synthetic construct
  source 1..120: mol_type = other DNA
actcacccctagaatagaccaagatgctcataaactacactgaagcagggaccataagtttaattccctctttgagccagtttaagctactgtttgggtgctgtgatttttaaatcactt

SEQ ID NO: 1720 - DNA, 120 bp, synthetic construct
  source 1..120: mol_type = other DNA
cctaccacataaaccaacccatctttacatttgcaacatctgtccccagagaccaggcatttctgagggtctacttcaacacaacagattgtcttattctgtcttgtattgttataacat

SEQ ID NO: 1721 - DNA, 120 bp, synthetic construct
  source 1..120: mol_type = other DNA
tcctttggggtcttcttagtttccttgcattttcataacttatgtctcttcctgaatgtgattaaacgaccctccccaattctaccttgaagtactgcattagccataaaggcatagaag

SEQ ID NO: 1722 - DNA, 120 bp, synthetic construct
  source 1..120: mol_type = other DNA
cacacttactaaaatggccaatctgtgtcatttagagctggcatagcagaaaactgaggcccaacagaggccaatgtaagaaatgccctatctgttgaactcttatatgtttatggagta

SEQ ID NO: 1723 - DNA, 120 bp, synthetic construct
  source 1..120: mol_type = other DNA
tggacatctgtgacctacacgtgaaggcatttttccaaataaagacagcttcctcccaagagaaatttgtgtgcctgcttttataatatcatgtttaacccttgctacatgtttgtgcct

SEQ ID NO: 1724 - DNA, 120 bp, synthetic construct
  source 1..120: mol_type = other DNA
aaacaaagaaacattttgctccatgatgaaaccaccctgaaggggacttagaaaaacctttccttgttatgttgaaacaacacaaggagagggcaaaaagagaggaaagtactacctcta

SEQ ID NO: 1725 - DNA, 120 bp, synthetic construct
  source 1..120: mol_type = other DNA
tactgaacctttactctgtgctcagcatggtgctatgttctatatagacaacctttcacttcgtcctcacaacttagggctgacatgattactataatagtcttccatatcacttacgga

SEQ ID NO: 1726 - DNA, 120 bp, synthetic construct
  source 1..120: mol_type = other DNA
acagggcttcccctgggacccagaatgagtttaagcctgggattggaacctacgtagacttgctagctttcaaatgattttttttttcattaaagcacacagataagatataccatgaat

SEQ ID NO: 1727 - DNA, 120 bp, synthetic construct
  source 1..120: mol_type = other DNA
atcaattattcatgtatgaccttatgatccagaagaacttcctaatttctcatccaggactattctgaaagaggatgatgggctgaagacacagatctgagctccaatcttgagcatgcc

SEQ ID NO: 1728 - DNA, 120 bp, synthetic construct
  source 1..120: mol_type = other DNA
cctgtagttctcttttcttgtgtccttgtctggttttgctatcagggtaatgctgacctcatagaataaatgtggaagtattccctcctcttcaatttttttgaagagtttgagcaaaat

SEQ ID NO: 1729 - DNA, 120 bp, synthetic construct
  source 1..120: mol_type = other DNA
tgctaataaagacatacccaaaactgggtaatttataaagaaaaagaggtttaatggactcacagtttcacatggctgcggagacctcacaatcatggtggaaggcaaaggaagagcaaa

SEQ ID NO: 1730 - DNA, 120 bp, synthetic construct
  source 1..120: mol_type = other DNA
tgattctactataggtttttacattgtgattaccataggcttacaaaaacatcttatagataataataagttgttttaaagagataacttatcttagatcacaaatagaagaataaaaac

SEQ ID NO: 1731 - DNA, 120 bp, synthetic construct
  source 1..120: mol_type = other DNA
actaagtttcctttaaaatgctatttttaattattggtcagggagctcacaaatggccactttgttagggtcagtcactgtattgttgctttgtccttttggtaggtcatggttccctgt

SEQ ID NO: 1732 - DNA, 120 bp, synthetic construct
  source 1..120: mol_type = other DNA
tgtgaaagtctgattctcctactacttgcttagaatattttcacttctctgtggtcctgggacctgtctgatcctcatgtttgaatttcaagtgttgctagtgaaaatctcagtgctttg

SEQ ID NO: 1733 - DNA, 120 bp, synthetic construct
  source 1..120: mol_type = other DNA
tccctgaggaatcgccacactgacttccacaagggttgaactagtttacagtcccaccaacagtgtaaaagtgttcctatttctccacatcctctccagcacctgttgtttcctgacttt

SEQ ID NO: 1734 - DNA, 120 bp, synthetic construct
  source 1..120: mol_type = other DNA
atggggatggcattgaatctgtaaattaccttgggcagtatggccattttcatgatattgattcttcctacccaagagcatggaatgttcttccatttgtttgtatcctcttttatttcc

SEQ ID NO: 1735 - DNA, 120 bp, synthetic construct
  source 1..120: mol_type = other DNA
atagtttcataaggaatggtaccagttcctccttgtacctctggtagaattcggctgtgaatccatctggtcctggactctttttagttggtaagctattgattattgccacaatttcag

SEQ ID NO: 1736 - DNA, 120 bp, synthetic construct
  source 1..120: mol_type = other DNA
atccagtgtgaaaatcacctgtgaatttttttttcttagatactgaaagttacagctggatccatgcctgctgcttacatgctgtatgtcttcggacaattctttaccttctttgcagct

SEQ ID NO: 1737 - DNA, 120 bp, synthetic construct
  source 1..120: mol_type = other DNA
tctattccaggtcttttccatataaattttaagttacgaaataaaaaagcctactggaattttgatagcaattacattaagcttattgatcaatgtggggagaaataccatcttgaagct

SEQ ID NO: 1738 - DNA, 120 bp, synthetic construct
  source 1..120: mol_type = other DNA
ttgttaagaatttttgcacccatcttttatgagggatatcgatcaggggttttctttccttgtcacatctattttcctagatttaggatcaggggaatagtgagtggcctcatagaatga

SEQ ID NO: 1739 - DNA, 120 bp, synthetic construct
  source 1..120: mol_type = other DNA
agtcgttaggtggaaaggtgtttatttgtcagttaggttgagttagttgatgttattgctcaaggcttctatatccttctttatccagttgttctacttttgggagttattgaaatctcc

SEQ ID NO: 1740 - DNA, 120 bp, synthetic construct
  source 1..120: mol_type = other DNA
tttctagtactcttcatttctccccgtggattcaagttagctcctggtatgattcatttcagcctgaaacacttccttagtatttattgtaaaacaggtctgctggcaacaaattctctg

SEQ ID NO: 1741 - DNA, 120 bp, synthetic construct
  source 1..120: mol_type = other DNA
tattttgctatctttgttagttttgtttcttcatttagtaacttggctgggttctatctgtgaagtctgtcttccctgcagtgtgtgtaggctgatgtctctattgattgtttttcaggt

SEQ ID NO: 1742 - DNA, 120 bp, synthetic construct
  source 1..120: mol_type = other DNA
aacctcatctttatttcactccatctagacatgtgatttccttctgaaggacactgagttttcatcctgtctttgatctcaggagcacagaacccagttgatccagcttactttaaaaat

SEQ ID NO: 1743 - DNA, 120 bp, synthetic construct
  source 1..120: mol_type = other DNA
aaggggattaaacaggggcatcccaagctgttgttgcagaagtaaatttaatgtctatctactttagtgtcatggcaatatataaccgaaagactattctcattgtaggcaccttgccta

SEQ ID NO: 1744 - DNA, 120 bp, synthetic construct
  source 1..120: mol_type = other DNA
ttactccactatgccattttcctgtttacagaatggtctcttgtgcattattttgattgatttttataacaagtcaggaaagggagccacagaggtaaaatgacccccagatccctcttc

SEQ ID NO: 1745 - DNA, 120 bp, synthetic construct
  source 1..120: mol_type = other DNA
gcctgggaagcactgtgctttaagaagagcttgtcataatggtaagaacataagactgggtgttcaaaaactggaattgaatatctgactgcaatatactggctttggagatttgaacct

SEQ ID NO: 1746 - DNA, 120 bp, synthetic construct
  source 1..120: mol_type = other DNA
tttattctgtttatagtggaggagacagtttaaggactgcatttccagccagaattcattggataccttcaatatatgtaagtcagtttgtcttgaagtccccatcagtcctctgagcct

SEQ ID NO: 1747 - DNA, 120 bp, synthetic construct
  source 1..120: mol_type = other DNA
caggttttatgccaggtatttggccatcatttgtattggatatgcctaagccttgccttagagcaggaaatggccttattgaccatctagtctaagatcttacctaacagatgaggaact

SEQ ID NO: 1748 - DNA, 120 bp, synthetic construct
  source 1..120: mol_type = other DNA
tcgactttggagagttagtgttgtcagtagcattcaaccaagaagttctttctttcctctccaagtgatgtagattctaagaaaagaggataaaggtctttgaaacttaagagggaacac

SEQ ID NO: 1749 - DNA, 120 bp, synthetic construct
  source 1..120: mol_type = other DNA
gtctgtgtctgtgtgtgtgatcagcggtcactccaattacatttttcttctattccagttttcttacctctcctgactgtttccccaacttcaacatttttctaaaataagaggtttgct

SEQ ID NO: 1750 - DNA, 120 bp, synthetic construct
  source 1..120: mol_type = other DNA
aaaatagagtatttgcagatgttatcaagcattccagaatgagatcatgctggacttaaggtgggccttcaatccgataacacatgtcccgttaagatacagatttcagacaaggacaca

SEQ ID NO: 1751 - DNA, 120 bp, synthetic construct
  source 1..120: mol_type = other DNA
gcatctaaatactatctgacccatgaatattgagttagaaaacaaactagtgactacataatactaaaggcaacccatccccacttctcatcttcaccaccagcaccctttctgccaaaa

SEQ ID NO: 1752 - DNA, 120 bp, synthetic construct
  source 1..120: mol_type = other DNA
gtcatagcactcagtgtattgtgcgcatgtcagcgatcacaggtggaggaggagaaacaggtcaccaagtgaaatgtacaatttattggcactgtttaaaaacatttctttaaagcacaa

SEQ ID NO: 1753 - DNA, 120 bp, synthetic construct
  source 1..120: mol_type = other DNA
tcagcctgggtgttagggatccctgttctagagaaattcttgaacatgtgcaccaagagagatgtacaaaaatgtttacaattgtgttgatggcaatagcaagaacctggaaataattca

SEQ ID NO: 1754 - DNA, 120 bp, synthetic construct
  source 1..120: mol_type = other DNA
aaacaaaaagtcagcccaggaaagtgtatagaaaggaaagtctcttttggttctttgatgacaaggtagaggctgaggtataagcctgagagcattaattgtttttgtgccacctccaat

SEQ ID NO: 1755 - DNA, 120 bp, synthetic construct
  source 1..120: mol_type = other DNA
atgaaaccctacttttattacttgttaaagaataaaggtttgggctgatcttgagatgggacttgtcttcctcccctccttgcatggcccaagaagccatggaaagtcacagatattaaa

SEQ ID NO: 1756 - DNA, 120 bp, synthetic construct
  source 1..120: mol_type = other DNA
caagcaagaaaactcacctctctgacccttaattccctcacctgtacattaggctgataattaccactcaagtttgccgtaagaactggtggtaaaacatactgcctaagaacatgtaat

SEQ ID NO: 1757 - DNA, 120 bp, synthetic construct
  source 1..120: mol_type = other DNA
tttagatcattagcgtatcattataatgcaaaagtccccacccatagaagagaatcactgccactttctgcacacgtgtcgtatgaagagcatgttcctgatctgcacctgcgtgtctga

SEQ ID NO: 1758 - DNA, 120 bp, synthetic construct
  source 1..120: mol_type = other DNA
tgtgaactttggttttctcaccaaaagaaaccaaaagctgttaaagcagtgcattttaacagctgcttctgaggctactactaccccaatctccaagacaattctggtgttggaaatttc

SEQ ID NO: 1759 - DNA, 120 bp, synthetic construct
  source 1..120: mol_type = other DNA
gatctttgaactctggagagtttaagtgtgataattggctgtgtttgggccagatcctgcctagtaaaacaggctatgcaaatgtaccgattaaaatgcgttccttctgtaattcttagt

SEQ ID NO: 1760 - DNA, 120 bp, synthetic construct
  source 1..120: mol_type = other DNA
atgaccttcaggaggatccagagatcttgacctttttttgttttaacccaagagaatctgaccattgaaaaagagcattgagaaaaagacacactttccaggacctgcctatcacatatg

SEQ ID NO: 1761 - DNA, 120 bp, synthetic construct
  source 1..120: mol_type = other DNA
attcattaacaattagcttctagacattgttttagtatgaagcacagccattcaggaaaatgttgtggtaagtatcagaaaaccacggtggtgaccctgcccaaagacatacccagtctc

SEQ ID NO: 1762 - DNA, 120 bp, synthetic construct
  source 1..120: mol_type = other DNA
gatcatcttatttaatccctatgaattaggcaggattcttatctccattcaacagatgaaggcattggagctcagagaagtgaagtcacatctgatgttactcagataggaaggggctat

SEQ ID NO: 1763 - DNA, 120 bp, synthetic construct
  source 1..120: mol_type = other DNA
caaagtttctgtggccatcaggatgtatctgttttcagaaggggcctataagaattcatttaactgaatacttggtcaatgggatctgcatctgaaaacagaattatcgggcttgccact

SEQ ID NO: 1764 - DNA, 120 bp, synthetic construct
  source 1..120: mol_type = other DNA
gaggtgatggcacatgaccatgaccatttctttaggattttgttgtaccaaagtaaggttggcattgcctttaggtgacatttgcagtcagaggctgttagaactttaagaaacatttga

SEQ ID NO: 1765 - DNA, 120 bp, synthetic construct
  source 1..120: mol_type = other DNA
aacatatatggctacgtttcaaatatctcccaatgatcagatggctcaactcacctccaataaagctttttgggttgtctcctcctgcatgtattcttctgccaacaaactgctttttga

SEQ ID NO: 1766 - DNA, 120 bp, synthetic construct
  source 1..120: mol_type = other DNA
agaaaattaatccctttgtgcctcaattttttcaactgaaaaataagaattaaagcagggaccacctcctggaattgtgaggagggtgaaatgcaatagtgtatgttgagtgccctgcat

SEQ ID NO: 1767 - DNA, 120 bp, synthetic construct
  source 1..120: mol_type = other DNA
tgcacatgtgcacactgcagtgggagatacacacggaaagctgaattcttatttctcttatctgtgaccattactatgttacagatagaaaaacaggactctgctcttaatcatagaaca

SEQ ID NO: 1768 - DNA, 120 bp, synthetic construct
  source 1..120: mol_type = other DNA
attaaatcccagctcaaatactagtgtgattaaaggcaaaatgctttcaagttccagagggcaaaactagggacttaaaagagttttaagcaagaggcttagagcaaatggagccatgcc

SEQ ID NO: 1769 - DNA, 120 bp, synthetic construct
  source 1..120: mol_type = other DNA
ccaaggtattcaagggatgagttgtgtaaagcaacagatgggactgaaatgtgagaaaatactttgtgagccatcttattgagaagaaaatgaacccttgcctctatggtagagaggtta

SEQ ID NO: 1770 - DNA, 120 bp, synthetic construct
  source 1..120: mol_type = other DNA
tcaccagctgctggttgtgaatacttgctatatggtatccaaaaggaagctctattaaatccaagagccatgtcatgtctgctaaaaatgagcaaaccttcctattaggtactgatggtt

SEQ ID NO: 1771 - DNA, 120 bp, synthetic construct
  source 1..120: mol_type = other DNA
atttcctcctccctctagatgtcttggtcaacatctttccttgccaaatgtttctcttctctgttccagtcaatgacatcttcatccactcaattactcaaggtggattctcctgaatag

SEQ ID NO: 1772 - DNA, 120 bp, synthetic construct
  source 1..120: mol_type = other DNA
ttcccctcatcatctgtttccctttgtcagtgtctgtcccactttgtgaaaagtgttttgaatggatcttttctgacttgtttttctcacctttgtgtcacatggtcattcattctctta

SEQ ID NO: 1773 - DNA, 120 bp, synthetic construct
  source 1..120: mol_type = other DNA
atcaaagaaattgatacattaacaggatgggtggtgatggtggcagtggcagggaaagtaattaaaaagtctaatttttctttctaaaagcaccagcccctgaactggataggtctcctt

SEQ ID NO: 1774 - DNA, 120 bp, synthetic construct
  source 1..120: mol_type = other DNA
tctccaggcagggaaagctcatctttgaaataactttgtgatatgatagaaagagcacacagagagtcagaaagtccaggttcattcttttctaatggctcacctactccgtaaaatgaa

SEQ ID NO: 1775 - DNA, 120 bp, synthetic construct
  source 1..120: mol_type = other DNA
cttgcagagacttggtgacttctcactgtctgaagaacgatcccttcaggcagcaattttccagtcaaatttatctgcccaagtttgaggccttaaaattaatgaagttgttaacatttc

SEQ ID NO: 1776 - DNA, 120 bp, synthetic construct
  source 1..120: mol_type = other DNA
caaatatgttgccctctgcagcatggagtgggtagatttaccccttggggcattctgcattttataaaaattgtccttctgtagagatactgaatgactttgggagcaaaatcaaaaatg

SEQ ID NO: 1777 - DNA, 120 bp, synthetic construct
  source 1..120: mol_type = other DNA
aaataatatcaaagaacatgtttgggaaactttaaggagcttcttaactgtaaggggccctggaagacctgtgacgctcataataataatcccctcttaagagactgattgttggctggg

SEQ ID NO: 1778 - DNA, 120 bp, synthetic construct
  source 1..120: mol_type = other DNA
aataaagaaaacactgatccatgtgcttggggtgtgtcttttagctgtcactcaatatcagtcaaaaatgaagtttataaggggctttcatgacatccatcgggaagatgagggggaaaa

SEQ ID NO: 1779 - DNA, 120 bp, synthetic construct
  source 1..120: mol_type = other DNA
tttacctacataatgtcacatgatattcaccgtggctctttgagatagaaatgatcatctctgttttacagatgcatcaactgagacctagagaggcaagtgatggaagcagaaactgag

SEQ ID NO: 1780 - DNA, 120 bp, synthetic construct
  source 1..120: mol_type = other DNA
atgcttcagaatagggcaagtgggaagggtctgggaagactcggacaatcaatctccatgtgaataaaaattcacttagactctaggtctgagtcattggctaatctcaaattttaagta

SEQ ID NO: 1781 - DNA, 120 bp, synthetic construct
  source 1..120: mol_type = other DNA
tcaatgtagaatataaagaacaaaatacttctgcatttaacaagtacagggtcaagacactgtctgttcccatcaagctctttacccttgccctacccaaccactgcagggaaggatttt

SEQ ID NO: 1782 - DNA, 120 bp, synthetic construct
  source 1..120: mol_type = other DNA
ctcgtctcttctcaagggatctgctgttacaatggtcctgcatcaacaattttccctctctaccaagtcagtcacacaaacatgcaccatcttataaagaaagaaaaagcttctttgact

SEQ ID NO: 1783 - DNA, 120 bp, synthetic construct
  source 1..120: mol_type = other DNA
acatactactgttaccaaatttgtgtcttcagcccaatctctcccctgaacaacagaatacacagaatatacatccaactgcctgctcaaaatctccactttattgcccaataagcatct

SEQ ID NO: 1784 - DNA, 120 bp, synthetic construct
  source 1..120: mol_type = other DNA
gctaagcacacactctgccaaacctcaattttctgaaaacgatgacgagaataagaatagggcatattctaaaaattctcagggttttgtaagggccacatgagataatgtgtgcatgac

SEQ ID NO: 1785 - DNA, 120 bp, synthetic construct
  source 1..120: mol_type = other DNA
taaggtcctctctggttcatacatatttgtttctctatggtttgctttcacattttcttccagctggctcattcagaagggagctattagtgtcaagggcggaatttggatggaattaaa

SEQ ID NO: 1786 - DNA, 120 bp, synthetic construct
  source 1..120: mol_type = other DNA
ttttttttttgctcattgatttagaaaaaattaggaaaagcatttcacagtggctgtttttggtttggtgtcatgtaggacatgctttgcaggggcaggggcagatcaagacatggacct

SEQ ID NO: 1787 - DNA, 120 bp, synthetic construct
  source 1..120: mol_type = other DNA
ttaatatactgaaagcgatacaaagacacaaagacacaaagacagggcagcctggaaaaccaagtccatcaacaaaagacctttttcttttggagtgagagagtcctggtaaggataatc

SEQ ID NO: 1788 - DNA, 120 bp, synthetic construct
  source 1..120: mol_type = other DNA
cttcacctgtattactaaaataaactcagcttgtattaaaatagataggccaacagcctgattggcttcatcctactctggtgctatgtcacctttgttgcttccattcatcttgcattg

SEQ ID NO: 1789 - DNA, 120 bp, synthetic construct
  source 1..120: mol_type = other DNA
tccttttgacatcttgatgttgttatccattgtgaaggagacagacacaaccctatgagaacgtatgatgagggatctgacttcattacgagaggcaggggaagattacctgagaagctg

SEQ ID NO: 1790 - DNA, 120 bp, synthetic construct
  source 1..120: mol_type = other DNA
ggctctaaaggcagaggcagtaatttggagctggcaagtgtgaaggaatgtggaagctgttatttgccttcatgcagcacatcttgagtgcatctttcagaatataatttaaaatacact

SEQ ID NO: 1791 - DNA, 120 bp, synthetic construct
  source 1..120: mol_type = other DNA
gtaaactagagatagagggatagagttctatctctgtggccaatgacacaccccacaaatacatggactcccaaagccctttcatttaagcctttgatcctcataaaggtttaataagat

SEQ ID NO: 1792 - DNA, 120 bp, synthetic construct
  source 1..120: mol_type = other DNA
actaagcattaaagatatttggaacaggtgaatgaaccatgggctaattggataatactacatctatctcttataattgtggaccaagagcacccctgactccttgggaggttctgtcag

SEQ ID NO: 1793 - DNA, 120 bp, synthetic construct
  source 1..120: mol_type = other DNA
agcaattatatctatactaggtttaactcacccttggggtgaaaaagacttgaggaagatgtgtttatgggttgttgactgttagggagaactgtggactaaatgtttatggttccccca

SEQ ID NO: 1794 - DNA, 120 bp, synthetic construct
  source 1..120: mol_type = other DNA
gtgacatgggaataatagaagcaatcttacatgcttgccttgaagatgccataagagagtgcttatgaagcacttagcacaatgcctagctagagtaagtgttcagtcaatgtgatttat

SEQ ID NO: 1795 - DNA, 120 bp, synthetic construct
  source 1..120: mol_type = other DNA
cagtgctcttggagaaaactctaaaatagatcattaatcagatggcacggaagcctttagaaatatacatcgaccagagggagacaaaactagttcagtaggaataagacatggtcagtc

SEQ ID NO: 1796 - DNA, 120 bp, synthetic construct
  source 1..120: mol_type = other DNA
ttacaaaaaccttgtaagttagagattataattacccctattttgcgtataagaaaactgagccatcgaaaagtaacttgctcaagaccccaagccagcccatgacagcatcagaatgac

SEQ ID NO: 1797 - DNA, 120 bp, synthetic construct
  source 1..120: mol_type = other DNA
tgtttcctgtactaagtaaataaaagaggaccaagattaaggcttatacactcttgaatttctactccccttaccccagtatctagcagagtgccttatgtagtgtcgacttttggcaaa

SEQ ID NO: 1798 - DNA, 120 bp, synthetic construct
  source 1..120: mol_type = other DNA
gtgataattttgcattcatttcttgcattgttttagaaaagaactggcaaactagggaatccagaatacaacaagcaggtggtaggcatctgccatgaacatggcttgcccagaaaaaga

SEQ ID NO: 1799 - DNA, 120 bp, synthetic construct
  source 1..120: mol_type = other DNA
tattgaaaggagacttgtttaccctctatagagactgaatcaattaaagagtggcctcaacttaaagctgaagcatgataggaacaccatgccatgagccatttgctctacttggtgatt

SEQ ID NO: 1800 - DNA, 120 bp, synthetic construct
  source 1..120: mol_type = other DNA
gtattgtgaataccaagcacatatcaatgactgtttcaatgtgagttcactccccaaacccccattagaatcaaataattagaggcaagcatgggttttgactctatagccagtgataca

SEQ ID NO: 1801 - DNA, 120 bp, synthetic construct
  source 1..120: mol_type = other DNA
ggacagtcagagggacagttagacaaagggacagacagacagaaaaacatggttatttgtccttttgttctcttatctttggaccatgacaattcctacctgcttcaaaggactattgaa

SEQ ID NO: 1802 - DNA, 120 bp, synthetic construct
  source 1..120: mol_type = other DNA
tactgaagctaatcaatcttcacaaaaacaatctggaataagaggtcagatccattcaaagcttttaagttgagctgcttggttattgaagtgaaccagcccatgtctcccctggtgaca

SEQ ID NO: 1803 - DNA, 120 bp, synthetic construct
  source 1..120: mol_type = other DNA
aaacacttcttgtactttggcaacgtctcagccaaatatcacaataatggccaggctctaggcaatagacaagaaaaactccaatatcctagggatacaattcaatctcagcagccttaa

SEQ ID NO: 1804 - DNA, 120 bp, synthetic construct
  source 1..120: mol_type = other DNA
attgattttaaatccctcttcagaagaaactgaaatgataaaacacacagcatcttttaaagaccatctgccagaaaccacccaacagatgggggcttaaaactctgttagcctgaggcc

SEQ ID NO: 1805 - DNA, 120 bp, synthetic construct
  source 1..120: mol_type = other DNA
gaatttgtggacctgttttaaagccaccacgtatgccaaagatgtctttttctaccacatgggttagaaagtgaggaatcgattttcactgttttaaatacacagccccacaggaaagtg

SEQ ID NO: 1806 - DNA, 120 bp, synthetic construct
  source 1..120: mol_type = other DNA
cttatgcactaatgaaaggatcagtggttctttgcctgacacaatctttttcatcctttggacccagcttaaatgtcacctgctcaaaaagtccttctcagattatcctatcaaagtagg

SEQ ID NO: 1807 - DNA, 120 bp, synthetic construct
  source 1..120: mol_type = other DNA
acctgacattttctgggattcactgaaactctaggtccttagtccagtttggggaggaaagtgcctgtaatttttcttaggtgctacctttgagatatctgttacattctaactttcatg

SEQ ID NO: 1808 - DNA, 120 bp, synthetic construct
  source 1..120: mol_type = other DNA
cattttcctcccagaaatataaaagagaaacaagtcagtaatttcttgtgggttcctagaaagcccctcccccaccaccaaatccaataccttttcatctgcttttgatgcctaaagttc

SEQ ID NO: 1809 - DNA, 120 bp, synthetic construct
  source 1..120: mol_type = other DNA
gttgaacagacacaatcccaggtcaccaacctcaaaggttttgattcagaaaaactgaaatgggaccatagtgtatacatatttaataggtatccctcagtgattcagaagaaggcgctt

SEQ ID NO: 1810 - DNA, 120 bp, synthetic construct
  source 1..120: mol_type = other DNA
aatatatggaaactagagagacacttgttcattgagatcttccccaaatttatcaagacagggagagaagaaatgagttgagtcttcctgttccacggaataggaacacattctacctgg

SEQ ID NO: 1811 - DNA, 120 bp, synthetic construct
  source 1..120: mol_type = other DNA
gaaggaaggaaggaaggaaggaaggaaggaaggaaggaaggaaggcaggcaggcaggaaggaaggaaggaaggaagaaagggagggagggagggaaagagagaaagagaaagaaagagaa

SEQ ID NO: 1812 - DNA, 120 bp, synthetic construct
  source 1..120: mol_type = other DNA
cagtagaagcaaagcaagtgtccaccacgtcttcatgttctagatttttagggacagttcccagctcaagtattctgtcctcttgttcaaccaataagtactaattagtggtgatgaaaa

SEQ ID NO: 1813 - DNA, 120 bp, synthetic construct
  source 1..120: mol_type = other DNA
tcatgctagctcgaggagcttctataccctgttgtttctgctctcacatcctgtactgacactgcagaatagccctgaaggttctccttcctggaagaaggagcaacagtcttgtcatct

SEQ ID NO: 1814 - DNA, 120 bp, synthetic construct
  source 1..120: mol_type = other DNA
cattacccagggcaatttccaatttcatcctgcaatttcccaaagtttaaactcggctgaaccataactgaatgcccttgacagactccaagaaactttttctggtcagtttttgacaat

SEQ ID NO: 1815 - DNA, 120 bp, synthetic construct
  source 1..120: mol_type = other DNA
gttctaaatgagtttctatttttctacctacaacagcttctacatccatttgacaaatagtagtatagaagtgttcaggacaaaaatgtctcttggtctcaggagatgccggacgccagc

SEQ ID NO: 1816 - DNA, 120 bp, synthetic construct
  source 1..120: mol_type = other DNA
aacaaactgagcacattatatcccttctaattatcttgttttttacgaggcacatattagtacccacctccccattttgttagtggggagattgaggctcatagagcttgccaatgagag

SEQ ID NO: 1817 - DNA, 120 bp, synthetic construct
  source 1..120: mol_type = other DNA
caaggaccctgtctgtttattcactaccctgtctcagcatgtagtcaatcctctatatactgtgttgatgtctttataactatttccatgactctgaagcaagccccttagcaaagtaca

SEQ ID NO: 1818 - DNA, 120 bp, synthetic construct
  source 1..120: mol_type = other DNA
ttgagtagtagacagacagacatgatctcactcaggccttcattcttttcatgagggaaaacacacccattcccaagagatgatattcacaccttacccgcatcctcttttttttttttt

SEQ ID NO: 1819 - DNA, 120 bp, synthetic construct
  source 1..120: mol_type = other DNA
gacctcctttctggcctcttcctgcttttttctctcattcttcttcttcaattaaaaaggctttagccaaaatgaattcctacctctgtcaggccttcaaattcctgttttctggacatt

SEQ ID NO: 1820 - DNA, 120 bp, synthetic construct
  source 1..120: mol_type = other DNA
gtttcaaaatcatcacaagagagatgtccatgatttctctctttttgtctatattccagtcctttgggttgcatgatcttgtgaaatttgtagccagcgaaacccagtagtgataggcac

SEQ ID NO: 1821 - DNA, 120 bp, synthetic construct
  source 1..120: mol_type = other DNA
taccaggaaattcacaagttatgctgtctgactggcagggtctttgactcttttgcaaagggcttacagacattattgttgggattactactaatttttatttgggggtagagggagtat

SEQ ID NO: 1822 - DNA, 120 bp, synthetic construct
  source 1..120: mol_type = other DNA
gatgtaaatcctttaaaagcacaaaggaagagtctgcactggaaagcaaagcaaaatagattggaaatgttcagtggaatttaagcaaagaatgcagagctgctctcctcttctgctgtc

SEQ ID NO: 1823 - DNA, 120 bp, synthetic construct
  source 1..120: mol_type = other DNA
actcagttatggctgaagtgaagttagctcttaaaatgtagcagctcttagagacatagacatatgtggctctgaactacagaacagaagaggaaatgaggataagggaagcttaagcaa

SEQ ID NO: 1824 - DNA, 120 bp, synthetic construct
  source 1..120: mol_type = other DNA
aggattttctcagtccatgaatgaggcctaataaaataggacagttaataaaaataacgagtgcctcataaatcaggaaattaagtgcttccccattaaaccaggctcagcccccacatt

SEQ ID NO: 1825 - DNA, 120 bp, synthetic construct
  source 1..120: mol_type = other DNA
tgttctgtcactggcttaatatatcccattagggtgggcagggactcccaaaagcaaagacattcaagtccagtcattttggtttatgtcatcagcttcaataataataaggttgcaaga

SEQ ID NO: 1826 - DNA, 120 bp, synthetic construct
  source 1..120: mol_type = other DNA
acttggaaagagatgctagcaaatcagatcttgcgagcttatgtgagctggctgcagtgcaccactgtaaaactcatatataatttgaagtgaaatgtggaaatgctttgtcttgctttg

SEQ ID NO: 1827 - DNA, 120 bp, synthetic construct
  source 1..120: mol_type = other DNA
gtctactcagcaggaccataaccctttgaggatatggtaagaatgagtcttcctcatcttcatatgcatagtaactagtatcaggcctggagcaaagctgaagcttaataaatgattgtt

SEQ ID NO: 1828 - DNA, 120 bp, synthetic construct
  source 1..120: mol_type = other DNA
tctttccatcacaaacatatgtcctactttctcacttcatggagggcctaatggaagatacagtcattaggatgcgtgtattcattttcccgggcccttagtgaaataggcattttggaa

SEQ ID NO: 1829 - DNA, 120 bp, synthetic construct
  source 1..120: mol_type = other DNA
gctgatggctttttgagaaataaacctccccagggaatccacctcaggaaatctactcagtatactttcttggtataaagcaagaaaacattgcaaagaaagacagatagccttgattgc

SEQ ID NO: 1830 - DNA, 120 bp, synthetic construct
  source 1..120: mol_type = other DNA
ctattaagcatgtggatgcatcgcttccttcagaggtgttccctctttagaggagtgatcagacagatttacaatgaacgataacacaaaaacgtgacatgaaataaatgtgcatcgaga

SEQ ID NO: 1831 - DNA, 120 bp, synthetic construct
  source 1..120: mol_type = other DNA
aagataaagagatagaaaataggacaggaaatataagaaaagcaaatcaccagtccaggatgcccagcatgtaaataatgagagtgccagaaagagaacacgcacagacacacagtcaca

SEQ ID NO: 1832 - DNA, 120 bp, synthetic construct
  source 1..120: mol_type = other DNA
caaagatgatgagtctgaatggctttgaacttctcaatagtaataccagagaccagaaaacaatggagtgatgtcttccaaaatctgaagggctatgacttgcaccctggaattcttctc

SEQ ID NO: 1833 - DNA, 120 bp, synthetic construct
  source 1..120: mol_type = other DNA
gcgtctcgctgctgagaggagatggagggtaaggggtagaggactactgtttttcacgacaagccttatacactatttgcttttttaaacaatgggcatgtataaaatttgataacatgt

SEQ ID NO: 1834 - DNA, 120 bp, synthetic construct
  source 1..120: mol_type = other DNA
ctgactcgactgacttcagttttggtgagtttcctccaaggacactggcactgatgaccgcaaagggcaaaactcattagataatgatgagtttctttagcataaagttaaagattattg

SEQ ID NO: 1835 - DNA, 120 bp, synthetic construct
  source 1..120: mol_type = other DNA
gagaaattccttccagtagaatgcgaaaggcaccactctagaccagacaaagatggatactgacacccgtaattaaagagtttctgttgagtacatatgacttctttttgaaaatggatg

SEQ ID NO: 1836 - DNA, 120 bp, synthetic construct
  source 1..120: mol_type = other DNA
agcagaaatcaaaagagagaatgggtctctctgtttatacctttagggcagtgcttagttaatcacttggactcttctagacagacttctttgggtaaaaatccctgcttccccatttac

SEQ ID NO: 1837 - DNA, 120 bp, synthetic construct
  source 1..120: mol_type = other DNA
gttgaatgtatagttagcttatttcaaatctgagtcagatctgtttctcattagctcccggaggctaagatatggataaactcaaaacaagtcctgattttgctgggcatggtggcttat

SEQ ID NO: 1838 - DNA, 120 bp, synthetic construct
  source 1..120: mol_type = other DNA
tcttggtgcaatgtatctcagaaggacagtcaaaagaatatctcataagatgagggacagactgactggctgtttactggaacatacctacagatcacctgagaatcttgttcaaatgca

SEQ ID NO: 1839 - DNA, 120 bp, synthetic construct
  source 1..120: mol_type = other DNA
aagtttcctatggcctagaaaaggcaacactacaactctgtccatcaaaaattgaacaaacctgaataggaaataggatccactcttataaggaaaggggaggggctgtattacaatgtc

SEQ ID NO: 1840 - DNA, 120 bp, synthetic construct
  source 1..120: mol_type = other DNA
cacctgacatcaaattctgcaaaagaagctccccaaggaagccagtctttggttctgcagataatatatcatgtgctaaatcactcagggaaatgtcacacagttgttagaataaagaag

SEQ ID NO: 1841 - DNA, 120 bp, synthetic construct
  source 1..120: mol_type = other DNA
atgccacagcaaaaagcccatgctggttaaggaagatgatactggcgagagtgtctccaaatctttctagcatcttttcagttgatgaagctctgactttatcattatatggaaacctaa

SEQ ID NO: 1842 - DNA, 120 bp, synthetic construct
  source 1..120: mol_type = other DNA
atgaacggtactgaggtttttctcatctcctaaacctgtgtctgaaaggttgtaagccataaagtagtagctcatcattgagtgcaacacactcatacctcctgttttgcaagagaaaaa

SEQ ID NO: 1843 - DNA, 120 bp, synthetic construct
  source 1..120: mol_type = other DNA
accatattctagaaggatgtcctgttgtgtgagccattttgctgttcatgaacattactcaaaacatctttctttaacataactcctgcctgcgatggtagcagtgttgtgttctgtttc

SEQ ID NO: 1844 - DNA, 120 bp, synthetic construct
  source 1..120: mol_type = other DNA
aagagaattttgtgagaaatctctactgagttttgctgtcccaggagaggagttggtttagctgttttatcaaaaagctttgaaatataaagtgctcccgaggagttcgaaaggacacag

SEQ ID NO: 1845 - DNA, 120 bp, synthetic construct
  source 1..120: mol_type = other DNA
tgatccaagttcagactgctaattatttgaagctatgattgaacccaggaatccaacctagcctttgcactatgttattacgttatagtgcctcctaaaccattctccctgttgtttagc

SEQ ID NO: 1846 - DNA, 120 bp, synthetic construct
  source 1..120: mol_type = other DNA
aaacaagaagcaaagcatacaaatgtgtgcaggctgcaaggctgagaccaagaaagaaagtagatggggttgaaaatgaatcctgcagtgggaaaattaatttagtataagccccaaagc

SEQ ID NO: 1847 - DNA, 120 bp, synthetic construct
  source 1..120: mol_type = other DNA
tgtaggaggtcagagtctcagttgtgggagcccaaagtccaggtggaaaataaatgctaatgaaaagttcccttgtattcactctgcttattgagtttacatagacaaatgttctgagga

SEQ ID NO: 1848 - DNA, 120 bp, synthetic construct
  source 1..120: mol_type = other DNA
attttagaaaatgagtcagagttagccaggaagagaatgagaaaaagacagtctgtagagaggaagcagtaagtatgcagataagaggctgtaagacagtagggtgggttaagtaaggga

SEQ ID NO: 1849 - DNA, 120 bp, synthetic construct
  source 1..120: mol_type = other DNA
ctttacaacctggagggctaaggaacaagagccaagggacccattatagctgaacctcaaatacagcctaagaagtaaccttgttttcttattcagacagagctttatggtttttgtttc

SEQ ID NO: 1850 - DNA, 120 bp, synthetic construct
  source 1..120: mol_type = other DNA
tgctggtgaaatgaagtgaaaagccaaggaattaccccgattatttcctgtatgaaagatgccagcctggattaaaacctcaagaacttctgtcataaaccaaactgtatggtggagaat

SEQ ID NO: 1851 - DNA, 120 bp, synthetic construct
  source 1..120: mol_type = other DNA
atgttaagaccagatgccaggttaagcctccaagagccatgtctatgcaatcacaagtgacatagactgggcttgaaaaaatgttaatctatgcaaaatcctcttgttctcagtatacac

SEQ ID NO: 1852 - DNA, 120 bp, synthetic construct
  source 1..120: mol_type = other DNA
atatatatatatatttccaaacaatagtcaccactgcccagatgatactgaaggcctctggtagaccagatctcttgtttttcatgacgcttttgtaatctcattcattcatccatccat

SEQ ID NO: 1853 - DNA, 120 bp, synthetic construct
  source 1..120: mol_type = other DNA
tcagggggagggtagcactagataataattactgctgggggccactagttaagttttggggaaaaactcatttgaaccctcaattcaaatcatctaccacaataaaaggcagataaagta

SEQ ID NO: 1854 - DNA, 120 bp, synthetic construct
  source 1..120: mol_type = other DNA
cattttttctgagcagtaggtattaaaaatgagcttaaaatattccatttattgaatattcagtttacatggtttaccatgttgtaaacacttgtgttgtcattcagcccttgttgttac

SEQ ID NO: 1855 - DNA, 120 bp, synthetic construct
  source 1..120: mol_type = other DNA
ttaggaaaatggcaggttggtagagcaatcagagcacacaattattgaataacttcgccaccttataggggcatggtttgtggcatcccaatgcaattagaagagtaacatcaatgatca

SEQ ID NO: 1856 - DNA, 120 bp, synthetic construct
  source 1..120: mol_type = other DNA
ataaaaaggacataactgcatattccaattattactttgcaacaggagaaagataggatgaggttgacaacggccttcgaactgcttttccttctgcccttcttttccttcctaatctct

SEQ ID NO: 1857 - DNA, 120 bp, synthetic construct
  source 1..120: mol_type = other DNA
tgcttcaacccagcagagactacgaataactttggagttgtttaaactcgtttcttttctctaagcaacctagctattcagcagctgttcatttcaaagctcagaaagatgcaaatggag

SEQ ID NO: 1858 - DNA, 120 bp, synthetic construct
  source 1..120: mol_type = other DNA
tctgtctcattcaccagtatagcccaagtgccagggacattgcttagtgtagaaggactcactaaatatttgctgattgaaggaactgatattctgactagttactggagtagtgttaga

SEQ ID NO: 1859 - DNA, 120 bp, synthetic construct
  source 1..120: mol_type = other DNA
cgagaggtatgacagtctttggccacattctatatttgccaccatatctagaaccctctatgcttccatggacatccaaaggtaggatgataataacccaaagaacttttttcttccttt

SEQ ID NO: 1860 - DNA, 120 bp, synthetic construct
  source 1..120: mol_type = other DNA
tgtattgtcatcaataaaccacatttggctgatcaagaaatgcaaaactagaccaaaaagtacaatgacaacaactgtggccgagccagcatccttgcattcatctattcattcagcaca

SEQ ID NO: 1861 - DNA, 120 bp, synthetic construct
  source 1..120: mol_type = other DNA
gaaacaaatccttgcatgtttcttcatcattcccagccgtttcctgaagctcaggcaaggaatgtgaaccattacttggttttattgcgttcacaggcaatgtaagatgatcacataaaa

SEQ ID NO: 1862 - DNA, 120 bp, synthetic construct
  source 1..120: mol_type = other DNA
tatgctattgctgcacgactttcagccttcaaggatcagggatgccacacaaccactttagtagaaattggcctctattccttggttttgccttctgtttttcacttaactttttttcat

SEQ ID NO: 1863 - DNA, 120 bp, synthetic construct
  source 1..120: mol_type = other DNA
gaggggagaaaaccctccagagccaaatcccaaatctatattcagggtatgattatcaagttggtagattattcaggattttttctctacccatccccttctgccaatatgatttttaga

SEQ ID NO: 1864 - DNA, 120 bp, synthetic construct
  source 1..120: mol_type = other DNA
attcatgtagaataaacattgtctcggcttgtctacatagtgaaatgtagatttaagaagtaatgcagataaataatgggatgccaagcttagaggttggaggtgggggaaggaagccca

SEQ ID NO: 1865 - DNA, 120 bp, synthetic construct
  source 1..120: mol_type = other DNA
tctattgttcctgcataacagcactgtatttactataaatcctgcccctagatgtcaaaacaaccttgatgttatggtgcgttgattgtcctacacatcacttctgaatcacatatcccc

SEQ ID NO: 1866 - DNA, 120 bp, synthetic construct
  source 1..120: mol_type = other DNA
tcttcatctctatttcactcctgtatctgagcactatcttcatattgctgggctaggtagcagagataccagctgaggattacagaacccaaaccataaggaactcagcacatttgacaa

SEQ ID NO: 1867 - DNA, 120 bp, synthetic construct
  source 1..120: mol_type = other DNA
atcatttagaaaagagaaaatgagatcgaaatctaggaacaccccccaaaatgaaagatagcttagaagctaccgttaaacaattaaagttgggagagaaggagccgccagctgatgtgg

SEQ ID NO: 1868 - DNA, 120 bp, synthetic construct
  source 1..120: mol_type = other DNA
gagtgaaagtgacaatggttttagcacctggaagttgtttgaaggtacaagtgttaggtgggagttcaaataaatgccagcttcatacaagccagtaagcaagtagtaccagtgaaaatg

SEQ ID NO: 1869 - DNA, 120 bp, synthetic construct
  source 1..120: mol_type = other DNA
atccctgagttaaagggaccattattcatctttatgtacagcttcctatgacaggcctacatgataaagcccagagacactttgatgaagtaaataatttagccccatccatactcacct

SEQ ID NO: 1870 - DNA, 120 bp, synthetic construct
  source 1..120: mol_type = other DNA
aaataaatgactacatggcagagttggatgtgaactacagttggtctgactcccttcatattcattctactggaccttactacttttatctccgtgagggagtttggtttaaggatagga

SEQ ID NO: 1871 - DNA, 120 bp, synthetic construct
  source 1..120: mol_type = other DNA
tgacaactttgtgcaagtcacttgaactttctgagctatgctttcctgtgctgataaagtggcaaccacagggccttttctggctgtctcttaggccttatattaagaatatatacatta

SEQ ID NO: 1872 - DNA, 120 bp, synthetic construct
  source 1..120: mol_type = other DNA
aaaaaatggatgttccctgattctaaaagctctgcatggatggagctttcatgtattcaggtttgtgactcactgacaggtgtgagatggaactaactcattgcttcacacaggaaatat

SEQ ID NO: 1873 - DNA, 120 bp, synthetic construct
  source 1..120: mol_type = other DNA
tacatataaaaaattcccttcctgtttttaaatgatggggtttcagattaaactccatttgccttttaccaagcacatgtgagtgtactggtataaccaaggtggtgcctggctccagtg

SEQ ID NO: 1874 - DNA, 120 bp, synthetic construct
  source 1..120: mol_type = other DNA
ggcataaaaataaatttcctagaacttacagggatatgggtgtctgtttctttataaaatgagaggccctgccttgcacaaataatggcccactgtagtaatatcagcttgtaacccgga

SEQ ID NO: 1875 - DNA, 120 bp, synthetic construct
  source 1..120: mol_type = other DNA
actaatccctattcacaggattggtatgagaaattgtaagtacaatttaaatgtacttacagtgcctagcaactagtaaactgtcagtgcagggaatgttagtggcagtagtcgtggtgg

SEQ ID NO: 1876 - DNA, 120 bp, synthetic construct
  source 1..120: mol_type = other DNA
ggctgtagaaaggtctctcgtgtgggattcacagaggaggccatgcagggttgcctggaatcaactgttttaatgaataatattaaggtagtagtgacattattaattaatgaagtaaga

SEQ ID NO: 1877 - DNA, 120 bp, synthetic construct
  source 1..120: mol_type = other DNA
gaaggattcatcaagaaaggcgattctaaaagtgtttactaattatacgctaataaaaaagccttcccaagagagcaagcaccagaggaaagatgccgacaataacagctctgagttcca

SEQ ID NO: 1878 - DNA, 120 bp, synthetic construct
  source 1..120: mol_type = other DNA
tgaaagtttcacaatggagagtcaaaacagaaagagtgcttagggatcatctgcccaaattcttctccactaccattatactgacttggaaacagaagctcagggaatttaaatggtttg

SEQ ID NO: 1879 - DNA, 120 bp, synthetic construct
  source 1..120: mol_type = other DNA
atttcccgagctctattagaataaggttttcattttaatcacgctctctgggcaggccaaatttaggcataatgaaaacaaaaagtgttatgcaaaatgagacgttagaggaagcccggc

SEQ ID NO: 1880 - DNA, 120 bp, synthetic construct
  source 1..120: mol_type = other DNA
ctggactcctgctcacccaggtgttttcaccgctgactgcattctcccatggtgtagagtaaaattcattgccataaaaagtttcttagcaaattgatcttaccaactgaatgaaaataa

SEQ ID NO: 1881 - DNA, 120 bp, synthetic construct
  source 1..120: mol_type = other DNA
aatagatgttttctgaaagcctgagcaatgtacaaaactgaaagaggatagggatccagctgaaaaagaagcacgtcccatgccatgagagaagatgaagattcatgagattcttgtctt

SEQ ID NO: 1882 - DNA, 120 bp, synthetic construct
  source 1..120: mol_type = other DNA
caagcaccaattttgataaatctctcttgcacagatcgaagtgaagagcacctgaatttgagggccaagaggttctcatatcctggtgagaaggtgcaatccctgaaattcagtcctgct

SEQ ID NO: 1883 - DNA, 120 bp, synthetic construct
  source 1..120: mol_type = other DNA
gtgaggctgttggttatattcttcctaaggactctctcagttctggcttttatttccgaattcaatgattctacatggagggagatataatagaaagatactgttccagacattgactcc

SEQ ID NO: 1884 - DNA, 120 bp, synthetic construct
  source 1..120: mol_type = other DNA
aaggtgactcttgttatgttttagcaaagagattggtggcattttgcccctggtccagagatttgtggaactttgaacttgagagagatgatttagggtatctggtggatgaaatttcta

SEQ ID NO: 1885 - DNA, 120 bp, synthetic construct
  source 1..120: mol_type = other DNA
atcattttggagatttaagatttgattgcctggctggatttcaaacttgcacagggcctgtagcccctttgttttggtcaatttcttccatttggaatggttgtatttacccaatgcctg

SEQ ID NO: 1886 - DNA, 120 bp, synthetic construct
  source 1..120: mol_type = other DNA
agctggagagtaggttggaggcagatctggagggcttcaaactccagattaaggatgatgacttctaaaggaatcctagagaaaatcattgagtgattttatgcatgattgtgatagaat

SEQ ID NO: 1887 - DNA, 120 bp, synthetic construct
  source 1..120: mol_type = other DNA
caagcctcatgcaatattaaaatgtttatgcaactctttctgtgcttgaagcagcagcaaatgttcttggtgtgcaaggaatgaggagaataatgttcttacacttcccaggagaaagtc

SEQ ID NO: 1888 - DNA, 120 bp, synthetic construct
  source 1..120: mol_type = other DNA
tatcctacttagaccaatctgtttagtgagctttgttggcaaaggcagtctcagggtattaattggtaggctcaaaccctatgtgaggtgatttactactcctactaagaaactgattcc

SEQ ID NO: 1889 - DNA, 120 bp, synthetic construct
  source 1..120: mol_type = other DNA
gccatcaaagaaatgcaaatcaaaaccacaatgagataccatctcacacctgttagaatggcgatcattaaaaagtgtcaggaaacaacaggtgctggagaggatgtggagaaataggaa

SEQ ID NO: 1890 - DNA, 120 bp, synthetic construct
  source 1..120: mol_type = other DNA
gtatactttaggcttatcacaggatatgttcagaggaccaattatttagaatcagactataggtctgcatttgtatgaatgaggtgggtccactactaagaacattttcacctaaggggg

SEQ ID NO: 1891 - DNA, 120 bp, synthetic construct
  source 1..120: mol_type = other DNA
attaatcattgcaggggaaaaattattcccaatcttcaaaaagtagggttgttgctaacgtaatctaggagaaaaatcattggtcaatttccaggacctgggcatagcctagtattcccc

SEQ ID NO: 1892 - DNA, 120 bp, synthetic construct
  source 1..120: mol_type = other DNA
ttttacaactcaagtctggccagtgcaatgccttctcaagattcaacacctaatagttagccttgggagttgatagaaatcacttaacctgtctaggctatagtttctccagatgctaaa

SEQ ID NO: 1893 - DNA, 120 bp, synthetic construct
  source 1..120: mol_type = other DNA
tgaggcactgcccatcttcatgggtctcaaagtctagtgggcatgaatcaagtaagaatagaaataaatgttcaattttcacttcaccatgagagcatgtaaagaaactgcaggtagttg

SEQ ID NO: 1894 - DNA, 120 bp, synthetic construct
  source 1..120: mol_type = other DNA
tattttccgtatcctgagctttctaaaaaagatggaagcaaacattaggaagaaatccaacagcaagaatccttcagtgcccagaataatcactgccttttatggagcacttaccaggtg

SEQ ID NO: 1895 - DNA, 120 bp, synthetic construct
  source 1..120: mol_type = other DNA
gagattgcaataggaaatactttgtctagaaatggcaacaagccaaaagggtgcgagtatagagaggggagatcacaaaaataggaggaaaagaaaatgaggggtatgattctgtactcc

SEQ ID NO: 1896 - DNA, 120 bp, synthetic construct
  source 1..120: mol_type = other DNA
catttcttccatgccattcttacaagagacaagaaacgatgtgtcttcccattgtacagaactgaaaatgaagttatggagtgttttctttctcccctgggatcacagtagtataccatg

SEQ ID NO: 1897 - DNA, 120 bp, synthetic construct
  source 1..120: mol_type = other DNA
cctgctaagtataagtaagtgtaatatcaccttaagccagaataaggaagaacttcactaatggctactgcagcaaatcagagcttagacccctaatctgttacctccttgtgaaacatg

SEQ ID NO: 1898 - DNA, 120 bp, synthetic construct
  source 1..120: mol_type = other DNA
cacaagactgtggagaatcctcgataaattcatagaagccccagaaagtccatgcttaggagtagacctaaactagccctaggttaaagactactttagatcatctctttaaaagcttaa

SEQ ID NO: 1899 - DNA, 120 bp, synthetic construct
  source 1..120: mol_type = other DNA
gaagttctagaacagacaaaaggaacctgtgggtgaaaaatgaataacagtgtttgcctctgtagaggagattactggcaaggggcatgaggaacctttctgtgatgatagaaatattat

SEQ ID NO: 1900 - DNA, 120 bp, synthetic construct
  source 1..120: mol_type = other DNA
aggtatctttatggaaatttcagagtcaggatgaatacattaagtgatcacaacacaagctttttgttcatgacaaaatggttgtctcgccattcccagcccttggcacattctctcttg

SEQ ID NO: 1901 - DNA, 120 bp, synthetic construct
  source 1..120: mol_type = other DNA
atctggcaaataggtacatgtcctacaaatgcttggagagataaagagatagataatcccactgcaagactctagttctttccacagttccaaaatgtggattcctagaacttcaagcaa

SEQ ID NO: 1902 - DNA, 120 bp, synthetic construct
  source 1..120: mol_type = other DNA
gtcctggggagttacaatgaacaagagccttagtgctgtctgaaacacaaaggggagtgaagaaatctgtttgccaaattgaaacgggcagaattgacaatgaaataaacttccatttct

SEQ ID NO: 1903 - DNA, 120 bp, synthetic construct
  source 1..120: mol_type = other DNA
gttgcaacgaacagatatttgtttgagtgacttcaagtaacaagggatttattggaaggaatacaagaaaagccccaccgtcacacttcagaaaaagcaagaactggacgaagaatctga

SEQ ID NO: 1904 - DNA, 120 bp, synthetic construct
  source 1..120: mol_type = other DNA
agaagttaacagaacaaaatctctgggaccatggaatgggttgctttgatatatagggagcattcataatcaatgatcatactctcaccctacgcgaagttactactgagcacttactgt

SEQ ID NO: 1905 - DNA, 120 bp, synthetic construct
  source 1..120: mol_type = other DNA
aaatgttacttgaatctccatttgtgctttttctctggggttaggtccatagctgttattagattcccaaaggagttcacaatcttctgaaggttagaaccattgtcctggttcttaggg

SEQ ID NO: 1906 - DNA, 120 bp, synthetic construct
  source 1..120: mol_type = other DNA
atgttaatagggactctgtaaataaataaggtttcacggttaagtaagcttgggacatgttggattacaaaaggtgagacaggtgtctttgctgcaaggcttcctcaacctttaacgaca

SEQ ID NO: 1907 - DNA, 120 bp, synthetic construct
  source 1..120: mol_type = other DNA
caagaaagcaataccatcctcctccagagattgtcaaaagtctggcaacttccttactggataactgctaagtagcactactattatcatattagccacacttgttgagtgtttaccatg

SEQ ID NO: 1908 - DNA, 120 bp, synthetic construct
  source 1..120: mol_type = other DNA
gctttcagggaataatgaaaaagacagaaaggtgaacatgacaatctagttccaagagccctagattgaaaaaagaacgggaaaataggtggattttcctctgaagccaaagaatggcat

SEQ ID NO: 1909 - DNA, 120 bp, synthetic construct
  source 1..120: mol_type = other DNA
agggcttttcgcatagtgttttaatacctagcctgtaaaaccttaataaatgttaatgaatttgtgtattgttgagggttacccaggatggaaagaggggtaggctctctggtttgtgga

SEQ ID NO: 1910 - DNA, 120 bp, synthetic construct
  source 1..120: mol_type = other DNA
tggtagtgccctcccccctcatccctccaatctcgtggtgccaatttttcatttagtattctttttttatttgtttccattgtcaaacacacatacaacagagtacaacagttttagagg

SEQ ID NO: 1911 - DNA, 120 bp, synthetic construct
  source 1..120: mol_type = other DNA
tgattgttatacttctataaaaaggtttaaaaacaagggcaaagccagcaactctcagggatgccccagagcctgataaagagactgaacagggaattctcattggcaactgcagaaaaa

SEQ ID NO: 1912 - DNA, 120 bp, synthetic construct
  source 1..120: mol_type = other DNA
tcttggtctgtctaagagctgattatttctcagattttattaaagtcattttctcaggaagtgctttcctgaatgcctagaccagttgttctcaagcttaggtaggaatcaggcactcct

SEQ ID NO: 1913 - DNA, 120 bp, synthetic construct
  source 1..120: mol_type = other DNA
aacagttctggaaccttcctccacacctattccccctctcctaggtcacttagttacaactactcctgatggtacacaatctaatgggtatgcctgacaactcctatggaccgaatgttt

SEQ ID NO: 1914 - DNA, 120 bp, synthetic construct
  source 1..120: mol_type = other DNA
acctctgctctccctacctaccactctccatgcagtcttcttaacacttaattcagatcatgccatctgccaactcaaacctcatcaaagactttctgttgcacttgcaataaaatctaa

SEQ ID NO: 1915 - DNA, 120 bp, synthetic construct
  source 1..120: mol_type = other DNA
gccttgggtctttctttgcagcaacacaaaatgcactaatgtagttcatcatccactgttggactttaaggttgtttccaactttctattaaccatcctggggtgaaggatctttgcaat

SEQ ID NO: 1916 - DNA, 120 bp, synthetic construct
  source 1..120: mol_type = other DNA
gagttcctaaaaattaattaataggaatcaacacactgacaaaagtctctgtgcctccctcaaagaagtgaacacaggaatttctatgtcccggttcttgtgttagagccacaaggtcag

SEQ ID NO: 1917 - DNA, 120 bp, synthetic construct
  source 1..120: mol_type = other DNA
aacctttgagacaagttttacatatgaggaaaataagtctgaggctgagttagtaatttgctcgaggttgtgcagttaggaggtgcaggaatagatattggaacccaggtctatgtaact

SEQ ID NO: 1918 - DNA, 120 bp, synthetic construct
  source 1..120: mol_type = other DNA
taaacaatcaaaggagcattgaggctggactaaagttagtgggattctctagtccataggcaagagcatgaagggtggtatgaccgatgtcaacaaaatcatgcatgtaagaataaagag

SEQ ID NO: 1919 - DNA, 120 bp, synthetic construct
  source 1..120: mol_type = other DNA
taatgttacataaatggaaccgtaggcactctaacattatatgaataatagcacataattaagcatgaggaacatcccttagggtgataactgagacacaaaagtggaaccacccccctc

SEQ ID NO: 1920 - DNA, 120 bp, synthetic construct
  source 1..120: mol_type = other DNA
gaaaacctgagtgaaggtaatggcagagaaagggggtcgcttgtgaaaaaaaataaatagaaaaaatcaggagtgattggaattggaggggaaagagggaaaacatcacacatgtgtcat

SEQ ID NO: 1921 - DNA, 120 bp, synthetic construct
  source 1..120: mol_type = other DNA
tattggtttgtttgtttaagaaagggcaatttttgtggtacctctcaaatcctaccatatggcaactgcctacgttagctcttgttaggaagtctcttgctcaactatgaggatgggtaa

SEQ ID NO: 1922 - DNA, 120 bp, synthetic construct
  source 1..120: mol_type = other DNA
ttcctagaaatatacaacataccaagactgaatgataaagaaattgaaaatcttaacagattaataatgagtaaaaagattgaatcagtaatcaaaaatctcccatcaaagaaaagccca

SEQ ID NO: 1923 - DNA, 120 bp, synthetic construct
  source 1..120: mol_type = other DNA
agtgaaagaaagggaagggaaagggtctgaacaggaaaaaaataagttaaattgacactgttgcagatgacatcatctgacatatgaaaaccctaaagattccaccaacgaactgttaga

SEQ ID NO: 1924 - DNA, 120 bp, synthetic construct
  source 1..120: mol_type = other DNA
gattgcagtattattaaccttcccctactctttcataagtcagacctgcattgaggtctgaaggctttcccacattttctggcttctcctcttttatccctcaagacatttctcccaaca

SEQ ID NO: 1925 - DNA, 120 bp, synthetic construct
  source 1..120: mol_type = other DNA
ttgtctcatgtaatcatggggaaagagaagacaaaggaaagaaaagagaagagttaaatctattgaatgggagaaaaagatcactccacacatgcccaaaagaacctccagtcccagggt

SEQ ID NO: 1926 - DNA, 120 bp, synthetic construct
  source 1..120: mol_type = other DNA
tgcggttggggattgtgttggaggaagagctaggctgacaaagtctgtttagtacaaggaaactgaaagttgaaaagataagtttactcaaataggtaatgtgggaagtcacctaacatt

SEQ ID NO: 1927 - DNA, 120 bp, synthetic construct
  source 1..120: mol_type = other DNA
tggaagagttttttaatttctatggtaataaggagcctaaactccagttccatttacaggctatacttaggagctatatcagccccaggctgatctctgtgatatgcagatttaccagag

SEQ ID NO: 1928 - DNA, 120 bp, synthetic construct
  source 1..120: mol_type = other DNA
tttgtctctgacaatttaagatcttacaactgcctcataacttgggatgtgttttaaattcctttatgaggaaatggaagcccaaagatactgagaaggggcccagagccacaaggtaat

SEQ ID NO: 1929 - DNA, 120 bp, synthetic construct
  source 1..120: mol_type = other DNA
tatatagatatctaggggaggggaagagaacatcaagcaggacaaatagtctaagccttatgctctaatccagcttgccaaatttcctcactctaacaaatcataccttcctccaaagac

SEQ ID NO: 1930 - DNA, 120 bp, synthetic construct
  source 1..120: mol_type = other DNA
tcccttgacctaataactatctaattgtctcaatattacccctaacagagatcagcagaaaagaataaatagcccagaagcaaaccttaatagaagttaaaggaagcatcacaaatcagt

SEQ ID NO: 1931 - DNA, 120 bp, synthetic construct
  source 1..120: mol_type = other DNA
aaatcagggcaaaactgatgaagatttagatctcagttttccagtaggaacaattaagtgttttaggtctttgataaagagcattgcccacaggaaccacaaggtcatgcaggatcacag

SEQ ID NO: 1932 - DNA, 120 bp, synthetic construct
  source 1..120: mol_type = other DNA
tgattctagaatccactctcaaccaatggctctaattctactcctgaccataagaaacctgccttgactacatatgtgcttaaaaagagctttggacactctacagtggttgctactaat

SEQ ID NO: 1933 - DNA, 120 bp, synthetic construct
  source 1..120: mol_type = other DNA
tctttaaatttcaattttctaatctctgccatagatctgcccaaaagtagctctcttcactttcaagttgggcaaaggaatgtacagacaaatcctctgtcccactgcccaaagatgtgt

SEQ ID NO: 1934 - DNA, 120 bp, synthetic construct
  source 1..120: mol_type = other DNA
agtcagagatgggaagtataagggacaactaaaatcagtggagcaaaccaagatgctagaaatatgcccagagacagaatccagaaggtgcctaaagccaaattctaggaagagaattga

SEQ ID NO: 1935 - DNA, 120 bp, synthetic construct
  source 1..120: mol_type = other DNA
catgcacctagatgaaatactactgatgttgttcaagctctttggggattttgtctccaaattaccaatgtcatttctcaatatgccaggaagagagaaggaaagcaagcatgagacaag

SEQ ID NO: 1936 - DNA, 120 bp, synthetic construct
  source 1..120: mol_type = other DNA
ggttttaagccctgcatgcattaggtatttctcctaatgctctccctctccttgtcccctacccccgacaggccccggcgtgtgatgttcctcccactgtgtccatgtgttctcgttgtt

SEQ ID NO: 1937 - DNA, 120 bp, synthetic construct
  source 1..120: mol_type = other DNA
gtcaggattaaaggaaataatacaaaagatgcttagtccaatgtctggcacatgataaactcattaaatgttagcagtgatggtaatgatgacagtggtgatgacagtggtggtgatggt

SEQ ID NO: 1938 - DNA, 120 bp, synthetic construct
  source 1..120: mol_type = other DNA
attcattcattcattcagtgggtaagtcagttcattgtttaactgaatgaattcatgaggcctcagtccaccaactatctcattggctcagaatttcacagacgtagcagcatatcatgg

SEQ ID NO: 1939 - DNA, 120 bp, synthetic construct
  source 1..120: mol_type = other DNA
acctggatgttactagtaggtcgaggtcactattggggcttagaaatttccagtcttccttggaggataaacaagttgccaattactatgataaaggaactgtcatctcatgagattatg

SEQ ID NO: 1940 - DNA, 120 bp, synthetic construct
  source 1..120: mol_type = other DNA
ggaaagtagggtctgaaggactcacgtttaagataatggttcattcagcttgactcaaacaatggggtacttattctatccttttctccccaaagtgacagagtgattgttcctaagaaa

SEQ ID NO: 1941 - DNA, 120 bp, synthetic construct
  source 1..120: mol_type = other DNA
acaatatctatgtgcttggttatgggaaagccacatttcttctagtacccatgccataaaagtgagcctgaaaaattgcttctttaaggaatcctaagtgtttcatggagcaaccatggg

SEQ ID NO: 1942 - DNA, 120 bp, synthetic construct
  source 1..120: mol_type = other DNA
taaggctcagctgaaatgcctcttcctccatgaaacttttcccaatcccccaccctcttcatcttttccaagtcaaaatgatcctcttcaccttttccaagtgaaaatgaattattttct

SEQ ID NO: 1943 - DNA, 120 bp, synthetic construct
  source 1..120: mol_type = other DNA
cgagggatttgaagcagaacaacttctagaactcgactgtcagaccggaaagtttaaaatcaagagaataaagccagacaagaagaaaccaagccacaaattgcaaacaagtcatttttc

SEQ ID NO: 1944 - DNA, 120 bp, synthetic construct
  source 1..120: mol_type = other DNA
aattgaaacatgttcttttcccaagagatgaatacagagaagccaactaactcagattcagtggggtaaaaactaggctcagacctgctcactccttgaagagtaagatggaattttctc

SEQ ID NO: 1945 - DNA, 120 bp, synthetic construct
  source 1..120: mol_type = other DNA
gcctgaatagatttttaatgcagattaaagtaccctactcagaaaagaaatggccacaaagcacatttatgagtaacgaacagaagtgagcaccatgattcaagggaggaagggataggc

SEQ ID NO: 1946 - DNA, 120 bp, synthetic construct
  source 1..120: mol_type = other DNA
gcaaaaaaaaaaaaagggtggagaatgaatgctttcaagatatgggtgttggagaagttcaagagctaatagaaaccacaccaaaggaattaacagaaaatgacttgatggagatgagtg

SEQ ID NO: 1947 - DNA, 120 bp, synthetic construct
  source 1..120: mol_type = other DNA
atcatgcatgtgtagtaccctggccctatacctatctatttgcctgtaccttcatctttgttagcccttttataagagactaaacagaaaaagagatgtaactcaaaactcaggcctatg

SEQ ID NO: 1948 - DNA, 120 bp, synthetic construct
  source 1..120: mol_type = other DNA
ggacattttaaaagtcacactgtgggtaggaaaggcttgacaagcccattatgttgtatcttccattgcaccaaaattctgttactgttcctgttgtctcattcctggttagcttcattt

SEQ ID NO: 1949 - DNA, 120 bp, synthetic construct
  source 1..120: mol_type = other DNA
aactcagaggcacatggcaccagtggcattgaaatgcacgctccagcttacctgaaaggaattgttaatatttctgttcagtatacctaattagctctggagtactgaaatttcacagaa

SEQ ID NO: 1950 - DNA, 120 bp, synthetic construct
  source 1..120: mol_type = other DNA
actgtgtagtcatttcatctctttatgacccaagttattgaaggataagaacaaccaccagctgttgctggaccctcttgtgaaagcaagctgaaaaaccaagacagcaagatgctttac

SEQ ID NO: 1951 - DNA, 120 bp, synthetic construct
  source 1..120: mol_type = other DNA
aacattttaggggacaggattgccttttcaggcagaacctctgttgagggaaaatggcagttaggtttgttcccatttccttctaaagagaaccaacaacattgtcatctatttgaatga

SEQ ID NO: 1952 - DNA, 120 bp, synthetic construct
  source 1..120: mol_type = other DNA
ttatctgcattagcatgtttcagatcaagcacttcagatgccttctctacacttgtaaaatcatcatggtcatagaccataggaactgcaaatggccttagagatcactctatcccatct

SEQ ID NO: 1953 - DNA, 120 bp, synthetic construct
  source 1..120: mol_type = other DNA
ccactgtcccctctaataattgcttctaatcacttatctgcactaaaccctgtgctaagcactttacaatcaatcagcccattggaccctcacaatgagcaattattaaggtattactgt

SEQ ID NO: 1954 - DNA, 120 bp, synthetic construct
  source 1..120: mol_type = other DNA
tgttgttataactaacaacctcccgaatttgattctaagtggcaaaatgttaactttcactgtggggaatgttccaggattctttctcagcttggcaaccaaacaccaaggtttaggtcc

SEQ ID NO: 1955 - DNA, 120 bp, synthetic construct
  source 1..120: mol_type = other DNA
caataacctggggagggggagcagggaaaaaaactatcaataacttatctaagataacttagtaaattagtggggaccagcaaaaccccaagcagaatgacttcaagtccaggataattt

SEQ ID NO: 1956 - DNA, 120 bp, synthetic construct
  source 1..120: mol_type = other DNA
atggtccagcaccagaatgccttaacaacaccaatgccttcagaaacccacagaaaggaaacaatgcagaaaggaattcatggtcttttaaatgagtgttgcatgattggccatagttta

SEQ ID NO: 1957 - DNA, 120 bp, synthetic construct
  source 1..120: mol_type = other DNA
agtgtggagcacctccacatgatcccattggacaataaaagttcattgtaagaagaataaaatctccatcacgcacctccacatgatcccattggacagtaaaagttcattgtaagaaga

SEQ ID NO: 1958 - DNA, 120 bp, synthetic construct
  source 1..120: mol_type = other DNA
agagtacattcacatgtcactttcataaataatacttcagtttaaaaacaattgtaaagaggaagggaagggtgcatttgttctgttaccagggacatcagagtgggaggtggtggggtg

SEQ ID NO: 1959 - DNA, 120 bp, synthetic construct
  source 1..120: mol_type = other DNA
aacttaagccctgtaaaataatcctttttcattaacttcaagttcaattaacatcaataatgagtgctcatttagaagtaaccgccacatcaagctccctgatggctgagctcgggcagc

SEQ ID NO: 1960 - DNA, 120 bp, synthetic construct
  source 1..120: mol_type = other DNA
ctatgaattgtgttcttttctctagtgattgactttggcatcgtgtgaggcagccccagcaaatgggacaaagaaggaaatccagtgagggccttcgggaaagatttttgttctccaaag

SEQ ID NO: 1961 - DNA, 120 bp, synthetic construct
  source 1..120: mol_type = other DNA
ttttaaggaaatttcaatttagccacttcaaaataattttttctggcacccactgtggtgccttgcacagagtgggtacttcactcaatgtctatccgcagtcaaaatgacagtcagaag

SEQ ID NO: 1962 - DNA, 120 bp, synthetic construct
  source 1..120: mol_type = other DNA
aaccctactttatctgattgcattattggccaagccgctcatctctcattgagaatcagtgctttacttaagaaaagctgcaaatcaaacaacagggctgtccagggaactgagaattta

SEQ ID NO: 1963 - DNA, 120 bp, synthetic construct
  source 1..120: mol_type = other DNA
cttcagctccatcaggaagcctgtactcaccaatcctactcactgttctttgcccgaagacatttagctcttaagctcacaccatctagtattattttaaagtatgtagtataatgctca

SEQ ID NO: 1964 - DNA, 120 bp, synthetic construct
  source 1..120: mol_type = other DNA
ctacgtccctcatctgagacagatgagtcaaacactcccttgtccctcagtcccaaccctaacataaaccctacccaaataaggaagagaaaatagtttttatgtatgtatgtaagtagg

SEQ ID NO: 1965 - DNA, 120 bp, synthetic construct
  source 1..120: mol_type = other DNA
ttagcttaagaatgtctggagctgggtgtcaaacctagaactaattccagattctgcttccttaacacaatgtaatatcctctcctttcagaagtacaggggttaacgaatgttcagagt

SEQ ID NO: 1966 - DNA, 120 bp, synthetic construct
  source 1..120: mol_type = other DNA
ctgttttctgaaatgcaaacaccactgcttgtgatggatcccttaaagtgcttctgattcacataggtcagcatgttcatgtaaattagacttaagtctaaactatgtttcttgcctaaa

SEQ ID NO: 1967 - DNA, 120 bp, synthetic construct
  source 1..120: mol_type = other DNA
gaaggaccctcatgttggggagaagttaatacttgtcagccaaactacagtcacaagtaaaagacataagacagagagatcatagatgtggagttaaacaggctgaaattcaaataccag

SEQ ID NO: 1968 - DNA, 120 bp, synthetic construct
  source 1..120: mol_type = other DNA
ctgccttgctgagcttctataacaccacatgatccacagaggcctctgttccttcttgtaagaaaattctttctggtgatgtcattgactccattctactgtctaattatgaactttcct

SEQ ID NO: 1969 - DNA, 120 bp, synthetic construct
  source 1..120: mol_type = other DNA
aaaccatcattctcagcagatatcctttgacctgactccctgccaaaaggcaataagcttattgtttctaaaattccagagctatagtttcctgtctcagagaaactttacctctcccat

SEQ ID NO: 1970 - DNA, 120 bp, synthetic construct
  source 1..120: mol_type = other DNA
ctagaagtcctcttgagtctttggctaaatattaagttgtgcattcatacagtgagattccacaagactaagcaaagagcagctaccaagtaaagaatagctatcagggaactgtaagcc

SEQ ID NO: 1971 - DNA, 120 bp, synthetic construct
  source 1..120: mol_type = other DNA
aaaagaaaatcctaaggaaggcagaaggtgggaaagacataacaggaaacaggtaaagagcatctctgactcaggaaattctctgactcactggaaataatgcaaaccatgtaacaatgg

SEQ ID NO: 1972 - DNA, 120 bp, synthetic construct
  source 1..120: mol_type = other DNA
ctactttcatctgctttatcatctctctgctgtcatctctcaagggcaaccctaaatgcaggatctgtgcagcaataatacaggtaggtaaaactctaagtttaaggagaatcctaaaga

SEQ ID NO: 1973 - DNA, 120 bp, synthetic construct
  source 1..120: mol_type = other DNA
taaagaacatcatagaattcatgtcttcgagctcctaatctagtgttctcctcaccacagaacacttactttacttatctgggcttaaaagagtcctttccatgctcaccctcatgaact

SEQ ID NO: 1974 - DNA, 120 bp, synthetic construct
  source 1..120: mol_type = other DNA
cgccttattttttatctactcccaagtagaaatgatgttcatgtgcatcttttggaggcaatggctcagctatggttcatagaaaccaccatgtacaaaatgttctgtggttcttagcct

SEQ ID NO: 1975 - DNA, 120 bp, synthetic construct
  source 1..120: mol_type = other DNA
agtgcacagcctgcatgaccagatgctggagtgcagctgttgctattatataaaaaaacaatagtggttcatattgatgaagcactttattttgcatcaggcattgggttaaggatttgc

SEQ ID NO: 1976 - DNA, 120 bp, synthetic construct
  source 1..120: mol_type = other DNA
tctttcaaatggcaatatagattctcaacatttaaagggatttttaagtagccagtaggagtccaccaaatctagaactgatggcatcttctcaagacacaggtcaccttttgccctgct

SEQ ID NO: 1977 - DNA, 120 bp, synthetic construct
  source 1..120: mol_type = other DNA
gggaagggactgacagatatgggagttcaaaggtcagatatattgcattgcatacatctctaaattgctcaggcctctccatagtacatgtaaaatccaaagtcatgtatccactttcct

SEQ ID NO: 1978 - DNA, 120 bp, synthetic construct
  source 1..120: mol_type = other DNA
gtcagaacctaaccttgaattttcatagggaaaatgaacggaaccataatgatacatgttgtctgaaacacagaacatggtatagcaaggtgtatctactccatggggatgtctgcaatg

SEQ ID NO: 1979 - DNA, 120 bp, synthetic construct
  source 1..120: mol_type = other DNA
agttcactgaaggcactatcaaactcatcagtgcctcttaggatggtctatataaattccagcactaaatgaaaagggctcactttaggtgccagtgtcactaacactaatgttgaaatg

SEQ ID NO: 1980 - DNA, 120 bp, synthetic construct
  source 1..120: mol_type = other DNA
caataatatgaagagaaattctatattccctgagaaggtaccatatttcccaaatctgtgctggccaggaacaagagggagagaagggcaatagttttgacatctactactaagcttgga

SEQ ID NO: 1981 - DNA, 120 bp, synthetic construct
  source 1..120: mol_type = other DNA
ctgaacagtccttggtacccagcggctccttccacctgatctccagaggactgtgcgtgcgcgcaagtctcttgctttcccccaactgcacggaggcgagcaggagtctaaatgaaacag

SEQ ID NO: 1982 - DNA, 120 bp, synthetic construct
  source 1..120: mol_type = other DNA
gtgggtaccctggtgggcaagcgtccaggacccctcgcggcggccgcgacccctgtcggaaacggagacttcccgcgtgccgcctgcaaggcgtcttccctgggaggagaaggcccaagg

SEQ ID NO: 1983 - DNA, 120 bp, synthetic construct
  source 1..120: mol_type = other DNA
aactgattactcttggataaaatttgtgttttaggtgtgcagagcctaaagtaagtaaaaactactctttttctggattccaagctctccatgggctcgattcctatccaggagcccata

SEQ ID NO: 1984 - DNA, 120 bp, synthetic construct
  source 1..120: mol_type = other DNA
aaggtatttccacacaatttaatcatttccaagttattggcaggtcaacacccccctcctccagggcatagttcagtcaaataatggacaggactgattttttccttgataaagtgagtc

SEQ ID NO: 1985 - DNA, 120 bp, synthetic construct
  source 1..120: mol_type = other DNA
ctccctgtcccagcaacagcagagatctgatgaaagacagatgaaaactttcctaaaatgctgatagaaagctcacatgaaaactgaccaactgactctttgccgaaatattcaaaagct

SEQ ID NO: 1986 - DNA, 120 bp, synthetic construct
  source 1..120: mol_type = other DNA
aagatattttgcagtttgacacatgtgaccctggtattttcctggaaggaggcctttatctgtcattcttccattagtggcccctgggatgttagaaccacagccatcaagctttgtctt

SEQ ID NO: 1987 - DNA, 120 bp, synthetic construct
  source 1..120: mol_type = other DNA
gatggtgtcatttcattttctcaatggtcctgcaagtgaggggtatctcctttgggtagatgaagaaacagcttcagagaatgaagcaatgtgcccaggccatccagctacttgcctgaa

SEQ ID NO: 1988 - DNA, 120 bp, synthetic construct
  source 1..120: mol_type = other DNA
cgcacaaaggatgatacccctcgccccttccactttgccatcatgctgagaactctaggttctgccgccagggataaagttcaagggttgatgaatctggcttagaaagtgccttgcagg

SEQ ID NO: 1989 - DNA, 120 bp, synthetic construct
  source 1..120: mol_type = other DNA
ttcagtgaatgtcttgggtaaatgaattcaggagttcatttaaggtgttcatgaagaatcttggctccatgaactgtagtggaggcaaaactccacctcttcccatttcagctaggtctg

SEQ ID NO: 1990 - DNA, 120 bp, synthetic construct
  source 1..120: mol_type = other DNA
tagtgaggacatctttcataggggactttcatctcctgcttctaagaaacagcacgaatgtcagagtatcttgcacctgctgtttttttaagtgcttttcattcaacgtagtccctgtgc

SEQ ID NO: 1991 - DNA, 120 bp, synthetic construct
  source 1..120: mol_type = other DNA
tctgtacctgctgttcttaagctaccaggccacatcccatcgtttctgatgtggaatttgacttaagaaaccaaatttccagaatatttctgaacatggagttaagaggatttttgtccc

SEQ ID NO: 1992 - DNA, 120 bp, synthetic construct
  source 1..120: mol_type = other DNA
ggtgagcatagagaagctgtccagcaagttccattctctctactgctgtaaaaccaacctccttggtaactttaaacagccatttaattttgttcatgctcttgcaggtcaggaatttag

SEQ ID NO: 1993 - DNA, 120 bp, synthetic construct
  source 1..120: mol_type = other DNA
caagagattagctggttccttaaggtagataagagatgatgaatgttgagtgcctccagaattacccccatagccaatgataacagttattgtcaccattaatactcagcttgccttctg

SEQ ID NO: 1994 - DNA, 120 bp, synthetic construct
  source 1..120: mol_type = other DNA
aaaaatataataatctgtgttgaaaagtaagttttaaaacacaatgctttaccacgagagctagagaaactattccaggacctgttttcaggagatctgggctccccctattcacagctc

SEQ ID NO: 1995 - DNA, 120 bp, synthetic construct
  source 1..120: mol_type = other DNA
ataagagctgtgagaactgctgctctcacaggcaacactaaaacccagagtgaactcccgtttttgctcagtataagaatttcagagaagaggagtaaactattctgcagtgatttaaag

SEQ ID NO: 1996 - DNA, 120 bp, synthetic construct
  source 1..120: mol_type = other DNA
aacatcaacaaacctgcagctgagggtcctgactgttagaaggaaaactaacaaacagaaaggacatccacaccaccaaaaccccatctgtacgtcaccatcatcaaagaccaaaggtaa

SEQ ID NO: 1997 - DNA, 120 bp, synthetic construct
  source 1..120: mol_type = other DNA
taagtgaaggagaaataaaatcctttacagacaagcaaatgctgagagattttgtcaccaccaggcctgccctaaaagaactcctgaaggaagcactaaacatggaaatgaacaactggt

SEQ ID NO: 1998 - DNA, 120 bp, synthetic construct
  source 1..120: mol_type = other DNA
ataacgaaatgaaggcagaaataaagattttctttgaaaccaatgagaacaaagacacaacataccagaatctctgggacacatttaaagcagtgtgtagagggaaatttatagcactac

SEQ ID NO: 1999 - DNA, 120 bp, synthetic construct
  source 1..120: mol_type = other DNA
gaaagtgaggagcgtctctgcccggccgccatcctgtctaggaagtgaggagcgtctctgcctggccgcccatcgtctgggatgaagtgaggagcgtctctgcccagccgcccatcatct

SEQ ID NO: 2000 - DNA, 120 bp, synthetic construct
  source 1..120: mol_type = other DNA
aaaaccagagacctttgttgacttgtttatctgctgaccttccctccactattgtcctatgaccctgccaaatccccctctgcgagaaacacccaagaatgatcaattaaaaaaaaagaa

SEQ ID NO: 2001 - DNA, 120 bp, synthetic construct
  source 1..120: mol_type = other DNA
tggccagggcaatcaggcaggagaaagaaataaagggtatttaattaggaaaagaggaagtcaaattgtccctgtttccagatgacatgattgtatatttagaaaaccccattgtctcag

SEQ ID NO: 2002 - DNA, 120 bp, synthetic construct
  source 1..120: mol_type = other DNA
tggacaaatgggatctaattaaactaaagagcttctgcacagcaaaagaaactaccatcagagtgaacaggcaacctacagaatgggaaaaaaattttgcaatctactcatctgacaaag

SEQ ID NO: 2003 - DNA, 120 bp, synthetic construct
  source 1..120: mol_type = other DNA
atgttgttctttctttacagcaaagttggcccgagatgaccaaattcacattctcaagcaacaccgacgtaaagaactggaaacacggcaaaaacaatatcggtgagttatgacatcaga

SEQ ID NO: 2004 - DNA, 120 bp, synthetic construct
  source 1..120: mol_type = other DNA
actgactcatgaagaaatagttaatctgaataaaacaatcacaaccaaagagattgaattactaattctaaaatttcccacaaatagaagcccagacccagatagcttcactggctaatt

SEQ ID NO: 2005 - DNA, 120 bp, synthetic construct
  source 1..120: mol_type = other DNA
acattgtactggagggtctagccagctcagttagggaataaaaagataagtaaaggcacccacaatggagtacagtaagtaaaactaccacaatttacaaataacatgatcttatatata

SEQ ID NO: 2006 - DNA, 120 bp, synthetic construct
  source 1..120: mol_type = other DNA
aatggcacagctgcttgggaaacagtctgctagctcctgactgttcaacagagagttacaatatgacagcatttccactcttaagcatattcccaacagaaatggaaacatatgcccaca

SEQ ID NO: 2007 - DNA, 120 bp, synthetic construct
  source 1..120: mol_type = other DNA
gatgatagatctaaaagtaagggctaacaacataacactcttggaagaaaacatacaagtaagtcttcataatcttgggttcggcaaagtctcttagatatggcaccaagagcacaggca

SEQ ID NO: 2008 - DNA, 120 bp, synthetic construct
  source 1..120: mol_type = other DNA
agttggggaggggaaacaaggagtgaatgttaatgggttcgaggtgtcctctggggatgagattatttcagaattgggttataatgatggttacacatacaactctgcaaatatattaaa

SEQ ID NO: 2009 - DNA, 120 bp, synthetic construct
  source 1..120: mol_type = other DNA
gggctgtggaggggcctttgggagccaatattgtgatacttttctacatatccctcaatagttgaacttcttacaaggaatatgtagtatatctgggttgtttttttaactcaaaaaagt

SEQ ID NO: 2010 - DNA, 120 bp, synthetic construct
  source 1..120: mol_type = other DNA
tcaaacaagactcagaacatattaaacacaaaggaaaagattggtaagtttgcctccctcaagataaggacactctgttcattgaaagacaccaggagagagtgaaggcaagtcatggag

SEQ ID NO: 2011 - DNA, 120 bp, synthetic construct
  source 1..120: mol_type = other DNA
taaaacttacatgccattagcatcaagtgtgggagagtaacctgctgtgctgtgggtcatgttaagggtttataaatgtgtgatttgttttagagtatttgtgcacaagcctctcagctc

SEQ ID NO: 2012 - DNA, 120 bp, synthetic construct
  source 1..120: mol_type = other DNA
tgctctcccactgtgaccacatctgtctgtgttacatgcacactcacacacagcagtaaatggcaaagtgtaggtgtttgttaatcgatataatttaatctaatcattatgtgacctgca

SEQ ID NO: 2013 - DNA, 120 bp, synthetic construct
  source 1..120: mol_type = other DNA
tacccgatgaccttgtttgacagtctaaaaatccctaagaccttgtggttgttttagtctgcactcccctgaccactaataagcatcactgcattgcctatttataagctttttttccct

SEQ ID NO: 2014 - DNA, 120 bp, synthetic construct
  source 1..120: mol_type = other DNA
cacctctctagatcctgtgtcaacgtacttccatagaatttctagttttcttcatgcaggtccttcacctttctagctactctacatttagcatttgctgttctgagtaggatatttttc

SEQ ID NO: 2015 - DNA, 120 bp, synthetic construct
  source 1..120: mol_type = other DNA
ccttctctctgtctctgtttctcctgtctcttggacattttaaaatgtattcagtatatacctaggtgtatctttttcctttttttttttcccccccacctaggacttgtcattgagaaa

SEQ ID NO: 2016 - DNA, 120 bp, synthetic construct
  source 1..120: mol_type = other DNA
tggtttatgtctctcatagtttcatttatggcttccatttctttgtagtttcaccctgtatttgggttacatgttcttctattttgcacaaagcacttcctggcacatagtaggtgctcc

SEQ ID NO: 2017 - DNA, 120 bp, synthetic construct
  source 1..120: mol_type = other DNA
ctctctcattttttttccaataaattaaatgcctttctacttctttgttccttctgcctgggtgttccacttggtcttcctcaatggagtgggattccatctccaccagttaatgtctgt

SEQ ID NO: 2018 - DNA, 120 bp, synthetic construct
  source 1..120: mol_type = other DNA
aggctactgggccaagaggacactgtgacagttgggatttggggaaagtcaaagcacaagatcatattaaaataactcaggacttttttaagacccaaaatctcgatattttactttcct

SEQ ID NO: 2019 - DNA, 120 bp, synthetic construct
  source 1..120: mol_type = other DNA
aacaaaaaagcaaaataaacatttttcaaaaacacaaatgcccaatgccacgggatacgtttcaaggatgtcaggatctgagcatgtttactggatgcagtccgtggcttgtctttgggg

SEQ ID NO: 2020 - DNA, 120 bp, synthetic construct
  source 1..120: mol_type = other DNA
tttgatgatatgttggccatagagtggattctcaacgcacaattgcaggacaaccggtatcttaaaaaaggcataaccagaggactccagacaccagacatacatgtgtttttggcccaa

SEQ ID NO: 2021 - DNA, 120 bp, synthetic construct
  source 1..120: mol_type = other DNA
tggaagttctggccagggcaatcaggcaggagaaggaaataaagggtattcaattaggaaaagaggaagtcaaattgtccctgtttgtagatgacatgattttatatctagaaaacccca

SEQ ID NO: 2022 - DNA, 120 bp, synthetic construct
  source 1..120: mol_type = other DNA
aaatggacaaatgggatctaattaaactaaagagcttctgcacagcaaaagaaactaccatcagagtgaacaggcaacctacagaatgggaaaaaaattttgcaatctactcagctgaca

SEQ ID NO: 2023 - DNA, 120 bp, synthetic construct
  source 1..120: mol_type = other DNA
aaaaaagacatacacggaaaaaaggaacacaaatccacaggaacagttggtggactgtgcctttttccgaagatgtctttaagggcatcaatatttaaaggagaacaggctggaaggaag

SEQ ID NO: 2024 - DNA, 120 bp, synthetic construct
  source 1..120: mol_type = other DNA
aattggcaaaaccaggatttgaatccaggtctgtttgtgtccaaagctggggcatttttctcctaccacaattggggtctactggagagaaaaattaaaacctaacatctggattagtaa

SEQ ID NO: 2025 - DNA, 120 bp, synthetic construct
  source 1..120: mol_type = other DNA
ttattctcaagtgcttgtataatttgttggaggctcgctctaaaaagtaaatataatttcttggttggctcaattgcaggtgagagcccagatgtctctgcccagaaatggagatacatc

SEQ ID NO: 2026 - DNA, 120 bp, synthetic construct
  source 1..120: mol_type = other DNA
aagctgatgtgttcacctccccactcgctgtttgcagcctggaagacgattgcagggggtggcagggctgaaaagacaatgtcctcattaaaggaaattgagaaagagagtttccttccc

SEQ ID NO: 2027 - DNA, 120 bp, synthetic construct
  source 1..120: mol_type = other DNA
gcgtcctgaagggggatgatcggtagggagtgggtgcggaggctcacgcctgtaatcccagtgttcggggattcccgagcgggaggatcgcttgagccggggaggtggaagctgcagtga

SEQ ID NO: 2028 - DNA, 120 bp, synthetic construct
  source 1..120: mol_type = other DNA
catgtttccctcaaaaaaatgatttgttctgtagtcaaattaatttggaaaacattgcaaactcttcagcagtggttctcaaagtatagcttgcgtcagaatcccctggggcccttgcta

SEQ ID NO: 2029 - DNA, 120 bp, synthetic construct
  source 1..120: mol_type = other DNA
ctgtggcttcttctgagaactaccagacccaccctgttttcagagtaaacctcctgttttgaggtcaaacagacccagctgggtaattggtgactcactcctggttcctccaaagaacag

SEQ ID NO: 2030 - DNA, 120 bp, synthetic construct
  source 1..120: mol_type = other DNA
tgctgagtaaagtgcaggcatgactgtgccctcagcatgcatagggcagcaggcatagattcatacacgtgagtttgcacttaagctgcagtaagagctacagaggaaatgaacagagac

SEQ ID NO: 2031 - DNA, 120 bp, synthetic construct
  source 1..120: mol_type = other DNA
ccttgggtttctattttcttgtcctgtgcagtgagcatttggaaacttctcctcagcaccaaacacggagccatttagcagaaaatacatgagttttcaagtcaattgaactgttcatcg

SEQ ID NO: 2032 - DNA, 120 bp, synthetic construct
  source 1..120: mol_type = other DNA
atcaatcatttgtgcttctgaacagagcaaaggcagaacttggcttgtgttttaggtatttacacaaaagcaactttgggttcctttggactaggatgtgtttgatgagagcactagctt

SEQ ID NO: 2033 - DNA, 120 bp, synthetic construct
  source 1..120: mol_type = other DNA
gggcattatgcagactgtcttgtgcaacatcagaggaggaattgcggggaatgtttctccatgatgctcgagtctgggaacataatgtcaatattttcactatcagtatcaataattaca

SEQ ID NO: 2034 - DNA, 120 bp, synthetic construct
  source 1..120: mol_type = other DNA
ttggattctttggtttcaaatcacaaaaatcaactccatctggtttaatccaagaactctattggctcaggcaacagtaaaaagcaatgctaactcatttgggaccagggctcagatcat

SEQ ID NO: 2035 - DNA, 120 bp, synthetic construct
  source 1..120: mol_type = other DNA
attggattagcagccattccttctgggtagagtctgatggtcacttcagctctcaaagtccagctatccagccatagtcctagaaggcaagacatcactgtgcccgaccaacccaagggt

SEQ ID NO: 2036 - DNA, 120 bp, synthetic construct
  source 1..120: mol_type = other DNA
ccagttttgacttatgtgtagagtccggcagcatcattttttggcatttaactcgtcacatctatttcacctaacctctttcttcttagtaaactgacactcgggtcggtctctcatctt

SEQ ID NO: 2037 - DNA, 120 bp, synthetic construct
  source 1..120: mol_type = other DNA
tttgaagcaataggtgaggttatttagaggctttttccattcaatgtgatatgtatgtggatcactgcagaaatactgctctgttcgattgtaaaatagtatgttgccctagactggggg

SEQ ID NO: 2038 - DNA, 120 bp, synthetic construct
  source 1..120: mol_type = other DNA
aaacctaggaaaagataaattagaagaaattgtagaaaataggccaatttccatatagtgattggaaacagacctacacagcgagcagctgagtctcacccagccactagacagctgaca

SEQ ID NO: 2039 - DNA, 120 bp, synthetic construct
  source 1..120: mol_type = other DNA
gaggtcataccacatgataaaacaggaaaacaatcaataaacatattgtcaaagaacagggaagatgatcttttctggtaatgctatggtagacctagaaaacacaagagattctaattt

SEQ ID NO: 2040 - DNA, 120 bp, synthetic construct
  source 1..120: mol_type = other DNA
gggacagtatagagtaagatccagaaatggactcccccacagaggaattcagtgtatcacaatggaggtttttcaactcagtgaaaaagggatattattttaatgatgctatcacactgc

SEQ ID NO: 2041 - DNA, 120 bp, synthetic construct
  source 1..120: mol_type = other DNA
gtcataggtagattcaaaaatttgttgttttgaaattggttaaggaagagaagtttcatttaaaaatttgggttaccagaaaggaatgttagctgtggcttgtgggcgggacttccccca

SEQ ID NO: 2042 - DNA, 120 bp, synthetic construct
  source 1..120: mol_type = other DNA
tggaaaaacaagacacaagggaccgataaaggatacatatctgtcgtatacaaatagctccttcaaactgctaaggcaatgggcatggtctcacttatgtaaaatgaatgcaaggatgca

SEQ ID NO: 2043 - DNA, 120 bp, synthetic construct
  source 1..120: mol_type = other DNA
tatggcttaagtgccaatcctaagctgcatccatgttgctgcaaagaacacgatttcattcttttttatggctatgtagtattccttggagtacatgtatcacattttctttatctggtg

SEQ ID NO: 2044 - DNA, 120 bp, synthetic construct
  source 1..120: mol_type = other DNA
tggttgcaggtatatggctttatttctgggttctctgttctgttccattgatctctgtgcctatttttgtaccagtataccatgctgtttttgttactgtagtcttgtagtatagtttga

SEQ ID NO: 2045 - DNA, 120 bp, synthetic construct
  source 1..120: mol_type = other DNA
aatgagtacattctatgtccttgtactttaaccaagatatttgtgctggacgtgctcacaggcatgtcccagcttgcagcccatgccccttccttatttggaaatgttattacttttcta

SEQ ID NO: 2046 - DNA, 120 bp, synthetic construct
  source 1..120: mol_type = other DNA
gacaagagcgtagttctgtgagaacctgggtgcagagttctgagaccttctaatttttcaagaaaaccaggtcattcaaatttttatgtgaaactgtctggtatttaaaagcagccaact

SEQ ID NO: 2047 - DNA, 120 bp, synthetic construct
  source 1..120: mol_type = other DNA
tgtacagaggcatcagcaaccaggtcaccacagagcttggggattttattttctggcattaagaggtgattgaggaggcagttaacatgacatgatttgcattttggaaaagaaaaaaac

SEQ ID NO: 2048 - DNA, 120 bp, synthetic construct
  source 1..120: mol_type = other DNA
ctgttaaagaaattcagatacttctggaacttcccaagaggcgaagttctccaacaactatactctgaagtgaaatatagcagtgtgtttcctttcccccaatgtatcagctcaaccaaa

SEQ ID NO: 2049 - DNA, 120 bp, synthetic construct
  source 1..120: mol_type = other DNA
ggtggcacacgtgagattcaccattgcaatcaacaccaaggcccgtgagcagctcatctgcgagtgtggcctctttgacaaggtgggtgccctcctaccctacttgttgcctggaagagc

SEQ ID NO: 2050 - DNA, 120 bp, synthetic construct
  source 1..120: mol_type = other DNA
ctccagccctcacctgagcacacaacaggccctcaacagagttgcatgggtcctggaaactgagggtcactgagagcaatgactgagggtcgtgtgctcagcactagagcagacttcaca

SEQ ID NO: 2051 - DNA, 120 bp, synthetic construct
  source 1..120: mol_type = other DNA
ccgggacgtctccggacccggctcccccgcagtcggcagcgctggcccctccgccacccctccggggtgtcctgcccagggtgccctccggccttggggcagggaatccgggcacggggt

SEQ ID NO: 2052 - DNA, 120 bp, synthetic construct
  source 1..120: mol_type = other DNA
ctggacatccttgtttttgtggctttgcacatgtgttcagtatgaccgcacacattcctagcagacaaattccttggtcaaagaatattgatactgaattgccctccacaaactaaattc

SEQ ID NO: 2053 - DNA, 120 bp, synthetic construct
  source 1..120: mol_type = other DNA
tggcagtcacatctcttcctccgaggccagtacctttccatttattctttgatcttcagggaactgcatagattgatcaaagtgtaaacaccatagggacccattctacacagagcagga

SEQ ID NO: 2054 - DNA, 120 bp, synthetic construct
  source 1..120: mol_type = other DNA
taaccaaaatagagttggcacataatacctgtttgtagactcaacagaggtcaaaggcaagcgggaactacctaccaaagacgcctttatcccatctgaccttccgaacttgtcctgcct

SEQ ID NO: 2055 - DNA, 120 bp, synthetic construct
  source 1..120: mol_type = other DNA
gagggtcagagtatgctaggatttgtctaaatcatttatagccttttgaatatagaacgaaaggaaacagatggcagtgacatgattacactgtgagacattgatgctaactcctgccac

SEQ ID NO: 2056 - DNA, 120 bp, synthetic construct
  source 1..120: mol_type = other DNA
attgaatggcagtgttgacaattaatggagagactatgaaaagaggcctagacttggagaggaagatcatgagttcagctttgtacctgttgagtttcagatgcctttaaacaaccaaga

SEQ ID NO: 2057 - DNA, 120 bp, synthetic construct
  source 1..120: mol_type = other DNA
cttttttatgtagacttctctgtgaaatccatactaattaggtaccatttgagtagagatttgaaggaaatgaaggggtaatccatgtggctctgttagggaggagtgttctaggcagag

SEQ ID NO: 2058 - DNA, 120 bp, synthetic construct
  source 1..120: mol_type = other DNA
agcaagatgatgaagaggagagacagcagtaaatgctctcaagacttctgggtaggaagctatgaaagaactgtgcaaggtagttacaattattcccagtttttagtttagaaactgagg

SEQ ID NO: 2059 - DNA, 120 bp, synthetic construct
  source 1..120: mol_type = other DNA
atggtaataaatgatgttttgaagcagaagcatgaggcatcatgttggtcctctgggggctcaaaatctactaggggagataaacatagaaacaagcaactagaataaagggcaaactgt

SEQ ID NO: 2060 - DNA, 120 bp, synthetic construct
  source 1..120: mol_type = other DNA
cactttcttttatttggatggagacgtgtgtaaatgagacaatccctaagaaaggttgtaatggacattctttcacttcctaaaactcttttttgccccaggacctttgcagcttctgtt

SEQ ID NO: 2061 - DNA, 120 bp, synthetic construct
  source 1..120: mol_type = other DNA
gaaactgaggctctgagaagataagtaatttggccaagaccatccagatagtaagtggtagtgctaggagggagtgtcatagaaaaccactactctaccctggaacaggcagatagcagg

SEQ ID NO: 2062 - DNA, 120 bp, synthetic construct
  source 1..120: mol_type = other DNA
ggggtcatgtctagtcttgacctgggaggcagctggagccagaccagagagacttggctgctcaacacagaacctcaagttggttgaaagtctagctgtttactcaccaagcatttgtgg

SEQ ID NO: 2063 - DNA, 120 bp, synthetic construct
  source 1..120: mol_type = other DNA
ctcatttgtaaaatgtttccaggccatgagatcacaggctgaggatggcccatgagctcatccagtcctttggggactgtgaaaatgcacctgtgtgtaagtgtgagcatcttagagatt

SEQ ID NO: 2064 - DNA, 120 bp, synthetic construct
  source 1..120: mol_type = other DNA
cctttcaagtctgtgtccttgcaagacggaattttccctttcctgacctgaaaggtggagcattggttctcaaggctggctgcatgttagaattgctcgggaaattaaaaaaaaaaaaaa

SEQ ID NO: 2065 - DNA, 120 bp, synthetic construct
  source 1..120: mol_type = other DNA
caatggtagaatgaactgatcattgtttgtcccctcttccatatctgatccagatatggaagctcaaagaggcagtgaattggctaaggtcgggggatgctgaggagtgaaatcaggatt

SEQ ID NO: 2066 - DNA, 120 bp, synthetic construct
  source 1..120: mol_type = other DNA
tgctgcagtgtggggctgaccccaatgctgcagagcagtcaggctggacacccctccacctggcggtccagaggagcaccttcctgagtgtcatcaacctcctagaacatcacgcaaatg

SEQ ID NO: 2067 - DNA, 120 bp, synthetic construct
  source 1..120: mol_type = other DNA
cccacaccacatcccttctcctgctagagcaattgtccctgtttatagaataaagctcagcccctaagtgttcttgtccttgactgtggcatgtggaaagagccaggaaaaaggggacgt

SEQ ID NO: 2068 - DNA, 120 bp, synthetic construct
  source 1..120: mol_type = other DNA
ttaaacctctttcctcatttgtgaaataggggtaatattgcccacctcataaaaggccgtaataacatatgtgaaatccctagcacagggctgagcaacagtaggtgctcaataaatggt

SEQ ID NO: 2069 - DNA, 120 bp, synthetic construct
  source 1..120: mol_type = other DNA
tagtaacagctggcatttctcgagtccttcctgagcaccaggcaccgtgttatgtatgcaatttgcaaatattatctgattaaatgctcacaataaggctatcagagaggtactattatt

SEQ ID NO: 2070 - DNA, 120 bp, synthetic construct
  source 1..120: mol_type = other DNA
ggtttaataataggtgccaggccaggtggttaatagaagtctggggcattgtagggggacagaggaggatatatgtccccattggccattgtagactcccttccacaaaaaggacgtcag

SEQ ID NO: 2071 - DNA, 120 bp, synthetic construct
  source 1..120: mol_type = other DNA
gaaaaaaaaaaatacaaaaaattagccaggcatggtggtgggcacctgtagtcccagctactcaggaggctgaggcaggagaatggcgtgaatctgggaggtggagcttgcagtgagcca

SEQ ID NO: 2072 - DNA, 120 bp, synthetic construct
  source 1..120: mol_type = other DNA
ctcagtttccccatcttcatagtggaattgtattggtgcctacccagagggttgtgtcaacaattaggatggcacctagcaccttggtcagtggtgggaaaggttccagaagttctgctg

SEQ ID NO: 2073 - DNA, 120 bp, synthetic construct
  source 1..120: mol_type = other DNA
caccaaatccctgagcaaacagtgcagtgttgcccatctgtggtttcacattgaactaattatatactcaagtgctgtttaactgtgtgccttgatgactgcctctctccatcctttaat

SEQ ID NO: 2074 - DNA, 120 bp, synthetic construct
  source 1..120: mol_type = other DNA
ggggacaggggcatcccagaactccaggatcgaggcagagcagccaggagtgggccatttcctgcaggccccaatactcccatgccagtctagctcagcaggcagagaagactaaccctt

SEQ ID NO: 2075 - DNA, 120 bp, synthetic construct
  source 1..120: mol_type = other DNA
tgcagacttgggggaaaacaagggcacaagaattgtcacccagcaggtggtgtggggctgctaggaggaacagggagtgtctgctactgagttcagggtttctttaattttttgttgttg

SEQ ID NO: 2076 - DNA, 120 bp, synthetic construct
  source 1..120: mol_type = other DNA
aaaacaacaggccaggtgctgtggctcacgcctgtaatcccagcactttggaaggctgaggcgggtgaatcacctgaggtcaagagttcgagaccagcctggccaacatggtgaaacccc

SEQ ID NO: 2077 - DNA, 120 bp, synthetic construct
  source 1..120: mol_type = other DNA
cagtccttggttcacacggtcccacttccagcttcttttgcccttaagactgatttgtccctgggagatcaccagatccctcattcaggtggagtgctgcagcgtgacactttttccagg

SEQ ID NO: 2078 - DNA, 120 bp, synthetic construct
  source 1..120: mol_type = other DNA
agcctgacatgtgggaacatgtgtcaggagacaagtgtcctgcacccagggtgacttagtgcttggggacaagtgttttgtggacacttggggacaagtattctgtacccaaggagactg

SEQ ID NO: 2079 - DNA, 120 bp, synthetic construct
  source 1..120: mol_type = other DNA
cactttagtccttcagcccagcttctctccagtttcctcccacacctccacggacaggctggttgtggtgatattgtacactgaagtataaaccttaaatgggtaaagtgggtggggcat

SEQ ID NO: 2080 - DNA, 120 bp, synthetic construct
  source 1..120: mol_type = other DNA
gggattgccatacatcctcccatcctgtgcacacagctccatccgtggctgcccttgaactctctgcccttcctttgttggggtattgagtgttcttcccatggaaggcagtggggatgc

SEQ ID NO: 2081 - DNA, 120 bp, synthetic construct
  source 1..120: mol_type = other DNA
tggggaacagggaaaggacagaaactgctgccatgcagtggaagtagatgagactcagggggcctggggcctgtcaaatggcctgaccagaactctttaaaaaaagaaaatctaaacaaa

SEQ ID NO: 2082 - DNA, 120 bp, synthetic construct
  source 1..120: mol_type = other DNA
tagcagcaccagcatcacctcagaagtcctgagaaatgtgatgtgaggccccactccagatggctgaatcagagactctgggggtgctccccagcaatttgtatttttcttagtaaattc

SEQ ID NO: 2083 - DNA, 120 bp, synthetic construct
  source 1..120: mol_type = other DNA
aggccagtaagtgttcatagcacatgtaaatattatcgataattatgagaagatggttcaagttgagagtgagacagagccgagtgggtaagagagtatctgcccaaggcagggatgtcc

SEQ ID NO: 2084 - DNA, 120 bp, synthetic construct
  source 1..120: mol_type = other DNA
ataaacgaaaaataaatggaagcggagaaaactgggcaagggcaatgagagtcgtagacgggaagggaagagggggctcccatcatagcctctgctctgtccaggccccatccccttcag

SEQ ID NO: 2085 - DNA, 120 bp, synthetic construct
  source 1..120: mol_type = other DNA
tgaaacttatattttattaacaacaaagacaaacaagctaaactcaaggaagaatgaataacccctaccacgtgattttgggagcaatgacagattttgttaaagaaccaaggctgggtg

SEQ ID NO: 2086 - DNA, 120 bp, synthetic construct
  source 1..120: mol_type = other DNA
agagacccacacaactttctttcttgctagtgtaatcgttaaattgatttttccagtccatcatgtaattgttccagcgatggaatcctgctttccactcccattctgcttcatcaatat

SEQ ID NO: 2087 - DNA, 120 bp, synthetic construct
  source 1..120: mol_type = other DNA
tgggaatagtcatgaaccaccatccctggccaatacattttaatgggaaacaacattaagtcattgtttcagccacttaccttgaaagcagtttattaattgtgttgtaaaatagaaaga

SEQ ID NO: 2088 - DNA, 120 bp, synthetic construct
  source 1..120: mol_type = other DNA
aagtgtttcactttcatgtaaaaatggcttttaaaaagatcagtcactataatcacaattttttggtgaataatagaacttctataaagggtcaaaaaagattagatgtggaagaaagat

SEQ ID NO: 2089 - DNA, 120 bp, synthetic construct
  source 1..120: mol_type = other DNA
ctcaatgtacttattgtgaaggggatcaatatatattttgtatgaattcagagatacaaagaaagaataatgctgccaccaatgtttcttttcatgcctcatggtgtctgaaagtccaca

SEQ ID NO: 2090 - DNA, 120 bp, synthetic construct
  source 1..120: mol_type = other DNA
aaaaacaagtttctccaaagcaaatctctgtgtgcaggggcaaagcaaatttgcaagtacaaatgtttaaaagaaaaggtaaaaaatatacacacagttgaccttgaacaacatgagtct

SEQ ID NO: 2091 - DNA, 120 bp, synthetic construct
  source 1..120: mol_type = other DNA
ctaaatggctttactcagaatataatttaaattctttagcatgatgcacaagacacttcatctctggttcctgcttatctggcttctctccactttgccttcacattgagattcagtgca

SEQ ID NO: 2092 - DNA, 120 bp, synthetic construct
  source 1..120: mol_type = other DNA
caaaccagtcaccctccccacccacaaaatacttatgttggctttaacaaaaatgttaagtggtgttttggagaggggattataccagcattactcatactgattgtaattttgacaaca

SEQ ID NO: 2093 - DNA, 120 bp, synthetic construct
  source 1..120: mol_type = other DNA
aaaataacaattctagaagaaaatctaagcagtaccattcaggaacaaggcatggacaaagacttcatgacgaaaatgtcaaaagcaattgcagccaaagccaaaattgacaaatagggt

SEQ ID NO: 2094 - DNA, 120 bp, synthetic construct
  source 1..120: mol_type = other DNA
tttattgcagcactatttacaacagcaaagacatgaaaccaacccaaaagcctatcagtgatagactggataaagaaaatgtggcacatatataccatggaatactatgaagtcataaaa

SEQ ID NO: 2095 - DNA, 120 bp, synthetic construct
  source 1..120: mol_type = other DNA
tgtgattgtaaaacagagacaacttgctttgtgtgtgggttttggggagatagaaaagatgggaatcaattttttgtttaatgcctcacagggtaaagagaagggaatagtcgtggaagg

SEQ ID NO: 2096 - DNA, 120 bp, synthetic construct
  source 1..120: mol_type = other DNA
atcacctttgcactccctcatccttgactgccagtcttgctaactgattagcaaatagtagtaaatgattttcaaagtaaccagttcaaagggtattttggcccttaaatttacacgtgc

SEQ ID NO: 2097 - DNA, 120 bp, synthetic construct
  source 1..120: mol_type = other DNA
ccacagctaggtaggtatttccatagagctcagcgttacacaagctaggaatttgttcaacattgtatgggaaatagcagcagctggcaaaaactttggagtttgtttatttaatctgct

SEQ ID NO: 2098 - DNA, 120 bp, synthetic construct
  source 1..120: mol_type = other DNA
agatcgtcatgatgagcagaatagcaaactctgaaggacctgaccagcaatatgtctgatggctgaaaatcaattactttcagaaagtatacttaaggaaccacatggattataaacagc

SEQ ID NO: 2099 - DNA, 120 bp, synthetic construct
  source 1..120: mol_type = other DNA
gttgagcacgtagtttcgtcattattcttgttgactctgtattcaaggttagatatttttgttcagtgcttttgaagacaggccagcttgtgctattgttctgagtctcatttggattcc

SEQ ID NO: 2100 - DNA, 120 bp, synthetic construct
  source 1..120: mol_type = other DNA
agcataaaccgagtctaaaaaaagggccacaaattgttcagaagaaggagcagtcattacatgcttgaaaggaaattacctgatggaatgggaatctggctgaaagagaggaaataagga

SEQ ID NO: 2101 - DNA, 120 bp, synthetic construct
  source 1..120: mol_type = other DNA
ctccagatcacagatggcacaattgtctaggtaaattatgtagtcttttttctttcttttaaagctgtagaaactaacaagtacagctgctggaggctggatattaaaccaggagaaccg

SEQ ID NO: 2102 - DNA, 120 bp, synthetic construct
  source 1..120: mol_type = other DNA
agaaaaagacatcaattgattcaggatgccctgatatgaagaaaaattatgcatctagcttcaaaaataaagtattcttggaattatagaatcctagtgctgcctacctaagcctaaaac

SEQ ID NO: 2103 - DNA, 120 bp, synthetic construct
  source 1..120: mol_type = other DNA
acaggtgagcttcttagattggcaatactccataagtacaccggcacaatagatgtcctgaagataatagatctctgaggacagagaagttttgcatttggaacattctaagtccaagat

SEQ ID NO: 2104 - DNA, 120 bp, synthetic construct
  source 1..120: mol_type = other DNA
gggcgggcgggaaggaaagaataagatctcatttacattgtttaaaagatcatctgtctgtagtgctgggaataactacagatggttcaaggtgaccaattaggaggctactaaaataat

SEQ ID NO: 2105 - DNA, 120 bp, synthetic construct
  source 1..120: mol_type = other DNA
ggtaagtacgcagctggaaatttgtagttactcttgattttactgatagaatctctgcgtttcaattagatccaccagttcttacttaacatgcatttttttattggaatgaccttgcct

SEQ ID NO: 2106 - DNA, 120 bp, synthetic construct
  source 1..120: mol_type = other DNA
cataatgcactataccaattcataggatatacaatgcctatatttccccaaagcatagctccttgtcctattctcctcctaccatctcttcagacagatcttccttgggaaccaaactga

SEQ ID NO: 2107 - DNA, 120 bp, synthetic construct
  source 1..120: mol_type = other DNA
actcacacatatacacaagctgtcatagtctgcttgggattatataacagaatatcatacattggatagcttacagacaacagaaattgatgtttcatattctggaagctgggaaattca

SEQ ID NO: 2108 - DNA, 120 bp, synthetic construct
  source 1..120: mol_type = other DNA
tgaaaactcacactgattcttcaagtgtcgtgacatagcaaaacgtttgacttcaatgtccttcatctgctgatgaggagtcattatatagacgactttctcttaagcctgttcacaaac

SEQ ID NO: 2109 - DNA, 120 bp, synthetic construct
  source 1..120: mol_type = other DNA
ctgtttcatcattcctgacttgtggattggaatacatcctcagcttcacagagaatttggatataggtttttatgagaaaaaagaagggaagagaaagggagaggagaggagaagaggag

SEQ ID NO: 2110 - DNA, 120 bp, synthetic construct
  source 1..120: mol_type = other DNA
tctgtcttctttcctctgcattgtttggatataaaggtttgcataattagctggcaagttaaagaggagatacgaggcaatgtttagcctcctccaacttcagaaaatgaattgggctga

SEQ ID NO: 2111 - DNA, 120 bp, synthetic construct
  source 1..120: mol_type = other DNA
tcactggaggtcccaacatttgactaatcacctccattagactttaaggctccgtaatagcagacaacatgtctgtttttttgactcttgtagacttgcatagagtcagtgtctgataaa

SEQ ID NO: 2112 - DNA, 120 bp, synthetic construct
  source 1..120: mol_type = other DNA
cacagatttcaacttggaatcatgagaatataattgccttacatattcttcctgctttagaaaagctgtatgttattttagtttaacttccttttatgaacctacactcctgcctagcag

SEQ ID NO: 2113 - DNA, 120 bp, synthetic construct
  source 1..120: mol_type = other DNA
taatggaatatgtgtcacaatctggacaaggtcattccaatccctgacaactttattcgttactaaatctagttggaaaaatagacctgcattcaggccctactagaattccaggcccca

SEQ ID NO: 2114 - DNA, 120 bp, synthetic construct
  source 1..120: mol_type = other DNA
ccttctagactcttctgaaatgacagtgatgaatgtgatttctgaatgacttgctaattgcagctaagtcagtcacaggattttgtttcttctgtccaaggcggatgtgccataatgaaa

SEQ ID NO: 2115 - DNA, 120 bp, synthetic construct
  source 1..120: mol_type = other DNA
cactctgaggtgagaactgtatgctgcatggtttggaatcaccagctttgcaaccagagtctgctactaaaagctggttgaatttgcatgaagttattcaaattatcagagcgtatttat

SEQ ID NO: 2116 - DNA, 120 bp, synthetic construct
  source 1..120: mol_type = other DNA
ccaccgctccggccaatagatgatattttttaaaggaagagtacaggaaaagagaagaaaagagaaataagaactgagctctgggaagatttaggaggttgggaaggtgggaagaatcta

SEQ ID NO: 2117 - DNA, 120 bp, synthetic construct
  source 1..120: mol_type = other DNA
aactctgatgatttctgggtttccatgactccactgaaagagatgcttcaaggaggagagagactacacacacatcaaatactgatgattcagaaataattaagtgacttcgcaacatgg

SEQ ID NO: 2118 - DNA, 120 bp, synthetic construct
  source 1..120: mol_type = other DNA
gcagaataaaaaagccatcacttgagaagggtgaagatgaagtagaatcttcacgatcagtcaggcatcagtgtaaaagaagtgttcataagttgaaactgcagttagttttgctgccag

SEQ ID NO: 2119 - DNA, 120 bp, synthetic construct
  source 1..120: mol_type = other DNA
gtaatctaaaacaagcttggtttacaaatgtacagtctggtttcttcataactccccagattcatgtctcctcacacctgcctttttactttctctttctctatcacctctcggtctttg

SEQ ID NO: 2120 - DNA, 120 bp, synthetic construct
  source 1..120: mol_type = other DNA
ttggggggttggtggagcggagtaggaaatgtaaatggtatctaattttcatttcctttttaattttagagctaaaatattacaaaactgaagaaaatgtttcactgagttcttcatgtt

SEQ ID NO: 2121 - DNA, 120 bp, synthetic construct
  source 1..120: mol_type = other DNA
tgctgggattacaggcgcgatattgcttgttgtaaataatgttaagtgttccaactccagctattgaaaaacagtgacagattctagtcattaatttatatatgctgatggaaaatagat

SEQ ID NO: 2122 - DNA, 120 bp, synthetic construct
  source 1..120: mol_type = other DNA
cctcttgagggattggatggacaacattaagccaatataagcaaacgtatttaaatccaagtataaaaccatagctaaacccaacttccatgtggtttaaattttaaacatgtatgagag

SEQ ID NO: 2123 - DNA, 120 bp, synthetic construct
  source 1..120: mol_type = other DNA
ccagtgtgaggtaaggatattcttctgttcaagttgtgatattctagcagcagattctagttcacagaaagtgtctgtgaaagttttccatattatccctcctaggaagattatgcccac

SEQ ID NO: 2124 - DNA, 120 bp, synthetic construct
  source 1..120: mol_type = other DNA
gtctttagtatactgttaaatgaagaactggtgtggtgctttcatctcaaaggacacaccatgacatatccagctgataaaactgatggggaacttttctaagaacagaggtttggctca

SEQ ID NO: 2125 - DNA, 120 bp, synthetic construct
  source 1..120: mol_type = other DNA
tgtccgtctcatctttcaatctccagagattccttttagtgtagattagttcaagctcaaagtatctgaaggctgtatactaaagactgtgaatactgaccttcaagaacagacggagga

SEQ ID NO: 2126 - DNA, 120 bp, synthetic construct
  source 1..120: mol_type = other DNA
aaatgccccctcagatatgaaagtatagtctggtcattaaaggactggggtccatagcagtttacaccagcattagttcttccagaatttttttctatacctctttctctgtgtcctcat

SEQ ID NO: 2127 - DNA, 120 bp, synthetic construct
  source 1..120: mol_type = other DNA
tgtaagtctgagtaactaacagaatatctgacgccaaagttgatggagaaagcaagattaggatttgtacatcccagaaatacagtaatttttcgtaagtgttaggtttctttgacttcc

SEQ ID NO: 2128 - DNA, 120 bp, synthetic construct
  source 1..120: mol_type = other DNA
aaaggagattgaattcttgctcttttccttccctagtggtacgcaaaaattctaatagagagggagcaaagtttagggaagatggatctgggttcctccatcacaccacaaagttcaatt

SEQ ID NO: 2129 - DNA, 120 bp, synthetic construct
  source 1..120: mol_type = other DNA
tacttataccaggttgcttatgagaagttattttcccccgctttcttgtcatgcaattagactgtgacctctcagttctattgtaaggttacttgccttctgcctatgccttcttagaaa

SEQ ID NO: 2130 - DNA, 120 bp, synthetic construct
  source 1..120: mol_type = other DNA
actccattctctctctacagttttttcttcctcctccctccctctaaccttgaggtgcttagacatgtgttttatctaaaacctccgtaagtgaaataaacctgtctcatagctttaaac

SEQ ID NO: 2131 - DNA, 120 bp, synthetic construct
  source 1..120: mol_type = other DNA
tattgaggtaatagggatgcagcagtaaacacaacataaataggcaaagataacaaagcaaataaaaaacagtgaggcatggagaacagagagaaaatctttaccctcaaaggccttaca

SEQ ID NO: 2132 - DNA, 120 bp, synthetic construct
  source 1..120: mol_type = other DNA
ataagagaaatagagacatagagggaacaattaacttggcaactatgtggcaaacatggcttcaaaatcaagctattttcctctaatgccatgctcttttgatgcatcatgctatgttgg

SEQ ID NO: 2133 - DNA, 120 bp, synthetic construct
  source 1..120: mol_type = other DNA
tttttctgctgcactgcgagagagtattctgaaatacttgatcaaacatatctcagttttatagctctctttgtagatttgcccctttgggggacatcggatttctctatctcattccac

SEQ ID NO: 2134 - DNA, 120 bp, synthetic construct
  source 1..120: mol_type = other DNA
atggccagatgacagtctcacaaacttaaacttgcctctaagtctcatgatgtctaattttagtctgttctctgcccttacctctataacattaaccaagcaggtataagcatgctaaca

SEQ ID NO: 2135 - DNA, 120 bp, synthetic construct
  source 1..120: mol_type = other DNA
aaaataccttgtgtattaacagcatttggcttagcatgtaattgtcttacccactccccattacaaaaatcaagaactgttctcatttacttttttccagatcagttaacttcagtggtg

SEQ ID NO: 2136 - DNA, 120 bp, synthetic construct
  source 1..120: mol_type = other DNA
gatctataaatgttaagatgcccttaaaataccaacggagaggaaagtgttggactttcaccttcatccatgataaggtgagattagccttctcatcataaacaattataatactggaca

SEQ ID NO: 2137 - DNA, 120 bp, synthetic construct
  source 1..120: mol_type = other DNA
ttaaatatttaaagacttaaataatcccaatggtttgcaaactaaaaaatcttgaagcagaaggaagattactacatattttttttctcagagaggagatctgttctgtcacccagacta

SEQ ID NO: 2138 - DNA, 120 bp, synthetic construct
  source 1..120: mol_type = other DNA
gtagacatactatataagacactccagtactggcataagaatagacatgagaccatttagtgggacagaataaaatgtactcattcatatccacacgtatatggtcagttgattttcaag

SEQ ID NO: 2139 - DNA, 120 bp, synthetic construct
  source 1..120: mol_type = other DNA
aaaagcacaatgagatgtcattacaaagccagaagaacagctaaaattgaagattgattagttgcaagtgatgctgaagatgtgaaacaagtggggctctggtacatcactgcttttggg

SEQ ID NO: 2140 - DNA, 120 bp, synthetic construct
  source 1..120: mol_type = other DNA
cccttggaaattacagatttgggacatcaagtctgtggtcagaaagatgtggatagatttccagacctaacagttatcaactttgtttccactgccgttcacttaattattcaaagcttc

SEQ ID NO: 2141 - DNA, 120 bp, synthetic construct
  source 1..120: mol_type = other DNA
accacaggttctgtttcaagaacgtagtttagtatggttgaggaagaacagcttacaatgaaagaggaaatagacaagttacagtcaacttctgtgagagtgaacaagaagtctgaagca

SEQ ID NO: 2142 - DNA, 120 bp, synthetic construct
  source 1..120: mol_type = other DNA
gtcaaacacaggctgcctcaaatctgatcaggcctattaggaaaaaaagaaaaaccaaacaatacaatggcaaatgtatattttgggtaaactgagggccaactgcatcaccatcatgtc

SEQ ID NO: 2143 - DNA, 120 bp, synthetic construct
  source 1..120: mol_type = other DNA
aagctgtcccttcatctttattaacacccaccaaaatctgggtttttttaaattgtccaagttcaagtaatatgtctggcatgtcagtgagaaaatcaccatccacggtcggaccaaagt

SEQ ID NO: 2144 - DNA, 120 bp, synthetic construct
  source 1..120: mol_type = other DNA
cgtgccaccaaaaactgtcaagttcatccctctgacttttccattctttgttgcaattatgatgtcatcttcagtatgtgacttcccaataagcatgcagagcaaaagaaaccaaaagag

SEQ ID NO: 2145 - DNA, 120 bp, synthetic construct
  source 1..120: mol_type = other DNA
cgaaggctgaggatatattccaggtaatttctccaaaatttaataaacatgagggactctttaccagatttataatgtcaatagagagaaccaggggctagcattataatgtctgggaga

SEQ ID NO: 2146 - DNA, 120 bp, synthetic construct
  source 1..120: mol_type = other DNA
agcctaattcaccaatggtcataggatatctagtgacctacaagtattttttatcccaataaatatctcaatttattaatccatggtctggagcatttggttcagggcttgatacttaat

SEQ ID NO: 2147 - DNA, 120 bp, synthetic construct
  source 1..120: mol_type = other DNA
ctgattgggcggttcgttctaagctgcaatttaataaattaattgcatcatccctggttgtacccattctccctcttgcctagctcagtcaatgttcttctaagtctaatgcaaaagcca

SEQ ID NO: 2148 - DNA, 120 bp, synthetic construct
  source 1..120: mol_type = other DNA
tggtgcaattggatactgtctcacatgattctgagagaacatagtagcataaacattatcataaaaatggggcacattttcacaaatacagctgtgtatctgaatttagatcaatttgct

SEQ ID NO: 2149 - DNA, 120 bp, synthetic construct
  source 1..120: mol_type = other DNA
tgagtcttctctgaaaattaaatctcctcttaggttgctatctattcaattacaattctcttaacatctgggaccgtctaattttggtaagaatgagcagatgctggcaagaaaccatcg

SEQ ID NO: 2150 - DNA, 120 bp, synthetic construct
  source 1..120: mol_type = other DNA
attcattattttctcagcagttaaataaacaaagtctgcgttccctgaataataggaagatttgatgcatgtgcctgctggctcacttcctctgtcccatttgcaagcttcagtaactgt

SEQ ID NO: 2151 - DNA, 120 bp, synthetic construct
  source 1..120: mol_type = other DNA
gacctctgtattggaaaggtctttatggaccagggagtccggtgtcttttttacgggggacccctgggctgcgagttgcacagtccaattcgctgttgttagggcctcagtttcccaaaa

SEQ ID NO: 2152 - DNA, 120 bp, synthetic construct
  source 1..120: mol_type = other DNA
acatcgagcaggagctggagcgctgcaaggcctccattcggcgcctggagcaggaggtgaaccaggagcgcttccgcatgatctacctgcagacgttgctggccaaggaaaagaagagct

SEQ ID NO: 2153 - DNA, 120 bp, synthetic construct
  source 1..120: mol_type = other DNA
tactgttagtgtttggaatggaattgggttgaggatggtcttgtgagggatgggaggtggtttgttcctttggttctagagcaatgtgtttgtgaagtacagcttgtgagttgaaggaag

SEQ ID NO: 2154 - DNA, 120 bp, synthetic construct
  source 1..120: mol_type = other DNA
agattaaaactatgggattgtacgcctaacttctgtgctagatgcaaataccatcaggcattttgggtcatgggactatgttttgagatccagacacagtttgccattggggtaaggaaa

SEQ ID NO: 2155 - DNA, 120 bp, synthetic construct
  source 1..120: mol_type = other DNA
gtaattttaccacttggacccacttttaggacttgctggattcttctccgaatgtcctcaaggtcccacagtctctttcccattaggttttattttttcccccttaaatgttttgtttgt

SEQ ID NO: 2156 - DNA, 120 bp, synthetic construct
  source 1..120: mol_type = other DNA
atgtatggcaggcatggaaagaggaatcctcactggctcagccatctgtctctgcctgtttactgatgttctttagagggctgtggagcctgctggtctgaaaaggaacaatgaggaaaa

SEQ ID NO: 2157 - DNA, 120 bp, synthetic construct
  source 1..120: mol_type = other DNA
gagtagccgtttgccctaaggaaaaatggcagcaaaggcctggggccacccacgtctgccttgtgattctaggctgtgtgcttttctttaaatggtaaaatatgcttaacttaaaattta

SEQ ID NO: 2158 - DNA, 120 bp, synthetic construct
  source 1..120: mol_type = other DNA
cttttcatagcccatggggtcaggactggggacttttactgatcattggaaagtgacttatcaattactcggtctttttctcatttcatccctgtagtttactttctgaggatctttttt

SEQ ID NO: 2159 - DNA, 120 bp, synthetic construct
  source 1..120: mol_type = other DNA
taaaggcatcagcagcacagaagcagagtctagatcaaattttacaagcgttctctggttcaggaaggctgacttgttttgggaacagaatggagcattctgaaacatttcactgaagaa

SEQ ID NO: 2160 - DNA, 120 bp, synthetic construct
  source 1..120: mol_type = other DNA
gcctctcctagatgcctcgtgtaagtggagtcttataatatttgtcctgtgtctggctgatttcactcaagcagggctttgaagttccccagggcgacactctcagtcttttcttttttt

SEQ ID NO: 2161 - DNA, 120 bp, synthetic construct
  source 1..120: mol_type = other DNA
cccgttagcaatggcgatcttccctgggccttcacgcccttagctttgaagtggcccagagtattagtttgccaaggctgtcccataacaagataccaagactgggtggcttaaataaca

SEQ ID NO: 2162 - DNA, 120 bp, synthetic construct
  source 1..120: mol_type = other DNA
gctgcgtgctaaaacttcgtgtgctgccatctctctccacatccaaaaagtaggggtgggaacaggtcattgctaaggttctttcgttagcttctttaatttttttctttaaatttaaaa

SEQ ID NO: 2163 - DNA, 120 bp, synthetic construct
  source 1..120: mol_type = other DNA
gtagtaaatatgactttcatggaggctgcttcatgggccctcgaaagtttcttgtaaagtggctggagcaggattataattatactccctccactgattgagtctgagggggtatgagac

SEQ ID NO: 2164 - DNA, 120 bp, synthetic construct
  source 1..120: mol_type = other DNA
agtagcgggtgcagaccatctggcctcctgtctggtctcatagagtctcctgttcatgtatctgatgtcagttgattgaacatcacttagcaaaaaatcttaagaagaaatgcataattt

SEQ ID NO: 2165 - DNA, 120 bp, synthetic construct
  source 1..120: mol_type = other DNA
tgttccctctgtgggggtgtgcagaagcactgtttatttttgcccacatcttagagtgataaatggaactcatttatgaattttgacttccaaaagctttccactttctcccttaggaac

SEQ ID NO: 2166 - DNA, 120 bp, synthetic construct
  source 1..120: mol_type = other DNA
gagttcaagaccagcctggccaacatggtgaaatgtcgtctctaccaaaaatacaaaaatgagctgagcaggctgagagcagtggttcacgcctgtaatcctagcactttgggaggccga

SEQ ID NO: 2167 - DNA, 120 bp, synthetic construct
  source 1..120: mol_type = other DNA
aatacacatactctaaaatgtaccatctcaaccacttctcagtgtgcagtttagtagtgttaagcctctagtgttttataagtggcagagttgatgggaaaacactgatcttcaggaggg

SEQ ID NO: 2168 - DNA, 120 bp, synthetic construct
  source 1..120: mol_type = other DNA
ataatacagtcatgcaccacataacgacattttggttattgatggtggtcccataagattataatactgtgtttttactgtaccttttctacatttggtatgtttagaaacagataccac

SEQ ID NO: 2169 - DNA, 120 bp, synthetic construct
  source 1..120: mol_type = other DNA
tttatgttgcggaaaggctaaaaggaagtgactgttaggaggttatgggataaaggacagaagccaggctccaagtgagtataggagagaccagagcactaaattggaccacagtgtcca

SEQ ID NO: 2170 - DNA, 120 bp, synthetic construct
  source 1..120: mol_type = other DNA
aaaaaaaagaatttggccctaacaaatgcaggttgtgattattaacataagtctggtttcctctctcatggcatttctttagtggccagatggtgtgagtggctccagaagactcttctc

SEQ ID NO: 2171 - DNA, 120 bp, synthetic construct
  source 1..120: mol_type = other DNA
gttttcttctttgtctctcctttctccctgctttcaagtctgtgaattaattggagtcattcccaagggaggagggtcactttattgaattttaagacaaggcggggccaggcgcgatgg

SEQ ID NO: 2172 - DNA, 120 bp, synthetic construct
  source 1..120: mol_type = other DNA
atggaacatttagtctggcagaggccaagggcagcaggtccctactctggctgcccatgtagttaaaaagtcacacacgtgcgcagctggtctgattaatgagtttgttttttgatgtca

SEQ ID NO: 2173 - DNA, 120 bp, synthetic construct
  source 1..120: mol_type = other DNA
tttgaaaggctggcatctcaagaggggagcagatgaagagtcatggggaaggttcctgtgcagtatgaggaaggtttaattttcttgccaacttttgagataattatgtgtaaatctttt

SEQ ID NO: 2174 - DNA, 120 bp, synthetic construct
  source 1..120: mol_type = other DNA
gtttacccttggctttatggttaactgcctgctcttttttgacttttttcttgcctccttctgttcacaggattgtactgaagcagttccatcaggtgctaaaacgtctgagctgtgtgg

SEQ ID NO: 2175 - DNA, 120 bp, synthetic construct
  source 1..120: mol_type = other DNA
cgtagactccttgggcctctgaattcctgtccgtaaatgatgaagctgaatggcagcatttttaagatccgttagttttgtgattctaaataaaattaagtcatgttgctctgagttccc

SEQ ID NO: 2176 - DNA, 120 bp, synthetic construct
  source 1..120: mol_type = other DNA
tgagatgagcaggcatgcgtgtgtggccacccctatttctgtgctatagtgggaggagcacattaggtactttgaggccataatttacctttgttacagatgaccaattccccaacagcc

SEQ ID NO: 2177 - DNA, 120 bp, synthetic construct
  source 1..120: mol_type = other DNA
caaaatcgatgctactttgtggatacttacataaccatttggaatgtgagcatgtgaaactataaagagcattcttaaggcctaggtcacatgaaaacaggtggcagtgggctggatttg

SEQ ID NO: 2178 - DNA, 120 bp, synthetic construct
  source 1..120: mol_type = other DNA
aaccattcatctgttcatttgaagttgatgtgacacctactggggtccaagcacaatgcttaggccttgactttgtccttgacctcaaggaacccatagacatatattaaaaacagctga

SEQ ID NO: 2179 - DNA, 120 bp, synthetic construct
  source 1..120: mol_type = other DNA
cgggttgaagtttgtgacccccacttaccaggcccagagcatgcatggtggactgtgggagatagtcattgggatttttcatttgattttatgttttttttttaatcaaggtaaaataca

SEQ ID NO: 2180 - DNA, 120 bp, synthetic construct
  source 1..120: mol_type = other DNA
cgtctaaaaacaaaccaaaaaaagcttctggactcattaaatataggctttccatttcccctccccgcggcaaccactgttctactttctgtatggatttggctaatcgaggtacttcat

SEQ ID NO: 2181 - DNA, 120 bp, synthetic construct
  source 1..120: mol_type = other DNA
acagacatgcaccactgcgcccctactcaatggtatttttcacatatcagatttttacattatttgcccctcacccacttaacagctatttgtttttcaactaacttcctttactgtttc

SEQ ID NO: 2182 - DNA, 120 bp, synthetic construct
  source 1..120: mol_type = other DNA
ccacagatgggtcagtactgttcttcccctttctatcccactaacatctttattcagatgtaacatacataccatagagttcacccgtttaaaatggaccattcagtggtggttagtatt

SEQ ID NO: 2183 - DNA, 120 bp, synthetic construct
  source 1..120: mol_type = other DNA
ccataagggtctgaagtggcaggtggatgggaaactgcactctctgacctctgcaaggggactgctgctttcccatgagcttctcctctttccgttgctggtttcttctttgttatcttt

SEQ ID NO: 2184 - DNA, 120 bp, synthetic construct
  source 1..120: mol_type = other DNA
caagctgcacaccctgttctgaatattgcccagaccagaatatgaattacttggtcataaatcagtgtcttgtctgcagaaaacttggcaatgtgagggacggcagctttaacttgattc

SEQ ID NO: 2185 - DNA, 120 bp, synthetic construct
  source 1..120: mol_type = other DNA
ttgactcaggaacttgctgtgaagattagagatgaggtgtgcaaaaaaaagcacctagcgtggctgctggcatgccctgagtgcttaataacatttgttattctcattttattgttgtta

SEQ ID NO: 2186 - DNA, 120 bp, synthetic construct
  source 1..120: mol_type = other DNA
ttctcagagcagagaaacagagtcggcgtttgtgagcgtgcattgtccaaacctgcatttggaaggggtcaaagtaggctgggctttgtttttactttttctttttaaattatgatgaac

SEQ ID NO: 2187 - DNA, 120 bp, synthetic construct
  source 1..120: mol_type = other DNA
aattttgccatgtttaggaaatctggctgagctggtaattaccaagtctaactgagaaatgtcttatatgtaaccttctgtttcccttgagtgtttcggaggaagctgtgggcacgtttt

SEQ ID NO: 2188 - DNA, 120 bp, synthetic construct
  source 1..120: mol_type = other DNA
ggacaaggactggaagtgattgtgggaaaatgatcctagaccattggtagaggaggtgaggttgtggatgacttttttagatttttgctgttgccatgttatatagtaggttcaaagtaa

SEQ ID NO: 2189 - DNA, 120 bp, synthetic construct
  source 1..120: mol_type = other DNA
tttggactcttacaagttctctgtaagtttgtaaatgtttgaaaataaatagtggaataaataaatacatgggaaaccgcactttgcctacgtgtgggatgctcgtgagacctggaggga

SEQ ID NO: 2190 - DNA, 120 bp, synthetic construct
  source 1..120: mol_type = other DNA
caaggcagaggggactcctgtaaagggctgtttttttctgtcctggaatgagcacattctgagggtgagtggctgtcagcagttaggaaaaattgcctgttgacttgtttcattaagagg

SEQ ID NO: 2191 - DNA, 120 bp, synthetic construct
  source 1..120: mol_type = other DNA
tgtacttctgaaaggaggaaggttacactgaagtttcacctaccgtccatgggattttgaccctgctgtagtgacagctgcatgtttggttctaggggaggaggggtgaatgacttatct

SEQ ID NO: 2192 - DNA, 120 bp, synthetic construct
  source 1..120: mol_type = other DNA
ttctcactctaatgggctcacagtaccttctgattacctcctggttcagcttccttgacaacaaactagaattgcttcagatgcaatacttcattcttcctagtgcatgagtaattcata

SEQ ID NO: 2193 - DNA, 120 bp, synthetic construct
  source 1..120: mol_type = other DNA
ccttatttctcaggactcaagacagatcctcaatcaatggcaagagtcatttttgttttcccgccaggctcactagagtttctgtctcttcccacttttctttgtgggacagctttcggg

SEQ ID NO: 2194 - DNA, 120 bp, synthetic construct
  source 1..120: mol_type = other DNA
acatgttagataagggctccctgcttcatagatggcatcttcctgctgtttttcatgtggcagaagggccaaagaagctctcttgggcttcttattgtaaaggcattaatttcattcatg

SEQ ID NO: 2195 - DNA, 120 bp, synthetic construct
  source 1..120: mol_type = other DNA
cctgaattggttttttgcactggcatttatacctttacttggttaatgattcttagagttctttatggactgtagggggaggaccgaggtccaggtggtggtgatggctgctttctaact

SEQ ID NO: 2196 - DNA, 120 bp, synthetic construct
  source 1..120: mol_type = other DNA
tgaaaggaacagtccagtatttgagacaggagaaccggaattgacttgactggtctgtggtgctttttttttttttttcctgtgccttgattcttccatttaaatacagaggacacctga

SEQ ID NO: 2197 - DNA, 120 bp, synthetic construct
  source 1..120: mol_type = other DNA
gcctgaaacacgctttgagccttcatttttgttttcttcccagtggccttatttttacactgtttgatttcttaaggctgctttggatccttttaaaagtaggcgagtgaaaagctacac

SEQ ID NO: 2198 - DNA, 120 bp, synthetic construct
  source 1..120: mol_type = other DNA
ccttttaaataggcaagctgcttgctgggaacacagttcaccttaagctttaaaaaaaattccttcaaagccaaaaaccatgcaaatatggagctgcctgacaagccgaatgattgatag

SEQ ID NO: 2199 - DNA, 120 bp, synthetic construct
  source 1..120: mol_type = other DNA
ccctttgctggtttagatcacaatagtactgccagtgctgcacccttttagaacttctaaggccatgagttattggagattcagtttccagggtggttcttgaacctaagaaatcttcta

SEQ ID NO: 2200 - DNA, 120 bp, synthetic construct
  source 1..120: mol_type = other DNA
ttatgttcttcccctaatttgggaagtgttcagctattgtattttccgatactgttttctgcttccatctctcctctctttctgggacacctgggacatgaaattagacatcaacatctt

SEQ ID NO: 2201 - DNA, 120 bp, synthetic construct
  source 1..120: mol_type = other DNA
acacgttgtttgtgctggggaaaggtggataaagccaaaagagttcaatctacaggatttctccttcctgggcttttggttagagagagcaagcttttctgtttggttcttttttttttt

SEQ ID NO: 2202 - DNA, 120 bp, synthetic construct
  source 1..120: mol_type = other DNA
tattgtagaaaccttatagtgctgtgttgggattagcagtaaacagtttggcatgtggtagatgctcgggaaatggaagctgcccttttttcctaatgggaaagaagggattttgttttt

SEQ ID NO: 2203 - DNA, 120 bp, synthetic construct
  source 1..120: mol_type = other DNA
atgtagtaactaataccttagtgtgatcctctaattttctgttgctttcttgcttccatggttgttggaagcctggagacccagtgtttggccaaggacagggcctgctggttttagagc

SEQ ID NO: 2204 - DNA, 120 bp, synthetic construct
  source 1..120: mol_type = other DNA
gaagaaaaggtgctctaatagcttcagcctggacttgggtccagagctttggatagaagcatctttccagacaattgggatcctgtagaaaatctgccctctgaggctcttctatgcctt

SEQ ID NO: 2205 - DNA, 120 bp, synthetic construct
  source 1..120: mol_type = other DNA
ggtgtcattaatggcgtgtgcatgagcattttcttctggcatttttacagagaccatgtgcagctggactctccggagacagcaaacagaaattctattatgtgtcctatcagctagtaa

SEQ ID NO: 2206 - DNA, 120 bp, synthetic construct
  source 1..120: mol_type = other DNA
ctcacactcttgatttctcagccacagtgagggtgaaaaccagggtcagctcgagactatgacccagttcccatttcacctcctgggtcttctccaggttctgtggggttttttgttttg

SEQ ID NO: 2207 - DNA, 120 bp, synthetic construct
  source 1..120: mol_type = other DNA
cataatgtggggactgcagagaggaagggacatgtttatgtcccaggtgagtcatggaatctcagaatatgagggtgtgcatgtcagattttttcaaggaggggtgtcttagtcacttca

SEQ ID NO: 2208 - DNA, 120 bp, synthetic construct
  source 1..120: mol_type = other DNA
ctgggacagtaactttaggcagtcagctggggtctgtctgttaagcaaggagcaggaatcagccttgttctctactggcctgtctgggaagcgtgaacaaattctgtgtcttgaatagta

SEQ ID NO: 2209 - DNA, 120 bp, synthetic construct
  source 1..120: mol_type = other DNA
tggttggtttattgtcttgttttttaagggggatgatcgaagaaagccttggaggtagggtgggggaagctgggaacagagggaattatatttccttttccaaatacttgtttaagaatg

SEQ ID NO: 2210 - DNA, 120 bp, synthetic construct
  source 1..120: mol_type = other DNA
tcaaactctcctctgggccatttccttctttttctcaacagaaagaacccaggctatggaatcatgtgtgggcccagcagggttcataggcaccttctcagtctgtctccagcgttgggc

SEQ ID NO: 2211 - DNA, 120 bp, synthetic construct
  source 1..120: mol_type = other DNA
tcctcagtgctggtgtctgagctccacaatgacttcattcatgtaatagtatgttatggctgcgtaacaaagaaccacaaactgtgcagcccaaatcatagaaatttatcatctcacagt

SEQ ID NO: 2212 - DNA, 120 bp, synthetic construct
  source 1..120: mol_type = other DNA
aataatactcctttacatgtatgtggcacgttctggttttccactcatgcattgatggatgctagggttgctgccacctcttggccattgtggatggcgctgctgggaatgtggtgaatg

SEQ ID NO: 2213 - DNA, 120 bp, synthetic construct
  source 1..120: mol_type = other DNA
acaaatgtcattagttttacaggtgcatgggaaacttcaccagagtcaagtccagacaagtggccgaagcaagatgctttatcctttttcgataaagaacaataagtttgagaagtggca

SEQ ID NO: 2214 - DNA, 120 bp, synthetic construct
  source 1..120: mol_type = other DNA
ttgtcattggatttagggtccatcagtgtgatattgtgatataagaaacctgtatgtggtcttccttctggtttctggcacaagctcctaaaatcattgtaatttcctgaacgatggggt

SEQ ID NO: 2215 - DNA, 120 bp, synthetic construct
  source 1..120: mol_type = other DNA
gttacccagccctcttccgtttggctttcgtgagtggtatcctttacaataaactggtaaatgtgagtaaaaggttttcccgaattctgtgagctgttctagcaattttttttttttttt

SEQ ID NO: 2216 - DNA, 120 bp, synthetic construct
  source 1..120: mol_type = other DNA
gtattagatactcagtaagtacatttgtctggggctaaaccttcagggtctccaggaagtctttctgagccccagagtcctaaaaagcccaggtgctgctgaggaataataactgtatca

SEQ ID NO: 2217 - DNA, 120 bp, synthetic construct
  source 1..120: mol_type = other DNA
cggaaggatactctcagccctcgggaaacagtggaattatgttccgggttccctgcttaggagaggaaaacaggtcagccttaaaaaaaaaaaaaaattgaggtaaaattcacataacat

SEQ ID NO: 2218 - DNA, 120 bp, synthetic construct
  source 1..120: mol_type = other DNA
agttttcaattgttttgattatacacctaggaggggagttgctaagtcgtaaggttatcaatgccacatcttagaaatgccttctctttggaatgaaagttgacccagcaggcaggtcac

SEQ ID NO: 2219 - DNA, 120 bp, synthetic construct
  source 1..120: mol_type = other DNA
tgatgttccattgcgtgtatacattacattgtgcttctcccttcttctgtcagtggacattgggttctttccacctcttccttcccatgttgtgatgaatatgggtgtgcaaatatgtct

SEQ ID NO: 2220 - DNA, 120 bp, synthetic construct
  source 1..120: mol_type = other DNA
tatttttattttttggctgccctttttccttttatgaaagaatagatttgcagagttctggggttgggttgctaagcaaactgcctggagagaagagggtttcagatttcactaggccct

SEQ ID NO: 2221 - DNA, 120 bp, synthetic construct
  source 1..120: mol_type = other DNA
gtgacagaaagatcatgtcgctgaaaataaaatcacgggtggggggtggtgctttgtgtacttaggggagctcaggtgtgaaaaactgcgttttgaaaaagcaggttcctgtgtgctggt

SEQ ID NO: 2222 - DNA, 120 bp, synthetic construct
  source 1..120: mol_type = other DNA
gaggaagttgttaaaggaggccaaggggatggcacggccttcatctaatagtgacagtagcattttagagctagagggtctttatccattgtctagttcacatgcatgattttaaaaaag

SEQ ID NO: 2223 - DNA, 120 bp, synthetic construct
  source 1..120: mol_type = other DNA
gatggctaaggccttggaaacacgtgttgagctttgtcattcagcctgggaggaagggagtgattatctccaggtgcctctgggaggaatgaattactctgtataaccagatagtcccaa

SEQ ID NO: 2224 - DNA, 120 bp, synthetic construct
  source 1..120: mol_type = other DNA
ttatctattggccgtaaattggaggttcctacagccccctccttgagtttgatcacttgctggaacggctcagagaactcaggaaaataacttactagctgactggtttttaatacaaag

SEQ ID NO: 2225 - DNA, 120 bp, synthetic construct
  source 1..120: mol_type = other DNA
aagggttttaggacctgcatgccaggaaagtagagggtgggatatgcaaagatcaaatatacatttcttaagtcacaaccccctgccaggggcagacgtatctcagaaagccccttgtat

SEQ ID NO: 2226 - DNA, 120 bp, synthetic construct
  source 1..120: mol_type = other DNA
aataaaaaaataaataaaaagagcaagagagagatggacttttccccatttctgtaaggaagctccagaagtgtatcttctcactgagctgcttttttctggggctgacatgttagctgc

SEQ ID NO: 2227 - DNA, 120 bp, synthetic construct
  source 1..120: mol_type = other DNA
tctttcttggtgcacccctttcttgctgcattgtgagcgtggtttggtacaaagaaggaccaagttcaggtaggctaagtgctgaacttgagaaaggcaatttctttccatcattcttga

SEQ ID NO: 2228 - DNA, 120 bp, synthetic construct
  source 1..120: mol_type = other DNA
agccagctgacaacagttttattcacctgttctctgttggcttttcctgcttggttgtcacaagcccagtttgttttgtgggttctttattggcttttatttagcctcaagttttgtgtt

SEQ ID NO: 2229 - DNA, 120 bp, synthetic construct
  source 1..120: mol_type = other DNA
aagtgagagtacggagaccctgaaggagccctcagagattcataaaaacgcagccaacactaggatacaaccaggtgtttaagatccactcattgatttattaaatgaatcttaattgag

SEQ ID NO: 2230 - DNA, 120 bp, synthetic construct
  source 1..120: mol_type = other DNA
gagtaggcaggggctgtgctgggaccctgattccaaattctacagataccatgaggcctgagctgacctcagtcagatccttcctcaaacccatcagttctcactggaggtgattctgct

SEQ ID NO: 2231 - DNA, 120 bp, synthetic construct
  source 1..120: mol_type = other DNA
ctcctggcctcaggtgatctgcccgcctcggcctcccaaactgctgggattacaggcgtgagacattgagcctggaccccccaaaaatgtttaagttagcagagcgaggtggtgggtgca

SEQ ID NO: 2232 - DNA, 120 bp, synthetic construct
  source 1..120: mol_type = other DNA
tctcagagggccctgatggaagaatccccctaccacccttccaggctgacttctgtctatttctcctgcagagtgagctggacttggaaaagggcttggagatgagaaaatgggtcctgt

SEQ ID NO: 2233 - DNA, 120 bp, synthetic construct
  source 1..120: mol_type = other DNA
ccggtgctgacgagtcagcagatcgagaccatcttcttcaaagtgcctgagctctacgagatccacaaggagttctatgatgggctcttcccccgcgtgcagcagtggagccaccagcag

SEQ ID NO: 2234 - DNA, 120 bp, synthetic construct
  source 1..120: mol_type = other DNA
ggcttgaggaacacagaaggcacttaatttgttccagttcttgctccctggggctctttcccccatggccagagagcaggaggctgtattttgatacatgctgccccctccatctttgaa

SEQ ID NO: 2235 - DNA, 120 bp, synthetic construct
  source 1..120: mol_type = other DNA
ggtagtgtttatacaccatccagactgaagaccaaatctggtctgttgctatcaggccattactcagctcttttgtgacagggacggcttgttgtgggcacttctcacccctgaaaatct

SEQ ID NO: 2236 - DNA, 120 bp, synthetic construct
  source 1..120: mol_type = other DNA
ccgccctcctgagaaatggagaatcgtgttgttggggggaaaaaaacacacatccagagctctttgccagataatattccgaaatcactcagagacttttttaaaactttaatatctgag

SEQ ID NO: 2237 - DNA, 120 bp, synthetic construct
  source 1..120: mol_type = other DNA
gctgcacgggctgacttccctgctctgggttgtggttctggctgaagttttatcaactcagaatttttatttttctaattatttcaaacttacaggagaactgtaagaatggggcaaaga

SEQ ID NO: 2238 - DNA, 120 bp, synthetic construct
  source 1..120: mol_type = other DNA
atcagatccggaggcacatttttgattagtgaaaaatgtggaaaggaattgcttagaactttgcacaagccacctggaagatgtgagctcctggagcaggagggaggagaagtcttgaaa

SEQ ID NO: 2239 - DNA, 120 bp, synthetic construct
  source 1..120: mol_type = other DNA
gaaacataaaattcaatataaatgcaaatgcacatggaaataaaatttaggtttgacacaaaacaaacaccaggagccgtgaatgccttgggcttccagcttgcagtcagctacagtggg

SEQ ID NO: 2240 - DNA, 120 bp, synthetic construct
  source 1..120: mol_type = other DNA
tggacaactacggagttgccatggaaatggctgagaagtgctgtcaggccaatgctcagtttgcagaaatctccgaggtaatgccttgatgccgttcagacaggtgcaccgctgactccc

SEQ ID NO: 2241 - DNA, 120 bp, synthetic construct
  source 1..120: mol_type = other DNA
attcaatctgttctcttttcctttttcattaaatgagcaaccctcctcccccacagctggaatggtggcatcgaatttcaagtgaccttgacaaatcagggacctgatcttttaagaaca

SEQ ID NO: 2242 - DNA, 120 bp, synthetic construct
  source 1..120: mol_type = other DNA
atgcttttgttcagaagcttagtaccaggaattaatctcagctccttcccagaggattttaggcacacagggatcttttattctgcacttctccagtgatgctttcaacacaattgtatc

SEQ ID NO: 2243 - DNA, 120 bp, synthetic construct
  source 1..120: mol_type = other DNA
gggaaggataccatcaggaccagtttgccaccaacattagcaacaaggtgctgcttaaattgacttaaatgttatcctgttgaccccagtggcctcataaggaggattttttttttttga

SEQ ID NO: 2244 - DNA, 120 bp, synthetic construct
  source 1..120: mol_type = other DNA
ctgtcaaaccaagagttgtattggcatctgagtaggtttctgcttgtctcagagtcaggtgtctgaaatgtcctgggatcgatggtaagagcagctaagaggtctgctcagcttaccctc

SEQ ID NO: 2245 - DNA, 120 bp, synthetic construct
  source 1..120: mol_type = other DNA
tgccctagatccttacagaggagtccttcttggccatgtgcatgcagcgtgagtttgctggaacacatgtaggacctgcttccaggatggtgctcacacaagctctgtccacaaagctgg

SEQ ID NO: 2246 - DNA, 120 bp, synthetic construct
  source 1..120: mol_type = other DNA
aaaaaaaaaaaaagagaaccacctccttctctttcttctggttcatgggccaggtggtcggcactgtaccaaggacacgggccctgtcctcagggcccccagggtggacctgcccaacac

SEQ ID NO: 2247 - DNA, 120 bp, synthetic construct
  source 1..120: mol_type = other DNA
cctgcaactgcagctgccatttagcattcctagagacaaggaagggccttctcagtgctcggatcattggaatccactgctttggggaattaaggaaaacgcgatgttgtctagaagttg

SEQ ID NO: 2248 - DNA, 120 bp, synthetic construct
  source 1..120: mol_type = other DNA
gactaatgactctagaaaagtcaccgtgagtctgaccagcaccccttcactcagagctttctatccgaggcacgttaagggaggtggcttgatggtggctaaggcaggatgatagatgcc

SEQ ID NO: 2249 - DNA, 120 bp, synthetic construct
  source 1..120: mol_type = other DNA
ccaaaatgacaggatcaaaggatcccgcaggcacagtttctttccaggcctgggttctgagggctggtgggtggcgctcatttgtttaggtgaattaacttcacagttagataaccaatc

SEQ ID NO: 2250 - DNA, 120 bp, synthetic construct
  source 1..120: mol_type = other DNA
ttcataaacattggcaaacaaagcttgggttctcggcttgtctgggccaagttctaattccttccaggagcgtgggcacgttgcttacctcttagctgtttcttctccaggaagtggtgg

SEQ ID NO: 2251 - DNA, 120 bp, synthetic construct
  source 1..120: mol_type = other DNA
agctgctatgtgggcttctttggcaacttttccttgtctcaccagtcaaggccctgctgatttgttgatgatcagactgtagttcgtgtacctggggaagttttccagcatctccatgga

SEQ ID NO: 2252 - DNA, 120 bp, synthetic construct
  source 1..120: mol_type = other DNA
cgcagtttcatttaatcctcagaacataccaccagactggtctttctcaccccatcatgtttaaggaaacagaggctccaagaaatggaggagcatagccagcatcatcgtcacagagaa

SEQ ID NO: 2253 - DNA, 120 bp, synthetic construct
  source 1..120: mol_type = other DNA
atgctgggctgcctgtggctttcgggcttctctcagatgagagttgcacaggtgggtggggggttggggagtctgtggcagcatcaaaagagtagcccagaaaccgccgagtccactgtt

SEQ ID NO: 2254 - DNA, 120 bp, synthetic construct
  source 1..120: mol_type = other DNA
tgtgaatgttacccctctctttctgcgctgcctgggacagagggtggacctccctgaagctctgttttctcattaaggacctgcctacagcctgttgtggggattgggtcaaataattca

SEQ ID NO: 2255 - DNA, 120 bp, synthetic construct
  source 1..120: mol_type = other DNA
tcttccaaaggctgaacacacaggagggattgggaaatttgttgaacaaagaagttacacataagccctgatgtgttagcaggacagtgagatgaacaaaacgttctggaaagtgggtgt

SEQ ID NO: 2256 - DNA, 120 bp, synthetic construct
  source 1..120: mol_type = other DNA
ggaacacgtgctgggttttaggtcaggtaaaccatgtatggccgagaacactggctcttgggctcttgacagcagtgacatcagccatagaaggcagtcggtgcatgtgaacgttcttct

SEQ ID NO: 2257 - DNA, 120 bp, synthetic construct
  source 1..120: mol_type = other DNA
ctgattttgtgttttcactggcatccccggggaaaacttaacctaggcaaacacctcctagtttttcggaaacacagcaccacaataggaaacaagttcagagattttacctacaggttt

SEQ ID NO: 2258 - DNA, 120 bp, synthetic construct
  source 1..120: mol_type = other DNA
gcctcctagacattgtctgaatttgggaaaatgaaaggcagggatgttggtaaaagtttcttctctccgcccttgtgagaggaaagacttaattcctccaaaaaaggtttactgagcatg

SEQ ID NO: 2259 - DNA, 120 bp, synthetic construct
  source 1..120: mol_type = other DNA
tgtcaatacatgtctgtcaatgtccagaatggcttgttttctagcctgaccaggagaggcagctggtgggctctgcagaagcctcacctctgggctagtgtggggcttgtgaattgaatg

SEQ ID NO: 2260 - DNA, 120 bp, synthetic construct
  source 1..120: mol_type = other DNA
atttcgaggggttttatccaagtgaagtgttgcatggagggctaatttagaaaagaagttggcgacagccatcccgataggcccccagccctcttgttcccctgccagcctatcctgccc

SEQ ID NO: 2261 - DNA, 120 bp, synthetic construct
  source 1..120: mol_type = other DNA
cttcctgttagcacttttgatgggactagtggactttggttcagaaggaagagctatgcttgttagggcctcttgtctcctcccaggagtggacaaggtgggttaggagcagtttctccc

SEQ ID NO: 2262 - DNA, 120 bp, synthetic construct
  source 1..120: mol_type = other DNA
agaagctgacctctttgatctcttgcgcagatgatgagtctccggggctctatgggtttctgaatgtcatcgtccactcagccactggatttaagcagagttcaagtaagtactggtttg

SEQ ID NO: 2263 - DNA, 120 bp, synthetic construct
  source 1..120: mol_type = other DNA
ctgtttgcgctcacatttacatttcctaaaattctttaaaccctacacttggaatggatgaattacatgacatgcagattgcaccttcataacataatctttctcctgggcccctgtctc

SEQ ID NO: 2264 - DNA, 120 bp, synthetic construct
  source 1..120: mol_type = other DNA
aagagattttatctccttgttcctgaaaaccttacccatccctgtcatcacaaagaagccacctattttgctggagaagtgtttggaaagagacttaaaaaggctttttgtctgcctttg

SEQ ID NO: 2265 - DNA, 120 bp, synthetic construct
  source 1..120: mol_type = other DNA
tcctttctcagcatccactactctttgatcattttagacatgttgcttgaatagtacaagggcacaaggagctcagtaaaataacctggtcattgtagctctggacatccctgcagaaag

SEQ ID NO: 2266 - DNA, 120 bp, synthetic construct
  source 1..120: mol_type = other DNA
tagggttcattcttggtgttacacatgttatgtgttctgacaaacgtggaatgacgtgtatccaccataataatatcttacagaatagtctcaccgccataaaagtgaacctgcatcgac

SEQ ID NO: 2267 - DNA, 120 bp, synthetic construct
  source 1..120: mol_type = other DNA
ccctgatcgtgctttccttatagtgcattatatcagtgggttgtgggtacagctctctcttcccaggaccttccatcttcacaagaggcctctagagggagtgggtttggctttccacat

SEQ ID NO: 2268 - DNA, 120 bp, synthetic construct
  source 1..120: mol_type = other DNA
tctaaaacaaaataaattaactaaaaattgctctcagctctcctgtcgctgtcccactgcactgtcttgttcactctgccagcctttgtgtggattctcatggtgggagattgtaccaca

SEQ ID NO: 2269 - DNA, 120 bp, synthetic construct
  source 1..120: mol_type = other DNA
actattgctaagtaactgggggtctcagtgaaagagagaaaagagctgataggcctcttcctgtgttatcatgtcaggccatcttttgaaactcttttctgcaatgctactgaagtattt

SEQ ID NO: 2270 - DNA, 120 bp, synthetic construct
  source 1..120: mol_type = other DNA
aacggacttagcaggattcttgcaaaatttgggctcctgagaacatgcccaaggatgggatctagctggaataaaaagctggagggaccagatgagttccgtcaaggagagtctttgtca

SEQ ID NO: 2271 - DNA, 120 bp, synthetic construct
  source 1..120: mol_type = other DNA
ctctgctgctggaaagtaaacgtggaggacagggctttgtccagttcattctctgtggtatctccagtatccagacagagacataaaacatacatctgtatctgtaagttatttaataca

SEQ ID NO: 2272 - DNA, 120 bp, synthetic construct
  source 1..120: mol_type = other DNA
acataaaacattggcaacaacaaaaatgaactctgatgcccccactggaacatgagttgtgagcccagcaagacacataaatagagcaggagaaatgggagaagacaaaagtctatgact

SEQ ID NO: 2273 - DNA, 120 bp, synthetic construct
  source 1..120: mol_type = other DNA
ccatgaatcttggatggatgttgatgccttcaccttgaaaaatccctccctgaagatacagattcaatgtcccctgctctgtgaaggcttctctgtcccgtgacctcacttcccaagtaa

SEQ ID NO: 2274 - DNA, 120 bp, synthetic construct
  source 1..120: mol_type = other DNA
ccacacggtacagcacagaaggctcctggtgtcactgggaaaagcccagattcaaaaaggctgggctccggagtcatgcacatcctctctcaggtatccctgtgcagaaaacagtgtcca

SEQ ID NO: 2275 - DNA, 120 bp, synthetic construct
  source 1..120: mol_type = other DNA
gcaggccccagggggtctcttgcagcaggaacacaaaatgagtgatgtttgttttgaaccaatatttggggaagatatgaagatgtaaacatcatgaaaatgtaagatcacatgagcaaa

SEQ ID NO: 2276 - DNA, 120 bp, synthetic construct
  source 1..120: mol_type = other DNA
tatttgacagacacttggatcatttctagtttgggctgttaaggttgatgcagccacgaacatgtccttggtaccagtctctatatggacgtatgttttcattcactgagtaaacaccta

SEQ ID NO: 2277 - DNA, 120 bp, synthetic construct
  source 1..120: mol_type = other DNA
caggaacaactggggttgccctgctggaccatccaggctggtgacgatgggcgtgaaggaagctgttgtctacaaggagctaagtgaacaagcatttcctcctttggaaggtttactcat

SEQ ID NO: 2278 - DNA, 120 bp, synthetic construct
  source 1..120: mol_type = other DNA
agtcatactttactcagtctccaaacttgggcaacaggaaactagccacttgagaaggaagctcagcttttctgggctttagaggagatggagacacgttggaaattcccgtaaccaata

SEQ ID NO: 2279 - DNA, 120 bp, synthetic construct
  source 1..120: mol_type = other DNA
aaagtgctgatatcacaggcagggtttccattttttaaagctcccagcagtggtataaactcctcctttccagagaaagcgcactctgtccgcatccctcatgttgtcctctcctgcctc

SEQ ID NO: 2280 - DNA, 120 bp, synthetic construct
  source 1..120: mol_type = other DNA
tggcttcactccagaactacctggggtttctagctgtgtaaatcccaggtcccactcagattatgagtcagttctctgcaggtggaacccagggaggtgttttttttgtttttgctttta

SEQ ID NO: 2281 - DNA, 120 bp, synthetic construct
  source 1..120: mol_type = other DNA
tgcccatagaaatggagacccctgatttgtctttaggtaccccagaaaggtttagaccttaaaagcaatgacacacccaaaaaggcccgggtataaatggtaaaatgttaatatttgaga

SEQ ID NO: 2282 - DNA, 120 bp, synthetic construct
  source 1..120: mol_type = other DNA
tggaatttatcacggtcccagattcctgttgaatggccgtaacccctgcccctttgtcacgagtcagttgccaagagaagcctgtttggtttgagagcagttcatgcagacatagaccac

SEQ ID NO: 2283 - DNA, 120 bp, synthetic construct
  source 1..120: mol_type = other DNA
tactctagtgtcctgtgtggaggtattggaattgtccattgctaagactcagaggagaaaagcacttagcatcgcaggacttggagcaccggtgctgaggcaacccttcattcattcgtc

SEQ ID NO: 2284 - DNA, 120 bp, synthetic construct
  source 1..120: mol_type = other DNA
gtaagcaccaatggccaattgggtccaaaggaagacaccggttcaaacactgaaaccaatcagattctcccacggccttcctgctatcagacgacactggtgcaggggtggttgctatgt

SEQ ID NO: 2285 - DNA, 120 bp, synthetic construct
  source 1..120: mol_type = other DNA
gtcctggaaggccttgcccatccctagagggctccctgtccctactcctcaaggagaccaagaggctgaaatagtcagcactgctgtgctgtggggtcctaaagtctgctgtcctccttc

SEQ ID NO: 2286 - DNA, 120 bp, synthetic construct
  source 1..120: mol_type = other DNA
cttgtctgcagtcactcactgcctttggcgactagtgccactgccacccctgccccagcctctcttctttgccaccctcctctctctgcactgtggccttaaaaaagagctcagagcttt

SEQ ID NO: 2287 - DNA, 120 bp, synthetic construct
  source 1..120: mol_type = other DNA
aagccagttcatctcggagtccaggcctggccctgggagacagggtgaagggagtggtttttatgaacttaacttagagtctaaaagatttctactggatcacttgtcaagatgcgccct

SEQ ID NO: 2288 - DNA, 120 bp, synthetic construct
  source 1..120: mol_type = other DNA
taagttttatacatagtttctaatttttttccgaacagatccagatacctaataagatgctggaatgtaatccctggacaatccgtgtcctggcagcatttggtcttcctctaagcgcct

SEQ ID NO: 2289 - DNA, 120 bp, synthetic construct
  source 1..120: mol_type = other DNA
ctcctctggtctcatgatgtgcatctgttaccttgaaactggaaaccagtctatcaatgtctgtgccaattttttattccctccccaacctccttccccatacgactttttatttatgta

SEQ ID NO: 2290 - DNA, 120 bp, synthetic construct
  source 1..120: mol_type = other DNA
gaaaaataagctttaaaaatagttactccattgtaatttttgcaaagcaggtatagagaggtctgtggacaattaaaaagtccccatcttttcactgggcacgccccagactccacgaga

SEQ ID NO: 2291 - DNA, 120 bp, synthetic construct
  source 1..120: mol_type = other DNA
tgcagtgacttccaactcatactccaccaaaacacacgtgggttcaaaaacttaacacaaaaatgcaacgcagtaattttcaaaacaaaaccaggactaagcaacttcatcaaaaccccc

SEQ ID NO: 2292 - DNA, 120 bp, synthetic construct
  source 1..120: mol_type = other DNA
gacaatacatggactttctctttcaatggtgaggaatgaaacaagatacaagaaccacagcatggaatatgttttcttttacatccaatggccaggtcataaaggatgccttgagacctc

SEQ ID NO: 2293 - DNA, 120 bp, synthetic construct
  source 1..120: mol_type = other DNA
cactgttagtgaagtgataccacagctatttaatttcatgcaattgactcaaggttaagattctgaaacgtacccctaaaccggttctggcaccactttcaacaacattcagatattccg

SEQ ID NO: 2294 - DNA, 120 bp, synthetic construct
  source 1..120: mol_type = other DNA
tgcagccactttacagacaagactgttacacccttacaagatgatcagtgacgcagccacatactgtctatacaattactcataaagtgcttttcacaaataaggacttcttcctcgttt

SEQ ID NO: 2295 - DNA, 120 bp, synthetic construct
  source 1..120: mol_type = other DNA
ccttggctatagcttggttggtctgatttgatttgtgttcctaaattctgagtctagattcctgataagggaggttttccattaatttgccattaatacatccgctttctttgctatgac

SEQ ID NO: 2296 - DNA, 120 bp, synthetic construct
  source 1..120: mol_type = other DNA
actgtatttcctgagaatttgctacattgtggaggaaaaaaaaaaaacccaaacacttatcttcattgctggacccaatgagaaagaaggcaatgtgtgccagcactatctagcctgctt

SEQ ID NO: 2297 - DNA, 120 bp, synthetic construct
  source 1..120: mol_type = other DNA
aatgccactattaggaagagagaggcagtagttatcctcattttgctaaagatacaattaagaggtcaactgatttgttcacaccacacgtttgacagagaaagaaaatccagactgcct

SEQ ID NO: 2298 - DNA, 120 bp, synthetic construct
  source 1..120: mol_type = other DNA
ctaatttctgattgctatcagattccaactggttgctagataacactggcacatcccaacaacagattgctaatgactggatgattgaatcctcagctttgtaagctgatagtattagtg

SEQ ID NO: 2299 - DNA, 120 bp, synthetic construct
  source 1..120: mol_type = other DNA
gcatgaattccttttaacaagcaattaactaaggtattgtgagtccaaagatcaagaaagggtaaaagaattattgcctcatatttaaagttaagaggattggggaatctagcactgatt

SEQ ID NO: 2300 - DNA, 120 bp, synthetic construct
  source 1..120: mol_type = other DNA
ataagactcttaaaatgtccctaaaacatggagaatttaaggaaaacatgggagtaacaggtgatgaatctgctttcacaaaaagtatcttttcttaatgattccttcttgcccatctgg

SEQ ID NO: 2301 - DNA, 120 bp, synthetic construct
  source 1..120: mol_type = other DNA
gaaaagtaacagtttacttcttatccaaatcaatcactacttgacatttaaggagaaagtcaactgcagccagaataagtcccctcctgacattcttcgtcatgactttcaagcagtttc

SEQ ID NO: 2302 - DNA, 120 bp, synthetic construct
  source 1..120: mol_type = other DNA
aggccatttaagctggtatattaaatagccaatgttttagagaggacaattttaactattggtttaactattagagtttagtatctaaatggctggtatatgccatccgaggggcaggaa

SEQ ID NO: 2303 - DNA, 120 bp, synthetic construct
  source 1..120: mol_type = other DNA
ctgtgaggcaggtatgctgggaaattatagaaggagctctatcaataaagagacccctgaccttgtgcctcaaaatggccaaacatttggagcattccacaaagtcaattttgtaaaaac

SEQ ID NO: 2304 - DNA, 120 bp, synthetic construct
  source 1..120: mol_type = other DNA
cagaggtatctcaaagaaaaacacacctaaaagttctcacagaattctgtgaagattttttgcaggggagagattgggtgtgaagggagcaatgcgtttgcaacaaaatttgacttctac

SEQ ID NO: 2305 - DNA, 120 bp, synthetic construct
  source 1..120: mol_type = other DNA
atataagcaaacatatgttcatttattttccttttgttgctactctcctgaactctctcactcatttgtttcagtggacaggaaacgcaccatatccccctgcctggatgggtgtttttg

SEQ ID NO: 2306 - DNA, 120 bp, synthetic construct
  source 1..120: mol_type = other DNA
ggttataatccttgaaggcatacagcatgataatgcatgttcataatcatgaaacatgtttaaagggcttggcataatgcctggcctataataagcactcaataaaaccttagcagctat

SEQ ID NO: 2307 - DNA, 120 bp, synthetic construct
  source 1..120: mol_type = other DNA
ctgggcaacagaacaggcccagcctataaaaaaaaaaaatgaggtatcatactacattttgttttctgtcttgttttctttttctctcaccaatatccatgtcatcaatacaaaactaac

SEQ ID NO: 2308 - DNA, 120 bp, synthetic construct
  source 1..120: mol_type = other DNA
taaaaagtgggcctaaggatgtactttgcattattaatgtcaataaacattctaagtaagaacccgagcaccatgacgtgaaaagagaacatgggacagggtcatgctgaagctgctcag

SEQ ID NO: 2309 - DNA, 120 bp, synthetic construct
  source 1..120: mol_type = other DNA
aaaaaaaaaaaaaagcagtgagttatcaagaattaggtaaaggcaggctgagctgacaaatgccttactgccttttcctttttctgcatcaggcagaaatgcccctcaaaaagacccagt

SEQ ID NO: 2310 - DNA, 120 bp, synthetic construct
  source 1..120: mol_type = other DNA
ctcatgaaatacacactgtgtgcccaaaaaagtgctcagaaatctgtctatgaatgttagtctgttcttttggatagcatgaagcttttacttacttggggaaagagtggtctctcatct

SEQ ID NO: 2311 - DNA, 120 bp, synthetic construct
  source 1..120: mol_type = other DNA
gctgatgaattttagaaaccgccaagcttgatacattgtgttatttcctgtttggtgctgtaatgacccttgtttaactgccaggcattagtaaagctttgattgcaatgtggcctctat

SEQ ID NO: 2312 - DNA, 120 bp, synthetic construct
  source 1..120: mol_type = other DNA
atggtccttcttcccaccactagctgtgatgatcatttactgccttgtatggttattaatctttttgtgatatgtatcttatctaagttctccaatgagactatgggtgctcaggcagag

SEQ ID NO: 2313 - DNA, 120 bp, synthetic construct
  source 1..120: mol_type = other DNA
ttgaaaaaactgatttgccagagaaccactcaagtggaagtgtaacacttatcttgctttcccattttccctgttataactgcccttctaccactttacaaaaggcacacctttaggact

SEQ ID NO: 2314 - DNA, 120 bp, synthetic construct
  source 1..120: mol_type = other DNA
aaaaaaaaaaaggcacaccttttacccatatgtaacctaactatagtatacattgtcccagggtgtaaaaacctctggggcaacaaagagacatttctaaatactggtgtcaaactgggc

SEQ ID NO: 2315 - DNA, 120 bp, synthetic construct
  source 1..120: mol_type = other DNA
tgtgaatgtaacagttgtcagtgagtcttgagcagctttcagtgagttttcagcaagtccttttaacaaacctgaagctggtcttggggactactaaactctgcatgtgattataacaaa

SEQ ID NO: 2316 - DNA, 120 bp, synthetic construct
  source 1..120: mol_type = other DNA
ttcaaattctgggactgatttttcatactttcaatacacactcagtactcctggtgtctcgaccctgtcaattcactccatggtattactggagctcatgtctgctcattttcagtatca

SEQ ID NO: 2317 - DNA, 120 bp, synthetic construct
  source 1..120: mol_type = other DNA
ttaccagctgtgctctgaatttacaggcaaaatctgccacctcagactatgggtatgagagtctaggggaatggtattcacattgcatagtaaagaatattcctggattcttaaacagaa

SEQ ID NO: 2318 - DNA, 120 bp, synthetic construct
  source 1..120: mol_type = other DNA
aagcccttgccacatcatttattatactcccatggaggacaaagcacctaaaatgccaagaagtggatgagagaagaactctgggatgcttttatctgtattttggagataatacttgtt

SEQ ID NO: 2319 - DNA, 120 bp, synthetic construct
  source 1..120: mol_type = other DNA
atagaaaaggctaagagctccatgaggctatgttagtaccttttggaaggtaagggacagggaatagttgcttaggaaggaaaagaagtaaaaaattaccctcctactagcattctcatt

SEQ ID NO: 2320 - DNA, 120 bp, synthetic construct
  source 1..120: mol_type = other DNA
aattcttcccatgacttaccctattagaatcagttcccacttcccattcctgattcagcaaagaaatactagacttgtggttataagatgcttaggagcagcacaactactgtagtaact

SEQ ID NO: 2321 - DNA, 120 bp, synthetic construct
  source 1..120: mol_type = other DNA
ctgatggaagatctgtgggatgtcctgaagagcgtgagaggatggaagtgaaggagaaggttgtatctacttcgctttgtcatacattttgttcatagttgcttttagtaatacagtaca

SEQ ID NO: 2322 - DNA, 120 bp, synthetic construct
  source 1..120: mol_type = other DNA
accagaatacagatcttctaagtccaatgtcccctcttccaccttgccacctgccctaattccacttactgtcataagaaatcacagctcaatttaactctaggtttattttgacaaact

SEQ ID NO: 2323 - DNA, 120 bp, synthetic construct
  source 1..120: mol_type = other DNA
ccacagcttgctgcaatgcacacaagtttttgttcccttcttttagaacttctctttcttcttttccacaaagcaaaaaacaagaagaaagaaagagctatgcaagacagcacaaggctg

SEQ ID NO: 2324 - DNA, 120 bp, synthetic construct
  source 1..120: mol_type = other DNA
agatattctcttggcactcctgggcgagcagtaaaggctcttcattggaatgaagatgctgcagatagtatcttagtctgcacttagggaagagaaatattatgtttttctcacctcatt

SEQ ID NO: 2325 - DNA, 120 bp, synthetic construct
  source 1..120: mol_type = other DNA
cacccaaccctccaagttagctttcgttctattttccacctattcatatccatcctttaaaactgaatacaaattctaactcctgagtgaagctttcccatgactaaccgaactgaaagt

SEQ ID NO: 2326 - DNA, 120 bp, synthetic construct
  source 1..120: mol_type = other DNA
ataggtctcactgcttacaaagttctgcagtgacatacaaagttaaaaactggtggaaataaatgggccccaatcaaagctttaagatggtgagatcttgtctccattagaaagaaaggg

SEQ ID NO: 2327 - DNA, 120 bp, synthetic construct
  source 1..120: mol_type = other DNA
ggacctccctctttccttggtaagatgttaaggagagcattacagttttacagaagtactaggaaagaacaaatatgctatcaaccaaaggaacaacacattctcttgataggtttctct

SEQ ID NO: 2328 - DNA, 120 bp, synthetic construct
  source 1..120: mol_type = other DNA
agcttatttgtaaaagccactagcatctctcacttaagtctgctgccattttcaagtattttaaactcttggtaaaacacagaactgacctacttagacatttgcatgtcagccctcttt

SEQ ID NO: 2329 - DNA, 120 bp, synthetic construct
  source 1..120: mol_type = other DNA
tcaaatttcatataaacagaatcacctggcttcttttgcgcagcaaaacaattgtgagattcacgcactggctgcatgcagtgttacggggtatgggtatatcacaacttatctatttac

SEQ ID NO: 2330 - DNA, 120 bp, synthetic construct
  source 1..120: mol_type = other DNA
aacaagggattaagaacctgtttcatgaagaagtgtgtgatcaactgtatcagatgtttctgacaggtcaaataaactgtggactgagaattttactgctggatctagcaacatggaggc

SEQ ID NO: 2331 - DNA, 120 bp, synthetic construct
  source 1..120: mol_type = other DNA
tccaagataaaaaggaaggagagcaactggacagtgaataccaacaagtcttttgagaagttttactgtcgaaggaagaagaggaatgaggtaataactgaagagagaagcaggattaag

SEQ ID NO: 2332 - DNA, 120 bp, synthetic construct
  source 1..120: mol_type = other DNA
gatggaggaagatctaccaagcaagtggaaaacaaaaaaaggcaggggttgcaatcctagtctctgataaaacagactttaaaccaacaaagatcaaaagagaccaagaaggccattaca

SEQ ID NO: 2333 - DNA, 120 bp, synthetic construct
  source 1..120: mol_type = other DNA
aatagtggagggaaggtcagcagataaacaagtgaacaaaggtctctggttttcctaggcagaggaccctgcggccttccgcagtgtttgtgttcctgggtacttgagattagggagtgg

SEQ ID NO: 2334 - DNA, 120 bp, synthetic construct
  source 1..120: mol_type = other DNA
ataaactagaaaatctagaagaaatggataaattcctcgacacatacactctcccaagactaaaccaggaagaagttgaatctctgaatagaccaataacaggatctcaaattgtggcag

SEQ ID NO: 2335 - DNA, 120 bp, synthetic construct
  source 1..120: mol_type = other DNA
atgagtgaacttccattcacaattgcttcaaagagaataaaatacttaggaacccaacttacaagggatgtgaaggacctcttcaaggagaactacaaaccactgctcaatgaaataaaa

SEQ ID NO: 2336 - DNA, 120 bp, synthetic construct
  source 1..120: mol_type = other DNA
tgcagccaaaagacacatgaaaaaatgctcatcatcactggccatcagagaaatgcaaatcaaaaccataatgagataccatctcacaccaattagaatggcaatcattaaaaagtcagg

SEQ ID NO: 2337 - DNA, 120 bp, synthetic construct
  source 1..120: mol_type = other DNA
ataaacatacagaaaaatggaaagaatacccacacaccttccacatagattccacaaatgtcaacattctgccaaatgtgcataagaaagatgtttcattattactgttacttcttaatt

SEQ ID NO: 2338 - DNA, 120 bp, synthetic construct
  source 1..120: mol_type = other DNA
aactgaaagtgtaactgccctataacattaagggtctacttgaagttttcgaagggactgaataagttggggaagcaacatgctttaatggttaaaggaatacaccctggagctgaagta

SEQ ID NO: 2339 - DNA, 120 bp, synthetic construct
  source 1..120: mol_type = other DNA
aaacttttatacatttgcctcctgctacagtttgaatatggcttgtccccacaaaactcatgtggaggcttggccccagtgtaatggtgttgagagttggtgggacctttaagaggcatt

SEQ ID NO: 2340 - DNA, 120 bp, synthetic construct
  source 1..120: mol_type = other DNA
ctgtatacacgacttggaacaaaagctaatgtttcttggggttagaataagcattttcctattttaacagctacttccagaatgctgttaaggtggctggttgcatcagaaatgacccag

SEQ ID NO: 2341 - DNA, 120 bp, synthetic construct
  source 1..120: mol_type = other DNA
aaggcacaatgtactgaccattcctggaatttctttagtaacagtattcttaagatatctgggtccttgggatgaatcaatgactggcaggtgaaaagatgataaaacaggccaggtgca

SEQ ID NO: 2342 - DNA, 120 bp, synthetic construct
  source 1..120: mol_type = other DNA
aaaggctttgcaaaagtacatattaagaggctatttaaataccctatagccttattgtctagctatagactatatctggcttggtcagtcctttgtgagatgatgctggtcagggaagag

SEQ ID NO: 2343 - DNA, 120 bp, synthetic construct
  source 1..120: mol_type = other DNA
cataatttccagtgtactgtaaatatcaacattttagcattttgttgctgctgttacatgaatgttccttagaaaacctctgttcctgtttagtggacataaagttatcttttctccctc

SEQ ID NO: 2344 - DNA, 120 bp, synthetic construct
  source 1..120: mol_type = other DNA
gagaaataacagcttttcaaacaggcctttcattttaaccctttcatcccctgagatagctgatattgccaattcctgagaattgaggattctacggtataaaccaggttggctttcatt

SEQ ID NO: 2345 - DNA, 120 bp, synthetic construct
  source 1..120: mol_type = other DNA
ttcatttaacagttatgtactgagtatgccaggtcccattctaggcattaggcataaaataatgaaaaaaagcccctgctctcatacagcctgcattctagtggggataaaagacaagaa

SEQ ID NO: 2346 - DNA, 120 bp, synthetic construct
  source 1..120: mol_type = other DNA
cactgtgcctggccaagattttaattctttaaaagcctttagattcgaacagattcagagattctaacttatctgaaacgttgagattgtttcaagtctaggggtaagtgggggtgttac

SEQ ID NO: 2347 - DNA, 120 bp, synthetic construct
  source 1..120: mol_type = other DNA
caaccattctgtttacttgcacaactgctaacaactttttagcaggtttttgctgtttctatcttctgaacctctcttgcttagctcaatcactgagtgctaagcctaagtttgcagtca

SEQ ID NO: 2348 - DNA, 120 bp, synthetic construct
  source 1..120: mol_type = other DNA
acacctctagaatcttccctatttaggtggtcctcactaggcatatcctagtttgtcaatgtttctaaaattccagagcccaggactaaataccacctctaaatgtattctgataagctt

SEQ ID NO: 2349 - DNA, 120 bp, synthetic construct
  source 1..120: mol_type = other DNA
aaacagctgtaacgtcaacactgccagtaggtgtttaaattggtacaactactttgtaacattgttggcagcattactaaaactggacatatgcataccctgtggtctcacaattctgtc

SEQ ID NO: 2350 - DNA, 120 bp, synthetic construct
  source 1..120: mol_type = other DNA
agatactcaacctgtatgtatattttaataagttaaatcaacattgattttcctcaattatcaaagtaatacagtgcttattctactgtttgtatcataaaatactgtacagcacttaag

SEQ ID NO: 2351 - DNA, 120 bp, synthetic construct
  source 1..120: mol_type = other DNA
gctccataatatggtatcttacacatactgctttgaaaaatttcatataccaaagacacctttctacatcaataaatgtacctctaccatgccattttaactcctatataatcacatatg

SEQ ID NO: 2352 - DNA, 120 bp, synthetic construct
  source 1..120: mol_type = other DNA
ctttgtcccactgtaatctgcccatcaggaatctcccaatcatcactcgagtcccgtctaccaagtgttttcttgataaaaacagtaaaaaagtcaagtcaagccaaacagaaaaagaaa

SEQ ID NO: 2353 - DNA, 120 bp, synthetic construct
  source 1..120: mol_type = other DNA
tttggctgtgacttctaagaagaaagaattcagagaaaaaaagatatcatatactcttaccattcgattcctgtcttctgaggatgaagatgacttcctttctcgctgaggtcctggaga

SEQ ID NO: 2354 - DNA, 120 bp, synthetic construct
  source 1..120: mol_type = other DNA
tgcctttgtaagtgagagctttgttaagtaagcgctatggcctctcagccaagttactataaatacaaatattctataggtcaagtgagcctgaggagtatactctttggaagtgatctc

SEQ ID NO: 2355 - DNA, 120 bp, synthetic construct
  source 1..120: mol_type = other DNA
ctgtatgacttccatcccattctatggattttctgagaaacagcagggctgagagagcaaaaatctaaagcaccattactacattcagaatatataacagatactaactagcaagagtca

SEQ ID NO: 2356 - DNA, 120 bp, synthetic construct
  source 1..120: mol_type = other DNA
acagcatctgtagttttatatttagtttgctttgggtgaaaacaagaaagaagagcccaactacctctgaacactgggccaggctcaaaatcaaacactatttcactggggacagaatgt

SEQ ID NO: 2357 - DNA, 120 bp, synthetic construct
  source 1..120: mol_type = other DNA
tttactgacctaagaagaggacaaatgggctttgccattatgggtctgttctataaaatgtacatttaaaacacttccagaaagttgaaggaagtggttgataatgtctgacaaaccccc

SEQ ID NO: 2358 - DNA, 120 bp, synthetic construct
  source 1..120: mol_type = other DNA
gtgtctgttacttgaaagaggcaagtataaaggaaataagcagcaaagcaattgcagtttccttgagtttttaaaaaaacctgaaatcactacttacctccatcaccacgaaatccttgg

SEQ ID NO: 2359 - DNA, 120 bp, synthetic construct
  source 1..120: mol_type = other DNA
ggttacaatcataaaaatatggatggataagggcacactagaagaggaaagaaacaaagtggctcatagaaaggttttgttaaaatttgtccttttttttgagactcagttgctctgtcg

SEQ ID NO: 2360 - DNA, 120 bp, synthetic construct
  source 1..120: mol_type = other DNA
gaaaagaaggtgacaggagttatatggctactaacaaatataaaaatcctagtgatgtcattaactttccattcttgagagcttacaatctcatgggaagtaagatgcacacattggaag

SEQ ID NO: 2361 - DNA, 120 bp, synthetic construct
  source 1..120: mol_type = other DNA
cccaacatcacacagtctgtaaagagttacagagctggctatgtccatctttaattcttcacagtctctgagagacataatttccaagctcaaggaattttactacatcaatcatttcct

SEQ ID NO: 2362 - DNA, 120 bp, synthetic construct
  source 1..120: mol_type = other DNA
gtccttatatccaactgctactggatttctaaacctgaaagtcccacaggcatcttaaagtcaatatatgcccccaaaaagctaaaattgctgcttctgcaaaccttgttttcctttggt

SEQ ID NO: 2363 - DNA, 120 bp, synthetic construct
  source 1..120: mol_type = other DNA
cttaacaaatgactttcctaacccccttatgtagtgtactcctacttattcaccataatctggcttaaaggttgtcccttctctgctcaatgttcctagatccaaccagatggagtttat

SEQ ID NO: 2364 - DNA, 120 bp, synthetic construct
  source 1..120: mol_type = other DNA
cttatatcacattctccttttcccctttcttcctttgtttttaggtcttgctagatagaggtgaaccttgctagttaaggaaaactagtactagaaaaaagtcacttaaaatgaacccaa

SEQ ID NO: 2365 - DNA, 120 bp, synthetic construct
  source 1..120: mol_type = other DNA
aaatccaatactgccaaagctgctttgctcaagtaggccctccaggaactatcaatgataagaccactgattcttacctggaaaacactagggaaatttacttatggctagaaattacct

SEQ ID NO: 2366 - DNA, 120 bp, synthetic construct
  source 1..120: mol_type = other DNA
gacgtgaggaatgggaaaaaaatatagtaggaaaggaatgaataaaggtttgaagagccaaggaagcctaacagtgaaagtcagtctctgaataaaacatgtcagaatctgaaccacacc

SEQ ID NO: 2367 - DNA, 120 bp, synthetic construct
  source 1..120: mol_type = other DNA
tcagagaaactcaatttggtagttggtatctaatagttgtgtcttggtccaccaagtcaacttctctagctttcagggcaagtacaagggaacacttgaagtgatcataatctgatgtca

SEQ ID NO: 2368 - DNA, 120 bp, synthetic construct
  source 1..120: mol_type = other DNA
ttttaagatagcattccttcactggaaggcaaatgtcctggatcattaccattataaaccttcagagaggccaagctaatttcattagggtgttttataactgctcacagaactgggacc

SEQ ID NO: 2369 - DNA, 120 bp, synthetic construct
  source 1..120: mol_type = other DNA
ttttttttttttaaagcatgtgcttccagacgcagcctaaataacgctgccccaaattcaatgtgaaagagtacacagacctgtgtcagaaatgttccaaagctaattaggtgcagtgtc

SEQ ID NO: 2370 - DNA, 120 bp, synthetic construct
  source 1..120: mol_type = other DNA
ttcccctttcaccatgcttctattccctaggcccgttcagattgtagtaattctttaaagtctagttcaaataccaccttcttcattaagttttcctgagcactctctttttcctcacta

SEQ ID NO: 2371 - DNA, 120 bp, synthetic construct
  source 1..120: mol_type = other DNA
cctgtggtattgggtggtgttcaaagaacttggagacaaacagcaaactgtgaggcaaaacaaaacaaacctaacttgtgcaaaacccagaagcttcatataccaaaatacatagttaac

SEQ ID NO: 2372 - DNA, 120 bp, synthetic construct
  source 1..120: mol_type = other DNA
gaacttctgtactacaacgctggtgaaatttataaccacatgtttgacagcggaaaccctggaaaagcagctttcgacaaaagtcacaaaatgctaaggtgaaaaacgtttttcgtacct

SEQ ID NO: 2373 - DNA, 120 bp, synthetic construct
  source 1..120: mol_type = other DNA
gtcttcatttttaacagaaaagtttaaaaagtaaaaaagaaaaattaaaaatttttaaaatagaagtttatagaataagcacataaaatatttttgtatagctatataatgtttttaaac

SEQ ID NO: 2374 - DNA, 120 bp, synthetic construct
  source 1..120: mol_type = other DNA
aacacttctctaggtgaaacttagaaggcaacatgttaagaattccatgtcaaaggcaaatgatgtagaacatgagtcacgtaacagaactgcactaggaagaatctatcccactaaagc

SEQ ID NO: 2375 - DNA, 120 bp, synthetic construct
  source 1..120: mol_type = other DNA
ggggggggtggttaatacttttaattacatgattgtaattatacaatttccactcttcaatattttgtataaaaccagttacaactcacaagattttcaaatgagacaggattttaccag

SEQ ID NO: 2376 - DNA, 120 bp, synthetic construct
  source 1..120: mol_type = other DNA
tagtgagaggcacagtcaaggtaatttgcatgcattaatttgtaaggtgtggggctgtgtgaaggaagacactgagtgtctgcagaaaaaggagaaggtttggatataaaagtttcaaat

SEQ ID NO: 2377 - DNA, 120 bp, synthetic construct
  source 1..120: mol_type = other DNA
ccatactctggaatcaatctgcagtttgctttcacaatccttctgtggcaaggaccttcctgaggcatcattttaatactattttctcacacttagcaacttaggtctttcttttatctc

SEQ ID NO: 2378 - DNA, 120 bp, synthetic construct
  source 1..120: mol_type = other DNA
actttaggcttacaggtacaagcacacgtttgtgtacacagaaaaaagtttggaagacagaacaataatctgttaatctaaacaaatgttggcctctaggagggtattttcacttttttt

SEQ ID NO: 2379 - DNA, 120 bp, synthetic construct
  source 1..120: mol_type = other DNA
taaacaaaatttcacgtcacatacaaaccatacccatcctgaattctgtaaacagcacagcactctgggattagacctctcatcatcagtgctttctttagactgtctcggactgtaact

SEQ ID NO: 2380 - DNA, 120 bp, synthetic construct
  source 1..120: mol_type = other DNA
gtccagggctatatatatgacccaaacagtacctgagttcttccctaaattgacacatggacactgacagagaaaagtccttgtttctactgtagttctgtagatttgcagaagatacaa

SEQ ID NO: 2381 - DNA, 120 bp, synthetic construct
  source 1..120: mol_type = other DNA
aacaaagaaaaaccctgaacttttacctacccagcaaggtaaaagtttgtcatgagagactgggctcatcactggaagtattaaagagactggatggtacagttgatcctcattacttgt

SEQ ID NO: 2382 - DNA, 120 bp, synthetic construct
  source 1..120: mol_type = other DNA
acagcagcttggaatctttatagccttgggatttgatcttatttatacctaatagatgttgagtacaaagcagttttgtggggactgcaaagtaggcaggctctcagtggctaaaaatct

SEQ ID NO: 2383 - DNA, 120 bp, synthetic construct
  source 1..120: mol_type = other DNA
cccttaggcactccagtaatgcacttcaaatatggctatgctccctcatgcttctctacatatgctgatcctaagttgcatatatatttcatcaacaggcaaaaatttggttttctgctc

SEQ ID NO: 2384 - DNA, 120 bp, synthetic construct
  source 1..120: mol_type = other DNA
atgagagacaggtcccagaaacagaagtagaaatggccttcacacatatgaaaacatgttcagtctcactcagaggaaagcaaacccaaactagtgaagttatttttcatttatcagatt

SEQ ID NO: 2385 - DNA, 120 bp, synthetic construct
  source 1..120: mol_type = other DNA
gttgttctaaaatttaggtggtcatcaaaattgttatatgtttaattctttgagatagtacattaatttggtagtttgttttacagtgcagacgattatatgccttaagtaagcttcatg

SEQ ID NO: 2386 - DNA, 120 bp, synthetic construct
  source 1..120: mol_type = other DNA
cattaaagtagaaaaaggaggatgtctataccacaaaaacttcagaaggtaaaagcaattttagaattaagcgtgcctcctggtcaggttgaatttaactggccaagaaccagaaaccac

SEQ ID NO: 2387 - DNA, 120 bp, synthetic construct
  source 1..120: mol_type = other DNA
agtcagtattgccctatcttttccctttgccattcctgtaccttggataccatcaggattaatgccaatcaacagatatttgtttacaaaccccagggtatgtaaacccaaagactcatt

SEQ ID NO: 2388 - DNA, 120 bp, synthetic construct
  source 1..120: mol_type = other DNA
gtctcttcaaatgatactccctgtcccaggaattccactttcaggtttgtgacaccttgttatatgtgtacaaggagacaagcacaagaatgttcttattacagcactgtttgtcataac

SEQ ID NO: 2389 - DNA, 120 bp, synthetic construct
  source 1..120: mol_type = other DNA
gtgatgtaaaagaccacatccagggtctatcacatttcttgatattacaatcctttgacttagtctaccttattttgaagatagcttatctagtctaccttatactgaagacagcttacc

SEQ ID NO: 2390 - DNA, 120 bp, synthetic construct
  source 1..120: mol_type = other DNA
agtgactgctaacgggtacagtgtttatttttgggatgaaaaaatatttttaaatgaattatcacggccacagaactttgtgaatatacaaaaatcattttatactttaaatgggtaaat

SEQ ID NO: 2391 - DNA, 120 bp, synthetic construct
  source 1..120: mol_type = other DNA
ataaaagtaaaaggtcagtccctttttcttgtcccagggaatatccccatccctccaataaccccaattaacagatttttacaattattcaaatatatctcagggccaggtgcagtggtt

SEQ ID NO: 2392 - DNA, 120 bp, synthetic construct
  source 1..120: mol_type = other DNA
caaagtgctggcaaaaaacaacagatgctggcaaagctgcagagaaaagggaaggcttgtacactgttggtgggaatgtaaattggttaggcactgtggaaagcagtttggaaatttctc

SEQ ID NO: 2393 - DNA, 120 bp, synthetic construct
  source 1..120: mol_type = other DNA
ataatgaacatacccatcactttctgaaaggttccttgtgctcctatgtaaatcttccatcctgccatagtcctgtgcccaggcaaatacaaatctgttgtcactatagaagagtttgca

SEQ ID NO: 2394 - DNA, 120 bp, synthetic construct
  source 1..120: mol_type = other DNA
caacagaaatctgggttgcttctgcctttggctactatagtgaataatgctgctatgaacatgagtgtacaaatatctctttgagatcctgctttcaattattttgggtatatacacaga

SEQ ID NO: 2395 - DNA, 120 bp, synthetic construct
  source 1..120: mol_type = other DNA
gatgcccccaactctgtactttttttgactgctttggctatacgggattccttgagatacggtatgaattttaggacggactttctatttctgaggaaaaaaaaaaaaagcccgttggga

SEQ ID NO: 2396 - DNA, 120 bp, synthetic construct
  source 1..120: mol_type = other DNA
gaacctatgaaaagtgaactccttctctggaaaggactttatggtgcatttgcccaagtcaacctaatcaaatttatagcttaacttagctgagagatttacaggtacctctcagtactc

SEQ ID NO: 2397 - DNA, 120 bp, synthetic construct
  source 1..120: mol_type = other DNA
gggcacaggagaaccctctaaagcatcaggaaatgtcctacatcttaatctacatggtagttacacatgtaaaaactctgagcgatatacttcagatttgtaccctctactgtgtataag

SEQ ID NO: 2398 - DNA, 120 bp, synthetic construct
  source 1..120: mol_type = other DNA
tatctttatgtattctggtaatagatttcagcctttcactgaaggtaatgtccttcaaagggtcagctttatgtgagaatctgggttccaactacctttgtgacacaggctgaaggccca

SEQ ID NO: 2399 - DNA, 120 bp, synthetic construct
  source 1..120: mol_type = other DNA
cgcaggccatacaaaaatagatggtgggttagatttgttgagggttatagttcagcgataccttaacatatcagctcctatgcttttctggttttttcaactccgtctttgttttcaccc

SEQ ID NO: 2400 - DNA, 120 bp, synthetic construct
  source 1..120: mol_type = other DNA
attccactgaaataattttcagtccctagatacccaaagtgtcttacttttaatattagcttggctattaacttccatcagatctttaatggccctgatccactgccttctagccctcag

SEQ ID NO: 2401 - DNA, 120 bp, synthetic construct
  source 1..120: mol_type = other DNA
attgacctagtaaatatcacacctatatgatgaagcttccataaaaatcactgaaatgcaatgttcctagagcttccagggtgctgaacatttggaggtagtggaaggtgatgctcctaa

SEQ ID NO: 2402 - DNA, 120 bp, synthetic construct
  source 1..120: mol_type = other DNA
atgctacaaattatttgttccatatatacagaagaggaactaacaggatccccttgttgtacaactccaggaggcaacattcacatctctatggacatgtgcaatgtaaggctatactgg

SEQ ID NO: 2403 - DNA, 120 bp, synthetic construct
  source 1..120: mol_type = other DNA
gaggaactgtcattcactaccacaaacaattttacttagaatgtgaattatcctggctgagaagatgtatgtaaagtccttagcacagaacttggaacacagcatggcaaatgctcaaat

SEQ ID NO: 2404 - DNA, 120 bp, synthetic construct
  source 1..120: mol_type = other DNA
ctactggggatgggatgtttgccagttttgttaggctgcttcgaagattatctatttacagataattcatatgttgatattccccttttaagtggggcatccctggaaagatatgcttag

SEQ ID NO: 2405 - DNA, 120 bp, synthetic construct
  source 1..120: mol_type = other DNA
acaactgatctgtctgaaaaatacaaagaaacagcaaaatggtgatattaaaactgactcaccactgtcctctgtttgttgggcaggaagactctaacgataggtttttgtggtgacttg

SEQ ID NO: 2406 - DNA, 120 bp, synthetic construct
  source 1..120: mol_type = other DNA
ctaccatctcaaatagatgcaatactacaaacatttatgaaagagagaagcaaatattttaaaatggcctttcccgtctctcaaggagtttactgttgggcagtggagtaggatgggtgt

SEQ ID NO: 2407 - DNA, 120 bp, synthetic construct
  source 1..120: mol_type = other DNA
gtaacaagagctactgaggaagagatttaaacttcatcaaaaggtcttctttgtttacagcctgctagttgccctacccagaccctgtttcatagtagatgagggcattataaacagata

SEQ ID NO: 2408 - DNA, 120 bp, synthetic construct
  source 1..120: mol_type = other DNA
cacgcacccctggggcacacatacttatcccaacttcttaaatgtctatctcattacattaatctgttcaaggtcaacattaatctctcaaacagttgctaagatttggccattgttgtc

SEQ ID NO: 2409 - DNA, 120 bp, synthetic construct
  source 1..120: mol_type = other DNA
ggttgtcaggggctggagggaatgacttccaatgcatgaagggtttctttgtgggaatgataaaaatattttagaatcagatagtggtgacagttgtccattgtgtaaatacactaagaa

SEQ ID NO: 2410 - DNA, 120 bp, synthetic construct
  source 1..120: mol_type = other DNA
agaataaaagaaatgcaattatggccttttatctccttttcaccagacattccctacaaggcaagttgatctaattatgtgcttagacaatcctgagtggaactctcacccgtcaggaag

SEQ ID NO: 2411 - DNA, 120 bp, synthetic construct
  source 1..120: mol_type = other DNA
cttaggaaaaaaacacaggagtaaatcatcctgacctttgattaggcaatggtctctcatgtatgatacaccaaaagcacagcaaccacagaaaatagataaattggaattccatccaca

SEQ ID NO: 2412 - DNA, 120 bp, synthetic construct
  source 1..120: mol_type = other DNA
catgatatatgtgtatgatgaaatattcagccataacaagaaatgaagtactgatacatactactacataaacaaactttggaaacattacattaagtaaaagcagccagtcacaaaagg

SEQ ID NO: 2413 - DNA, 120 bp, synthetic construct
  source 1..120: mol_type = other DNA
ggactcagctgtagggtgattacagagacagtatcccttcatctctgggctccaataaatcaagtacagaaagaagaatctactactagaaaagcatctagcattatatcttacacatag

SEQ ID NO: 2414 - DNA, 120 bp, synthetic construct
  source 1..120: mol_type = other DNA
ctgtggtcttgacagaaaagctaaagggactatagcgattcaaccaagtatctgacaactgacctgtgtagaactagtcttacaataatttacctctacgcttcttgctatgtgaaagga

SEQ ID NO: 2415 - DNA, 120 bp, synthetic construct
  source 1..120: mol_type = other DNA
tctgcactgtttctgagtttctgttgaccatttctgctgctgtctttcctgttgacagctttctttaaatatctggttattcttaactgtccactcatatttcagagttaagaattctta

SEQ ID NO: 2416 - DNA, 120 bp, synthetic construct
  source 1..120: mol_type = other DNA
aaaatggaccaagaacttaaatcagacatttctcaaaaaagatatacaaatggccaataagcacataataaaaggctcaacattgttagtcatcaggaaaatgcaaatcagcaccataat

SEQ ID NO: 2417 - DNA, 120 bp, synthetic construct
  source 1..120: mol_type = other DNA
aaaaaaagtgtaaaggaatcttaaatggcagatgagaaacctgcagaacggtgggtctcagtgagtaatcagtagatctagctcttcactgatgggcctttaaatatcagtatgtacagg

SEQ ID NO: 2418 - DNA, 120 bp, synthetic construct
  source 1..120: mol_type = other DNA
cttacccaagatgtgatattatttccactttactaatgaggtggggtataagaaggctggatatcttgagtacagaaactaagccagagttgggattcaaacatggagtctgtatgactc

SEQ ID NO: 2419 - DNA, 120 bp, synthetic construct
  source 1..120: mol_type = other DNA
ttgttgttagtgatcagtcttcaaatagtaaaaagcctgaagagttatgtgaggagggggcagtgaatcactgctatagtggggacatagctattgatgcaaatgaattacatctcagca

SEQ ID NO: 2420 - DNA, 120 bp, synthetic construct
  source 1..120: mol_type = other DNA
ccttaccacctagattctgtaacaccttgttggctgtggagtctgactgactacttaagaaaactaatgctaagaaagctcatctgtgattataacagcacctactaactcataggatta

SEQ ID NO: 2421 - DNA, 120 bp, synthetic construct
  source 1..120: mol_type = other DNA
ttcctcacattcccaggccccctttcaaaaaggttaagttctgtttatggtttggtgagcagccttccatgtctcccttttactcatggaaaaaacattaagacatacatatatgaaatg

SEQ ID NO: 2422 - DNA, 120 bp, synthetic construct
  source 1..120: mol_type = other DNA
aaatttaataaatatgccaaatggtcttccaaaagaagaaatgtatcaagtcaagtccctatctgcagggtataagtccactcttccccacaatctcaccaacacccagcacaatcacac

SEQ ID NO: 2423 - DNA, 120 bp, synthetic construct
  source 1..120: mol_type = other DNA
aacttaacatgttcaaagactaacttctgatctcccccatcacccccacaaaacttgtttttcctagtctctttacctcaggaaataagctcccttctttgagtaaaccaaaaacttcag

SEQ ID NO: 2424 - DNA, 120 bp, synthetic construct
  source 1..120: mol_type = other DNA
cattcatctctttatcccaatgtcaccttatcaatgaagcattctcttaccttctcatttagaaaggctctatccctcccattccttaaaggcacagaatcagcttctatgccctttgtt

SEQ ID NO: 2425 - DNA, 120 bp, synthetic construct
  source 1..120: mol_type = other DNA
ggatgggagagagaaagtgggggaaaataatcagagatgagaaatgaagagaatgagctgattagaataaaattttcttgctggggtataaaaaacggttaagattgggctgggagtggt

SEQ ID NO: 2426 - DNA, 120 bp, synthetic construct
  source 1..120: mol_type = other DNA
gaagatgcccatgttaaaatataaatgcagacaaactgctatggaaggacatgaaggggagctatggcacaaaaaaaaaactacagccattggctcccctcatcccttaaagaaaatgta

SEQ ID NO: 2427 - DNA, 120 bp, synthetic construct
  source 1..120: mol_type = other DNA
gagggaagggagagacagaagtggtcttaaaatttcaagaaaatggttgaaagaatcacagtactgaaagcaaggaggccaggaccatcaaccacttagttggaaaaattcagaacattc

SEQ ID NO: 2428 - DNA, 120 bp, synthetic construct
  source 1..120: mol_type = other DNA
acattaatgggggaaagggccagcattacagcatttcaaacctatctattattattcaagaagagagatctaggaacatcttgtgccagatatcagaacaacatcagaggccagcttgaa

SEQ ID NO: 2429 - DNA, 120 bp, synthetic construct
  source 1..120: mol_type = other DNA
cagtgcatgcagagtggatcttagtttagggatggaagatagctgcaagagacattcttgggacaaccatggaaatctgaacacatatcagatgtaagatgatagaattttaaccttcct

SEQ ID NO: 2430 - DNA, 120 bp, synthetic construct
  source 1..120: mol_type = other DNA
ggggataacagaccttagggaattgtgtgtgccttaatacttctttatttttctccactaaaccttatttcacattacaccaaatgacatgtatgtgtgcatgcagatgtgttccccttc

SEQ ID NO: 2431 - DNA, 120 bp, synthetic construct
  source 1..120: mol_type = other DNA
gcatatggttcacattggcattataatttagtggggaacagaacggactatataataaatatttccagggtaagtggccatccttttggaaaaggtcaactaatccaaaagaaaatgggc

SEQ ID NO: 2432 - DNA, 120 bp, synthetic construct
  source 1..120: mol_type = other DNA
tctattttgaatttggactgttagccactcagaatctgccttaaagggttggttctttcagggttcacaaaaacatgcaatcaacgttctagattgtttgtggatctacacccacagcaa

SEQ ID NO: 2433 - DNA, 120 bp, synthetic construct
  source 1..120: mol_type = other DNA
tagaattaatttggcatcagacttttcatcagcaacattaaaagacaatgaagacggaaagtagattacttgttgacttaaggctggggggtgggcaaattggtgggaacagagaatgac

SEQ ID NO: 2434 - DNA, 120 bp, synthetic construct
  source 1..120: mol_type = other DNA
tagaaagttaaagatagtgactgtggctatatggtaagcaaggggagagtagaaacaagatgggtatcagaaaaattaggcaatatgccaggttatgaaggatcctgaaagccacggtaa

SEQ ID NO: 2435 - DNA, 120 bp, synthetic construct
  source 1..120: mol_type = other DNA
gacctacaagagagtataggccaagaaggctcagccctggggatcataaacatttacaagagaaaccaaaaatggctgaaaagaaagaaacagacactgaggtagaaggaaaaaatattc

SEQ ID NO: 2436 - DNA, 120 bp, synthetic construct
  source 1..120: mol_type = other DNA
tgcctaagtgcaggcaggtagcgggcattttgtcaggcccatatgatgaaaagagagaaaaattagagagccaaaggtattagtaatttttacagtcatttcataatagtatcttgaccc

SEQ ID NO: 2437 - DNA, 120 bp, synthetic construct
  source 1..120: mol_type = other DNA
aggactgtgcgctctgtgaatttggaacttaccccacttgatcagttttactcctagcacctaagtatactacctagcatgaagcaggtagtttataagtgctggctatataaaatatta

SEQ ID NO: 2438 - DNA, 120 bp, synthetic construct
  source 1..120: mol_type = other DNA
agacaatgtcagatggtcataaaaagttatagagaaaaacagagactgtgagcaggatcggggtgggtggctattcattttgtagtatggtaaaacttgaaggtctcattggtaagatga

SEQ ID NO: 2439 - DNA, 120 bp, synthetic construct
  source 1..120: mol_type = other DNA
cattgacccaagcagtggttgttttaagcactatgctttggagtggcttttgtacaaaagaaaattaatacgttctgttagggaaacagtagtccacagcaggaggagacacaaaaactt

SEQ ID NO: 2440 - DNA, 120 bp, synthetic construct
  source 1..120: mol_type = other DNA
tgtccagatggcaggcatgatatacacagtagctatctgcacatgtacaacttaatcaaggctattcatgctgttgtcattcaactcagttatctgcattgttggtattacaaatgttgg

SEQ ID NO: 2441 - DNA, 120 bp, synthetic construct
  source 1..120: mol_type = other DNA
aacagtaaaatgccctatctgcagagtaacacagggcattcagattctaggtaatcttagtacttcaagtctttgcaggtagctctttttacttccaagtctctagtgatatcacccttc

SEQ ID NO: 2442 - DNA, 120 bp, synthetic construct
  source 1..120: mol_type = other DNA
ctggccaccacagggacagaggctacacacatacacatattgagaagaagtacccatattctctaaagcaaggactgcctagctcacttagtagaactagaaattaatggatttttatat

SEQ ID NO: 2443 - DNA, 120 bp, synthetic construct
  source 1..120: mol_type = other DNA
gaagaagaaataacaaagaaaatttaagaatttctccttgagccaaaaggcaaataagagtcttcagaaccaaagttccttttttaacaaagaaagaataagagctgggcatggtggctt

SEQ ID NO: 2444 - DNA, 120 bp, synthetic construct
  source 1..120: mol_type = other DNA
cggaggaaagcaaaagccaggtcaggcaacatggtggcctgaagtttgaatatactccctgatacacagatagacacacaaagaaagaatagaaaccttactggccttgaaatatttgaa

SEQ ID NO: 2445 - DNA, 120 bp, synthetic construct
  source 1..120: mol_type = other DNA
aaaaaggcaaagaaataacattcaaagatagtgtctcagttttttcccctcacttttctcacgtaaccccatggtggcagcggcaacaataggatcttcaaaagagccaacattctgaga

SEQ ID NO: 2446 - DNA, 120 bp, synthetic construct
  source 1..120: mol_type = other DNA
tcaaaagccttcccaaatctgacaaatgacataaaactacagattcaaaaaggtcggtgaatccaaaaatggataaatacgtagaattccacactctcacacatcataaagtgttgaaaa

SEQ ID NO: 2447 - DNA, 120 bp, synthetic construct
  source 1..120: mol_type = other DNA
cagaatggctaaaagttgttcaaacaatctaaaagaatgcaggaaagacagagtaatggaaaacagaagcagctaacagaaaacaaattactaaactggtaaacctaaatctaaacatgc

SEQ ID NO: 2448 - DNA, 120 bp, synthetic construct
  source 1..120: mol_type = other DNA
aggcataataaacatgacaataaggttaatcccaggaccacaaggctagttcaatattcaactgaatgaaaatacagcatactaaatctgtgggatgcaaatacagtagtgctacagtga

SEQ ID NO: 2449 - DNA, 120 bp, synthetic construct
  source 1..120: mol_type = other DNA
atggcatacagcaaaagcaatgctcaaaggacaatttatagcaataaatgtccacccctacctcacaccatattttaaaaaccctcaaaatgaataaatgatataggagctaaaataata

SEQ ID NO: 2450 - DNA, 120 bp, synthetic construct
  source 1..120: mol_type = other DNA
aaaaaaaaaaaaaagcacatatcttaattttaaaatagtgttaaaaaccactaacaattacctgggccttcaaggagtcatcatttttgtgttggtgggtcttgcctcagtgttgatggc

SEQ ID NO: 2451 - DNA, 120 bp, synthetic construct
  source 1..120: mol_type = other DNA
ccctcaaagtcatccacaagcattagaatgaacttcttccaaactcctgttaatggtgctattttgacctcctctcatgaatcacaaacattcttaatggcatctagaaaggtgaataat

SEQ ID NO: 2452 - DNA, 120 bp, synthetic construct
  source 1..120: mol_type = other DNA
cgacgtctcactatgatggccaggctggtctcgaactcctagcctcaagtgatcctcccaccttggcctcttaaaagtgctgggattacaggcatgagcctgttttgctttcttatcatt

SEQ ID NO: 2453 - DNA, 120 bp, synthetic construct
  source 1..120: mol_type = other DNA
aaacacaataaaacaaagtaagcctataattccacatataattcctgcaatgctttacagttgtcaaataaaaaaatgtctacaatcctttctattgggtggcaaaaaccacaattactt

SEQ ID NO: 2454 - DNA, 120 bp, synthetic construct
  source 1..120: mol_type = other DNA
atgacaccacatgttctccccacagggcaattttgtttttcctctatggtacctttatttatttttccagttagccatgtaagctttctcaggcttggcctttaatctgtcgtatataac

SEQ ID NO: 2455 - DNA, 120 bp, synthetic construct
  source 1..120: mol_type = other DNA
cactcctaatttctagaagaacataagtgtttaacagagacataagatatcttttacttctccagaagcccccaatttaaatcagctccccattacagggactctgattttggtttcagg

SEQ ID NO: 2456 - DNA, 120 bp, synthetic construct
  source 1..120: mol_type = other DNA
agggtttcagaaacctgcaggtattccttcatacctcttattaacatttagttacatatttgtgcccagattttgttcaaggtctgtgttacaatgtagtttccacaaatgcggcaactg

SEQ ID NO: 2457 - DNA, 120 bp, synthetic construct
  source 1..120: mol_type = other DNA
gaatctgcaaaacacataactgattcacaacactccccttccttaaaccctttaatggctccccagtaactcagaatacaacctaaacttcctagtacagagtgcaagatctgaaaagat

SEQ ID NO: 2458 - DNA, 120 bp, synthetic construct
  source 1..120: mol_type = other DNA
atctgaccgcaaatattttttgaaatggagaacatcagttaacctgatgagttggttaggtggaggtcagttcagagagctaaaattacttttcccttttgggtaatatggctgcagtga

SEQ ID NO: 2459 - DNA, 120 bp, synthetic construct
  source 1..120: mol_type = other DNA
aagaaaacattattgctgctagaggggaaaaaatcaaagttaacactttccctactctactacaagctgcttgtcatccataatacaggataaaaacaatgatctagcgcgggtgcagtg

SEQ ID NO: 2460 - DNA, 120 bp, synthetic construct
  source 1..120: mol_type = other DNA
agaaatgttttattttctaggactaccacagcccagggtactaaggagattcaagacaataatccaaattcaacccatcagtcaaaagtcagtgaggatgccaaaaggtataaggagagc

SEQ ID NO: 2461 - DNA, 120 bp, synthetic construct
  source 1..120: mol_type = other DNA
ggatacagtggtgagcaagacggacaaattcctatagccctcagagaactcacatactccatctagattttttttttctaagctaaaactccctactcctttcactgttcttcaatgatt

SEQ ID NO: 2462 - DNA, 120 bp, synthetic construct
  source 1..120: mol_type = other DNA
atcccaaatagcatcctccaggcatgacaatcaaaatatttccaaatgcctcccagcagggtaagtatcacctcagaaaccattgaaaaaaaaaattgggtggtatggagaaaatgaagg

SEQ ID NO: 2463 - DNA, 120 bp, synthetic construct
  source 1..120: mol_type = other DNA
actatggaacctatctttgggagaacactttgaatattcagtatccacaatataaactttaggaaatactgtgctagagcatttagtacacagcaaggatggctgatagacgtgggcagg

SEQ ID NO: 2464 - DNA, 120 bp, synthetic construct
  source 1..120: mol_type = other DNA
ttcttaagcaaagagcaggctcaaatagaagtactctactcaaagacaacaaggatgagtaataaaaagaaacaatccagcaaagggtctatgaggagaaacgttaacaaccccacccgc

SEQ ID NO: 2465 - DNA, 120 bp, synthetic construct
  source 1..120: mol_type = other DNA
gcagggttcaagaaagaaatggaaggtaataaaaagaccacttcagaaatgaaggccacggtggaaacagaaagaaatggctgaagaagaaaaaaggaagccattcttggcagaaaaaac

SEQ ID NO: 2466 - DNA, 120 bp, synthetic construct
  source 1..120: mol_type = other DNA
ccaactgtcagcaaactagaaatggaagaaacattcttaaacttcatatagggtatctataaaaagtctgtaagtcaccaagcataacagaagcattctcactaaagacaggagaaacat

SEQ ID NO: 2467 - DNA, 120 bp, synthetic construct
  source 1..120: mol_type = other DNA
acaacagcacaaaaagattctcgcaaataataccaatcctccacatccaaaaggatgaaaacattatgtagaaaactataaaccttttaaggaaaaaaaaacagagctgggagtagtggc

SEQ ID NO: 2468 - DNA, 120 bp, synthetic construct
  source 1..120: mol_type = other DNA
atagacaaacaggttaagaagtagcccagaaatcggtccatgggaatctggtagaaatgagaggttgctttacaaataagtgagaaaaagactgtgcacatatgtacaaatggtgttggg

SEQ ID NO: 2469 - DNA, 120 bp, synthetic construct
  source 1..120: mol_type = other DNA
ttccattaaagcataactgtaaagcaaaccccacaacccaaggtaagaaatagcattgccaattatcttaaaagtctcccatttgtccttaatcacatccactttctctcctccctgagg

SEQ ID NO: 2470 - DNA, 120 bp, synthetic construct
  source 1..120: mol_type = other DNA
atgcatactcaagaaccattagtctagggcaaacgcctaagagtgagtggtattgctggttataggatatcctattattttccaaaggatttttccccccaatttacattcccatccatc

SEQ ID NO: 2471 - DNA, 120 bp, synthetic construct
  source 1..120: mol_type = other DNA
agaaattgatttttatgcataacagatggggaagtctagcttcatttatttaatatggtaggcattgttccagcaagtgtatcctttcccaactaatctgccacaagagcaggtgtccct

SEQ ID NO: 2472 - DNA, 120 bp, synthetic construct
  source 1..120: mol_type = other DNA
ttgggtgggagccagatctcacattcacaaaggtaataaccaggatgagcagtgcctaccatagagcattaaaaatttgccgagtggaaaaaggaattaaagaagtcttcctaccttatt

SEQ ID NO: 2473 - DNA, 120 bp, synthetic construct
  source 1..120: mol_type = other DNA
tgagatttcaatattgaaattaggccaattaaaaaccctacaatgacttctaagtgttcaagtgaaaccaagagtcacatgtctctctcttgaaatcaaaagctagaaatgattaagctt

SEQ ID NO: 2474 - DNA, 120 bp, synthetic construct
  source 1..120: mol_type = other DNA
aagtaattgtgactttcaacattccttatttaagaagtacctttcattgggctatagccgccatagatatcgttattactctgatggatctgggcaacattaattgaaagccttctgcaa

SEQ ID NO: 2475 - DNA, 120 bp, synthetic construct
  source 1..120: mol_type = other DNA
tttccaatcaagaatctttcataggtggtaggtatttcttttttgggggaggcagggaggggtgtcaagaaacttcgtatctaaagacataacatttgattctctcactttcaatggtct

SEQ ID NO: 2476 - DNA, 120 bp, synthetic construct
  source 1..120: mol_type = other DNA
atcttcacagtgaattggtcattttatcatttgaggtgactcttctgccaataatgctttctgccttactgtccacctttgatattaactgtaccatactgtctgctagaatatgcatgg

SEQ ID NO: 2477 - DNA, 120 bp, synthetic construct
  source 1..120: mol_type = other DNA
cagcctctcaaagtaccatgcccagcttcttgtcacatattttaattaaggtcttactagtactttatacagtcaacgtttcttttaatacatccacatatttgccactctctttgctct

SEQ ID NO: 2478 - DNA, 120 bp, synthetic construct
  source 1..120: mol_type = other DNA
ctgtgctacactctaaacagtttcttctgccttgtctcccaggcaatgaactctttcttcagctaggcataatctcttaggtatatttggtaaagtgttcacttctggaatttctatttg

SEQ ID NO: 2479 - DNA, 120 bp, synthetic construct
  source 1..120: mol_type = other DNA
cttgaaaaattactggaagcaattccctagaatgaaaggcctttctccacacgtgatttgcctttccatctgccaggccatggaagtaatactagtctgaaaccagtaaccatgataaat

SEQ ID NO: 2480 - DNA, 120 bp, synthetic construct
  source 1..120: mol_type = other DNA
taataaataacacactgatggtactttgtacatatatacaacaagcactgtgactgtggcagttacaactgcagactgaagagtatttgcgtcaccaatacagcacaagtgacactgcca

SEQ ID NO: 2481 - DNA, 120 bp, synthetic construct
  source 1..120: mol_type = other DNA
ctgttatccactttggtggttaatcacgtgctgccatatgcatgctttgtctcttcaattaacagtgttattgtttagaagacttttttcccctccaaatgaaatcccaagcacaattcc

SEQ ID NO: 2482 - DNA, 120 bp, synthetic construct
  source 1..120: mol_type = other DNA
tatagtgagtaaaacaaggtaaactctgggattctacaaaagcacaaagcagaggcatcaaactaggacttggaaagaggttaagaaaagcttcctacaataaacggtaggtgaggtaag

SEQ ID NO: 2483 - DNA, 120 bp, synthetic construct
  source 1..120: mol_type = other DNA
tcataaagtatagatgctcctatagaaagccaatccttcctatttatacactaaatccctttccctcttacctcttctaagacagtgcttcagcaattcttctctctccctcctgaaacg

SEQ ID NO: 2484 - DNA, 120 bp, synthetic construct
  source 1..120: mol_type = other DNA
ctgacctccctatttaaattgctacctacccccatcccagccctaaactgtttaactttcattgctccacagcacttattacctttgaacatactacataatttcctttctgtatgtcta

SEQ ID NO: 2485 - DNA, 120 bp, synthetic construct
  source 1..120: mol_type = other DNA
gaaggcatgtgcaggaagaatatgagtggaatatcatcagtgttagaggcaatcctgcaaaaactaaagggagatgaacattttctgtggctctagaataggaatataaagaccactctg

SEQ ID NO: 2486 - DNA, 120 bp, synthetic construct
  source 1..120: mol_type = other DNA
agtcaattgagaaacaaccccaagcagtacattaaactgtttaaaatatgccaaaataagtgactaattcaaagtatcctaacattttatttcaattaagcagttctaaaactataaagt

SEQ ID NO: 2487 - DNA, 120 bp, synthetic construct
  source 1..120: mol_type = other DNA
tgatgagaaacatcattttacactgtagggataattccctgggctaaccagtaaaaagctatcagtgcagtttaaaacaaagtaaaggggccctataggccccactgaaaaaggtagaaa

SEQ ID NO: 2488 - DNA, 120 bp, synthetic construct
  source 1..120: mol_type = other DNA
aaagcaattatgaactttctatagacctctaacctacatcttactttgagaacctcaaatataacatatatagtctcccttagaccaggagtcagaacagttcagcccatgaactggccc

SEQ ID NO: 2489 - DNA, 120 bp, synthetic construct
  source 1..120: mol_type = other DNA
acctctgaagaaggtccttgaaaccccaaaacagtgtttttcaaactgcctgttgcagccaatttggctgtcaatttcataaggtgattttgtgaccggcagaaaaaaagaatagaatgt

SEQ ID NO: 2490 - DNA, 120 bp, synthetic construct
  source 1..120: mol_type = other DNA
tcccacagtacatttgtcccaaacgtgctgtcaggaactgcagctacattacaagaatgaaaacgacgctttatccgatgttacagagcttccagaagatataaagttaattgagttcaa

SEQ ID NO: 2491 - DNA, 120 bp, synthetic construct
  source 1..120: mol_type = other DNA
acaggtttccagctgctatatccagacccacctcctattcattctaatcaagaaagcaagggatagaaaaacaagaaaagtcagactgttctagcctgttaccctaatgtaatttttctg

SEQ ID NO: 2492 - DNA, 120 bp, synthetic construct
  source 1..120: mol_type = other DNA
gatcagagatcttgaaaacagaacataataaaattgtaattctaatgcaattgtgagaagctcccttctacagaaacagcacaggaagaacagttaataaatatcactctggtatcacac

SEQ ID NO: 2493 - DNA, 120 bp, synthetic construct
  source 1..120: mol_type = other DNA
gccctcgctctcacttactaaatcagactcttcagggggtacagttccaaacaatctggccctttcaaataaaatagaagggtagagattttacttcacaaaagccttctttacagaatt

SEQ ID NO: 2494 - DNA, 120 bp, synthetic construct
  source 1..120: mol_type = other DNA
ggaaaaaaataggacaaaaaggaggacaacactaagaaatcaatcagacctataaaaatgggtaggaataaagaggtgtgaatgcacaatggacgactagccaaaaagtgccagtagtgc

SEQ ID NO: 2495 - DNA, 120 bp, synthetic construct
  source 1..120: mol_type = other DNA
caaatagaaaagtgaaaaagggcagcggactgagaaggggggcagtccgggagaggagagaggaaatgatgagccccatcatccccacgaccatgtaagaattacacgcgacagtaactc

SEQ ID NO: 2496 - DNA, 120 bp, synthetic construct
  source 1..120: mol_type = other DNA
gaagctgtatggtttcagcaacagggagcaaaggaaaaaaatcacctcaaagaaagcaacagcttccttcctggtgggatctgtcattttatagatatgaaatattcatgccagaggtct

SEQ ID NO: 2497 - DNA, 120 bp, synthetic construct
  source 1..120: mol_type = other DNA
ataattttgtgctcatggcagatttccaagggagacttcaagcagaaaatctttaagggacccttgcatagccagaagtccttttcaggctgatgtacataaaatatttagtagccagga

SEQ ID NO: 2498 - DNA, 120 bp, synthetic construct
  source 1..120: mol_type = other DNA
actcctggtgacagtgaaagcccacagcctctggcaactgtattaacatgaacttcaatctgttaaaggaaagccaccaggaaaacagcactgtaatttaacgatgtggaaaaatgtatg

SEQ ID NO: 2499 - DNA, 120 bp, synthetic construct
  source 1..120: mol_type = other DNA
ttcattcaacaaatatttaaaatgtgccaagaactgtgctactcaagcaccaggtaatgagtgataaaccaaacccatgcaaaaggaccccatatagcacaggtacatgcaggcacctta

SEQ ID NO: 2500 - DNA, 120 bp, synthetic construct
  source 1..120: mol_type = other DNA
catatgggaaaaagagttagagggaaaaagtcttccctcagtatatttaatatgtgcagttctcaaatccttacccatcccttacagatggagtcttttggcacaggtatgtgggcagag

SEQ ID NO: 2501 - DNA, 120 bp, synthetic construct
  source 1..120: mol_type = other DNA
agataattcatccagtcaaaaaaatacatgttatcctggttagagactcagcagggaaaggctacatgctgagctggaatccatatactcaggggaataaaaatcagaagagactgtgga

SEQ ID NO: 2502 - DNA, 120 bp, synthetic construct
  source 1..120: mol_type = other DNA
tttacctatccaaagatattttctcactaacatgttggcactaacagcagctcaacgccatctgaacacataacatactgaatcctaactattaaccaccttcatgctcttgagaagggg

SEQ ID NO: 2503 - DNA, 120 bp, synthetic construct
  source 1..120: mol_type = other DNA
tttaataagaggcttggatggctagaaactcaaagttattggctgaagtttgatgtttatccagacttggtacctcaagtactcactatgaccccatcaacagaggggtctatgttgatt

SEQ ID NO: 2504 - DNA, 120 bp, synthetic construct
  source 1..120: mol_type = other DNA
tgcaataaaaagaaaattgccaaggcctaaaattcacctggcttcaaagagactgcgatagagaaaaaaatcaggaagctaaaaatacacggatggccttttagaaagtggtcaccctcc

SEQ ID NO: 2505 - DNA, 120 bp, synthetic construct
  source 1..120: mol_type = other DNA
ctatggtgacatttagtattttcagaatgtcattactttgaccacatactttccatcattgctattctgcatggaggaaaaaatccaaagcactagaatttctttttaaagaggggaaga

SEQ ID NO: 2506 - DNA, 120 bp, synthetic construct
  source 1..120: mol_type = other DNA
cagcctgggatgttctgaaatgcctggtagtgcacacttgaaaaaggaagaaaagcagactgggaacatagcacttagggagctgagaaagcagccagctcaggcctgacaggtaagtgt

SEQ ID NO: 2507 - DNA, 120 bp, synthetic construct
  source 1..120: mol_type = other DNA
tgcagtgagctgagattgcgccactgcactccagactggccaacagaatcagacaaaaaattagctagttgttgtggcacatgcctgtaatcctagccacttgggaggccaaggcacaag

SEQ ID NO: 2508 - DNA, 120 bp, synthetic construct
  source 1..120: mol_type = other DNA
caaagtctttagattctcatctgcttaaagtcccagctcttccacttatcagctaagatctgaacccgagacgggaatccaaattacacagcctctctaaatctcttagttttatcattc

SEQ ID NO: 2509 - DNA, 120 bp, synthetic construct
  source 1..120: mol_type = other DNA
gctactcgggaggctgaggcaggagaatggcgtgaacccgggaggcggagcttgcagtgagcggagatcacgccactgcactccagcctgggcaactgagcgagactccgtctcaaaaca

SEQ ID NO: 2510 - DNA, 120 bp, synthetic construct
  source 1..120: mol_type = other DNA
attatgactggtcatggacatgagaataaagaataatgagactggggagaaatttgaggaagaacgctcagaaacaattctgactgaaactcagattgtagggaaggccttatgtgttgc

SEQ ID NO: 2511 - DNA, 120 bp, synthetic construct
  source 1..120: mol_type = other DNA
tcctccaaatttaatccattagcaagtcctctcttcaaacccatcccaaaccaaccttgtttttaaccatctccacaccaccaattaccacaaggataaaatctgaattccttaccacca

SEQ ID NO: 2512 - DNA, 120 bp, synthetic construct
  source 1..120: mol_type = other DNA
ctggtctcgaactcctgacctcaagtgatttgcctgccttggcttcccaaagtgctgggattataggcacgagccaccacacacgaccaacattggcctatcttttaaaaaataaaccaa

SEQ ID NO: 2513 - DNA, 120 bp, synthetic construct
  source 1..120: mol_type = other DNA
cgacagaacctgaatcctaccagggacttagttagtcttatttactgttgcattcctagtgcccagaacacagtaggctcccaataaatagccactgaataaaagttaaaaccaacaaaa

SEQ ID NO: 2514 - DNA, 120 bp, synthetic construct
  source 1..120: mol_type = other DNA
gagccactgcatctggactgcatattaatatgaagagcttttcttcaacaacagtgaacagttttctacaaaggtatatgcaagtgggcccacttcttgttcttatgaatcttttctttc

SEQ ID NO: 2515 - DNA, 120 bp, synthetic construct
  source 1..120: mol_type = other DNA
ggattcctgccgactattaaataaatccctagctcatatgctaacattgctaggagcagattaggtcctattagttataaaagagacccattttcccagcatcaccagcttatctgaaca

SEQ ID NO: 2516 - DNA, 120 bp, synthetic construct
  source 1..120: mol_type = other DNA
tttcaaaggcccttctgaagaactaagcaaactaaggaaagaccatttagttttaaacaggagaaatgtatttaactaaatcctaaacacagcaggctatctgcaagcagcagcagcagc

SEQ ID NO: 2517 - DNA, 120 bp, synthetic construct
  source 1..120: mol_type = other DNA
aaacaaaagaatcatcatcaagtgaactggaacacatccagagaactaattttgttagaaagattttagagttgagccacacaatctgcatcttctgcgtcctccatgcactcgtctgct

SEQ ID NO: 2518 - DNA, 120 bp, synthetic construct
  source 1..120: mol_type = other DNA
ccagctgcctcacttgttgttttaggacttaggctccacctcaccagtgtagtcccagcaggtagataggagttaatagttgactatctcagctcaccaccctccaaacctttttttttt

SEQ ID NO: 2519 - DNA, 120 bp, synthetic construct
  source 1..120: mol_type = other DNA
ccgtgcctcgcctcatgtggttttatgcagcagatgcaaggtattctgtaaaggttcttggtatacctgttttcataacaacatgagtagtctcttcagtaattagattagttaaagtga

SEQ ID NO: 2520 - DNA, 120 bp, synthetic construct
  source 1..120: mol_type = other DNA
ctgagaggtaactagcctacacagaaagttatgctacagatatacatggcttaaaaccaagactcaaccctctgatagttacaaaacactgaaatcaggatgttactaaaggtcagtgca

SEQ ID NO: 2521 - DNA, 120 bp, synthetic construct
  source 1..120: mol_type = other DNA
gatcaagagccattgaaacagacacaggtaagagctttcagagcaaattgctggtctggacatgggattatgagatgaaaacatttatagccatcactgtgcacttactcattgtatcta

SEQ ID NO: 2522 - DNA, 120 bp, synthetic construct
  source 1..120: mol_type = other DNA
ttgacaatacctacataaaactctttccagaatgttgttaagtcttagtcattagggagatacatatggatacactcacaaattcttctggggtcaggccagacaccaccatggacattc

SEQ ID NO: 2523 - DNA, 120 bp, synthetic construct
  source 1..120: mol_type = other DNA
tggtggaaatccaaagtagcttagtttcctaaaaaggaaatatggcattatgtagcaaacaccttaacacgtatttacactttcagtcaacaatgctagttttagaaatatatcctaggg

SEQ ID NO: 2524 - DNA, 120 bp, synthetic construct
  source 1..120: mol_type = other DNA
ggcataagccaccaagcctggctaattttgtatttttagtagagacagggtttctccatattggtcaggttggtcctgaactcctgccctcaggtgatctgcccgcctcggcctcccaaa

SEQ ID NO: 2525 - DNA, 120 bp, synthetic construct
  source 1..120: mol_type = other DNA
atgccatggtatcaggaattaagcatagctaagtagaatgtatgagattcctaaaatgaccctaatgaacatggccaaataccacatttgatgccaaacagtgtcttttatgataacgtg

SEQ ID NO: 2526 - DNA, 120 bp, synthetic construct
  source 1..120: mol_type = other DNA
gaaagataaatggaaggagaaaaccatcgccaccaattgtgaaaggacaaatcatacttgctgggcagccaaagcataaatgaaacagctcatgtcagagagatcagaaatgactggcaa

SEQ ID NO: 2527 - DNA, 120 bp, synthetic construct
  source 1..120: mol_type = other DNA
ggccctccagtaaggaaaagaatagtactggactacatagtccagtactggactgctatacagccctgtgttaatagtggtgtaaatacacatctctgaaagatattctaaatgttttct

SEQ ID NO: 2528 - DNA, 120 bp, synthetic construct
  source 1..120: mol_type = other DNA
cactcctggttctttatttttactggtagaactatctgcagacacctcaaacttgtcagcagaaaggccttctggattctggcttatagggtattcactacttttctgtgaagttaatac

SEQ ID NO: 2529 - DNA, 120 bp, synthetic construct
  source 1..120: mol_type = other DNA
cttaaaggcagaagtacttatttatttatttttatttatttattttttttgagatggagtttgctcttgttgcccaggctgcagtgcaatggcatgatcttggctcaccacaacctctct

SEQ ID NO: 2530 - DNA, 120 bp, synthetic construct
  source 1..120: mol_type = other DNA
tgtcttttctggacctgtgagtttctaggattgttaagaactctgttgaaagtaagtaggatctaactatgaagagaggtatcatcctccccacccccaatacagggtgataattgataa

SEQ ID NO: 2531 - DNA, 120 bp, synthetic construct
  source 1..120: mol_type = other DNA
gaacctgaaaaacagagcaaaacctttctgcttttttttctccttaatccttaattcattctctgaacagcaagcccaacctaagccttgtgacatgatgatctacttgctggctggttt

SEQ ID NO: 2532 - DNA, 120 bp, synthetic construct
  source 1..120: mol_type = other DNA
gagtttcagttagactcacaccagatttagggagaaaaaggctcaaaacttatgttggtattaagttgtgatatccaaaacaattcagaaattaagcatttcagttacagatctccagaa

SEQ ID NO: 2533 - DNA, 120 bp, synthetic construct
  source 1..120: mol_type = other DNA
tccaattaaaaactcaaatttccatctcactttccttcatttatgccattattcctcagctcagtgctcacttcttataggaagtcagctctgatcaactgcatctgcctggttactcca

SEQ ID NO: 2534 - DNA, 120 bp, synthetic construct
  source 1..120: mol_type = other DNA
catgctgttctaacacagcttctagttcagccatttcctgctggagctttatcaggttatgttgcatggtatccctctgcttcaaaaacgataaatggcaccaagaaaatgaaatacttt

SEQ ID NO: 2535 - DNA, 120 bp, synthetic construct
  source 1..120: mol_type = other DNA
tgtgtccacctagagatcattagcaaggacctgtgagagggaaggatccaacagaaagagccctgagaaagcctgtaaggatagttactgtttttaaaataatgagttctttttgcttat

SEQ ID NO: 2536 - DNA, 120 bp, synthetic construct
  source 1..120: mol_type = other DNA
tcagtcaacctggaatgaaagcacatagatatctgaccaaaatgcttcacaggctgtattagtcactactgtcacaaccatcacatctaacctctacgtggccattacataaatcagaaa

SEQ ID NO: 2537 - DNA, 120 bp, synthetic construct
  source 1..120: mol_type = other DNA
tggctaattctaataagactcctgaaatgtgcagcagagcagccggaactggtctggagggaagcagagtgtatatctgacccttgtttgttcacattcattacatataaatatatatat

SEQ ID NO: 2538 - DNA, 120 bp, synthetic construct
  source 1..120: mol_type = other DNA
tgggtatattgacagagtcccaaacccacattcaaaaaggatcataggaattgcaaagagagaaaaggcctcctaaatcttttcatcaatttagttgccatggcaatcctgaagaagtgg

SEQ ID NO: 2539 - DNA, 120 bp, synthetic construct
  source 1..120: mol_type = other DNA
ttttaatgatccagtaaaagctagattataatgcacagaattatctggatttcttgtttttgagacagggtctcaccatatcacccaggatggagtgcagtggcaccatcatggctcacc

SEQ ID NO: 2540 - DNA, 120 bp, synthetic construct
  source 1..120: mol_type = other DNA
atctgacttcagaaagttcataaaaaaacatcattcacttactagcagctaaaagggtatttaagatttaggtgggaaaaagaagccacagcaggatgaatcgagggggtctgaacagct

SEQ ID NO: 2541 - DNA, 120 bp, synthetic construct
  source 1..120: mol_type = other DNA
actattctgcctttagtacataaacatttcatattacattatcaaatggtcatatatatggtaaagcttttatttatttcataggtgaccaaattattggccttgaccattaggtccaga

SEQ ID NO: 2542 - DNA, 120 bp, synthetic construct
  source 1..120: mol_type = other DNA
tgcgcgtgtgcgtgtgtgtgaaataaaaggtagtatgagttccatcaaggtgcttacagtctaatttaaggagacaatgaaccacaaacaattgtgccattaattcaaagagatgatgtc

SEQ ID NO: 2543 - DNA, 120 bp, synthetic construct
  source 1..120: mol_type = other DNA
ctgagatgcctttgccaatattacctggttactgcagtcatttaagctattcttcaatgataataaattctcctctgtgttcttagacagacactcggtagcaacggtgctatgcctagt

SEQ ID NO: 2544 - DNA, 120 bp, synthetic construct
  source 1..120: mol_type = other DNA
gatagacaaaacctagagcctcctttgatactacatttggcattatcaactggcttatctttctgaccaaccacaggaaagcctgcagtgatattaactgtctgtacaggcttgatatta

SEQ ID NO: 2545 - DNA, 120 bp, synthetic construct
  source 1..120: mol_type = other DNA
attaggtgggcttagatttctactgactactagttcaagcgcatgaatatgcctggtagaagacttcctcctcagcctattctttttaggtgcttttgaattgtggatatttaattcgag

SEQ ID NO: 2546 - DNA, 120 bp, synthetic construct
  source 1..120: mol_type = other DNA
acattcattctgtctttagtgagtaataaactgctgttctcatgctgtaatgagctggcatgagtatttgtgccacatggctccacatgcaagtttgaaacagaactaccctgatacttt

SEQ ID NO: 2547 - DNA, 120 bp, synthetic construct
  source 1..120: mol_type = other DNA
cagaccataccacgacatttgacagagaatgatactctaactctgccaagagattttgtgggttgtaaaggtcccaaatggtcttcagaataatctaattacagtactgtatctacccac

SEQ ID NO: 2548 - DNA, 120 bp, synthetic construct
  source 1..120: mol_type = other DNA
caacaaacaaaaagggtatttcctccactataaaatgagagaactaaactagatgatctctaaggtttcttccaataccatgattctagtctggagaaacaccagcctacttgagggagg

SEQ ID NO: 2549 - DNA, 120 bp, synthetic construct
  source 1..120: mol_type = other DNA
agtgctcctaaatatcaactactataactatttttacaatgcctgttgtctaggaatttatgatcataaggggggaaaacagtaagtgttatgataaatagatggtggtgcctgggagct

SEQ ID NO: 2550 - DNA, 120 bp, synthetic construct
  source 1..120: mol_type = other DNA
ttttaaaaatagagacagggttcccctatgttggccaggctggtcttaaactcgtggactcaaccaatccttctgcctcggtcttccaaagcgttaggattacaggcacgagccatcctg

SEQ ID NO: 2551 - DNA, 120 bp, synthetic construct
  source 1..120: mol_type = other DNA
atccagcaattattattaaatacttaaaaaacctgagacccttacccaattcaatgtagacagacgtcttttgaggttgtatccgctgctttgtcctcagagttctcacagttccaaggt

SEQ ID NO: 2552 - DNA, 120 bp, synthetic construct
  source 1..120: mol_type = other DNA
atatatatatatatatatatatatgtaatcccagcactttgggatatatgtgtatatatgttttttttttttgagacagaatcttgctctgttgccaggctagagtgcagtggcgtgatc

SEQ ID NO: 2553 - DNA, 120 bp, synthetic construct
  source 1..120: mol_type = other DNA
gtaacaacagagcaaatcactacattttctttaacaattacaccttttaagttcaagtaattttccctttttttaaaagatagggtctcagtcacctgcgctggagtccagtggcacagt

SEQ ID NO: 2554 - DNA, 120 bp, synthetic construct
  source 1..120: mol_type = other DNA
agatcttgctttgccgcccacgctgaagtgcagtggagtgatcatagctcactgtagtctacatctcctggactcaagtgatccttctgtctcagcttcccaagtagctgggactacagg

SEQ ID NO: 2555 - DNA, 120 bp, synthetic construct
  source 1..120: mol_type = other DNA
ataggtacattcacctcacctggctgtaaggtctctctcttgattatatcaggtaccctgaccttctctgaactctaactgattagaacacttgtctaaccacttaatataccatctttc

SEQ ID NO: 2556 - DNA, 120 bp, synthetic construct
  source 1..120: mol_type = other DNA
gactaaaaggtcttatcaccacgtcatagaaagtaattgtgcaaacttcctgagttttcatggacagcacttgagtgtcattcttgggatattcaacacttacactccaaacctgtgtca

SEQ ID NO: 2557 - DNA, 120 bp, synthetic construct
  source 1..120: mol_type = other DNA
agcaatcacaccctgctgagcttactgttcttaacatctgaaccctgcccaatccctcacttagttctgcctctcaaggatttctgtcaaattatgattatacttctttgaaaacacata

SEQ ID NO: 2558 - DNA, 120 bp, synthetic construct
  source 1..120: mol_type = other DNA
actgtggttgcttccaacctagcatcattaccaaattatataccttttggttatatcattcttacataaaggacactgtgaaggccctttcttctggttgagaagtttcagcatgcaaaa

SEQ ID NO: 2559 - DNA, 120 bp, synthetic construct
  source 1..120: mol_type = other DNA
cctgcaaaataaaacataaaggacataatatactggtgaagggggtgactaggtagggagtaaatagcagacactgacaatgaagagacccaggaaagaaaagattaaggggctaaaaaa

SEQ ID NO: 2560 - DNA, 120 bp, synthetic construct
  source 1..120: mol_type = other DNA
cactccaccctgggcaacagaggaagactctgtctcaaaaaaaaaaaaaaaaaaaaaaaaaaggccaggagcggtggctcacgcctgtaatcccaacactttgggagaggtcaggagttc

SEQ ID NO: 2561 - DNA, 120 bp, synthetic construct
  source 1..120: mol_type = other DNA
atcaagaaggcatcaagcattactccagcaaatagtacaattgaacaattcagagcaggggtagggaggaaattcccttatgatagtactgcagaatatagtacagtagagtgacaagct

SEQ ID NO: 2562 - DNA, 120 bp, synthetic construct
  source 1..120: mol_type = other DNA
aaaaaaaaaaaaaaaagtagctgttgaaaaatttaagttacatttattgctcacattctatctctttgaacaatgtggttctagatcttcaaaaaagtattacaggctgggtgcggtggc

SEQ ID NO: 2563 - DNA, 120 bp, synthetic construct
  source 1..120: mol_type = other DNA
agaactttaggcttgcttgggtcaataaagttgttttatttttagcaattagagtttatccgtagaaaatacaattaatacaacaaaagcatgggggtatcgctcccaggctcccagctt

SEQ ID NO: 2564 - DNA, 120 bp, synthetic construct
  source 1..120: mol_type = other DNA
cacacatatatctttatgactggttctttcctgactatcacaatcctgactatcacaagcttgaaaccaagcttctcactcttctccagttgccaactctaatcctctcaatctcaacag

SEQ ID NO: 2565 - DNA, 120 bp, synthetic construct
  source 1..120: mol_type = other DNA
cgcgcccgtcctctattttcttttatttgtacatttgctcgtattattatctctgcctataagcctataatttccttcttccacaagttctcaaagcaactatattcataacttaatctc

SEQ ID NO: 2566 - DNA, 120 bp, synthetic construct
  source 1..120: mol_type = other DNA
acagggaggcaggggttgtagggtaagagggaagtatactttgcatcatatacctttttgtgctaataaactttttaccaagtacatagtttgtacctggtaccaggttatgtaccaggt

SEQ ID NO: 2567 - DNA, 120 bp, synthetic construct
  source 1..120: mol_type = other DNA
ctgggttatgaaggacaaaaacaaaagctaataatggagccacataacacattcaaacttacttgcaaaatatgtggtcacactttgtggagacaggttccttgatcaactccagactag

SEQ ID NO: 2568 - DNA, 120 bp, synthetic construct
  source 1..120: mol_type = other DNA
ccagccccaagtgtcttctgatctataggtgtctcttactttttctcccttgtcatttatttttaaaattaggtcatttgacctgtggagtttcccccattctggattttgctgattgta

SEQ ID NO: 2569 - DNA, 120 bp, synthetic construct
  source 1..120: mol_type = other DNA
atacggaattaaagaatacatgggaataagtgcattaaagagaaaaattaagcagggtaaggggaaacaggtagttcaatatctatgtgggggtgagatgtacatggggggagtcaggaa

SEQ ID NO: 2570 - DNA, 120 bp, synthetic construct
  source 1..120: mol_type = other DNA
gcctggcatcaagcaatcttcctgcttcggcttcccaaagtgctgggattacaggtgtgagctactatacccggcctttagctttcttctgaatgtgaacctttttttttttttttggag

SEQ ID NO: 2571 - DNA, 120 bp, synthetic construct
  source 1..120: mol_type = other DNA
ctgccagactccttgggctattgcaagaataaaattaaatgctacttgggaaaatgcttcacaacctgagatgacttgggaaaaatgcttcacaacctgagataacttgtaccaacattg

SEQ ID NO: 2572 - DNA, 120 bp, synthetic construct
  source 1..120: mol_type = other DNA
gcaaattgtgctatactgtactatattaaaaggaagtgaaatatgatccctatcctagaactttccatacaaatgaatgtaaaacaccataaaaattaatcttaaggccgggcgcggtgg

SEQ ID NO: 2573 - DNA, 120 bp, synthetic construct
  source 1..120: mol_type = other DNA
atgtatccaaatgccacactattgaggattttcctgatcactgattgtcatgagtaagttttgtgctttttcaaaagcagttttttcctacaatgtcatttcctgcttctctggctctga

SEQ ID NO: 2574 - DNA, 120 bp, synthetic construct
  source 1..120: mol_type = other DNA
catagaatgtcagctagtaatcagtgttatggagaagcagcaggaatagaagataaagtgtgtgctgggggtgtggtaattttaaataggggtgtctggaaatgaaaaggtggtatttca

SEQ ID NO: 2575 - DNA, 120 bp, synthetic construct
  source 1..120: mol_type = other DNA
cctcatccatgattttattttgccatttcaagtgatggagcttgttttagagctggaagaaaagccaaaatgccagttaatctaaactagattcctgccccagtgcagaaccaatcaaga

SEQ ID NO: 2576 - DNA, 120 bp, synthetic construct
  source 1..120: mol_type = other DNA
cctttctccaagaaagagaaagctacagaggagtgactgaccgggtaggtggtggtagccttagctttctccaatgtttctggttgttttctttttcttgcataaaaccaaaatcaacaa

SEQ ID NO: 2577 - DNA, 120 bp, synthetic construct
  source 1..120: mol_type = other DNA
agtttcggtaaatataagtaataaggattgttgggggggtggagggaaataattatttccagcatgcgttgcggaatgaaaggtcttcgccacagtgttccttagaaactgtagtcttat

SEQ ID NO: 2578 - DNA, 120 bp, synthetic construct
  source 1..120: mol_type = other DNA
acactaagagggtttggagaagttcaagggaggaatcctgcaaagaagaggggcgactttttccgtgtctccggacagctaatcgttttagtgacaggatgagagagcccttcgtgttct

SEQ ID NO: 2579 - DNA, 120 bp, synthetic construct
  source 1..120: mol_type = other DNA
ctgtcaaaacggaccaattagctctctgtaaaatggaccaatcaacaggatgtgggtggggtcagataagggaataaaagcaggctgccccgctgggtgccagtggctcacacctgtaat

SEQ ID NO: 2580 - DNA, 120 bp, synthetic construct
  source 1..120: mol_type = other DNA
cgataactggaagactaggatgaaatctgcaagttaaaaaatgacactacccatatatccttctcatcccattctccttttttcgagaccccgttaaagagatcttggttagggaccttt

SEQ ID NO: 2581 - DNA, 120 bp, synthetic construct
  source 1..120: mol_type = other DNA
ggcaggaagtgtttcttaaagttggaaagtggtatttcagaatatccgcttttggcagactgagtcagtcacttcattttcctgattttttgcctaaggtcctggtgaattgacaaagat

SEQ ID NO: 2582 - DNA, 120 bp, synthetic construct
  source 1..120: mol_type = other DNA
taacactgtgagatcggcaaaacagacatattagacctattttacagattaaagaactgaagctcaaaggtgaactgacctgctcacagttttatgtctagtaatgggccagagctgtgt

SEQ ID NO: 2583 - DNA, 120 bp, synthetic construct
  source 1..120: mol_type = other DNA
ataataataataaaaacaatgagacatgcaagagatgtcgggagaagcaccagaagattccattgaaatcttgctccccagaagggtgggaacagtagggacagaaaactgctgtggttc

SEQ ID NO: 2584 - DNA, 120 bp, synthetic construct
  source 1..120: mol_type = other DNA
aaagctgcctctccaactagcatcagaaagaactaggtgagaatcctacttctatcacttactagttctgtggctctggccgcccccgcccaagttacttaacctctttttttttttttc

SEQ ID NO: 2585 - DNA, 120 bp, synthetic construct
  source 1..120: mol_type = other DNA
ggcattctgatgcctgcagttctcctgtctggctttgaataactctgggtagtgctttaaatctaagctgacataccagtgggatgtgaactgtccttgcaaatgttttgagcccttcct

SEQ ID NO: 2586 - DNA, 120 bp, synthetic construct
  source 1..120: mol_type = other DNA
aagaaaatagttgtctctatgtccttatttctaatcttcctgctcaaccatgaactgcactaaacacactcagacccatctaacctaaaattgagaaagggaggttctcactcctggaga

SEQ ID NO: 2587 - DNA, 120 bp, synthetic construct
  source 1..120: mol_type = other DNA
acgcgttgctgtggcggtagctcaccaatccaatgcatgcacccgctcctttattaggctatagggccagtggctgcgacagggacctgatacaacagtgcgttaaataaggagcttatt

SEQ ID NO: 2588 - DNA, 120 bp, synthetic construct
  source 1..120: mol_type = other DNA
tcaaaagaagacatttatgcagccaacagacacatggaaaaatgctcatcatcactggccatcagagacatgcaaatcaaaaccacaatgagataccatctcacaccagttagaatgtca

SEQ ID NO: 2589 - DNA, 120 bp, synthetic construct
  source 1..120: mol_type = other DNA
aaaaagaataaaagaggtccctttttctgggagattgatgtaggggagcgagcgtgtgagttggaagggaggcattgaggatcagccatttaaagcagcatacaaggatgttcaaggctc

SEQ ID NO: 2590 - DNA, 120 bp, synthetic construct
  source 1..120: mol_type = other DNA
tggtaaagtagcctgaaagccagtggtacaaccccctccccacaaccttcaccacctctagcccctccaatgaaaagcactaattgcctatatacaacccctttttgtttgaaatatcta

SEQ ID NO: 2591 - DNA, 120 bp, synthetic construct
  source 1..120: mol_type = other DNA
cttgttcttttttatgattgcacatcttttgttctaacgtttggtccttcaccttggttcctgacacaaggattcctaaatcccttggaattttctgcatgataggagcgtcctttgttc

SEQ ID NO: 2592 - DNA, 120 bp, synthetic construct
  source 1..120: mol_type = other DNA
ttccctcctctgaactgctgcatttcctgtctgcatcatgtttgccctaatcagacatcgccttatttcatcatcctttaaaaaatgctttatttctctggcagatttcattggaatcag

SEQ ID NO: 2593 - DNA, 120 bp, synthetic construct
  source 1..120: mol_type = other DNA
ggcgacagaccgaaaaaaaaaatttagcataaaaatgtgaaattatgtaaatatgccaaaataggaacctggaggtgcttggaatccagactttgggagcccagcagtgcaaggatctct

SEQ ID NO: 2594 - DNA, 120 bp, synthetic construct
  source 1..120: mol_type = other DNA
tccatggattgctgggctaaatcatataagactgtaaaatgcctaacccaggatttggcatcaagtaagcaaattgtaaatggtagctgctgttctgcctatgactatttagtcttgtgc

SEQ ID NO: 2595 - DNA, 120 bp, synthetic construct
  source 1..120: mol_type = other DNA
ttcatgttcactaacttaccaaatgtgatttattagtgactttttttttgaagatggagtggaggaatccttgcgccttctgcagcattctgctgccgttatggaacagtgcatctatgg

SEQ ID NO: 2596 - DNA, 120 bp, synthetic construct
  source 1..120: mol_type = other DNA
ctgcctttgtggatgcgtgggccgccagcttcagtcctgcttttctttctgatggcccttgttatttatgcataaatatttaactacacatttaaatgtcttactgcatggctagaatta

SEQ ID NO: 2597 - DNA, 120 bp, synthetic construct
  source 1..120: mol_type = other DNA
ttttaaattacttccatccccatgttgttttgtagtagaattgtttcctaaagaaaacaactccttgattatggctcaccctgttggagttgtgggcactctgtaacatctttggttgtg

SEQ ID NO: 2598 - DNA, 120 bp, synthetic construct
  source 1..120: mol_type = other DNA
ccctcctcattttagatgggaaccatgagggccccgtcgtttaccccgcatcactgttgaagatctcatcctcactggaagactccttgtcctgcagcctcatggcttttttttttttta

SEQ ID NO: 2599 - DNA, 120 bp, synthetic construct
  source 1..120: mol_type = other DNA
ctggcctttctagttagaattctgtgaggtttgtataaaaggaatagagtgggggcccaaaaaccagtaagatgagaaagtactgtttgctcagttctaggatccatgaaataaataata

SEQ ID NO: 2600 - DNA, 120 bp, synthetic construct
  source 1..120: mol_type = other DNA
tcaggggcctgacattgaggattcttttttatcttcctctgatgctcttctataagaatgactctgttttggaagaaaacgcaattaagattttccatcacaacaaccactatctccaaa

SEQ ID NO: 2601 - DNA, 120 bp, synthetic construct
  source 1..120: mol_type = other DNA
ctggaaagaaagagagtggtctacttgatgatatgaagcatgatcaatcagtatcaatactagctttagggtgaaggcatagccaaattggaaactgtggacaaatttcagaaactgcac

SEQ ID NO: 2602 - DNA, 120 bp, synthetic construct
  source 1..120: mol_type = other DNA
attcaaacatgaatattcacctcacccagtcctctgggaggtccataagtccctgttttgggaagaatgaagctgagctctagctaaaaaaaaacaactccatttggggatctaaaaatt

SEQ ID NO: 2603 - DNA, 120 bp, synthetic construct
  source 1..120: mol_type = other DNA
aaaaccaaaagaggattttcagtgtgttccagaaatgttcctattataaatacatctttgtgctaaaagttttttttccctatatgtaagatttgtttcaggctagatgcagtggctcat

SEQ ID NO: 2604 - DNA, 120 bp, synthetic construct
  source 1..120: mol_type = other DNA
acacttccactccacctacaagtggagggtagaactgcatttattcatccttttccaacacatctagcaagacgtagtagagacgcaagagaaatttgttaatgtataaaaggagaactc

SEQ ID NO: 2605 - DNA, 120 bp, synthetic construct
  source 1..120: mol_type = other DNA
ttagatcacttcagaagacgcatgtttggtttgtgattactttgtaaaaacagtgtagtaggtactcactaaaggaaatttagaaaataataagcttaaggctgggcgtggtgcctcatg

SEQ ID NO: 2606 - DNA, 120 bp, synthetic construct
  source 1..120: mol_type = other DNA
aatatatgggaataagtgtattaaagagaaaaaataagcagggtaaggggaaacaggtagtgtaatatgtatagggggtaggtgtacatggggggagtcaggaaaggtttcactgaggtg

SEQ ID NO: 2607 - DNA, 120 bp, synthetic construct
  source 1..120: mol_type = other DNA
tgagccactacacttagccctaaatgtgaacttttgaaatggattttttgggtaaagtccaggcaggacatcaaagaacaagtatcctggtagtgcgacaagaatgtggttcttttcatt

SEQ ID NO: 2608 - DNA, 120 bp, synthetic construct
  source 1..120: mol_type = other DNA
ccctgccagtctccttgggctattgcaagaataaaattaaatgctacttgggaaaatacttcacaacctgagatgacttgtaccaatgtgggtattattactgggaccaaatgtgacttt

SEQ ID NO: 2609 - DNA, 120 bp, synthetic construct
  source 1..120: mol_type = other DNA
aaattgtgctatactgggtactgtattaaaaggaagtgaaatatggtccccatcctagaagtttccatacatatgagtctaaaaaaccattaaaaattaatcttaaggcctggcgcggag

SEQ ID NO: 2610 - DNA, 120 bp, synthetic construct
  source 1..120: mol_type = other DNA
caaaaatctctgctgccctggagtttacattctgtgggactagagataaaggatagatacattacatagaaggtcagctagtaataagtgttatggagaagcagcaggaatggaggataa

SEQ ID NO: 2611 - DNA, 120 bp, synthetic construct
  source 1..120: mol_type = other DNA
gacttgctaaaggctttgatgatttgcagtattcttatttaaatgtacagagccagcttcagaggaaggttcttccaaagacctatcccctccatgacaccaaccatccatgattttttt

SEQ ID NO: 2612 - DNA, 120 bp, synthetic construct
  source 1..120: mol_type = other DNA
gtctgcttgtggatttcatttctgccttttagtttttactttttctttctttggaggcagaaattgggcataagacaatatgaggggtggtctcctcccttattcccccactttgagact

SEQ ID NO: 2613 - DNA, 120 bp, synthetic construct
  source 1..120: mol_type = other DNA
atttttctctgtgtggtttgaactccaccatgtagtcttcctacaggaagggtgaagtccttctccactcttgctatatagtattgtctaatgattgaggcttttaggacccagaaatta

SEQ ID NO: 2614 - DNA, 120 bp, synthetic construct
  source 1..120: mol_type = other DNA
ccttttgtcctacctcagtgacttgatgtatacactggaacagtcctcagtctgaggaaggtcagttgaagtccttactgtaaaagtccaaattttaaggaaaatgagttccgcaatgag

SEQ ID NO: 2615 - DNA, 120 bp, synthetic construct
  source 1..120: mol_type = other DNA
gaaatgccagggtgaaagggatagccaattggactaaagtacaagtgccactccagttatttggcagagtgcccagtaaaggtccaccacaataccaccacacatctgctcggggatgaa

SEQ ID NO: 2616 - DNA, 120 bp, synthetic construct
  source 1..120: mol_type = other DNA
gactgtggcccatgactctggagggggtggcactttcttgattctggtgtgacgagtccatccttttttgctgtacgaacagcagtcttggtggttagcaacacaaggtagggtccttcc

SEQ ID NO: 2617 - DNA, 120 bp, synthetic construct
  source 1..120: mol_type = other DNA
caactttctgacttattacaaatatttatttctttaaacaaccagttaatttgtttcaggacaagaatttaccatataatactctttttatataaattccgccccccctttttttccttt

SEQ ID NO: 2618 - DNA, 120 bp, synthetic construct
  source 1..120: mol_type = other DNA
aagacaaaacaccacgctcacaccacaaacacaccacaaaacaaagaaccggtaaaaagggcgcacacacagttttgcagtttgcaccaaaccaaaatcagagtatccagaaatccaagc

SEQ ID NO: 2619 - DNA, 120 bp, synthetic construct
  source 1..120: mol_type = other DNA
cattcatgatttattttgccatttcaagtgatggagctggttttagagctagaagaaaaccaaaatgccagttaatctaaactagattcctgccccagtgcagaaccaatcaagacaggg

SEQ ID NO: 2620 - DNA, 120 bp, synthetic construct
  source 1..120: mol_type = other DNA
gtaattagacaatataaattctgtattttttcacatattgcttccaaccctttgggtcttttcctttctccaagaaagagaaagctacaggggagtgactgaccgggtaagtggtgagct

SEQ ID NO: 2621 - DNA, 120 bp, synthetic construct
  source 1..120: mol_type = other DNA
aatgttgacgttggccaggacctttgcaaacaagccaggccaaaaagtttcaatatttacactggctgctttaataagggcattgatcttatcctccgtaaaggtcacctcatagtcctg

SEQ ID NO: 2622 - DNA, 120 bp, synthetic construct
  source 1..120: mol_type = other DNA
ctctcgtcctttcagtagctctgttgccatgatctccacttcctctggttccatttggcaggcatctgccagggcctggcctgttgccatgatgaagtttgcatcagctgccaaggtgcc

SEQ ID NO: 2623 - DNA, 120 bp, synthetic construct
  source 1..120: mol_type = other DNA
tgcacattaaagtgaaagtgtgttggggaacacagcagtatccttattgccactagcccccagcatccttggggctcctactgtcacacagcagtctaggacatactagactacaagatc

SEQ ID NO: 2624 - DNA, 120 bp, synthetic construct
  source 1..120: mol_type = other DNA
tatctaatgcacagccaaggctgagaaccattctaggtctttccagcccatggtgatccataccccctctgcactctcaggacactaaatatctgttattatttggtgttttttgtttat

SEQ ID NO: 2625 - DNA, 120 bp, synthetic construct
  source 1..120: mol_type = other DNA
cctgtctagaacagaagctttgcctgagcctagcccctaagttatgattgctgagaagttctccccctcatcctgctgttttttatgacacttacgtaatcacagattatatttagtcta

SEQ ID NO: 2626 - DNA, 120 bp, synthetic construct
  source 1..120: mol_type = other DNA
tggacatctcacatgatctctgtgggccactatttcctcatgaataacccaaaaagacctaactaggtgtcattaaagaccttccagcaataaagtgttataagaaacatgagacagagc

SEQ ID NO: 2627 - DNA, 120 bp, synthetic construct
  source 1..120: mol_type = other DNA
tcttgaccccatgggtggaaatttcatgcccttcccaggcttccaggttgagaagtgttcttactcagtacagtcttctagattggtgatctttattgattggatatgtcatatatatat

SEQ ID NO: 2628 - DNA, 120 bp, synthetic construct
  source 1..120: mol_type = other DNA
gcaggataacgcccttgtaatacacattttgccttgaatacacacaatgccttgaaatatgcattaaagtgtttttggatgatggaacatcattttggagttactctcaaatggttcaga

SEQ ID NO: 2629 - DNA, 120 bp, synthetic construct
  source 1..120: mol_type = other DNA
gttcttatctaacttgtctctcccttgaacaaatcctattttctttggtcctatcatccagagatgaagcgccctggttctttttttgaggttgaaacatcttcaatcatggactaccca

SEQ ID NO: 2630 - DNA, 120 bp, synthetic construct
  source 1..120: mol_type = other DNA
aggagaaaggcaaaagttacccagatcacaccaactgcacttgacaaggccacccagttctttctgaacctttcagacagccagtcatttactaagaaacattggctgagttttgtggca

SEQ ID NO: 2631 - DNA, 120 bp, synthetic construct
  source 1..120: mol_type = other DNA
gaaacaggggagcatttccttattttccaactgtgtttaggaagtgggagcccagctcccttttaaaagaagagacaatgttaggattaactgttgtctacaaaatgggtaccccaaaat

SEQ ID NO: 2632 - DNA, 120 bp, synthetic construct
  source 1..120: mol_type = other DNA
ttctgctggtcagaggaccgcactttgatttggggtctagagtgtctggtgaggtatatagcttcctactcctaggagtgttcaagcaggagctggatgacaatttctcaataaagtcaa

SEQ ID NO: 2633 - DNA, 120 bp, synthetic construct
  source 1..120: mol_type = other DNA
tgtctctgtgctcttgcacagacagtgctctctggccttgctaaattccttttgatgagtgctaaccaaaacaaaaaaaaaaagtaagaacttttggcagcctctctggagtatgaaaaa

SEQ ID NO: 2634 - DNA, 120 bp, synthetic construct
  source 1..120: mol_type = other DNA
tgctctgtagataacctccctccacctctccagctgggaagaagtgtctcctctagtcacattcagccagactacataacttcccactcctttgtgtctaataactgtctcatttcagct

SEQ ID NO: 2635 - DNA, 120 bp, synthetic construct
  source 1..120: mol_type = other DNA
acttccccaaaattcccttcattgcgggccacatcagacctgaagccaaaaaaaacgggattattttctagatcaggtaaagttcttcttagcaagccaaagaaaagagggagggtagac

SEQ ID NO: 2636 - DNA, 120 bp, synthetic construct
  source 1..120: mol_type = other DNA
ctctattgccacaaactcaatgtggctactccccatcactcccaccctgcacacggctgttctaagccaggcaagcctctaatcttgtgccagccttagatacacgaaatactctggaag

SEQ ID NO: 2637 - DNA, 120 bp, synthetic construct
  source 1..120: mol_type = other DNA
ttcatgagaagcccttgttctgcagccctgggtcaaaagaagtcattgttttatcttccaattatccacaggtagactgatccctggcatactggtcttctcattaaacaacagattttc

SEQ ID NO: 2638 - DNA, 120 bp, synthetic construct
  source 1..120: mol_type = other DNA
cagacctcagattttaagaagtaactatttttagtttgggctgtttattttggctgtttagatttctctgttctggctgtgctggtgagaagtgctgctgtcaaaccatggaggcttttg

SEQ ID NO: 2639 - DNA, 120 bp, synthetic construct
  source 1..120: mol_type = other DNA
cagtttagtttgttcgcaacacagcagccacagtgattgttttagaactaaagtctgttcacacttaaaccctccaaagggttctcatctccctcagaataaaatccaagatcataacca

SEQ ID NO: 2640 - DNA, 120 bp, synthetic construct
  source 1..120: mol_type = other DNA
caacacgaggagactccatctctatatttcaaaaacatattttttaaaaaagaagtaggactctaatcctcccactgccctgtttaaaaacctttagtgacttcccactgcctgctccat

SEQ ID NO: 2641 - DNA, 120 bp, synthetic construct
  source 1..120: mol_type = other DNA
ggactgttcttcagaaacttcagagcaggcgagaatgtaagagaagctccaaggaagaggcgcccagagtctttctgtcattgtcaattctggctgcatgaagatctgcctgccctgtgt

SEQ ID NO: 2642 - DNA, 120 bp, synthetic construct
  source 1..120: mol_type = other DNA
ctccttaaatctacttccttgtaagttttcccagggatctcttacccttttattagaaagtggatgaaattctacctcttccacaaaaccttccaggtagtttgggaggatctgatggct

SEQ ID NO: 2643 - DNA, 120 bp, synthetic construct
  source 1..120: mol_type = other DNA
atcacagcccattcccatgggtgctatagactagactgtgggtctgaagggcttcctttctctgggcatcatgaggttccacaagaagacccactctaccaacttgtattgcttcagttt

SEQ ID NO: 2644 - DNA, 120 bp, synthetic construct
  source 1..120: mol_type = other DNA
ctaatcaatcagtattaacaatctgccctgtgggcagagaggcatacacctatgggggactgcgtgcattttgtcagagacccctggtcaggcctactttggagtgaccagtcaacatac

SEQ ID NO: 2645 - DNA, 120 bp, synthetic construct
  source 1..120: mol_type = other DNA
tttagggtacatgtgcacattgtggcagttactccttttatctgtgtctcagattgggtccctgagcaacatgtttgaaggaaagtagtggatggctaggtcttttttttttttgtttgc

SEQ ID NO: 2646 - DNA, 120 bp, synthetic construct
  source 1..120: mol_type = other DNA
aatgcccagtttactatggaaagcaaagcttgactctgctataatgtggaatgcacgtggtgtttccacagagtcaaaagcgacatcaaatgccaactggaactgttatgcttctagaac

SEQ ID NO: 2647 - DNA, 120 bp, synthetic construct
  source 1..120: mol_type = other DNA
gggatggatgtcactgaggaaactggatctggacttgccacatattagccttaaaactctgtgcattcagttgaagcaaattcactttgagtctcaataatgtgttgtgttgcttgtgta

SEQ ID NO: 2648 - DNA, 120 bp, synthetic construct
  source 1..120: mol_type = other DNA
ggctttctgcaaacttatgtgtttggtgtggtgaagacctatttttcaaaataaaatattctcatatggaaatctgtgcattcgaagacatctgttttcacaatgtggggctccttgtgc

SEQ ID NO: 2649 - DNA, 120 bp, synthetic construct
  source 1..120: mol_type = other DNA
gctcaggagagcacttactgaggcaatagccttccagaaatctctatatttcactcaactccttgcagtggcctaaatgcatttcctatctctgctcgcagttgttgaaatgtgaggact

SEQ ID NO: 2650 - DNA, 120 bp, synthetic construct
  source 1..120: mol_type = other DNA
aaactccacaaacttcttgacctcgaggaagccaccatctccctctactcaattccttcaatagttgaggccccgaaataaggtactgtcctgatttcacaccacagcctgctctgagcc

SEQ ID NO: 2651 - DNA, 120 bp, synthetic construct
  source 1..120: mol_type = other DNA
aagaaaaaataaaaagaaaaatgcctgaggcttcaagacatgggctgtactctgtggatgggggagccacaggctggctgggctttactttccagccctccatccagatacttgtgggcc

SEQ ID NO: 2652 - DNA, 120 bp, synthetic construct
  source 1..120: mol_type = other DNA
tggcctgtgtatagtttaaaggtgtaaaattatgaagccgataaaaactatagcttcccttgctctctcccccttgacctgtctaaagctcttctctcagaaaggaaccaataaacaggt

SEQ ID NO: 2653 - DNA, 120 bp, synthetic construct
  source 1..120: mol_type = other DNA
tgttgaaataaaaggaccctgtgatcctctcctgggctaggattttaaaaatagtaacttcacagagaagcttcttccagcatggaaaaaagcaatcagaatttcttgagcttcacccag

SEQ ID NO: 2654 - DNA, 120 bp, synthetic construct
  source 1..120: mol_type = other DNA
attaattcagcctggttctgcttgtcctcttcttggtccagataaatgggatttctgcagcagtcactggctatttgcatttatgagatgtttgtggtttatccacggttgtttcttatc

SEQ ID NO: 2655 - DNA, 120 bp, synthetic construct
  source 1..120: mol_type = other DNA
acaatgactataacaatgaaaaagaagttgcggtttcccctcaatgagcatatactggagagcctgttagcgttcagctcacttaatcatccctacagcctaaggaacagggaatattat

SEQ ID NO: 2656 - DNA, 120 bp, synthetic construct
  source 1..120: mol_type = other DNA
ttaacgttggttgatagtgaatgggtggagtgtggctttgtactgggtttatacgagattcatagagtggaagcatggtttgcccaagatggctccaactctttagaaatgtctgaactc

SEQ ID NO: 2657 - DNA, 120 bp, synthetic construct
  source 1..120: mol_type = other DNA
tctaggctcactgaccttactgggcttttaattcctcccagctgtagccaaacaaccctgtgagtctctaatctttttggcacaaagaattatcctacagctgtacctgcatttgctatg

SEQ ID NO: 2658 - DNA, 120 bp, synthetic construct
  source 1..120: mol_type = other DNA
tcgaaaaacaaaacaaaacccctatcccagtgatctagaagcttattgctgctctctatggacaagaaattggactgtgggctcaccatttccctgttctcttcctaacccccgggcttc

SEQ ID NO: 2659 - DNA, 120 bp, synthetic construct
  source 1..120: mol_type = other DNA
cagaaacaaagactaatcagacaaagtaggtgcagctgcagtgaaggagacccataagcaagtgttacaatggagagaagcacaggtgataggggagcccagagaaggacattgcactca

SEQ ID NO: 2660 - DNA, 120 bp, synthetic construct
  source 1..120: mol_type = other DNA
ttcttcctttctcttttccaccacccccactccctgccctgccatagactatggtaagaaaaaaaacagagaaatgagttcaaagtggggaagtgattcttttttcacagaaggaggtta

SEQ ID NO: 2661 - DNA, 120 bp, synthetic construct
  source 1..120: mol_type = other DNA
tcatatttaacaggaagaggattttattactcttaattctactgaagttcattaagtctgctactctctcattcctatacacctccctcctggtagagaagggtcctgccacctacctga

SEQ ID NO: 2662 - DNA, 120 bp, synthetic construct
  source 1..120: mol_type = other DNA
atttagttcttcagctgagactgctctgctgagttccagacctatttttctgtctgctaccttgacatatccattgggatgtctcaaaggcacatcaaactcaccatgcccaagacaaag

SEQ ID NO: 2663 - DNA, 120 bp, synthetic construct
  source 1..120: mol_type = other DNA
agtttagaatccttggaccatgagaggtagtgtatattggaccccatacctatataaggcactgataggattttgatttttcacttgagacatttttcctttctcccagggcctctagca

SEQ ID NO: 2664 - DNA, 120 bp, synthetic construct
  source 1..120: mol_type = other DNA
taggctttccaagacctcctcagaagctgagcagatgccagcccatgttttctgtaaagcctgcagaactgtgagccaaccaaacctcttttctttataaattacccagtctcaggtgca

SEQ ID NO: 2665 - DNA, 120 bp, synthetic construct
  source 1..120: mol_type = other DNA
gaaaattgggtatgttgctttgccacttgaggtctccgttttacccccgtgaaaggagctgattaggtcatataatccagcactcatggtccataatttttagaaaaatgatgtcaatat

SEQ ID NO: 2666 - DNA, 120 bp, synthetic construct
  source 1..120: mol_type = other DNA
gcagaagtggtcatactcatccacaactgttccctgcagcactgtttgtatcgccaaagaggggaaaaattaactacattatggcatattcatcctgtggaatgttttacatccaaagat

SEQ ID NO: 2667 - DNA, 120 bp, synthetic construct
  source 1..120: mol_type = other DNA
ggcagatactcacatgaactggatgattttgttcaagcctgcaatttcatacaggctctctgtgtcagagccaccttcatccaaagacagttttcctggagacaggagagaaagagtcag

SEQ ID NO: 2668 - DNA, 120 bp, synthetic construct
  source 1..120: mol_type = other DNA
cacattaggggttaatgacaaggcagtccattgcctaactgaatcagccacggagcctcaaattggccatactgccccaacccttcaaactaccttagaaatttagttttgtacagacca

SEQ ID NO: 2669 - DNA, 120 bp, synthetic construct
  source 1..120: mol_type = other DNA
tgtgaaaaataaagataaatgtttcctatgcaagtttacagactcccagaattctatctatagactgcctggaaggaagcttctggaatgggatgataccaatggggaagaaggctgatg

SEQ ID NO: 2670 - DNA, 120 bp, synthetic construct
  source 1..120: mol_type = other DNA
tgacctaatttccctccaaccaagagtgtctcctatctgcctccctcacttgatctccctcatagactctatctccagttgatttatttaaagccaagatttttcaaatgaacaacgtct

SEQ ID NO: 2671 - DNA, 120 bp, synthetic construct
  source 1..120: mol_type = other DNA
tatctaataatagttatatgggaaagcagtcttgcagaggcaaggaaaaagactcaaagggcccttcgttcctcaaaaagtgtgaaattctaagccatcagaattgagtcactcacagcc

SEQ ID NO: 2672 - DNA, 120 bp, synthetic construct
  source 1..120: mol_type = other DNA
cactctcctttgttcccctggatgatgctttcttgtctctaaaatcctgtacttctgatgacatcctgcatctccttttatcttaggatgttttacagtctccttttgtgttcagagatt

SEQ ID NO: 2673 - DNA, 120 bp, synthetic construct
  source 1..120: mol_type = other DNA
cacagaagttgatgtgagagtccagcagcctctatcaagccaggcagtgaagagatttacaaaaagtgtaaaatagcgtcaccactcttctcaccaaatattactggttttggaaaaatc

SEQ ID NO: 2674 - DNA, 120 bp, synthetic construct
  source 1..120: mol_type = other DNA
cctaggggagagacggcaaatacgggtgcatcaactaacaaatgatctgatcatgcttatctggggaatttcacttaaaaggattctgacatcaagttcatactcagtgaaaagagtatg

SEQ ID NO: 2675 - DNA, 120 bp, synthetic construct
  source 1..120: mol_type = other DNA
ttaatttactcaaatttccattatcctttgaagtctacctcaaattcctttgcctccaaatacttctaacggcagaactccctgggacacattgcgtatgaaacaacaatgcgctgtgag

SEQ ID NO: 2676 - DNA, 120 bp, synthetic construct
  source 1..120: mol_type = other DNA
aacttatgaacatccagaaactgctggccagtggaaacatccatatcatttccaaatttgtgtgatgtgaggaggataatggaatttatagcatctagcaggggaaggagatttgacctg

SEQ ID NO: 2677 - DNA, 120 bp, synthetic construct
  source 1..120: mol_type = other DNA
tatatacacacacatacagatctatcctgattggtgctctctggagttacacaagggggtctgtacccccacaacccagcccccatcaccattagtctgcaacactcacacccatggaag

SEQ ID NO: 2678 - DNA, 120 bp, synthetic construct
  source 1..120: mol_type = other DNA
cttcattccttctattaatttgtgatcccaaagctttccccttcttccagaaaatggtaatgtgatgattaaaatgcaaagccatgccattctgtgaaagggcctgttgatggagactgt

SEQ ID NO: 2679 - DNA, 120 bp, synthetic construct
  source 1..120: mol_type = other DNA
tgaatacatcacagctattcttatgagacacgtgggcccttggtgaaggtctgttttctgcctacactgtgttctattggtttccattatgttctattggttttcacagagctgttgttt

SEQ ID NO: 2680 - DNA, 120 bp, synthetic construct
  source 1..120: mol_type = other DNA
aacttgaaggtcactttatcactgagaccttcctggctctcaccccccaactgtctatcttcttagcctgatttgtttttgtttttagctgttgtcaaaacttgactcgctatatatttg

SEQ ID NO: 2681 - DNA, 120 bp, synthetic construct
  source 1..120: mol_type = other DNA
agcacacaggaggctctcaggctatgtttgttgaataaatgaacaatggaaagtcacaatttctgctcaccttcgaaccaggtgcagccttgggatctgcattcctaagaagagacactg

SEQ ID NO: 2682 - DNA, 120 bp, synthetic construct
  source 1..120: mol_type = other DNA
ataactgaaagcaccagaatagctgcagtgatccctctccatcccagagggatatgtgctcaggatccatggaaagttggttcacaggaaaaaataagtcatttcttgcacacctcagtt

SEQ ID NO: 2683 - DNA, 120 bp, synthetic construct
  source 1..120: mol_type = other DNA
gtcttgggtaatgaggataataatagctaagctttagtaagcacccgcttatgagcccggccctattctggccacatgcatacatttaatcctcactgaaactttataaggtaagtactt

SEQ ID NO: 2684 - DNA, 120 bp, synthetic construct
  source 1..120: mol_type = other DNA
atggcccttgccatgacagctacattggtcctcaattcaagtgtcttcagaaagtgaagatgtaagctactctttgcaacattaactcctaacaagtccaaaaaaaaaaaagtacaagaa

SEQ ID NO: 2685 - DNA, 120 bp, synthetic construct
  source 1..120: mol_type = other DNA
ctgttagtgctgggaggtcagagaaggaagggaatgaacatttattgagcaactcttgtgtgccaggtcagacacgaggttgttgcactcatggatataacagtcctgaaaagaaagata

SEQ ID NO: 2686 - DNA, 120 bp, synthetic construct
  source 1..120: mol_type = other DNA
ccagaacttggaaataaagcaaagaaaggatgccatatctttgtaatatcatgttggagcattttataacaggcctggccaaggattatctaattatccaggtcagggtttctcaacctc

SEQ ID NO: 2687 - DNA, 120 bp, synthetic construct
  source 1..120: mol_type = other DNA
ctaacctctctgcgctgtggtttactcctctgtacaaatgagaaaaataaaagtacctgcctcatgggcattcagtgtgataacacatataaggcattagaacagtgactgacaatatgc

SEQ ID NO: 2688 - DNA, 120 bp, synthetic construct
  source 1..120: mol_type = other DNA
cagccagtttggcatgtgccaaagtgaggaaacctctgtcataaaatgcttggacctgcaaatccaattacccatcagtggacacaggcacctgtatcaccacacatctgaagttgaact

SEQ ID NO: 2689 - DNA, 120 bp, synthetic construct
  source 1..120: mol_type = other DNA
cacttacaaatcataaattcaaagataaaattaattaaaatctcaatactttgaccacagagcattcaaccccaaatgtggggcccttctgagtgggagtcctctgggactgcataggtg

SEQ ID NO: 2690 - DNA, 120 bp, synthetic construct
  source 1..120: mol_type = other DNA
ttggaaacatttctgattaggtttccgacttgcagggaactcataatactgtctctatgaactctaggcctaacccaaggttttgcaactccagcccacaaactaaagaaaaacatacac

SEQ ID NO: 2691 - DNA, 120 bp, synthetic construct
  source 1..120: mol_type = other DNA
atttaatcccactctccttccacactcaggagctcagagtgttttcccctcatagcaagcacacatttagaatcccagcttcccatcagctcaagatagattcccatggaaaccagcata

SEQ ID NO: 2692 - DNA, 120 bp, synthetic construct
  source 1..120: mol_type = other DNA
attcctggataaaactctcccatgaaggcaaacttagtggacacaagtttcttatgaattacatttggggaagagaaattagcattcaacctctgtggctcactagctgaccttactaag

SEQ ID NO: 2693 - DNA, 120 bp, synthetic construct
  source 1..120: mol_type = other DNA
tacccagataaatggcatgggagggtaagggttgatgcagggtaaggttgagaactcactgagtaggactgggaaggagagatggagagatgaatgctgaatttccagagccatgtgcac

SEQ ID NO: 2694 - DNA, 120 bp, synthetic construct
  source 1..120: mol_type = other DNA
agttttctcaaagaggccatcgcatctttttttggtccctatcctattctaaaatgaggctggtgcttcaaaaacctagtggcaccccatgataatgtggatttgggcacacatgggaac

SEQ ID NO: 2695 - DNA, 120 bp, synthetic construct
  source 1..120: mol_type = other DNA
gtttggaaatatttgatcattttttcatgcatcttgtctccccagggacaggggttgggtcttatgctttcttcttatgctttcttctatatactgtgtggtcaacacatatgtgctgat

SEQ ID NO: 2696 - DNA, 120 bp, synthetic construct
  source 1..120: mol_type = other DNA
attctgcctacaacatcaaagagcattggatgtgaaaagtatttttgctgttaatatgagaattaggaactactcagggaggccactgatagtagtgagtgaaaaatgcccctccaagag

SEQ ID NO: 2697 - DNA, 120 bp, synthetic construct
  source 1..120: mol_type = other DNA
tgaacacttaagcttaaatgggaattttcataggctgtgagttaaaagctaagcagtgctgggtggagatgtgcctagtaatccccttcaaaggaaccaagttatctttaagctatgaag

SEQ ID NO: 2698 - DNA, 120 bp, synthetic construct
  source 1..120: mol_type = other DNA
gcagaaggagatgaataacttattctttaccttgtcaaaatgacatatataagataagaccttataacagagcaatgcaacaaggactgaaacctaaacaccaccactttcctgccccag

SEQ ID NO: 2699 - DNA, 120 bp, synthetic construct
  source 1..120: mol_type = other DNA
gtactcttcagatctgagctgcatggggcgagtaattatagttgaacctcagagcactcactttcttcagttgaagactagaggaaaatgtcttttgctgttgttcttgccataataata

SEQ ID NO: 2700 - DNA, 120 bp, synthetic construct
  source 1..120: mol_type = other DNA
gactctgcaatttttcgcatcaaagttcactagcctagtagcgttacttcaggacttctctagaggctgacttggtaactgctgtcagtaaaagctttgatggctgaaataattttgttt

SEQ ID NO: 2701 - DNA, 120 bp, synthetic construct
  source 1..120: mol_type = other DNA
ctatattaattacttgatttaaatttgactgcaaacttttgacttgttttggagcctggctatcccaggatgatagcccattttgaacacgtgagagttccgttcaccagaaaataggcc

SEQ ID NO: 2702 - DNA, 120 bp, synthetic construct
  source 1..120: mol_type = other DNA
tttttaaagtcagataagctaaaatttgtctaagacagaagacagataagagagaaagtaagttatatagctttcttcagaaagccagcacctgcggctgtgtgcagcgagaggcagagt

SEQ ID NO: 2703 - DNA, 120 bp, synthetic construct
  source 1..120: mol_type = other DNA
atggtctatatttcattgacaataaatgtcatacctgttatacctaaggcagtacatattcctcaggtacaccagcctgcttccctgtgcaaactgcttcaatccaaagaaccagaaaag

SEQ ID NO: 2704 - DNA, 120 bp, synthetic construct
  source 1..120: mol_type = other DNA
tagaaattgacttgggctgtggactcccatcacctcctatgaatttagacttgtactcattcttattttgcactagaatctttacaaagaatgagctaaacctggagctcagggttgatc

SEQ ID NO: 2705 - DNA, 120 bp, synthetic construct
  source 1..120: mol_type = other DNA
taggtactataaagaaagtcttttgaacttacctgcctctcggtccctgatacagtagtctggagaattctcaaaatacacgaggtcatttttcgttggcttcttaaacctctcgttagc

SEQ ID NO: 2706 - DNA, 120 bp, synthetic construct
  source 1..120: mol_type = other DNA
ccgaatcctgcaataaaccaatcagggtaattgtactatagcaattctatgctactgtatttattttgcagatgaccgagaagcaaggctgagagaggtggaagcactcacccaaagtta

SEQ ID NO: 2707 - DNA, 120 bp, synthetic construct
  source 1..120: mol_type = other DNA
ctctcacctgtccaggagctgtccctcctaagatcttggagagcaccacacaaaactcactccacatcaagtacttaggaattaaatatgaatgctcattcttccaagtttattcttttt

SEQ ID NO: 2708 - DNA, 120 bp, synthetic construct
  source 1..120: mol_type = other DNA
catataataaaataaaagagtcacataagaagaaataccttgtctctgtctctagatgctggtttctgcagcagcctctctgcaacctgagggcagcaatgccgacaggcagcaagctgc

SEQ ID NO: 2709 - DNA, 120 bp, synthetic construct
  source 1..120: mol_type = other DNA
ggtttacacatattatctaattatcaccgtcaggcaaagtaagttatcgttcccattctatgcttatgaaaacctgcgctctgcgaggaaaggaaaatccctggtcacccagctatttaa

SEQ ID NO: 2710 - DNA, 120 bp, synthetic construct
  source 1..120: mol_type = other DNA
ggtgattccactctggaaacatctgcacaagcttggaaggatacacacccacatggatcttcatgcagctattgcataattagtaacagcaaaatatgaggaaaaacccaaatgacatca

SEQ ID NO: 2711 - DNA, 120 bp, synthetic construct
  source 1..120: mol_type = other DNA
agggtggtttcccatgcacagccgctgatggagggactggagacattttatttggatgataaaagaatgagtgactaaagtcgaggacctctgttctgtaactataagtaaattttgatt

SEQ ID NO: 2712 - DNA, 120 bp, synthetic construct
  source 1..120: mol_type = other DNA
attagccggttgccaaattttggaattggtcctctatgtcacttatgttttctctcatcttttcaatactttcttcccgatttcttgaggaagaaattccatcagagtaacagtcctggc

SEQ ID NO: 2713 - DNA, 120 bp, synthetic construct
  source 1..120: mol_type = other DNA
gataatccttggacagtctcttcatatttaagaatgaagtagtaaaaaggcatttaggaactctggttgtagaggtggggcttgtggaccaaaaaatattgctttctggtgagttggcag

SEQ ID NO: 2714 - DNA, 120 bp, synthetic construct
  source 1..120: mol_type = other DNA
tgtctcttgaatctttcctgaaaagtctcttgttctacttccttcttctttgattcttaatgcaggtcgctgtcaagattccattttcagccttctcgtatgctcctgttctcaattctc

SEQ ID NO: 2715 - DNA, 120 bp, synthetic construct
  source 1..120: mol_type = other DNA
tcgacatcactctgctggtgtttttcatattagggtttgccagtctctggggctcatgttccttggattcagtgagttctataagcttttacacttagtgtttgcgtatctaattatagt

SEQ ID NO: 2716 - DNA, 120 bp, synthetic construct
  source 1..120: mol_type = other DNA
ccctgtcttgggacttgacttctggttagtttttggttcatatgataaataaagatctctaatatcaagcacatattattttggggtccaacaagacagaagtgagcctggcagaactga

SEQ ID NO: 2717 - DNA, 120 bp, synthetic construct
  source 1..120: mol_type = other DNA
agtattttattttatatggcaaccctagtttggtaacttatgcaaggttttgctcaagtattagagccagttttctgatgccagggccttatcctccataatgcctcagtcaagaactcc

SEQ ID NO: 2718 - DNA, 120 bp, synthetic construct
  source 1..120: mol_type = other DNA
gatctggctgggactcaaatttcaaattttcagcctcagttcctattaaatctcagtcttgaactccaccctagagttcttgtatccctcaactttatgatacacttcctgctccaatat

SEQ ID NO: 2719 - DNA, 120 bp, synthetic construct
  source 1..120: mol_type = other DNA
gatctagtacttcatgattctatgaccctgctttagtctctccatccctctcaggcccagttgctcatctgaaaagtagaaatatgaatactattttttattcctacaggggttttggaa

SEQ ID NO: 2720 - DNA, 120 bp, synthetic construct
  source 1..120: mol_type = other DNA
cacagaggatctaaaatgacattacagtacagagacacatgagggtgctctaaccaactgctataataaataaattgttcaaatattggggaaaaattaaggcccgttatgaatggcagt

SEQ ID NO: 2721 - DNA, 120 bp, synthetic construct
  source 1..120: mol_type = other DNA
tttgcagagcaggcaggagaatatctgaggcctgacagctgttcacctctacacggtgaagaatcatgtgatttacattaaaagttgtgtttattcagggcctaaaatataatagctatg

SEQ ID NO: 2722 - DNA, 120 bp, synthetic construct
  source 1..120: mol_type = other DNA
gtcaggttcccaaagagggcatccctaaatctagaagaagccaacaaaccatgcttgatgagttgttttcatgatacatgtaagaaaagatgctctgggtctaatctttatatcccttag

SEQ ID NO: 2723 - DNA, 120 bp, synthetic construct
  source 1..120: mol_type = other DNA
atctaatataggtttttgtcaatttaggtatctgtgtggcagctcttcttaaataagcagtatcaaagaaaaagatggccttgcccagctcctggcttcacattagtctcaaacacaggc

SEQ ID NO: 2724 - DNA, 120 bp, synthetic construct
  source 1..120: mol_type = other DNA
gtgactttttgaaccacacagctgggagagcaaaccaccttttcacattgaagccctgcttgtttccgtttgtcattcagtgctaaaatttattatacatcccttgcaatatttgctctg

SEQ ID NO: 2725 - DNA, 120 bp, synthetic construct
  source 1..120: mol_type = other DNA
atggagataaatcaagcaatgcctattaagtacataggcacagtttttatttggggtagagagattgttacctaggaaggcaaaactctagaagctagggtttcttgaaggttatggatt

SEQ ID NO: 2726 - DNA, 120 bp, synthetic construct
  source 1..120: mol_type = other DNA
tgagagggaacctggccttctgtgaagaatggaaagaaattgtgtagcatgagtggtttaagttctgagtactgtggcaaagtattctgcttcatctgaaaaaaatctgaaggaagtaca

SEQ ID NO: 2727 - DNA, 120 bp, synthetic construct
  source 1..120: mol_type = other DNA
ggggggtaggcaaaaacaagtaaaaagtttcctattttgggggtttgcacataaactgctgtgttttctgtcagattttctaatagcaaatggactgtggtgtttcctggagaatgctaa

SEQ ID NO: 2728 - DNA, 120 bp, synthetic construct
  source 1..120: mol_type = other DNA
tgattcacctcttacaaacctctagacatgttccttgatttctctagtcctcacctgtagaacagggacaatgacgcccaactgaacaaacttctgatggaataaaatgcaatagaagat

SEQ ID NO: 2729 - DNA, 120 bp, synthetic construct
  source 1..120: mol_type = other DNA
catggaaacagaaatagtcattttattgaaaaatggtcagtctgataaatcaatctttgatcctgtgtcagcaatgtcaaggctaaacgcctccctgttcaaagccggcttaggaaggaa

SEQ ID NO: 2730 - DNA, 120 bp, synthetic construct
  source 1..120: mol_type = other DNA
aggataagaaattggctgattttgctgtcgctcagctggatccaaataaaccaaacatcggagctctcatttgagggggaatgtggttttatggagttgtcaaagctgaaatgatcttct

SEQ ID NO: 2731 - DNA, 120 bp, synthetic construct
  source 1..120: mol_type = other DNA
ccaggggataaggagattactatgcatgggatacaagaatccagagatgattctcaactcattgcttcgcttctctccctgaagctgggatgaagagctagcacttgtaaatttggagct

SEQ ID NO: 2732 - DNA, 120 bp, synthetic construct
  source 1..120: mol_type = other DNA
gggaataaacgaaagcttacctccacccttctttgtcccgcattttcttgaagtaaatccagacacttaggaaagaaaaggtggttggctccgaggaaccagaaacattgccaaaatttc

SEQ ID NO: 2733 - DNA, 120 bp, synthetic construct
  source 1..120: mol_type = other DNA
tctgtacctattctctcgatggaccccttcgctttgaagataagatgttcgctagtagacatggttaggaaatgctcaagaaaattaggaggaaagaaggttacagcaaaccttacttct

SEQ ID NO: 2734 - DNA, 120 bp, synthetic construct
  source 1..120: mol_type = other DNA
ttttctgctgaagagaaaaacatttttctagaatgtaggaaggtagaatacaggcaaggcagtagtttcagttaaggagggagagactggagttttgggctgttgaagcagctgaaattt

SEQ ID NO: 2735 - DNA, 120 bp, synthetic construct
  source 1..120: mol_type = other DNA
attcttcacttaaccttaggaataagaaccacattgcatgaataagagcaaaatgaaaacagagcaacctgaataaagtctaaagccaaccctagacaggatcacgatttcccagtggta

SEQ ID NO: 2736 - DNA, 120 bp, synthetic construct
  source 1..120: mol_type = other DNA
aatccagaactagggagaagagaacagaagcagtgactgcaagtaagaattagatacatgggttgaggatctatctataatcagtagaacagtggattagtaagccagaagagaggtcaa

SEQ ID NO: 2737 - DNA, 120 bp, synthetic construct
  source 1..120: mol_type = other DNA
ttcatattcctttttgcaattccataattccatctgggctcattttaagtactactgaatggtggtgagtttcccattttgctttttttctgctatcctgcagcctggacacaaggcagc

SEQ ID NO: 2738 - DNA, 120 bp, synthetic construct
  source 1..120: mol_type = other DNA
gcctttgaaaactgaactaacatcagaaccagaacccacataaggctggtcagaatttgtggcctgaacccaattaggttgcttgatcatatgttgaaacaagaatatcaacattccaca

SEQ ID NO: 2739 - DNA, 120 bp, synthetic construct
  source 1..120: mol_type = other DNA
agctaagagaaatggtaaatatctgaataaaagttacagactcttctagtcctctccagttctttaagaaggcagaaaaggggaaacaggattgaaaaaccaagataacacacagaaaac

SEQ ID NO: 2740 - DNA, 120 bp, synthetic construct
  source 1..120: mol_type = other DNA
tgtgtatagaccaaacaacagaccttcaaaacatacgaagcaaaaatttgacagaactaaaaggaaaaaaacagacaaatgcacaattacagttagagatgtcaacattcctcactcagt

SEQ ID NO: 2741 - DNA, 120 bp, synthetic construct
  source 1..120: mol_type = other DNA
tgtagcaatagaaaatgttattattgccatctctggaaaacagtcttctacagtcttccctttggacacaacaattcacattccttccacatgggcaaaataaacccactctctctccca

SEQ ID NO: 2742 - DNA, 120 bp, synthetic construct
  source 1..120: mol_type = other DNA
ttagatgcttaaaacagcaatcacttgttagctcattatattgtgggtcagaaatttaaactgggtttatctgggtaattcctctgttgatcttcactggggccgtgcatgtttgatggc

SEQ ID NO: 2743 - DNA, 120 bp, synthetic construct
  source 1..120: mol_type = other DNA
tgtgcacattgtcttaagttagaaaaagaacaacagaataaactcaggaaagcagaaggaagaaagtgaaaaagaacataaagtaatgagataggaaacacagattcattagaaaggttc

SEQ ID NO: 2744 - DNA, 120 bp, synthetic construct
  source 1..120: mol_type = other DNA
ttcagaaacagatccacaagtacattagaaattaggtgtaggaaataggcaccacttcaaatcaaagggaaatgatggattattcaataatggtgctgtgaaaattggctcacaataagg

SEQ ID NO: 2745 - DNA, 120 bp, synthetic construct
  source 1..120: mol_type = other DNA
gtaagtctgtaaattaatataggctccttgaagaggagtatagcggtgatgcaatcaagctctcccctggaaacagatggaggataattcaaggaggtttgatttacaaagagactatga

SEQ ID NO: 2746 - DNA, 120 bp, synthetic construct
  source 1..120: mol_type = other DNA
tatgtaaaatgtttcaggaagatgaggtcctctgtgtgacttggggaggtgaaagtgtaggtaggtgttaggataagtaccaagtagacaatctgaacaagattgagtcatgtacatttc

SEQ ID NO: 2747 - DNA, 120 bp, synthetic construct
  source 1..120: mol_type = other DNA
tattaataataatcatttttttcatgacctattcaagggcacttctggttggtgacagagttgggttccctgggaagaaaatcctggtggagattagtatatgggacacattaggagtgc

SEQ ID NO: 2748 - DNA, 120 bp, synthetic construct
  source 1..120: mol_type = other DNA
gctgtctgctaactgcactccagcccctggagataagtcatttattcttaaatggagatttgggagccacatcacacatccactccagtatacaaaacttcattaagaaaaaaaatctac

SEQ ID NO: 2749 - DNA, 120 bp, synthetic construct
  source 1..120: mol_type = other DNA
ctgcctttgcctcccaaacattggattataggtatgagctatgtgcctggcctaagtatttaaattttctgatctctgatctcatataaaaaatgtaatatatggttatagtgcttgcac

SEQ ID NO: 2750 - DNA, 120 bp, synthetic construct
  source 1..120: mol_type = other DNA
tcactagtggatatgccgaaaagaaaatatccaccaaaattccacccccacaaagctaaaaatgattatttattaatcagtgacagagtgacttggagtgcaaaacagaaatcatcatgg

SEQ ID NO: 2751 - DNA, 120 bp, synthetic construct
  source 1..120: mol_type = other DNA
atcttcttttgagaattgtctattcatatccttagcccactttttgatgtgattgtttgtttttctcttgccaatttgtgagttccttgtagattctggatattagtcctttgtcagatg

SEQ ID NO: 2752 - DNA, 120 bp, synthetic construct
  source 1..120: mol_type = other DNA
gatttctgtacattcattttgtatcctgaaactttactgaactcatttatcagttctaggagattttttgatgagcctttaggattttctagatatgcaatcatatcattggcaaacagt

SEQ ID NO: 2753 - DNA, 120 bp, synthetic construct
  source 1..120: mol_type = other DNA
tttctaattgagcttatttggatcttctctcttttttcttggttgatctcacaaatggtctatcaattttatttatcttttcaaagaaccagctttttgtttcatttatcttttgcattt

SEQ ID NO: 2754 - DNA, 120 bp, synthetic construct
  source 1..120: mol_type = other DNA
tttatttatgaagctttatttccctgtatgcaaaattcttggctgataattgttttgtttaaggaggctaaagatagtaccccgattcctttagcttgtagggtttctgctgagaaatct

SEQ ID NO: 2755 - DNA, 120 bp, synthetic construct
  source 1..120: mol_type = other DNA
gagctactgggctccaggctcgtaccgaggaatgtctgcaaagagtcctgtgacgtgatctgtcttcagcagtgaatacaacacctgctccggtggatgtagcaggggagtgaaatggac

SEQ ID NO: 2756 - DNA, 120 bp, synthetic construct
  source 1..120: mol_type = other DNA
catccgagaggaagttgcaatttagccctgcctcctagctgccatttttccctgctatcccctggattcatttttggactgatacccttttagacatttaaatcttgtttcccatattta

SEQ ID NO: 2757 - DNA, 120 bp, synthetic construct
  source 1..120: mol_type = other DNA
taagctctatactaagcacaaagcagataccccagaaatactgattaaagaattttactgccaggatggtagtatgatgaatgtcataaatgcactccccagagaaacaagcaaagctgg

SEQ ID NO: 2758 - DNA, 120 bp, synthetic construct
  source 1..120: mol_type = other DNA
cagggtcactatatatgcccaagactgctctctctgagaagaaacatcaaagacttcacaatttggggtaagtagacttcactaatatagtgcagccaaatcactaaacaaagaaacaag

SEQ ID NO: 2759 - DNA, 120 bp, synthetic construct
  source 1..120: mol_type = other DNA
aaagtttttaagagaaagtaaacccagatagttctctaaatctgttacttgtggcaggtatctgagttaccagcagcatatccttatgtgttcacagtaacttcaagtcttgcctccacg

SEQ ID NO: 2760 - DNA, 120 bp, synthetic construct
  source 1..120: mol_type = other DNA
tatctggaaaataagagaacagcagaagtcagagggagcagggttgtattagagtaagaaaataacaatagatggtaacttgaacccacaggaacaaaagaagagaaccagaaatggcaa

SEQ ID NO: 2761 - DNA, 120 bp, synthetic construct
  source 1..120: mol_type = other DNA
aaatatgtggaagttaacatactcttaaaagaaccaggtgtggtggctcacacctgtaatcccagcactttgggaggccgaggcgggtggatcagaaggtcaggagatggagaccatcct

SEQ ID NO: 2762 - DNA, 120 bp, synthetic construct
  source 1..120: mol_type = other DNA
gaattaaacaccatggccaagagggatttctcccaagaacgcaagactggtaacaccaaatcaacagactaaaggacaaaactgcatgattatgggaatagatgtaaaaacatttggcaa

SEQ ID NO: 2763 - DNA, 120 bp, synthetic construct
  source 1..120: mol_type = other DNA
taaaaatcctagaagacaacacatataaatcttcaaggtcttagatctggcagtggattctaacatatgacatgaaaagctcaaacaacaggagaaaacaaatgagatatcatccaatga

SEQ ID NO: 2764 - DNA, 120 bp, synthetic construct
  source 1..120: mol_type = other DNA
gattttggttatggatagaaaactgtaatagaccagaatccattgaattgtatgctttcaatgaatgaattatctcaagaaagcttttaaaacaaaacattaaatgtgaacaaatacaag

SEQ ID NO: 2765 - DNA, 120 bp, synthetic construct
  source 1..120: mol_type = other DNA
cttttacttattaaaaaataactgtagaatagctcaggcagatccttcaggaattatttcagaaggcactattattacagatgacagctgtatgcatgtaattacccttgaagaccttcc

SEQ ID NO: 2766 - DNA, 120 bp, synthetic construct
  source 1..120: mol_type = other DNA
ctcaagcaactcctggccagatcaggataaaatatttccagtatcctttattctttcccagtcaatacctacttctcagacctagccactaccatcacttctataagttttgccataaat

SEQ ID NO: 2767 - DNA, 120 bp, synthetic construct
  source 1..120: mol_type = other DNA
aggacctacccttcttctttgtctacattattcccttagggatccagtcaggtcttcttatctctaaagtgacaacatccaaatttttaacttctgcctgtgtctctctcctctgaattt

SEQ ID NO: 2768 - DNA, 120 bp, synthetic construct
  source 1..120: mol_type = other DNA
agatatctgtatggcttactctctaatcctttatgttctcaaacgttctgaagtttgagacatcttccctgaccactcaaagtactacttctaccctgcacttcctatttccttttgtct

SEQ ID NO: 2769 - DNA, 120 bp, synthetic construct
  source 1..120: mol_type = other DNA
gtggaggtctcagaagtttgaggaaagagcagcgcgaaatagttatctggtaaaaaggttactgaatgtatcagagaaatgtagtaagtgtatcagagaaatgtactaagactgacaaag

SEQ ID NO: 2770 - DNA, 120 bp, synthetic construct
  source 1..120: mol_type = other DNA
cccaagcactgtgctgactgggagtgaaacactgtatgtgttaaaagaagtacctttagaacttctaagactcatttaaatgaggaaatatcagcaaaaaaatatgccttgctatttagc

SEQ ID NO: 2771 - DNA, 120 bp, synthetic construct
  source 1..120: mol_type = other DNA
gattatttcctctggaaagttagcttgcaaatgaaaagaagaaaaccgaatccgcatatggtaatagctgtcctcttcaaaattctactattccatgtagatacttcttcccttaattgt

SEQ ID NO: 2772 - DNA, 120 bp, synthetic construct
  source 1..120: mol_type = other DNA
ggcttttgggggtggggcaggagagaaaataagcagaaaccaaagatccttgaaagataaaaagaatcaggcacatttatagagtgatatttactagaaacatcctgtgctggagtgatg

SEQ ID NO: 2773 - DNA, 120 bp, synthetic construct
  source 1..120: mol_type = other DNA
tgggatacccatgaaaaatggcatgtttaagtaggatcagttcctttcctttgattcttctagatgagatataatttttgggtcatcagcaagttcaggatgtagcttgtgtagcacagg

SEQ ID NO: 2774 - DNA, 120 bp, synthetic construct
  source 1..120: mol_type = other DNA
tatagacatcaaatttatgtattaaacagataaagagctcggaagtgagctctttagtcgactggaagtgtttttctttattatccatctccaacaaaggttcccattccaacagcttag

SEQ ID NO: 2775 - DNA, 120 bp, synthetic construct
  source 1..120: mol_type = other DNA
ggccaacaaagtctgtttcctgtgtatatttcttcctttggaaactgtcctttttcccacttgtctaagtgttccatttgttgctcttaccagaactgcttcattgtctaacaccttttg

SEQ ID NO: 2776 - DNA, 120 bp, synthetic construct
  source 1..120: mol_type = other DNA
gtaactcagtaataacattctgtacagctgttattaaatggccacactgtttatttaatttgagaagaaagttgaggaactcatcaccactaaagaaaggaaacaaacaaacaagcagga

SEQ ID NO: 2777 - DNA, 120 bp, synthetic construct
  source 1..120: mol_type = other DNA
acacaaaaatagaagcagaataattaggcaactaacagagaaatgcatccaagagatgatgaaggaaaacttaaactaaggatctggcagtggcagtcttactgtggggaggaggtagag

SEQ ID NO: 2778 - DNA, 120 bp, synthetic construct
  source 1..120: mol_type = other DNA
gattttggcaatgagaaaacactggtgactagattagcttcagtggcagaagccaatttacagtagaaacaaccaagaaacttaacccaacagaaaagttggtcaaggctattaacagag

SEQ ID NO: 2779 - DNA, 120 bp, synthetic construct
  source 1..120: mol_type = other DNA
ttctaagcccatacagaaattcttacttgtagaagttttgactacatactatacaaagtttcttacactatttctagaaggaaaggttataaaaagcaagcaatgtcagcctccaatgaa

SEQ ID NO: 2780 - DNA, 120 bp, synthetic construct
  source 1..120: mol_type = other DNA
tatgtcccaggttgagactgttcctccagcctactctcagaatgacaagatcactgttgctgagccatgatatagacgatcaggaaataaagtcttgttataagtgactgacatttagaa

SEQ ID NO: 2781 - DNA, 120 bp, synthetic construct
  source 1..120: mol_type = other DNA
gactacaggcacaccccacggcattggctttaaattgcatactttaattctgcaaacatactaagtcagaaaaaagtaaatgcagtgtgtgtatgcattgttgtaacagattattttaga

SEQ ID NO: 2782 - DNA, 120 bp, synthetic construct
  source 1..120: mol_type = other DNA
catgtcccaggcaatggataacatggttaatatatacaccaagctccttaggtcattctgataacttagccaggtaagggaaccactagcataaatcatggttacgaaccataatatgtt

SEQ ID NO: 2783 - DNA, 120 bp, synthetic construct
  source 1..120: mol_type = other DNA
tccttattaaagttaactctattaatttttgagagatttgcttcaacctgccaaagcctttaaaatcttaatgctctatgtctccatctagccaccagtcacatgtagctaccgaaccct

SEQ ID NO: 2784 - DNA, 120 bp, synthetic construct
  source 1..120: mol_type = other DNA
acagatcccacagccatccaaagagtagctggaaatactaggggcaacttttggcttgataaattagaaaaaatgaaccaagtccttgaaaaaccacacattaccaaaactcagccaaag

SEQ ID NO: 2785 - DNA, 120 bp, synthetic construct
  source 1..120: mol_type = other DNA
aaatgggaggaatcactcttcctgatattaaggtttaccatatagttagagtaatcaagacgtggtactttcagagggatagacacataaagaacccagaatagagaacccagattatac

SEQ ID NO: 2786 - DNA, 120 bp, synthetic construct
  source 1..120: mol_type = other DNA
gaaatggctaaaaaaaatcatgctaacaccaaatgattgtgaggatggagagcaaactggatcactcataagcttgctagaaacataaaacagtactgccattctggaaaacagttgggc

SEQ ID NO: 2787 - DNA, 120 bp, synthetic construct
  source 1..120: mol_type = other DNA
cattgcttgacaagttcataatattggaaatgaagtttacatattggtaacataatttctcatacagtaaggctgaaaatagaactgagctacatgagacatgttttcttattgccctaa

SEQ ID NO: 2788 - DNA, 120 bp, synthetic construct
  source 1..120: mol_type = other DNA
aaagtgtctctaatacatcccgcagctatatgttattagataatactagatggcaaaataaaaggtctcagttttgagaaccaaacaaaaggcttgggagacgtgttaatacccatatac

SEQ ID NO: 2789 - DNA, 120 bp, synthetic construct
  source 1..120: mol_type = other DNA
agcacaactctgaaatattttaacagaatgtgcacactcccaagaagagtctatcttaaatagtgctttactgcttcagtatctccacctagctggtaacaactgtcatggactcaaacc

SEQ ID NO: 2790 - DNA, 120 bp, synthetic construct
  source 1..120: mol_type = other DNA
atgaggagtataactcatctttccccaaatgaaaatatatgccagtatgtactccttgtgaaatttctgcacataaaaatctcctcagcctggtacagtagcatacacctgcagtcccag

SEQ ID NO: 2791 - DNA, 120 bp, synthetic construct
  source 1..120: mol_type = other DNA
attgctaagtggcaagagagtaatgagcatgactaaatgtatacaaatcctaactgaacacctcaaaaagatatggtgaaattcctgagttttaaaatctaacctctcaggaagtcaagg

SEQ ID NO: 2792 - DNA, 120 bp, synthetic construct
  source 1..120: mol_type = other DNA
ctcacttggcatctttccatctttggtttgtagcattttattagctccaagttcaagcaacttcaaaactatatttttatgaccctgacgtgctgcccacgttaaagcctgtaagtaggg

SEQ ID NO: 2793 - DNA, 120 bp, synthetic construct
  source 1..120: mol_type = other DNA
tgggtgtgaccatctcgagcagcatacatgattggggtcataagtctcctaaggaggaggaagaaaggaaacatttgtgttaatgctgccattaatctctcattttcattaatttaacca

SEQ ID NO: 2794 - DNA, 120 bp, synthetic construct
  source 1..120: mol_type = other DNA
gtagtttatcatttcccaaaattagagattcaatccttctactcctggaagttagtcaccttctgggcctattccaaggacaccagattttatcagctctacttgggctgaacataacat

SEQ ID NO: 2795 - DNA, 120 bp, synthetic construct
  source 1..120: mol_type = other DNA
ttacctgcataataacccaaatctgctcctctcagtcttccctatttcataaagccaccattaaccacattactcaggcttaagactaggcataattcatgactcttctctgtcattcca

SEQ ID NO: 2796 - DNA, 120 bp, synthetic construct
  source 1..120: mol_type = other DNA
tagccagcggaacaagacaaggaaaaagaaaaatggtaggcctccagatgggaaaaaaagcaaaattgtctttattcacagacagcatgatgtatatagaaaacctgatggactccacaa

SEQ ID NO: 2797 - DNA, 120 bp, synthetic construct
  source 1..120: mol_type = other DNA
cctgcatatttcccacaccttttccttcttaaaccccttcatttagcccaaaaagttggaatggtcttttgaaggcatgagcctggccattctccaattgctagcatttgataaataaaa

SEQ ID NO: 2798 - DNA, 120 bp, synthetic construct
  source 1..120: mol_type = other DNA
ccatgcccagctgctattgtgaatggtgctgtgataaacataatgagtgcagtgtctttttggtagaatggtttattttcctttgggtatatactcagtaatgggatggctgggtcaaat

SEQ ID NO: 2799 - DNA, 120 bp, synthetic construct
  source 1..120: mol_type = other DNA
taatccatcttgaattgatttctgcatatggtaagaggtagggatccagtttcattcttctgcatgtgggtatccggttttcccagtgccatttactgaatagggtatcctttccccact

SEQ ID NO: 2800 - DNA, 120 bp, synthetic construct
  source 1..120: mol_type = other DNA
atttttcctctgaggaaatttcctctgtgctttctctgaatcacacaagtgctgatataaaggccttgtgttgtcacttttaccagttctattttaattaatccagaaattaccagaaat

SEQ ID NO: 2801 - DNA, 120 bp, synthetic construct
  source 1..120: mol_type = other DNA
gcactttctgtttatcatgcgtccataataaatacatgtttccatgtctccttggacatagaatcaccttgttagattgatcaagttctcttagtttcactcccacccactccatctgaa

SEQ ID NO: 2802 - DNA, 120 bp, synthetic construct
  source 1..120: mol_type = other DNA
acttctggaaaggttctccatgtctctacctttcctttatactttccatttctttagccctttgtgttgtattcttggagatttcctcacctctatcttctagtccactactcagctctt

SEQ ID NO: 2803 - DNA, 120 bp, synthetic construct
  source 1..120: mol_type = other DNA
gataaccttgtctatcagtaatgcagattttaggtattgctagagtttcccatctgtttctttctttggcgagcgactctttttccattccagagataacttttttctttcaaaaataac

SEQ ID NO: 2804 - DNA, 120 bp, synthetic construct
  source 1..120: mol_type = other DNA
cttgcataactgaattgccttacagttcccaaaacaatggtaaaactaaaagtgcttacaacaagcatcctttccttgttgctgacattaatgcaaatgctgctagcttctccattaaac

SEQ ID NO: 2805 - DNA, 120 bp, synthetic construct
  source 1..120: mol_type = other DNA
aaatatctagtgctgtcactatgtatgtcctctcaagtactgttggagatagtgtaaatgttttcaattttttcagaagacgatttggtaacacctattgaggctggagaatagggtctg

SEQ ID NO: 2806 - DNA, 120 bp, synthetic construct
  source 1..120: mol_type = other DNA
ccaagaacctggatgtctcacgctcaaggcctatcttcccataacactatcacaattataaatacacatctacctttgtctcagcagctccactttagagatgtgttctatcaaaaaatc

SEQ ID NO: 2807 - DNA, 120 bp, synthetic construct
  source 1..120: mol_type = other DNA
gttttcccagtttttgttcctagagacactttctactacctctaatcttcctatattgtaaatgcctatagccttggaatctcttccgtactgtcaaattcttgacacaaggactgagtc

SEQ ID NO: 2808 - DNA, 120 bp, synthetic construct
  source 1..120: mol_type = other DNA
gttttatatcctcttccactttttgcttttagacatttgccaattagcattggcaagtgctaatgggtagcattagcagaaagcagtaactttaggccttcttatggtgatggggaactc

SEQ ID NO: 2809 - DNA, 120 bp, synthetic construct
  source 1..120: mol_type = other DNA
ccaacagaaaatattaaaaacaaccagaggataaaatctaataccttcaaagaatcaacaataagagtaacagctgacttgttgtgctggacccctactggctccaatagggatggcact

SEQ ID NO: 2810 - DNA, 120 bp, synthetic construct
  source 1..120: mol_type = other DNA
gaaccctaatggcacacccctcagggtaactggctatgtccaattcacaaggttgtccctgtactagagtttccagaatttatatttgtttcattatgactttagtttgtttaaaggcct

SEQ ID NO: 2811 - DNA, 120 bp, synthetic construct
  source 1..120: mol_type = other DNA
tattggtgtccattttgtgttaccgtgattatgttttgtcatcctaactctcagttggaattttttggcagtttggagggtcaagcctgacaaaatactcgttcccaagatgtattttgg

SEQ ID NO: 2812 - DNA, 120 bp, synthetic construct
  source 1..120: mol_type = other DNA
ggcaaatcactctgataagccccttgactgtttccttttttttttttttgactcctttgtctttcatccagcagtgcatacctcttacttatgcagtttttgtttcccttaagtcgaggg

SEQ ID NO: 2813 - DNA, 120 bp, synthetic construct
  source 1..120: mol_type = other DNA
tacgtggtaagccagagtgtccattctgtcattttgtttgcacaggcaggacagttaggtctccaacattttagtctgagctaactaagcatttctttctaatcacagcttgtcttgtaa

SEQ ID NO: 2814 - DNA, 120 bp, synthetic construct
  source 1..120: mol_type = other DNA
agtcaccagcagatgtatttaaaaaaggttttcagaagaaaaatgatccctgattaaatccctgtttaaaatatgaaaatagaggatggaatgaagagagccataaagatgagtatgtgg

SEQ ID NO: 2815 - DNA, 120 bp, synthetic construct
  source 1..120: mol_type = other DNA
ggaaaagttgaccaaaatgcaaatctcagtaactgatagaacacggaagtaaaaaaaaaaaaaaatcaggacagtagtccctgctttatccatgggggatatgctccaagacccccagtg

SEQ ID NO: 2816 - DNA, 120 bp, synthetic construct
  source 1..120: mol_type = other DNA
ggaaccagtggttaagaccaaatattttaaccaaacatgctttatatcattcaaaagatcacccctatcattcaataaattacaaggcatgaaggagctgtgccaggaaccaggggacaa

SEQ ID NO: 2817 - DNA, 120 bp, synthetic construct
  source 1..120: mol_type = other DNA
tatgtgaaagaagaaacttcactacctcctctccataaaagattaaaaagaagagttaaacaaatccaagtgatgcttccaagaaagaaaaatattgttctctctcacctagaaaatgca

SEQ ID NO: 2818 - DNA, 120 bp, synthetic construct
  source 1..120: mol_type = other DNA
gtttcagaagttagcaaggtcatgaagcttatagtaacaggacttgggacataaattctgagtccaagatcattcacaaataagtaatcttcaatttttcttaatagcgtaactcaaaat

SEQ ID NO: 2819 - DNA, 120 bp, synthetic construct
  source 1..120: mol_type = other DNA
caaaccttttgagcaattctacttctggaagtcttctacagaattaacgcgtaccaaggatattatcatcgttatggcaaacaaacatctgatgcttactctgtggctaggcactgttct

SEQ ID NO: 2820 - DNA, 120 bp, synthetic construct
  source 1..120: mol_type = other DNA
ttgtaattccagtctatgctttcagagcaaagatatgtcacacatttacttacagctagaaaacaagttactattgtaagccaaaattacatttttatctactaaactgctcctgtgaca

SEQ ID NO: 2821 - DNA, 120 bp, synthetic construct
  source 1..120: mol_type = other DNA
ccatatttgccagataccgtacactgtgttaaatattgtcagtatcaagatccaagagatgcataagatgtaatttgtgtcctagaggcttaattttaaaaacggctttcaagttgtaag

SEQ ID NO: 2822 - DNA, 120 bp, synthetic construct
  source 1..120: mol_type = other DNA
cagaggctcagaaggaggatgtaatatttgaagaaacgatagatgagagattttctagaactgcaaaatttagaagatgcttgtcatggtatcatgatggagataccttaataatatcac

SEQ ID NO: 2823 - DNA, 120 bp, synthetic construct
  source 1..120: mol_type = other DNA
cttttgtccggcatatccacgctatatatactacacacccaattatcactgacggatctgtctcaattatcagattgacagatcttttcagatcatttcaggtcaccaagaaagatgagt

SEQ ID NO: 2824 - DNA, 120 bp, synthetic construct
  source 1..120: mol_type = other DNA
tcacaaaaatactctataattctagaacagaaaaaatttatagtggtagaaacaagatccggatcacatggttgcttctggtggagagggaactggactggcaagagacacaatggaact

SEQ ID NO: 2825 - DNA, 120 bp, synthetic construct
  source 1..120: mol_type = other DNA
tcaacagcctgaaagtaaattcatctgaagatctgtttttctccttgacatctgaagagtggttcccagatgtattgctggtatcttttggcactttttacaggaatctaaagctcccaa

SEQ ID NO: 2826 - DNA, 120 bp, synthetic construct
  source 1..120: mol_type = other DNA
ctaaagcacatgtcctaattccaaggtataaccagatccaaaagttacattttactaaggattataccatatatgacaggataaaagtttcgttaaaagtttgaggccgggtgcggtggc

SEQ ID NO: 2827 - DNA, 120 bp, synthetic construct
  source 1..120: mol_type = other DNA
ctatctaaagctgtaaagtagcttccaaggttgctgtccaggtatcatagaaactgaaccaatttagaaaaaaacttccagagtgtagcataattatttctgtatatcaggtactagatc

SEQ ID NO: 2828 - DNA, 120 bp, synthetic construct
  source 1..120: mol_type = other DNA
atgaatcccttcagtctccaaagtttatctataattcatttaacttccttcccctcttactcccattacttcaagagaacagaaagtggttaaggacatggacacagccacattgtctgg

SEQ ID NO: 2829 - DNA, 120 bp, synthetic construct
  source 1..120: mol_type = other DNA
taatcaggaattcaatgtaataattaaactggatttgctcatatactcttgttcttcttacactcaaagcacttctgaatggaaattatttagtaacaaggacaaagatggatttcatga

SEQ ID NO: 2830 - DNA, 120 bp, synthetic construct
  source 1..120: mol_type = other DNA
gctctgcattggcaacactagcagcatacataaggggagtccatccatactgaaagttggaatctacactaatgcctgtcaatataaaaacaagcttttaaaagcacactaccaccaaag

SEQ ID NO: 2831 - DNA, 120 bp, synthetic construct
  source 1..120: mol_type = other DNA
ctgggagaaaacattaaaccatcttagtatagacatctactgctagccctacttgtcttctctaacaaatcttcctctttgaactgctttgattgaaagcttatcaatgagatcagagaa

SEQ ID NO: 2832 - DNA, 120 bp, synthetic construct
  source 1..120: mol_type = other DNA
gaaataccctaaaacaggagttaacctgtgaaagtgaggcatcagcagtaaggggaatgacagtgaggacaatggtaaagaaatctttctccttctacctatatctctattactgccttt

SEQ ID NO: 2833 - DNA, 120 bp, synthetic construct
  source 1..120: mol_type = other DNA
aggtaatttaaagttttttttttatttaatacacaaaaaattcatgaagcccaggacagaattatgatgctttacataaagaaactgatgctctctggctgggggcggtggctcttgctt

SEQ ID NO: 2834 - DNA, 120 bp, synthetic construct
  source 1..120: mol_type = other DNA
aagaactgatggaagataaacagggtggcattccaaatgcaagcagagaggaagaaaataaggcagactggactcagtcaacgaagattatgcaggatgatacattaacatttgttgcgt

SEQ ID NO: 2835 - DNA, 120 bp, synthetic construct
  source 1..120: mol_type = other DNA
acttacctttcgacctctttaaagtatttgcttgatgaaatgatgaaattcttgctctgcaaggaatgccttacttgtggcaggagcacactaggatttaacggcaagtaagactagact

SEQ ID NO: 2836 - DNA, 120 bp, synthetic construct
  source 1..120: mol_type = other DNA
tgtctttctaaatgcattcattcaataaatgctagggattacttagcacagccaagtgctactaggtttggggagacaacgtcaaagataaaccatggagccttatggagctcactttaa

SEQ ID NO: 2837 - DNA, 120 bp, synthetic construct
  source 1..120: mol_type = other DNA
ctaagtagtcattgcatttactgagatgggggaagaccagtggataaacgtgaagatttaataggcatccccaaattaacatattcaaaaccaagcagccaagtgtagctgttaagtggt

SEQ ID NO: 2838 - DNA, 120 bp, synthetic construct
  source 1..120: mol_type = other DNA
tgtgatattgatatcagagggtgatttcaggaggtagcatgacccattaggaggttactgtaattgtgaactagagcagtggcagggaaaatggacaggaggagatattttcaaaattta

SEQ ID NO: 2839 - DNA, 120 bp, synthetic construct
  source 1..120: mol_type = other DNA
cctccatcactttattttgagcctgtgtgtgtctttgcatgtgagatgcctctcttgaagacagtatactgatgggtcttggttctttatccaactggccattctgtgtcttttaattgg

SEQ ID NO: 2840 - DNA, 120 bp, synthetic construct
  source 1..120: mol_type = other DNA
attatgttcctgtgtaaactggctattttggctgtcagctcctgttttgttttatcacgattcatagcttctttgcattaggttaaacatgttcctttagctcagcaaagttcattatta

SEQ ID NO: 2841 - DNA, 120 bp, synthetic construct
  source 1..120: mol_type = other DNA
gcataaatcattctgttataaagatgtgggcacgtgtatgttcattgcagcagtgttcacaatagcaaagacatggaatcaacctaaatgcccatcaatgatagactggataaagaaaat

SEQ ID NO: 2842 - DNA, 120 bp, synthetic construct
  source 1..120: mol_type = other DNA
aggtccaaagttccccagagaggcctgggctatccagctttagaagtcatcttcctaagaagtaataatggacatattaaagtaataatgttatcaaaggagaagggataggatgagatg

SEQ ID NO: 2843 - DNA, 120 bp, synthetic construct
  source 1..120: mol_type = other DNA
gctcagatgttacttggaaagtataatgctcacagaagcactctctctctctaggggaatacttgtttccatcatttgttttactctctgtagagggaaacattcctttccaaaggagat

SEQ ID NO: 2844 - DNA, 120 bp, synthetic construct
  source 1..120: mol_type = other DNA
aagtgtagaatcaggaacaccagttaagagtctattataatagtctaggttctcaaccttgtctgctgcttagaattccctggagataattttagccagccccagttgaaaccagttact

SEQ ID NO: 2845 - DNA, 120 bp, synthetic construct
  source 1..120: mol_type = other DNA
ttgttgcatttatttcgttgggggaaagtgggtggaaaagtagggaatatctgtgtgggggaggaggtcgaatattgaaattaagaatatcagtttggacttcataatgtaaagagtgct

SEQ ID NO: 2846 - DNA, 120 bp, synthetic construct
  source 1..120: mol_type = other DNA
ttttctgcctttatagaggaacaggagaaaggaaaagaaggttgagaatgggttttgaattaggcagccaacagtgactgccacaaattcatgtctttcttatgaaagccctatcaaagt

SEQ ID NO: 2847 - DNA, 120 bp, synthetic construct
  source 1..120: mol_type = other DNA
ttgcatttgatagttgggaatatgagatcaagcttgtgtcaaaaagctctgggacttaaacctagatttacatagagccaggccatttgtacttcattagatacctgccagtatagatgt

SEQ ID NO: 2848 - DNA, 120 bp, synthetic construct
  source 1..120: mol_type = other DNA
ttcacatgattggctttctcagaaagtagtctttgcactatagtaaggctagaaacatgccttcagttcatgattttcagttttttctacagacgtctggtgggttatggtgtgctccta

SEQ ID NO: 2849 - DNA, 120 bp, synthetic construct
  source 1..120: mol_type = other DNA
cagagcttaaaccatatcaacaggtgaaggcacagaagtttggatagattaaaacaacttgccctaaatcaaggacccttcaatggaactgaaaggcctgatattctaattcaaaggttc

SEQ ID NO: 2850 - DNA, 120 bp, synthetic construct
  source 1..120: mol_type = other DNA
ggcctgaggtcacttgcctctacagacccaggagttgttagatggcgagggtctaccaggaagtgaggcaccaattttaacatttctacaatgttttataaataaacaaaatgtgatgat

SEQ ID NO: 2851 - DNA, 120 bp, synthetic construct
  source 1..120: mol_type = other DNA
tataagaaacatacaagccttgttaagcttaattacattttaatgggaatggccttaagagtcggatggcaggatccactcagtagcatgggaatgcatacaacagaagaagactcttgg

SEQ ID NO: 2852 - DNA, 120 bp, synthetic construct
  source 1..120: mol_type = other DNA
acccctagacctgtacttgtatctttaacctagtctaatatacatcacatgaataaaaatgacaaagccgtggtccttaggtacctattgctattctcctttagcacaccatcaaccctc

SEQ ID NO: 2853 - DNA, 120 bp, synthetic construct
  source 1..120: mol_type = other DNA
cacttttcttcttttgagagtacagcccagtaaatcacttggacaagaaaactcatctcatgctttcccaggaaacctgacttaaaccagacccatgatccaattttttaagtaccacag

SEQ ID NO: 2854 - DNA, 120 bp, synthetic construct
  source 1..120: mol_type = other DNA
tctgtgtaatcaatccacacaaggcattccagtggaggtccttgttggttacagattgcccatttttacttcaaggtcagggaagtggatagaatttgtaatgaatggtataattgttga

SEQ ID NO: 2855 - DNA, 120 bp, synthetic construct
  source 1..120: mol_type = other DNA
tgtctgatctgtgtcacttagcataatgttttcaaggttcatccatattgtagcatgtatcagaacctgattcctttttatggctgaataatattccattgtatgttttcttttattttt

SEQ ID NO: 2856 - DNA, 120 bp, synthetic construct
  source 1..120: mol_type = other DNA
caccatcccagcttttggaatgttagtttctcggcaagccttgccacagtgggcttaagtgccctgggatctaggtatactagaaaggctgtctagggcacaggactgcaattcctaggc

SEQ ID NO: 2857 - DNA, 120 bp, synthetic construct
  source 1..120: mol_type = other DNA
tttaaacatcacggtggcctggcagaactccctggggaccaatggtgctagtggccacagggagagtctcctgtgtctatagagagaggagagaaaggtggaaagaactttgtattatgg

SEQ ID NO: 2858 - DNA, 120 bp, synthetic construct
  source 1..120: mol_type = other DNA
gggcaaatctaagagttaatggccttaaagatgaggtagagaaagagatacaagtagaaagtttattcaattagataatatcagagattttctgaaacctagagaaacatatcaacattc

SEQ ID NO: 2859 - DNA, 120 bp, synthetic construct
  source 1..120: mol_type = other DNA
catatcaataataacattgaatgtaaatagactaaattctccaatcaatagacatagagtggctgaaaaaaacaagacccagtgatctgttgtctacaagaaacacacttcacctataaa

SEQ ID NO: 2860 - DNA, 120 bp, synthetic construct
  source 1..120: mol_type = other DNA
atcttagagaactaggaaagctaaagcaaaccaaactcaaaattagaagaagaaaagaaataataagaaacagagcagaaataaatggatttgaaataaaacaatacaaaagatcaatga

SEQ ID NO: 2861 - DNA, 120 bp, synthetic construct
  source 1..120: mol_type = other DNA
acaaagatgcccactttcaccactgttattcaaaatagtactggaagtcttagagcaatcaggcaagagaaagaaagtaagggcatccacataggaaaggaagaagtcaaataatccttg

SEQ ID NO: 2862 - DNA, 120 bp, synthetic construct
  source 1..120: mol_type = other DNA
ggagaaaatatttacaaactattaatctgacaaaaaattaataaccataatatgtatggagcttaactctataggaaaaaatctaatctgatttaaaaatgggcaaagatttgaatagac

SEQ ID NO: 2863 - DNA, 120 bp, synthetic construct
  source 1..120: mol_type = other DNA
acatatagggaatgaaattttagagtaaacagaattgaaggattttgctgttgcaggaactaacagatacataatttttcttctgaatagatgaaggtagaaaggcaaaatggttggagt

SEQ ID NO: 2864 - DNA, 120 bp, synthetic construct
  source 1..120: mol_type = other DNA
aagccactgcggacagccagacatactgttttatgttgagagtatatcttcatccttttactttccagcctagggtcttattcctttcatgagactatgcagagcaagtctaatgttttc

SEQ ID NO: 2865 - DNA, 120 bp, synthetic construct
  source 1..120: mol_type = other DNA
gatagtggtagaagtcagaatagtttcttctgggaggagataattattgaaagatgatgggagggaggcttctgttttgctgattttatactctatttcttgatctagtggtagctactt

SEQ ID NO: 2866 - DNA, 120 bp, synthetic construct
  source 1..120: mol_type = other DNA
gactaaagatgaagccctgtagaccatccttattaacttctatcttggctcacagtgatccattagacccttttggacatggtcattcagtcaattatgactagtgctaatggaactcac

SEQ ID NO: 2867 - DNA, 120 bp, synthetic construct
  source 1..120: mol_type = other DNA
aagtgtgcttttccgggatgttgtttgaagcttctttacttttcacttttctcttttcaccagcagagggcaggtaaggaagagagaagaaaatactataaaagtatctcgtcctctatt

SEQ ID NO: 2868 - DNA, 120 bp, synthetic construct
  source 1..120: mol_type = other DNA
ttctaaaatgcaacacgttgatgttatttccttactcaaaaccccatactaactcccttttgccaatgatagtaggtgtgggacttcttttctgccatttcagactctgaacaaggtctc

SEQ ID NO: 2869 - DNA, 120 bp, synthetic construct
  source 1..120: mol_type = other DNA
ttagcatgatgtcctgcaactggcagagtcattcagagacaccagggctctttgtattttttcaggccctcagtatattaaaaactgaaaaatgccagggttacaaaattgtggcatatt

SEQ ID NO: 2870 - DNA, 120 bp, synthetic construct
  source 1..120: mol_type = other DNA
atgggattgctgggtcaaatggtatttctagttctagatccttgaggaattgccacactgtctttcatagtggttgaactaatttacactcccaccaacagtgtaaaagtgttcctattt

SEQ ID NO: 2871 - DNA, 120 bp, synthetic construct
  source 1..120: mol_type = other DNA
ccctctttaataaatggtgttgggaaaactggctagccatatgcagaaaactgaaactggaccccttccttacaccttataaaaaaattaagtcaagatggattaaatacttaaatgtaa

SEQ ID NO: 2872 - DNA, 120 bp, synthetic construct
  source 1..120: mol_type = other DNA
gcagtaagaaaggaaatttggttgtttaaacattaggcatcaagtttttctcctacctccatgcaactgagagatttgatgctttttcaaggagcagggttgattcaaggagcaaggata

SEQ ID NO: 2873 - DNA, 120 bp, synthetic construct
  source 1..120: mol_type = other DNA
tatataaccacatggaatttcatactgaagcccagcaaaacttccattatcctccacatccataatttatccttcactctttctgccaaccacaggtgttggacaatgatttgaggtctt

SEQ ID NO: 2874 - DNA, 120 bp, synthetic construct
  source 1..120: mol_type = other DNA
tattttaccctacaacaatatagtgaaaaagtgtggtcatgggattggttagacctaattcaggactaccaatactagatgtgaggctataggcaggtgtgttaaagattctttggaatc

SEQ ID NO: 2875 - DNA, 120 bp, synthetic construct
  source 1..120: mol_type = other DNA
caactctcatagccagtagttaatattaccttgcaagtttggtatggttgatgaattgcatcctgttaataattgctacagatttttgaataattgcagaccagtttgatggtcctgggt

SEQ ID NO: 2876 - DNA, 120 bp, synthetic construct
  source 1..120: mol_type = other DNA
tccaccacctactatctgcttacctaatttctcatttccagtttatgtatacagtggcttcagaattattacatatagccctgtgggatacaactttgtcaactagagtggtgcttatgt

SEQ ID NO: 2877 - DNA, 120 bp, synthetic construct
  source 1..120: mol_type = other DNA
tagctttgcaagaaactgccaaactgtattttaaagtggctgtaccattgtgccaccagcaactcctgccagtgatccagtattgtcagttttttggattttagccattctaaaaggtga

SEQ ID NO: 2878 - DNA, 120 bp, synthetic construct
  source 1..120: mol_type = other DNA
taactcatttaattcccactacagccctgtgtaatggaagctgttcttcccaccattttataaatgatgaaaccttagatcacactcagtggaagagttctaaagccctatgtggtgctg

SEQ ID NO: 2879 - DNA, 120 bp, synthetic construct
  source 1..120: mol_type = other DNA
gcctggcctttgagatgagtagggagtttgagtgggagtttgagtttcctcttagagaaacagaactgagtgaggcactttcattttttagtttcctagtaccttttgttaaggaaaaaa

SEQ ID NO: 2880 - DNA, 120 bp, synthetic construct
  source 1..120: mol_type = other DNA
tccaagaactccaagttttcttggttcaaagaggtaatttctgtttctaaacactagaaaaaggagaatatgaaggatctgactagtccattgtcacatgccccaccccattttctgctg

SEQ ID NO: 2881 - DNA, 120 bp, synthetic construct
  source 1..120: mol_type = other DNA
aaggcaccttctcttaattaaataaacaaaagagttctatgtggtctagttacacagagatcacagtgattaactactcagctctggagccagacaactgggtttgttcagattctggca

SEQ ID NO: 2882 - DNA, 120 bp, synthetic construct
  source 1..120: mol_type = other DNA
ccatgataccactcagtgatataagtctctaaacagcaaactcttccatgaatggggtggagggaagatggtttttctttccaggtgaacttacatattgccttttctcagatatcagat

SEQ ID NO: 2883 - DNA, 120 bp, synthetic construct
  source 1..120: mol_type = other DNA
atgtatcacatttaatttatttcatccagtggttcttaactggggacaactttgtacctctctccccaacatatttggcaatctctggagatagtcctggatctccagatctatctgtca

SEQ ID NO: 2884 - DNA, 120 bp, synthetic construct
  source 1..120: mol_type = other DNA
agactgtaatgtgtgtttacatcctaggtaatcactgtggcccactgttgaagagctgtggctgttcttacccttctagcttagataaacttataagcacaaccagactacatatatgaa

SEQ ID NO: 2885 - DNA, 120 bp, synthetic construct
  source 1..120: mol_type = other DNA
cctggcccattaatctctttcctgttcctgacatttcagagatacgtttaggatttcaatcatgaccttaagccacatttgaacaattttctggtggataagtcctcattcccacattat

SEQ ID NO: 2886 - DNA, 120 bp, synthetic construct
  source 1..120: mol_type = other DNA
aacagattgggaatggggaagtggatgtggtgagttcaatcacatgtctgggaaaagtcaatagtgaagacagagtctcacaattttttgtcataatggagagatgaaaacacaggtaga

SEQ ID NO: 2887 - DNA, 120 bp, synthetic construct
  source 1..120: mol_type = other DNA
gcattatctcctcttacctccttgcagatttttttttctctttcagtacgtgtcctaagatttctgtgccacccttggagttcactcacctaaacctgaaactaataaagcttggttctt

SEQ ID NO: 2888 - DNA, 120 bp, synthetic construct
  source 1..120: mol_type = other DNA
aaaatacttgttaataagtacctaagtatggtttattggttttcccccttcatgccttggacacttgattgtcttcttggcacatacaggtgccatgcctgcatatagtaagtgctcaga

SEQ ID NO: 2889 - DNA, 120 bp, synthetic construct
  source 1..120: mol_type = other DNA
gcccttgaaggagagctcctccctgtggatgagagagaaggactttactctttggaattatctttttgtgttgatgttatccaccttttgttactccacctataaaatcggcttatctat

SEQ ID NO: 2890 - DNA, 120 bp, synthetic construct
  source 1..120: mol_type = other DNA
tttcacatggccttaccagatatacaggaaacacgtcacatgtttctattgtatgttgttaaatgccttagaatttaactttctgaataggatcccttcagtttgagagtcataaaagag

SEQ ID NO: 2891 - DNA, 120 bp, synthetic construct
  source 1..120: mol_type = other DNA
cagactggtctcttggacttgcttccaagtgacttttgactgtatcacaaaatcaaattcactctgaaaatataaagatttttcatcataatttcctttgttaacagccaagtgctacct

SEQ ID NO: 2892 - DNA, 120 bp, synthetic construct
  source 1..120: mol_type = other DNA
ccacctctgggataggagcccttctgtcttgaacaatgttgtctgaacactaacaaatgttgactttctacaccagtccctcaatagtcttttctatttatccttttgctgaccatgttt

SEQ ID NO: 2893 - DNA, 120 bp, synthetic construct
  source 1..120: mol_type = other DNA
ggcatctgtgtagggcatcttcctggagaaaaacctctgagatgcaatgaggtcaaaaggggaaaacagactatgataaagatcaagttgtttggagatcttgtagaaagattaatttac

SEQ ID NO: 2894 - DNA, 120 bp, synthetic construct
  source 1..120: mol_type = other DNA
attcatattctgtattctatgtgagacgttaagaaggtagaggtggccaagaaggaaattgttgctgcctttatggaacaaattatctgaaacccagctttctcgagggcttcattgaag

SEQ ID NO: 2895 - DNA, 120 bp, synthetic construct
  source 1..120: mol_type = other DNA
ctcctatataacctgctaactgatgtctgaacctcctgataacttcactcctttaggcagtgcttttcacatcacgggacacaacatatgagagatcatagaaattcaatgtggtatgaa

SEQ ID NO: 2896 - DNA, 120 bp, synthetic construct
  source 1..120: mol_type = other DNA
aagtctctgttgaccatttcattgcctctttttttggaatatgcatcttttaatgtgtccttcaaggcaaaggctctatcttatctatcttgtgtcttgcattttcccagggcaatgttt

SEQ ID NO: 2897 - DNA, 120 bp, synthetic construct
  source 1..120: mol_type = other DNA
catatgtggcttattattgttccctgagtgttgtacaactctgttatgctgtgatgaaacctcatgcaaacaggtatgtcaaagatatgatgggctgttaactgagcttggcccacatat

SEQ ID NO: 2898 - DNA, 120 bp, synthetic construct
  source 1..120: mol_type = other DNA
atgatctcatattctacttcatctttatcttcattgtcaactgtcaggtagcaatatatgatggaagaagcatgtactttggaatcagacagacctggctggaatcctaactctgtcact

SEQ ID NO: 2899 - DNA, 120 bp, synthetic construct
  source 1..120: mol_type = other DNA
ctgaaatgtcatgcagtgcataactgtatcttaaatactcaaagtatcacctttgtttgtttgtccccttgtgtgcatcatcctaacgtggaatttctctgttgattagggccagcgtat

SEQ ID NO: 2900 - DNA, 120 bp, synthetic construct
  source 1..120: mol_type = other DNA
aatattacacctgccttgtcctcaagaagttagtcttctgagggaaagaaattagcaaacaaattgtaatctcagttatgtgccatgttccatgctgggcacaggggatacagtagttta

SEQ ID NO: 2901 - DNA, 120 bp, synthetic construct
  source 1..120: mol_type = other DNA
aaaagggatttaaagcaaggcttttgaggtagagtcttattaattccttggtaaaccttgagccaattgttgtctatgttctctgcctctgtcttgctccttccttctgggattcactgt

SEQ ID NO: 2902 - DNA, 120 bp, synthetic construct
  source 1..120: mol_type = other DNA
ggttcatgccaggcagattcctgactcctataacccagagcttatcagagcatttatgtccccaaagagaaatgtcacctccatctttcaataaacactttagcaaagaaaaatcaagta

SEQ ID NO: 2903 - DNA, 120 bp, synthetic construct
  source 1..120: mol_type = other DNA
cctctcaagtgcttgagtctttgaaatccaagtcatgtgagtgaattagatacagctgttagaagtggcctttcaatgccaatggtacacattccttggtttctttacgatactattgct

SEQ ID NO: 2904 - DNA, 120 bp, synthetic construct
  source 1..120: mol_type = other DNA
ttgcaccacatgactgtctaatttataattttctttagagacagggtcttgttatgttgtctaggctgctctcaaactccagggctcaagtggtcctcctcccacagcatcctaaagtgc

SEQ ID NO: 2905 - DNA, 120 bp, synthetic construct
  source 1..120: mol_type = other DNA
aatgctttatagacaacattgaatttggctctcatgaacatcaggaatagtggtcatggtagttattatctccagcaggaactgtagctgagagatcttcagagctttttccaaggcgat

SEQ ID NO: 2906 - DNA, 120 bp, synthetic construct
  source 1..120: mol_type = other DNA
ttaagctgaccaagtgattactgcttataaattcaccattttatggagaagaagcaaacactgctaaataccttgtggaatcagaggaggggaaattagtaacttgaccccaatactgcg

SEQ ID NO: 2907 - DNA, 120 bp, synthetic construct
  source 1..120: mol_type = other DNA
agtttaaaacttatacatagtaaaatctgtatgccttagggatctctgtttgctatcccatagtgaatgattaattagtttctgttagaaatagtcagaactaggctgggtgtggtggtg

SEQ ID NO: 2908 - DNA, 120 bp, synthetic construct
  source 1..120: mol_type = other DNA
gaaacacctggatgatcactgatttctagtggaagaaatgctgaaaagtccttactgtgcatttaaacattctaggtttaatatactcagggtttttcaaaagaaagggtggctggagtt

SEQ ID NO: 2909 - DNA, 120 bp, synthetic construct
  source 1..120: mol_type = other DNA
cattttcctttttactaaatgttctacaggttcttttctttccatccacacacagtgccattaccctcattctaagcctttcaaacatctggcagtaagtgatctgctgcacttagctct

SEQ ID NO: 2910 - DNA, 120 bp, synthetic construct
  source 1..120: mol_type = other DNA
tatcataaattgctgtcccagatttttttacagcctaattgccacctgtatgttcgactttccttctgttctttatgttagatactgggatagtatgcaccaggtgggtgtgccatcact

SEQ ID NO: 2911 - DNA, 120 bp, synthetic construct
  source 1..120: mol_type = other DNA
agtgagattggatatgagggccactggcaaagttttgccccagaacagtgtcaaaatgtttgcatttggcatagccctttctctttttgttctgaatggctttgctagaatatcttttct

SEQ ID NO: 2912 - DNA, 120 bp, synthetic construct
  source 1..120: mol_type = other DNA
caaatcaagtgaatatctgttcctcctctctttattttagctggaccagaccaattttgaggaaaggatacagacagcgcctggaattgtcagacatataccaaatcccttctgttgatt

SEQ ID NO: 2913 - DNA, 120 bp, synthetic construct
  source 1..120: mol_type = other DNA
ccttttgattgccagtgacagaaacccaatttactagcttaagtaaataaaaggaacgaatttattggctcatgaagcctgaactatgtgaagacctaggtggagaactggccttaggaa

SEQ ID NO: 2914 - DNA, 120 bp, synthetic construct
  source 1..120: mol_type = other DNA
ccactatgcccagctttgaatatctaagttttaattggatgctgagggaatgattaatcagagtagggctgggttaattgaaaaatgtgatacatttgtatttatggccagatagagaac

SEQ ID NO: 2915 - DNA, 120 bp, synthetic construct
  source 1..120: mol_type = other DNA
ctttcatttacatctcagctcctgaagtatggtttccaccatgttcctaaaactacattgcccagggtcactagagacctcttatgaaatataacaacacctttctacattacttccgtg

SEQ ID NO: 2916 - DNA, 120 bp, synthetic construct
  source 1..120: mol_type = other DNA
agccactgccccggcctattactcctttagagtgatttagagccatgtttacttatggtaacttgacagtaatgggaataaccactgatgaaacgtaaagcctttgtctaattgtttacc

SEQ ID NO: 2917 - DNA, 120 bp, synthetic construct
  source 1..120: mol_type = other DNA
atgaatccaactccaaacactaagaaaccacctaaaactctagtaaggataagtaaaaatcctttggaactaaaatgtcctggaacacgggtggcaatttacaatctcaatgggctcagc

SEQ ID NO: 2918 - DNA, 120 bp, synthetic construct
  source 1..120: mol_type = other DNA
gttctccattgcatgctgcttctattgattaacctaagcactactgagtagaagctggaagaggggtctaattagaaggcccctttctatgctctgcttggcttgtaaaataatttattt

SEQ ID NO: 2919 - DNA, 120 bp, synthetic construct
  source 1..120: mol_type = other DNA
agaaagactaaattgttcttaaacttctcaagcttaaaaatatcccagcaaaagagatcgtaaaagcccttcatggcgtattaattatccatgcatgggggtgagtggaaaggtactcct

SEQ ID NO: 2920 - DNA, 120 bp, synthetic construct
  source 1..120: mol_type = other DNA
aatattattagctatgacttctcaccattaactatgcacttgctttttcttcatctgactcagcagccagatagatgcaacattgtctttaacatttaagactcctagcaagtccgggca

SEQ ID NO: 2921 - DNA, 120 bp, synthetic construct
  source 1..120: mol_type = other DNA
cagcccacagagaaaatagatggagaatgtttcttttcagaccttggcaggtgtcagattctcagttaatctctcctagatttgaaaaaaaaaaaaaaggtctagaaagggagagcctgg

SEQ ID NO: 2922 - DNA, 120 bp, synthetic construct
  source 1..120: mol_type = other DNA
attatatagccaaagttgagaactatttgtagacaggcatcagcatgatcacttaatgatttgacttttgctagatctaaggtgaggaaattggagagtggtatccataggaagaactgt

SEQ ID NO: 2923 - DNA, 120 bp, synthetic construct
  source 1..120: mol_type = other DNA
gtataaggaaggggtccagtttcagttttatgcataatggctaggcagttttcccaccaccatttactgaataggagatcttttcctcattgcttgtttttgtcagatttgtcgaagatc

SEQ ID NO: 2924 - DNA, 120 bp, synthetic construct
  source 1..120: mol_type = other DNA
gagaagtaaccaggttgtgttataacagtttgtttttgatttagggttatcagtgagggtggcggtggggaggggactttggagtctaactgtctagttcaaatattagtttttgtttat

SEQ ID NO: 2925 - DNA, 120 bp, synthetic construct
  source 1..120: mol_type = other DNA
agtttgctgagaatgatggtttccagcttcatccatgttcctgcaaggacatgaactcatccttttttatggctgtatagtattccatggtatatatgtgccacattttctttatccagt

SEQ ID NO: 2926 - DNA, 120 bp, synthetic construct
  source 1..120: mol_type = other DNA
aacatatgttatataataatatagtaatatttattctaaataaatatataatactataaataatataataatttatatatatgattataatatataataggctatattatatattattaa

SEQ ID NO: 2927 - DNA, 120 bp, synthetic construct
  source 1..120: mol_type = other DNA
attgacactcacttttaccctgccaaaagcaaaatcttaaacttttgctttagtatataagccagcattcattgtatcctatgatgggttctgagtgtaggtgtatttgctttcttccat

SEQ ID NO: 2928 - DNA, 120 bp, synthetic construct
  source 1..120: mol_type = other DNA
actctatttagaattcattgtgatgcatgtatgaggtagaaatctaatttcaaaaagatgagtatccagtttgtccatcatttattgcatgatctctttctccactgaattaaaatgccg

SEQ ID NO: 2929 - DNA, 120 bp, synthetic construct
  source 1..120: mol_type = other DNA
ttaaaatgataatggtgattttattaagtgacctcacacaatagaaaacagtgtagccttagaagttttccaagtgaccattctacttagaaacaaccctgctttgggatcagaactgta

SEQ ID NO: 2930 - DNA, 120 bp, synthetic construct
  source 1..120: mol_type = other DNA
caattagctttctccacctcttagtttatcagtgaggaaaactgtccagagcgcggaagagactaaaataacacagccaatgtaggtaatgtgctggataagaatttggaattcacgatt

SEQ ID NO: 2931 - DNA, 120 bp, synthetic construct
  source 1..120: mol_type = other DNA
tgtaaacatgcccttccagagtaatgctaccagttctttgtgaaatagctactgttgttcaaaggatgactatgtcctcttcggttgaggaaagatgacaacaaactcagtaatgacatg

SEQ ID NO: 2932 - DNA, 120 bp, synthetic construct
  source 1..120: mol_type = other DNA
acagtgaacaagaaatgatgctttgtctggtatgcatggtaaataatgccccttgctctctgcttcatgatcacatgtgatacttctaacatagatagcacatgtaaatccagtggcctt

SEQ ID NO: 2933 - DNA, 120 bp, synthetic construct
  source 1..120: mol_type = other DNA
gataggaggttggcaattttctttttagcacctgcctgtctgctatcattcaaactcacatttaaaatgtggctatgtgagatgagagaactataatattccaggtttgtgattagtttg

SEQ ID NO: 2934 - DNA, 120 bp, synthetic construct
  source 1..120: mol_type = other DNA
aaagacaccacataccagaatctctgggatgcattcaaagcagtgtgtagagggaaatttatagcactaaatgcctacaagagaaagcaggaaagatccaaaattgacaccctaacatca

SEQ ID NO: 2935 - DNA, 120 bp, synthetic construct
  source 1..120: mol_type = other DNA
atgctaaaaactctcaataaattaggtattgatgggacgtatttcaaaataataagagctatctatgacaaacccacagccaatatcatactgaatgggcaaaaactggaagcattccct

SEQ ID NO: 2936 - DNA, 120 bp, synthetic construct
  source 1..120: mol_type = other DNA
aagctgaaactggatcccttccttacaccttatacaaaaatcaattcaagatggattaaagatttaaacgttagacctaaaaccataaaaaccctagaagaaaacctaggtattaccatt

SEQ ID NO: 2937 - DNA, 120 bp, synthetic construct
  source 1..120: mol_type = other DNA
aatgacagctctatatgggttagggtttcttgtggggatgacattgatgtagaaagcatggtcatctattgagaatgatggggctggaggtattggatacttgaggtttagaaaatacat

SEQ ID NO: 2938 - DNA, 120 bp, synthetic construct
  source 1..120: mol_type = other DNA
cctccctcccattcccagctctgctttgtgtagttgccttgagaagctaagttcattctgaaaataatgccattgcacaaaacacttttgaaagttctagtttgaaattacatcaggtca

SEQ ID NO: 2939 - DNA, 120 bp, synthetic construct
  source 1..120: mol_type = other DNA
cctacaaatttaaagtttttggaacagcacgtgcattgaacccataagaacctactctgcttttctgcatgtattgtccagacaagagaccaaattgccgaggcatcatttaggtgaatt

SEQ ID NO: 2940 - DNA, 120 bp, synthetic construct
  source 1..120: mol_type = other DNA
tgaacactgcttcaaaatttctaaaataggtaaatcacgatctctaaactggagggttgtccaaccactagggacaatagagtactgatatttagtggtcagactgtaatgcgggaagag

SEQ ID NO: 2941 - DNA, 120 bp, synthetic construct
  source 1..120: mol_type = other DNA
aagccttgtgcagaactcaaagtcactcgagattaagcctgttactaagttatgtgcaatttagctcagtggatttcccccacttcatattgctctgataatgttttggaattaactgcc

SEQ ID NO: 2942 - DNA, 120 bp, synthetic construct
  source 1..120: mol_type = other DNA
ggcactattgttataaattatacaactggaaaggcggagttttcctgggtcagataatagtaattagtggttaagtcttgctcagctctagcttccctattctggaaactaagaaaggtc

SEQ ID NO: 2943 - DNA, 120 bp, synthetic construct
  source 1..120: mol_type = other DNA
tctgccttctgtggacttggtttcctgatagtccttgccctttttcaggctgggctagggagaatgatgatgaagtacaggtagcaacctattttcataacttgaaagttttaaaaatta

SEQ ID NO: 2944 - DNA, 120 bp, synthetic construct
  source 1..120: mol_type = other DNA
aaatagagatacccaccgctcataggctgtcataagggatagagatagcatatggaatgagtctgtacagcgtctggcacataggaggcatttaccaaacagtagttattatttttgtta

SEQ ID NO: 2945 - DNA, 120 bp, synthetic construct
  source 1..120: mol_type = other DNA
ttaactcgggaatgacatagggtaatattcacagattgggttcctataaatcctccacttgaagtgaagtcagttcaagtaatgaaagctacctcctgagatagaatcagtacttggcac

SEQ ID NO: 2946 - DNA, 120 bp, synthetic construct
  source 1..120: mol_type = other DNA
actcgaaaaggctagaagtgttgacataaatatgggacagcaagagttgctcctactcaagagagcaaatataatgttctggaagagattggcagaattcacatcaaaggagtgattact

SEQ ID NO: 2947 - DNA, 120 bp, synthetic construct
  source 1..120: mol_type = other DNA
ccacctgcaacttgaattaaaagaaccacttgggtttttttttttgtttcaaacgcaaatcctggaaacctactgagactcattcagtcagtatctctaagaggcaagcttgagactgta

SEQ ID NO: 2948 - DNA, 120 bp, synthetic construct
  source 1..120: mol_type = other DNA
tgcgcatggcggtcactcggcaatttccctgggctgtacaaacatggtatgactctcttggagcaataaacaaaatacaggtaatgtaccataatgctgcattatatactatgatttaaa

SEQ ID NO: 2949 - DNA, 120 bp, synthetic construct
  source 1..120: mol_type = other DNA
atctagaaaaccaaactgggagaaaatgagagaaaccaaaagagaggtagagaggagcagagaagaaaatgaagaagcaaggcaaggaccaggctttttcattatttcttatggccaaga

SEQ ID NO: 2950 - DNA, 120 bp, synthetic construct
  source 1..120: mol_type = other DNA
tcatcctaatggcgaataaaattagaatgatgatataactggtagaactggaaggaggatcactcacttattttctagattaagaagtagaggaatggccaggtgctcatggttgtaatc

SEQ ID NO: 2951 - DNA, 120 bp, synthetic construct
  source 1..120: mol_type = other DNA
gtttgacattttctactactttcaggtcattattttcctactctggtgcaaaaaccctcaattcctgtctcactccatctaatcaaataggtagcatgcttgagcccttactatgtgcca

SEQ ID NO: 2952 - DNA, 120 bp, synthetic construct
  source 1..120: mol_type = other DNA
ttaccatttccctaaaggctattccagatttttatcacattcacaaaattcccgtcttttctcaggatctgttcacccccagtagatagccttgtctcccacaatacatggagaaaatag

SEQ ID NO: 2953 - DNA, 120 bp, synthetic construct
  source 1..120: mol_type = other DNA
gcatctctggcttcagtttcttccttgaacttcatacatatgtttccaaatttcctgcgtgtacctcaaggttcttgttcatcacttcccaagcttcataaacgcactcattttagtgta

SEQ ID NO: 2954 - DNA, 120 bp, synthetic construct
  source 1..120: mol_type = other DNA
atcagaaataaaagttattagtaacaacagtcttccactggtacaagtgcttattggataaaagtcccacttctaagcatgatactcacaacttttaggttaatagcctttgtcaccttg

SEQ ID NO: 2955 - DNA, 120 bp, synthetic construct
  source 1..120: mol_type = other DNA
attgccttaggtttgaaatctgggtgaaataagatactgcctccttcagtatttctgcctttgcttttatgggagcctctttcaagaaaaagtcattctctcatggtccctttgtttgag

SEQ ID NO: 2956 - DNA, 120 bp, synthetic construct
  source 1..120: mol_type = other DNA
ggtgctaccagtgtgatggagtagaattcagatttgggtagtgactttaaagctgtgtgactttagtcatttaactgctgagtcacagtctacagctttgaaagaggaggattataaaat

SEQ ID NO: 2957 - DNA, 120 bp, synthetic construct
  source 1..120: mol_type = other DNA
gtgggatagttttttgaggaaatacataggaatgttaatttattcagtggtcatcctcttctccatatcccaccctaagaacaacttaacctggcatatttggagatacatctgaaaaaa

SEQ ID NO: 2958 - DNA, 120 bp, synthetic construct
  source 1..120: mol_type = other DNA
gcaccactgtaccctagcctaggtgataggctcaaaaaaaaaaaaaattggtgtttgcaatgctaataatacaatttggttgtttctctctccagttgttttcctacatacgaaacagct

SEQ ID NO: 2959 - DNA, 120 bp, synthetic construct
  source 1..120: mol_type = other DNA
gggtgggggagccccataaatgttgaataataggggtttgattagataaattttggtgtagttctataatggcgtgttattcagccaataaaaggtttgttaaagaatgactgtgacgga

SEQ ID NO: 2960 - DNA, 120 bp, synthetic construct
  source 1..120: mol_type = other DNA
attattcctttctttactgtctctcatctgtccattttccattctcctgcattccctcatccaaccaaggtagccaatccaggtaactttttttagtatcttcccagagatgtttctctc

SEQ ID NO: 2961 - DNA, 120 bp, synthetic construct
  source 1..120: mol_type = other DNA
ggcttcctataagtggtcaagcatttgtgtacttgtgattttggtagatgttgtcaaatgtccttccctgaaatttgtaccaattcgtactcatgccatacactctaaatagagtgctga

SEQ ID NO: 2962 - DNA, 120 bp, synthetic construct
  source 1..120: mol_type = other DNA
gtgatgatggtggcttgatccaggtagtagtggaagtagtatagtaggaagtgatcagattcaggacatgctttgaaggaagatccaataggattaatggataagttgaacaatggcata

SEQ ID NO: 2963 - DNA, 120 bp, synthetic construct
  source 1..120: mol_type = other DNA
cacagtaaagagaaatgtaaataaacataaaaatgtagtattaaaccataatggcataaaactaattgtagtacatatggtactactgtaataatttggaagccacttcctgttgctatt

SEQ ID NO: 2964 - DNA, 120 bp, synthetic construct
  source 1..120: mol_type = other DNA
tattgttacccaataaaaaaaatttggaaacttgtcttcttttcccctgattctgtttaaatagcactggagttacctgttttgaattttttttccaagcggtcccttatgagttttctc

SEQ ID NO: 2965 - DNA, 120 bp, synthetic construct
  source 1..120: mol_type = other DNA
atatttaggtcttctacatcttcacttatcttttttctacttgctttgccattaacagataaagttgaattaaaggcttctactacatacatttctccctgttattccttataggttctg

SEQ ID NO: 2966 - DNA, 120 bp, synthetic construct
  source 1..120: mol_type = other DNA
cagtggctatacttaatactaataactttatgttaaatttttcattctatgtgactctagttcactaatatgagctctgataaaatcagtgctttttcgaggttaggagatcaagaccat

SEQ ID NO: 2967 - DNA, 120 bp, synthetic construct
  source 1..120: mol_type = other DNA
cacttctgcttaggatgataattggaggcaagtgaatcctgagcgtgatttgataatgacctaataatgatgggttttatttccagacttcacttctaatggtgattatgggagaactgg

SEQ ID NO: 2968 - DNA, 120 bp, synthetic construct
  source 1..120: mol_type = other DNA
ggaatgagcattgatctgccagcagagaattagaggggtaaaattgtgaagatattgtatccctggctttgaacaaataccatataacttctagtgactgcaattctttgatgcagaggc

SEQ ID NO: 2969 - DNA, 120 bp, synthetic construct
  source 1..120: mol_type = other DNA
acagggttgtattatcatcaccatatttttggcctcttgaaaagaaatcctgtgcctattagcatccaattaccgttcctttgtagctaagtctcccccattccagctttaaacaatcac

SEQ ID NO: 2970 - DNA, 120 bp, synthetic construct
  source 1..120: mol_type = other DNA
tgacataggagaaatacccctgagagacagttcttattagtgactactgtgcagaaaagatggaggttggtgtaattaaggagaaggaaagccatgaagccaaagtattatgaaaaagca

SEQ ID NO: 2971 - DNA, 120 bp, synthetic construct
  source 1..120: mol_type = other DNA
caggaatccagatatggtcatgatggacaggaagagacaagagttacatagaggaattctgggaagataagaaatgtcatttttatgtactgtttgcatccatcagacaaggcatcagga

SEQ ID NO: 2972 - DNA, 120 bp, synthetic construct
  source 1..120: mol_type = other DNA
gatgattacatgacagcacgtgattgctgggagtaacagacaaaagtaactgaaagtgctcggttatcttgacagtcaaaatcaaaagtgtcccctattttcagtgacctaagagtttct

SEQ ID NO: 2973 - DNA, 120 bp, synthetic construct
  source 1..120: mol_type = other DNA
attataattgtattttgttattaaaagggggacagagtacactgttctcttgcctttttaatttccagactaccacttctcctgcacttgacaataccgcagtctaccacgtagtcccat

SEQ ID NO: 2974 - DNA, 120 bp, synthetic construct
  source 1..120: mol_type = other DNA
cctcctgctttccaggtctggtaaaaactaacctgtaagaacttgaaacttagcctttgaatggtcaatccaccactgtaggagaatttatgaatgttcagttgagagaactgaaaataa

SEQ ID NO: 2975 - DNA, 120 bp, synthetic construct
  source 1..120: mol_type = other DNA
agacatagaaggaacctcagaaatctctggctgaatatttccatctgcagatgatcatgtcattaggcttctgactctatagccatagaaaaatattcatgaagacctttcaggaaggga

SEQ ID NO: 2976 - DNA, 120 bp, synthetic construct
  source 1..120: mol_type = other DNA
ctgaactttacactgggggccatgggactcactgaatggcattaaatttgagagtggtcatatgaccagatttgcattttacaaagattgtcattgactgcaacatgaagtatggagtat

SEQ ID NO: 2977 - DNA, 120 bp, synthetic construct
  source 1..120: mol_type = other DNA
actaagagccaggagggaaaactttcaagagagtattgcattatggaagggaagaagagagaacattttaaatgatacgcaatgctcaataatggtatccgctttggagaggccaagtaa

SEQ ID NO: 2978 - DNA, 120 bp, synthetic construct
  source 1..120: mol_type = other DNA
aaaaaaagaggcagaaagacagaaggtcctccactaactttcacgtgccatgtaaccagcgaaatccaattattttacagcattctagctatagaagagtttgggaagcgtagtgcttag

SEQ ID NO: 2979 - DNA, 120 bp, synthetic construct
  source 1..120: mol_type = other DNA
ccagggagctggaaaacatgttaggaaatccagagcaggaacagatttcaagatagcacaataatatagcagtgaagtactgagaaaagagtttttttcacgggttggatttattctagc

SEQ ID NO: 2980 - DNA, 120 bp, synthetic construct
  source 1..120: mol_type = other DNA
gctgtatacaaaaatgttacttcattctctctctctttataatactcttggctctcttacgttctctcacacactctactcttcccttcctctgttctttctacttgttccctctgctcc

SEQ ID NO: 2981 - DNA, 120 bp, synthetic construct
  source 1..120: mol_type = other DNA
tttgaccctctctagtactctttatctaagtattctcaagtgctttacaatctcaaacagacccaatgtgttgtatacacagaatcctttgaagctgacatttgcctttctgaccagctt

SEQ ID NO: 2982 - DNA, 120 bp, synthetic construct
  source 1..120: mol_type = other DNA
tcatatgacaacattcctattttcttaactgccttgataggggcgaagacaaattctaagtaggactttttaccccattcttcttaccatcattctttcacaaaacccccagctttagac

SEQ ID NO: 2983 - DNA, 120 bp, synthetic construct
  source 1..120: mol_type = other DNA
atttcatatcctttaccaattatctttttggtaagttattgtggtggccatgagatgtgccttacagaggccttgctagagggaatgtgattgaatgagagccccagatgctgtgtatta

SEQ ID NO: 2984 - DNA, 120 bp, synthetic construct
  source 1..120: mol_type = other DNA
gtagtccctccttcccctattgtcattctgacatattttttctaggttccgatctatgcatgtgtttctttatggaagagttggccctttgtatctttgagtttcaaatccatggattca

SEQ ID NO: 2985 - DNA, 120 bp, synthetic construct
  source 1..120: mol_type = other DNA
caatgtggctgaagggtaaggtggatatagaggagtgctgggaggtgaggctgaagaaataagctaggaaatgtctttttatgccattttttaaagtttggactttattctgaagttcac

SEQ ID NO: 2986 - DNA, 120 bp, synthetic construct
  source 1..120: mol_type = other DNA
agtcagcaccccaaccctcatgttgtccaagggcgttgtccaagggtcagttgtaattggtattttggatagcagctgtggtaaattctggttagatgtactatatttataaatgaaact

SEQ ID NO: 2987 - DNA, 120 bp, synthetic construct
  source 1..120: mol_type = other DNA
aagagtgcatgctttgtagacaaattgccttagttagaatcctggctctatcatctattagctatgttatctttgggataacattcatcttttcttatagatatgcttaaaacagtgcct

SEQ ID NO: 2988 - DNA, 120 bp, synthetic construct
  source 1..120: mol_type = other DNA
gtaggtcatttttatgaggaggggtgtggatagtaaatgccagggtaaatcacatagcatctaataaacgtatttatgaactacaaaagcttacactttcagtctagtctagtccagact

SEQ ID NO: 2989 - DNA, 120 bp, synthetic construct
  source 1..120: mol_type = other DNA
tagtacatctggcaaggtcatgcaaacctgggacttgagcttctgattctaagtccagtgctttttgtgtacatcatctcttgtacataccttatgatgatatgctaataaaagctacgt

SEQ ID NO: 2990 - DNA, 120 bp, synthetic construct
  source 1..120: mol_type = other DNA
acaataagccagacagaccagggttcaaattctgggtctcacattatccaattcaatattccagctttgttacttattgagcaaccactacaagcacagtttacatgacatctgatagct

SEQ ID NO: 2991 - DNA, 120 bp, synthetic construct
  source 1..120: mol_type = other DNA
ggaaagaaggaggggaatactttagttccattctccctcctcctatttccttgacttgtttaaaatataaatgttatagacacctaagatagaaatttgactgaaacagcctcttaatta

SEQ ID NO: 2992 - DNA, 120 bp, synthetic construct
  source 1..120: mol_type = other DNA
gagtttttccaatgttatcttctagaatgcttatgttttctggtcttagatttaagtctttgattcatcttgagttaatttttgtataaggtgagcattgaggatccagtttcattcttc

SEQ ID NO: 2993 - DNA, 120 bp, synthetic construct
  source 1..120: mol_type = other DNA
ttgattctcagcttggttgttgtcagcagggacattttctaaagtatagactgtagttccttatcttctatctgtttcttactgtccccttcagtattcttgtccttttttcccgctatt

SEQ ID NO: 2994 - DNA, 120 bp, synthetic construct
  source 1..120: mol_type = other DNA
agaaataaagacctatgttttacatgtctcataaccactgaaggtccttctcataagcagtgcttatgggtattaacgacctctctatattttacttctccagtgcctaagtagccgagt

SEQ ID NO: 2995 - DNA, 120 bp, synthetic construct
  source 1..120: mol_type = other DNA
gccttggacccatggaagcccagtgaagatacttagatcctgcaggggtgtgaataatgttcttttagtttctcttcttaggaggtttgttcattttgggagatttcttttgaaaagagt

SEQ ID NO: 2996 - DNA, 120 bp, synthetic construct
  source 1..120: mol_type = other DNA
gggggaggaggtcccttagtagaaacactcttggtccaagcattttaaagctgtcaaagagatgtaaatatagataatgtatgtcaaggagagagctttgtggttaaactgtaactttca

SEQ ID NO: 2997 - DNA, 120 bp, synthetic construct
  source 1..120: mol_type = other DNA
cttatttctaatctcataagaaacttgtcatagatgtgagggagagaattaagaacagagtgtggggaagaaactgtgtacattttgatgggatccattatgtagctcttgcatactgtc

SEQ ID NO: 2998 - DNA, 120 bp, synthetic construct
  source 1..120: mol_type = other DNA
ctgtcccatcatagattgcattttacctcttgagaaatatgttcaccattgttggtatggcagaatgtagcatggtattaactcaaatctgatctgccctactgggccaggattcaagat

SEQ ID NO: 2999 - DNA, 120 bp, synthetic construct
  source 1..120: mol_type = other DNA
acagagctcaggacttatatttccttggaactcctgttagggtccaatgtacatgaaattccctagacagacagacagtcagttatatggcttgatttcaaagtttcaaaatgatttaat

SEQ ID NO: 3000 - DNA, 120 bp, synthetic construct
  source 1..120: mol_type = other DNA
atccaatcaactctatacgaaaattttccattgtgcaaaagactcccttacaaatgaatggcatcgaagaggattctgatgagcctttagagagaaggctgtccttagtaccagattctg

SEQ ID NO: 3001 - DNA, 120 bp, synthetic construct
  source 1..120: mol_type = other DNA
tgccttggatgaaatgagccatgggcagggttgtaatgaattgatatgtttaatagtatagatcatttgtgaataatatgacctttgacaagacacaagccattaacatctgtaggcaga

SEQ ID NO: 3002 - DNA, 120 bp, synthetic construct
  source 1..120: mol_type = other DNA
cctaaccagtgcactatatcccaattccataggagcccttctttgtgattcatagcactttcccatgagttttgttgattttgtgagaaacaaaactctttttcctttggactgtctgga

SEQ ID NO: 3003 - DNA, 120 bp, synthetic construct
  source 1..120: mol_type = other DNA
gatgatatggagagcataccagcagtgactacatggaacacataccttcgatatattactgtccacaagagcttaatttttgtgctaatttggtgcttagtaatttttctggcagaggta

SEQ ID NO: 3004 - DNA, 120 bp, synthetic construct
  source 1..120: mol_type = other DNA
gccccgcgagccccaggcagtgaggggcttagcacctgggccagcagctgctgtactcgatttctcactgggccttagctgcctccctgcggggcagggctcgggacctgcagcctgcca

SEQ ID NO: 3005 - DNA, 120 bp, synthetic construct
  source 1..120: mol_type = other DNA
acttactatagcagatgagctaaagaaaagaaaaaagtccatgcgtaatctttgtgatatgtgccaccaccaataagcaaaattgttctcttattcaaaaggttggacacagctgctcta

SEQ ID NO: 3006 - DNA, 120 bp, synthetic construct
  source 1..120: mol_type = other DNA
ggcacaacaaaacacatctgtggcttggattcagcttgtgaatgattactgcagatatttattctagaggacacccctgggtatgtcctaatataaaacctaaatctaaactcaagtccc

SEQ ID NO: 3007 - DNA, 120 bp, synthetic construct
  source 1..120: mol_type = other DNA
acctctgccttgaaagatcacattacttgattgtcttcaacttatctgaatgtggtagtgatttctgtaaatttataggacctttgtctcatgcagctccatggagttgaacttatgcac

SEQ ID NO: 3008 - DNA, 120 bp, synthetic construct
  source 1..120: mol_type = other DNA
aacccctgcttggcagtgcatcattgactagatggagaagaaatgaaaataatacattaggaagcagtttcctggttcttttgaaaacaactagagagtcttgttgttgactggaatatc

SEQ ID NO: 3009 - DNA, 120 bp, synthetic construct
  source 1..120: mol_type = other DNA
ggcaatgccagcattattaacactcctctagttagaacaaagaggaaatgtaataacaaaacataataatagccaaataaagagtgacttagaatgtacacccttatctaggatcctgag

SEQ ID NO: 3010 - DNA, 120 bp, synthetic construct
  source 1..120: mol_type = other DNA
gtaaaggagagaaatggcagagaatttacttcagtgaaatttgaattccattaacttaatgtggtctcatcacaaataatagtacttagaacacctagtacagctgctggacccaggaac

SEQ ID NO: 3011 - DNA, 120 bp, synthetic construct
  source 1..120: mol_type = other DNA
ctttacagcactcctcttcaagacaaagggaatagtactcatagtagaaataacagctatgcagtgattatcaccagcaccagttcgtattatgtgttttacatttacgtgggagtagcc

SEQ ID NO: 3012 - DNA, 120 bp, synthetic construct
  source 1..120: mol_type = other DNA
tgcacttaaagactgaggttaataaggatttccccaagttttttcatagcaacctgtgagcactttctctgttgaggcatttatggtatgaaaagatgagtaaggcacagttcttgccct

SEQ ID NO: 3013 - DNA, 120 bp, synthetic construct
  source 1..120: mol_type = other DNA
gcactggccattccacttcttcttttccaagctcctcattccctttaacgctgttcatagttggttccaaaccatttgaaatataataagcaccaggatggttttttctttccaccaaag

SEQ ID NO: 3014 - DNA, 120 bp, synthetic construct
  source 1..120: mol_type = other DNA
gggtttcggtagaggtatgtcaaaaaggtatggaagtcagaggagaaggagacccctatgttatagaatacaaatggaagggaaatgatgacaacagtaagttgtcattaaatgcaaggt

SEQ ID NO: 3015 - DNA, 120 bp, synthetic construct
  source 1..120: mol_type = other DNA
cagtaaggaccataaggaagggacagaagcaaagataagttttagaacaaaagagaggggaaagaaaaaatctagggttttatgagggctgtccctgagtgatagatgtgaataggcctc

SEQ ID NO: 3016 - DNA, 120 bp, synthetic construct
  source 1..120: mol_type = other DNA
tacatcagataaaaactggaatgtgaacctcttaacttgattgtgaaagtatttgccaatggtgcctcttgataattatttgaggctcacttcagaactcctctggaagggttaattttt

SEQ ID NO: 3017 - DNA, 120 bp, synthetic construct
  source 1..120: mol_type = other DNA
cagattcccactattttaccttgagcagacacttatcttgaagggtctcagatttgtcacttgtagaatggggaatataaacctgataatggtccctttcagttctaaagttatatcagt

SEQ ID NO: 3018 - DNA, 120 bp, synthetic construct
  source 1..120: mol_type = other DNA
agttttacaaccctacatctttgttgcaacagtgccagtgatagtggcttttattatgttgagagcatatttcctccaaacctcacagcaactcaaacaactggaatctgaaggtatgac

SEQ ID NO: 3019 - DNA, 120 bp, synthetic construct
  source 1..120: mol_type = other DNA
atttcgtgtgcccccaaactctacttgagctgttagggaatcacattttgcagtgacagccttagtgtgggtgcattttcaggcaatactttttcagtatatttctgctttgtagattat

SEQ ID NO: 3020 - DNA, 120 bp, synthetic construct
  source 1..120: mol_type = other DNA
aaaccgatgcacacagattgtcagatagcaattctgtgattgaaggggaaatatgtcacctcttcatactcatattggtgaagggtcctagcttcaaaattaatagattcctaaagaggg

SEQ ID NO: 3021 - DNA, 120 bp, synthetic construct
  source 1..120: mol_type = other DNA
cttgatttattaggggcaataatcaaaacatttaacaatcattatagtacagaacttaccaatcaaatcagatgctcagccggagtggatgttggccacccagctattattatccctggc

SEQ ID NO: 3022 - DNA, 120 bp, synthetic construct
  source 1..120: mol_type = other DNA
cagatgctgtttggacactcttcccctgcttttggtctctttgtaaagcagctcatctggatacaggatctcttttccccattgcccattctaatatatgttaccgttattacttataga

SEQ ID NO: 3023 - DNA, 120 bp, synthetic construct
  source 1..120: mol_type = other DNA
ttcacccatgcttaactgagtggtgccaaattgtcctcaagtctgttgtactgatatatatccccatcaagagagtacaagaattctcatagctatgtatcttcaacaacacttggtgtc

SEQ ID NO: 3024 - DNA, 120 bp, synthetic construct
  source 1..120: mol_type = other DNA
accatgggtgtgtacaattcctttgtccttgctgtattaattttcttggtttacatagtagcctctacacattgatgtcaaaacctctgtttggtgcatttctactctgcgtgttcaatc

SEQ ID NO: 3025 - DNA, 120 bp, synthetic construct
  source 1..120: mol_type = other DNA
ggcctagtttagacaaaaacacagagtcaaatgtcaacagaattctgaagttataaaaatgacagtgtggctttttttttttttaaccttccacctggtgcttatgcccaagtgcctagc

SEQ ID NO: 3026 - DNA, 120 bp, synthetic construct
  source 1..120: mol_type = other DNA
ctctttcagatctctaaacatcagctatatctcagccctgttctactgacactctctagctgttattttctaaacccatgtttcagaaaccatatcttgatgaatcttggaaggccgagg

SEQ ID NO: 3027 - DNA, 120 bp, synthetic construct
  source 1..120: mol_type = other DNA
gactactttttgtcttttactgcttgttttgttgatcaagtgactgattgtacaatgaccaacaagaagtctgatgtgtagagaaaaggggaacctggcttttctgccttactcctgatg

SEQ ID NO: 3028 - DNA, 120 bp, synthetic construct
  source 1..120: mol_type = other DNA
tttctgttttcacaaatttttgtggtatattttcctctcatgacctctgtctcaagacttctttccatccatctcttctcatttcatcctgtagagtgtctgtggtaagagccctgcatt

SEQ ID NO: 3029 - DNA, 120 bp, synthetic construct
  source 1..120: mol_type = other DNA
ttgtaattttaaaagtgctccaggtgattctagcgtgtatcaagcaagacttgtgaaccactgaactacatgctaagactcattttagctctgattttctgtgagtcatagcagagggct

SEQ ID NO: 3030 - DNA, 120 bp, synthetic construct
  source 1..120: mol_type = other DNA
agagtttcaagaacatgttttgggcagagtctgttttcttgctattatctcttaagtttatgttcatggcctaaagattatgctaatggatctgccttggtcttgggtgtcaggtctgtg

SEQ ID NO: 3031 - DNA, 120 bp, synthetic construct
  source 1..120: mol_type = other DNA
tcaagtattcttccccacaaatgaagaatggggttcattgtgtcattggttgggtctcattttggcttcatcttctatttctcaaagtctaagaaaagtgctcctacggaagtgggtgtt

SEQ ID NO: 3032 - DNA, 120 bp, synthetic construct
  source 1..120: mol_type = other DNA
attgaattcagagattttgctgggttctaagtggagtttacagaatgccatgatattaggaattaaggagtgtgttgccctacatcatcttttgtccgtgctcactgtctctgaggcact

SEQ ID NO: 3033 - DNA, 120 bp, synthetic construct
  source 1..120: mol_type = other DNA
cttaagattaaatcacacgttcttggctatgcatatttgggcatgctgtggggagttataataggctgtcttagagtcacattaagcagctagacagacaatgagttggaaagttacatt

SEQ ID NO: 3034 - DNA, 120 bp, synthetic construct
  source 1..120: mol_type = other DNA
acaaacagtgcaggcttgatcaatggcatgggaaaacaggcaatacagttagaattgctaagatggaattttaacgttcaattaaggatctatctctaaactcctctgctttatccacca

SEQ ID NO: 3035 - DNA, 120 bp, synthetic construct
  source 1..120: mol_type = other DNA
agatgcgatctgtgagccgagtctttaagttcattgacatgccaacagaaggtaaacctaccaagtcaaccaaaccatacaagaatggccaactctcgaaagttatgattattgagaatt

SEQ ID NO: 3036 - DNA, 120 bp, synthetic construct
  source 1..120: mol_type = other DNA
tttgaaatccttcttatggatcccagcactgggctgaacacatagaaggaacttaatatatactgatttctggaattgattcttggagacagggatggtcattatccatatacttcaggc

SEQ ID NO: 3037 - DNA, 120 bp, synthetic construct
  source 1..120: mol_type = other DNA
tatacaaaataggccatgcgtgttcagtaactattcactgcaaggcactctctaggtactttgggggaattggaaattactcacataaggctatggattgtgccatttgtcaaaagacaa

SEQ ID NO: 3038 - DNA, 120 bp, synthetic construct
  source 1..120: mol_type = other DNA
ccttgaaatgcccttgaataagagatatccaggtaaatgctatgggaattcagaggaggaagcagttagtatcagttggcggagagttaggctattaagagaaggttttatataggaagt

SEQ ID NO: 3039 - DNA, 120 bp, synthetic construct
  source 1..120: mol_type = other DNA
ctgtgcccaacctccaattttggattttgagagctaaagcaatatagtcgaaaactcagataatccaggtagattttgctattaggtgctatttggttcctggtacagagctaaaaccct

SEQ ID NO: 3040 - DNA, 120 bp, synthetic construct
  source 1..120: mol_type = other DNA
gcttggtgtcgaaaacccacattgttggtgtcagaagtattgtcagtaggatagggaaaacagtttgttttctttttttagtggtctttggtcatctttaagagcagggcttctcaaagt

SEQ ID NO: 3041 - DNA, 120 bp, synthetic construct
  source 1..120: mol_type = other DNA
tgaaggtatttgtgttgtgctccctcaatcttttaattcaactataagctaaacccatgaaacttgagtagtttcagttatctgacttttttcttctcttttgatacagtgttggctatt

SEQ ID NO: 3042 - DNA, 120 bp, synthetic construct
  source 1..120: mol_type = other DNA
atgtgcaagggatctgtagtgatgtccccttttttgttttattgatattagcaatttgtgtcacatcttttattttgctttgttagccaggctagagatatctctatttttgatgttttt

SEQ ID NO: 3043 - DNA, 120 bp, synthetic construct
  source 1..120: mol_type = other DNA
tcatataatgcccctcattatttcctcgccctgatgtctgttctctctgaaagaaatatagcctctccaggtctcttttggttggtgttaaaatgacttaactttctttatcccccttac

SEQ ID NO: 3044 - DNA, 120 bp, synthetic construct
  source 1..120: mol_type = other DNA
acctgtataattttccttttctctcttcagcttctttgaacatttcttaccagccagacctactgacaacaattttccccaatttttgtttgtctgatagagactttatttcttcttgac

SEQ ID NO: 3045 - DNA, 120 bp, synthetic construct
  source 1..120: mol_type = other DNA
tttagtcttttagtgagcctgtgcgcctgcagcttggaagcacttgtgaagtgttttttcaccccttttggtgggacatagtgactagtgtgagcgggagttgagtatttcccttcccct

SEQ ID NO: 3046 - DNA, 120 bp, synthetic construct
  source 1..120: mol_type = other DNA
agcatcctataggcaaaattcataaaagtatagaagtcggccagtgacttggacccacttggaattttcttgctctcacatcatgcacactgaatctccagcaatttttcacttacagtt

SEQ ID NO: 3047 - DNA, 120 bp, synthetic construct
  source 1..120: mol_type = other DNA
tatttttggatatcccaaaacactgccagctcagctttaggctgcccttcttgggggggaaaaaagcagttgaaatttaggacttaagtgggcatctcgtttaatttttaatggatttct

SEQ ID NO: 3048 - DNA, 120 bp, synthetic construct
  source 1..120: mol_type = other DNA
attctcagggaggaggtgcattgaagttattagaaaacactgacttagatttagggtatgtcttaaaagcttatttgcgggaagtactctagccttattcaacagatcactgagaagcct

SEQ ID NO: 3049 - DNA, 120 bp, synthetic construct
  source 1..120: mol_type = other DNA
ctcagttgtctgagaacaaacatttgtgaaaatctcattgtagagttcttacgatggatagggggtcaactgtgtcattattgcttatcagcttatcccaaagacctagtttattaccag

SEQ ID NO: 3050 - DNA, 120 bp, synthetic construct
  source 1..120: mol_type = other DNA
tgcatcaggggtccaattccttatggccagtttctctattctgttccaaggttgtttgtctccatatatcaacattggtcaggattgaaagtgtgcaacaaggtttgaatgaataagtga

SEQ ID NO: 3051 - DNA, 120 bp, synthetic construct
  source 1..120: mol_type = other DNA
aatgatcacttttctccctttgtgctaatggacactgaatccattccactaccatagttcttgctaatactactctactttttacacaaaattaaaatgccaggagcacctccaggtaga

SEQ ID NO: 3052 - DNA, 120 bp, synthetic construct
  source 1..120: mol_type = other DNA
gctggtttctggggctggctctcagtatcacaaagatgtctgtaaacagaatatgctatttcttctttgtgacaaattttgaacattatgtgaatgtccaagaaagagcaaaagagggca

SEQ ID NO: 3053 - DNA, 120 bp, synthetic construct
  source 1..120: mol_type = other DNA
acataactcccacctcaaagatggggcatcttttgctctgggagatatcaaatgcgaccaaaacaagtgtttgtagatttgaatgatgattcagcagtgtagcagttctcactcatttta

SEQ ID NO: 3054 - DNA, 120 bp, synthetic construct
  source 1..120: mol_type = other DNA
acaaaagaatatagtttcacaaagaaagtgataattaaggcggttcataaagggtcataaagcttgtagattttagaaatgtgggggcatgaggatgtggagagggtattccaggatgcc

SEQ ID NO: 3055 - DNA, 120 bp, synthetic construct
  source 1..120: mol_type = other DNA
tggtcagaccagggaagtattttcttttatgctatctctgaaaatgtatacactaaaaagttgtagtataaaaaggttgtaaagcattaagtaattttagaggaaacaataatttggata

SEQ ID NO: 3056 - DNA, 120 bp, synthetic construct
  source 1..120: mol_type = other DNA
tccagtcaccacaccagccaaactgctttattgttttttgtttgacatccaatgctaaagcataatgcctgttgcagtgaaatatacatgagcaaccctgagaactcaatatagcctcac

SEQ ID NO: 3057 - DNA, 120 bp, synthetic construct
  source 1..120: mol_type = other DNA
tgcttacttcagtatctaacactagacagtaaactgtagacaaaagacctacagaatttctgaatggtatcaaattcaccacacttaaaactttgggatgtctaatttcaaccaacagct

SEQ ID NO: 3058 - DNA, 120 bp, synthetic construct
  source 1..120: mol_type = other DNA
gtagtgaattgctttgattgctgaatgcgaatggatgggtagagatgcaagagtgaaagggaagaaatcaattaggaggctcttgccctgctccagataggactgataattaattttatt

SEQ ID NO: 3059 - DNA, 120 bp, synthetic construct
  source 1..120: mol_type = other DNA
tcatgtacgtaataggatttacctcatgaggttgacatgaagattgaaagaggtaacatatagaatgagcctgtcccaggacatggttcatgataagtctgccataaatgggagctatgt

SEQ ID NO: 3060 - DNA, 120 bp, synthetic construct
  source 1..120: mol_type = other DNA
accaggaacatacattcagttaaacaattatttgacttctgctcttccactgatttctaagttgaggctctctcttgtgcctgtctgatcagataagtagagttgtgccttggtttatag

SEQ ID NO: 3061 - DNA, 120 bp, synthetic construct
  source 1..120: mol_type = other DNA
aaatggttgatatggctaagatcattctacacactttgtgtgcatgtatttctgtgcacaacttcaaaatggagtaccctaaaatacctggcgcgacaagtacttttgactgagcctact

SEQ ID NO: 3062 - DNA, 120 bp, synthetic construct
  source 1..120: mol_type = other DNA
aaagagaaatagaaaagaaaaaaggagtgacaggtctctataagtctaaaactttaaggcttgagaataatttgctttgctttgcctccaggctcactggggtggtgtcttacctctgga

SEQ ID NO: 3063 - DNA, 120 bp, synthetic construct
  source 1..120: mol_type = other DNA
gcttctgtttaggtggctgactaatatccccactgtctgaatgcatagcacctagtttctgttgagatggctagtccatagtaatttacttatcaaatttggccacaccctttgtattct

SEQ ID NO: 3064 - DNA, 120 bp, synthetic construct
  source 1..120: mol_type = other DNA
gttctgaagctctccactacaagaaggaggctttggtttgacttgatatacttctctgggaaacaggtttagcataaaacagtgatgctcattctagaacacctgcaaatgacaatagtt

SEQ ID NO: 3065 - DNA, 120 bp, synthetic construct
  source 1..120: mol_type = other DNA
cagcatacaaacaaacaagcaagtatcagcctagagaagcagaaaaggcatttgggtttcaaagtcacaaggcctaggctttagtctaatacagctgataatacaatttgtccaaacagg

SEQ ID NO: 3066 - DNA, 120 bp, synthetic construct
  source 1..120: mol_type = other DNA
tcaaaagaaactgaatcccaagagaaaaaaaaaagacttctggcattgtggcccaataaattggtaggattgttgtgacttttcaagtttacatgtaaaatgggcccagcgcagtgcctg

SEQ ID NO: 3067 - DNA, 120 bp, synthetic construct
  source 1..120: mol_type = other DNA
cttgtccatgtcccccactggagtggaagttcctggaggtcagggattatatcctattaattgttgtatttccagtgcctagagtagtcttgcatacatggatggtattcaataaatatt

SEQ ID NO: 3068 - DNA, 120 bp, synthetic construct
  source 1..120: mol_type = other DNA
tttgaagtcttcttagtttggacaggactgagctaaagtttgtactttttttaatttattgaaaaatggtttctaatgatagtattaacaagattatattgggggcaggacgcagtggct

SEQ ID NO: 3069 - DNA, 120 bp, synthetic construct
  source 1..120: mol_type = other DNA
aataaagaatttcatctggggaaaaacatactttgctcagctctttgccacaagtgcaaagtctaagacagtcaaatagctttcctagtacggccttaggaacttagtatatgactggtg

SEQ ID NO: 3070 - DNA, 120 bp, synthetic construct
  source 1..120: mol_type = other DNA
ttttacaatggcagagcttaagccagtgctcagtcattcattcatcctcaagttttgattcatttatcattcatcaaaactctgttttgtttggccacccacattctaggagctcagtac

SEQ ID NO: 3071 - DNA, 120 bp, synthetic construct
  source 1..120: mol_type = other DNA
ccatagcagcttcatagactgaaacaataaaaaagttgaaggcacaaagaaagacacaggtcctctaactccctgcccagtgccctttattcatattctcagcacttgtatttctaagtt

SEQ ID NO: 3072 - DNA, 120 bp, synthetic construct
  source 1..120: mol_type = other DNA
agagtagaagatgggaggtagcaccaaggatgatgtcatacctccatcctttatgctacattctatcttctgtctacataagatgtcatactagagggcatatctgcaatgtatacatat

SEQ ID NO: 3073 - DNA, 120 bp, synthetic construct
  source 1..120: mol_type = other DNA
atgtctgcgtgtgggggtctcccccaagatatgaaataattgcccagtggaaatgagcataaatgcatatttccttgctaagagtcttgtgttttcttccgaagatagtttttagtttca

SEQ ID NO: 3074 - DNA, 120 bp, synthetic construct
  source 1..120: mol_type = other DNA
ttacaaattccctatggtttagtcacaaggaagttctgaggatgatgtatcacgtcatttctgttcaggcttttgagcctcctggaggtaaatggtttccttactgaaggcttgttatta

SEQ ID NO: 3075 - DNA, 120 bp, synthetic construct
  source 1..120: mol_type = other DNA
tgggacagtcacctcatggaattggagctcgtggaacagttacctctgcctcagaaaacaaggatgaattaagtttttttttaaaaaagaaacatttggtaaggggaattgaggacactg

SEQ ID NO: 3076 - DNA, 120 bp, synthetic construct
  source 1..120: mol_type = other DNA
acacatgaagtccaagcatttagatgtataggttgatggtggtatgttttcaggctagatgtatgtacttcatgctgtctacactaagagagaatgagagacacactgaagaagcaccaa

SEQ ID NO: 3077 - DNA, 120 bp, synthetic construct
  source 1..120: mol_type = other DNA
ccacagagagcaaaaccttggatagggggaccactctataaatatgtaccacatttttcctcacccattcatccatcactggctacttggtttgcttccactttttggatatagtgaata

SEQ ID NO: 3078 - DNA, 120 bp, synthetic construct
  source 1..120: mol_type = other DNA
ttcacatataacttctccatacatgatagcctcccccattcaacatcccacactaaagtagtacatttgttacaactgtgaaagcaaatagaatttcaagaccccaagctcactatgcca

SEQ ID NO: 3079 - DNA, 120 bp, synthetic construct
  source 1..120: mol_type = other DNA
tggccttttcagattggcttctttcacttagtaatatgcatttaagtttcctccgtatcttttcatggcttgatagctcatttctttttagtgctgaattatattctattgtcagatgta

SEQ ID NO: 3080 - DNA, 120 bp, synthetic construct
  source 1..120: mol_type = other DNA
tttggggctttacttgtccctgtctatgcccactcctatctgacacacactttcttaatttatttcctagttgtttcactttgtttatcttcattatgaggaaaaaaagccaaaacctga

SEQ ID NO: 3081 - DNA, 120 bp, synthetic construct
  source 1..120: mol_type = other DNA
agggagccgggactcaatacctgtgtactttctcagagaaaggagaggtcttggcaaaattttgggtttatccttaattccatacaatgggaatattcaattgctctttaatcactcagt

SEQ ID NO: 3082 - DNA, 120 bp, synthetic construct
  source 1..120: mol_type = other DNA
aagcctgaatagttttggggcacaaattgctctttaactctcttctttcccattcacctttgtcactgatggaataatagaaggagcaatctttatcagcaatggcagatgtgctgataa

SEQ ID NO: 3083 - DNA, 120 bp, synthetic construct
  source 1..120: mol_type = other DNA
cccctgtcactgaacttcaatagttatcagctcacagtcaatcttatttcatctatgctccctcatgcttccctcctatattattttgtgcaaatccaaacagcatataactttagctct

SEQ ID NO: 3084 - DNA, 120 bp, synthetic construct
  source 1..120: mol_type = other DNA
aagagggagcagcttgtgactgaagtgccataaacttttgttcttactgagattagtatattttctggaataaacgctgctgcttttgctgtatgtgcttagggccattttcagagactt

SEQ ID NO: 3085 - DNA, 120 bp, synthetic construct
  source 1..120: mol_type = other DNA
tttatatcctgtgttttggggaaggttggcctagaacatttattctaaaaggaaagggcatgggaaattcttaccattggcagtgtcggggaggaaaaaatgcatacttcttacccattt

SEQ ID NO: 3086 - DNA, 120 bp, synthetic construct
  source 1..120: mol_type = other DNA
acatcaagcgagaattcttaatcagacattcaacaaattgagggtcgtctatgtgttctaggtgctaagaactcggcagcaaacaaggcaaagttctcagtgtcatggagtttacattct

SEQ ID NO: 3087 - DNA, 120 bp, synthetic construct
  source 1..120: mol_type = other DNA
gctgagtcagtatcaggatattgtcacgatcccaggtgatctgtaggtactttagagtttgaggattcctagattagatcatctagggtatgaatgaatgtagaagagaaagactgagaa

SEQ ID NO: 3088 - DNA, 120 bp, synthetic construct
  source 1..120: mol_type = other DNA
caattgttctatacatcccttctgaagcacatatatatcctttccctatggtgtataagcccggggtatggaaagtaagagtgtggagatccagcatcttgtctcactgccactgagata

SEQ ID NO: 3089 - DNA, 120 bp, synthetic construct
  source 1..120: mol_type = other DNA
agaactggatttaactaagtttggggttatgcctagcaagtatgacagagaggggatgagggagttgaggagagatgccaagtgtagactaattatgatcatgtaatataaactaggtga

SEQ ID NO: 3090 - DNA, 120 bp, synthetic construct
  source 1..120: mol_type = other DNA
agcttcagtgttttctacccaagcaactacaggttatctaacatcacttttcagagatcatgtttcttctggagacagaaaataatttccccataatccagctgagaaaattgcttggcc

SEQ ID NO: 3091 - DNA, 120 bp, synthetic construct
  source 1..120: mol_type = other DNA
ttactcatttcagagttcagttacccagaaaccacctacttctatgcctacaataagaagcaaacaagaggtttttgcaataaagacaatcagtatctaggataagggctggcatgtggg

SEQ ID NO: 3092 - DNA, 120 bp, synthetic construct
  source 1..120: mol_type = other DNA
accacccctgcctccatgacagaatgtagaaaagttttcttgtgtggttctatagccaaataagtccctttcatgctattcaaatagggtttcatagtgctgcactcagttctatttttc

SEQ ID NO: 3093 - DNA, 120 bp, synthetic construct
  source 1..120: mol_type = other DNA
gatgaacactattctgtcagcatcaagaatcatttctaattcttgtagactcttttccatgataagatcaatgtaatttgtaacaaattacccttgggttgagtccttggagaaagctgg

SEQ ID NO: 3094 - DNA, 120 bp, synthetic construct
  source 1..120: mol_type = other DNA
ctgtcctgcaagtatttcttggatgctgtttatacttgatttctatccaatgctctttagcacatcttctcagagtctagaaagttgtctcctttttccctcaagccaaatgggttactg

SEQ ID NO: 3095 - DNA, 120 bp, synthetic construct
  source 1..120: mol_type = other DNA
ggtttgattcgggcatcttcatttctaaaattaactattcctgagttctgctaatgtgtcctgccacaagtgtaggcataaaaaggtgaaggaattaaactaccaggctctgaatcaagg

SEQ ID NO: 3096 - DNA, 120 bp, synthetic construct
  source 1..120: mol_type = other DNA
tcaactgactatctcaattaagattttggtacacaatgagtgtaggccacataatcctcatcccttacggaatgctgtttagtgagtgttatacctgtctaggcatgtttcttgttacac

SEQ ID NO: 3097 - DNA, 120 bp, synthetic construct
  source 1..120: mol_type = other DNA
tttgttaatttaacaaatacagattaaaagtctatcatgtgttctgagcagtactggggccaaaataatgaaccagagggacaaggtccctgtttacgggatgtttatgttctagctggg

SEQ ID NO: 3098 - DNA, 120 bp, synthetic construct
  source 1..120: mol_type = other DNA
tagctagcatgtagagaggcttcaccgagaagacgatgttttcgctcatatgtgaatgactagaaatcgccagccttgtgaagatcttggaagatattttcaagtagaagcaaaaattgg

SEQ ID NO: 3099 - DNA, 120 bp, synthetic construct
  source 1..120: mol_type = other DNA
acacccaccgtgaggtgatggaagtgttttaaatcttatttttgctggtagtttcacaggtgtacacaactgtcaaaacacgtggaattatactttaaggaaaggcagttccttgaacat

SEQ ID NO: 3100 - DNA, 120 bp, synthetic construct
  source 1..120: mol_type = other DNA
ggcctaggtgttgttcttcaaaaaggactaattctagactctgctacaagcccactatacaatattgttgtgatctgataagcttttaaaaattgaatctgtaggccaggtgcagtggct

SEQ ID NO: 3101 - DNA, 120 bp, synthetic construct
  source 1..120: mol_type = other DNA
ggtttctctttacaacagacttggtaggtagctttacgttaatcactttgggtccaagctatgcatctggaaactggggataagaatactatttccatatctgtcaaaaggcagaggagt

SEQ ID NO: 3102 - DNA, 120 bp, synthetic construct
  source 1..120: mol_type = other DNA
atatagtgctagtaaatatcagcatataagtggttaaaccatgggagtggatgagatccctcaggaaaattgcattgagttgaagaggaggtgtcaagcgtaaattgtgcttggatgttt

SEQ ID NO: 3103 - DNA, 120 bp, synthetic construct
  source 1..120: mol_type = other DNA
aagggaaagatccacagcaagggaagatgaaggcaaccaagtagatcattgagggagcaaagtcctggagtaattgtataggtgaaagggaaaagtctcatcttattatcttttgtaata

SEQ ID NO: 3104 - DNA, 120 bp, synthetic construct
  source 1..120: mol_type = other DNA
catccaggagtgtgtacttaacagcaatacctatgatgcaaggcagactacgacaggtaatataagagaggtagaaataaagcctatggaacttcagaagaggaatagagtatctgagta

SEQ ID NO: 3105 - DNA, 120 bp, synthetic construct
  source 1..120: mol_type = other DNA
gataaagctcaacacagtccagcaactagctatgcttagcctccttatcttcatttttaatgcgacaccgtgaactccagtcaagaaaacacatttaagaccctttacacttgactgatg

SEQ ID NO: 3106 - DNA, 120 bp, synthetic construct
  source 1..120: mol_type = other DNA
gcaagggaacatctaaggcttgggtaattgatttccccgtggttgcaagaagttcacataacattattcaatcatctctcaagtttgcttgtgattgctaaatcatttgtgacattggcc

SEQ ID NO: 3107 - DNA, 120 bp, synthetic construct
  source 1..120: mol_type = other DNA
gactcaaactacatggccatctggcccctccatctacagttagaagcaccaccttggcaataattgaaatgaactttcaacaaatctgctagagtcaagactgaattatgcattgtttta

SEQ ID NO: 3108 - DNA, 120 bp, synthetic construct
  source 1..120: mol_type = other DNA
ttatcttctcaagttaggaactacagaattgacctggaaaaagagtgggcccaaaagaaagattcctaaagtatctcattagtgccatgactagcaggcaacataagcagctcgattagc

SEQ ID NO: 3109 - DNA, 120 bp, synthetic construct
  source 1..120: mol_type = other DNA
attttattattcatataatgaggtcttctgagaaaaacaggccaggctcccaagcaagtctaaaaatggattgagagaacagggagggagaattgacttggggttttatgtggtggagta

SEQ ID NO: 3110 - DNA, 120 bp, synthetic construct
  source 1..120: mol_type = other DNA
caccatgcaaactttaattttctttatcttgtctatttatactagctagaatctcacgtacaatgatgactagaggaggcaaaagtggtcatctttgtcatatttctgatctcaggggca

SEQ ID NO: 3111 - DNA, 120 bp, synthetic construct
  source 1..120: mol_type = other DNA
tgattgcccactttccacagggccagttctatttctttgttttttgccctcctattatccacttactccatgcaatgtgaccgcaagagttctaaaagcctacataatagacatgtaaat

SEQ ID NO: 3112 - DNA, 120 bp, synthetic construct
  source 1..120: mol_type = other DNA
aaatccaggcccaggaaagtgtcacatggtcaatgacacaaatcactcaccggcagaacagggaggagtttcactacttcaattctctatttaccatatcacaaaatatgtaagatatca

SEQ ID NO: 3113 - DNA, 120 bp, synthetic construct
  source 1..120: mol_type = other DNA
aaccatagtcatcatgatgtgcaatagatctcttgaacttatttctcccttctgattttttttttttttttgagacagggtctggctttgttgcctaggctagagtgcagtggcatgatc

SEQ ID NO: 3114 - DNA, 120 bp, synthetic construct
  source 1..120: mol_type = other DNA
ccaggatggtcttgatctcttgaccttgtggtctgcctgcctcagcctcccaaagtgctgagattacaggcatgagccaccatgcccaacctatttttaatttttaaaggaacctctata

SEQ ID NO: 3115 - DNA, 120 bp, synthetic construct
  source 1..120: mol_type = other DNA
ccattgtgtttttctttctaggaggcagaaaaaccttctgaatttttaccatgatgacattaaagccagagatgttaagtgtcattgtagttagctctgtggccagaacctgagctggca

SEQ ID NO: 3116 - DNA, 120 bp, synthetic construct
  source 1..120: mol_type = other DNA
tttatacactcatggtttaaaatccaattttcataatatagttgccagcatctgtgaattattacaatttgaaaagatttggaatgccataactttttaaaaatgttctgctctgatctt

SEQ ID NO: 3117 - DNA, 120 bp, synthetic construct
  source 1..120: mol_type = other DNA
ttatgaatgtgtgaggcaactaggaaggctttactgcgttatctaacactcatggacaacctgtaggtttttttaactacagagaaaacgtaatagaaaagatgtgccaggcacagtggc

SEQ ID NO: 3118 - DNA, 120 bp, synthetic construct
  source 1..120: mol_type = other DNA
ggaaggtgttttaactctgagcacccaattcctggtgctccatttaagtatttaagatgtttctaattagggttgagtcttgttgtgaacagctagtgaaatactaacatgggagggcaa

SEQ ID NO: 3119 - DNA, 120 bp, synthetic construct
  source 1..120: mol_type = other DNA
gttattgccccattctagtcattccccatcaagtgaacataaaattatgatctccatttaaaacggtacaagttatctaagccaactttgtacttttttgctacttttttgtagcatgta

SEQ ID NO: 3120 - DNA, 120 bp, synthetic construct
  source 1..120: mol_type = other DNA
tcaataatcaaataatctgggggcatataggagaaaacataagagaaacattccttccctagcagaacctacattcatctatggttaggccactcaagatcttccatacttggaagctgc

SEQ ID NO: 3121 - DNA, 120 bp, synthetic construct
  source 1..120: mol_type = other DNA
gctggggactgctgtcctaaatggtagcatttttcttagccctctataagtcacacattgataatctttcccttcagagtatttcaagctctaagtatttcccaaagttctttctttagc

SEQ ID NO: 3122 - DNA, 120 bp, synthetic construct
  source 1..120: mol_type = other DNA
tcctagtccatcctcgtcacctccatgtgtacttgatggtatgttaagggcgaatctgcttagtatgttctgcttttgttttgtaaagatgcttatgctgtcaagttaccagaaagaaaa

SEQ ID NO: 3123 - DNA, 120 bp, synthetic construct
  source 1..120: mol_type = other DNA
atgtgaaaagctacatgaaggcatctcaatccctctaaagatatatttggaaagaaagaaatgggtggaaaatgaagatgacagatcagggctatgttttagaacagtgggtctcaaccc

SEQ ID NO: 3124 - DNA, 120 bp, synthetic construct
  source 1..120: mol_type = other DNA
ccccagactccttgtggaaagctgaggttgaagatctgtgctgtgatgaggggctccagatagcggtgagagatcccgcttcaagactgggttgggggtccagaccaggaggataagcct

SEQ ID NO: 3125 - DNA, 120 bp, synthetic construct
  source 1..120: mol_type = other DNA
cagtgagacactagttaatgcagaaaaaacagattttacttggtaactactgacaacatgagaaaaagctggctccatgctgatttgtctagatgtgcctggagtttaaagggagagtga

SEQ ID NO: 3126 - DNA, 120 bp, synthetic construct
  source 1..120: mol_type = other DNA
tgagtcccaatagggatttgagttcttggtgacaccaagtcagggaggagacaaattagaaatgtcagtctgaagagagtggtaggtagccagatactgaaggaaagtagatgggaggat

SEQ ID NO: 3127 - DNA, 120 bp, synthetic construct
  source 1..120: mol_type = other DNA
aaacaaaacacctacaaaagacagtgaactagactaggatctgataactcccaagggggtgttatatttctccactgaagcatagcatttctctttacaaacccttcccttttgattgaa

SEQ ID NO: 3128 - DNA, 120 bp, synthetic construct
  source 1..120: mol_type = other DNA
gaacaaaagtcataaaaagactgtaatcatccttcagcagtttactcagttgcatgcaggtactgaattcttgttctgcttgatcttgggctagcaggtacatgaacccatcttttctca

SEQ ID NO: 3129 - DNA, 120 bp, synthetic construct
  source 1..120: mol_type = other DNA
tacctgtcatgggccttttcattggtccctttttgttgaagatgaagcactttgccctgtagctgattgcaagagatttcaggaaagcatcagagtaaaactctaatgacaaaagactta

SEQ ID NO: 3130 - DNA, 120 bp, synthetic construct
  source 1..120: mol_type = other DNA
ggttaggcctccggataactgtgggcaaacctgacactccacaagaggtggttgagcagagtcttctctaactcccacagggaaagggagacttcctttcccggtctgctaagtaacggg

SEQ ID NO: 3131 - DNA, 120 bp, synthetic construct
  source 1..120: mol_type = other DNA
aaaaaaatttaaagaaactttatacataaatccattcaatgattatgaggtcaattctagccagctttgacctcataacataaaatttcttttctgcagactttcttgaggccaggagtt

SEQ ID NO: 3132 - DNA, 120 bp, synthetic construct
  source 1..120: mol_type = other DNA
caccacgcccggccataacttgtattttacaagtaaaactgggaagaagacaattggaaattgtctgtcatttaccagtttgttggcaaattttatgaatataccatcttataatctcta

SEQ ID NO: 3133 - DNA, 120 bp, synthetic construct
  source 1..120: mol_type = other DNA
acccagccctattttatatttttatctgaactgtgtttctggcaaattggacaagttaagggtcacttgctccatgtgaggggaaggctttctacctgtatttgtggataagacctttac

SEQ ID NO: 3134 - DNA, 120 bp, synthetic construct
  source 1..120: mol_type = other DNA
aaaaaaaaaaaaaaaaagcctgggactcttagcgcctcagagccttactcagaatcataaaatcattagaagcaatgtctgtcctcactgctgcatccgatattcttccggaccactgga

SEQ ID NO: 3135 - DNA, 120 bp, synthetic construct
  source 1..120: mol_type = other DNA
acaaaacaacaacaaaaaaaaaacagccgagcgcagtggctcacgcctgtaatcccagcactttgggaggccgaggtgggcagatcacaaggtcaggagttcaagaccagcctgaccaac

SEQ ID NO: 3136 - DNA, 120 bp, synthetic construct
  source 1..120: mol_type = other DNA
gacactgagctcctgccacatgagcaggttgacctgcagggggcctccaagcaggtgccaaggcagaatcggatgtgaccaggagaacacccttgaaggataaagcgaatgtgcgaccac

SEQ ID NO: 3137 - DNA, 120 bp, synthetic construct
  source 1..120: mol_type = other DNA
ttggagaaatgacagcttcttgtactgggggttatgagacagtggcaggagggggacactcccagagtgctgccagaaagaggcgaggccccatctggatttgatggcatttttattgtg

SEQ ID NO: 3138 - DNA, 120 bp, synthetic construct
  source 1..120: mol_type = other DNA
ctttctctccgtggcccctggtagctgtctttctcccaggaggaggagaaagacaccttcctgagcaggaggatgtgggtgaatagagaccaaagtgtcaatcactcttctgacagaggt

SEQ ID NO: 3139 - DNA, 120 bp, synthetic construct
  source 1..120: mol_type = other DNA
attgggattacaggtgtggccactgttccagccatagttcatattttaaaggatttttaagagtctcatttcactgatgttacttgcagtatatttatggaaaacattcctgtctttttt

SEQ ID NO: 3140 - DNA, 120 bp, synthetic construct
  source 1..120: mol_type = other DNA
agccgatggccaggcagccggtgcagaaggttcatccattttgatgaaccgtgaattcatctgtactttattcattttaataactgaatcatacctcattgtatggctctaccatgtttt

SEQ ID NO: 3141 - DNA, 120 bp, synthetic construct
  source 1..120: mol_type = other DNA
tgttattttccttaaaaaaaaaaaaaaaaaaaagccagctgggcacggtggctcatgcatgtaatcccagcactttggaaggccaagggggtggagcacttgagctcaggagactagcct

SEQ ID NO: 3142 - DNA, 120 bp, synthetic construct
  source 1..120: mol_type = other DNA
agtagcacaggtgggtttctacgtggctttctttaaagggaggcctgattctcggcttttcaggacccgccctccattttctcacttgcctgctctttcgtcctgcgaaactgggcagtg

SEQ ID NO: 3143 - DNA, 120 bp, synthetic construct
  source 1..120: mol_type = other DNA
ctgtgacctatctgtctcatcatctttttcttactggtttgtgtatgttcttggtaaactagcccttggtcttacacatcatttccaaggtactaaggactcttcaggggaaatacaact

SEQ ID NO: 3144 - DNA, 120 bp, synthetic construct
  source 1..120: mol_type = other DNA
tgcctttctaaaatggagcgtccagcagagagtgggatctcctatgccactgggagcccagggccccatcccagaaagacctctgagtgagcacaggggccctagaagaagtttccttgt

SEQ ID NO: 3145 - DNA, 120 bp, synthetic construct
  source 1..120: mol_type = other DNA
cctcccctcccgccctgcagatgccggaggccccgcctctgctgttggcagctgtgttgctgggcctggtgctgctggtggtgctgctgctgcttctgaggcactggggctggggcctgt

SEQ ID NO: 3146 - DNA, 120 bp, synthetic construct
  source 1..120: mol_type = other DNA
ggccgtgcctggggatccaagttcccctctctccacctgtgctcacctctcctccgtccccaaccctgcacaggcaagatcgtggacgccgtgattcaggagcaccagccctccgtgctg

SEQ ID NO: 3147 - DNA, 120 bp, synthetic construct
  source 1..120: mol_type = other DNA
ctgttccaggtcacccttgtggttggagcgtcccaggacatcatcccccagctgaagaagaagtatgatgtggacacactggacatggtcttcctcgaccactggaaggaccggtacctg

SEQ ID NO: 3148 - DNA, 120 bp, synthetic construct
  source 1..120: mol_type = other DNA
cggccgtattccagctttcaaaacaacaaaaaacaacaaaaacttttctggaaagatccctgtcagccttgtggagtgtggagagggctgtggggagggcatttcagatgccctgaactc

SEQ ID NO: 3149 - DNA, 120 bp, synthetic construct
  source 1..120: mol_type = other DNA
ggttgcaattcaaaatcaagggctgctttgaggaggcctctccaccgggctgctgtagtcaccaagtccagcccatgcccaaaggaagaggaatgagttcccccttaaaaaaaaaaaaaa

SEQ ID NO: 3150 - DNA, 120 bp, synthetic construct
  source 1..120: mol_type = other DNA
tcaaggcacctgcctgcaaattgattttattatactttagatgtttgagattgcttgttaacttttgtttggtgactaagtcaaatttccaagacaaggtgactggggtgtcccttgccc

SEQ ID NO: 3151 - DNA, 120 bp, synthetic construct
  source 1..120: mol_type = other DNA
tgtgccacatgctgttctaagggatggatactcctgagatggatacaggagttgatgagagaaaggtccctgtcctcacggggcccatgttctgaaggtggcacccaagtcttgtacagt

SEQ ID NO: 3152 - DNA, 120 bp, synthetic construct
  source 1..120: mol_type = other DNA
tgcttacagaagaggcaatggctcagaccagctcccgcatccctgtagttgcctccctggcccatgagtgaggatgcagtgctggtttctgcccacctacacctagagctgtccccatct

SEQ ID NO: 3153 - DNA, 120 bp, synthetic construct
  source 1..120: mol_type = other DNA
agaatagaaggattgttgtgtacaaacattaaaaatagacattttattacaagagtgtagagaagggagaccaatagaaggtaattgaaatacccccccctcactccagccctagtcctg

SEQ ID NO: 3154 - DNA, 120 bp, synthetic construct
  source 1..120: mol_type = other DNA
aggaggatcaatgcaatgattgtattaatcatatataagagcttaagagggtggacccagcctttcctctgcatctctgaacttactggtcatggttgatctgccactggtttacaaaga

SEQ ID NO: 3155 - DNA, 120 bp, synthetic construct
  source 1..120: mol_type = other DNA
accttagaatgctgctagccccaactcatgggacatttgacacacagcgtcttgtactgttatcatctggatgtgctctttatcttctttctattatgaggccaggagatgaactcttta

SEQ ID NO: 3156 - DNA, 120 bp, synthetic construct
  source 1..120: mol_type = other DNA
tggagattgggaaaagcatgatcagtgtagggatcttggaggtggctgctgagagaaggtgcaggaagaaaaaaagtcaagccgtcagattgggggatgagaaaagccaatatctagagt

SEQ ID NO: 3157 - DNA, 120 bp, synthetic construct
  source 1..120: mol_type = other DNA
tctaaactgaaaggaaactgaggcaatactttctctgtaagcttgacctaaaaagggtgtttaaattcataaaccactctctccaacatatcaggcatctctgcctgttaccctggacta

SEQ ID NO: 3158 - DNA, 120 bp, synthetic construct
  source 1..120: mol_type = other DNA
aagggagatgtgactggtgagtttttagggactggtatttccagctccctgcagttggcaatctgtcaccctgattgtctcccagcaaaggacaaagaagatggtcaatgagataggaaa

SEQ ID NO: 3159 - DNA, 120 bp, synthetic construct
  source 1..120: mol_type = other DNA
atggtagatggagcttagtctttctggtatccagctgggagccaagcacagaacacgcatcagtgtttatcaaatgactgaggaaatgaatgaatgaatgtctccatctcaaccctcagc

SEQ ID NO: 3160 - DNA, 120 bp, synthetic construct
  source 1..120: mol_type = other DNA
tcgacccttacaatcaggtggtggtgtcagtggccaacgtcattggtgccatgtgcttcggacagcacttccctgagagtagcgatgagatgctcagcctcgtgaagaacactcatgagt

SEQ ID NO: 3161 - DNA, 120 bp, synthetic construct
  source 1..120: mol_type = other DNA
cttcagtttccccatctgaacaataaggtgttctctggcctgtaagtctaggcccctataattccagcagctaattctgaaacctgtatctcaagtttatgttgaagagacccagcctct

SEQ ID NO: 3162 - DNA, 120 bp, synthetic construct
  source 1..120: mol_type = other DNA
acttgtgaatagacagtcttacataagagtgacatggggtataagaggggataattcatggggcagttagggcagcccctgagctctgcttgtcctctgtgttctacagacactgtgatt

SEQ ID NO: 3163 - DNA, 120 bp, synthetic construct
  source 1..120: mol_type = other DNA
tcaggaaggctgtttgtccctgctaggaactgtttatataatgaaaggaggggacctcaattgctatagtctgctctaagtgacgatatttacaaaagtttcacaaactttagtgcacag

SEQ ID NO: 3164 - DNA, 120 bp, synthetic construct
  source 1..120: mol_type = other DNA
atttaccatccacactgggacatttgagtgtgaaaatgctatcaatgtttatgctagtcatcattactccaaaacaataaacataagccaggacatactgttgaggccccttaggaggca

SEQ ID NO: 3165 - DNA, 120 bp, synthetic construct
  source 1..120: mol_type = other DNA
tctccatcaattgaagaagacaccaccattctgaggccagggagcgagtgggggccagccacggggactcagcccttgtttctcttcctttctttttttaaaaaatagcagctttagcca

SEQ ID NO: 3166 - DNA, 120 bp, synthetic construct
  source 1..120: mol_type = other DNA
tcagcctcccaaagtgctgggattaacaggtatgaaccaccgcgcccagcctttttgttttttttttttttgagacagagtcttcctctgtctcctaagctggagtgcagtggcatcatc

SEQ ID NO: 3167 - DNA, 120 bp, synthetic construct
  source 1..120: mol_type = other DNA
cagtacatgatatctcagtgctgggcccattcagagtgggggctgctccctctaaccactcccacctgcctccaacagatcagtgagcgctatggccctgtgttcaccattcacttgggg

SEQ ID NO: 3168 - DNA, 120 bp, synthetic construct
  source 1..120: mol_type = other DNA
atctccagcctccaactcctggtaattgtctgtcctccttcccgatcctctctgtttctgtctccatatttttctctcttctccagttcagcttaagaatctttcaccatttttatttcc

SEQ ID NO: 3169 - DNA, 120 bp, synthetic construct
  source 1..120: mol_type = other DNA
acttcacccacttaaatgcctgaaaacatggacaggtgccctaaccaataccctaaacacataaatatctagatagattattccctgacacccaaataagtgttccccaaccctttccaa

SEQ ID NO: 3170 - DNA, 120 bp, synthetic construct
  source 1..120: mol_type = other DNA
ctaatccacgtgaaaacttagatataagtttccatccaaccccactgaaatacctaaacacctggacagatgcctttaactccgttccttccttgctatgaaacaaatccccattcccat

SEQ ID NO: 3171 - DNA, 120 bp, synthetic construct
  source 1..120: mol_type = other DNA
tagggaatccaaagctcagggagaaaggatcaagggagggattcctccacagtaagtttcaagatttttagggaagaaataggatgctgttgcttaaaattctgtgcttgtatctcagaa

SEQ ID NO: 3172 - DNA, 120 bp, synthetic construct
  source 1..120: mol_type = other DNA
atcatcccctaagttcctccctgtgcctaccctgtgattctgacacaacctggtttaacaggatcctgctgcaacaatgcgaatggctgatgtctgttctgttatgaatggtctacctcc

SEQ ID NO: 3173 - DNA, 120 bp, synthetic construct
  source 1..120: mol_type = other DNA
cctttccattaggccttttgccttagggacacaaatctcaggtccctcaaacaccctgcctagtggaacatggaccccatgtctcccaaacttcctgtttcagagacatgaaacttctat

SEQ ID NO: 3174 - DNA, 120 bp, synthetic construct
  source 1..120: mol_type = other DNA
taatatatcaatattggttcaccattgttatatctcttatagaaggaaactgaagctcagggaggatcggagtctcctctgaaagtctctcaggccataatattccacccctcctcccta

SEQ ID NO: 3175 - DNA, 120 bp, synthetic construct
  source 1..120: mol_type = other DNA
tcccagggaggaagggtggaatattatggcctgagagagtttcagaggaggctctgatcctccctgagcctcaatttctttctataagagatgtaacaatggtgaaccaatattgatata

SEQ ID NO: 3176 - DNA, 120 bp, synthetic construct
  source 1..120: mol_type = other DNA
tatgacaaaaggccgaatggaaagggggcttctgtttcttaagataggaagtttgggaacatgtgtttgattctcctgacacaaagagtctggagagatgcaggactcaggagtgtctaa

SEQ ID NO: 3177 - DNA, 120 bp, synthetic construct
  source 1..120: mol_type = other DNA
attttcaatattttaatatctaatgagactcagctgatgcctaccagctgaatgttgccctgtctctggacagcaagtcacgtctcagggtcccgggatctgggacaggtggggacattg

SEQ ID NO: 3178 - DNA, 120 bp, synthetic construct
  source 1..120: mol_type = other DNA
atgggaatgggatttgtttcatagcaaggaaggaactgagttaaaggcatctgtctcgttgtttaggtatttcagtggggccggataggaacttatatctaagttttcaggaaggttagg

SEQ ID NO: 3179 - DNA, 120 bp, synthetic construct
  source 1..120: mol_type = other DNA
attggaaagggttggggaacacttatttgtgtgtcagggaacaatctgtctagatatttatgtgtttaaggtgttggttagggcagctgtccatgttttcaggtatttaagtgggtgaag

SEQ ID NO: 3180 - DNA, 120 bp, synthetic construct
  source 1..120: mol_type = other DNA
agagagagaccaggtttaaagaataagacaatcagaaaagaaacagaaaggccagacagagagatgcacatagaaacagagggataaggggacactccatggaggaagggaaggaagtgg

SEQ ID NO: 3181 - DNA, 120 bp, synthetic construct
  source 1..120: mol_type = other DNA
atgtcatgtgctgggatgcttcgcacccaggttctcacagtcagggagctggacatcccaagatcctgtctttctgatgctgaaactccaaaactccatttcctaagactctggtccaca

SEQ ID NO: 3182 - DNA, 120 bp, synthetic construct
  source 1..120: mol_type = other DNA
gcagagtttatttgagcaaagaagtgactcatgagttggacagctccctaaaccaggaaagacaccacacggcagtatggtcaagtggtatttacaggcagaaaaaggaggtgacataca

SEQ ID NO: 3183 - DNA, 120 bp, synthetic construct
  source 1..120: mol_type = other DNA
ctcagtatggaattcacaatggacaatgtcaacgtagttgagtgattctttaccttttcttcatgtttttgttgttcccactgtaatgagcccactggatgtacaaagaatggctgcata

SEQ ID NO: 3184 - DNA, 120 bp, synthetic construct
  source 1..120: mol_type = other DNA
aaaccaactgctagctgcacctgtaaacacatatctgtttctttcccctgagaaatgtccttagtgtatttgtggcagtgtctagagaaacagcagtgtcagccgcattttaaattaagt

SEQ ID NO: 3185 - DNA, 120 bp, synthetic construct
  source 1..120: mol_type = other DNA
ccataggtagtccccaggtcttgcatacgggatgcctggaagcaaaatatgccttttgcagccattattcagatacatttcctatatttagtagtgattatgttattagctagttaatag

SEQ ID NO: 3186 - DNA, 120 bp, synthetic construct
  source 1..120: mol_type = other DNA
ctattattaggggcataggccctctattactattttacaagagatctatctatgtctttccagtaggagtggatctgattgccatcaatcaataatacctgagaccaagggactccaatc

SEQ ID NO: 3187 - DNA, 120 bp, synthetic construct
  source 1..120: mol_type = other DNA
agaactcaggaaggaccaggcggccatctagggtctccatgagtgcatgcttcacattggaattacagactctaaagtacaaattttaatacaatgagttgcaatttatgcttctctaat

SEQ ID NO: 3188 - DNA, 120 bp, synthetic construct
  source 1..120: mol_type = other DNA
ggtctttggttatcagttagacactgtcactttacctggaagatacaaggtaattggtcacagactctcaaattatgaaacatttagatttttcaggggaatgacatggagggagccaag

SEQ ID NO: 3189 - DNA, 120 bp, synthetic construct
  source 1..120: mol_type = other DNA
caaatcatgcctctgttaacagaatttgctgttccttctagctcttggtatcccactgcccgctttctttatgaaagctggtatggtcattgaatatcccaatcctttacaaatttggaa

SEQ ID NO: 3190 - DNA, 120 bp, synthetic construct
  source 1..120: mol_type = other DNA
tatactaaaatgagttttcaaaaggatctttgtggctaccttattagttcatagaaagtggaggcttgtctggaatgatattaaagaatttttttcattttaattgttttagagacaggg

SEQ ID NO: 3191 - DNA, 120 bp, synthetic construct
  source 1..120: mol_type = other DNA
atctggggatccctcttcaccaaatagagttgcatcatacaggtaaaggtcccaagtgcctattgttttcttttcatcattttccatgtgtgacaagagtatcacgcaatcatgtgaatc

SEQ ID NO: 3192 - DNA, 120 bp, synthetic construct
  source 1..120: mol_type = other DNA
ataggcacatacatgtttgcataaagttgtgaggcttcacacactccctaaaactctttcataaaccttccaaggatcctctaggtattcacgaccatctattatgattgcatctcttgg

SEQ ID NO: 3193 - DNA, 120 bp, synthetic construct
  source 1..120: mol_type = other DNA
ttgtggggcagtgaaacaattgttaagtggagtaagcatgtcatccagaagtccagtgaaggggctttgcagagatcaatgcagggcatttgtaagtaaacttaacaaattttatgactt

SEQ ID NO: 3194 - DNA, 120 bp, synthetic construct
  source 1..120: mol_type = other DNA
tgcctgaaaccccacataatactgagcactatgcatactctttttttttcctatacaatcacattatatagggagggtggtatacacagtgcagacatggtggacaaaggatgattcgtg

SEQ ID NO: 3195 - DNA, 120 bp, synthetic construct
  source 1..120: mol_type = other DNA
tgtctgatagaggagcttcggaaatccaagggtgagtcctgggggatgaataggaaagaaagacaatgaaacactgagagatgcaggtgcacgggaatagaaagacagagaggtatataa

SEQ ID NO: 3196 - DNA, 120 bp, synthetic construct
  source 1..120: mol_type = other DNA
ttatttttgagttctccataacttggtgtctgtgagacatgtaggtgaagggtctctggctagcacctccatctcattcatgccaggtgtttaccatctctcttatcaaaatttctcaag

SEQ ID NO: 3197 - DNA, 120 bp, synthetic construct
  source 1..120: mol_type = other DNA
gtatacaggtatcacttaacaagtacagaataattcccagaagactggagagccctagatgtggaaagaagagattaagggggagtaataggtaggggtggaaagatggttttttatttg

SEQ ID NO: 3198 - DNA, 120 bp, synthetic construct
  source 1..120: mol_type = other DNA
ggcagaaatagagtcagagagagactgagagaaggaagatgagcaaaaacaagacaaagaagagcagaaatcaagagattctgagagacagagttgatgagaatgagtgtgaaagagagg

SEQ ID NO: 3199 - DNA, 120 bp, synthetic construct
  source 1..120: mol_type = other DNA
gcccagactgcttctggttcttctgtatccttgcttctcagtctttggtaaagctctccacctaaagaaaatgaaggataaatgacaataaggaacagcatttcttcattttctcccatt

SEQ ID NO: 3200 - DNA, 120 bp, synthetic construct
  source 1..120: mol_type = other DNA
aatcattttattaatatctgacacagcaagggagatgaggagaggtgggaagagggagagaaaagtatgagaaagacaaataaacaggctgaggtagacaatgggtgacacagaaaggaa

SEQ ID NO: 3201 - DNA, 120 bp, synthetic construct
  source 1..120: mol_type = other DNA
ggctagattccaaccaagccaattctgttggtggatgcatggatgcatgaagaatctgtccatgcgttctcccactgttttcttccatcacttaaggattttttgttctaaggtttttgt

SEQ ID NO: 3202 - DNA, 120 bp, synthetic construct
  source 1..120: mol_type = other DNA
ttcatgcattcatccatccttctacgaactaggtttcactcttatccttccatgagtcaacctttcaattcacccttaatccatccgtgatttccttcatttatcacaataattcactca

SEQ ID NO: 3203 - DNA, 120 bp, synthetic construct
  source 1..120: mol_type = other DNA
atctgtaatattcattagatttcaagcagtgagaattcttgttgcttcctccctcctcccctcaccccatgctgattactttgaggggtatcaaggatctaaccctttactataggtttt

SEQ ID NO: 3204 - DNA, 120 bp, synthetic construct
  source 1..120: mol_type = other DNA
ttttaacatctctaaacctcagtgagttcattttcttaaaaagaaaaaatctgttgggcaccactgtaagcccagtgctgtactgggggctgaagataatgcatcaaacaagtcacacag

SEQ ID NO: 3205 - DNA, 120 bp, synthetic construct
  source 1..120: mol_type = other DNA
gctgaagcttggctgccctgattgtccaaggttacttgttacaagaatatactctcaagtttgtttacatgttgagttacattacaatttgttatgtagggaggctgctttaggccaaat

SEQ ID NO: 3206 - DNA, 120 bp, synthetic construct
  source 1..120: mol_type = other DNA
ggaaggaggaggggagaaaggagggaaaggagagaaacagaataagagataggaaaaagagagagtgacataaaaagagaggaagaaagaatgaacaagacaaataaggtatctttagag

SEQ ID NO: 3207 - DNA, 120 bp, synthetic construct
  source 1..120: mol_type = other DNA
gctattctaagaatttttacaattgtctcctttaacctcacaagagccctttgagggaggtgccattctccccatatgagaagtgaagaacactaagaatgttgtcataaatgtgctcac

SEQ ID NO: 3208 - DNA, 120 bp, synthetic construct
  source 1..120: mol_type = other DNA
ctgctacaagccagcttccttcccctccatggcaccagttgtctgaggtcacattgcaagtgagtgcaggagtgagattatcgaaaattataatatacaaaatcatatatatatatatgt

SEQ ID NO: 3209 - DNA, 120 bp, synthetic construct
  source 1..120: mol_type = other DNA
tacctatcaagctgtcactccccataccccattctctttttcatctcggcccctgtcaatctggtttttgtcactatggacttaccaattctgaatatttcccataaacagaatcataca

SEQ ID NO: 3210 - DNA, 120 bp, synthetic construct
  source 1..120: mol_type = other DNA
gtctggccccactcctctcccgattattggaaatatcctgcagttagatgttaaggacatgagcaaatccttaaccaatgtaagtatgctttatgttcctccagtaatgtacaaggtgta

SEQ ID NO: 3211 - DNA, 120 bp, synthetic construct
  source 1..120: mol_type = other DNA
acagacatgagccattgcacttgacccctttgctcgttttaaatagaattatttatttgttattgagtaatttgagtttctaagtattttgggtggtcagaatctcatttgtctagtttt

SEQ ID NO: 3212 - DNA, 120 bp, synthetic construct
  source 1..120: mol_type = other DNA
attatttcatcaggaaacagacaatttcacttcatcctttcctacatgaatacatcctttcctatacgaatattcctatatgaatattttctgtctttagtctaattgctctgactagga

SEQ ID NO: 3213 - DNA, 120 bp, synthetic construct
  source 1..120: mol_type = other DNA
gatactatctctgttggatccactctccttctgtggtgattataccagtggatctcaaagtgggctgggcagtagaatcatttgggtgatttaaaaaggtgtagattttttagtattgat

SEQ ID NO: 3214 - DNA, 120 bp, synthetic construct
  source 1..120: mol_type = other DNA
aggccctgattgatcatggagaggagttttctggaagaggaagttttccagtggctgaaaaagttaacaaaggacttggtaaatgtgcatgtatcgtgtgtatgtgtacatgtgtatgta

SEQ ID NO: 3215 - DNA, 120 bp, synthetic construct
  source 1..120: mol_type = other DNA
cttgtggcacagacatagtgggaatgacttctttacatcttttgggcatggaacaactgacatgtactttcatttgtttggtctatatttgtacagtcagtctcactaacatgtctgggg

SEQ ID NO: 3216 - DNA, 120 bp, synthetic construct
  source 1..120: mol_type = other DNA
ctgttttggggcaacctgatcggttgacctcaccatatctaaatggatacaaaatcctcggtgaattttaaaacaactggatttgggagtaaaagtttatttatcctctccccatccaag

SEQ ID NO: 3217 - DNA, 120 bp, synthetic construct
  source 1..120: mol_type = other DNA
aactggaagcattccctttgaaaactggcacaagacaaggatgccctctctcaccactcccgttcaacatagtgtcggaagttctggacagggcaatcaggcaggagaaggaaataaagg

SEQ ID NO: 3218 - DNA, 120 bp, synthetic construct
  source 1..120: mol_type = other DNA
ctagaagaaaacctaggcaataccatttaggacataggcatgggcaaggacttcatgtctaaaacaccaaaaacaatggcaacaaaagccaaaattgacaaatgggatctaattaaacta

SEQ ID NO: 3219 - DNA, 120 bp, synthetic construct
  source 1..120: mol_type = other DNA
gctaaatgacgagttaatgggtgcagcacaccaacatggcacacgtatacatatgtaacaaacctgcacgttgtgcacatgtaccctaaaatttaaagtatataaaaaaaagtgtaatcc

SEQ ID NO: 3220 - DNA, 120 bp, synthetic construct
  source 1..120: mol_type = other DNA
aacatagatgacttttgcctgtttacatttgttccatcaacctgaattttcccataccctttctgtctttagtctccccctctgctggtactacacacagttactttaactactcgttat

SEQ ID NO: 3221 - DNA, 120 bp, synthetic construct
  source 1..120: mol_type = other DNA
gatcgatttgattataaagatcagaggtttcttaacttgatggaaaaattcaatgaaaacctcaggattctgagctctccatggatccaggtgagatcaagagcttctcttcctgagata

SEQ ID NO: 3222 - DNA, 120 bp, synthetic construct
  source 1..120: mol_type = other DNA
gcctgcctctgtagactccacctctgggggcagggcatagccaaacaaaaggcagcagaaaactctgcagacttaaatgtccctgtctgacagctttgaagagagtagtggttctcccag

SEQ ID NO: 3223 - DNA, 120 bp, synthetic construct
  source 1..120: mol_type = other DNA
aaagtgacggggagaatggaaccaagttggaaaacactctgcacgatattatccaggagaacttccccaatctagcaaggcaggccaatattcaaattcaggaaatacagagaatgccac

SEQ ID NO: 3224 - DNA, 120 bp, synthetic construct
  source 1..120: mol_type = other DNA
gacttagactcccacacaataataatgggagactttaacaccccactgtcaacattagacagatcaaggagacagaaggttaacaaggatatccaggaactgaactcagctctgcaccaa

SEQ ID NO: 3225 - DNA, 120 bp, synthetic construct
  source 1..120: mol_type = other DNA
accaaccaaaaaaagttcaggaccagatggactcacagctgaattctatcataggtacaaggaggagctggtaccattccttctgaaactattccaatcaatagaaaaagagggaatcct

SEQ ID NO: 3226 - DNA, 120 bp, synthetic construct
  source 1..120: mol_type = other DNA
caaacaaatggaggaacatttcttgctcatgggtaggaagaatcaatatcatgaagacggccatactgcccaaggtaatttatagattcaatgtcatttccatcaatctaccaatgactt

SEQ ID NO: 3227 - DNA, 120 bp, synthetic construct
  source 1..120: mol_type = other DNA
ggtgctggagaggatatggagaaataggtacagttttacactgttggtgggactgtaaactagttcaaccattgtggaagtcagtgtgatgattcctcagtgatctagaaatagaagtac

SEQ ID NO: 3228 - DNA, 120 bp, synthetic construct
  source 1..120: mol_type = other DNA
tagttaggagaagtctgaagcctatagcttagagagtgtcttcctcatgaaaaattgcactcactgggcagtggcattacagaaacaggcttaatttggattaatctttctgtaaatctg

SEQ ID NO: 3229 - DNA, 120 bp, synthetic construct
  source 1..120: mol_type = other DNA
ttgctttctgtttgttagttttcctcctaacagtcaggcccctcttctgcaggtctgctggagtttgctgggggtccactccagaccctgtttgcctgggtatcaccagcagcggctgca

SEQ ID NO: 3230 - DNA, 120 bp, synthetic construct
  source 1..120: mol_type = other DNA
ttatttggccatcttgccccaatcccagtccagaactttgtatgtaccaagctgtgaagtgaatgtttgaaaactggaaattttggatactcttatatagtagctctggaaatcagagtc

SEQ ID NO: 3231 - DNA, 120 bp, synthetic construct
  source 1..120: mol_type = other DNA
tcaggattttagtgctctactgtgtgccttaactataatcgtttgccctaggtagctttgggttgttcatttgtcttaggagatttttgagaaatgtccattgcttttccatcctgagtg

SEQ ID NO: 3232 - DNA, 120 bp, synthetic construct
  source 1..120: mol_type = other DNA
tttggcaaaaggggaggaggttttggagaacagatgctaccaggaagttctgaataggataggggtgtttgctgcttcagcaaggtaattaaggttaagatgacaaaatgattggatttt

SEQ ID NO: 3233 - DNA, 120 bp, synthetic construct
  source 1..120: mol_type = other DNA
ggagagaataaaagaacatcaagaatccctggacatgaacagtgctcgggactttattgattgtttcctgatcaaaatggaacaggtaaaatgttatttgtttgcctgcatcttgtggtt

SEQ ID NO: 3234 - DNA, 120 bp, synthetic construct
  source 1..120: mol_type = other DNA
aatagtggtagggtcaatatggaaactgtgaggaaggtaatatagatgcttcaggacactaaggtgcaaagtactctttgaactgagaagaggcccaatccagaacaaactgaaaagagt

SEQ ID NO: 3235 - DNA, 120 bp, synthetic construct
  source 1..120: mol_type = other DNA
agaaaacctaggcatgaaatttgctgcaccatttcgtattctcactacaatgttttgaggattccactttctccacaaccttgctaatgtttcttatctttttgattccagccatcccag

SEQ ID NO: 3236 - DNA, 120 bp, synthetic construct
  source 1..120: mol_type = other DNA
gtgaaatccaatttatttatttatttgcatggtttcttgcaatttttttgtcacgtttaagaaatgatttcttagtccaatatcacaaagattcaccccaagttttcttcaaatggtttt

SEQ ID NO: 3237 - DNA, 120 bp, synthetic construct
  source 1..120: mol_type = other DNA
tgttaccaatgggcatgatgacctttgtctagcaagtacatctgttgagaggactaggtttgtcttactgtggttgattacataatattaggcatgccacaggtcacatggagattataa

SEQ ID NO: 3238 - DNA, 120 bp, synthetic construct
  source 1..120: mol_type = other DNA
tttttttttttttatttaaggttggttgaatcaatggatgtggaatccatggataggaaggtggattgtactctattattagctatattcaactggctgtgcaatttattattttttaaa

SEQ ID NO: 3239 - DNA, 120 bp, synthetic construct
  source 1..120: mol_type = other DNA
caccaacacttgttttttctctctttgataatagccattctaacagatgtgaggtgatagctcattgtgtttttaatttgtaactttttaatgattagtgttgttaagcatctttttatg

SEQ ID NO: 3240 - DNA, 120 bp, synthetic construct
  source 1..120: mol_type = other DNA
tcctctccagcacctgtttcctgactttttaatgatcgccattctaactggtgtgagatggtatctcattgtggttttgatttgcatttctctgatgaccagtgatgatgaacatttttt

SEQ ID NO: 3241 - DNA, 120 bp, synthetic construct
  source 1..120: mol_type = other DNA
tgttcttccatttgtttgtgtcctcttttatttcattgagcagtggtttgtagttcttcttgaagaggtccttcatatcccttggaagttggattcctgggtattttattctctttgaag

SEQ ID NO: 3242 - DNA, 120 bp, synthetic construct
  source 1..120: mol_type = other DNA
ggtcctggactttttttttgttggtaggctcttaattattgcctgaatttcagagcctgtgattggtctattcagggattcagcttcttcctggtttagtcttgggagagtgtatgtgtc

SEQ ID NO: 3243 - DNA, 120 bp, synthetic construct
  source 1..120: mol_type = other DNA
ttattgttgtgtaggagtctaattatcttcgtaggtctctaaggacttgctttatgaatctgggtgctcctgtattgggtgcatatatatttaggatagttagctcttcttgttgaattg

SEQ ID NO: 3244 - DNA, 120 bp, synthetic construct
  source 1..120: mol_type = other DNA
ctctctgttatattctgttggttgatgtgtccatttttatgccagtaccatgctgttttaattactattaatttgtagtatagcttgaaatcaggtaatgtgatgcctccagctttcttc

SEQ ID NO: 3245 - DNA, 120 bp, synthetic construct
  source 1..120: mol_type = other DNA
ttctcaattgtatggtgtagtgcctgggtgaggttggtgctgtagctttttcttcccagtctatgtggatattttctttgttgctcagtacatagaagtctctcaacttgtttctgactt

SEQ ID NO: 3246 - DNA, 120 bp, synthetic construct
  source 1..120: mol_type = other DNA
tatcacctctaccttcatatatgtgttttgagtaaaaaggagagaaagtgccatcaacaggtacctgcttatatgtcatagacaagaaatatgtttcatggccaacacagctccaaaaga

SEQ ID NO: 3247 - DNA, 120 bp, synthetic construct
  source 1..120: mol_type = other DNA
ggactgagagaggtgaagacagtgtgatcagtagcaaaagtaataaagccctggattttagtgactaaatacttttaataaagtgtctagatttcatgggagacgatttgtagcaggcac

SEQ ID NO: 3248 - DNA, 120 bp, synthetic construct
  source 1..120: mol_type = other DNA
attggcaattcttttgtggttggtttgatgccattttttaatgttttggtaaatttctatttttatagacttaggggtacaagtgcaattgtgttcatgaatatattccctagtggtgaa

SEQ ID NO: 3249 - DNA, 120 bp, synthetic construct
  source 1..120: mol_type = other DNA
gttcctaaaatacagcagccaggtgtaaactccagaggacaagtagcaccagtggaaagacctccatttttcaccatttagatagaaaattcttaccaaatgtccagcaaagtgaatgaa

SEQ ID NO: 3250 - DNA, 120 bp, synthetic construct
  source 1..120: mol_type = other DNA
gggggaagtgtgaatgtgtgtgcatgtttctgtttgtgggtgtgtgtctatttgttatggggtgatgatggagatataagtcctcatctttcttaccatgaggttttagaaattttcaaa

SEQ ID NO: 3251 - DNA, 120 bp, synthetic construct
  source 1..120: mol_type = other DNA
aattcaaaaactacctcatccccaaggtaagcttgtttctcctacactacatctccatgctcttcaagtccccaaattcatagtatagtcccaatcctctaacaacacatgatgagagaa

SEQ ID NO: 3252 - DNA, 120 bp, synthetic construct
  source 1..120: mol_type = other DNA
cactggttaggatttccaggacagcgttgaataaatcatgatggtgggcatccttgtttcatatatgatgttcaggatgggtggagatttaacatctcaccagtgagaatgatgttttat

SEQ ID NO: 3253 - DNA, 120 bp, synthetic construct
  source 1..120: mol_type = other DNA
aaattgactgtaacctctctgagttcccccatgcctgcaagcctgagtaatttttgtctcaacatcttttccagtgccttctaacacatggtttctgtgtttattgagactttttagttg

SEQ ID NO: 3254 - DNA, 120 bp, synthetic construct
  source 1..120: mol_type = other DNA
tgtattcaattatatggtatctccccactctccacattactgggagtgttagaaaatctgtagcaactattatgtagcataatatctttctagaatgaatatatgtgtgtgtaggtatat

SEQ ID NO: 3255 - DNA, 120 bp, synthetic construct
  source 1..120: mol_type = other DNA
cttgcccgaatctatggtcctacctgaatggctgcaaaaatgatgatttttctaaatttatccttccttctgtgttttttaggttggattcatctctgatgaagagttcccccacgtgtt

SEQ ID NO: 3256 - DNA, 120 bp, synthetic construct
  source 1..120: mol_type = other DNA
ctcaaattcccaaacaggggctgcgtgggaaaaatgagggaggacttttgtatctagggttttagcaagttaaaatgaagatgacaggaaaggcttatttatcaacaaagagaagagttg

SEQ ID NO: 3257 - DNA, 120 bp, synthetic construct
  source 1..120: mol_type = other DNA
ataagaaccctccccactttttaatagccacagggatctctttcccagttccaaagaggaattaatgaagaccaggtatgtttagaggcttctatttaaaaactgtcttctggaagtcct

SEQ ID NO: 3258 - DNA, 120 bp, synthetic construct
  source 1..120: mol_type = other DNA
tggaacagaatagagaacccagaaataaagcagcatacctacagccatctaatcttaaacaatgctgacaaaaaacaggcaatgggaaaagactccctattcaataaatgatgctgggat

SEQ ID NO: 3259 - DNA, 120 bp, synthetic construct
  source 1..120: mol_type = other DNA
aacaacaacaaaaaaggtaatccatgtgtgaggtgtgtgaaaactgaagtgatgaaatacagcagcaagtggggatgtacaccagggtccaagcttgatgataaaccgggattcagaagg

SEQ ID NO: 3260 - DNA, 120 bp, synthetic construct
  source 1..120: mol_type = other DNA
tggggctttggggagttgatccagtttttcaaactgaaaaagctagaatgtaggttaatttaattctgcctctagatacatcactgagctacccaagagctcttcttaatgggtgaaact

SEQ ID NO: 3261 - DNA, 120 bp, synthetic construct
  source 1..120: mol_type = other DNA
taaagcttgaaactttgtggtgtgttggaaattgatgaagaatggatatgcctagagctgagagtggaggagatgaagaatggaaggagtgatatagaacatcagactgggaacagaatg

SEQ ID NO: 3262 - DNA, 120 bp, synthetic construct
  source 1..120: mol_type = other DNA
cacatcttcccattccctcaagatccaatgaacatccaacctccattaaagagagtttcttgggtcacttcctaaatatatctgctattctccatactctgtatcacttgtattgaccac

SEQ ID NO: 3263 - DNA, 120 bp, synthetic construct
  source 1..120: mol_type = other DNA
ttcagaatagccgtgaaaattgaacttctctgaagaaataatttatgcctgttgtaaaggaagcagctgtgggtttaggaccagcaaaagcagataagcggtagataagaagttatagac

SEQ ID NO: 3264 - DNA, 120 bp, synthetic construct
  source 1..120: mol_type = other DNA
aagagtgagcagcagcaagatttattgtgaagagcaaaagaacaaagcttccacagcatggaaggggacccaagagggttgccgctgctggctcaggtgggcagcttttattcccttatt

SEQ ID NO: 3265 - DNA, 120 bp, synthetic construct
  source 1..120: mol_type = other DNA
tgtaaactgtctgagaaattctttgagagtgtgtggtagtaggataatgaagtagataaactggctattctggttcctgtagcagtagccattcctaaccctataagtagggatattagt

SEQ ID NO: 3266 - DNA, 120 bp, synthetic construct
  source 1..120: mol_type = other DNA
tgaaggtggtaggttaatttggtaaagatccagttttttgtgggaatgggggtggcaacataagcagaggttgatagatacaaagccaacagtcatttgccagggaaggattggactggt

SEQ ID NO: 3267 - DNA, 120 bp, synthetic construct
  source 1..120: mol_type = other DNA
ttggactgagccccattttgtgagaatttcggattctcaacaaggtcatggacaaaagagtaaagagtaggccatgggaaatgagattcttgtgttagtttccttaagtgcctcttgact

SEQ ID NO: 3268 - DNA, 120 bp, synthetic construct
  source 1..120: mol_type = other DNA
gaacttcctttctttccatattgcagcatgggtatgtaggattagataagctacttgctatttgtatacacatttattctttttccctttcccagttctaaggctcgggtaagtgccacc

SEQ ID NO: 3269 - DNA, 120 bp, synthetic construct
  source 1..120: mol_type = other DNA
taagattaggcctagatatttgacctgctgtaggcaaagctgggcctttgacctagacgccttgtacccttgattagctacaaagttcaagagatctagagtaccctgctggcatgaggc

SEQ ID NO: 3270 - DNA, 120 bp, synthetic construct
  source 1..120: mol_type = other DNA
ccaggaggaagtcaatttcctggccctcaatggttaaacatacccaggactcagtgagggtgatgacatgggctggcacttaccctgggcaccctgagtcctgttgttggatcatctggt

SEQ ID NO: 3271 - DNA, 120 bp, synthetic construct
  source 1..120: mol_type = other DNA
cttccccaggtctgccttgatctgctgtaaatcagagagggagaagcggccatgtacccaggttgggccaaatttacctccccctacagcttgaagggggcataactgatagcccggggt

SEQ ID NO: 3272 - DNA, 120 bp, synthetic construct
  source 1..120: mol_type = other DNA
tggagggccataccctgagggagggaagggatctccagagttggaagtgtgatgccttttgtcctcatttatatgaacaggaaggatagaatttctgaggatccccatatcctagcttca

SEQ ID NO: 3273 - DNA, 120 bp, synthetic construct
  source 1..120: mol_type = other DNA
tgacaggtgcccagtatttagcccctgaattctaaggaaaaataggacagaacagcaagtgaaagggatccagtggtacttactgcttggcaataggcaaaagtcccttcattgtcacca

SEQ ID NO: 3274 - DNA, 120 bp, synthetic construct
  source 1..120: mol_type = other DNA
cttgtttgtagttggaatttgcaaggcagaataatagggatgaggttagtccatgggtaattattagggcagttgcaccggtaaaacttcagggggttttaatgagaatagccatgataa

SEQ ID NO: 3275 - DNA, 120 bp, synthetic construct
  source 1..120: mol_type = other DNA
aatctaagtcaggcttagtaaatggacaaaacagtgacttcatttgctgttaactgtatctccttttctagctctcaaaaatctatggccctgtgttcactctgtattttggcctggaac

SEQ ID NO: 3276 - DNA, 120 bp, synthetic construct
  source 1..120: mol_type = other DNA
ttaattggactatgtttgtatggtcagcctcactgacttgtctagggtttcttttaggcccatgcttgccattctggccagtaatgacattctacagtttttattgcttaggcatatctt

SEQ ID NO: 3277 - DNA, 120 bp, synthetic construct
  source 1..120: mol_type = other DNA
agggatgtgaaagacctcttcaaggagagctacaaaccactgctcagggaattaagagattacaaaaacaaatggaaaaacgttccatgctcatgaatagtaagaatcaatattgtgaaa

SEQ ID NO: 3278 - DNA, 120 bp, synthetic construct
  source 1..120: mol_type = other DNA
gcctcgagaagctggagctgcatgtttttattcagtgcaggcacaatgctgaaaacctggagcccatgcaatctgtaggtaattaatatttattgttcccctttcagggaacatcaagaa

SEQ ID NO: 3279 - DNA, 120 bp, synthetic construct
  source 1..120: mol_type = other DNA
caatcacttgattacaacaactttatttcagagatcctccaccaaacaagaaaaccttttgtataatttaatttatttagctattaaatgatagacttggtctaatcaatgtcaaatttc

SEQ ID NO: 3280 - DNA, 120 bp, synthetic construct
  source 1..120: mol_type = other DNA
tctttgagctatttgttgtaatataaaaagctttgaaatccccaactattctcaccctttctatctcagtgctttgttgtctacagactttgcagactgatgtgattccctctgaaactt

SEQ ID NO: 3281 - DNA, 120 bp, synthetic construct
  source 1..120: mol_type = other DNA
atttggaaccacagaagctgccaagaaacactgaatagggcagaggtgtttgatgtctcagttgggattctagctgatgagacagctggttaggaatgaaaaaattattgtttttttggt

SEQ ID NO: 3282 - DNA, 120 bp, synthetic construct
  source 1..120: mol_type = other DNA
ggagaaagtaaaagaacaccaagaatcgatggacatcaacaaccctcgggactttattgattgcttcctgatcaaaatggagaaggtaaaatgttaacaaaagcttagttatgtgactgc

SEQ ID NO: 3283 - DNA, 120 bp, synthetic construct
  source 1..120: mol_type = other DNA
aaatgggcatcattattgcacacagtttattggagaatgggaaagaatggtttaacctaggtgggtttcctgcattcctgcagattgaaataggccttaaaatatttgcagtgagagtca

SEQ ID NO: 3284 - DNA, 120 bp, synthetic construct
  source 1..120: mol_type = other DNA
tgttgtgcaaccatcagctttctctggtttcaaaatgtttttatcacgccacaaaaacgtattatattcgctaaataatcactccattcccccactccatcatgtaataacctctaatct

SEQ ID NO: 3285 - DNA, 120 bp, synthetic construct
  source 1..120: mol_type = other DNA
atatttttcatttggagtgaggtagggtaggtcccagctacattcttttgtattttgtcatccaattgactcatcaccatttgttgaagagattctttcctcggactgaatggtctaggc

SEQ ID NO: 3286 - DNA, 120 bp, synthetic construct
  source 1..120: mol_type = other DNA
ctaaattttcctggggtacgatgacaaacctgagggtatatatcccaggtaatgtagctgcttcatcaccatgtagttgcatatgaattggacaatcaactttcccatttctggaaaaag

SEQ ID NO: 3287 - DNA, 120 bp, synthetic construct
  source 1..120: mol_type = other DNA
aactgctttccatagtggctgaactaacttacatttccaccagtagtgtataagttttcccttttttctgcagccttaccaacatctgttattttttggctttttaatcatatccattct

SEQ ID NO: 3288 - DNA, 120 bp, synthetic construct
  source 1..120: mol_type = other DNA
ttctttagggttttctaggcctgagatgggtcttctaggtctgagatggagcttctatatctactagtaaaagattagccttgtactcttgaagacagtagaaggatgggtattttttaa

SEQ ID NO: 3289 - DNA, 120 bp, synthetic construct
  source 1..120: mol_type = other DNA
ttttgatttgcattcttctaatgaccagtgatgacgagctttttttcatatgttttttggccacatagatgtcttcttttgagaagggtctgttgatatccttcacccactttttgatgg

SEQ ID NO: 3290 - DNA, 120 bp, synthetic construct
  source 1..120: mol_type = other DNA
gtaatttggattcctaggtattttattctctttgtagcaattgtgaatgggagttcactcatgatttggctctctgtttatctattattggtgtataggaatgcttatgatttttgcacc

SEQ ID NO: 3291 - DNA, 120 bp, synthetic construct
  source 1..120: mol_type = other DNA
gagattcaacttcttcctggtttagtcttgggagggtgtatgtgtccgggaatttatccatttcttttagattttctagtttatttgcgtagaggtgtttatagtaatctctgatggtag

SEQ ID NO: 3292 - DNA, 120 bp, synthetic construct
  source 1..120: mol_type = other DNA
tatatttaggatagttagctcttcttgttgaattgatccctttaccattatatattggcctagtttgtctcttttgatctttgttggttaaagtctgttttatcagagactaggattgca

SEQ ID NO: 3293 - DNA, 120 bp, synthetic construct
  source 1..120: mol_type = other DNA
tcttttttctctaaacttcccttctagcttcatttcattcatttgatcttcagtctctgataccctttcttccactagattgaatcggctactgaagcttgtgcatgcatcacatagttc

SEQ ID NO: 3294 - DNA, 120 bp, synthetic construct
  source 1..120: mol_type = other DNA
gtggacgcccatcccccagccttgctgccaccttgcattttgatctcagactgctgtgctagcattgagcgaggttctgtgggcatgggaccctctgagccacgcatgggatataatctc

SEQ ID NO: 3295 - DNA, 120 bp, synthetic construct
  source 1..120: mol_type = other DNA
aggtttgttacatatgtatacatgtgccatgttggtgtgctgcacccattaactcatcatttacattaggtatatctcctaatgttatccctccccccacccccaccccacgacaggccc

SEQ ID NO: 3296 - DNA, 120 bp, synthetic construct
  source 1..120: mol_type = other DNA
agatgtgaagtccttgcccatgccaatgtcctgaatggtattgcctaggttttcttctagggtttttatggttttaggtctaacatgtaagtctttaatccatcttgaattaatttttgt

SEQ ID NO: 3297 - DNA, 120 bp, synthetic construct
  source 1..120: mol_type = other DNA
catccctgacttgtgccagttttcaaagggaatgcttccagtttttgcccattcagtatgatattggctgtgcatttgtcataaatagctcttattatttttagatacgtcccatcaata

SEQ ID NO: 3298 - DNA, 120 bp, synthetic construct
  source 1..120: mol_type = other DNA
tcttgcttctctagttcttttaattgtgagttttggtgtcaattttagatcttttctgctttctcttgtgcatatttagtgctataaatttccgtctacacactgctttaaatgtgtccc

SEQ ID NO: 3299 - DNA, 120 bp, synthetic construct
  source 1..120: mol_type = other DNA
agtagcttgttattttgcctgttagttgatgcagtttttttcatagcattgatggtctttacaatttagcatgtttttgtagtggctcgtatggtttgttcctttccatgtttagtgctt

SEQ ID NO: 3300 - DNA, 120 bp, synthetic construct
  source 1..120: mol_type = other DNA
tagtgaggagctgtaatcccttgaggaggagaggcactctggtttttagaattttcagcttttctgctctggtctctccccatctttgtggttttatctacctttcgtctttgatgttgc

SEQ ID NO: 3301 - DNA, 120 bp, synthetic construct
  source 1..120: mol_type = other DNA
aatgagatgaacaaggtaccgcagttggaagtgcagaaatcacttgtcttctgcctcaatcatgctgggagctgcagaccagagctgttcctatttggccatcttgccactaaatctcta

SEQ ID NO: 3302 - DNA, 120 bp, synthetic construct
  source 1..120: mol_type = other DNA
tcccttatttgtccccacccatgtcctgctgattggtccattttaccgagtgctgattggtccattttacagggcactgattggtccatttttcagagcactgattggtccatttacagt

SEQ ID NO: 3303 - DNA, 120 bp, synthetic construct
  source 1..120: mol_type = other DNA
tctctccctatttttttctttcctttttccctctcccttccaatgggggtgtaactataaagtatgttgggtagggtctttgactttaattccatagctgtgtttacttctgtgggtagt

SEQ ID NO: 3304 - DNA, 120 bp, synthetic construct
  source 1..120: mol_type = other DNA
cccctaccttcctccagaccaactgctccgatttctggcctgagactaaaatatctgcgtggccatgatgccaggctgccaaagaatgattgactttttatgctcccatattaaaagcag

SEQ ID NO: 3305 - DNA, 120 bp, synthetic construct
  source 1..120: mol_type = other DNA
tgtccacattttcctccccaggtatcttagatgtctttcacgatttctgtggatttttcttcttgaatttaagcttacaaagttgatctttatgtactgtgctatttccaagtggctgaa

SEQ ID NO: 3306 - DNA, 120 bp, synthetic construct
  source 1..120: mol_type = other DNA
aattaaaattcccattcccttatcacttgctccgaaatttatctgaagtcaaagggaatggcttgcccaaagagaagtgtccagagacgtggatgatgtgacaagaaatgttgtagaacc

SEQ ID NO: 3307 - DNA, 120 bp, synthetic construct
  source 1..120: mol_type = other DNA
cccccttacttctctacctctactagctaccattctgttctctatttctgtgagattaactttcttagctaccatataagaataagaacatgcgttatttatctttccatgccaggctta

SEQ ID NO: 3308 - DNA, 120 bp, synthetic construct
  source 1..120: mol_type = other DNA
tccagttttcctgttgctatttaatgaaaagactgttctttcatcagtgaatgttcttggtgccttgtcaataatgtttgctataaaggcatggaataatttctgtgttctctgttctct

SEQ ID NO: 3309 - DNA, 120 bp, synthetic construct
  source 1..120: mol_type = other DNA
gtatgaatttaaatttccacaaaaaatatatgagggttcctttttcttcacatccttaccagcatatgttattgctcatctcttggatataagccactttaactggggtgagatgatatc

SEQ ID NO: 3310 - DNA, 120 bp, synthetic construct
  source 1..120: mol_type = other DNA
gctgccaccacgcctggctaattttttgtatctttagtagagactgagtttcaccatgttggccaggctggtctcaaactcctgaccctgtgatccacccacctcagcctcccaaagtgc

SEQ ID NO: 3311 - DNA, 120 bp, synthetic construct
  source 1..120: mol_type = other DNA
tataattttccctctaaacactgctttagctgtgtcttggagattctggtacactgtgtccttgttctcattggtttcaaagaacatctttattttgccttcattttgttatttacccag

SEQ ID NO: 3312 - DNA, 120 bp, synthetic construct
  source 1..120: mol_type = other DNA
tttccatatttagtgtttccttcaggagctcttgtaaggcaggcttggtgatgacaaaatccctcagcatttgcttgtctgtaaaggatgttatttctcctttgcctatgaagcttaatt

SEQ ID NO: 3313 - DNA, 120 bp, synthetic construct
  source 1..120: mol_type = other DNA
tgatgttggtgacctttgaatgggttttttgcgtggacatcctttttgttgatgttgatgctattcctttctgtttgctagtttttttcctaacagtcaggcccttctgctgcaggtctg

SEQ ID NO: 3314 - DNA, 120 bp, synthetic construct
  source 1..120: mol_type = other DNA
aggtctgttatttgagagttattatgtccctttggtggtgccatatttctttatttttcatgttgtgtccctgaatttatgtctatgcatgtgatggaacaattgctattccaaaatctc

SEQ ID NO: 3315 - DNA, 120 bp, synthetic construct
  source 1..120: mol_type = other DNA
ggcctgcctctgatgtagaaggggtgctctttagatttgagcccagcaagtagaatatggctactatcattaataagataggatatactaccttattaatgctaagtaaccaagctcaag

SEQ ID NO: 3316 - DNA, 120 bp, synthetic construct
  source 1..120: mol_type = other DNA
ttttttgccaaaaaatatgctgtgtgagtcagctaactgcagagtctgacaaatggaatttttaagcaagcatggaataagggggtaggaaataaagtttgggccagttggtctacagca

SEQ ID NO: 3317 - DNA, 120 bp, synthetic construct
  source 1..120: mol_type = other DNA
attgtgaataatgccgcaataaacatacgtgtgcatgtgtctttatagcagcatgatttatagtcctttgggtatatacccagtaatgggatggctgggtcaaatggtatttctaattct

SEQ ID NO: 3318 - DNA, 120 bp, synthetic construct
  source 1..120: mol_type = other DNA
tcaaaaaaaaaaaaaaaaaaaaaaaatctttaatccatcttgaattgatttttgtataaggtgtaaggaagggatccagtttcagctttctacatatggctagccagttttcccagcacc

SEQ ID NO: 3319 - DNA, 120 bp, synthetic construct
  source 1..120: mol_type = other DNA
tgtaaaagaacagaaattataacaaactatctctcagaccacagtgcaatcaaactagaactcaggattaagaatctcactcaaaactgctcaactacatggaaactgaacaacctgctc

SEQ ID NO: 3320 - DNA, 120 bp, synthetic construct
  source 1..120: mol_type = other DNA
ccgaatccagcagcacatcaaaaagcttatccaccatgatcaagtgggcttcatccctgggatgcaaggctggttcaatatatgcaaatcaataaatgtaatccagcatataaacagagc

SEQ ID NO: 3321 - DNA, 120 bp, synthetic construct
  source 1..120: mol_type = other DNA
aaaagaaaagaaaaaaaggacatctttgcacagtagaggaagataactgagagaaatgaagacagcatggcagtttcaaaagcaatagagctctggcccagtgtgtctggatttcatcga

SEQ ID NO: 3322 - DNA, 120 bp, synthetic construct
  source 1..120: mol_type = other DNA
ctgcagataataaatattcttttttcccctgtgtcagtatcccccatttaatgacaataacctaattacaaataagagttaggcctttttttgaacaattactaacctataacgttctag

SEQ ID NO: 3323 - DNA, 120 bp, synthetic construct
  source 1..120: mol_type = other DNA
agtatttggaagtgccaagggtcaaatatggtagagaatgaggttgaaaaacgaggctctctctgcctaggtttcctacacaactcttttcatcaagtaactaattttctcccacaagaa

SEQ ID NO: 3324 - DNA, 120 bp, synthetic construct
  source 1..120: mol_type = other DNA
tgccttgcaccaggcctagaaaacaactacttcagaatgaacctggtggataattcagaagtgagatgagacagcaagaacaagagatgtgacagattttatgagagtttccaataacta

SEQ ID NO: 3325 - DNA, 120 bp, synthetic construct
  source 1..120: mol_type = other DNA
tatggctgcatagtattccatggtgtatatgtgccacattttcttaatccagtctatcattgttggacatttgggttggttccaagtctttgctattgtgaataatgccgcaataaacat

SEQ ID NO: 3326 - DNA, 120 bp, synthetic construct
  source 1..120: mol_type = other DNA
ctgttctgttccattgatctatatctctgttttggtaccagtaccatgctgttttggttactgtagccttgtagtatagtttgaagtcaggtagtgtgatgcctccagctttgttctttt

SEQ ID NO: 3327 - DNA, 120 bp, synthetic construct
  source 1..120: mol_type = other DNA
tgcatcccagggatgaagcccactcgatcatggtggataagctttttgatgtgctgctggattcggtttgccagtattttattgaggatttttgcatgaatgttcatcaaggatattggt

SEQ ID NO: 3328 - DNA, 120 bp, synthetic construct
  source 1..120: mol_type = other DNA
tcccgagttctagtttgattgcactgtggtctgagagacagtttgccataatttctgttcttttacatttgctgaggagagctttacttccaactatgtggtcaattttggaataggtgt

SEQ ID NO: 3329 - DNA, 120 bp, synthetic construct
  source 1..120: mol_type = other DNA
gcccccactctcttctggcttgtagagtttctgccgagagatctgctgttagtcagatgggcttccctttgagggtaacccgacctttctctctggctgcccttaacattttttccttca

SEQ ID NO: 3330 - DNA, 120 bp, synthetic construct
  source 1..120: mol_type = other DNA
ccacttgaggaggcagtctgcgcattctcagatctccagctgcatgctgggagaaccactgctctcttcaaagctgtcagacagggacatttaagtctgcagaggttactgctgtctttt

SEQ ID NO: 3331 - DNA, 120 bp, synthetic construct
  source 1..120: mol_type = other DNA
aaatagtaggtcttattcatccctacttcccttctcaccccccacttccctttcaagtatctggtagccatccttctacactttatgtccattagttaaattctttttattttagatccc

SEQ ID NO: 3332 - DNA, 120 bp, synthetic construct
  source 1..120: mol_type = other DNA
caatgtcctggagatgttttctagtattttcctatagtattttcacagtttgaggtctcatacttaagtttttaatccattttgagttgatttttgtatgtggcaagatatatgagtcca

SEQ ID NO: 3333 - DNA, 120 bp, synthetic construct
  source 1..120: mol_type = other DNA
tggttaaattaattcctaggtattttattttatatatggctattttaaatgggattacattttaaatttctttttctcattgttcactgttggcatatatcaacactactgatttttatg

SEQ ID NO: 3334 - DNA, 120 bp, synthetic construct
  source 1..120: mol_type = other DNA
agtctgattttggtatcagggtaatactggcttcatagaatgagtttggaagtattctcttctcctttattttttggaatagtttgagtagggttggtattagttctttgttaaatgttt

SEQ ID NO: 3335 - DNA, 120 bp, synthetic construct
  source 1..120: mol_type = other DNA
gtagtaggggtggtgcagttgagatttcctcgggagaggtgccttcaatgtcattaacattggagcatgagctagcaggctggtccaagggtctgcagtagatcttagccatggactgca

SEQ ID NO: 3336 - DNA, 120 bp, synthetic construct
  source 1..120: mol_type = other DNA
aagggaacctctaaaagttcccctcgagtggtgtaggtttgagcaattacttgttgacagttatgttctatcttttctttattatttggaagaaatgtggctcagttaagagttgcacaa

SEQ ID NO: 3337 - DNA, 120 bp, synthetic construct
  source 1..120: mol_type = other DNA
tgagttgagatgttgggtttcaaagatcttcaaaggcaaacaagaattgagagtcaggatgtacagggatgcagaaaaagtcatccttaaggtccaggactgtaaaccactctgcttcct

SEQ ID NO: 3338 - DNA, 120 bp, synthetic construct
  source 1..120: mol_type = other DNA
aagcaagccctattagacatataattttcccaacttttcccttttccagagcctccaatgtccacttgcctggtatgcttcctcaatgcctcccttagtctctccagaaaggcagtagga

SEQ ID NO: 3339 - DNA, 120 bp, synthetic construct
  source 1..120: mol_type = other DNA
attggtcctaattctccagaatacatcttaggggtgtttttgccttgggggaaatgtttcccatctgaaaaaagaacatagggaagccaacacccctagtcattttctgatgagcataag

SEQ ID NO: 3340 - DNA, 120 bp, synthetic construct
  source 1..120: mol_type = other DNA
gagctacctttttgcttttttttatttttttttgactaagaataactctgaactggtgaggtgtgctcacaatgaggtttcctctaaaagttacttttctacttttagttaagtagttgt

SEQ ID NO: 3341 - DNA, 120 bp, synthetic construct
  source 1..120: mol_type = other DNA
ccaatattaccgctttggatgtccctttgttgtcaccaaaatgttaccaagggggtccttgctcacagagctcccaagatggtggtgatccacttccaagatggtggtgggccacttcca

SEQ ID NO: 3342 - DNA, 120 bp, synthetic construct
  source 1..120: mol_type = other DNA
ctgtagcagttggatgaaatattctgcaaatatctattagacccatttggtctatagtgcagatgaagttcaatatctccttgttgattttctatctggatgacctgtccaatgctgaag

SEQ ID NO: 3343 - DNA, 120 bp, synthetic construct
  source 1..120: mol_type = other DNA
ctgccccatgcagtgacctgtgacgttaaattcagaaactacctcattcccaaggtaagtttgtttctcctacactgcaactccatgttcttttattcctcaaattcacagtatgattct

SEQ ID NO: 3344 - DNA, 120 bp, synthetic construct
  source 1..120: mol_type = other DNA
taggccagccttataaaactaagtgagaaatgtttcctaatgtgagtctgtttttactgcctccccgtctccacttttcttcttgtgatcacttagttgtatctttgaaatgcctaataa

SEQ ID NO: 3345 - DNA, 120 bp, synthetic construct
  source 1..120: mol_type = other DNA
aaacttatttcttctcctataactaattaatgagaaatatactgaagaatcaggatgagtcgccagtctcccaatccactgcatcagctttggtgacctgttgaaggggaatgctgcatc

SEQ ID NO: 3346 - DNA, 120 bp, synthetic construct
  source 1..120: mol_type = other DNA
cagtcaagaaacaggcacataattcgggtatgttgtcatttttatctcctgtaatcaagaacagttcatttcctctgtttcctttcagtatgttgatctctgtgaagagttgaggccttt

SEQ ID NO: 3347 - DNA, 120 bp, synthetic construct
  source 1..120: mol_type = other DNA
tatacttgtgactatacttgttaccattctagaagacgtcgtttgaagctcaatcatatgtttattcacaaatgccctgtgaatagacactctggccatttcccatgtcaacagagactt

SEQ ID NO: 3348 - DNA, 120 bp, synthetic construct
  source 1..120: mol_type = other DNA
gagttcattgtagattctggatattagcccttcgtcagatgagtagattgcaaaaattttctcccattctgtaggttgcctattcactctgatggtggtttcttttgctgtgcagaagct

SEQ ID NO: 3349 - DNA, 120 bp, synthetic construct
  source 1..120: mol_type = other DNA
ttgtgcctttaagtcatagtctacacataagatttgtgaaaactgaagtgatgaaatagagcagcaggagtggacaggcactaaagcccaagcttgatgaaaaggacagattcagaaggt

SEQ ID NO: 3350 - DNA, 120 bp, synthetic construct
  source 1..120: mol_type = other DNA
gtgctacatgacaacaaagaatttcccaacccagagatgtttgaccctcgtcactttctggatgaaggtggaaattttaagaaaagtaactacttcatgcctttctcagcaggtaatata

SEQ ID NO: 3351 - DNA, 120 bp, synthetic construct
  source 1..120: mol_type = other DNA
gcatctggtgatagaatctccttcctttttctgtgacctttgatgtctgctttatatgtggcactgtagataccaagataacaaggaaagaaaccttccttcaagcattcacatttagca

SEQ ID NO: 3352 - DNA, 120 bp, synthetic construct
  source 1..120: mol_type = other DNA
gggaggaatattcagaccatagcacatttttcaatggaagcatgaacatgatgttgaggaatcccagggaaacgaacattttcttgctcagtgagatgagaaagagagtaaaaaaggaga

SEQ ID NO: 3353 - DNA, 120 bp, synthetic construct
  source 1..120: mol_type = other DNA
gatgcttcttctgacccgtcatctcacattttcccttcccccaagatctagtgaacattcagcctccattaaaaaagtttcactgtgcaaatatatctgctattccccatactctataat

SEQ ID NO: 3354 - DNA, 120 bp, synthetic construct
  source 1..120: mol_type = other DNA
atcaggttacttttattacttcatgtttccaacttagaatgaagtaatgaagtataaatatatgctttcatattgctgctcatgtgttttgtcatgcttctctcttcaaacatgaacaaa

SEQ ID NO: 3355 - DNA, 120 bp, synthetic construct
  source 1..120: mol_type = other DNA
ttagtagaggtgttgacaaacacccatgggtgagataaataaaaaagttgtctagtctgtttcctcctggagactgtagtggataatctgttttcctgcctatttcagctcctaaaggct

SEQ ID NO: 3356 - DNA, 120 bp, synthetic construct
  source 1..120: mol_type = other DNA
aaaatagctccatgcgggcaagtccttctcctgcacaaattcgttttcctgaagataacaaagaaaggaagtagttactccttgtgtttaactgtgactgtgacaaacagtcatttgtga

SEQ ID NO: 3357 - DNA, 120 bp, synthetic construct
  source 1..120: mol_type = other DNA
gattggaagaagacagggtgctctggaatcactgcaaaataacctcttagcttatgtaacctcttagcttcccttaaattttatcacctcctttgaagcacatgaaacatcctctgagtt

SEQ ID NO: 3358 - DNA, 120 bp, synthetic construct
  source 1..120: mol_type = other DNA
catttgaagtcttacatcttggatacttgtgtgcaaccttctgaatgtgttctccagatcatcaagtttggatgcccttttctggcctcatttgccgctctatttcatcacttcaaattt

SEQ ID NO: 3359 - DNA, 120 bp, synthetic construct
  source 1..120: mol_type = other DNA
ctttgttttggggcattacatactgcagtattgaggtgtagatagacccttgtattgagaaagaaaaacctcttctggttgtgtgctttgatgaaaactgtggattgtagtcctaatcct

SEQ ID NO: 3360 - DNA, 120 bp, synthetic construct
  source 1..120: mol_type = other DNA
gagggagatcgtgtttgcctcactgccttactgttctatgagaatgatttttgatagtttcccttactgcacaacttttctccaaagtgtttgtcttttagaacagccagaaggaagtta

SEQ ID NO: 3361 - DNA, 120 bp, synthetic construct
  source 1..120: mol_type = other DNA
tttgctagccttatttagggaaggtacaggagtctgatcacttggaatgacatgagccttctgggggctgggattttatgaaaataccaactatctgtttcataacaaatgtagagtatc

SEQ ID NO: 3362 - DNA, 120 bp, synthetic construct
  source 1..120: mol_type = other DNA
tgttaaattgtaatggttttataaatatatttgtgtgtgcggtggtggagcaggggcagtgatgcaattagcaatggtactgtcttcattcttccatttccaattgtggccactttgagc

SEQ ID NO: 3363 - DNA, 120 bp, synthetic construct
  source 1..120: mol_type = other DNA
ttcctggcacccattatttcttctgacttagtttcagacatgagatggagcacaacccccagtattggagaaacttagtatagagggtaaaatttgtagcaaccatgtaggtcccaaata

SEQ ID NO: 3364 - DNA, 120 bp, synthetic construct
  source 1..120: mol_type = other DNA
cttctcctcttgataaatcttcctctgctaatacttacaactccatcctctatgctgtgtcaattgtcagccctccattgtctctccatgttttagaaatttgccaaagacttattggct

SEQ ID NO: 3365 - DNA, 120 bp, synthetic construct
  source 1..120: mol_type = other DNA
ggtatggcagaaactgcagatcagttgactcaaactttatttcctgacagacctacaagttccattcatgaaatcattcgctgcttaggttagtcacacagaatatttctttccccagaa

SEQ ID NO: 3366 - DNA, 120 bp, synthetic construct
  source 1..120: mol_type = other DNA
gggctatatcatgaaaagtgttacactcttgaatcaagagtttgcaattttcttctgtcaaaaatttacaaagactcagtatcacctacatattcattacaaagctgaaatgtgtaaaac

SEQ ID NO: 3367 - DNA, 120 bp, synthetic construct
  source 1..120: mol_type = other DNA
ctctctctttaacagtccatttggcttatgattattcacctgtaatattggctcttccttctgaggataattgaacattgacatctttgtcagccaactggaaatctctgatgcctcagg

SEQ ID NO: 3368 - DNA, 120 bp, synthetic construct
  source 1..120: mol_type = other DNA
aaaaaatactattgaattactgacatcctctcttcccctggcagcagtggcatggttcagagagtatttctgagtactgagggagggagagcacagcaattatagagcataaaattagtg

SEQ ID NO: 3369 - DNA, 120 bp, synthetic construct
  source 1..120: mol_type = other DNA
tcaacacattcccagctagctggctatcaggaaagactccttctacttgagaaatcagagtgaaatataaagtcgactttgtcttgcaactaggtactagcttgatcacaggagggtaga

SEQ ID NO: 3370 - DNA, 120 bp, synthetic construct
  source 1..120: mol_type = other DNA
tctggaaagcctaacaagaaggatgtgtacaaaaaaaaccccagactacaaagacaacaaaaatacctaactctagaatgcccagcccccgatgaatatctacaagtataaagaaaatcc

SEQ ID NO: 3371 - DNA, 120 bp, synthetic construct
  source 1..120: mol_type = other DNA
agaaatccaaaacctgaacaaaattatagcaaataatcagattgaactcaagagaaagcatcctagtagagaaaagctcaagacccaatgacttcaatgatgaattctagcaaatattta

SEQ ID NO: 3372 - DNA, 120 bp, synthetic construct
  source 1..120: mol_type = other DNA
aaataataaacaaattccgtaaagttgcaagatacaaaataatatacaaaaatcggtagtatttctatattcctacagcgaacaatttaaaaaataattttaaaaagtaatcccatttac

SEQ ID NO: 3373 - DNA, 120 bp, synthetic construct
  source 1..120: mol_type = other DNA
gaaaatctaaaagcttatgccctaaaatcagggggtaaaaaaacccaagtatatctacttttactactgctattcagcatcgttcttaaggtcccagccaaaacaattagacaagaaaga

SEQ ID NO: 3374 - DNA, 120 bp, synthetic construct
  source 1..120: mol_type = other DNA
taagattggtccagatatcagttgtgtctgtttatatcagcaatgagcaatatgaaaataaaatcaaggaaatagttacatttgcaatagcatcaaaagggccaaaagccctgagaacct

SEQ ID NO: 3375 - DNA, 120 bp, synthetic construct
  source 1..120: mol_type = other DNA
tttgtatttcatacgtatttagtaagggtttaatgcccagaatccataaacaattacctacagttcaacaacaaatgacaagcaacccagtatagaaataagcaaagggccaggtgtggt

SEQ ID NO: 3376 - DNA, 120 bp, synthetic construct
  source 1..120: mol_type = other DNA
tggagttgggaatgaggtgtaactatttaatgatatagtatgtttctgtggagtgataaaaaagttttgaaagtagagaggaatggtagttgtgatgcagggcaggcgagtcccaatgtg

SEQ ID NO: 3377 - DNA, 120 bp, synthetic construct
  source 1..120: mol_type = other DNA
acctctccacaaactactcattccatctgaaacctttcttctgttccacactgaaaatatattaagggctatgtcaatgtgcagggcatacaggaagcccatttatgataagccattctt

SEQ ID NO: 3378 - DNA, 120 bp, synthetic construct
  source 1..120: mol_type = other DNA
gtgccacattttcttaatccagtctatcattgttgcacatttggcttggttccaagtctttgctattgtgaatagtgccacaataaacatacgtgtgcatgtgtctttaaagcagcatga

SEQ ID NO: 3379 - DNA, 120 bp, synthetic construct
  source 1..120: mol_type = other DNA
tggtctatatctctgttttggtaccagtaccaagctgttttggttaatgcagccttgtagaatagtttgaagtcaggtagcctgatgcctccagctttgttcttttggcttaggattgac

SEQ ID NO: 3380 - DNA, 120 bp, synthetic construct
  source 1..120: mol_type = other DNA
atgatgcccacttgatcgtggtggataagctttttatgtgctgctggattcagtttgccgtaatttattgaggattcttgcattgatgttcatcagggatattggtctaaaattctcgtt

SEQ ID NO: 3381 - DNA, 120 bp, synthetic construct
  source 1..120: mol_type = other DNA
tagtttgattgcgctgtggtctgagagacaatttgttgtaatttctgttcttttacatctgctgaggagtgctttacttccaactatgtggtcaattttggaataagtgtggtgtggtgc

SEQ ID NO: 3382 - DNA, 120 bp, synthetic construct
  source 1..120: mol_type = other DNA
ctggcttgtagagtttctgccgagagatccgctgttagtctgatgggcttccctttgtgggtaacccgccctttctcaatggctacccttaacattttttccttcatttcaactttggtg

SEQ ID NO: 3383 - DNA, 120 bp, synthetic construct
  source 1..120: mol_type = other DNA
caaatgttgctgcccgatcgttcctctggaagttttgtctcagaggggtacccagccctgtgaggtgtcagtctgcccctactagggggtgcctcccagttaggctattcaggggtcagg

SEQ ID NO: 3384 - DNA, 120 bp, synthetic construct
  source 1..120: mol_type = other DNA
gaatcctgaagttttcattgaatcttttcatcagggtgagaaaattctgatctttataatcaaatcgtttctggaaaacaacggagcagatcacattgcagggagcacagcccaggatga

SEQ ID NO: 3385 - DNA, 120 bp, synthetic construct
  source 1..120: mol_type = other DNA
aaagggtgcccaaattcacatctataggtcctaaataagagtgacacgaaatgaaagggttgtgaataaagttggaacattgaacaacaagaaacctgctgagttagctgcttctatgcc

SEQ ID NO: 3386 - DNA, 120 bp, synthetic construct
  source 1..120: mol_type = other DNA
attgagcagaaaataggattaaatgaccttttattcctacaccctatgaaccaacacatttatacaggcaaagcacagatacacaaaacctcccttgtctctgtgcttcaaatctccctc

SEQ ID NO: 3387 - DNA, 120 bp, synthetic construct
  source 1..120: mol_type = other DNA
cttatagatggcctgtgatgtgccacgcaatgacccaggcaattggtacacaaatcacacagttcatcctcacttcaacacattcagcacattcatttgacctgttttaaaaatgaagaa

SEQ ID NO: 3388 - DNA, 120 bp, synthetic construct
  source 1..120: mol_type = other DNA
tcaaataacttaccctttgcaattggctggaggaacataaggcagacttacattggtgaaagatttgcagatgtccttaacatctatctgtagcatatttccaataataggaagaggagt

SEQ ID NO: 3389 - DNA, 120 bp, synthetic construct
  source 1..120: mol_type = other DNA
ccccactcctctcccagtgattggaaatatcctacagataggtattaaggacatcagcaaatccttaaccaatgtaagtatgctccttcagtggcttgcaaaaggtaagtaaattcacct

SEQ ID NO: 3390 - DNA, 120 bp, synthetic construct
  source 1..120: mol_type = other DNA
ccccaaaatgaccttagcatttagtaatggtaggaagaaggtcagaagatgtataagtattagggttttttctcaagtgaaagatggtttagcagtgttaatatgatatgtgaacacccc

SEQ ID NO: 3391 - DNA, 120 bp, synthetic construct
  source 1..120: mol_type = other DNA
ttcttgaagctgggtattggtcttaaggtagactcgaaagtgctgataaatttctcaagcatcagtgtttgaataagcggagtttcaaattttggtctgctgtacattagctgtgagaca

SEQ ID NO: 3392 - DNA, 120 bp, synthetic construct
  source 1..120: mol_type = other DNA
tcatgctaaatcaggcttagcaaatggacaaaatagtaacttcgtttgctgttatctctgtctactttcctagctctcaaaggtctatggccctgtgttcactctgtattttggcctgaa

SEQ ID NO: 3393 - DNA, 120 bp, synthetic construct
  source 1..120: mol_type = other DNA
agcctcactgacttctctggggtttcttttaggcccgtgcttgccattctggccagtaatgacattctacagtttttattgcttaggcatatcttagtgcagttctcatcaattattatt

SEQ ID NO: 3394 - DNA, 120 bp, synthetic construct
  source 1..120: mol_type = other DNA
ttgcttttgaaagaagtgaaatatggctctgttctgctcagcccacaggcagccagacttcaaggttatctcacttgttccctgaacatcgctgttatcctgttttttttttcaaggtgc

SEQ ID NO: 3395 - DNA, 120 bp, synthetic construct
  source 1..120: mol_type = other DNA
cacaaatggaaaaaaattccgtgctcatgaatagaaagaatcaatactgtgaaaatagccatactgcccaaagtaattcatagattcaatgctatacccgtcaaactatcattgactttc

SEQ ID NO: 3396 - DNA, 120 bp, synthetic construct
  source 1..120: mol_type = other DNA
tgggtatatgcccaaaggattataaaccattctactataatgacacacgcccatgtatgtttatgtggcaccgttcacaatagcaaagacttggaaccaacccaaatgcccatcaatgat

SEQ ID NO: 3397 - DNA, 120 bp, synthetic construct
  source 1..120: mol_type = other DNA
gaattcaccaacagtctctttggttcctctctactggttcaacacatgactctttcagctattcattatatataaaaagctttgaaatctccaactattcttgccctttccatctcagtg

SEQ ID NO: 3398 - DNA, 120 bp, synthetic construct
  source 1..120: mol_type = other DNA
accacttattctcttttttttctgacaaatccaaaattctacatggatcaagctctgaagtgcatttttgaatactacagtcttgcccagacagccttggggtgaatatctgggaaagac

SEQ ID NO: 3399 - DNA, 120 bp, synthetic construct
  source 1..120: mol_type = other DNA
ccaagaatcaatggacatgaacaaccctcaggactttattgattgcttcctgatgaaaatggagaaggtaaaatgtaaacaaaagcttagttatgtgactgcttgtgaatttgtgatttg

SEQ ID NO: 3400 - DNA, 120 bp, synthetic construct
  source 1..120: mol_type = other DNA
cagcacatcaaaaagcttatccaccatgatcaagtagccttcatccctgagatgcaaggctgtttcaatatttgcaaatcaataaatgtaatccatcacataaaaagaaccaatgacaaa

SEQ ID NO: 3401 - DNA, 120 bp, synthetic construct
  source 1..120: mol_type = other DNA
atgcttttacaccgttagtgggagtgtaaattagttcaaccattatggaagacagtgtgctgattcctcaaggatctggaacaagaaataccatttgacccagtaatcctgttactgggt

SEQ ID NO: 3402 - DNA, 120 bp, synthetic construct
  source 1..120: mol_type = other DNA
ggaagagggaaaggaagcctttattgagtgagaacaaaaatgatttgtacagataacagttggaatttagtgtctatcagataaggcgtaaacatcaatgccgttgtcatcgcaccattg

SEQ ID NO: 3403 - DNA, 120 bp, synthetic construct
  source 1..120: mol_type = other DNA
agagccaatcttttctacagtgaatgtggcattttatattccttccagcaatgtagaaggatttctattttccacatagttgctaatacttgtaactttctgtatttattgaagccatcc

SEQ ID NO: 3404 - DNA, 120 bp, synthetic construct
  source 1..120: mol_type = other DNA
ccatttgttgaagagactctttcctcagattgaatggtctaggcacccttgatgaaagtaaatttgccatagatctttaggtttatttcgtgatttcagttttattccatttgtcttgat

SEQ ID NO: 3405 - DNA, 120 bp, synthetic construct
  source 1..120: mol_type = other DNA
ttcatcaccatgtagttgcatattaattgaacaatcaactttcccatttctggaaaaaagaccattggtattgtggtagggattgcctgagtttttagatcactttgaggagtactgcca

SEQ ID NO: 3406 - DNA, 120 bp, synthetic construct
  source 1..120: mol_type = other DNA
gctgtgcagaagctctttagtttaactagatcccatttgtcattttggcttttgttgccattgcttttggtgtatgagacaagaagtccttgcccatgcctatgtcctgaatagtattgc

SEQ ID NO: 3407 - DNA, 120 bp, synthetic construct
  source 1..120: mol_type = other DNA
accctttatttctttctcttgcctgactgccctggccagaacttccaacactgtgttgaataggagtggtgagagagggcatccctgacttgtgccagttttcaaagggattacttccag

SEQ ID NO: 3408 - DNA, 120 bp, synthetic construct
  source 1..120: mol_type = other DNA
gaagggttttttgtttccatgtaattgagtttccattgtttccatggaatgcaaaaattccatgttttgagtgagtttcttaatcctgagttctagtttgattgtgctatggtctgagag

SEQ ID NO: 3409 - DNA, 120 bp, synthetic construct
  source 1..120: mol_type = other DNA
ttttgtttctccttcacttatgaagcttagtttggctggatatgaaattctgggttgaaaattcttttctttaagaatgttgaatattggcccccactctcttctggcttgtagagtttc

SEQ ID NO: 3410 - DNA, 120 bp, synthetic construct
  source 1..120: mol_type = other DNA
cagctgcagtctgttggagtttgccagaggtccactgcagaccttgtttgcctgggtatcagcagcggaggctgcagaacagcggatattggtgaacagcaaatgttgctgcctgatcgt

SEQ ID NO: 3411 - DNA, 120 bp, synthetic construct
  source 1..120: mol_type = other DNA
atgccatcacacaggtagtgagactagtacccaataggtagtttttcagcccttgcctttatatctctctaccctctatagtaattccttgtgtattttttccatctttgtgtcccactt

SEQ ID NO: 3412 - DNA, 120 bp, synthetic construct
  source 1..120: mol_type = other DNA
ggctttatttctggcttctctacttctgttcaatttgtgttttgtaccagttacatgctctcttggttactgtagcttacagtatagtttgaagtcaatgtgaagcttcccactgttctt

SEQ ID NO: 3413 - DNA, 120 bp, synthetic construct
  source 1..120: mol_type = other DNA
tgtactgaaatctcactgaagttgtatgtcagttccaggagtttttggaaagttctttagggttttctaggtctgaattgggtcttctaggtctgagatgggtcttctacttctactagt

SEQ ID NO: 3414 - DNA, 120 bp, synthetic construct
  source 1..120: mol_type = other DNA
tgcagatagaattgtttttctctccctatttttgttctttcctttttctcttccccttcctatgggatgtgactataaagtatgttgggtagggcctttgacttggattctatagctgtg

SEQ ID NO: 3415 - DNA, 120 bp, synthetic construct
  source 1..120: mol_type = other DNA
acaaagcaatcaacaaacaaaatgaaagtaacataatttcctcaactgtgcaaactaattcatattaataattccatgaaatgtgtccatagtaacacaagagcagaagatgggccttgt

SEQ ID NO: 3416 - DNA, 120 bp, synthetic construct
  source 1..120: mol_type = other DNA
gatgtgctgctttcaattcttttgggtataaataacccaaaagaataacccaccacgcctggttaattttttgtatctttagtagaaactgagtttcaccatgttggccaggctggtctc

SEQ ID NO: 3417 - DNA, 120 bp, synthetic construct
  source 1..120: mol_type = other DNA
tagggtgttgattttagatctttcctgctttctcctctggacatttagtgctataattttccctctaaacactgctttagctgtgtcttagagattctggtacactgtgtccttgttctc

SEQ ID NO: 3418 - DNA, 120 bp, synthetic construct
  source 1..120: mol_type = other DNA
tagtgttgacggtctttacaaaatttggtatgtttttgcagtggctgttcccagttgatcctttccatatttagtgtttccttcaggagctcttgtaaggcaggcttggtgatgacaaaa

SEQ ID NO: 3419 - DNA, 120 bp, synthetic construct
  source 1..120: mol_type = other DNA
taacagtgaggcccttctgctgcaggtctgctggagtttgcttgaggtccactccaaaccttgtttgactgggtatcaccagaggaggccacagaacagcaaagattgctgtgtgtttat

SEQ ID NO: 3420 - DNA, 120 bp, synthetic construct
  source 1..120: mol_type = other DNA
gcatgtgatggaacaattgctattccaaaatctctagagtgaatttcatagagaaagacttttatctgaagttgagtgtttgtgtgcaggtgacgaagagtgggtaactcagtttttgat

SEQ ID NO: 3421 - DNA, 120 bp, synthetic construct
  source 1..120: mol_type = other DNA
aggaaaatgccgtggcctgcctctgatgtagaaggggtgctctttagatttgagcccagcaagtagaatatggctactatcattaataagataggatatactaccttattaatgctaagt

SEQ ID NO: 3422 - DNA, 120 bp, synthetic construct
  source 1..120: mol_type = other DNA
tatacagaccttcattttgatgattaaatcccaggatggggtctactctacctcctacttcacatttgtgttttgagtatgaaagaggaaatagaggaaatggacctagagaccttctgc

SEQ ID NO: 3423 - DNA, 120 bp, synthetic construct
  source 1..120: mol_type = other DNA
gaaaaagaaaagataaaaggggcatctttgcacagtagaggaagataactgagagaaatgaagacagcatggcagtagcaaaagcagtagaactctggtccaatgtgtctggatttatgg

SEQ ID NO: 3424 - DNA, 120 bp, synthetic construct
  source 1..120: mol_type = other DNA
ttgttacataggtaagttgtgtaacactgaggcttggggtcccagctattccatcacactgacagtaaacatattacccaacagatggttcttcagcccacatctcttctctccctcccc

SEQ ID NO: 3425 - DNA, 120 bp, synthetic construct
  source 1..120: mol_type = other DNA
aggtcagaagagaaaaatttatcaaggatgaaaagttaatcagtgtcccttaaatcctcccaatattggtatttggaagtaccgagggtcaaagatggtggagaatgaggctgaaaaagg

SEQ ID NO: 3426 - DNA, 120 bp, synthetic construct
  source 1..120: mol_type = other DNA
agcaccagacctagaaaacaactacttcagaacagacctgggggataattcagaagtgagatgagacagcaagaacaaaagagatgtgacagattttatgagagtttccaataactaaaa

SEQ ID NO: 3427 - DNA, 120 bp, synthetic construct
  source 1..120: mol_type = other DNA
attagttcaattcttttatttttagatcccacaaataagtgagaacatgctatgttcgtctttctgtgcctggcttatttcacttaacgtaatgatctccagttcccttcatgttgttgc

SEQ ID NO: 3428 - DNA, 120 bp, synthetic construct
  source 1..120: mol_type = other DNA
ggatatgagtccagtttcattcttctctgtaggatattaaattttcccagcacatttattgaagagactgtctttcccccagtgtacgttcttggcacctgtgttagtctgttctcatgc

SEQ ID NO: 3429 - DNA, 120 bp, synthetic construct
  source 1..120: mol_type = other DNA
aacaacactactgatttttatgttgattgtgtatccttcaactttactgaatttgttcatcagttctaataattatcttgtagaatctttagtttttcctactataaggttatatcatct

SEQ ID NO: 3430 - DNA, 120 bp, synthetic construct
  source 1..120: mol_type = other DNA
agtaaccaataattattctttgaatttctgcagtatcagttctaatgcctcctttttaattttttatttatctgaatctactctttttttttttcttagtctggctaacggtttgtcaat

SEQ ID NO: 3431 - DNA, 120 bp, synthetic construct
  source 1..120: mol_type = other DNA
ttgaagagaattttctccacttatatgtgtacagatttttcttaatatctggtttatggcagttacacatttgtgcatctgtaaccatcctctctttaagtttgcatatacttccagcac

SEQ ID NO: 3432 - DNA, 120 bp, synthetic construct
  source 1..120: mol_type = other DNA
attagtttgtcaatttcccaaaaccttgggctggaatttctggcagggtgacactaaatttataggctagtttggaaagaactgaatcttgacacgttgaggctttccattcctgaatat

SEQ ID NO: 3433 - DNA, 120 bp, synthetic construct
  source 1..120: mol_type = other DNA
aaccagctagtgtgtgaactaacagaatatgaactcacttattatcatgggaagaggtttaagccactcatgaagaattcacccccatgtcctaaatacttctcacaccagaacccacct

SEQ ID NO: 3434 - DNA, 120 bp, synthetic construct
  source 1..120: mol_type = other DNA
ttagggtctgagggtaatggtaatgaaacttacttcttctcctataactaattaaatgagaaatatactgaagaatcaggcacgagttgccagtctccccagttcactgcatcagctttg

SEQ ID NO: 3435 - DNA, 120 bp, synthetic construct
  source 1..120: mol_type = other DNA
tttaatcacttttttcttgcaattcactctccagtcaagaaataagcacatagtttcagtatcctgttactttccatctcctgtaatcaagaagagtccatttcctctgtttcctttcag

SEQ ID NO: 3436 - DNA, 120 bp, synthetic construct
  source 1..120: mol_type = other DNA
tcacaaatgccctgtgaacagatactgtggccatttcccatgtcaacagagacttcaacttttagttatactctacacataaggttggtgaaaactgaagtgatggaatagagaagcaag

SEQ ID NO: 3437 - DNA, 120 bp, synthetic construct
  source 1..120: mol_type = other DNA
taggctgggcttgtaggataaaattatccacaaacacagaatagggtcttaaaaggctcacttctgagtttggaaagcagagtaaacagatcattgtagttcaataggactgaggctgtg

SEQ ID NO: 3438 - DNA, 120 bp, synthetic construct
  source 1..120: mol_type = other DNA
gctcccttgcatctcttgatgttattattttagcaaggacagagccctcctgacttattcacttcctaaaaggagccatctctttagtaatgttgcattgggattatgtgtcaacatatg

SEQ ID NO: 3439 - DNA, 120 bp, synthetic construct
  source 1..120: mol_type = other DNA
tggctgcatattgagccagaaatacaaagggaaatacagtatgttagcctcctcctctaagcccttctcagttcaacccactggacaagaaatgtatgtttctaaagaaagattgatgaa

SEQ ID NO: 3440 - DNA, 120 bp, synthetic construct
  source 1..120: mol_type = other DNA
tacttgaggattggatttgaaagtgagaaactgtgtccaggggcagctctaacctctagggaaatattcagaggatcagtcaaagggtggaatggacattaaatgctagaattcttatat

SEQ ID NO: 3441 - DNA, 120 bp, synthetic construct
  source 1..120: mol_type = other DNA
cttcacaaagtggccctgggcatccaggaagtgttcggggtggaagcggaagggcttctcccagacggcctcatccttcagcaccgatgacaggttggtgatgagtgtcgttccctgggc

SEQ ID NO: 3442 - DNA, 120 bp, synthetic construct
  source 1..120: mol_type = other DNA
ttggagccccgggtgtcccagcaaagttcatgggcccccgcctgtacccttcctccctcggcccctgcactgtttcccagatgggctcacgctgcacatccggatgtaggatcatgagca

SEQ ID NO: 3443 - DNA, 120 bp, synthetic construct
  source 1..120: mol_type = other DNA
gggcacacctctcccacgaccatgtctgagatgtcccctcctcctccaggcccttcttacagtggggtctcctggaatgtcctttcccaaacccatctatgcaaatcctgctcttccgag

SEQ ID NO: 3444 - DNA, 120 bp, synthetic construct
  source 1..120: mol_type = other DNA
cgccagcctcacccattgggctcctgccaggtctcggcagtggccccgcccactcgtcacaagccccgccctcgtccccatgctcacacctccctagtgcaggtggtttcttggcccgct

SEQ ID NO: 3445 - DNA, 120 bp, synthetic construct
  source 1..120: mol_type = other DNA
aaggtttgaaccgggtcactgcacccccttcatcctcgatttcgtgatttaaacggcactcaggactaactcatcttccattcccaaggcctttccttctggtgtcagcagaagggactt

SEQ ID NO: 3446 - DNA, 120 bp, synthetic construct
  source 1..120: mol_type = other DNA
ataaaattgggtcctgattttatgtggaagatgttgtgtgtctaggagcaggaatccatggaagacaagatatgatatagaagaaacaggcgaagggactggtacagcatatatttgagg

SEQ ID NO: 3447 - DNA, 120 bp, synthetic construct
  source 1..120: mol_type = other DNA
ttacaggacacctatcaagaacaaaaataacataaagatactttaaatattatgatgagcagagatagaccagggaaatactacgaaaagcaaacacatgtagcaacagttatcagggga

SEQ ID NO: 3448 - DNA, 120 bp, synthetic construct
  source 1..120: mol_type = other DNA
agttttatatacctattaacattgtaaatccacatatccagtgacctaaccgtcccactcccacaaaactgacttacagagataggtgcatgtctgaacaaagatacatctacagggcac

SEQ ID NO: 3449 - DNA, 120 bp, synthetic construct
  source 1..120: mol_type = other DNA
ggaacctgttcacccaaaactgaaatgagtcgtcaggtaaatcagcccttgataaaacagcaggaacctgttcacccaaaaccaaaatgagttgtcaggtaaatcagaccttgataaaat

SEQ ID NO: 3450 - DNA, 120 bp, synthetic construct
  source 1..120: mol_type = other DNA
aaaaaagatttcattaacccaactctcatccctgataaacactgttagttatctagagaaagaagaaaattgtcccaatacagtcacctctttgccacacccagccaacagcagacgtga

SEQ ID NO: 3451 - DNA, 120 bp, synthetic construct
  source 1..120: mol_type = other DNA
cccttcttggttcaggagaggtgcagtgttaggtgcagcacaaccaatgacttgcttatgtggctaataaattgtcaagagaaaaactgggttagaatgcaatatatagtatgtagtctc

SEQ ID NO: 3452 - DNA, 120 bp, synthetic construct
  source 1..120: mol_type = other DNA
tcactctttccttttatttttcttccatggaattttccagttaacttgagaaagtggaatcgaattccgatgttgaattttccttctggccccattcatgtggcaggtggtgattcaggt

SEQ ID NO: 3453 - DNA, 120 bp, synthetic construct
  source 1..120: mol_type = other DNA
tccttcacccgggtaagagaaatagtgttgattttagggagaataactcagcaattggatctggtatgtgtgtattcaactcatttgcagacaaattgtggttgttcaataccagcctgt

SEQ ID NO: 3454 - DNA, 120 bp, synthetic construct
  source 1..120: mol_type = other DNA
ataacacgccccgggacagttacgggcgctagccacgtcggcgatggccaaataataaactaacagtaatattatagtaacagcatccgaaggatgagatcaggattagggcgatggccc

SEQ ID NO: 3455 - DNA, 120 bp, synthetic construct
  source 1..120: mol_type = other DNA
gtggttgtatcacaattagtggcatttggttttccttcttctgcattgtgggttttacttctctggggttgccaaaaacaaaattaaccatctcagtccttgtcgttaacgcaggagaag

SEQ ID NO: 3456 - DNA, 120 bp, synthetic construct
  source 1..120: mol_type = other DNA
agcgtgggaatatgcgaacatttttaaagaataaaaagtttagctttaaatttgttgattccaaatgtgttcatactctcgggaggatccatcaagcaactcttgggaggagagacaggg

SEQ ID NO: 3457 - DNA, 120 bp, synthetic construct
  source 1..120: mol_type = other DNA
cagttcagggagcaagggtggccattaaacacgtgacttgtatcctaaatactgttgaaaagcaaaggaaactcaaacaggttcagacattcactatctttcgtaaactggcagttttca

SEQ ID NO: 3458 - DNA, 120 bp, synthetic construct
  source 1..120: mol_type = other DNA
ctctagctttacaataattttcccagctttctacactacttgcctggaagccacagaaaagtcataaaaaatgtggctgaagtaaaagagtatgtgtctgaaagggtgaaggagcaccat

SEQ ID NO: 3459 - DNA, 120 bp, synthetic construct
  source 1..120: mol_type = other DNA
ataccccactaagacacccctggttgcagaaaagaacatcccaacaccagagtggagagaggtggcagggtctgcattctgctccataaataacctctttatgacagagaagataatgtc

SEQ ID NO: 3460 - DNA, 120 bp, synthetic construct
  source 1..120: mol_type = other DNA
gtcttaaggctcgtcagttcctgaaagcaggtattataggctatgaagttatttcccccaagaaagtcgacatgtgatggatccagggtcagaccctgggcttttcttgttctttccttc

SEQ ID NO: 3461 - DNA, 120 bp, synthetic construct
  source 1..120: mol_type = other DNA
acctcctcacatctccccacctctctcaccagaaatggcttcagaattgctgtgtggctttgcacttttaacagttgttaattatcagcacagtattcatattattgctgtatgtgttta

SEQ ID NO: 3462 - DNA, 120 bp, synthetic construct
  source 1..120: mol_type = other DNA
ggataaaagcgtgattgaatagatgggtggatgatgggtggatgcccaactggccaggaaccaatccctgaaatttgtcccattcatatcttggcagagaagctccatgaagaaattgac

SEQ ID NO: 3463 - DNA, 120 bp, synthetic construct
  source 1..120: mol_type = other DNA
atttcctgatccagaaaagtttaagccagaacacttcctgaatgaaaatggaaagttcaagtacagtgactatttcaagccattttccacaggtgagaaagatcagaggcagtaccttcc

SEQ ID NO: 3464 - DNA, 120 bp, synthetic construct
  source 1..120: mol_type = other DNA
cgctcatgagtgtgtggaggacaccctgaaccccccgctttcaaacaagttttcaaattgtttgaggtcaggatttctcaaactgattcctttctttgcatatgagtatttgaaaataaa

SEQ ID NO: 3465 - DNA, 120 bp, synthetic construct
  source 1..120: mol_type = other DNA
aggagaatggtgcccaagaaggacactgttgacccaaaatattccaaataaacaatgagtacagccacagattcaggtttggagaaagttgttggacaactcactttatgggacaagtta

SEQ ID NO: 3466 - DNA, 120 bp, synthetic construct
  source 1..120: mol_type = other DNA
gcagagtatagccactctcactaactgaagcaattgctgactatgtcatctagttatatgggaagaatcaaaagtaatattagaacctcatcccatacacatttgggtgagcaattcagg

SEQ ID NO: 3467 - DNA, 120 bp, synthetic construct
  source 1..120: mol_type = other DNA
tgtctctgggtacttgagattagggagtggtgatgacaagcatgctgccttcaagcatttgtttaacaaagcacatcctgcacagcccttaatccatttaaccctgaggtgacacagcac

SEQ ID NO: 3468 - DNA, 120 bp, synthetic construct
  source 1..120: mol_type = other DNA
ttcacaaatcaccactaaagattggttgatatttatgatcaactagtttgacgttgggaagaagctacagaaccaaagggatagcctataattactactggttttctttctctccctttc

SEQ ID NO: 3469 - DNA, 120 bp, synthetic construct
  source 1..120: mol_type = other DNA
aaagccatttccacatgtttagatattatcacagcagtaccacattcctggtaacacaatttgtcttagtctacttgagatgctataacaaactatcataggctggatggctttaacaac

SEQ ID NO: 3470 - DNA, 120 bp, synthetic construct
  source 1..120: mol_type = other DNA
gaaatttcaacaggagatttgaagaggtcaaacaaaccaaactacaacagaagggaatattgggcctgggagtctgactggcaaatatcttttaagtcaaggagctgtgtgggtgcacag

SEQ ID NO: 3471 - DNA, 120 bp, synthetic construct
  source 1..120: mol_type = other DNA
atactgattgtgggaatggccctgtagtactaatttgaaacttcttgaagggaatcagagggagatcctggattatttatcttcttattactgaaatattcagaaagtgggggaggggcc

SEQ ID NO: 3472 - DNA, 120 bp, synthetic construct
  source 1..120: mol_type = other DNA
gaggaaggagcaggcagcatctttgctgttctgcagcctccactggtgatagctccaggtgcaggagggaccccagcaaatagggtctggagtggacccccagcaaactgcagcaaccct

SEQ ID NO: 3473 - DNA, 120 bp, synthetic construct
  source 1..120: mol_type = other DNA
aggggttgccatcatcatttctgacaaaacagactttaaatcaacaaattcaaaaaagacaaggaggggcattacataatggtaaaggaatcaattcaacaggaagagctaactatccta

SEQ ID NO: 3474 - DNA, 120 bp, synthetic construct
  source 1..120: mol_type = other DNA
ggggctcctccctaactcattccatgaggccagcatcatcctgataccaaaacctggcagagatacaacaaaaaatgaaaacttcaggccaatattcctgatgaacattgatgcaaaact

SEQ ID NO: 3475 - DNA, 120 bp, synthetic construct
  source 1..120: mol_type = other DNA
tgacattctccacagaattagaaaaaactactttaattttcatacggaaccaaaaaagagcccatatagccaagacaatcctaagcaaaaagaacaaagctggcagcatcaagttacctg

SEQ ID NO: 3476 - DNA, 120 bp, synthetic construct
  source 1..120: mol_type = other DNA
gaaaaaacacccattaagaagtgggtaaaggacatgaacatatactttttgaaagaagacatttatgtggccaacaaacgtatgaaaaaaagatcaacatgactgatcattagagaaatg

SEQ ID NO: 3477 - DNA, 120 bp, synthetic construct
  source 1..120: mol_type = other DNA
tggtccatgggacattctaccgttaatggatctggcctctagcccttatgggatggggacaggaacaaaattttataaagataggagacattattaaaggtcctcatttataaacagtct

SEQ ID NO: 3478 - DNA, 120 bp, synthetic construct
  source 1..120: mol_type = other DNA
aaaaatcaaggggtagaaatgagtggtgtccacattattacttctagcgacccatgagtaaaagttttgcatcctgttcccatgattgtgctcttaggtcttagttcgaaaggaagaaat

SEQ ID NO: 3479 - DNA, 120 bp, synthetic construct
  source 1..120: mol_type = other DNA
tggctgagatgcttatccttatctgatgcatatcattttgttactggtttattgtatccttttctatcaaccaaccgtagattcctaagtgatgtgttttgtgggtcctgtgccctagca

SEQ ID NO: 3480 - DNA, 120 bp, synthetic construct
  source 1..120: mol_type = other DNA
aaccagtggggactaccatatggaaccgactgattttgaaccccagctcactgatcctcatttttaattttttttttaatttcagggagtctgtgtagtccagacctgtaatgaaggaat

SEQ ID NO: 3481 - DNA, 120 bp, synthetic construct
  source 1..120: mol_type = other DNA
ggacaggaagaggtaggatgggggaaggaagaggaggaaagggtggaggagggacaagaggttttcaagagtcagagagacagaaggtggagagaggagatacaacatcagtcatcttcc

SEQ ID NO: 3482 - DNA, 120 bp, synthetic construct
  source 1..120: mol_type = other DNA
cagcttttctaacccccatctttgacattatatcccaactactggccatccaaaccccctgcctcagatgctaaggtttacctcagctgtctctgtttgttcttctcttcttcaatctgc

SEQ ID NO: 3483 - DNA, 120 bp, synthetic construct
  source 1..120: mol_type = other DNA
aaatttaattgacaatttagcaaatgaatgtcttgccattgagagagtttcccttaacactactgccagctgttggagccgaaggggaaagacattctttggactctccattgtttagag

SEQ ID NO: 3484 - DNA, 120 bp, synthetic construct
  source 1..120: mol_type = other DNA
ttggctttcttttttgcttcaccaaagagcagaaaaacattgtgtgagtgcagcctctattctcttcccaacagtgacatttctcatttgccttcaggtaaatctatagtggcctagatt

SEQ ID NO: 3485 - DNA, 120 bp, synthetic construct
  source 1..120: mol_type = other DNA
acatggggccctatttttagtttaagtaattaagttttaaaagaaagagaaggtgaagaggattatttcccaaattcgtacattgtggggcctgaaattaaacccacatctgcctggccc

SEQ ID NO: 3486 - DNA, 120 bp, synthetic construct
  source 1..120: mol_type = other DNA
caggggtgcactctcactgctgaggctgttcaaagtaagatcaaagctcctgatataattcaagaaaaaaaatgagggtataaaaaactggagcaaggagtcaaaaatcactgtaactgg

SEQ ID NO: 3487 - DNA, 120 bp, synthetic construct
  source 1..120: mol_type = other DNA
tctttcttgaaagtcactttcattttgtcccaacacatctgagcagacaccagtggtttcagaacacgtgccatgtcttcttactttccttgcccctttctttcttaacaatattacacc

SEQ ID NO: 3488 - DNA, 120 bp, synthetic construct
  source 1..120: mol_type = other DNA
gggcagagattcaattcagcttctcccacctcctaaccacgtgattggggcaaattaaacaacctctctaggaatcagtgaaaatgtacattgtgcatattagtgaaaacgaatatgtgt

SEQ ID NO: 3489 - DNA, 120 bp, synthetic construct
  source 1..120: mol_type = other DNA
gttctgatgctcaaaatattccagatttgaccattagatgcccaatcaagctgatatttcctgactttgggcacaacaatctattccaggtttataatactttcccttccccagccctgg

SEQ ID NO: 3490 - DNA, 120 bp, synthetic construct
  source 1..120: mol_type = other DNA
ccacctgggctacattaccccacacaagtcactaccaccatctctattgtgtgtatttttagtagcttactttctccctaagtagtacctattcacagcaataattttaaaaagcatgaa

SEQ ID NO: 3491 - DNA, 120 bp, synthetic construct
  source 1..120: mol_type = other DNA
aattttggcaaagttctttccagccctatctcctagaatctaatgattttaactggaaagagaggaactgggctcatgtatttcataaagctgcttgctgctttgatggatcaaacagga

SEQ ID NO: 3492 - DNA, 120 bp, synthetic construct
  source 1..120: mol_type = other DNA
cttaggcctttaaatggggaagtaagctacattctagtcgtactagagagaacactagactagaagtataaaatcttgagtcttaggaccagttctgcaaattccttgagcatatgatct

SEQ ID NO: 3493 - DNA, 120 bp, synthetic construct
  source 1..120: mol_type = other DNA
atcgtgcattccacagtgtgggtctgtgtagtatttagttattttcagtagatagtgttagcaagaacacccactttagtttttgattaatctggttgacattgatcctacctctgccag

SEQ ID NO: 3494 - DNA, 120 bp, synthetic construct
  source 1..120: mol_type = other DNA
aaaaaaagaaaaaaaatggaagcacctaatcctctttgtgagctggtggtggagtctggatctctgtcaccagttttccagaggacagaacacaggaaagctgaaatctctagcagaggc

SEQ ID NO: 3495 - DNA, 120 bp, synthetic construct
  source 1..120: mol_type = other DNA
tctacaaaggtaaaagacatctcattcatcttggtttcaccattctctttcctccaatgtctagtacatggcaccccactccccatggtaggtttagtaatagaatcaggtagacccatg

SEQ ID NO: 3496 - DNA, 120 bp, synthetic construct
  source 1..120: mol_type = other DNA
gggaggaggcagagccatgatttgaattaggtctatttgacgtcaaagtcatagctcgtagactgtgtaacacacaattatttcaacttgtcagttcccaagatgatttttaaagctgac

SEQ ID NO: 3497 - DNA, 120 bp, synthetic construct
  source 1..120: mol_type = other DNA
aaaatcaatgtaaagcaagtcctgtgaagggagcatggtgtctcacaaagaaacagaacagatctgcttccagatcccaactcttcatagttgagagatctcatgcaaacctaatttttc

SEQ ID NO: 3498 - DNA, 120 bp, synthetic construct
  source 1..120: mol_type = other DNA
caatgcacattagcatagtaaaaacactgagaggccccacaggaaagaaaagccagtctttatctaaacatatttaacgtaggaatccttcctgctcccctccccacaatacctatttat

SEQ ID NO: 3499 - DNA, 120 bp, synthetic construct
  source 1..120: mol_type = other DNA
agatatgtaagagtggaaagtgggccctgaggtaagacccatcaggttgcaaactcttgctctacaacattgatgctgcaagttacttacactctttaaacctcagttccttatttgatt

SEQ ID NO: 3500 - DNA, 120 bp, synthetic construct
  source 1..120: mol_type = other DNA
gagtgctaacaagggcatcattctaatcacaacagagcaacaagttggaaggagctgggaaccctaatggctttgcaaagcctagtttggatttttttttttttacctgaaagcgaaata

SEQ ID NO: 3501 - DNA, 120 bp, synthetic construct
  source 1..120: mol_type = other DNA
actttcacatcagaaagttaactgtttcctggaactatctcaatgtcgactgacttcgttgatttccctcttgcctctgagcttcttgaggacaaggattctctcttacatttgtattac

SEQ ID NO: 3502 - DNA, 120 bp, synthetic construct
  source 1..120: mol_type = other DNA
ctcatgatactctgtcatctttaccatcatcttctggaaacttcaatttgtccaatgttgctcttaatgttaatgatcccttccttacctgcacaacatatagcgagtctcctcctctga

SEQ ID NO: 3503 - DNA, 120 bp, synthetic construct
  source 1..120: mol_type = other DNA
cccagtgttatcataatagtctttattagaggtaaataagagggtcaaagtcagagagaaagtatgtcaggatggaagcagataccagagagaagagaagatgctgtgcttctggctttg

SEQ ID NO: 3504 - DNA, 120 bp, synthetic construct
  source 1..120: mol_type = other DNA
ataattcagggacagtgggaatgtggtagtagggcatagatgcagatacagtgaaaatggccatgtgttgataattgttagagctcactgatgagtatacacagtgattcatgattgtat

SEQ ID NO: 3505 - DNA, 120 bp, synthetic construct
  source 1..120: mol_type = other DNA
aagtatgtgacttcatctagtaacttcagcagctgctgaaaccaactatcctggtactcaaagcgttctccgaaggtgatggagcaaatgatattggaaactgcattgttgatcttgaaa

SEQ ID NO: 3506 - DNA, 120 bp, synthetic construct
  source 1..120: mol_type = other DNA
gtgtatcagatgaaggacaggagaagatcattaaggcacttgaaaactgcccagagaaataatcccaaagcaatggatataatggctaatatttactgattgcttgcaatggcaggcact

SEQ ID NO: 3507 - DNA, 120 bp, synthetic construct
  source 1..120: mol_type = other DNA
gctgcctgcctcactttgctgacttaaaggtattttgaattcggcatatccatgattgaactcacagttttctccatatgacttttcacccatgcccaactaaaccaaataccttatact

SEQ ID NO: 3508 - DNA, 120 bp, synthetic construct
  source 1..120: mol_type = other DNA
ttcttctgactgttccatcactcatgcctagtaccatgcttcacaaggcagataatacagtgaatggatatagaattaactgatgaaatatttctaagaattgaaaagcaccttgtaggg

SEQ ID NO: 3509 - DNA, 120 bp, synthetic construct
  source 1..120: mol_type = other DNA
gtaattttaagtgttcatgccaatctgttcatgccaatctgttctatcatagaccagaaggctcaagatcctctgtgtgacacaaccttaatgaaagagaataaggaaatagagacagga

SEQ ID NO: 3510 - DNA, 120 bp, synthetic construct
  source 1..120: mol_type = other DNA
ttcttcacaaactgaaaaatagttaaatcgtaacagttgaatatgcacatgtccatgtgttcagaaatggaggatgtgtgtagctggaggggatcatattgagaggagtgcgtgtgtctg

SEQ ID NO: 3511 - DNA, 120 bp, synthetic construct
  source 1..120: mol_type = other DNA
tatctttcaagacagaaaatgaattatagctgaaacaacacagcaaaggtgacaaagctattgagtggtgcagggaatttcccaggcattatgtaagatttgaggacaaagacgtgagcc

SEQ ID NO: 3512 - DNA, 120 bp, synthetic construct
  source 1..120: mol_type = other DNA
ctctctgccactgcatatttcgaattaaacagaactagataaaaaacttgtatggtattatcaactgtttaaacacggggtaggagccctgggatgaggatggcgatgtctaacaattct

SEQ ID NO: 3513 - DNA, 120 bp, synthetic construct
  source 1..120: mol_type = other DNA
tgtgcacgcatgcacagtggtggcaggataggcacaaagacaggtaagattctctctctccttaaactgtattttaatatgttgtctcactgtgtatgtattgttgcctttacagtcaaa

SEQ ID NO: 3514 - DNA, 120 bp, synthetic construct
  source 1..120: mol_type = other DNA
aaatcaaaggcattctagatggtgagaacaccatatacagatgtaaaggggaaatgcagaaggtgtttgggagcaagagagctaccttgtctgactgaagcatagggttcattatttaaa

SEQ ID NO: 3515 - DNA, 120 bp, synthetic construct
  source 1..120: mol_type = other DNA
gttatccccagggtttccattcagtgatccaatctccttatatctcatttggttaccaagagtgtacagtatacatttagtcatatacagccttgtattttgcctggcatatgataagca

SEQ ID NO: 3516 - DNA, 120 bp, synthetic construct
  source 1..120: mol_type = other DNA
acaaatcaaatagtctcgggctcaaatccttatttgttattatttagctgaataacccgggcagttcactgttcgttctcagtcattttgctccatggtaaaatggaagcaccaccagat

SEQ ID NO: 3517 - DNA, 120 bp, synthetic construct
  source 1..120: mol_type = other DNA
gtgggtaataaaagtggagtagaccagaatagcactgcagaggctttataacctgcattgatatttgaactgccacccacaaaagtgagcattcagaatctaaataggctatatgctaaa

SEQ ID NO: 3518 - DNA, 120 bp, synthetic construct
  source 1..120: mol_type = other DNA
gaagtagagagggtaaaggaacctaaatggttgcaagatatctatatttcacttgaggtagtaaaatttttacactaatagactgcaatcagctacatctgcatatcgtaatccttagag

SEQ ID NO: 3519 - DNA, 120 bp, synthetic construct
  source 1..120: mol_type = other DNA
acttggaaattaaacaacatattaattaaataaggacacaggtttgggggcttagttttaacattctgtggctaattctgtcacttagtattaccaattgggtatttctcccataaagtg

SEQ ID NO: 3520 - DNA, 120 bp, synthetic construct
  source 1..120: mol_type = other DNA
caaatagtaaacatttaataatattccatccctagaaagtgcaggtggaatcatgccagttaatgggttaggaaatgaaactcaaagtgggttttaccaggttaccagcgttagccacac

SEQ ID NO: 3521 - DNA, 120 bp, synthetic construct
  source 1..120: mol_type = other DNA
ctagttctgacaaaggccccacgccaacagtgattacaatgaccaaaaatatttacttgttggttctcattcagttctatagatttctccttaatgtgcaggaaagcatctgataatact

SEQ ID NO: 3522 - DNA, 120 bp, synthetic construct
  source 1..120: mol_type = other DNA
gggatctgcaacagttaaacaagcatattgagaagcattaaataaacaaaagtagaaagtatagcatcaaagtgagtgagacactccttcagtgttgaggggacacaacagagtgatatt

SEQ ID NO: 3523 - DNA, 120 bp, synthetic construct
  source 1..120: mol_type = other DNA
cttttattcagggctgagtcccctgtctgggcacatataatacagctacactgctggcctaaagccacaaataatatggaatatggaaataatatggaaactatttctgtcttcttcctc

SEQ ID NO: 3524 - DNA, 120 bp, synthetic construct
  source 1..120: mol_type = other DNA
aaccttggcttcacatgagaagcaatggggaagcttttaaagccacactctgggcaaattagtttagaatttctgtgatatcccagacatcatgaatttttaaagctccctggtgattcc

SEQ ID NO: 3525 - DNA, 120 bp, synthetic construct
  source 1..120: mol_type = other DNA
aggcacataagtgatgggactgactgatggaaaagtaggttcctgcctcaagtcacacttacattggtcatgaggaaggagaaggggaaattgtcttgtactatttcaaaattgttattt

SEQ ID NO: 3526 - DNA, 120 bp, synthetic construct
  source 1..120: mol_type = other DNA
actcagtccatgcagtactaatgaagtattaggagctccagagactaactcatactggtaaaggatcgaagcatttataaagtgttttaataactgtcatgcccattgctgtgctcagtg

SEQ ID NO: 3527 - DNA, 120 bp, synthetic construct
  source 1..120: mol_type = other DNA
ggctctcaccccagggactgaaatccttagcataaccgtgtactggtttttctttctcattgaaacaaatgtgactaataggctatgaccactagcatcaaataacatatgagaaagtga

SEQ ID NO: 3528 - DNA, 120 bp, synthetic construct
  source 1..120: mol_type = other DNA
ccacctgcacagctgtgtaatttccagagagagcatttccgcataacatactcagtgttatgggtgtgttccttgaatgatcctaaaagtactttattgtaagttaatatgaggtagtac

SEQ ID NO: 3529 - DNA, 120 bp, synthetic construct
  source 1..120: mol_type = other DNA
tgcctgctccaaccatgtaattcacaaccaaaaccaatatgaaaggagtgtgagaaaggtcgacagagctgtgatttaccagtgaagacttctgtgatgcagttataagtaaattcaact

SEQ ID NO: 3530 - DNA, 120 bp, synthetic construct
  source 1..120: mol_type = other DNA
tttgcagcaacctaataaatttctaggcagaaatttttattcagtggatctgaaggaggctgagaattggcatttgatctgatgtaggtgatccacagaccgcagactgactttctagca

SEQ ID NO: 3531 - DNA, 120 bp, synthetic construct
  source 1..120: mol_type = other DNA
ttgtgtctgatatcaaatttcatgtgctgtctctgactcattctcatatctccttccccaaaccccactttctgcatttctaccaaatgaattctcttgctctaaacatgagcagtcttc

SEQ ID NO: 3532 - DNA, 120 bp, synthetic construct
  source 1..120: mol_type = other DNA
ccaaaagggcaaatagaaactgttttgaggtgaacaaaaactaagatgtgatagaccacaatctcatgggatttagcaaaggaagtgctcagagggaaagttacagctgtaatgtctaaa

SEQ ID NO: 3533 - DNA, 120 bp, synthetic construct
  source 1..120: mol_type = other DNA
atttgatttggaaatttctatagtgagtgaccacatatccctggtctgcccaggacaaactcagattacacctgtttttactgcataagtgtagatagcaaataataggcttgccctacc

SEQ ID NO: 3534 - DNA, 120 bp, synthetic construct
  source 1..120: mol_type = other DNA
gctatagagatggcacttttcataaatcccactggaccaaaaggctagagttcaaagcagaaacattttgtcctacatcagttgtggaggtctccatggttgtagaaaatgtgttaaaca

SEQ ID NO: 3535 - DNA, 120 bp, synthetic construct
  source 1..120: mol_type = other DNA
ttcaagtgacataactgacaatgtgtaaaatctcaaggcatatacaaagagacttctagaactactatgtcagttctgcaaggttctaggataccagatcaacacacaaaatcaaagcac

SEQ ID NO: 3536 - DNA, 120 bp, synthetic construct
  source 1..120: mol_type = other DNA
aatattaatacattgatcacctcaaaataaaaaatagtttgctctgatatggaccctgtcagagaaaaagacttgtgactgtaggatagcaggagggagccacatggagacagagtggat

SEQ ID NO: 3537 - DNA, 120 bp, synthetic construct
  source 1..120: mol_type = other DNA
gagacattgaaagacaaaagagctcttcaaagagaccatggttagaaatgacagtagagcatttgttaagctgggtggtgcatacgtggatatttcccatgccattctccataatgtttc

SEQ ID NO: 3538 - DNA, 120 bp, synthetic construct
  source 1..120: mol_type = other DNA
tagcaagactaataaagaaaaaagaagaatcaaatagatgcaataaataatgataaaaaggatatcaccactgatcccacagaaatgcaaattaccatcagagaatactataaacacctc

SEQ ID NO: 3539 - DNA, 120 bp, synthetic construct
  source 1..120: mol_type = other DNA
ttgtatatttaggaaaccccatcgtctcagccccaaaactccttaagctgataagcaacttcaggaaagtctcaggatacaaaatcaatttacaaaaatcacaagcattcctacacacca

SEQ ID NO: 3540 - DNA, 120 bp, synthetic construct
  source 1..120: mol_type = other DNA
caaacaggcaacctacagaatgggagaaaatttttgcaatctatccatctgacgaagggctaacatccagaatctacaaagaacttaaacaaatttacaagaaaaaaagcaaacaacccc

SEQ ID NO: 3541 - DNA, 120 bp, synthetic construct
  source 1..120: mol_type = other DNA
tgtgggaaggagatgatatgatgtatttatgagcacatattagaagggtctgagacaacacatgtaataaaagggcacctaaggaaaaaaaaaaagaagaggggaataggcagacactgg

SEQ ID NO: 3542 - DNA, 120 bp, synthetic construct
  source 1..120: mol_type = other DNA
tgtgcagtggggtaaactcatcatagaaacaagtctatccaatggaagtttccagaatactcacccccacacttttccatactttttatgacattccatgtcaaacatacaaaagccctg

SEQ ID NO: 3543 - DNA, 120 bp, synthetic construct
  source 1..120: mol_type = other DNA
aggaatgtgcatcttgggggtacatctactaaagagttgacctggaaaaggtggcggggaaattattgcttttgcacagggaaaaaatatgaaattcctggatagtaattagacaacaaa

SEQ ID NO: 3544 - DNA, 120 bp, synthetic construct
  source 1..120: mol_type = other DNA
cttccccctgaggagaagcatttttactgatggaactaagctgctcttggcaatcataagaagcaaaagagtgagctcaaaaacactcaccttatggtaggacaaaatatttcccaaaaa

SEQ ID NO: 3545 - DNA, 120 bp, synthetic construct
  source 1..120: mol_type = other DNA
tctgtgatcagatgatctggttgatttgacctattgggaaggatgattgactcatatttccctgaatgacagtgtgcagaagaatcacaactaaagaaccaatttccaggtcattcctcc

SEQ ID NO: 3546 - DNA, 120 bp, synthetic construct
  source 1..120: mol_type = other DNA
agctgaaaagcatggtgtgtataaatggatccatatgcttcatatgggcttttagctaaaaggtaggggccttcgaatgtccacattccctcctgtttataacaaaagatgtagtattcc

SEQ ID NO: 3547 - DNA, 120 bp, synthetic construct
  source 1..120: mol_type = other DNA
tcatcactggctcacagtcttgcttactcctctgccctgagcgtttaacataacctgctaagcaggtttgtttgaaataggggtattaaaatgaacgttgggaaggtatattttaaaaga

SEQ ID NO: 3548 - DNA, 120 bp, synthetic construct
  source 1..120: mol_type = other DNA
cttatcctccttgggtccaaactattgtcaagtagatcatcctcaatcaatgctatcccaaaacccttcttgccactaaagatggatggggaagatgcttatttattcctttatagagct

SEQ ID NO: 3549 - DNA, 120 bp, synthetic construct
  source 1..120: mol_type = other DNA
ttaaaacttgcaaggtaatcctgagtagctgttgtacagtttaattatgtgggcagttttcaacttccagagtctagtaacccttcccagttgaacccatcaagtgcaatgatgggaaat

SEQ ID NO: 3550 - DNA, 120 bp, synthetic construct
  source 1..120: mol_type = other DNA
ttaattagtttagaatttctgagatgtcacaggcatcatgaatttttgaagctccctggtgattccaatatacagctagtggttgagaaccactgtcatgagagagcttctgcaggttct

SEQ ID NO: 3551 - DNA, 120 bp, synthetic construct
  source 1..120: mol_type = other DNA
tgttggtcacatgctcattgagaaaggagaaggagaaaacgtcttgtgctatttcaagttgttatttttccctttccttctcctgtcatctctttttttctaattcccctcctcctcctc

SEQ ID NO: 3552 - DNA, 120 bp, synthetic construct
  source 1..120: mol_type = other DNA
agacaaggttcctcccatcagcaaacttgcaggtaggggctaatgaaagtctagatcccaagcatcctgaatcaccagccagtaccctaaaaatttcattctaaattttgcttaataata

SEQ ID NO: 3553 - DNA, 120 bp, synthetic construct
  source 1..120: mol_type = other DNA
agcataagttggaatcaccaccattgaccctttgggaatgaataccccattgatttcaacatctttcttgcaagtcctctcaagtctaatagcaactgggaataatctgagtgtttcatt

SEQ ID NO: 3554 - DNA, 120 bp, synthetic construct
  source 1..120: mol_type = other DNA
taaatttatgattggatgctaccaaggtacacaatttgagttctagttaaagttatgaagagaatagaaccccacactcagccccatcccctccttttggaatagtttcctagttgttgc

SEQ ID NO: 3555 - DNA, 120 bp, synthetic construct
  source 1..120: mol_type = other DNA
tacccagtaatgggatggctgggtcaaatggtatttctagttctagatccctgaggaatcaccacactgacttccacaatggttgaactagtttacagtcccaccaacagtgtaaaagtg

SEQ ID NO: 3556 - DNA, 120 bp, synthetic construct
  source 1..120: mol_type = other DNA
ctttaaagtagttttttccagttctgtgaagaaagtcattggtagcttgatggcgatggcactgaatctataaattaccttgggcagtatggccattttcatgatattgattcttcctac

SEQ ID NO: 3557 - DNA, 120 bp, synthetic construct
  source 1..120: mol_type = other DNA
ggatgatgctggcctcataaaatgagttagggaggattccctctttttctattgattggaatagtttcagaaagaatggtaccaggtcctccttgtacctctggtagaattcggcggtga

SEQ ID NO: 3558 - DNA, 120 bp, synthetic construct
  source 1..120: mol_type = other DNA
tggagagttctgtagatgtctattatgtccactttgtgcagagctgagttcaattcctggatatccttcttaactttctgtcctgttgatctgtctagtgttgacagtgtggtgttaaag

SEQ ID NO: 3559 - DNA, 120 bp, synthetic construct
  source 1..120: mol_type = other DNA
agttgctcttctcgaggagtatctttgtggcgttctctgtatttcctgaatttgaatgttggcctgccttgctagattggggaagttctcctggataatatcctgcagagtgttttccaa

SEQ ID NO: 3560 - DNA, 120 bp, synthetic construct
  source 1..120: mol_type = other DNA
agatctccagctgtgtgctgggagaaccactactctcttcaaagctgtcagacagggacatttaagtctgcagaggtttctgctgccttttggttggctatgctctgcccctagaggtgg

SEQ ID NO: 3561 - DNA, 120 bp, synthetic construct
  source 1..120: mol_type = other DNA
tttgtttttctcctcagaggcttcctacattatgtcagtgaaggaatcagtgattatgctttttataaaaattctcctggggagtggtgaggaggcatttttgctaaggcttcacctctt

SEQ ID NO: 3562 - DNA, 120 bp, synthetic construct
  source 1..120: mol_type = other DNA
tagtctgtttggtcaggactggattaggacctttagagacctggagcacagaaataaatatggtgcctgcagcaatcatgtaactcacaaccaaacacaatataaaatgagtgtgagaaa

SEQ ID NO: 3563 - DNA, 120 bp, synthetic construct
  source 1..120: mol_type = other DNA
ttgcagtagattaaccttgcgaacacactttcaagtactgccagttaaaatcacccttactgggatagtgtgcttcctgatcggtatgtttgatataaatttccaagtagaggttctcac

SEQ ID NO: 3564 - DNA, 120 bp, synthetic construct
  source 1..120: mol_type = other DNA
actccaggctgtgaaacactcacatttaccacacactacatgtcagcagtcggcaggtagcctcataggacctttaattgcagaatatgtaaaataagagtcttggacttaaaatgattc

SEQ ID NO: 3565 - DNA, 120 bp, synthetic construct
  source 1..120: mol_type = other DNA
tatacataggaaacaccactacagcagtgagatcaatggcaccttctgagtctttggagtgaccaaagtaatagaattaaattccctgacctcttagcctttatctattggactagagtt

SEQ ID NO: 3566 - DNA, 120 bp, synthetic construct
  source 1..120: mol_type = other DNA
gacaactacagtagcatgtgttgagtgtggatgatataagatatgtaagctctgtgcttcagcagaacaagagtagaataattaactcttcctagtggattcaagaaaggtggcgttgtc

SEQ ID NO: 3567 - DNA, 120 bp, synthetic construct
  source 1..120: mol_type = other DNA
gatggggaacatctaagcacaaaacagatcagtacctgtagttaaatgtgcagactcaagtcccagaaggatatggctttctccagcatggagcagtaagtgacattttgtaatgaattt

SEQ ID NO: 3568 - DNA, 120 bp, synthetic construct
  source 1..120: mol_type = other DNA
ggcagactgtatgttgcctcagaccagctctgtctttaatacacctacagcatgggcaacttgaaaaagggatgccatgatgtggtgatttttttttgaaaagtaggtaatacttaaaga

SEQ ID NO: 3569 - DNA, 120 bp, synthetic construct
  source 1..120: mol_type = other DNA
agcaagaagaaattaaaagccattaaaattaactaacaaagagcgagaggacgctattgcagtgccacgtgaagtgaattgtgacaaagaattcaagtgtgtattctggacaaggcagag

SEQ ID NO: 3570 - DNA, 120 bp, synthetic construct
  source 1..120: mol_type = other DNA
tagccaggagaattggagaaattgggaaatctattgaaagacgtttggagagtaaaactgctaatttaaaattttatgctttggtgatggatgaaggcactgacactacagatacggcac

SEQ ID NO: 3571 - DNA, 120 bp, synthetic construct
  source 1..120: mol_type = other DNA
tgcctctttactggacttttgtaagacctgtcttcccaatgacaaatatcccttgcttcacaatcacaccttgttcatgtcattgctttttggcagcacttacatttgtgagctactatt

SEQ ID NO: 3572 - DNA, 120 bp, synthetic construct
  source 1..120: mol_type = other DNA
aggaaatattaatacattggcctcctcaaataaataaaagtttgctctgatatagaacctgtcagagaaaaagacaaactccatgttgtgactgtaggacagcaggagggagccacatgg

SEQ ID NO: 3573 - DNA, 120 bp, synthetic construct
  source 1..120: mol_type = other DNA
cagtggatcaatcattatttaaatttcaaaaaatggatgcttacccttcgatttgtgaagacagaataacattctttcactagcactgttctgatcacgtcgggatctgtgatggccagc

SEQ ID NO: 3574 - DNA, 120 bp, synthetic construct
  source 1..120: mol_type = other DNA
tgctgcaattggctgagaccaccttataaaatcacagtccatcagcccaccagggaacacaatggtttaataatattcagcatctcttcttcaaagtaagtgcaatggtataaaccaata

SEQ ID NO: 3575 - DNA, 120 bp, synthetic construct
  source 1..120: mol_type = other DNA
cagtagcaggtctatccaatggaggttttcagaatactcacccccacatttttccatactttttatagcactctgtgtcaaatttccagagaccctgggagaggaaacaaaatacaagtt

SEQ ID NO: 3576 - DNA, 120 bp, synthetic construct
  source 1..120: mol_type = other DNA
ctgcttttatcgagggtaaaattgtgtagaattctcagatagtaatcagacaacagaggcttcagttgtgagagttagaatctgagaaacaagctccaggtacacaggataggaaatctg

SEQ ID NO: 3577 - DNA, 120 bp, synthetic construct
  source 1..120: mol_type = other DNA
gcaggaattcttccaggacacttcatttccttatgtctgtttagtaagtggactcttcgctgatttggggactctcatcctaggtagaaagagtaagattttttttgtcttttgcactga

SEQ ID NO: 3578 - DNA, 120 bp, synthetic construct
  source 1..120: mol_type = other DNA
taaaagacacagagggaccttccaaagtccaggtactttcctgttgatagcaaatggtgcagtatggcatataagataagtaatgataaaacgtcccggagagttgtattaagaccttgt

SEQ ID NO: 3579 - DNA, 120 bp, synthetic construct
  source 1..120: mol_type = other DNA
cttactcccctgtcctgagagtttaagacaatctgctaagcaggtatattcgaaaaggagttattaaaataaatggccggacaggtatatttgaaaagacgtgcagtcttgtcttagagg

SEQ ID NO: 3580 - DNA, 120 bp, synthetic construct
  source 1..120: mol_type = other DNA
ccatgttttcattgattagtcttcgtcagatctaagctaatcaaatcattcccactaccaaatgctgtccctaaaccctcctagtcaccaaaattagaaggtggatgggagaaatgctta

SEQ ID NO: 3581 - DNA, 120 bp, synthetic construct
  source 1..120: mol_type = other DNA
gtctcatcccttgactcagcctttagaacaatgggtttttctgttagaagaagtcctccaaagcgtaatttcagggggatctgcaacagttaaacgagcatattgagaagcattaaataa

SEQ ID NO: 3582 - DNA, 120 bp, synthetic construct
  source 1..120: mol_type = other DNA
cctgtctgagcacacatacaggatagctacatagctggcctaaagccacaaataatgtggaatatgaaaataatatggaaaccatctctatcttcttcctcttctatgtagaaagcctgc

SEQ ID NO: 3583 - DNA, 120 bp, synthetic construct
  source 1..120: mol_type = other DNA
gttgggagccactgtcatgagaaaacttctacaagttctgggaaggaagagcatcattcaaaagtcaaaacaagataataagtgcacctcatgattgtgcaaaatacttccccatctttc

SEQ ID NO: 3584 - DNA, 120 bp, synthetic construct
  source 1..120: mol_type = other DNA
ttggtcatgaggaaggagaagaaattgtcttgcactacttcaaaattgttattttgcactttccttctcctctcgtctcttgtttttctaattctcctccttctcctccctaccttgtct

SEQ ID NO: 3585 - DNA, 120 bp, synthetic construct
  source 1..120: mol_type = other DNA
agagaacaactcatactggcaaaggattgtagcattcataaagtattttaataactgtcatgccctttgatgtgctcaatggcccactaagatgtgtggaggagttatgaaagcaggaga

SEQ ID NO: 3586 - DNA, 120 bp, synthetic construct
  source 1..120: mol_type = other DNA
ccagagcaagtcctgccaatatcagcagagctcactatcaagacgtgtgagcaatatgcatattgttaaatgccagggaggtttttggatgtttttttacttagcattattgtggtaaca

SEQ ID NO: 3587 - DNA, 120 bp, synthetic construct
  source 1..120: mol_type = other DNA
atccctgccaccttcacagctgggtaatttccagagagaacatttctgcataacatactcagtgtcatggtgtgctccttgaatgatcctaaaagtactttattgtaaattaatatgggg

SEQ ID NO: 3588 - DNA, 120 bp, synthetic construct
  source 1..120: mol_type = other DNA
cacagaaataaatatagtgcctgttccaaccatgtaactcaccaccaaaaccaatacgaaaggagtgtgagaaatgtcaacagagctgtgatttaccagtgaagatttctgtgatgcagt

SEQ ID NO: 3589 - DNA, 120 bp, synthetic construct
  source 1..120: mol_type = other DNA
tagccctcagaagcactcttttgttacctttgtgggtctcagagtcttttgaattctgagagtcaatcatcagctgaaggaaatccactcggtgctagaagcaaaaagagaaattttatt

SEQ ID NO: 3590 - DNA, 120 bp, synthetic construct
  source 1..120: mol_type = other DNA
gggctcaaatgtaacacacactacacttcagcaggtggcctgataggaccttttgttggagaatgtgtaaaataatagccttgtacttgaaatgactctttaccaatctatgatctagag

SEQ ID NO: 3591 - DNA, 120 bp, synthetic construct
  source 1..120: mol_type = other DNA
cagcagccccttctgcatcttttgaatgatgaaaggaacaaaattcaatgccctaatctctttgcctttatgtattgggctagggtctcttaggataacccaaatcataatttgctgctt

SEQ ID NO: 3592 - DNA, 120 bp, synthetic construct
  source 1..120: mol_type = other DNA
ctagtcatagaaagacagagatccactatcagacaactgcagtagcatgtgttaattgtggatgatacaagatgggtaagcactgtgcttcagcagaacaagagtagaaaaattcactct

SEQ ID NO: 3593 - DNA, 120 bp, synthetic construct
  source 1..120: mol_type = other DNA
caatgatagggaccatctaagcacaaaacacaacaccacccatagttaaatgtgcagacataagtcccagaaggacatgactttgcctggcatggaacaataagtgacattgtataatga

SEQ ID NO: 3594 - DNA, 120 bp, synthetic construct
  source 1..120: mol_type = other DNA
tttgttggactgtatgttgcctcagacgagctctgtctttatgttcacctaaaccatgggcaacatgaaaaagaggtgccttgatgtggtagatttaaaaaaatatacaatgagaacaca

SEQ ID NO: 3595 - DNA, 120 bp, synthetic construct
  source 1..120: mol_type = other DNA
gggaagaatcactctacatgatgctaagagttactgtacaggtattagagtcaccagtttgttgttgatggaggaataaacacagtgatcaatgggacagaatagcaaatgaaagatgca

SEQ ID NO: 3596 - DNA, 120 bp, synthetic construct
  source 1..120: mol_type = other DNA
gtactgcagtaatgtgaatatactgtatttatagttatgcaagattgcaagatgttaccatgggggatgggcaggatgaagtgtacatggaaccttcctgcacagtttttaggcaactgt

SEQ ID NO: 3597 - DNA, 120 bp, synthetic construct
  source 1..120: mol_type = other DNA
atatttccctttataaagagtattaggtccatggaaaattgaaggcaagtaaatcatcaaatgctcacaaggactaaatgtttcaagggcagttgctgtggggcccaaggacatccagag

SEQ ID NO: 3598 - DNA, 120 bp, synthetic construct
  source 1..120: mol_type = other DNA
cacatagcttataatggcacacagtttcccattctaatactcttctcccaaatacatatcttcttctttcagaaaacctctctgtttgtagttaggctggcaagagcttcatcgcaagag

SEQ ID NO: 3599 - DNA, 120 bp, synthetic construct
  source 1..120: mol_type = other DNA
cttgctccgagtttgcactgaaacttaaaaaaaaaccttcctgtttctacatttcaggggtgaagttttaactatggaaaagaaggtccgaggaatgtgtatcttgggggtacatctact

SEQ ID NO: 3600 - DNA, 120 bp, synthetic construct
  source 1..120: mol_type = other DNA
atttcagaggtatctgatcactgtggggatgcctgccttgatcattcaccttggcacaagtaccacctcccctgggtcacaagtatcaccttccctgggtggcaagtaccaccttccctg

SEQ ID NO: 3601 - DNA, 120 bp, synthetic construct
  source 1..120: mol_type = other DNA
agcaggaaagagttgataccctagcccaatctcacactgacacccaccagtgccatgagccagaccttcaagaaggcatcagggcagttccccaagagcatccccattggcagtacaaga

SEQ ID NO: 3602 - DNA, 120 bp, synthetic construct
  source 1..120: mol_type = other DNA
agccgtgccctgtctgtgtgggctccaattagaggttggactgtctgactcacatcgccactgctcctaaagttcctggagctcaaacccaatgtttcttggctgactccttcccagatc

SEQ ID NO: 3603 - DNA, 120 bp, synthetic construct
  source 1..120: mol_type = other DNA
ccgttacgtacctcagcataattcttcatgaaaacacatggggtctccctgctgatcatgtctggctgatctctgaaaccccaaccccttctacaaaacaactcctttccttcctgggca

SEQ ID NO: 3604 - DNA, 120 bp, synthetic construct
  source 1..120: mol_type = other DNA
gtccatatcctgcaccaccatgctgtaatatgggctgaaagaagtttcttcactatgcaagtgtcctccatcattaatgcctctttaataaaaattcttctcaaggccactttacttcca

SEQ ID NO: 3605 - DNA, 120 bp, synthetic construct
  source 1..120: mol_type = other DNA
atgacaatataaaaaagcttaaagataaagaccaaaaactcaccagccaggcaaatacttattttggacccacctggacactttctaactgggtgtcttagctcctccctattcttagtc

SEQ ID NO: 3606 - DNA, 120 bp, synthetic construct
  source 1..120: mol_type = other DNA
cacacggacgcatgtgaaagtagggaaattattgcttttgcagagggaaaaaatatgaaattcctgggcagtaattagacaacaaagccctcacttaggagaactagaatctgagaaaca

SEQ ID NO: 3607 - DNA, 120 bp, synthetic construct
  source 1..120: mol_type = other DNA
agggaaaaaagcctattcatgagctcttgctacagagaggaaagttttactctcatgtccacagataacaagccacaatcaggggctcctgttcctacttttaatactaactaagtatgg

SEQ ID NO: 3608 - DNA, 120 bp, synthetic construct
  source 1..120: mol_type = other DNA
tctgattgatttgagctattggggaggatgattgactcatattttcctgaatgacactgtgcagaagaatcacaactaagaacaaggacattcctcctcttgtggaatctagccttccaa

SEQ ID NO: 3609 - DNA, 120 bp, synthetic construct
  source 1..120: mol_type = other DNA
ctcatatgtgctttcagctgaaaggcaggcaccttctaatggccaggtaccttcctgttgatagcaaaagatggagtattccacataagtaaccataaaatgttccagatagttgaatta

SEQ ID NO: 3610 - DNA, 120 bp, synthetic construct
  source 1..120: mol_type = other DNA
atattttctcacttcatcttgatcctacctggatgcttttgctatcatcactggctcacagtcttgcttactttctagccctgagagtttaggataacctgctaagcaggtgtatttgaa

SEQ ID NO: 3611 - DNA, 120 bp, synthetic construct
  source 1..120: mol_type = other DNA
aggatgccaggatctcactggtgagaagattcaccctcttctcctgcaacttaaagggaaaaatgtaaaatccaaattctggtttggtaagctgggtacaaaccattgtctattagatta

SEQ ID NO: 3612 - DNA, 120 bp, synthetic construct
  source 1..120: mol_type = other DNA
acattcacgcacaagcgtctttctgtttgaacacttgtctcaattattttgagtagatatctaggatggaatacaggactgtggaacagggtcttagggtaattctaggcttcacttttg

SEQ ID NO: 3613 - DNA, 120 bp, synthetic construct
  source 1..120: mol_type = other DNA
agacccttctaggaccaacccaaccgtactctatggaccttttcctataaactccagaggaggtgagggaaagagagctggaacttggaccatctacaatgtcccccttttccccactgt

SEQ ID NO: 3614 - DNA, 120 bp, synthetic construct
  source 1..120: mol_type = other DNA
aaatgagaaaacagacccatggaacatgagggagagctcagaaaaagacatgagaataagtgaaaacttcacatttgataaagacagcccctgctcaaaccaaaatcctgggaaactgat

SEQ ID NO: 3615 - DNA, 120 bp, synthetic construct
  source 1..120: mol_type = other DNA
atagatagataacaaatctatggctctggagacacctttggagaatgagaaaggattaggtggggtggcaggattgtcaaggaaaaagctagtcttatctgtaatatctcatttggtgca

SEQ ID NO: 3616 - DNA, 120 bp, synthetic construct
  source 1..120: mol_type = other DNA
aaagaaagaaagaaaagaaaagaaatagaagcagaatgatggttaccagaggccagggctgagggagggatagagaagggtgagatgttggtcaaaggatagaagcttcagttagacaag

SEQ ID NO: 3617 - DNA, 120 bp, synthetic construct
  source 1..120: mol_type = other DNA
gggatagccattttctggaagaatacacagaaaactgttgaccatagtcactgctaaggtggagcttaataaggaagctcatttttatcataaaattttttggaccctttcttttaacca

SEQ ID NO: 3618 - DNA, 120 bp, synthetic construct
  source 1..120: mol_type = other DNA
aaaaagtggatctcatgaaagtagaaggtagattggtagaagggagggaggggtgaggagaagttgattaacgggcataaataagaggtttgataggagaaataaaacctagcacttgat

SEQ ID NO: 3619 - DNA, 120 bp, synthetic construct
  source 1..120: mol_type = other DNA
gtcttcttgacctagagcactgccccccaactgtacccaattatctactgatcattatttaggctctcaactgagacactttctataccccctagtcctgcttctcttactgtaaatccc

SEQ ID NO: 3620 - DNA, 120 bp, synthetic construct
  source 1..120: mol_type = other DNA
cccataaaaagtcacactagctctaagggctcttgagtctaatctgagacagtctctgaagattcatcctttttccagaaatccaagtccatcttgcactcctagacccctcttggtcac

SEQ ID NO: 3621 - DNA, 120 bp, synthetic construct
  source 1..120: mol_type = other DNA
ctctttcttgggaagaaatagaaaatgtgccaagactcataatgtagggcccctctcttaggatgcaaactctgctgcacatacaagtgaaaacattacccttggagaaatttgacttga

SEQ ID NO: 3622 - DNA, 120 bp, synthetic construct
  source 1..120: mol_type = other DNA
cacagacacacaaatacacgtaaacatagacatagacacagatatagatatagacacagacacacacacacatagactgtcacagacttagaaacatggacacacaaatacacataaaca

SEQ ID NO: 3623 - DNA, 120 bp, synthetic construct
  source 1..120: mol_type = other DNA
agatatagatgtagatgtatggagttaaatgtggacaattaactcattagtttgtaaatagagcaaactctcagacttgtcagtttcaagcctagcagctccctgctaggtgcactccac

SEQ ID NO: 3624 - DNA, 120 bp, synthetic construct
  source 1..120: mol_type = other DNA
tctccttgaaactgtccacaaagctcagactttatcctcctgcaactggtccatggtctagctttcaccctagcctctttgcatcagtgttaactccatttagtgctacattagtcagtc

SEQ ID NO: 3625 - DNA, 120 bp, synthetic construct
  source 1..120: mol_type = other DNA
tgcagtttcatcatctaccatggggcaaaaatacataatctctccttcgcagagctgttaaaatcaaattagacaatacatactcgtatcatggaatgggcacatggcattgtttctggc

SEQ ID NO: 3626 - DNA, 120 bp, synthetic construct
  source 1..120: mol_type = other DNA
agctgctcatgtaccatgagtggtcccttccatatacagaagaacctgccaactgtcccaaagacttattagcaaacataaacacttattggtttaaaccaatgagttttcaggtggttt

SEQ ID NO: 3627 - DNA, 120 bp, synthetic construct
  source 1..120: mol_type = other DNA
acatggccacaaaatacatgacaattcctaacatgagatggtgtgctctaacatgcacatgagatggtctaacatgatcttaaaagcgtgttccacatacaggctctgggttgaatataa

SEQ ID NO: 3628 - DNA, 120 bp, synthetic construct
  source 1..120: mol_type = other DNA
aacttgaccagctctacatgaccccagttggaattatataccagatgtaaccaggtataacatatttcaggtgtaaccaggacccaggtgtaaatatacaaggcagacctggccatataa

SEQ ID NO: 3629 - DNA, 120 bp, synthetic construct
  source 1..120: mol_type = other DNA
gtcaatagattatctttctttgcttagaccacaccaggttgggtttccaccactcacaactgaaagagacttcaataaccagagacagctgggtaccagcccagagtcactcagcatttt

SEQ ID NO: 3630 - DNA, 120 bp, synthetic construct
  source 1..120: mol_type = other DNA
tatctgcctacccatctatccatcaatccattttatctgtgctttcatccatccatatattcatctgtctgtctgcttatcatctattaatagccatctatccgtctaatctatccatca

SEQ ID NO: 3631 - DNA, 120 bp, synthetic construct
  source 1..120: mol_type = other DNA
acggggaggagaaaggccaaggaaagcttctgaaaggtgaagtgagtggccaacttttatctgggtttggcaacaggtctcattgataagagggagataagaagaagaatataagagaaa

SEQ ID NO: 3632 - DNA, 120 bp, synthetic construct
  source 1..120: mol_type = other DNA
gatgggtaaaaaggggctgagaggtaaagtccagaaaggcccaaccaaaaccagcagccaagtggcctccagttccctagtaagcacttagaatgggaaagagagagagagactgattaa

SEQ ID NO: 3633 - DNA, 120 bp, synthetic construct
  source 1..120: mol_type = other DNA
catttgaggagtagcaattagcctcatgtagcctacttcctttgtagatgtttgctggagtacggatgaaaagagagataattctagaaagataggtgactatcatatagaggctgggtt

SEQ ID NO: 3634 - DNA, 120 bp, synthetic construct
  source 1..120: mol_type = other DNA
taaaactgtatgtggacctgagaagaatgtgactactggagagactagtggatgatcatttcttgactcttttatgcaattgactttttagttctcaattgcactgctctgattagtcaa

SEQ ID NO: 3635 - DNA, 120 bp, synthetic construct
  source 1..120: mol_type = other DNA
tttcctaatggacttcttcctgattttaccaaagcaaatgccctccacccccgccctgctctaaatagcacagatttctggtattttaatgtgtcattagtttgaccagacagattttag

SEQ ID NO: 3636 - DNA, 120 bp, synthetic construct
  source 1..120: mol_type = other DNA
aaaaacctgtgggctctaacatgggaagttagagagtacgtacttttcctagtgggtatgaaagaaaaactctaggttcaccctgaatagcatctggagggactgaattaatacagtaaa

SEQ ID NO: 3637 - DNA, 120 bp, synthetic construct
  source 1..120: mol_type = other DNA
gctctttccagaactgctcttttggccctcattcttatggatgtggtattcagtggtgaatccaacctccacacatgagtatttgataaatttgctcaagtagaacttctagatgtatct

SEQ ID NO: 3638 - DNA, 120 bp, synthetic construct
  source 1..120: mol_type = other DNA
cattacagcataaagagaaaagacattccaagccgtgagatgatgtttgtgacaaagaggaaaacagaacatggaaactacagatcaaagcctgactggacctcagtgtttatgaagaag

SEQ ID NO: 3639 - DNA, 120 bp, synthetic construct
  source 1..120: mol_type = other DNA
gtattgctaatcttgcacagaccaagtacatagcagtcggcactcaataaatttgttgagtgcttaataaatgtgtgaatgaataagtgttggttcatgctggagtgcaggttcctcagt

SEQ ID NO: 3640 - DNA, 120 bp, synthetic construct
  source 1..120: mol_type = other DNA
caccacacccggtcctgctgtattcttaaaatggtcatttgctgagtgctagattcaaattttcagttgcctcatatattccatcttggtcttccttgtcacgatcattgatatatagta

SEQ ID NO: 3641 - DNA, 120 bp, synthetic construct
  source 1..120: mol_type = other DNA
agagatgtggttctagaacaaagtatcttctttgtatggacacatcagacatttcttgagggaatcctaccagaaggagatgctctttacctcttctattggtttatacctgtaggtcct

SEQ ID NO: 3642 - DNA, 120 bp, synthetic construct
  source 1..120: mol_type = other DNA
acttttcatgcatgtaataatacccaggcaccactatatcagctaactttgctagatagcagtcacaaaaaggccattaatatctctcttacctccacctgagaaaggttagtgctatgg

SEQ ID NO: 3643 - DNA, 120 bp, synthetic construct
  source 1..120: mol_type = other DNA
catacacaatgtaattcctttatgatcctcatcagactttcctacatctcagcattctttaggtcagtcagtcaaatcatcgctaaagctttcaccaacaggaacatcgttcctggcgtt

SEQ ID NO: 3644 - DNA, 120 bp, synthetic construct
  source 1..120: mol_type = other DNA
tctctaacttatgcaggggaatctgcttgttagtgtctttttcctttttgttgcttttaaaaattgattacctatagaagcttggtaaatattcagttttattttcttctacatgtactt

SEQ ID NO: 3645 - DNA, 120 bp, synthetic construct
  source 1..120: mol_type = other DNA
tgctttcctctgaaaaatgatcagattaaaataagccagaatttggtattctcacatcgtatgtatgagcatgagttctgaaacagattgcctgagtctagctctctggtctgctaccga

SEQ ID NO: 3646 - DNA, 120 bp, synthetic construct
  source 1..120: mol_type = other DNA
gccctcggcataatgatgaagtaagttaacgttgcctttgacacttaacctcctctcagtgaaaccaaggtatggatttgaaagtacctcagtgttgggagtttaaatagaaaaagatct

SEQ ID NO: 3647 - DNA, 120 bp, synthetic construct
  source 1..120: mol_type = other DNA
cctccctgttgccagtctgatgttgtttgatgccaatccatttattcactttctgcttccacacaagaatgacttgcataattttaaaggttggaaatccagcatgatcctaaatcagag

SEQ ID NO: 3648 - DNA, 120 bp, synthetic construct
  source 1..120: mol_type = other DNA
ccagctaacacagtgccacacaaccccacaatgctttcagcatattcagtcatctgcctcggagagactgaaaatattactattgatttggcttggtgtttaatgtggttgttaaatttt

SEQ ID NO: 3649 - DNA, 120 bp, synthetic construct
  source 1..120: mol_type = other DNA
ttcacaggcttttttcagtgtccaccaaccactttccattctggataaaggatgttagctaggtaagaggataagcacagttgtaatctggatattcaagctgacctaatggtagatgct

SEQ ID NO: 3650 - DNA, 120 bp, synthetic construct
  source 1..120: mol_type = other DNA
cctataatagctccaaattaagaattctacaattctgttgatcctattctgatcgatgccagattcggttcatcggtgatgaacaagtcagtcatggtgcctcagattccttccatctca

SEQ ID NO: 3651 - DNA, 120 bp, synthetic construct
  source 1..120: mol_type = other DNA
catttttttttttttttactctgggctacctatttgctacttggaaaaaatctgcctttatgggacacttgctgactgtagtgataccagtcttagcaacctgaacatggacatgcccct

SEQ ID NO: 3652 - DNA, 120 bp, synthetic construct
  source 1..120: mol_type = other DNA
caaaccttgtcatagtgatccaaaatggaatgggaagtactgaagatgtatagtgatctcgcttcatgtaggattgtgcttgcattttctaacacagtccctggcatataatggaagctt

SEQ ID NO: 3653 - DNA, 120 bp, synthetic construct
  source 1..120: mol_type = other DNA
gaaccacacacgaaaactgcttaggaactctcaaatcaagtagcaggtcaaagaactcctttgattgactctttgttaggctgtttggagtaggatgtactaattagatttggaagcact

SEQ ID NO: 3654 - DNA, 120 bp, synthetic construct
  source 1..120: mol_type = other DNA
tgttttggaattccttcttgctagaatggctatattggaatcctgtagggcatcttgacatctgctttaggcacactgaaatgttcaatggcaagagtatttaggactgagaacatctga

SEQ ID NO: 3655 - DNA, 120 bp, synthetic construct
  source 1..120: mol_type = other DNA
aaagcaaaaagacaacaaatgggtacgcttccttaatgcagagacataggcaaatgcctttctttcagctttacgcaaagatagaagaagaatctcttacattctgggcaaccatctgga

SEQ ID NO: 3656 - DNA, 120 bp, synthetic construct
  source 1..120: mol_type = other DNA
ctccatgtgcagcatattaaaatgtatattagcctcaaggtgcataaacacaaaataatagaccaaaggttttggcctgtggagaaaaaaaatccatgctcaaaggccgtcaagtagctg

SEQ ID NO: 3657 - DNA, 120 bp, synthetic construct
  source 1..120: mol_type = other DNA
gtgaagggaagatattatcgataattacaggcacaaaaagcaagactgtcagagacaaactggcctatatgatcatcccaaccataagctcttgaattggcaaatgtaaaggaagcacac

SEQ ID NO: 3658 - DNA, 120 bp, synthetic construct
  source 1..120: mol_type = other DNA
atgtattgaggctgttataggaaggaggagagcatgtttgaaaaccactttactgaaagataatttacatggaaggaagtaacaaaagtaagactgacaaaataggccaggtgcagtggc

SEQ ID NO: 3659 - DNA, 120 bp, synthetic construct
  source 1..120: mol_type = other DNA
tggggggggtgtgtgtgttcttttgggatatctgctttgaaatttcatcatcaaactaggcttttccctgatgaaagttccatactatagagaaaacatccacatttgcttgcagtttgt

SEQ ID NO: 3660 - DNA, 120 bp, synthetic construct
  source 1..120: mol_type = other DNA
caacagagtcttttgtacgctttgggcttgatagatattaatgaaatggaaaggtaaaggtaaatgtttcacgccctttggaattaatctctattgtacatacataacatgcagatgcac

SEQ ID NO: 3661 - DNA, 120 bp, synthetic construct
  source 1..120: mol_type = other DNA
tggctcctcatccttcacatatcattccaaatatctctttctcacagaacgcttccctgatacccaaattaaagtagctccacattctctatttttcttctaagcatgccttttcctcct

SEQ ID NO: 3662 - DNA, 120 bp, synthetic construct
  source 1..120: mol_type = other DNA
atatgagctcttttgattctttacaacagtgctgtgaagtcaactgggaagactgaattatctccagtctctagatgagaaaatcaagaatcagaaagattatctggggctgggtgcagt

SEQ ID NO: 3663 - DNA, 120 bp, synthetic construct
  source 1..120: mol_type = other DNA
ttctgtggagtgagatttgcagtcaatgtcagtattaaatctaggtgtaaaatgcaaaggtgcgaagtttgaatgatgcctccactttgttaggtgatggctgaatcacatacacacaca

SEQ ID NO: 3664 - DNA, 120 bp, synthetic construct
  source 1..120: mol_type = other DNA
ccattactactatactgaaactagtctagaacctaatgagctgaattgctatccaaaggaacaggatttaggttcagatggggaaaaagagaataacagctgcatccacactcccttcca

SEQ ID NO: 3665 - DNA, 120 bp, synthetic construct
  source 1..120: mol_type = other DNA
agtagatctaccatttgatccagcaatcccactaatgggtatctacccagaagaaaagaagtcatcatacgaaaaagatacttgcacaaccatgtttatagcagcagaatttgcaattgc

SEQ ID NO: 3666 - DNA, 120 bp, synthetic construct
  source 1..120: mol_type = other DNA
aggagtcagttacaactggttatttcctctttgcagggaacgtatatgtggcctgaatagttgagcagacagacttgggcttgctgctattaaatatgtggaatgtgtgttaatattcag

SEQ ID NO: 3667 - DNA, 120 bp, synthetic construct
  source 1..120: mol_type = other DNA
agttgggcctgagattctgcatttttcaacaacctctggtgatgatgctgatgttgctggtttgggtaccatgttgtgagtagcattgatctagataattccagttggtacaaataaata

SEQ ID NO: 3668 - DNA, 120 bp, synthetic construct
  source 1..120: mol_type = other DNA
tcacctagtgtttgcacacactcatacacacatcaccttttctgcccatgcacacagttttagagatcccttttcagtgtattaccatcatcttgcctttttcttattgggaagacttat

SEQ ID NO: 3669 - DNA, 120 bp, synthetic construct
  source 1..120: mol_type = other DNA
ttcactgcatttgattgtagggttttctctttattagcttaaaagtgagcagtaccaagtccaattccccagggctttttgtgcttctacaaatcatgtcaagttgctcacaaccagtga

SEQ ID NO: 3670 - DNA, 120 bp, synthetic construct
  source 1..120: mol_type = other DNA
aggggcagagttttggggtttgcattaagataagttaattgtctgctaaagcaaacaaaaatcgggactcttaggtgtggagagtccagagtctctgtataatgtatcatttacacagtc

SEQ ID NO: 3671 - DNA, 120 bp, synthetic construct
  source 1..120: mol_type = other DNA
atccattaaataacaaaacagacatatgattattcagttactatgccgctaaataaatcctatgatttcatcttcctcccttatctccctccttccttgtcttcttctctccctccttcc

SEQ ID NO: 3672 - DNA, 120 bp, synthetic construct
  source 1..120: mol_type = other DNA
gctgatttggaagcaggcagacttccttctggatctcattcaatttagaaacaacagcagattagcgattaaatcggccaaacaacttctggctcataccaattaatttcttcaaggatt

SEQ ID NO: 3673 - DNA, 120 bp, synthetic construct
  source 1..120: mol_type = other DNA
gctgggtcaaatggtatttctagttctaggtccctgaggaatcgccacactgacttccacagtggttgaactagtttacagtcccaccaacagtgtaaaagtgttcctatttgtccacat

SEQ ID NO: 3674 - DNA, 120 bp, synthetic construct
  source 1..120: mol_type = other DNA
tatatgtagttgaggtgcttttccaaatggaaagaaaacaatctactacccaaatcaacacatagtttcctgtgaacaatatcagaaactaataggatgatcctctgtcttagtccattt

SEQ ID NO: 3675 - DNA, 120 bp, synthetic construct
  source 1..120: mol_type = other DNA
tcttactactgatgctctggggattaagttttgacatcagttttacaggggatgtggtcattcaaaccacagcaccctcttttagaaacaagattgagagacaactttctggtattcact

SEQ ID NO: 3676 - DNA, 120 bp, synthetic construct
  source 1..120: mol_type = other DNA
actgaaaaagagcccaattagccaaggcaatcctaagcaaaaagaacaaagctggaagcatcaagttacctgactctaaactatactacaggggctacagtaaccaaaacagcatggtac

SEQ ID NO: 3677 - DNA, 120 bp, synthetic construct
  source 1..120: mol_type = other DNA
aaattattctacctaccataaagatacgtgtccacataaggtatgttcattacaacactatttacaatagcaaagtcattaaatcaacctaaatgcccatcaatggcagattagataaag

SEQ ID NO: 3678 - DNA, 120 bp, synthetic construct
  source 1..120: mol_type = other DNA
atcactccttttcctgaaagttaccacttcttgacactgtacaattcttggacataattactttgagtctctagagtaagatcagtaagcaactaatgaaaaattcctggtagaggcaga

SEQ ID NO: 3679 - DNA, 120 bp, synthetic construct
  source 1..120: mol_type = other DNA
aatcagaatattatgaggctttctagctctgtgatccaagtaacaatcttctccacaatgtgtaacaggctatcatactcagctgtcaaatgccttccagaaagcaagatatgccttgct

SEQ ID NO: 3680 - DNA, 120 bp, synthetic construct
  source 1..120: mol_type = other DNA
ccaactccaaatgtttacaaattggcattctctttacattttgtcttagaaggagcatttctttccaaggcgaaatacttgagagaaaatgcccttagtaggaagatgtgcttccagatg

SEQ ID NO: 3681 - DNA, 120 bp, synthetic construct
  source 1..120: mol_type = other DNA
taacccacatacagatctagaatactttcagatggccctcataagttttctcttggtcctctgcagaactgcatacattacaatgcttgagtaaggactgtatgaatggaaacttcacct

SEQ ID NO: 3682 - DNA, 120 bp, synthetic construct
  source 1..120: mol_type = other DNA
ccaagttggatttgttgtagaaaagctaaaagtcaagtaatataacatacatgggcagaatagaaggaggaagagttggacctgtgatctttgccaataaacggaaggtccatggtaagg

SEQ ID NO: 3683 - DNA, 120 bp, synthetic construct
  source 1..120: mol_type = other DNA
ggacgcaaatgagcaaaaagaatttttgtgtttacgaccatgatacaaacagttaagaaatccaggtgaaagtgggttttccatcccacagaatttgaaccgccctcattgtcacaactg

SEQ ID NO: 3684 - DNA, 120 bp, synthetic construct
  source 1..120: mol_type = other DNA
ttgtttccttctaattccataactccgatagcataatagcagttatgttgaggagtggtaattgaatggttacgggcacaatgtttgtaataaacagaattgggtttgcgtccggcttcc

SEQ ID NO: 3685 - DNA, 120 bp, synthetic construct
  source 1..120: mol_type = other DNA
ttgatttaaagtttccagacaaatttcccactgggtttgtttgtataagggtaggtaggacgttagggcaaaagagtccagccctgcatgtaatatcctatcggcaatcaatttaaggtt

SEQ ID NO: 3686 - DNA, 120 bp, synthetic construct
  source 1..120: mol_type = other DNA
atcaaaggacagactaccaaaattatggtgatgtgcaaggtcacctgtgtgatgacatataagttgattatgacaacagatgcatctgccaaaacatttccttgatctcctcctgtaagc

SEQ ID NO: 3687 - DNA, 120 bp, synthetic construct
  source 1..120: mol_type = other DNA
aacactagaagaatttaattaacccactgaaactttcaaagtggtagttaatgcatggaagaaatgagaaatcagaaaagtggggggagagtggataagtgcttaacctcccacaagctg

SEQ ID NO: 3688 - DNA, 120 bp, synthetic construct
  source 1..120: mol_type = other DNA
gccacgctttatgccttatcctagagtatttttcccactcctactagactttgtttcaggttatctaggaaaacattctgaaactcatcccctgttgtctgtgtatatctctataattgc

SEQ ID NO: 3689 - DNA, 120 bp, synthetic construct
  source 1..120: mol_type = other DNA
gactactagtggagtgatataatgggaaactgcactacagcactagctacttgcagatgggaaggagtgcagaaaaggaagtgaagaacacaaaaaatgagtgtattagtccattctcag

SEQ ID NO: 3690 - DNA, 120 bp, synthetic construct
  source 1..120: mol_type = other DNA
cttataaaaccagaggggacaaagaatagaaaatattagcgagcactagcaatatctaccacaaatgccaaaagcacgcaaagtcagatggcattccagccttactctgtatctcaataa

SEQ ID NO: 3691 - DNA, 120 bp, synthetic construct
  source 1..120: mol_type = other DNA
ttaagtgtgagactgccaattattcagggcaactgaagatatcctcacctatccttcctaagctcccagggttttggtaacgctgttcaatatccatatcatcttgaagctaaaaataaa

SEQ ID NO: 3692 - DNA, 120 bp, synthetic construct
  source 1..120: mol_type = other DNA
agtttacattttatttcaggcatgcaatggtggattgtgataaggcagttgtagcagctacagattcaaaaagcacattgctgcccaaattcctagaattggtgacctgttggtactcca

SEQ ID NO: 3693 - DNA, 120 bp, synthetic construct
  source 1..120: mol_type = other DNA
tttcaagcactctctcttctgtggtaagcttttgactacagcacattgacttatttgtgggatcatcacacactgatgagatgatcagaagctcagaacaagatggggctaacaaatttt

SEQ ID NO: 3694 - DNA, 120 bp, synthetic construct
  source 1..120: mol_type = other DNA
aatggtcattacagtataaaaaagtcccccaaaaatgttatcatagatggacaggagtaagctgcaagagcctaccagcaggtccttattatagattttccattttaagattctatatac

SEQ ID NO: 3695 - DNA, 120 bp, synthetic construct
  source 1..120: mol_type = other DNA
tttccataaaagacacatctcgttcctttttatggttgcatagtattccatagtgtatatgtaccacattttctttatccaatctgtcactgatggccatttaggttgatttaatgtctt

SEQ ID NO: 3696 - DNA, 120 bp, synthetic construct
  source 1..120: mol_type = other DNA
aatgagatatcaacacatatgtactagaatagctgaaactaaaaagactgagaatatcaaaaggtggctggaacatagaagaaccaaacacccacccacagctggtaggactgtgaaaga

SEQ ID NO: 3697 - DNA, 120 bp, synthetic construct
  source 1..120: mol_type = other DNA
acaaggcagcttctaaggtgttggcaatgttgcatgctttggcagaggtgaggatttcacggatatatgtgtttgtcacaacttgtcaaatggttcatttaagacctctgtatttttcct

SEQ ID NO: 3698 - DNA, 120 bp, synthetic construct
  source 1..120: mol_type = other DNA
ttcctttggatataaacccaatagtaggattgctgaggtgaatggtagttttattttcagttctctgagaaatctctatactcttttccacagggtttgaactatttacattcccaccaa

SEQ ID NO: 3699 - DNA, 120 bp, synthetic construct
  source 1..120: mol_type = other DNA
agaatgatgtatctggtcatatggatacaattttggtttctattatcaaaacaaatccttgttttcagagttgctgtacaaccaccatgacagaatttctgattttatcctaatgagagc

SEQ ID NO: 3700 - DNA, 120 bp, synthetic construct
  source 1..120: mol_type = other DNA
gaagcagacttacaaaaatacaactgcgatgtgatactggttacagccaaggttcaaaaaggaaggagacattaattctatagcaaaggtcagggaatagctcaaaaagtgatgcttgag

SEQ ID NO: 3701 - DNA, 120 bp, synthetic construct
  source 1..120: mol_type = other DNA
tagctaacaaggaagcttcacataaatccagcagtcttactatttgctaataactgctgtcctacatgcagtttcttcattgggtatttccaacctctggccatttggaacctaatgtga

SEQ ID NO: 3702 - DNA, 120 bp, synthetic construct
  source 1..120: mol_type = other DNA
gagtgtctttctacaaagggtctacattttctctcatcttcctatagtatgcggacactgtgaggaccagcatactattctttggctaatgataggacaatgtgagttatatgcaaagac

SEQ ID NO: 3703 - DNA, 120 bp, synthetic construct
  source 1..120: mol_type = other DNA
tattaggagagggacagtgatattttctactaaaactagccaaatataagtcaattatatgatgtttctcttattctttctgagtccctaacccagtcatccaaggcagagtacccaggg

SEQ ID NO: 3704 - DNA, 120 bp, synthetic construct
  source 1..120: mol_type = other DNA
tggtaaataagatctgaaatagaaaccaaggctgagttctcaagaataacacaggagatttaagcacataccttgtccatgagttcagctatacgtggaactggtttccctttctggtga

SEQ ID NO: 3705 - DNA, 120 bp, synthetic construct
  source 1..120: mol_type = other DNA
taccaaccattcctcaggctcatggtaaatgtcccttcttcaaggaggcttccaggagcccagaataggttatggccttcttttaatcagacatttttaacttctaattattgcattatt

SEQ ID NO: 3706 - DNA, 120 bp, synthetic construct
  source 1..120: mol_type = other DNA
atactgcttctaggttgcttatttccaaagatatccctccaattttgatatcacatgtagactccagagagtcatttacaacttcctgtagaacctcttcaccaacatggcccaacatta

SEQ ID NO: 3707 - DNA, 120 bp, synthetic construct
  source 1..120: mol_type = other DNA
gatgatgaactaaagatatgcagccaggtcacatttctaagaagtttggctcctgtaagaggaagaggcgagctggggttataggttatagggttttgcattttgctttttacttttatt

SEQ ID NO: 3708 - DNA, 120 bp, synthetic construct
  source 1..120: mol_type = other DNA
ttgctccaggccccatggttagaaagtggtggcaccagaattcctggccatacaatagaatatgacctagatatagacattaacagaggaaaaacttttaatataactacaaatactttc

SEQ ID NO: 3709 - DNA, 120 bp, synthetic construct
  source 1..120: mol_type = other DNA
cctggaatccaccatgagacacgagtgctggaggggaccacttcagatatacttaatcatatggcaaatgtcacaccacttacgtacctttacaaaatgagtagtttaatttttacttcc

SEQ ID NO: 3710 - DNA, 120 bp, synthetic construct
  source 1..120: mol_type = other DNA
agacgcatttaatagaggccgacctgtgcagaacaactgtacaaatacctggatggtaacagagggttgtggggagctattcttttctcattatttctcataaaatgagattaactagat

SEQ ID NO: 3711 - DNA, 120 bp, synthetic construct
  source 1..120: mol_type = other DNA
catgaaggtggaagtactgtggaaattataaagcttagacagaatggtactaaacctcataggtattgtagaatttcacgtaatctagaatttcaagtgcctggcagaggccaaaatggg

SEQ ID NO: 3712 - DNA, 120 bp, synthetic construct
  source 1..120: mol_type = other DNA
agacagagaaggtgctatgaattgttcagtaagtgaggaaattgaaaccaaacattgaatgcagtgcccaaaatcaagattagtaactgggagggccaacagtaagactcagaatttctg

SEQ ID NO: 3713 - DNA, 120 bp, synthetic construct
  source 1..120: mol_type = other DNA
aaatagctgtccaaatgtcattctactaagaaatctggctttgagttcagttgtctatgttctgaccacagcaaataggattgggaaaaaaagaacaacaaacgaatagccccggagatg

SEQ ID NO: 3714 - DNA, 120 bp, synthetic construct
  source 1..120: mol_type = other DNA
tttcaattactctgcagtaacacaggtggtggtgtaagggtttgcatgtagcattgtgcatgctcagcacctctcatgataaaagtggggtaagaaaaggaaactaaacatccaaacaat

SEQ ID NO: 3715 - DNA, 120 bp, synthetic construct
  source 1..120: mol_type = other DNA
ggctttttgttttaatgaaggccaagaacctaaaagtaaaatgcctggtcttcagctacaaaagatggatctactggaacatggttacagacaaacaaatgcaatgtccaaagaagtagt

SEQ ID NO: 3716 - DNA, 120 bp, synthetic construct
  source 1..120: mol_type = other DNA
agtacatagagtttcatacgcccacaccacccccaaactcggcaccttccccattattaatatcttgcattagatggtacatctgttacagttaaagcaccaatattgatatgctattat

SEQ ID NO: 3717 - DNA, 120 bp, synthetic construct
  source 1..120: mol_type = other DNA
agtctggctgctttgccacagtgttctttacatttctttcctctaacccttgcatctcctggaaacttgtacttgtcttgaatcttgttgaactctcacacaatgtggttcactagaatt

SEQ ID NO: 3718 - DNA, 120 bp, synthetic construct
  source 1..120: mol_type = other DNA
catttggatctcattcaccagatttcagagacacagcaaaaagggcagagactatatttcttttggttaccattgtacacccagtacttaccacataaagatctttgcctggcatatgac

SEQ ID NO: 3719 - DNA, 120 bp, synthetic construct
  source 1..120: mol_type = other DNA
accactgcacatgcccagtaaaggccttctctctgtttgctgggaatgtagccaggagtgtttaatagattattctgaatttttaccagaagagagcaattgtttttgtttttttcctct

SEQ ID NO: 3720 - DNA, 120 bp, synthetic construct
  source 1..120: mol_type = other DNA
tctgaatgtgcaactggtgtcttctgaggtgtgtgtgtgtgtgttccatattgactaatttctaagatgagttgctccattgagctccaggaccaaaatgatcatatctttgttgtaaac

SEQ ID NO: 3721 - DNA, 120 bp, synthetic construct
  source 1..120: mol_type = other DNA
tctgccaaacgaagctaagagcaaacattgttctttcttctgattatgtggggcatgaccatagaataggggaagagaaatgtttaacttggagcatttatatttcaggccaggagaatc

SEQ ID NO: 3722 - DNA, 120 bp, synthetic construct
  source 1..120: mol_type = other DNA
tttgttgccataaccacagcttcttgcaactggaatcaatcatggtctctcacttgcctcactgcaatactttctttattcactcttgaccctcctaaattaattatctacacgacagct

SEQ ID NO: 3723 - DNA, 120 bp, synthetic construct
  source 1..120: mol_type = other DNA
ttacgatattccaattacccaaaagttttcttgcatcctttagcagccactgttcaccacctccccaagcttcaagaaactactgattcgttgtcctcataattttgtcacatccaatca

SEQ ID NO: 3724 - DNA, 120 bp, synthetic construct
  source 1..120: mol_type = other DNA
ggagtctcttgaataaaagcaccaatctcatttataagggcaccaccctctgacctatcaaacctttgacttaccaaaggcctatctcttaatactaccagattggggttagtattccaa

SEQ ID NO: 3725 - DNA, 120 bp, synthetic construct
  source 1..120: mol_type = other DNA
cttgggggtaccaatagaattccctaacagcagccaaattttacttgagaccatccaacttagccttctgtattgcatcctgggagtgacttgatttaggttatgatatggtaaaactat

SEQ ID NO: 3726 - DNA, 120 bp, synthetic construct
  source 1..120: mol_type = other DNA
ggatgatgatgatggctgatgatgataattaatagcttgcatctgtggtacacatactttgcttcagatactgtatgaggtgctttgcatatggttgtgaatcctcacaaccatactacg

SEQ ID NO: 3727 - DNA, 120 bp, synthetic construct
  source 1..120: mol_type = other DNA
gactctctttcaacaaagggtcatttgtgtcaatggacagaagagaggatcagatcacctgcggtaattgcaaattaatgttctcctggtaatgcactaactacacactattgatctaca

SEQ ID NO: 3728 - DNA, 120 bp, synthetic construct
  source 1..120: mol_type = other DNA
ggtggaaattaacacacgtttgtatttcagtgttgtacttgatcatgctccctgtttagacagaggtcattcatcctaaatctggtttctgaactgtggtctagaaatcacctgaaatgg

SEQ ID NO: 3729 - DNA, 120 bp, synthetic construct
  source 1..120: mol_type = other DNA
ggctggagcaggagggagatactcggaggactgagactctgaattgtgatactcgctttatcatattaaatatcatttctgtcttattacaatccaatgagataggtactataacttcca

SEQ ID NO: 3730 - DNA, 120 bp, synthetic construct
  source 1..120: mol_type = other DNA
ttgggacagtacacacaaagcaaaacagtggggtacaaaactgaatgtcatgaatggaaactcttagagaggtagatgcttttgagggaccaactgtgaaatgtatttttgtggtctgta

SEQ ID NO: 3731 - DNA, 120 bp, synthetic construct
  source 1..120: mol_type = other DNA
tctcttcatttcctatcattctcacctctgttcagtatgtcttgccatgcctgaaataggccatatttgctcacttgtataactacgccttgatatttatactgttgctctttctctggc

SEQ ID NO: 3732 - DNA, 120 bp, synthetic construct
  source 1..120: mol_type = other DNA
tagagcccaggagccccagagtagccagtcttctagaaatctcaaagttttctttactcagcacgtggaaagaatgttcagaattcaaaataattttggaaactgaagaagtcagggata

SEQ ID NO: 3733 - DNA, 120 bp, synthetic construct
  source 1..120: mol_type = other DNA
taagactttggtcaagcatatgaagactctttgaaaaagaagtcagaccgttaattagtcacatctctgcatacaattcaaataggaacggacagtagaaaggatttgtcagggacaaga

SEQ ID NO: 3734 - DNA, 120 bp, synthetic construct
  source 1..120: mol_type = other DNA
atagggtgcaaaatttttatcacctaaagacacccgtcagtaaagttgaagcaatgaagcctctgtgtatattatgaccaagagataatatgggtaatgcatccatctgcactcaagtgg

SEQ ID NO: 3735 - DNA, 120 bp, synthetic construct
  source 1..120: mol_type = other DNA
tgggttgactgaagaacttataagagcatttacccaggaaggcaagcctgtaatcggttttgaatcttatttctaggccacggtgttacatctggttctgttgtaatagtcattttcact

SEQ ID NO: 3736 - DNA, 120 bp, synthetic construct
  source 1..120: mol_type = other DNA
ggcatagtattctctaggttcatttattttgacacaaatggcaggatcttttttacagctgaacaaaactccattgcgtatatatgctgcaatttcttcatcattcatctattgatagac

SEQ ID NO: 3737 - DNA, 120 bp, synthetic construct
  source 1..120: mol_type = other DNA
ttaattcattttgagtttgagtttcagctgagcccagtattacgctgaagccaaacccagaaaagggtactataggaaaaaaagtataggccgtatctctgataaacatggttgcaaaaa

SEQ ID NO: 3738 - DNA, 120 bp, synthetic construct
  source 1..120: mol_type = other DNA
catgttacagaataagatcatagaaataaacagtgccacggagaaatgatacattccaagaaaattcgctcaaaaattttgaagcaaattttgctatgaaaagcaataattgggctgggc

SEQ ID NO: 3739 - DNA, 120 bp, synthetic construct
  source 1..120: mol_type = other DNA
tctgtgatgcatataaagcaataaagaaggtatgcgctatcacacttatgcaacttatgaaaaaaattagctttccattcttgaaatgtcattactcttcttaatgtcagtcatatggct

SEQ ID NO: 3740 - DNA, 120 bp, synthetic construct
  source 1..120: mol_type = other DNA
gtggatttaataaatattgtaaaaccagagaacagaattcggttgggcaatgagaggcaatgaaaggatgatatgagagaaatgggaggatgatgatcaagaggctaagggctttgagct

SEQ ID NO: 3741 - DNA, 120 bp, synthetic construct
  source 1..120: mol_type = other DNA
atatttctgttacacaccaagcagtcaatacatggggtaaccaatagcttatgatggggcctggcataaaaagataaatttaggcaaacagatttcctctcttagcagtctgagctgtac

SEQ ID NO: 3742 - DNA, 120 bp, synthetic construct
  source 1..120: mol_type = other DNA
tctgcaccctgagcacacatctacacccaggacacataactctcgtttagttttctatgatttcacttttcttctcttcatagaaacttgactctaagaggtaagctatagcctgaacat

SEQ ID NO: 3743 - DNA, 120 bp, synthetic construct
  source 1..120: mol_type = other DNA
gatttctggctcatttctgaaggatacaggattttgagctgacagttcttgttttagcatttgaaaaatgtcccactttcttccagactccatggcttgtgatgagaaatcccctgttat

SEQ ID NO: 3744 - DNA, 120 bp, synthetic construct
  source 1..120: mol_type = other DNA
tggtataatattaagagactcttgattttatttaaactttgtttctgctagctttccttggtgtcagtctggcaggggaagtggagaatgccacctccttaatgccagatagaagcccag

SEQ ID NO: 3745 - DNA, 120 bp, synthetic construct
  source 1..120: mol_type = other DNA
ctacccttttgccagagaatatgtgatgccaaactttctgctttccaattaccatcaatgctaagtagtgagaagtcattattaatggagtattaccagagagttcacagttcacagtct

SEQ ID NO: 3746 - DNA, 120 bp, synthetic construct
  source 1..120: mol_type = other DNA
cgagcaatggaggtcacagctctcaaagcaataggtctgattgctgtccctacacaaaatcagaataatcaatggttagcacactgaccacttgagtatactgtcttatattacttctat

SEQ ID NO: 3747 - DNA, 120 bp, synthetic construct
  source 1..120: mol_type = other DNA
cctttaagcattttctgaactaaaggcagttcaacttatgcaagaatttgacactgccttaaaccagggcttcacaaacaacataaacaaataactggttcagcctcacgtggtgagttc

SEQ ID NO: 3748 - DNA, 120 bp, synthetic construct
  source 1..120: mol_type = other DNA
tatctgttacactcatagaatgcccaacaccaagtgtgaaacctattgtaaagttcggactttgggtggttaggctataggtgtcaatgcacgttcatggattacaacaaatgtatcact

SEQ ID NO: 3749 - DNA, 120 bp, synthetic construct
  source 1..120: mol_type = other DNA
ctacctccactgttagaagactatcattaacagtaaggggtaaaatttcaaagtggtatacagggatttggccacatattctattgatattaatggacataaaaaggcaacacagctttg

SEQ ID NO: 3750 - DNA, 120 bp, synthetic construct
  source 1..120: mol_type = other DNA
ggttcgaacaaacaaacgaaaaatgaactggacttatgagttgcaacattgctaccaagaactttgctttgcattatgtggctcttgtggtggactagactgaactgtaacttttggtca

SEQ ID NO: 3751 - DNA, 120 bp, synthetic construct
  source 1..120: mol_type = other DNA
attggagacaaaagcatgatgcctatgatgacagaactttatcctctgaaaccttaagaggaccatacatgtcccctcctttttctcttttcctaacagctgtcatttagcagtgtcata

SEQ ID NO: 3752 - DNA, 120 bp, synthetic construct
  source 1..120: mol_type = other DNA
actcagtacctagcatgtgtcaggcatttatttttaccaagagaattaataacattcaccaaagagggccattctcctttctgaaagtgtcagctactgttactggaatgagtaggatca

SEQ ID NO: 3753 - DNA, 120 bp, synthetic construct
  source 1..120: mol_type = other DNA
taatattccagggagtttggatgtattagatgatacaactcatgggaaagacttggcacagtgcctagcttataatgtgtataagctaatattagtgtcaaagccagagaaaattgatca

SEQ ID NO: 3754 - DNA, 120 bp, synthetic construct
  source 1..120: mol_type = other DNA
atgaaagcagctacaatggaacttccctattccttgaatcttgatggctacttgacagcaagatgcaacagaaagacttctctgtactacaggaaatattggattagtttttctcttcca

SEQ ID NO: 3755 - DNA, 120 bp, synthetic construct
  source 1..120: mol_type = other DNA
atgccattagttcacctttccttttgatagtgctatggcattatgtttaaacaattacccgacaacacagcagtttaatgaaacagtacagtgagcacattcttcaatatggccagagag

SEQ ID NO: 3756 - DNA, 120 bp, synthetic construct
  source 1..120: mol_type = other DNA
tagtctgcaatatcaccataaaattcactgccgggtttgaatgtgaggacttttctttatttccagattaacacatgcctcaatctctccaaataagagcttctggcaatgctttttgcc

SEQ ID NO: 3757 - DNA, 120 bp, synthetic construct
  source 1..120: mol_type = other DNA
ctacctgggcccttatctgaaccctctgaatcaatgctcactctaaaactgaccaggcactttgaaaaagagagatcctactgtttagttgctctatcaattagttgacaataacatttc

SEQ ID NO: 3758 - DNA, 120 bp, synthetic construct
  source 1..120: mol_type = other DNA
tttcagacaagatctcctaaagtattacctaaaggaactgtaatactaccctagagcatgaggatatggagcaatctggcaacctctcttaacataccacaagtcagctacttgccaaaa

SEQ ID NO: 3759 - DNA, 120 bp, synthetic construct
  source 1..120: mol_type = other DNA
atggcttcgctggtaaattctattaaactaaaggaaggaataataccgatcttacacaaactcttgtagaagatagaggaagaatgagccaatctcaactcattttataaagccagtata

SEQ ID NO: 3760 - DNA, 120 bp, synthetic construct
  source 1..120: mol_type = other DNA
aagacaatggcattagaatatacgacaaataagtgaaagagaacggagtcctgatatagtcccacaggtaaggccaattaatttttgaccaaggcaggaagtcagttcaatgaggggaaa

SEQ ID NO: 3761 - DNA, 120 bp, synthetic construct
  source 1..120: mol_type = other DNA
gacagtttctttaaaaaatgacatacatctatcctatcacccagcaatttctttcctagatattcactcaacagtgaaaacagaactaaaaaagtatatgtacaaaaatgttcatgacag

SEQ ID NO: 3762 - DNA, 120 bp, synthetic construct
  source 1..120: mol_type = other DNA
ctcagctggagatggagaaattgactagcaagcaacccaagagaactttctggtgtgaaggaaatatcctctgtcttgtttcagattgtgttactacagatgtgcatcattttgaaagct

SEQ ID NO: 3763 - DNA, 120 bp, synthetic construct
  source 1..120: mol_type = other DNA
gcagtttggccctttgctgactgtagtgctaagtgagaccccagagccaaatttcaaaaaatgccatcaactgatcacaagtattgttaacatataatgagaatgtctgtttctgcactt

SEQ ID NO: 3764 - DNA, 120 bp, synthetic construct
  source 1..120: mol_type = other DNA
tttcccatatccagcacaaactgaactagagaaacatattatgattgccaaaaaacgggctatcactctaaaggctgtaggcaaacaaaatactaacaagtttaattattcacaatggca

SEQ ID NO: 3765 - DNA, 120 bp, synthetic construct
  source 1..120: mol_type = other DNA
aactggaaggtctcagattctacccaaatatgttgactcccaaactagggccgtttttcacaaacattttgccttccttcaataagttgatatttgtatgtacctattggctctaggcat

SEQ ID NO: 3766 - DNA, 120 bp, synthetic construct
  source 1..120: mol_type = other DNA
aacacctggtaaaagctctgtggttgtggtaaactgttcatcatcaccacctacattggcttcatttagacatcacgtttatcttaagtcattctgagagtttagggcatgcctgagtat

SEQ ID NO: 3767 - DNA, 120 bp, synthetic construct
  source 1..120: mol_type = other DNA
atagttgattatgacagctttcagttttgcctattttaagactttatgttcctaccaaaagttgaaggcctatggttgaagtgggaacgtctgacagtgactgaattatttccctccagg

SEQ ID NO: 3768 - DNA, 120 bp, synthetic construct
  source 1..120: mol_type = other DNA
tgcccacccaccttcccacttcacactacgcaatgattaccaacaagttcctttggaaatcacaaagccaaaaattggtaaaaagaaatcagaagactcagtgcactgtgacatacaaaa

SEQ ID NO: 3769 - DNA, 120 bp, synthetic construct
  source 1..120: mol_type = other DNA
aatatgaactatgtcttaaaggataactagcattttgaatgcagagaaggaatggagggaatcacagataacggcatgagcaaaaggatacagatctggctggaatgttaggtgtgtcgt

SEQ ID NO: 3770 - DNA, 120 bp, synthetic construct
  source 1..120: mol_type = other DNA
tgagagggcctctgagaattttgagcaaggtagttaccagataagattgtattttggactttgtatatgatggtggtgttgcataaggaccagaaggacaagaaagtgaaagtgattagc

SEQ ID NO: 3771 - DNA, 120 bp, synthetic construct
  source 1..120: mol_type = other DNA
aagtcagactagccagactgaaattggaagatgatatgggcaatggttgacatagatagatatgtacacatctctttacatatatacataaagttacctttcaccactgtcattcttggc

SEQ ID NO: 3772 - DNA, 120 bp, synthetic construct
  source 1..120: mol_type = other DNA
aggggtgtaaatagttgctggattgtgaagacttagtctagaattgtgaagacgtatgacaaacacatgacaaacaagtcactggcaaaatgtctggagttctctttccatgtagctttt

SEQ ID NO: 3773 - DNA, 120 bp, synthetic construct
  source 1..120: mol_type = other DNA
ttctctttgtttgttaaggctaataccaaatattacatcctttggggagcactcctagaccatcctcaatcaccagattcctttctttttgttctctctagcatgagtgggaacaacatc

SEQ ID NO: 3774 - DNA, 120 bp, synthetic construct
  source 1..120: mol_type = other DNA
tggggtaagataacagttctcagtgttgggttatagtgtcaatgcaagacttgagctgtgttaattcaacaagcttgatcttgattgccaaagcatgcttgtcaatatttagctcccaga

SEQ ID NO: 3775 - DNA, 120 bp, synthetic construct
  source 1..120: mol_type = other DNA
ctaaagataaaatcagatcaatgctgcaacaatgagaatcaggctgaaatggaagagccagatcatgatctagattcttttggttacctacagatagctatgactgccaattctgaatct

SEQ ID NO: 3776 - DNA, 120 bp, synthetic construct
  source 1..120: mol_type = other DNA
gccttgtcccttcaattttaccccaatagatagtaatagcaagactgtcccgttcatccgtggacagtgccattattagatactgggaatcctcgttataaattacatcataccactttc

SEQ ID NO: 3777 - DNA, 120 bp, synthetic construct
  source 1..120: mol_type = other DNA
aggcagcagtatccaattggcttagcatatcaagggagaatactaactagagaatgaaaaatagcacattagtgttcagaatgctcatctattaagagaagatacgtctgcaccatggag

SEQ ID NO: 3778 - DNA, 120 bp, synthetic construct
  source 1..120: mol_type = other DNA
gtgcatgtgtctttatagtaacatgatttgtaatcctttgggtatataccccgtaatgggatcactgggtcaaatggtatttctagttctagatccttgaggaattgccacactgtcttc

SEQ ID NO: 3779 - DNA, 120 bp, synthetic construct
  source 1..120: mol_type = other DNA
aaaaaaggagtaacttgtttcatgtaagtccaaaccacaagaagggaacattaaattttaaagctagagaataatatgttttgactctatgtcccacctcctggacacactggggcaggg

SEQ ID NO: 3780 - DNA, 120 bp, synthetic construct
  source 1..120: mol_type = other DNA
ctgcacaaggatagctttttactcaagtctccaataccacattcgttatttccatctgaaatcttatcagaatgccccttaccatccacatttctacaacattctgattatgaccaccta

SEQ ID NO: 3781 - DNA, 120 bp, synthetic construct
  source 1..120: mol_type = other DNA
ccaaattccctctgaaaagcatatgagattatgtcacatcatttggctcaaatgaagaactgtaaactcttccatatttcaggtgcttttcggagggacataggttataagcaccacgaa

SEQ ID NO: 3782 - DNA, 120 bp, synthetic construct
  source 1..120: mol_type = other DNA
tcctttgacagaaacacactgaaagtatgtttcccatcaaaggaagcatcaaattcagctaaagaattcatagagaaggtttgttggcacattgaaggaagctgggatttccccagacaa

SEQ ID NO: 3783 - DNA, 120 bp, synthetic construct
  source 1..120: mol_type = other DNA
aatttgaacttagagcaacagactttgtcaaaggcaaaccagcacatttttctcttttaaaaacacaagttttgaacgcctgtgaaaggtctccattcaatttgacactcagccaagtcc

SEQ ID NO: 3784 - DNA, 120 bp, synthetic construct
  source 1..120: mol_type = other DNA
tataaggtgtctctgagatcagataagtaggatgtggcctatcactggtctttattttcagttgtgctaaaatgaaacaagtgtgttttctcccgtcagtttcagaggagagtggatatt

SEQ ID NO: 3785 - DNA, 120 bp, synthetic construct
  source 1..120: mol_type = other DNA
aagacatttatccagctctctcaatcctgttctctttcttgcatgagttcacacatattaaaatgcaagtgtcttgcttgtctgatatgtcttttgcattatttgaaaccctgaagcccc

SEQ ID NO: 3786 - DNA, 120 bp, synthetic construct
  source 1..120: mol_type = other DNA
tatgtagaatatgatataaacacgagagagatgcacaggatgcataagatgcatggaatcaggggtaagggcttctaaagtagtttggggagtgtaaggaaaatattggactgagaagct

SEQ ID NO: 3787 - DNA, 120 bp, synthetic construct
  source 1..120: mol_type = other DNA
ctcactgcacatggcttatcatgccttctcctgatcttcttcctctcagcttcttttgctggatcttcttactcttcctgttcataaaatgctaaaatagccattggacctctttttttt

SEQ ID NO: 3788 - DNA, 120 bp, synthetic construct
  source 1..120: mol_type = other DNA
aagaaaatctggtacatacacaccatggaatactatgcagccataaaaaagaataagatcatgtcttttgaagcaacctggatgcatctggaggccattatcctaagtgaattaacgcag

SEQ ID NO: 3789 - DNA, 120 bp, synthetic construct
  source 1..120: mol_type = other DNA
tgcagggcctacatgatctctggttagtcctccaatctcattgtcaactattcactctcctattcaacttacttcacaccatgcatccttattgctgtttctgagcattctactatattt

SEQ ID NO: 3790 - DNA, 120 bp, synthetic construct
  source 1..120: mol_type = other DNA
aaaagcagattgtaaaatgataactgacttagtagaaaaaaaagaacattcaacatgtagaactcccaaaaaggcagctaaagacagggtactggagagcacagttcaagcagggaggca

SEQ ID NO: 3791 - DNA, 120 bp, synthetic construct
  source 1..120: mol_type = other DNA
aattgtttatccccagagaaaagacctgaagatactcacatttgtcagccacagtaaaaggaagagcttaccactcaatctcctctgcaataaagctccctagctgttaaatttcactca

SEQ ID NO: 3792 - DNA, 120 bp, synthetic construct
  source 1..120: mol_type = other DNA
gggtagggggagcaggggcctggataggttagtcaatgaatacaaagttatagttaggaagaaacatttctgttgtttcattacacagtagggagattacagcaaataacaatatagtgt

SEQ ID NO: 3793 - DNA, 120 bp, synthetic construct
  source 1..120: mol_type = other DNA
ctgagggatgttgtaagagaaaacccactggtgttactgtgttgactacaaagcttttgttgaggatacagctattttatgacatcatactctctgagtgagaagtcatagaccttgatt

SEQ ID NO: 3794 - DNA, 120 bp, synthetic construct
  source 1..120: mol_type = other DNA
tgtttccctgacaattggtttgagtgtcttcttttatatgcgatattcttggaaatacgaagactatttcagagttctctgttccattggtttaatctactggttcttgtgccagaaaac

SEQ ID NO: 3795 - DNA, 120 bp, synthetic construct
  source 1..120: mol_type = other DNA
ttggaatcagtcagatctgacctcaagtaccaatggacctcaggccttggtattgtttttctcatttataaaatgattctttgtgaaagctgcctaactcagagcctggtacacaaaatc

SEQ ID NO: 3796 - DNA, 120 bp, synthetic construct
  source 1..120: mol_type = other DNA
tggatcaaagccaaattggcagaatctagcagatttttatgggactctacaagactaaaggtggagggttttaacttttcctccttgccttgacctctaacactctgtatagaagggata

SEQ ID NO: 3797 - DNA, 120 bp, synthetic construct
  source 1..120: mol_type = other DNA
gcaattctcccatctcattaaatttttgtttatcctctatgtcttcatatattttagtgagacttttggagagtccacccgagtgtccaatcacaaacctaaattccttttaactggacc

SEQ ID NO: 3798 - DNA, 120 bp, synthetic construct
  source 1..120: mol_type = other DNA
ccattggaggaggagaggcactctgctttttagagtttccagtttttctgctctgttttttccttttccccatctttgtggttttatctacttttggtctttgatgatggtgatgtacag

SEQ ID NO: 3799 - DNA, 120 bp, synthetic construct
  source 1..120: mol_type = other DNA
ataaaaggatggaggaagatctaccaagcaaatggaaaacaaaaaaaggcaagggttgcaatcctactctctgataaaacagactttaaaccaacaaagatcaaaagagacaaagaaggc

SEQ ID NO: 3800 - DNA, 120 bp, synthetic construct
  source 1..120: mol_type = other DNA
caaatagatgcaataaaaaatgataaaggggacatcaccactgatactgcagaaatacaaactaccataagagaatactacaaacacctttacacaaataaactagaaaatctagaagaa

SEQ ID NO: 3801 - DNA, 120 bp, synthetic construct
  source 1..120: mol_type = other DNA
ataagcaacttcagcaaagtctcaggatacaaaatcaatgtacaaaaatcaaatcacaagcattcttatacaccaataacagacagagagccaaatcatgagtgaactaccattcacaat

SEQ ID NO: 3802 - DNA, 120 bp, synthetic construct
  source 1..120: mol_type = other DNA
gaactcaaacaaatttacaagaaaaaaccaaacaaccccatcaaaaagtgggcgaaggacatgaacagacacttctcaaaagaagacatttatgcagccatcagacaaatgaaaaaatgc

SEQ ID NO: 3803 - DNA, 120 bp, synthetic construct
  source 1..120: mol_type = other DNA
tagatgctctaattccaagaatctgtgtatttgaaaagctcctcaggtgactattatcatactaaagacttcagtgacctctgctgtattataagctacattggtctgttctcatgctgc

SEQ ID NO: 3804 - DNA, 120 bp, synthetic construct
  source 1..120: mol_type = other DNA
aaagcttaatggaataaattaatacagaatgagcaatggagaaggggcagctgaagcacagtgcttaagtgtacagtatgaagagtcagacagtagagattcccatatacctggatacca

SEQ ID NO: 3805 - DNA, 120 bp, synthetic construct
  source 1..120: mol_type = other DNA
catgtctactatgtccctgaaactttcataaattctggaggagtcgatatgaaggaaacaacggctcttgcttttaagatgtttataatccaaacaggtcagtcatcaaccgaatgtgct

SEQ ID NO: 3806 - DNA, 120 bp, synthetic construct
  source 1..120: mol_type = other DNA
tttggagaaagatctgagtatgaacccagactatgacatatcctggttatgtaaactctggcaagtttcttaagtatctagacttgagtctctaagtctgcagaatgggcccaatggtat

SEQ ID NO: 3807 - DNA, 120 bp, synthetic construct
  source 1..120: mol_type = other DNA
tctagtttcccaatttccatatgtatgatgtcttaaattttgtatgcctgagaaacaatgcaatcaaggcatcccgctggttcttctgtctcaactcctctgtttcaacagtctttccct

SEQ ID NO: 3808 - DNA, 120 bp, synthetic construct
  source 1..120: mol_type = other DNA
ccaaattcctttctcttctctattctgataacaactcttatcatcactcctgtataaccctggcagtctccaccttcaagtatcagacaccatgtatgtgtctcaaaggtttactatgcc

SEQ ID NO: 3809 - DNA, 120 bp, synthetic construct
  source 1..120: mol_type = other DNA
aagaaagcagtaaattaagagagaagagcagtaagctaccagcactgctgtttcccacactttaagggtttgagaacataactaggtaaatttgcatgtaagcactgtcctagaagagag

SEQ ID NO: 3810 - DNA, 120 bp, synthetic construct
  source 1..120: mol_type = other DNA
atactgagaactcagttctctgcaaggcttccttaattaatccaatgtactgtaccattgttctgtatgagactgtgacatggtgaactgtttctgaagcttacagagatgtgtagttct

SEQ ID NO: 3811 - DNA, 120 bp, synthetic construct
  source 1..120: mol_type = other DNA
tctcctgcacagaccaacgatggctaaacagtgagatactgaggctctgagaaaggcaacataatgaaagaggggattctttgtcaatctgtacatgaatatattcaaatgagcattatt

SEQ ID NO: 3812 - DNA, 120 bp, synthetic construct
  source 1..120: mol_type = other DNA
tgcgatgtgaagtcgatgcctaaaatccctttctaagctactatattgattcacatttgtgcaagttttctaaattatacactttgtactcacttctggccctacactgacgcagatcta

SEQ ID NO: 3813 - DNA, 120 bp, synthetic construct
  source 1..120: mol_type = other DNA
acagggaggatttcatgtgaaaatgtcacaccacagctggataacaccatttatataggtgatagtaatcactgatttgggggctatcttaagatgccctcattatttgggaatgaagtc

SEQ ID NO: 3814 - DNA, 120 bp, synthetic construct
  source 1..120: mol_type = other DNA
gaaataattccactgacattccttagctgagatcccgttttcccaatgcaagtcactgtcccttattagctaatgcattttctctagaagaacattcctgaaatgtgcccagttttctac

SEQ ID NO: 3815 - DNA, 120 bp, synthetic construct
  source 1..120: mol_type = other DNA
ttcttttattaatttttaatgttcagcaccctctgtgacctcctttattctcttgctgtcaacatggcaggctggaaaaattgaaatgggctgacagaaaacatagtgcatgttacagcc

SEQ ID NO: 3816 - DNA, 120 bp, synthetic construct
  source 1..120: mol_type = other DNA
ctagtaagtggcaaaagaactgagagacgatgagaaattcttaggaaagcatggaccacaagagaatagaatttgtgcaagaccttatcttgatattctctcatcctgtgctgtcacttg

SEQ ID NO: 3817 - DNA, 120 bp, synthetic construct
  source 1..120: mol_type = other DNA
gtgtttattaggaaaaactataaaggatcttgtgtttccagatcaaaattcatggtcaatttgctagcatgagtccaggtgtaaatctcctgtgtttgtgggatcaagtgctcaactgga

SEQ ID NO: 3818 - DNA, 120 bp, synthetic construct
  source 1..120: mol_type = other DNA
gaaatagacatttccatgtgcctattttctgtgattttccaggctcttattttctcatggggcaagtatcatttagagggcaaacacctatcctctccattgaataacttagctacagta

SEQ ID NO: 3819 - DNA, 120 bp, synthetic construct
  source 1..120: mol_type = other DNA
aggcttccaagtggctttcaatactattgacccccatgccataataatttactctgaacatctgtcagacatttttcctgattttcactaggtgactgctttaaatgactgcctcttacc

SEQ ID NO: 3820 - DNA, 120 bp, synthetic construct
  source 1..120: mol_type = other DNA
tacacaaaaacgtctacgtagatcacaaaggctttattggtgctttctaaaggcattaatgcttctccctgaacatgatttgcaatctctgtcacagtagttgcttgtcttgtgtgtgtg

SEQ ID NO: 3821 - DNA, 120 bp, synthetic construct
  source 1..120: mol_type = other DNA
agatgacctcttcattgtagagcaggtatttctaccaattacttagggcatcaaatctcactggtttcatgtcctctgcaaaggaataagcactacagaatgagactgagaatttcctga

SEQ ID NO: 3822 - DNA, 120 bp, synthetic construct
  source 1..120: mol_type = other DNA
ctgtaagaggaaaaaccatgagtatggaaagcagagcagtggttgctgagactgagaattaggctggaggagcaattaagtggaaataagtataagaaaatttttgagggtaatggaaat

SEQ ID NO: 3823 - DNA, 120 bp, synthetic construct
  source 1..120: mol_type = other DNA
agagggttgtgttagggtgggacatatagggagcttttgaggtgttggagatgttctatttcttgacctggtggtcacatggtgtgcacattatgagttgttaaaaaatatatatgtgtg

SEQ ID NO: 3824 - DNA, 120 bp, synthetic construct
  source 1..120: mol_type = other DNA
gtggcattgtaggtaatgtgggttctacccttttggcaaatatttattgaccatgaggcactacaaattttccgtgctgaacactaagatgaatgaaactagagtctgcaaggaaatgca

SEQ ID NO: 3825 - DNA, 120 bp, synthetic construct
  source 1..120: mol_type = other DNA
tgaaagaatgaagaatttctaattgcataccagctttccatcatgaaccacaaaacatttgcatctcctcttccatggagccaaaataagctggagatacaggatattagcagctcttgc

SEQ ID NO: 3826 - DNA, 120 bp, synthetic construct
  source 1..120: mol_type = other DNA
accctgcatggtagagggggctctgcaatttaaagggttaactttctgcaatgttgaggagtcgcataacttttcacgagaactgatgagtagatatgctaaagtaactaagttctgaaa

SEQ ID NO: 3827 - DNA, 120 bp, synthetic construct
  source 1..120: mol_type = other DNA
tgacctctgcaaaaagacaactcagagacatccttaaagagtttggacacttacttgatcttttgattcagaacttgctcaaactcactattgtgatgtgggactctggaagcaattgtg

SEQ ID NO: 3828 - DNA, 120 bp, synthetic construct
  source 1..120: mol_type = other DNA
ttttgtaaaaccaagattgacacaggttccataggcctatcttcacaggcaaacaaaaaactcttcgagagccatacattggccatatttcgcagtaattaggacacctccaaatcttct

SEQ ID NO: 3829 - DNA, 120 bp, synthetic construct
  source 1..120: mol_type = other DNA
gcacccaccatgctgatacatttaggatgaagagagtctagggaagtcacgcttctgtcctgggaatgttatgaaatccaagcaagaaagaattactattgaggcaattttaaataacct

SEQ ID NO: 3830 - DNA, 120 bp, synthetic construct
  source 1..120: mol_type = other DNA
caactacatggaaactgaacaacctgctcctgaatgactactgggtacataacgaaatgaaggcagaaataaagatgttctttgaaaccaacgagaacaaagacacaacataccagaatc

SEQ ID NO: 3831 - DNA, 120 bp, synthetic construct
  source 1..120: mol_type = other DNA
taaatgtaatacagcatataaacagagccaaagacaaaaaccacatgattatctcaatagatgcagaaaaggcctttgacaaaattcaacaatgcttcatgctaaaaactctcaataaat

SEQ ID NO: 3832 - DNA, 120 bp, synthetic construct
  source 1..120: mol_type = other DNA
actatctgatctttgacaaacctgagaaaaacaagcaatggggaaaggattccctatttaataaatggtgctgggaaaactgactagccatatgtagaaagctgaaactggatcccttcc

SEQ ID NO: 3833 - DNA, 120 bp, synthetic construct
  source 1..120: mol_type = other DNA
atggatgaaattggaaaccatcattctcagtaaactatcgcaagaacaaaaaaacaaacaccgcatgttctcactcataggtgggaattgaacaatgagatcacatggacacaggaaggg

SEQ ID NO: 3834 - DNA, 120 bp, synthetic construct
  source 1..120: mol_type = other DNA
aaaaaagtaagtgaaatgtttttggtaaaggaagggctaggcctctggggattgggacaccataaatcattttgtaagacatacagcagctctaaagagcagctcctgttttcttgttgt

SEQ ID NO: 3835 - DNA, 120 bp, synthetic construct
  source 1..120: mol_type = other DNA
agagggtcttactctttctactgtcttgcaaccaaaaaaccagtacatgatctaggcctaggcaactgaagatccagcccaaagttttaacctcacaatcagaaaagtggttaaattgta

SEQ ID NO: 3836 - DNA, 120 bp, synthetic construct
  source 1..120: mol_type = other DNA
tgcgctttttttcacttaacaaggaacatactatggtgaactttgctggttatgtaattaacacctagaagcagcagcacctaattagatttttacatcatctgggcaaaggcagcatcc

SEQ ID NO: 3837 - DNA, 120 bp, synthetic construct
  source 1..120: mol_type = other DNA
aggaagcagggaggagacatgtccacatggttcagctagagtttagggtcaatttttgaaagattttgtgccttatcctttaggcaataagaaaacatggaaggccatatgtttaatcca

SEQ ID NO: 3838 - DNA, 120 bp, synthetic construct
  source 1..120: mol_type = other DNA
caacatcctgaattcttacaatgtgaaaccagcaactgtctgagacaccaaaaatgaactttgcttattaaacacataattgagatcacaggcctaaataggacctgaagaagttcccag

SEQ ID NO: 3839 - DNA, 120 bp, synthetic construct
  source 1..120: mol_type = other DNA
gcaaatacataacaataggcatttagaagatataacttcttagaagaactgggtaatccatagctctgggcctggcacaagcaggaactttgatgctgtatgttaacacaagggcaactg

SEQ ID NO: 3840 - DNA, 120 bp, synthetic construct
  source 1..120: mol_type = other DNA
gtttgattagagaaaatattttccaaggtgagtgagaaacaacttctgaatattacttcctagatttttggacaatttggtaggatgaacttaagcctaaagcacctattaaacaagaag

SEQ ID NO: 3841 - DNA, 120 bp, synthetic construct
  source 1..120: mol_type = other DNA
ttgagaccccatgcatgaatggcacactagataaatgtcttaccctatgtttgaacacagattcacaaaagaatgactatcaggtcatttttaccatgtttgtgacttttgatgaaggtt

SEQ ID NO: 3842 - DNA, 120 bp, synthetic construct
  source 1..120: mol_type = other DNA
atatgatcattgcctgtctacatgatccagttctatataacacagtaagaggaaactgagatacaggtgtgagaaagcttctaagagttaggataactcttagccaagtcactagctcac

SEQ ID NO: 3843 - DNA, 120 bp, synthetic construct
  source 1..120: mol_type = other DNA
aggtcctatgaattccatctgagatgctattagttgatcattgttatcttctaattgtgtgcctaggaacactgagaattccgttggtatttctgagcctagatctactgtccagagtca

SEQ ID NO: 3844 - DNA, 120 bp, synthetic construct
  source 1..120: mol_type = other DNA
gtaagaaacttgaatcatgcagtgagggtatgtgaatgactcacatggctaagaatgagttgaactttcaagagcttttccagctagcccctacactgtagtctcaactctttttttaac

SEQ ID NO: 3845 - DNA, 120 bp, synthetic construct
  source 1..120: mol_type = other DNA
accgcacccagctgaatttttaagtacagtttttgaaagttgatgggtcctagccaaaaaagagaagttctggataaatttgatggtgactcagacaaaaatgagcataccatatgctct

SEQ ID NO: 3846 - DNA, 120 bp, synthetic construct
  source 1..120: mol_type = other DNA
gtgtgttggggcagtggggaacagacccaaagagtaggtttttaaaaaacgacagaatgcctgtcactgtgacaaacttctagagaaaatatttcctgtgtttttcatcatgctttcctt

SEQ ID NO: 3847 - DNA, 120 bp, synthetic construct
  source 1..120: mol_type = other DNA
catgggcattttcctttgcccagtgtttcgtatccttgtccttcgtgtctttctctatctcttcaagtctctctttgaggtgactggtttcatattttagtcatgaagttataaacagct

SEQ ID NO: 3848 - DNA, 120 bp, synthetic construct
  source 1..120: mol_type = other DNA
ggtttcaaggagaagttataaataaggtcaaattctgtgcagtacatgaaaagggagatgattgtgaaaacgtgactggtgacacttctgatagtgttttgagcagagtaggagaaagca

SEQ ID NO: 3849 - DNA, 120 bp, synthetic construct
  source 1..120: mol_type = other DNA
agaacttgctttatttcatgggaagtgagttgccactaaatctcccaggcagaatgggctctgtacttagtaccattgacaacttacaccttgattctctccttctccttttctaaatgt

SEQ ID NO: 3850 - DNA, 120 bp, synthetic construct
  source 1..120: mol_type = other DNA
aaaacctcaaacctggcctgttcttgtgtggcaaaatctacattacaaggaagtcaaagaaaaattgctacctatttcatgtactcttaaacttgtgggagggaggtcaagcttgaacag

SEQ ID NO: 3851 - DNA, 120 bp, synthetic construct
  source 1..120: mol_type = other DNA
ggaagaggaagtaaggtagaaaggagtttaaaagtctctaaaaaggtacagggagtagagattcaggagtaaaatgggcaagtaggctgtcttagtgtgatcattgtcattactgaactg

SEQ ID NO: 3852 - DNA, 120 bp, synthetic construct
  source 1..120: mol_type = other DNA
tctaaatctaaaccaacagatgacctacctcacccctttatcaactgcttatatttgcaggaaagtgacagtaaaggctagttaccaagagaaattgaaggaggagtaccatgacattag

SEQ ID NO: 3853 - DNA, 120 bp, synthetic construct
  source 1..120: mol_type = other DNA
accagcaacaaatgctacaaataggagatttgttttcaggagaactgcttcactagcatagtagttgttttgttccaggtagctgatctgacgaagtttagaatctcatactctagtgag

SEQ ID NO: 3854 - DNA, 120 bp, synthetic construct
  source 1..120: mol_type = other DNA
cagctcatgaaggagcttatcatcactccccctaccacttaccatcaccaccactttgagaagaacaattcaatttatttttatgatagagcacactttttgatctctggatgaagtcag

SEQ ID NO: 3855 - DNA, 120 bp, synthetic construct
  source 1..120: mol_type = other DNA
agagagagagaatctcgccaaaagtacttgctagtaaccattctaaggaattctagaagtagggcagtatgattccaaataaatatggtttattttttgaatagacagaccaacattcac

SEQ ID NO: 3856 - DNA, 120 bp, synthetic construct
  source 1..120: mol_type = other DNA
gctgcaaaatgctttcccaaagggtggtactgtttcactttccactagtaaaatatgaaagtgactgcttccccacactctctatagcactaatggtaatcactctttgccaaattagtt

SEQ ID NO: 3857 - DNA, 120 bp, synthetic construct
  source 1..120: mol_type = other DNA
gactgtcgggatgcgagaaaatgctttttaattgacaggtagaaaacagcaggaagaaaagtgatgggtacctcacttgcaattatgtgtgtaagaaggcttctagtcttgattacaact

SEQ ID NO: 3858 - DNA, 120 bp, synthetic construct
  source 1..120: mol_type = other DNA
tggtttgtaatgatagctcagacaaaaatcaagcttccatatctgtctgggtatctttacgagttctgtgttctgcgagtttgctcaatttatccaactgtgtgtcaaaacccctatctt

SEQ ID NO: 3859 - DNA, 120 bp, synthetic construct
  source 1..120: mol_type = other DNA
catttctgactttctaaagcctgtttggaaggccagctttctcttgtgtactgaaaaccaatctcactggaatgctggtcagccattctacagttaaaatggaaattaggaatctttttg

SEQ ID NO: 3860 - DNA, 120 bp, synthetic construct
  source 1..120: mol_type = other DNA
acttcccctcccccaatatggacactattctgcttcagttctctgagctgtcatcagaattcatgataaggaaagacacagtgaggaaatcacttattctgacatcaagaagaaaagcaa

SEQ ID NO: 3861 - DNA, 120 bp, synthetic construct
  source 1..120: mol_type = other DNA
agaaacagaaagacaaagttaatttttaagcaaaattcagtgagagaaaccagtctcagagctgaagaccactcctcttgtaggctgggaaacagatagaggtaggagtgacaaagaagg

SEQ ID NO: 3862 - DNA, 120 bp, synthetic construct
  source 1..120: mol_type = other DNA
gtaatgaaatgaatgaaactctatatggtgaacttatagaaaagccactatgtttgatgcaattggctacaggaagtcgtggccttcaggaaagaatctgtgggaggtttgctgaacttt

SEQ ID NO: 3863 - DNA, 120 bp, synthetic construct
  source 1..120: mol_type = other DNA
agattttcaagcagaaaaaagtccttctcaaataactctaaataaaaagaaggagctctagatccaaagggatcaaggaagtgaaagtggaggaggtcagacaacaagtgccaatgtggc

SEQ ID NO: 3864 - DNA, 120 bp, synthetic construct
  source 1..120: mol_type = other DNA
ggaacaagatgacaggaaaagagcagcatggaatctagtaagaaaaagaaacaaaaatttcaaataatggattttctaacacccccgctgttcctccagtgcattgtgtcacagtctcac

SEQ ID NO: 3865 - DNA, 120 bp, synthetic construct
  source 1..120: mol_type = other DNA
catcatcaagatatctatcaataatttctgtgattgataaagccagggattacttctttaaaattcttctttgagaggcagtcatgtctgagggacaggagcacaggctcttgagccaga

SEQ ID NO: 3866 - DNA, 120 bp, synthetic construct
  source 1..120: mol_type = other DNA
atccctggagaatcaatggggaacaagtcactctaccatcagtttctttatttttcatgtggagaatattctatcttccccctcaaagttgattgaggaatgaatgtgatcccatgtgta

SEQ ID NO: 3867 - DNA, 120 bp, synthetic construct
  source 1..120: mol_type = other DNA
gattgtttcattgttttagagtccacatgtaagagaatatgcaatatttgtctctctaggcctgccttccttcacgtaacatgttctctagttccagtcatattgttccaagtgacacaa

SEQ ID NO: 3868 - DNA, 120 bp, synthetic construct
  source 1..120: mol_type = other DNA
caacaccctttaatgaaaagatgtcctttttccaatggttatacttggcacccttgcttaacatcaattgactatatatgaataggttcactgctgagttttccattctgctccactggt

SEQ ID NO: 3869 - DNA, 120 bp, synthetic construct
  source 1..120: mol_type = other DNA
tttctgcatttccagctgaggtacctggttcatctcattgggactggttggacagtgggtgcagcccactgaggatgagctgaagcagtgggggtgtcacctcacctgggaagcacaagt

SEQ ID NO: 3870 - DNA, 120 bp, synthetic construct
  source 1..120: mol_type = other DNA
ctcctacaaaggatcacagctcctcggcagcaacagaaaaaagctggatggagaatgattttgacaagttgacagaagtaggcttcagaaggttggtaataacaaacttctctgagctaa

SEQ ID NO: 3871 - DNA, 120 bp, synthetic construct
  source 1..120: mol_type = other DNA
taacaggcaaaataaccagctaacatcataatgacaggatcaaattcacacataacaatattaaccttaaatgtaaatgggctaaatgttccaattaaaagacatggactggcaaactgg

SEQ ID NO: 3872 - DNA, 120 bp, synthetic construct
  source 1..120: mol_type = other DNA
gaagcaagagcaaacaaattcaaaagctatcagaaggcaagaaataactaagatcagagcagaactgaaggagatagagacacaaaatatccttaaaaaaatcaatgaatccaggatctg

SEQ ID NO: 3873 - DNA, 120 bp, synthetic construct
  source 1..120: mol_type = other DNA
agggatgccctctctcaccactcctattacacatagtgttggaagttctggccagggccatcaggcaagagaaagaaataaagggcattcaattaggaaaagaggaagtcaaattgtcct

SEQ ID NO: 3874 - DNA, 120 bp, synthetic construct
  source 1..120: mol_type = other DNA
gacttcatgtctaaaacaccaaaagcaatggcaacagaaggcaaaattgacaaatgggatctaattaaactaaagagcttctgcacagcaaaataaattaccatcagagtgaacggacaa

SEQ ID NO: 3875 - DNA, 120 bp, synthetic construct
  source 1..120: mol_type = other DNA
ccatgttacccaaaacacaattacaggaaaaacaggagtgccaagcctgccatgttgtttacagttttggtgtggtcaaggaaagaaaaaatgttggcaaaggaaaattgcaacaaagtt

SEQ ID NO: 3876 - DNA, 120 bp, synthetic construct
  source 1..120: mol_type = other DNA
aattttaataactttatttttcttgacttaccttatctccttctctagtcaggcaaatccatacgcctccttcctgacagctcacctatcgcagttggaaaccttaaactgactgcacca

SEQ ID NO: 3877 - DNA, 120 bp, synthetic construct
  source 1..120: mol_type = other DNA
gcctggcctatatataatgttttttactgccacataatggttgggctacacaaaaacaacaatatttcctgacctagaactgataattcagttagatttaaacggtgttgctttcaacta

SEQ ID NO: 3878 - DNA, 120 bp, synthetic construct
  source 1..120: mol_type = other DNA
ctcctgagtttcaactctgggaaatatggaaaatactatgacttttcagctgttttggttttaaaaaagtgtcttcatattgtctcctccacagacatctatgggggtctgatccaagca

SEQ ID NO: 3879 - DNA, 120 bp, synthetic construct
  source 1..120: mol_type = other DNA
ccactgaacaattggaatccatcgagggctagggaaataacatctttgtagcctcttggaactgttaggtaaagaaatcaaattctttgacagtgattcaagctctaggtcactacagat

SEQ ID NO: 3880 - DNA, 120 bp, synthetic construct
  source 1..120: mol_type = other DNA
taggatttttttgccacctattgttggcaataattttaaaaacacaacaaccacaacaatacaaaggcctactcgaggtctattcagtactagcctgaactgggtaagaaggttctgcag

SEQ ID NO: 3881 - DNA, 120 bp, synthetic construct
  source 1..120: mol_type = other DNA
cagcctccagtataaaagaccaagggttctattctagccactttaagtacaagatgtccacttaaccaatcatagcctttttgagcaactgctgcctagattctcattcatcaaagtaaa

SEQ ID NO: 3882 - DNA, 120 bp, synthetic construct
  source 1..120: mol_type = other DNA
tagagatggacacttatccttcaggagagcaagtggcttgataaaggtgacacagatggctgatggaatgaatacatgagactacttttaaacacttagcaatgctgaggtgttttaaga

SEQ ID NO: 3883 - DNA, 120 bp, synthetic construct
  source 1..120: mol_type = other DNA
aagttttagcatttggcattctcattcagccaaaggctgtgcaaaactttatgtggctaaataactctccagaaaggatgcacctaagacacttaatggctgagtaaattcagatgtgct

SEQ ID NO: 3884 - DNA, 120 bp, synthetic construct
  source 1..120: mol_type = other DNA
agaaatgtttgccctcccaaattaagggcctctgagtttaattcaaatcaatttgatgacttgagagaaaaaaaaaaaggtggggacctactaagtacaagatcctgtgccagacatgga

SEQ ID NO: 3885 - DNA, 120 bp, synthetic construct
  source 1..120: mol_type = other DNA
gctaccaagtttacaggcatgtgaactgaagcatagggaggttaaatgacaagcttagttattaggtgacacagtagagattgtaactcagatctgtttgacatcacatttattccttcc

SEQ ID NO: 3886 - DNA, 120 bp, synthetic construct
  source 1..120: mol_type = other DNA
gccgcggtttatttttcggtaaggccaactagaagcttgaattggttataagagtattttaacaggtttatcacatgcaaaggcttaaaaaatagttcactactttctaagtacaccaga

SEQ ID NO: 3887 - DNA, 120 bp, synthetic construct
  source 1..120: mol_type = other DNA
gtcaatcttctttgtctccagctgctcaagtgtcaactgtggataatatgacctgtctcaaaaccatgtcatgcggtaattaccagcttagtgaaaagattgtatagtgcaagtatacac

SEQ ID NO: 3888 - DNA, 120 bp, synthetic construct
  source 1..120: mol_type = other DNA
tatatatatggtgtggactctgagccaaactataggtttgaatcccacttttactccatcctagctgtgtgaacttgaacacactctttcactacttttggccttagtttcctcaaaaaa

SEQ ID NO: 3889 - DNA, 120 bp, synthetic construct
  source 1..120: mol_type = other DNA
gtactggggcatgaaaggcacagttattggattccctcttaacttcttctgttaaatgaatacatggggtcagatgttgactttccaagtagcaatgctatcctctagtctcaactattc

SEQ ID NO: 3890 - DNA, 120 bp, synthetic construct
  source 1..120: mol_type = other DNA
ggaacttgctttctaacaagcaggacagaggaactattagtagtggccaatgacacaactgttaatcaccactttattatatgctacagaggaaaaacacagacagaggtagatccagat

SEQ ID NO: 3891 - DNA, 120 bp, synthetic construct
  source 1..120: mol_type = other DNA
gttgtggccagctctggaatgcaccatattgcacttgttttcccttcttcccatctcatttttcttttctcctcagtctttctgctctgagattgtatacttcaataaagctttttcaca

SEQ ID NO: 3892 - DNA, 120 bp, synthetic construct
  source 1..120: mol_type = other DNA
gaaatcatgctgcttaatgctaccctcctagaagctgtgaaggcctgcgggatacttccttcatatgatatctcctgggctagtccagacttaagattatagtgaatatttttatttttt

SEQ ID NO: 3893 - DNA, 120 bp, synthetic construct
  source 1..120: mol_type = other DNA
aaggcacatggttacttgtttgcatttgtgcaggattcaatttatattatggaaaacctgctgactagtgttccattcaggagcattctgtcccgctcttttatgcatgtctgtattcaa

SEQ ID NO: 3894 - DNA, 120 bp, synthetic construct
  source 1..120: mol_type = other DNA
agagtagtaattaccaatgcctcctctgaaactaggatgtccaggttagaaccctgactctgtcacttacttgtggccctgagcaaagtatttagtttcctgattggtaaaatatgaata

SEQ ID NO: 3895 - DNA, 120 bp, synthetic construct
  source 1..120: mol_type = other DNA
cagagccaggcagtgtgactgagcaagagtctgtgcttttaacgactaggttttgctagcccaaagcacatacttgatacacgtaagtaattatttcctaccattatcatttaaagacta

SEQ ID NO: 3896 - DNA, 120 bp, synthetic construct
  source 1..120: mol_type = other DNA
cagaattggggagaaaaatgtaagaatgcttgttccatggccttttccctaggggctaaaaaagtgagaagtcatactccaagcttcatttgcaagtataaaaggggcaccatgtaatta

SEQ ID NO: 3897 - DNA, 120 bp, synthetic construct
  source 1..120: mol_type = other DNA
tatattgactgtgccaggttggttaattgttcaccctgtaggttgctgagaagcatgaggcactacaattggacttgatgaagggaaataaatatcatacagagagttgttcaggacatt

SEQ ID NO: 3898 - DNA, 120 bp, synthetic construct
  source 1..120: mol_type = other DNA
gaagagatagtgaaacccagatgctacacagtatttgaactttgtcttcccccatcctacagtttatgttacacagtctggtgggagattcaatgtcacctaattgattaataagcaaat

SEQ ID NO: 3899 - DNA, 120 bp, synthetic construct
  source 1..120: mol_type = other DNA
aaccctgtgggagattgggttttattgttggtgtaatgggaggccgcagaaaggtttaaaggagggtgataaaataatctgatgtacattttcaaaagatgcttgtgactatagggaata

SEQ ID NO: 3900 - DNA, 120 bp, synthetic construct
  source 1..120: mol_type = other DNA
tgatgaatcgagagtacaagtggagaaagtgggctttaagagaggcagaggcattgtttgtatctaacaggatagaagacgagtagagagagaaacaaataagtatggatgcatttaggt

SEQ ID NO: 3901 - DNA, 120 bp, synthetic construct
  source 1..120: mol_type = other DNA
catgcaggctgtcttgtcaaattcccattgacttcaggtctatgctttttaaaacacattgacaatgctattttggtattctgtaaccatactgtgaactacataggaaatccagtcaac

SEQ ID NO: 3902 - DNA, 120 bp, synthetic construct
  source 1..120: mol_type = other DNA
gcttaggaactgatctccccaaggttaacagtgacctcaccaaatatattatatacttttcagcccagatctgtactaaactctcttcagcatttaagactactaaccacctccagtttc

SEQ ID NO: 3903 - DNA, 120 bp, synthetic construct
  source 1..120: mol_type = other DNA
aatgagagcaaaagaaagggtaatcatttgtaactgtgtgaatcagggaaggcaccatacaacaggaacacttggccaattatgaaatcacccatggacatttagaggtatacctcgaag

SEQ ID NO: 3904 - DNA, 120 bp, synthetic construct
  source 1..120: mol_type = other DNA
ctcacaaggcttgcaatcaatttcttccaaactcctgttaatgcagacatctgacttcctctcatgattcacaaatgttcttaagggcatctagaatggtttgatattctatccagacca

SEQ ID NO: 3905 - DNA, 120 bp, synthetic construct
  source 1..120: mol_type = other DNA
actgtcttccacaatggttgaattagtttacagtcccaccaacagtgtaaaagtgttcctatttctccatatcctctccagcacctgttgtttcctgactttttaatgatggccattcta

SEQ ID NO: 3906 - DNA, 120 bp, synthetic construct
  source 1..120: mol_type = other DNA
agggacaaaacaatggtttctaatcagctaagcatttggatttgaattttcgatcattttctctagtaaattcgtgcttctcatgtagacattgccttctgggatgcctctcctgtgccc

SEQ ID NO: 3907 - DNA, 120 bp, synthetic construct
  source 1..120: mol_type = other DNA
acctggaacttgaccacagatggcataagaccaagtgaggccagaagaaccatgcagcatagcccagttaagcaaattgctaacatcctgaatcaagaactaaattaataattgtttcaa

SEQ ID NO: 3908 - DNA, 120 bp, synthetic construct
  source 1..120: mol_type = other DNA
tctcagagacagaatcactgctttctcttaatattcaagtgtgctacaccaaccactactcagttcctgttggactgtgtcagatagatgtttatttatatacttctcttctcttgtccc

SEQ ID NO: 3909 - DNA, 120 bp, synthetic construct
  source 1..120: mol_type = other DNA
gtaacatgcattcaagcttcctccatgttttcatggcttgatatttataccattttagcactaaataatatatcactgtctgtatgtaccaaagtttataattcacctactgaaggatat

SEQ ID NO: 3910 - DNA, 120 bp, synthetic construct
  source 1..120: mol_type = other DNA
gtagattgcaaaacttttctcccattctgtaggttgcctgttcactctgatggtagtttcttttgctgtgcagaagctctttagtttaattagatcccatttgtcaattttgtcttttgt

SEQ ID NO: 3911 - DNA, 120 bp, synthetic construct
  source 1..120: mol_type = other DNA
cattttctagatacacgatcatgtcatctgcaaacaaggacaatttgacttactcttttcctaattgaataccctttatttccttctcctgcctaattgccctggccagaacttccagca

SEQ ID NO: 3912 - DNA, 120 bp, synthetic construct
  source 1..120: mol_type = other DNA
tagtgctctatcaattttgttgagatcacatgctgtcttctaacgtgatcaaatcattttgcattcccaccagcaacgaatgagagctcctttgctccagatcctcatcagaatttggtg

SEQ ID NO: 3913 - DNA, 120 bp, synthetic construct
  source 1..120: mol_type = other DNA
cagccagagttttttattttaatgaaacccagcgtatcaataatttctttcatgaatattgcctttggagttgtatttaaaaacacatgtgtcatcaacatattcaagatcatctaggtt

SEQ ID NO: 3914 - DNA, 120 bp, synthetic construct
  source 1..120: mol_type = other DNA
tcttaagagatactggtctatagtttctagcatgtctttgtctggtttgctgtcagtgcaattattaggtattagggcctcatataatcagttaaaaagtacagaggctccttgacttac

SEQ ID NO: 3915 - DNA, 120 bp, synthetic construct
  source 1..120: mol_type = other DNA
agttgttcatagcactctttattttccttttagtgtccctgggacccgtagtgatgtccaccctttcatttctgatattattaacttatgtcctctctttttattcattagcctggctag

SEQ ID NO: 3916 - DNA, 120 bp, synthetic construct
  source 1..120: mol_type = other DNA
atagctaatccaagtccatcagataaccccgtaccacttcacagatgatatgagcatcttataataaaaaaatcatatcctccctcctgtccattgtgtcactgctgtcattcattggac

SEQ ID NO: 3917 - DNA, 120 bp, synthetic construct
  source 1..120: mol_type = other DNA
aaaaacagaatgctctgccatattatgaaatggttcttcttctcttccccctgccagaagcagcgggggaattttctctaatactcactttgagaagtttgtcaagcttctctagataaa

SEQ ID NO: 3918 - DNA, 120 bp, synthetic construct
  source 1..120: mol_type = other DNA
tgttggtggggtgtaaattagctctttagcgttttacttgttaagatggagtggcaacttccaagtaccttacatgtgtaaccggaaacaagctatcatatatttttatgcctataagtc

SEQ ID NO: 3919 - DNA, 120 bp, synthetic construct
  source 1..120: mol_type = other DNA
gctgcaaccaggagacacaacaacgattccattaaactgcaagttaagattgccacctggccattttgggctacctctcagtcaacagtctaagaaaggagttatagtgttggctggggt

SEQ ID NO: 3920 - DNA, 120 bp, synthetic construct
  source 1..120: mol_type = other DNA
taagcacatgggttttgtaaagattattaaacattttccgtaaagattttaaattccccaaatatgattttatgtaaataatattattataattattttatgagacgtagctctttgctc

SEQ ID NO: 3921 - DNA, 120 bp, synthetic construct
  source 1..120: mol_type = other DNA
gtctatcctattacctcacagaaattctaagtgaaagcttagattcattcactgtgaaacatgttgcataccctcccacttgagagactctaccttggctgcctgctcaaccttatatat

SEQ ID NO: 3922 - DNA, 120 bp, synthetic construct
  source 1..120: mol_type = other DNA
gaattgatattaaaaatttttgtcctacttacacagaaaaagttcctagaactgtgagccccagacatgtgtgcctctctgatttgaaggacccatagagggccactattgcaaacagat

SEQ ID NO: 3923 - DNA, 120 bp, synthetic construct
  source 1..120: mol_type = other DNA
cttctcagaagcatgacaaagtgatttagagtagaagtagtgaaaggacctttttcaaagtgattggaacctttctggtatagacgttaaacagcataatgaatgtgttggcatttgttt

SEQ ID NO: 3924 - DNA, 120 bp, synthetic construct
  source 1..120: mol_type = other DNA
agacaaattctggttcagaaccttctgaattatttacaaccaactccacttggtctatcatttaatgaaagaacagaaaggtgtccttcccccacaccaccctaaacgagtcatcatagt

SEQ ID NO: 3925 - DNA, 120 bp, synthetic construct
  source 1..120: mol_type = other DNA
cctcaagctactcgtaattatacccctagatcaggctaagcaatttcctatcctctttttttttcaacatattttcatgacttggagtattatttctcattaggtaactatcagccaagc

SEQ ID NO: 3926 - DNA, 120 bp, synthetic construct
  source 1..120: mol_type = other DNA
actgaagcaataatattgcctggcattgtgtttggcttttagtttggctggcagggccagcttcttccatctattcatcctaaataacattgtcagcaaatcttttttttaggcaactgc

SEQ ID NO: 3927 - DNA, 120 bp, synthetic construct
  source 1..120: mol_type = other DNA
ttttttggacatttctgctgcatcatccattctctgtgataaagattgtggtacactaacaggtatgtttactcctatagcatgtgcagcttgtacagggtatggcttttaggaagtaat

SEQ ID NO: 3928 - DNA, 120 bp, synthetic construct
  source 1..120: mol_type = other DNA
ttaacccagaggtgctcatcgaacccccttttaggtagaccttcgcttcatgtgcagccttaaggattagttgtcagcatttaccctcaaataaaatatagccacacaaatattaattaa

SEQ ID NO: 3929 - DNA, 120 bp, synthetic construct
  source 1..120: mol_type = other DNA
aaatgatgccatccactgacaccagtaacactgtctctctggggaaattcatgtctgtgagaactgtcaatctagatggatacagacatattaaacatactcccttcaatccataaatcc

SEQ ID NO: 3930 - DNA, 120 bp, synthetic construct
  source 1..120: mol_type = other DNA
tgcattaatggacacaggtttcagccaaagcctagaagcaatgacacttaccctaaagactgaaaaaggaaaaataagtatactgaaaaaaggaaaagaaatccaaggtggcagcaggga

SEQ ID NO: 3931 - DNA, 120 bp, synthetic construct
  source 1..120: mol_type = other DNA
cctagcaggaaatagaaaggacagtcaattgtggataaaatgaataaatgttatgtaaccacttacaaagatatagccttgtgcaggaaaaccacaagggacagtagaggacactgggag

SEQ ID NO: 3932 - DNA, 120 bp, synthetic construct
  source 1..120: mol_type = other DNA
tcaagatgccaatcaagagtcactttctctggaaggtcctaatcaacttgctcttgtggtagagttaggtaattaatactctgaactactatgtgacattgtgtgtttctcatctgcaca

SEQ ID NO: 3933 - DNA, 120 bp, synthetic construct
  source 1..120: mol_type = other DNA
aagactattatctctggtggaaaattctcagcttcaaagactccatggcaagagcattaggaagaatgtttccaaaaactgatatggggggattttctggcagaggtgagtttctgaaat

SEQ ID NO: 3934 - DNA, 120 bp, synthetic construct
  source 1..120: mol_type = other DNA
tgtctccatgtagaagtgacatgaaaatggaaatttcacagatgagctggaatctgttttgggtgaacaatgactcaattcaagtaaggggaatatcatacatcaaggtccacatgcacc

SEQ ID NO: 3935 - DNA, 120 bp, synthetic construct
  source 1..120: mol_type = other DNA
ctttccactagcctgtgagtgcaaaatctttccaataaacccactataaaaccaaatatgcagccaaaaatagacctagtcctcctgattctcagatttgcacctctttaacacaccgac

SEQ ID NO: 3936 - DNA, 120 bp, synthetic construct
  source 1..120: mol_type = other DNA
ataggataccttttgtcaccttcgtaagatcgatgtttctccagaaaccgatactagcatctgagctagtatgaaccctttaaatattatattttggattcttctgcccacagtgaactg

SEQ ID NO: 3937 - DNA, 120 bp, synthetic construct
  source 1..120: mol_type = other DNA
agaaaagtacatctgacattttgcaaacagactttgtccaatcatgctatggcttcacctaaatcccccaactctggtcaattcccctgcataggattgtaaacaagttcacatttgaac

SEQ ID NO: 3938 - DNA, 120 bp, synthetic construct
  source 1..120: mol_type = other DNA
atgcaactattggcttaaaaatagaggagtggctctatagtggggtgggatgaagggtaggcagagacaatggaaactagtgacttctatttgagagatttttaaggaatactcctcttt

SEQ ID NO: 3939 - DNA, 120 bp, synthetic construct
  source 1..120: mol_type = other DNA
agctttcttgcccaatgaagcaagaaaaaaaaaaaaatctctccctgaaaatgcacctccgtctcaaacattttttccagaaatagatattaatcctgcccctttgcccactcagccaac

SEQ ID NO: 3940 - DNA, 120 bp, synthetic construct
  source 1..120: mol_type = other DNA
ctggaagtttcagagtttgagctcattatttagaagtaaccgggagatcctatgctagtaggcagctaagactaagaaattcaatcagccagccaagaaacaacaaccactaaaagcaaa

SEQ ID NO: 3941 - DNA, 120 bp, synthetic construct
  source 1..120: mol_type = other DNA
caacacataattctaaaagatgtgcatctgaaatttaatgctatactcttgtgttttctctggatttaagaggaatagggatgtggagaagagggttgtggagaagggggggtaatcaat

SEQ ID NO: 3942 - DNA, 120 bp, synthetic construct
  source 1..120: mol_type = other DNA
atatgtgaaccaatcctactgagaatttagtagaagtggagcctgagttcagaaggaaaaaaaaaataacagatagcagaacaggcttagcagttttttccagacaatcctggaggagga

SEQ ID NO: 3943 - DNA, 120 bp, synthetic construct
  source 1..120: mol_type = other DNA
cattaaccaatctctctttacccttccccttcccctcccactacacttcccagcctctggtaatcgccattctacactctatctccatgagatcagttttttatctctcatatgtaagtg

SEQ ID NO: 3944 - DNA, 120 bp, synthetic construct
  source 1..120: mol_type = other DNA
gctttagttagattcggttcttcattgccttcaaatgtgtcgagagcagaaccttctcttcagcaggacttgggacttgagtcccagaaagactctagaatctctttacttattgttaat

SEQ ID NO: 3945 - DNA, 120 bp, synthetic construct
  source 1..120: mol_type = other DNA
cagaagtcctgcctgaatttcaaagtcataagctaaccatatggtatctattatcctagcagtctgagtttgaattggaaaggccttggaaggttttaagcagagattaggcaacaactg

SEQ ID NO: 3946 - DNA, 120 bp, synthetic construct
  source 1..120: mol_type = other DNA
ttagttaggagctcattttccagtttgtgaattatctaggtctttgattcttctcttccctctggctgattacctttcccatttctctgctcattagcacctccaccaaaggaaatgaaa

SEQ ID NO: 3947 - DNA, 120 bp, synthetic construct
  source 1..120: mol_type = other DNA
ggccctttgcacattttaaaggcttgaggggataagtaggaggaaaacaattgttacagttttcacattatcctttctttctccttctttccccagccctttaagagaagattgcattag

SEQ ID NO: 3948 - DNA, 120 bp, synthetic construct
  source 1..120: mol_type = other DNA
cttgaagagttgggtagggactgaagagctaggtagccgggtgttagcgattcaactcaacctaaaagtaattcccaagatgcattccaggaaaagggctataataattttaagttaaac

SEQ ID NO: 3949 - DNA, 120 bp, synthetic construct
  source 1..120: mol_type = other DNA
tcatgtgagatctgaatcaaggcttactttcttgttgcataagaacacccaatttttccagcatatttgctgaaagactatattttgtccactgaattgcctttttgcatctttgtcaaa

SEQ ID NO: 3950 - DNA, 120 bp, synthetic construct
  source 1..120: mol_type = other DNA
tcaaactcactgattacctaaagtattctgacagggccaaatctaggataggcaagttaggtatttatctcagctgcaaaaattaagggaatggcaaaagtctcagtaatgaagagaagg

SEQ ID NO: 3951 - DNA, 120 bp, synthetic construct
  source 1..120: mol_type = other DNA
tggctaaagtttggtcaatttttttcgtctccgcaaggaaccagctttaccttcattgatgttctctattttttttctttttccaatttcatttcttttccactctgatctttattatat

SEQ ID NO: 3952 - DNA, 120 bp, synthetic construct
  source 1..120: mol_type = other DNA
tgtagttacaattctggtggtctttattccattgtgtagaaccacagtttgacctggcatcatattccatctgcctaaaacagtttaacattacgcagtgtagacctccttttattgtgc

SEQ ID NO: 3953 - DNA, 120 bp, synthetic construct
  source 1..120: mol_type = other DNA
gttgcagttaagttatatggaaacacgttgatcctttcagatctcacctttaacatttgctgggcatgaccaaagcagtgctcagcctggggctaattatttcccaatacttaattaaga

SEQ ID NO: 3954 - DNA, 120 bp, synthetic construct
  source 1..120: mol_type = other DNA
ttcaaaatgtttaaactatctctgagggtcacacagatgaggaattgaggctgagagtgtcataaaaagcaagtcagaggagatgttgagattcaaatctgttctgactctaagccctct

SEQ ID NO: 3955 - DNA, 120 bp, synthetic construct
  source 1..120: mol_type = other DNA
ttaattataaaaacttcaaagaaatagaagcctacttttgcagaggtagtcttcgtggagatggcaagaagactgtacaagggctctggactaacgtacgcccatcaagtaagcaataag

SEQ ID NO: 3956 - DNA, 120 bp, synthetic construct
  source 1..120: mol_type = other DNA
caaattataaaggagacctaacggcatgccaggcaaaggtaaaaacaagcacctctgcacttgaataaactgttctcagtgccacaaggatccttttttctttttctctggcagttaaac

SEQ ID NO: 3957 - DNA, 120 bp, synthetic construct
  source 1..120: mol_type = other DNA
ccataaattcctgtctcacctttcttcccttgaagtttctgtctctggttttggccagaaacctgcttcctagcccacaggtagtaatattttctaagtattactcctttctaaatgtat

SEQ ID NO: 3958 - DNA, 120 bp, synthetic construct
  source 1..120: mol_type = other DNA
gataaataaaaggaaaccttgaaagccaagcagaagtctagtgtgaatgtaggctttggtataactgtgacaattcagagatgagccctcacaatatatttcagaggtctctctgccttt

SEQ ID NO: 3959 - DNA, 120 bp, synthetic construct
  source 1..120: mol_type = other DNA
actatgtctcttctttctactcaactgtagaatcacaaggcaagggtttcatctcagctttcttgtccacttactgtcatttcttggtggtcattattacaacaacttactcctacccaa

SEQ ID NO: 3960 - DNA, 120 bp, synthetic construct
  source 1..120: mol_type = other DNA
aacagggataattttcacatcaagctcaggaagagaaaaatttctaataagcagaaactatagattttagacgggtcacgatagttcccttcacatccaaacgactatcttgaggaagat

SEQ ID NO: 3961 - DNA, 120 bp, synthetic construct
  source 1..120: mol_type = other DNA
caccaacttatgccaattctcttgttttagatgttaaatcacacttacgttgtctggaaagtcagcctttagttcagtgacactttgacaccaatatgcagccgttttctcactgatgag

SEQ ID NO: 3962 - DNA, 120 bp, synthetic construct
  source 1..120: mol_type = other DNA
tttgaggaaaggtcatttagttaaggatttatcagaattagtcatttaagtacccctcctcaccatcttgtcacttttagtaagataacatgaacccccattagtatatagcaattaagg

SEQ ID NO: 3963 - DNA, 120 bp, synthetic construct
  source 1..120: mol_type = other DNA
ttttcatggtctgagaaggcaattcttgaaatatttcactcagatgaggctggttttcttctgtgttccaattttcaagagccataccctttaaaccttgagatcctcctttcctctgct

SEQ ID NO: 3964 - DNA, 120 bp, synthetic construct
  source 1..120: mol_type = other DNA
aacgggcctttattcaaagttcaggatttattactatgcttagatcttttcctgctagtccatttgtctagaattgggttcttgcttgcttcttctgatccttcagggacccctttttct

SEQ ID NO: 3965 - DNA, 120 bp, synthetic construct
  source 1..120: mol_type = other DNA
cacaaagccaacatctcacattagccaaaaggatcaataagctgacaatatttaattggaagactgtcaagaaaatgcttctttcttaagcatttccctcatcagtaatacctcaaagcc

SEQ ID NO: 3966 - DNA, 120 bp, synthetic construct
  source 1..120: mol_type = other DNA
ttggagtaggtagatgctggaggagaaattggaaatggtagagcaaggagggctttctgaaagtactagtgatatataattataaagaagctttactcttgaactgcagaaatgtggcag

SEQ ID NO: 3967 - DNA, 120 bp, synthetic construct
  source 1..120: mol_type = other DNA
ggaggtgcaaagtgggcaagataagtatttgttcccaataaatcatatttttctcttgtagtagcttatataacgacagtactcaatatctgaattagtgacagaatttgcccttttgtc

SEQ ID NO: 3968 - DNA, 120 bp, synthetic construct
  source 1..120: mol_type = other DNA
ccatagtcttgaatcaaacatgatggtccatttcctattcctgtggcccaaaaccttgcaagatcaaaattctaagaatgctttgacattctccagtgttttagactacactgggactct

SEQ ID NO: 3969 - DNA, 120 bp, synthetic construct
  source 1..120: mol_type = other DNA
tctgcaggctttgagaatccattgtgttctgtctcctattcaagttattaataccaatagctcacagcagctgtgcattcacggagataagttttacaagaaacagatgaagggcttttt

SEQ ID NO: 3970 - DNA, 120 bp, synthetic construct
  source 1..120: mol_type = other DNA
tggcgggtcatgcgtcagtttcagctttagcaatcaaggaggtaagtctcttctaagaatcttaacctgtgtgagccccaaaatttaaactgcgaggttaaaaatttggtttaaaagtgg

SEQ ID NO: 3971 - DNA, 120 bp, synthetic construct
  source 1..120: mol_type = other DNA
tctaaaatagtcacctttcgagggaggagaaaggaatataattgaggaggcacaaacagaatcaaaggtacaggaatatcttatgttctcttcttctgtgaaatgagaaaaaggtattca

SEQ ID NO: 3972 - DNA, 120 bp, synthetic construct
  source 1..120: mol_type = other DNA
tgttctttctttcctgaagtgcagggagaggccttctcagaagtttcttttatctgactaaaggaaattcttcctgaagaaatgtcattgtcctgaactccttccctggaatctacatta

SEQ ID NO: 3973 - DNA, 120 bp, synthetic construct
  source 1..120: mol_type = other DNA
ctgaaggacatttgaaaaacttcctgtctgtgtcctctcaattttttttttgtttgtttcataggagacaatcatgttatacctgaaaggtgatccatatggccctcacagggtaaggtt

SEQ ID NO: 3974 - DNA, 120 bp, synthetic construct
  source 1..120: mol_type = other DNA
ttttccaggtcttttccctgatctaggagagaattaactaagagtctggcatatttttaagtctgacaaggaacatttacaatctattctctctgtagcctgctacctggaggcttcatc

SEQ ID NO: 3975 - DNA, 120 bp, synthetic construct
  source 1..120: mol_type = other DNA
tagagatctgtggaactctgaacttgagagagatgatttagggtatctggcagaagaaagttctaagcagcaaagcattcaagaggtgacttgggtggtgttaaaggcactcagttttaa

SEQ ID NO: 3976 - DNA, 120 bp, synthetic construct
  source 1..120: mol_type = other DNA
tctactagggcagtgcagaagggaaatgtgacatcagtgccctagagtccctactagggcactgcctagtggagctgtgagaagagggccaccatcctccagaccccagaatggtagatc

SEQ ID NO: 3977 - DNA, 120 bp, synthetic construct
  source 1..120: mol_type = other DNA
aattgattgagacatgtctcacatacactctggtttacagtgtaatcaaaattataacaaaaaaagttggcaaatagaaaatctggatatatacgcaaaatattcttatttgttgaccta

SEQ ID NO: 3978 - DNA, 120 bp, synthetic construct
  source 1..120: mol_type = other DNA
tctaaaagtttttcatatattacccataaatataccaaagaactctaacattttacagaaaacaggttattgagatagagaaagaaccccctttaggggcctgcagtggggggtggaggg

SEQ ID NO: 3979 - DNA, 120 bp, synthetic construct
  source 1..120: mol_type = other DNA
caaactttcttgccatatcccaatgctttagggatatctgaacccacaatgggcactgaacaagatttttctggagtgcaaaagaagggaacagatctagaaaagaagctatttagtttg

SEQ ID NO: 3980 - DNA, 120 bp, synthetic construct
  source 1..120: mol_type = other DNA
gtagattaaagaggaagaccaaagatgactacagagggtgagctgaaacaccgttttgattttcctgctaagttttaaggatgaaggatgaatgattcagtttcttaaggttaggagggc

SEQ ID NO: 3981 - DNA, 120 bp, synthetic construct
  source 1..120: mol_type = other DNA
atttgctaaatgtgttgatgttattgagaggaattaggaggtgctccaatggactgagggaccagattaagagatacaggtatatattgattctcataaacttcatacattccccctgca

SEQ ID NO: 3982 - DNA, 120 bp, synthetic construct
  source 1..120: mol_type = other DNA
ataactgcacgaggatactgggagaactttgatctttaggagggcttccaaatgctaacttgctgaagctgcccatgttagtgatacagttagacctacaaaagaattataagatttctg

SEQ ID NO: 3983 - DNA, 120 bp, synthetic construct
  source 1..120: mol_type = other DNA
cacgcccatcccgtccccctctttttcagagatgtttgaagtagtgccttcagtttttggcaaactagaaaactttaagtggaaaatgtaaaaaaagagacaggtttagagacttaaaga

SEQ ID NO: 3984 - DNA, 120 bp, synthetic construct
  source 1..120: mol_type = other DNA
atattagccagggcactaattgacagcaaattggggaatacagtaagcagatgatggccagtaagcctgtaagttcacttccaactgatactttgtatttgtgtgactactcacttttag

SEQ ID NO: 3985 - DNA, 120 bp, synthetic construct
  source 1..120: mol_type = other DNA
ggtcaaatgactcgaatagagattcttccaaagaagattcacaaagagccaaaaagtatatgaagaggtgctcaatagttccaatcaccaggggaatgcaatcaaagtcacaatgagcta

SEQ ID NO: 3986 - DNA, 120 bp, synthetic construct
  source 1..120: mol_type = other DNA
tcagtaatttaaacagtatggttatgttacaagaagaaactgtaagaccaatggagcaaaacagcagggcaatgattgcggcatcatttttgtgggcattcattcatgtttgaatctgat

SEQ ID NO: 3987 - DNA, 120 bp, synthetic construct
  source 1..120: mol_type = other DNA
cctaatcctccttggcctaatcctccttgcaacaataactcaaaaagttaatacctgatccaagataaatcagagtcctgctgaggttacactctactcactggatacctatacattgtt

SEQ ID NO: 3988 - DNA, 120 bp, synthetic construct
  source 1..120: mol_type = other DNA
tagaacgtataaagatatgtgcacacagataccatgtttagcattatcgcaacaaaaatactaaaaaaaaaacagcttatatgtcaactacaggcacacctaggagatgctgcaggttca

SEQ ID NO: 3989 - DNA, 120 bp, synthetic construct
  source 1..120: mol_type = other DNA
gtgctgggattcatgactgttcttaatgaaacctagaatggtaaatacttcccattcaccactaaatgttttcaactgactatgctcagattcattagaggtatcactatagcagttata

SEQ ID NO: 3990 - DNA, 120 bp, synthetic construct
  source 1..120: mol_type = other DNA
tttacagaattggagcacgtcaaggccttgttccagatcagcctttgacttaagagagtgttgtgctgatttggtctatccagacaactaaaactttccctatagcagcaatcaggctgt

SEQ ID NO: 3991 - DNA, 120 bp, synthetic construct
  source 1..120: mol_type = other DNA
cattgcctatccaacatccattcctatatttgttcttactaatgggatcctgatattatttagggggcaatgtgtccaatttaaaacttgctttaaattcccttgcagctgggagagacc

SEQ ID NO: 3992 - DNA, 120 bp, synthetic construct
  source 1..120: mol_type = other DNA
aagtgtagtgtagtcatactcttcggaagcatgaatttacaaatctaaacatagtaattgcaagtatagcttaacaagatcaaggaagaagaatgtgaaaagacgaggcagggaattgct

SEQ ID NO: 3993 - DNA, 120 bp, synthetic construct
  source 1..120: mol_type = other DNA
tctcctatgggagtggagaagaaaggtctattacattaaaagttataacaaagtatattatatgtcaacttgacaacaattgaacaagcgtagtgctggtattgaaagaggagtctaagg

SEQ ID NO: 3994 - DNA, 120 bp, synthetic construct
  source 1..120: mol_type = other DNA
ccccacctcaccccacctctgcctttgcccctaacttcctatgatggaagctaagatttcagctcttttatataacctctcaagcaaatttattctcctccaacttcctaaaatatttaa

SEQ ID NO: 3995 - DNA, 120 bp, synthetic construct
  source 1..120: mol_type = other DNA
gatattctgttgtagaagcacaaagtgaatgaactaagacatgacatctgactgatattttggttggtatagaattcaaaactaaaaataatttccaactgggtcccatggctcacgtct

SEQ ID NO: 3996 - DNA, 120 bp, synthetic construct
  source 1..120: mol_type = other DNA
tttgtggccaccatgttcttcatttctggggacatcttctcattttatattgttggaaattccctcctctttattcgctctgacttctccatgtagcacaactgttttaaaggtatggag

SEQ ID NO: 3997 - DNA, 120 bp, synthetic construct
  source 1..120: mol_type = other DNA
gccgatcctctgcaaaattcttcagctaatattgacttgaagcaactacaaggctgcccccagatagtttcagatatctgcagttggctaagtaacttacaattagtacactcactttct

SEQ ID NO: 3998 - DNA, 120 bp, synthetic construct
  source 1..120: mol_type = other DNA
cagaacttaagccatggagattatgggtagagagtatagaatttatatcacataaatcagtataagatgttggtgttttaagagactgttactcatttcatatccattactcagatagat

SEQ ID NO: 3999 - DNA, 120 bp, synthetic construct
  source 1..120: mol_type = other DNA
tggctaagcaaattgtggttatatacatagcatggaatacaagtcagcaaaaaaaaaaggaactagctattgacataggcaaaatcttggatgcatctcaagggtatgatgcttattttt

SEQ ID NO: 4000 - DNA, 120 bp, synthetic construct
  source 1..120: mol_type = other DNA
tttgtgctcttgtaagtttaatctgtacttcataagcttacctcaaattactgtgaacctacaagtgctaagtcagaagaatcatgcctataactaggtaacactgaggtaggaggcagg

SEQ ID NO: 4001 - DNA, 120 bp, synthetic construct
  source 1..120: mol_type = other DNA
accaggacacaccacagccttgacctatggttattgtcctggttactcctgtcctattaaaataaggatgaaaaactacattaacaatgatagcctttgttgagtacttactatgccctg

SEQ ID NO: 4002 - DNA, 120 bp, synthetic construct
  source 1..120: mol_type = other DNA
aaaaaatagaaacacaaattggtacatctgggcccccaccagaaggtgaacttaggtgtacagtttcaagaagcataacatgagtggacaagtctactgccaacaactggttaatatctg

SEQ ID NO: 4003 - DNA, 120 bp, synthetic construct
  source 1..120: mol_type = other DNA
tgaaaagggggttgctatacaaaaagatttgatcttacggttttgcaccatcatattaaacatgtttttccccaatagtagcaaattcagcaattctccaaccaacttccggggtagcac

SEQ ID NO: 4004 - DNA, 120 bp, synthetic construct
  source 1..120: mol_type = other DNA
cacaggttgaacatttttactgcttccactgcagactgtcatttttcgaaatgaaaatgctaatgataccgaaggggaaagcactaagccgaagagatgcatgaatgaaacgttggattg

SEQ ID NO: 4005 - DNA, 120 bp, synthetic construct
  source 1..120: mol_type = other DNA
acaaaacaatgattgtcaatgaatagccaaacatggtcccatgagctatgggactcaaaagggagaaagctggtgccctaaaataatggaattaaaaagaggcccacagcaaacctttta

SEQ ID NO: 4006 - DNA, 120 bp, synthetic construct
  source 1..120: mol_type = other DNA
acacacacataattttaagataaaagaaagcttccagggtgggtcacatctaagccggctcctgaggatgaattgtattctcaaaagtcaaaatactgggcagagctcttcagatacgag

SEQ ID NO: 4007 - DNA, 120 bp, synthetic construct
  source 1..120: mol_type = other DNA
tttttctcatcttatgttcacttcctttgcaaaacaacaataaacagctggcaagtcagagataccagagtttttcctaacttctctcttcccatatctagcctcatgcaatcagtcacc

SEQ ID NO: 4008 - DNA, 120 bp, synthetic construct
  source 1..120: mol_type = other DNA
aatggcattccttgctctagcttggtttggtgcttcctctgtagttttatagctcttcgtttctaattctctcatagcatgttttctcacgcacatcacatctagattttaggttctctg

SEQ ID NO: 4009 - DNA, 120 bp, synthetic construct
  source 1..120: mol_type = other DNA
cagaactgggtcaaattgcccctgatgaccacactttctgaataaggggaaaaaaatatggaaagtggaagctactttaactgtcaattatattaaccagttgccacaatgattgttaat

SEQ ID NO: 4010 - DNA, 120 bp, synthetic construct
  source 1..120: mol_type = other DNA
tttcatgaggactaagatgaaaagttgagtggatcaaaatatagatgggttggagttacagcactgacctctatctgatttttctccctcaggagatatatctttaaataaacaatttct

SEQ ID NO: 4011 - DNA, 120 bp, synthetic construct
  source 1..120: mol_type = other DNA
tccaagggtcactgtgaacttgtggttctttgttacaactgcaacctaatgttctattcaaagtcttattgcaaaatcctcaaaatatgatgaatctgggtggcaaatggtaatagaggc

SEQ ID NO: 4012 - DNA, 120 bp, synthetic construct
  source 1..120: mol_type = other DNA
aggcttcagatgcatttctcaattgctcactgcagaatagctgcagaactgaaacaaaaccttcagtacaaaaatgacaacccttttgtttccactaaatccgtattctgtcatccactg

SEQ ID NO: 4013 - DNA, 120 bp, synthetic construct
  source 1..120: mol_type = other DNA
tcttactcatgttaatagcagttgtagacacaaatcctacaaacactgataaaaagtgctctggggtagggaagcgttttttagttttctttgagtcagctacgaagaaatcacacctca

SEQ ID NO: 4014 - DNA, 120 bp, synthetic construct
  source 1..120: mol_type = other DNA
tattctgtgagaaatgatgggggctgtgatgtgggtggtaccagtggagatgggaagtgactttctaccctttaataactgatcacataactattaatgttttagtctggcatacagatt

SEQ ID NO: 4015 - DNA, 120 bp, synthetic construct
  source 1..120: mol_type = other DNA
caaaaatctgcttagggaactcttacacccttcactccaatatggaaacaaaatgttaacaaaaagttagggatggatgttggagattatgacatggtttctttggagcatgcttctggg

SEQ ID NO: 4016 - DNA, 120 bp, synthetic construct
  source 1..120: mol_type = other DNA
caatttaaaattcattatattgctgaacaatgtattacattgcaaaataaaactggttgataagaggagggaggtagtcagtcagcaggttccctttgcagggcctggtggtcacgagat

SEQ ID NO: 4017 - DNA, 120 bp, synthetic construct
  source 1..120: mol_type = other DNA
aaatttggcaggatagaagtgagaaactgtttcagacacatgagatattgtagaaaaacatgcaaatgaggaaagcagggcaggatgaaaagggcaatgggcttagctgaagtgaaagaa

SEQ ID NO: 4018 - DNA, 120 bp, synthetic construct
  source 1..120: mol_type = other DNA
caatattgaatgtgtacacacgagtgtgcaagcacacatacaggttcttttgttgatgaagaaatgagggttacgtcatagaagagcttgctaaatagtcttgaagtgaacacttggatg

SEQ ID NO: 4019 - DNA, 120 bp, synthetic construct
  source 1..120: mol_type = other DNA
aatttgtgcaatttgtgcaaacgcaggagcaacttcctctcaattaagataatgtggattgaaacaagtttcttggaatccacatgggagaacagacaacctacatggtaaaaagtctgc

SEQ ID NO: 4020 - DNA, 120 bp, synthetic construct
  source 1..120: mol_type = other DNA
tatgtaaaagcatgatatagtggaaattgcagggatttgtatcaaatagaccttggttcaaatcctgacgtggtggatttcagtgttttgatgggaggggccatttccatgctgttacaa

SEQ ID NO: 4021 - DNA, 120 bp, synthetic construct
  source 1..120: mol_type = other DNA
gaatattgcagtaagacagtttgttaagactttagaaagacctaaggcaggtcctagtagattctctcagggcttctaacattcctaaagacattgtaccacaacagcaaggcatatcca

SEQ ID NO: 4022 - DNA, 120 bp, synthetic construct
  source 1..120: mol_type = other DNA
ctttgtaacatgctttgaataaaatacggaagtaacactgtgtagactttggagtctttgtgtcaagagatctttcagcttccactcttgtcctcctagaacactactagccttgtgaag

SEQ ID NO: 4023 - DNA, 120 bp, synthetic construct
  source 1..120: mol_type = other DNA
agcattcaagaacaggttacatttcttctctcaggactaccaatacatgcagttagaagttaggccagccgatttttacgtatcttcttaatattgtgtgatacttgccctgttttctca

SEQ ID NO: 4024 - DNA, 120 bp, synthetic construct
  source 1..120: mol_type = other DNA
actgcacagtaaagaataataatatttctgtttactgagatatcaactggcatttcactgtaagtcaatggtctatcggtgctacagcatattagacctcaatctggcatctacaaatgt

SEQ ID NO: 4025 - DNA, 120 bp, synthetic construct
  source 1..120: mol_type = other DNA
ccaccatcaaagtaagtaaaatagggtttccaaaaaaccccgcatggttacatttcatgtgccaaatttaatttccatttgttcataactccccttttgaaccagcatcacacacttcta

SEQ ID NO: 4026 - DNA, 120 bp, synthetic construct
  source 1..120: mol_type = other DNA
cacacttacacattgcatcttgtaaagctgtcagagtaagacagccttaatgttttagccataataatgccagctattgatcctagtaagaggaaaaagagagaatgtgcttaatggggc

SEQ ID NO: 4027 - DNA, 120 bp, synthetic construct
  source 1..120: mol_type = other DNA
tttctatatgacttcaataatattttcttaccttatcaagagagaaagttttggtgagggcaaaaccccatccagcttcaaaagctcttcgaatcattgatgtgctggtggctggagttg

SEQ ID NO: 4028 - DNA, 120 bp, synthetic construct
  source 1..120: mol_type = other DNA
cactgaaacatcatacataggtgcttgctaaatgttgtctctttttctgactggggaggttattaaagattgcatcaggccttttgtttgtaaagtgtctctctcactccattcctccct

SEQ ID NO: 4029 - DNA, 120 bp, synthetic construct
  source 1..120: mol_type = other DNA
cagtaaaagtatagaagcaacttctctgtcttagaaacaatgttgagccaacttgcctttgatggcaatagcataactacatatggtcccatgtgtctgtactttacaaggtgaaataag

SEQ ID NO: 4030 - DNA, 120 bp, synthetic construct
  source 1..120: mol_type = other DNA
cacaaggttaattcctcccaaacctcaattgcaatctccaaactcagatttccaagagacatcaaggcctttggatgtagatgctttgctcttacactttaacctcaactcttttatctc

SEQ ID NO: 4031 - DNA, 120 bp, synthetic construct
  source 1..120: mol_type = other DNA
gctgtcttgttggcttatgttcttaagccacccctcagaaataaaatgtttcaatcattgcttctccaaaatactttgtgcctccctacctctgcacttttcacattccatctttcttct

SEQ ID NO: 4032 - DNA, 120 bp, synthetic construct
  source 1..120: mol_type = other DNA
gcatatacttcttgggacatttccttactaccacctatacacttttctgaagtagttacctcttttttatttactattccacaattttactttagtattattctttgagttctgggatac

SEQ ID NO: 4033 - DNA, 120 bp, synthetic construct
  source 1..120: mol_type = other DNA
ctcagaaataatatcacacatctacaaatatctgatctttgacaaacctgacaaaaacaagaaatggggaaaggattccctatttaataaatggtgttggtaaaactggctagccatatg

SEQ ID NO: 4034 - DNA, 120 bp, synthetic construct
  source 1..120: mol_type = other DNA
ggaatccgctaacatagttgaaaaggttaaaaatgagaactcgaatttttgccatttccctccctcccttcccattgtaaagcaagaatcattttataacctggacatcaccatgacctc

SEQ ID NO: 4035 - DNA, 120 bp, synthetic construct
  source 1..120: mol_type = other DNA
ttagaatgttctttcctgccggtgttaatgctttgaaaattccaactaagccttcaaaagtcagtcctgttgtcctctccactaaaaatcctccttatgtgtaaaaaagggagacagagg

SEQ ID NO: 4036 - DNA, 120 bp, synthetic construct
  source 1..120: mol_type = other DNA
cagtctgtatccatcatcaaacacccctaggatgttatccttcttgatggacacattacagtttattcaggatataatttacacccccaaatttctatccctaactcagacctctcctct

SEQ ID NO: 4037 - DNA, 120 bp, synthetic construct
  source 1..120: mol_type = other DNA
tccaaatctataaaagcccattattctatgattctaacatagagtggcattgaagctctggaagattgctgattttaggccagtctctccaagagccatctagtgggaagagtaagtaat

SEQ ID NO: 4038 - DNA, 120 bp, synthetic construct
  source 1..120: mol_type = other DNA
ttaagttcggaagatagtctaaaaggtgctcatgtggacctctcatctgctaataaagtgtcagctctgacaagcatcaacacattgtccaaatgttaaggtctactgtaaaaataggac

SEQ ID NO: 4039 - DNA, 120 bp, synthetic construct
  source 1..120: mol_type = other DNA
gtggggtcatggaattatagcagagacatttggatgtgtaatgattatgttgttgggaaaaagtaactcacatggtaagtatacatcccagtggcattttctcctgatttgctttgctag

SEQ ID NO: 4040 - DNA, 120 bp, synthetic construct
  source 1..120: mol_type = other DNA
attatttttgactccattctctttgccactattatctcttactgagactttttcttactgacttctgcattctccttgcctcctactcaaatctgttctttactctgtaccagagtaggg

SEQ ID NO: 4041 - DNA, 120 bp, synthetic construct
  source 1..120: mol_type = other DNA
tgctttggatatatgcatacactcatgttactatcactacaatccacgtcacaaacatatccatcacgttcaaaagtttacttgtgtccctttattgttgcttactttatcccttccttt

SEQ ID NO: 4042 - DNA, 120 bp, synthetic construct
  source 1..120: mol_type = other DNA
ttacattgcaccaacagttgtataagggtttcaatttctccacaaacttgtcaaacttttgtttttctgataatagtcattgtatcaagtgtgaggtaatatctcaatgtggttttgatt

SEQ ID NO: 4043 - DNA, 120 bp, synthetic construct
  source 1..120: mol_type = other DNA
tatgcattcttgactttcgtattgaaagtcattgtatatgttgtatagttgactgtacatgacatggctgtaggatataagctctctattgttccaatgctctacatgtttgtttttatg

SEQ ID NO: 4044 - DNA, 120 bp, synthetic construct
  source 1..120: mol_type = other DNA
gctataaaacatctcttagtactgttcttgcattaagtttttttttattagtcttttggtattttgtgtttttgttttagtttgtcctgagagatactctaatcctgcccccatgattca

SEQ ID NO: 4045 - DNA, 120 bp, synthetic construct
  source 1..120: mol_type = other DNA
gctcttgtgttaacctattaacccttatatttctagaaggagaattctctgaaatagactaaggtgaggatagagtgtgaagagaaaaccagcgtagttgcccagaggtcacttcaaaat

SEQ ID NO: 4046 - DNA, 120 bp, synthetic construct
  source 1..120: mol_type = other DNA
tgttaagtccttgagctgggaattctacctctatgatgacaaagttctgtctcagagacataagtgagaaaaccaaaaaggcaacatgatattcccaaaagtctgaaggcagaattactg

SEQ ID NO: 4047 - DNA, 120 bp, synthetic construct
  source 1..120: mol_type = other DNA
ctatgactgtaagcaaatttgactttactacttgccattgcgagagataaaggtgagatcacatacatttctggtactagttaagtctaaaggcccagtttcccaatgagactgacctga

SEQ ID NO: 4048 - DNA, 120 bp, synthetic construct
  source 1..120: mol_type = other DNA
aaggctttcccattagcttcctggtgagactgtaaggtcgaataagctgcctcaaaacctgcaaagggtaacggaaatactctaatattaagcctgtgcaatttaaatttctaattctcg

SEQ ID NO: 4049 - DNA, 120 bp, synthetic construct
  source 1..120: mol_type = other DNA
aggcttccctaaatgttcagtcatatgtccaaattagatgaaattaatgtcatgattaaaaaggaaactgaaacctttaaaaaatatacgttgagggcattgaagaaatggaagacatga

SEQ ID NO: 4050 - DNA, 120 bp, synthetic construct
  source 1..120: mol_type = other DNA
accaatcccctgagatacttagttccctcaaccactagtgattttttttgtgcctcagtcaagccagaagaaaatacacacagaaaaaatctaagcagtagaaaagtaggtcaccaatgc

SEQ ID NO: 4051 - DNA, 120 bp, synthetic construct
  source 1..120: mol_type = other DNA
aagagctccttctcaggactaccatgactactgaagggacaatgagcttctgatctgggattataatttagaataatttagtttgtgttctatctccaagttttttctcagtggcaggac

SEQ ID NO: 4052 - DNA, 120 bp, synthetic construct
  source 1..120: mol_type = other DNA
tctctatttggtgcttttgtaatgaagaaactgaggtcctctacatgctctcttaaccaagttggttgcatctgacagatttactggactatttccttcccttgttttcctccctaagag

SEQ ID NO: 4053 - DNA, 120 bp, synthetic construct
  source 1..120: mol_type = other DNA
actggaaaacgcttttcttcacattaataccagatctgacactaccatatcatttctatacatgaacaattcctaccacattacctactccaaattgaaatcctagctaggcaatctcat

SEQ ID NO: 4054 - DNA, 120 bp, synthetic construct
  source 1..120: mol_type = other DNA
tttcagccagcttgtaccctggtctgggtacccctcatggagtgagcaacatataaaatcttatccagtagccttctttaaatcccagtaaatctaattacccagtattattctaatttt

SEQ ID NO: 4055 - DNA, 120 bp, synthetic construct
  source 1..120: mol_type = other DNA
atagatgaatactttattttgagggtacagcaatacataaacatggttcctagcttgtgcagagacagaccagtaagcaggcttcaaacaaggagcacaaaggaagttcatgtcacaaac

SEQ ID NO: 4056 - DNA, 120 bp, synthetic construct
  source 1..120: mol_type = other DNA
acattcactgggcttcatctggtctaacacaagaacctcatctcttatcccttgattccactttcatttcttaaaggagctagcaggctgctcagtaagatttctggtcaatcaaaatta

SEQ ID NO: 4057 - DNA, 120 bp, synthetic construct
  source 1..120: mol_type = other DNA
agattaaaaactgtgaaactaaaaactgccaactaatagtaatggccccgaaccgtgaagaaagggaatttcgtgctccaactttggcatccctagaaaactgcatgaagctttctcaga

SEQ ID NO: 4058 - DNA, 120 bp, synthetic construct
  source 1..120: mol_type = other DNA
agtagagctgaagtttcctgcaccaggcaagcctggaaattatcagtatactgtgtttctgagatcagactcctatatgggtttggatcagattaaaccattgaagttggaagttcatga

SEQ ID NO: 4059 - DNA, 120 bp, synthetic construct
  source 1..120: mol_type = other DNA
ggaagtaggcaggtgaatcaaacttttaaaagatgatactatcagtgtcaagtccaggccctacctagcaaataagtaggtcctgcattagttacacaaacatgagaaggacaactagaa

SEQ ID NO: 4060 - DNA, 120 bp, synthetic construct
  source 1..120: mol_type = other DNA
ttacaactgaaattcatcaaatgtttgtttcctttccacttaggtgcatagaatttggaaaacagacaggaccttatctggtccaaatgaacagatcaaaccatcttttggagtatgtaa

SEQ ID NO: 4061 - DNA, 120 bp, synthetic construct
  source 1..120: mol_type = other DNA
atcaccacctgcaaatacccatgcttcactagtttgcatagtttctggatctacttctgggagaccccatctgttaaattttatagggctcaaggcttcttttactgaaaaaacaagtga

SEQ ID NO: 4062 - DNA, 120 bp, synthetic construct
  source 1..120: mol_type = other DNA
ggacaacaccctatttgatggagtaaactgagtaagccagtgtttaggataaaatgttctctccaggtaacgtcataatttttaagcacagcatctcagacagactaagggccttattct

SEQ ID NO: 4063 - DNA, 120 bp, synthetic construct
  source 1..120: mol_type = other DNA
tttaagtagagatttcattctatgcttgagcaaggtaggaataattccttagttatctctgagtcccacaacataaattagagtcaaagacatgtttacagtcggccctccatatctgtg

SEQ ID NO: 4064 - DNA, 120 bp, synthetic construct
  source 1..120: mol_type = other DNA
actccacctgtcacaaactcggtccataagtagtcaggaaatgttactctgagtttaataagtaactttatgtttcttaaaatatttagcaccaacatcataagccaccctaggggcatt

SEQ ID NO: 4065 - DNA, 120 bp, synthetic construct
  source 1..120: mol_type = other DNA
tgcacagttttctcagattttccatgagattgcatcttgatggagactgtggcatatgtcccaggagctccatagttgaacagaaaaagaacttgaaaaagaatcccaaaacatgcttat

SEQ ID NO: 4066 - DNA, 120 bp, synthetic construct
  source 1..120: mol_type = other DNA
ccaactaagaatatcaagtctggatggcttgagctttgtcttcacatctcccttccacttctcagtactttaatcagtatgctctccacaatgaagattcattgttttccttctgccagt

SEQ ID NO: 4067 - DNA, 120 bp, synthetic construct
  source 1..120: mol_type = other DNA
aatataaaagccatcacatgggaactctcttttcttcccatcagcaaaactacaaacctactggatctataccttcgctctctctctcttcctttttaataccactaaggaactctccct

SEQ ID NO: 4068 - DNA, 120 bp, synthetic construct
  source 1..120: mol_type = other DNA
catagtattccatggtgtatatgtgccacattttcttaatccagtctatcattgttggacatttgggttggttccaagtctttgctattgtgaataatgtcgcaataaacatacatgtgc

SEQ ID NO: 4069 - DNA, 120 bp, synthetic construct
  source 1..120: mol_type = other DNA
gatctctagtacatggcaggcatactgctggatatttccatagaatatcttattagatcacaaaagaacccttgaaggtggatattatcatcctcaataaagccaagaggtggcagaggc

SEQ ID NO: 4070 - DNA, 120 bp, synthetic construct
  source 1..120: mol_type = other DNA
tgaatatgctagtagaattcagtcagggtaaaatacagatctgatcttctccctcaccctattcaggataaacttaggctccccaagttgaatggaaacgatggatgtcaataatagcct

SEQ ID NO: 4071 - DNA, 120 bp, synthetic construct
  source 1..120: mol_type = other DNA
ccaaggtcacacccttaggatttaaacctcactagaaattaactacatatgtagttggaaaatgcctgaaaaatccacagaagcatttggagatacacacctagacctcagatgaaggca

SEQ ID NO: 4072 - DNA, 120 bp, synthetic construct
  source 1..120: mol_type = other DNA
tatatgatagtgaaaatggttatgaatagggttacatgaaagagactagtacaagatgagggatgtgagaagcagaaggggtgctttagatcatagcaattatggagggtcagagagcgc

SEQ ID NO: 4073 - DNA, 120 bp, synthetic construct
  source 1..120: mol_type = other DNA
acccttactctattatttcgcatataccttataatctagacgaagaaactcccccatgtattcatccagcctgtttactataactggaatgggctttcaatccctgtctctgttctccta

SEQ ID NO: 4074 - DNA, 120 bp, synthetic construct
  source 1..120: mol_type = other DNA
ttagcactggttagcattaatccacatactgttaggcaggatccccaaatggatgttaacattaatactggtttcctcctccaacaatggcagtatattacatttgaattgagtagcttc

SEQ ID NO: 4075 - DNA, 120 bp, synthetic construct
  source 1..120: mol_type = other DNA
tgttgtgcttcaaatggatatctaaggcagatgtaagtgatgtggtgttgattcccaatcactttcaacactgttatcagtttgacctccatcctcatcacctccaccctttcaaaataa

SEQ ID NO: 4076 - DNA, 120 bp, synthetic construct
  source 1..120: mol_type = other DNA
gatctcttctatctgtgagttctgtcagcactataaacacctgtttacctcccagctagctaccccacatccaatctctttatcaagcagataaccaaatcctgactattctacttaaga

SEQ ID NO: 4077 - DNA, 120 bp, synthetic construct
  source 1..120: mol_type = other DNA
ttgctatatatgtatttacatgtctatttctctcattagcctataggtccctgaagggcaatgactcttttacttgtgtctgtattcctagtgcctgagtagtgcctggaacacagttgt

SEQ ID NO: 4078 - DNA, 120 bp, synthetic construct
  source 1..120: mol_type = other DNA
ccccttcccctttatttttgatatgagaaattacgtaagctgaaggtcataaagagtggttagttgttcaaagaaaattttgccaccagtagcttctataagatatgttttgttgtttga

SEQ ID NO: 4079 - DNA, 120 bp, synthetic construct
  source 1..120: mol_type = other DNA
cagaactatctaggttttgtgtttccttgttatctctagttcccagtgagtgagcagaaagaaaatgtaagcagtgggtgaagtacgtaaattcctttcctaacagaagggtcgtatctt

SEQ ID NO: 4080 - DNA, 120 bp, synthetic construct
  source 1..120: mol_type = other DNA
ttccagctggggcagcctggctccagagaccccactctcagccaatataccagatagactctaattagtgtaatatttattgtattatgaagaatacaacaatttatgccacaacaaagg

SEQ ID NO: 4081 - DNA, 120 bp, synthetic construct
  source 1..120: mol_type = other DNA
tgctgatcggcacataacatattccatgcacatggatatggaatatgtagtcttttgttcctacttcccactccctggtacaatccaaaaagtgatggaagaaacagaattatgtaaagt

SEQ ID NO: 4082 - DNA, 120 bp, synthetic construct
  source 1..120: mol_type = other DNA
ctccaccctagtctatggaattttaaagcccatgcaatgactcgctcattttcatactctctagaatataatttggcacctggcattcattaggtactcagtaaatgtttgtcacatgcc

SEQ ID NO: 4083 - DNA, 120 bp, synthetic construct
  source 1..120: mol_type = other DNA
ttctaacaaacactgcttctgtgactcctttatttaatgttttccatccaaaagaacagtactgaaaacatttagatgggagtccaggaatgaatgctatctcacactgcagctctgcca

SEQ ID NO: 4084 - DNA, 120 bp, synthetic construct
  source 1..120: mol_type = other DNA
gtctagataaaaagtgacaaatttaggccatcatccagctatttgaaaacatttatctcgatgacattaaacatctggatgtttccacataccaagatgtttgatgccctgcagataaaa

SEQ ID NO: 4085 - DNA, 120 bp, synthetic construct
  source 1..120: mol_type = other DNA
aacaattccctgaaagctagaaactattacagcactaaaataacagacaattgcatcacacatttcagctcccagcactgtacctttaggatcactcagaactgaaccaaaggcactgat

SEQ ID NO: 4086 - DNA, 120 bp, synthetic construct
  source 1..120: mol_type = other DNA
acagcgaaacaagcatgtcctcctgatgaatgcccagttcttccccatttcctacgtaattcattttgccataaaatctggatacctcggtttctgtttgttttcatatgcataatggaa

SEQ ID NO: 4087 - DNA, 120 bp, synthetic construct
  source 1..120: mol_type = other DNA
catgtgggatgttatgctggtaaacatacaaaacagttgatataaaactgctcactcctcagacaggaagattagaggtaagcggaattgaatcaaatttgaaaactgctctgctgctta

SEQ ID NO: 4088 - DNA, 120 bp, synthetic construct
  source 1..120: mol_type = other DNA
caaacataaaaaaactggctttagcatatgctcatctatgtgccccaggtttgattacatgtattcaaatatctggcattcttaccaattatccgacagtgcactggggatggcatgagc

SEQ ID NO: 4089 - DNA, 120 bp, synthetic construct
  source 1..120: mol_type = other DNA
tgtgtggcctctgtgcattatgtgtaccccttcaggaactgtaagtaataaaatctttatttccatcttgagcctgtcccaatcattgaaggaatgctctcatcttaaagatcctaaatt

SEQ ID NO: 4090 - DNA, 120 bp, synthetic construct
  source 1..120: mol_type = other DNA
gaaaaggaaaagctaaagtgaaaggtgaagggcttggctagacatagttccctttgtgggaagaggagactcaagcttcccagtctaagctcatttacaggtactataaaatcatgaaat

SEQ ID NO: 4091 - DNA, 120 bp, synthetic construct
  source 1..120: mol_type = other DNA
atatgaatgcttctcctcatggcacccatatatatttatttgtttgatggagcatgtctttatgagggacaactggtttatcaagcaaacatgccaacctctcttttcctagtctccacc

SEQ ID NO: 4092 - DNA, 120 bp, synthetic construct
  source 1..120: mol_type = other DNA
cctgttagattgatttagccaacaggattaagccttaccttgatgtttcctttcagtaatattttatctactaacccgcaacctactccttggctattacttcctacctccgcattctgt

SEQ ID NO: 4093 - DNA, 120 bp, synthetic construct
  source 1..120: mol_type = other DNA
ccagtcagagcccgtatgtgcacagcaaaagagtggtaaccaggatctatcctatcatctcattttgttaggaacatagtttaaagagaaatgccattaaaagaggatgagtttgtacac

SEQ ID NO: 4094 - DNA, 120 bp, synthetic construct
  source 1..120: mol_type = other DNA
cactggaaaggaattagttactaggaagttcttgtatggaatccattctctctctttgaagaagtgggtgtggaagggtaaaggagtttatctcaagaagaaaagaaggaaagcagcttg

SEQ ID NO: 4095 - DNA, 120 bp, synthetic construct
  source 1..120: mol_type = other DNA
attcatatgaatttgatttcacaatccaatcttctagttatcttggttaccaaggacatgaaggagggtaaaggaagaggcatcaaactcggcccattcacacttgatctcatattcttt

SEQ ID NO: 4096 - DNA, 120 bp, synthetic construct
  source 1..120: mol_type = other DNA
acctattttcttcatcttaggttttgatggattcaagcctccctggcagctgttggagtatctcacaaaactacgttctgtgtaacttggtgcctttgtagttcctcctttaatcttaaa

SEQ ID NO: 4097 - DNA, 120 bp, synthetic construct
  source 1..120: mol_type = other DNA
attctcagcaaactaccgcaacgacaaaaagccaaacactgcatgttctcattcataggtgggaattgaacaatgagaacacatggacacaggaaggggaacatcacacaccggggactg

SEQ ID NO: 4098 - DNA, 120 bp, synthetic construct
  source 1..120: mol_type = other DNA
gaaaagcggaggtgaatatttttaaatgaagaggggcttctaatgttcacctaaaaatgaatgaagtagagcatacagatctcttcccactttcaattattgccaggcagtggccaaagg

SEQ ID NO: 4099 - DNA, 120 bp, synthetic construct
  source 1..120: mol_type = other DNA
taaatgggcacaagcttttgttggctcctggcctatttgcagtcttcttttttttccactcaccatctgaattatcacatgtactgtagaattctgacaatttcacctgtcagtttcttt

SEQ ID NO: 4100 - DNA, 120 bp, synthetic construct
  source 1..120: mol_type = other DNA
taacatggtcctttgacattaaaaatatctgagaagaggcctataggtcatgccacaaaaatgatctattatggggtatgctgtgtggtggtggaaaaaaatcaggtaaaaggcacattc

SEQ ID NO: 4101 - DNA, 120 bp, synthetic construct
  source 1..120: mol_type = other DNA
agcatcctatttagcatgtgtgtgaggccacaagggagctggaaagacacttggaatcagaattacatcaatatgctgatgatgcctgcatatcttcatttcatcaaacctatatccttt

SEQ ID NO: 4102 - DNA, 120 bp, synthetic construct
  source 1..120: mol_type = other DNA
tgtatttccctcactcagagaatgagaattagactgcaccatcagacatatacatgttgacatgcctaatggtgaggcattttactgacaaaccatgctatttccaaattacacccaaga

SEQ ID NO: 4103 - DNA, 120 bp, synthetic construct
  source 1..120: mol_type = other DNA
ttcttgtaatctactcacattaaccaatagctcactcttttacttagcccctgactagcctctctgcttctgatgccactccactatagtcaattctcagcagagtagccattttaaaat

SEQ ID NO: 4104 - DNA, 120 bp, synthetic construct
  source 1..120: mol_type = other DNA
atcaaactgtatagcctgcaaacagaaatagagggtattgatgtcactgaccacaaaggtcaacaatgtccccattttagcgttaacatttttctctgctgcagaggagccacactatga

SEQ ID NO: 4105 - DNA, 120 bp, synthetic construct
  source 1..120: mol_type = other DNA
aattcataccgctaccctcttcttatctggtctcagtttgtttgtgtcttagttctacctaagacagaagaaataaccaccattcatttccagtgacccttgcaaatggaagatgactat

SEQ ID NO: 4106 - DNA, 120 bp, synthetic construct
  source 1..120: mol_type = other DNA
tacatgacacccttttctttctatttgcttcacaaataatgaactgactgaaagtatgaccaaggtatacatcttagaatgcagtctgtaaattggcttacggaaaattccgtatgtgtc

SEQ ID NO: 4107 - DNA, 120 bp, synthetic construct
  source 1..120: mol_type = other DNA
gagagtgacaggcgcacattcctgaatgatgaaaggaaaaccccattttcaagtagagaaaccatttctgcatgacagctcaaaagatacttgtactcaaagcagtgtaaaattgcatct

SEQ ID NO: 4108 - DNA, 120 bp, synthetic construct
  source 1..120: mol_type = other DNA
ctttggataaaatattacaattttccccaaagacaatgactctggtcaggccaaaccaaggtacaaccttcattcaggtggttcttcttggggtgtataaagtgatagggtgtctatcaa

SEQ ID NO: 4109 - DNA, 120 bp, synthetic construct
  source 1..120: mol_type = other DNA
actatacaccaagggtagacatggaacttgtcatactctttcagtggaaatatacattggtgttcaatatctagaaaatagtcttaaatctatcttaagaaaatactgacacatgcaaat

SEQ ID NO: 4110 - DNA, 120 bp, synthetic construct
  source 1..120: mol_type = other DNA
gatgacttttgtcatatgagataaggtgggtgccatatctgatctgaaagctgaaggtttctgtgggttgcctgtaatcagcaataaaccaccattgtctcttcagattaaaccaaacat

SEQ ID NO: 4111 - DNA, 120 bp, synthetic construct
  source 1..120: mol_type = other DNA
ctttgatagtctatgctaatcatagtgctgtgggatgatcagaagcagggattttgtcactagacagactttggtatgagtccttcctctctcatttaccagttctgtggtattgtataa

SEQ ID NO: 4112 - DNA, 120 bp, synthetic construct
  source 1..120: mol_type = other DNA
attaagtaactcgctgaaggatcacagaacatgtaagaagcagcgccaatttctaacgtggacactggttgtagagtctatgttatgagttcaaaatggctgcctttttcatgtttaagg

SEQ ID NO: 4113 - DNA, 120 bp, synthetic construct
  source 1..120: mol_type = other DNA
gtttagtgttaactgaatgatgcaagcatttgtgtgatgcttcctgtccttgaaaggattcatctgaatgacagctaagccatcatgagaaagacagtcatctttggagatagactcaca

SEQ ID NO: 4114 - DNA, 120 bp, synthetic construct
  source 1..120: mol_type = other DNA
agcacttactagctattatgaccttggccaaataaattatactttctgggcaacagcttcctcatcacaggactgttgggagaattaacacgaaaaacaggtatataaagctctttgcac

SEQ ID NO: 4115 - DNA, 120 bp, synthetic construct
  source 1..120: mol_type = other DNA
aaattacaagggacaataagtgtctctccacccccatggtaccccttgaggccaggtctacaaatcttacattttcaaggaattgcattattttgatttttttcctgtctcataccaatg

SEQ ID NO: 4116 - DNA, 120 bp, synthetic construct
  source 1..120: mol_type = other DNA
gatgagaaagagaatagatcaatgatggcctattgtggttcttttctcaataaaactccccattttcttcccgatgtgctgctgtaaatgcgtttagtactgagtgttcagacagaatgc

SEQ ID NO: 4117 - DNA, 120 bp, synthetic construct
  source 1..120: mol_type = other DNA
ctctgctttatggtattatttattaaagtatactttgtctcttgagccttttctcttctccttttctttatttccctcccttctattttctctgtttctttttctcatttggcttttgct

SEQ ID NO: 4118 - DNA, 120 bp, synthetic construct
  source 1..120: mol_type = other DNA
atcgacatacataacggaaaaaaaccctcaaccaaccacctaaaaacatactctattgaactgcacagtaggaaacagcattaaagctgccaccataaacacacattccgtagaaggaag

SEQ ID NO: 4119 - DNA, 120 bp, synthetic construct
  source 1..120: mol_type = other DNA
ctaggaattcagaaaattccacaagaaaatcaccttctaaagggcattcttgatggatgcgcttggtcaacaattccagaaacatgtttgacctttttgcacctcagtttcttcatccat

SEQ ID NO: 4120 - DNA, 120 bp, synthetic construct
  source 1..120: mol_type = other DNA
tcagtctcaactataaaatctgctctgctgggatattaaatgagataatatatctcaatagtatgataattgcttagcatactgactggcatatggaaaatgttaacagatgaactgatc

SEQ ID NO: 4121 - DNA, 120 bp, synthetic construct
  source 1..120: mol_type = other DNA
gacaaataggcagggtccaaactatgaggggtcattcaagtcacaccaggatgtttggattttacactgaggaaacattttaggaaatgatataatcagctttgtacattagcaaggaca

SEQ ID NO: 4122 - DNA, 120 bp, synthetic construct
  source 1..120: mol_type = other DNA
caggaggaggggtaggaaaaagcggcatgctggaagtcaaaaaaagagaggtatcagctcaaactttcttgttatcacagaagaaaactggatgcaaaaatttaaaacattatacagcgc

SEQ ID NO: 4123 - DNA, 120 bp, synthetic construct
  source 1..120: mol_type = other DNA
aaaccaaaaccaaataaagactcctagacagtagaaatatatgggtaacgtagcgacacctaggtttgctctcggtttccctacctactagctttgtgatgtatggcaaattagcttact

SEQ ID NO: 4124 - DNA, 120 bp, synthetic construct
  source 1..120: mol_type = other DNA
cttgagccccacaaaaacactatggactaggtatccttatgctcatttacagatgacaaactgaggttcaaggcagtaaaaaaagctttctataatctcacagacaagtggcaaagacag

SEQ ID NO: 4125 - DNA, 120 bp, synthetic construct
  source 1..120: mol_type = other DNA
ctcactgcttccaggtcctctattgacagaactaaatactgaaaactgtgtacgcgatgggttaaaaagcaaagctatcttcgtggacatatgatcaaataactacagaaacagactcca

SEQ ID NO: 4126 - DNA, 120 bp, synthetic construct
  source 1..120: mol_type = other DNA
ccaagtctagaattccacggtgggagccataagttctaagatttaagatattagagagctgatgctctgatagttataggacttcctgattgatctctgattggttaatttgaaagacga

SEQ ID NO: 4127 - DNA, 120 bp, synthetic construct
  source 1..120: mol_type = other DNA
tcaaacattcacaatgcatcacgtactgtgctagacaaatccgagccagaacctaagtttgagtcctgactctgctactttccagcaagttagcttaccatcttttactacagatttttt

SEQ ID NO: 4128 - DNA, 120 bp, synthetic construct
  source 1..120: mol_type = other DNA
ttaattttagctttaatgattatatgcaaaatgtcttccaaaacctcaggacaaattataccatagcagttgggcttgtttcttcaatccctcatcctctatgctgcccccagtgctgag

SEQ ID NO: 4129 - DNA, 120 bp, synthetic construct
  source 1..120: mol_type = other DNA
gtccttaaatgcgacatctagaaatctggggcatactgagtgtgctggtgagactttccgaaacacctgttttcaacgcatgatctgccaatatgtgtttaaatttgttcatttgttcaa

SEQ ID NO: 4130 - DNA, 120 bp, synthetic construct
  source 1..120: mol_type = other DNA
atgaggcctaaatccagttagctaattctaagttccacttcattttcattagcaatggagggaagcatcacgactactcactaatataaatcaactatacatcctccccacccatcaaga

SEQ ID NO: 4131 - DNA, 120 bp, synthetic construct
  source 1..120: mol_type = other DNA
tctgttggtatcattccccatcatgctggcagataagtttttctaaaatgaaaaattcgagggactccccagtgtttcactccttagcaaggaatataaggcccttcattatttgaacct

SEQ ID NO: 4132 - DNA, 120 bp, synthetic construct
  source 1..120: mol_type = other DNA
gagacagataggattacattaaaagaccagagagaccacacggagatgctggatacttacctattgttcacttaattattcatgcaaactacttggatgttttactaaaaccaagatttg

SEQ ID NO: 4133 - DNA, 120 bp, synthetic construct
  source 1..120: mol_type = other DNA
gtctctaggtccagtgaaaaacaccaacattgagagtaagttcagggtgaggataaaacatctcctatgaactagggatacctacaaaatatttgcagggagattctatctctgagagag

SEQ ID NO: 4134 - DNA, 120 bp, synthetic construct
  source 1..120: mol_type = other DNA
tctcattacagaccagtaataaccagttcagagtccggcgccagtctatggctacacaaccagcagcattgctatagatgacacagaatttgaatttaggtagatgatacagaatttgaa

SEQ ID NO: 4135 - DNA, 120 bp, synthetic construct
  source 1..120: mol_type = other DNA
ctgaaggaataatctgcttttctttcaaatgtattgcctatattaaatccgcatccacccttttatcaatgcaagggaaacaccggttacaaagttaatgttaacgaccattgcttctat

SEQ ID NO: 4136 - DNA, 120 bp, synthetic construct
  source 1..120: mol_type = other DNA
tattcgtatatgctctttcattcttcactgtcccaaaatgtaaaagtccaatcttcttagccttccttcatacttctgcccctatctaatcattcttttagcaacttctggttccatttt

SEQ ID NO: 4137 - DNA, 120 bp, synthetic construct
  source 1..120: mol_type = other DNA
agggtgacaggacagaaagatgtactgttgcagaagagcaatatttggcaccactggtttaaatttcacacatagcaacagaaaatgctttctgccgtaaaaacaagaagaaacatgtct

SEQ ID NO: 4138 - DNA, 120 bp, synthetic construct
  source 1..120: mol_type = other DNA
gtagattatgggagtcaggtgttttcactgttgtattgggaggttaaatgtaaataagaagaaaaggatagagagaggctacaatggtctacgtggtgatgaattagagtggaagacatc

SEQ ID NO: 4139 - DNA, 120 bp, synthetic construct
  source 1..120: mol_type = other DNA
tccagtgtggtgaaagtgaagaagaaaggcaggcaaacaagatctgaaggaatcaggaaatagtttcatgaaaagaatggcgtttacacagaatcaggagagctaagatttgcatatgtg

SEQ ID NO: 4140 - DNA, 120 bp, synthetic construct
  source 1..120: mol_type = other DNA
ataattcactgcagaataacaggaaataaatttgggaacacagtgttcaattgttaccaaggcctcagggagtcaggcatagtgatagaaacattttaatgagggggtttggatcaaagt

SEQ ID NO: 4141 - DNA, 120 bp, synthetic construct
  source 1..120: mol_type = other DNA
atcagtttgttgaagacatgtctgcacccccatgtttattacagcactattcacaatagctaaactttagaatcaaactaagtatctatcaacagataaatggataaagaaaatgtatat

SEQ ID NO: 4142 - DNA, 120 bp, synthetic construct
  source 1..120: mol_type = other DNA
cacgtgggctttggcagatgatgaatctgtcaatacaaataaataattgttcttttcgggtcatttcaaatatcaagggtaggaaagcttgtcctcttggacctactagactatgggcaa

SEQ ID NO: 4143 - DNA, 120 bp, synthetic construct
  source 1..120: mol_type = other DNA
gacttcccatttcctccaaaaggaggcaagctcctctgcctaactgaaaattggttcacattttgcctcaagtttctactcccatctatagtttctgaatgtgatatatacatttcacaa

SEQ ID NO: 4144 - DNA, 120 bp, synthetic construct
  source 1..120: mol_type = other DNA
cagtttgaaagtgagttgtaactatctgctagcaaaaagacaattgcatggacaaagataatgatagtaggaatgaaagggcaggttcctatttcagagacattgaggcacagactcttc

SEQ ID NO: 4145 - DNA, 120 bp, synthetic construct
  source 1..120: mol_type = other DNA
tactatctgtgcaaaagaggacagtggttatttgctcagactttagaactagataccttgagttcaaatcccagcctctacatgctaaataaaagaacccagactcataatgatggggct

SEQ ID NO: 4146 - DNA, 120 bp, synthetic construct
  source 1..120: mol_type = other DNA
cttttgcccccttacttagttagatatagccatattttatcagaatacagccaacataactgacactctcacttcttgcagttaactcaaaggtccctccacagacaggccatttctgat

SEQ ID NO: 4147 - DNA, 120 bp, synthetic construct
  source 1..120: mol_type = other DNA
tgcttctctaggacctcagagcttagtgttttgtcagcttcaagctgttttggagaaagtgttggcttatttctcagctgtagcattgacttagcaagtctttcttctaaacttgtaaat

SEQ ID NO: 4148 - DNA, 120 bp, synthetic construct
  source 1..120: mol_type = other DNA
attcaccattgaagatctttcatgtgattacacattgctttgttcttcatactaattgggagtgtgcctaatatgtgaagcacagactatgtttcatcaacaataagaaacattttgctt

SEQ ID NO: 4149 - DNA, 120 bp, synthetic construct
  source 1..120: mol_type = other DNA
tagagtcttcttgaaacatatttaggaatttgaacaaatgtctgttctttaaagttacgggagtgggtagagctttatgacactgtgtggggatatgggggatagaggagtcagagaaac

SEQ ID NO: 4150 - DNA, 120 bp, synthetic construct
  source 1..120: mol_type = other DNA
ccccaatcttacttctgacttccccaagttcaactgattgaaatgttgtgcaaataagcaaccatttccttattgaaatggtcaacaaggacctcagttaaaacaatggtctcaggattt

SEQ ID NO: 4151 - DNA, 120 bp, synthetic construct
  source 1..120: mol_type = other DNA
attcacagaaaacaagtgaaattcaagtggttagattcaggggcttatatgccttttaaaagggggcattaggcttcaagggatgattaactcatggggaagtggctagacaatatatgg

SEQ ID NO: 4152 - DNA, 120 bp, synthetic construct
  source 1..120: mol_type = other DNA
gagaaacactatttgaaaaaattgtaggtgagcattgtgcagtatttgacactggtggccacagtaggcatacacgtttctgcaaggcatatagaatagcatcagaacaaagcctattca

SEQ ID NO: 4153 - DNA, 120 bp, synthetic construct
  source 1..120: mol_type = other DNA
gctccgccatgggattatgtgttaacgatgtaattggcacccacagtttaagaccaccagtgtggttcttgcctaaataatgaatttacttacaaattgcactgaaattattctctagct

SEQ ID NO: 4154 - DNA, 120 bp, synthetic construct
  source 1..120: mol_type = other DNA
tcttattcatattatcttaacactagaaatgagaagttcactcagtgaatgagggcattgtctctcccatgaaatgccttgacaaacctacccagggtcagtaagaaatcctgtgagcat

SEQ ID NO: 4155 - DNA, 120 bp, synthetic construct
  source 1..120: mol_type = other DNA
ccctaaggttggcaagcacccagaaaaccaggcaaaggactaaagagctttgccttagaccaggagacatatatattattttgctccaagacaaacaagaaagaagtgagaaaagagaaa

SEQ ID NO: 4156 - DNA, 120 bp, synthetic construct
  source 1..120: mol_type = other DNA
atgcctgacagaataagacacagatgtttttgcacatgtgggtacttgtggcaaatcattatgtcacctaggagaagctactttctaaattaatggccatcaacaagcttaccaactctt

SEQ ID NO: 4157 - DNA, 120 bp, synthetic construct
  source 1..120: mol_type = other DNA
tacatggtcaaattagatcctcaaacgcatgtgtatgaacagatgacgcagaacatgcctattcaagacaacatggtttctgagtgacactgattaacaatcttgtgaaagctggccttt

SEQ ID NO: 4158 - DNA, 120 bp, synthetic construct
  source 1..120: mol_type = other DNA
tgcccggcaatttatttactttctgttagattattagagtctgtaattgtaagttatgtaaccacaccatgaattaacaggcttgagggctttccctgaaagatgggcaaaaggtgggac

SEQ ID NO: 4159 - DNA, 120 bp, synthetic construct
  source 1..120: mol_type = other DNA
aaacaccatgcacttcagctacactggaggacacacttttcaactgacccatctgagatctaacattaggttaaatcctctgtctaagatacctttcattcctaactccactttgcaaaa

SEQ ID NO: 4160 - DNA, 120 bp, synthetic construct
  source 1..120: mol_type = other DNA
gactgagaacttcttttggagacatatataatgagcacatataaaggtgcagaggaaaggaaggggatggagatagaagaaacaaaaagtgacagatcagatataaaagactttctaacc

SEQ ID NO: 4161 - DNA, 120 bp, synthetic construct
  source 1..120: mol_type = other DNA
aactatcgcaagaacaaaaaaccaaacaccgcatgttctcactcataggtgggaattgaacaatgagaacacatggacacaggaaggggaacatcacactctggggactgttgtggggtg

SEQ ID NO: 4162 - DNA, 120 bp, synthetic construct
  source 1..120: mol_type = other DNA
tatagacacatgcacatgtatatttattgtggcactgtttacaatagcaaagacttgaaaccaacccaaatggccatcaatgatagactggataaagaaaatgtggcacatatacaccat

SEQ ID NO: 4163 - DNA, 120 bp, synthetic construct
  source 1..120: mol_type = other DNA
cattctggaataattaatatattcacatatgcaaagataagatataaaaatatacaccatgaaaagtgacccttcactgttgtctcctctatcttaagttttcttgggtagccttgtgtc

SEQ ID NO: 4164 - DNA, 120 bp, synthetic construct
  source 1..120: mol_type = other DNA
atcttgtaagtttggtttcagtgttttctgttacagaatgatgctgtgaggagtgtaaagccagtctaatattttctcttcagtatgacttgatcattttccctatatgtccaaggaagt

SEQ ID NO: 4165 - DNA, 120 bp, synthetic construct
  source 1..120: mol_type = other DNA
catgagaatatcttattactcatcatgtaatgagctaactttgcttaattggttatttgcaggatgttcctgcagaggtggttatggtgagggacagagttctctcctttcttgctgcca

SEQ ID NO: 4166 - DNA, 120 bp, synthetic construct
  source 1..120: mol_type = other DNA
gcagagtctcttctagtttttcccaactcatacatctgatattttgccaattactgatgactcaactctgccctttctctctcatccatcttcttaaattcattcctgctgctactacca

SEQ ID NO: 4167 - DNA, 120 bp, synthetic construct
  source 1..120: mol_type = other DNA
cataatcacttggaatggaagactcttagaaactatgtataagcatacggctactgttacctcatttcagtcagagaagattccccttagaagatcctctatagaccctcagtgtcctat

SEQ ID NO: 4168 - DNA, 120 bp, synthetic construct
  source 1..120: mol_type = other DNA
aagtaggaagttccaaaaagtaatgatgaaagacactcttatttttaagccatgaccattcctggaagaaaacagaaactgggacacaggcgaaacactgaggttccatagttggcaaag

SEQ ID NO: 4169 - DNA, 120 bp, synthetic construct
  source 1..120: mol_type = other DNA
agaggagcttgctcataattacaacacccaacttcacaaaagggcattttagaggcaagttaaacaaacagatagaaacatctcataaaccacaaaagaaggaattagtagtccctaggg

SEQ ID NO: 4170 - DNA, 120 bp, synthetic construct
  source 1..120: mol_type = other DNA
acaggaaactctctaggcagtcaacaagtgtataagccttcttcaaaagaaacgttgtatatgccttagaaattttacgtggagcaagtccacattctgtgtacattaaatatgcctttt

SEQ ID NO: 4171 - DNA, 120 bp, synthetic construct
  source 1..120: mol_type = other DNA
gaaaaggcacttcattttgagttctgactttcatctttcattcactggttacaccctgaccccacaaaacttactgcttccattctggaaatgtgaaacctcctacagcgtaatagattt

SEQ ID NO: 4172 - DNA, 120 bp, synthetic construct
  source 1..120: mol_type = other DNA
tcaacaaaacccacataattttaatttgagggcggaagggtgagggacatttctattgcagtattttatatggtgaagatcctgagcatggtaggcctaaggcagtttcctatgatatca

SEQ ID NO: 4173 - DNA, 120 bp, synthetic construct
  source 1..120: mol_type = other DNA
attttcatgagaccagtgtcccccttttccttctcttctattctccctaccttctcctctcacctttttatagggaagggtctgcaatatttttgtactaagtgttaaatgagtaataac

SEQ ID NO: 4174 - DNA, 120 bp, synthetic construct
  source 1..120: mol_type = other DNA
tcaatatctgatgaaagaaagcttactgactcattaggagccaaactattttcctatcactaaattctttaaggaattctatgacatcagccaatatataaagatttactgaccaatata

SEQ ID NO: 4175 - DNA, 120 bp, synthetic construct
  source 1..120: mol_type = other DNA
aagttaaaatacttaaaaacagtctttttatagcagaagcaatcaaattagaataacaagcataggaatacacaaagcactgctgcagaagactctgcctccaccccgccccaaccaagg

SEQ ID NO: 4176 - DNA, 120 bp, synthetic construct
  source 1..120: mol_type = other DNA
gggtctgctaagtccaacctcatgtagccatctgcttttcaacttccaaaatgttgtcatttctgctcctttctattctttttttccttctgggcttatgatttttgacaaatcctgttg

SEQ ID NO: 4177 - DNA, 120 bp, synthetic construct
  source 1..120: mol_type = other DNA
gttgaagactggtagtttctgaaattcttctcagagaccatgcactagaaacaatggaaccacagatttgctaattagaattattcctgaataatcattaaagcaaacagcagcttttgc

SEQ ID NO: 4178 - DNA, 120 bp, synthetic construct
  source 1..120: mol_type = other DNA
attaattacttcagcatttgcccaagttcaatctctaatcatcactctcctgcactgtataacctctgtccagcccatctccacatgtccagtctcatcacttttaaattcatcatctac

SEQ ID NO: 4179 - DNA, 120 bp, synthetic construct
  source 1..120: mol_type = other DNA
aataaacccagtgcacatagcataatatgcttacaggtgaattcatcttcaactttcaactcagaaaatgccctatattctttccaatagtaatactctgtaatggcatggtggttggtt

SEQ ID NO: 4180 - DNA, 120 bp, synthetic construct
  source 1..120: mol_type = other DNA
caccaacctttagattctagtaaagccttcctactcaaaggagtaaataaaaccttactacttcactaagaagaggctaaagcaaagtgaactcacttggctgacatgttccaccttaga

SEQ ID NO: 4181 - DNA, 120 bp, synthetic construct
  source 1..120: mol_type = other DNA
tttttaatagaccagtcaatgtttctgtttgatataaagtttaaggccaaagagtgaggaactagacagccctgattccgtccctgatgtttcattctgaatttattacgactaatatta

SEQ ID NO: 4182 - DNA, 120 bp, synthetic construct
  source 1..120: mol_type = other DNA
caaagacttgcctacagtgttctctccacctccttccccctcattttcttgtgtgtataccaattagcctacaatggtagagaccatatgttcaattattcggcattatggaaacatata

SEQ ID NO: 4183 - DNA, 120 bp, synthetic construct
  source 1..120: mol_type = other DNA
aagttagtcatcatgtggactaacctttttttgccctattatcatgaaaatccctctagccacacagattcatctaatatatgatctggtgaaaataaggatggggcaatggcaacacca

SEQ ID NO: 4184 - DNA, 120 bp, synthetic construct
  source 1..120: mol_type = other DNA
ctggtcttgctcttctccaaaccattttcacagtgcgaccaaacctatctcactaatctcttacctctcacatcaaaatccttcattttccacagcacaaagtaaacactcaataactac

SEQ ID NO: 4185 - DNA, 120 bp, synthetic construct
  source 1..120: mol_type = other DNA
acgcacacacacatacacaggggaaaagagagcatacttaaatatagtggaaagcagttgcagaaaaacataagattgctttaccactaaaagtctaacacatttcggtctctaccactg

SEQ ID NO: 4186 - DNA, 120 bp, synthetic construct
  source 1..120: mol_type = other DNA
ccctgagcaccttgaataaaaggaactatgctctggatggctttttgttatttcctggctgaagtcaataggtgctaattgttagaattcatcatgaagaatccagaggcagaacaataa

SEQ ID NO: 4187 - DNA, 120 bp, synthetic construct
  source 1..120: mol_type = other DNA
gagtgagaagcaaggttggtttctcaccatggggggtttcacaaaaattcagctattttaaagttctagtacaaaataatcagggatagctatctcttctgctacctatgttgttgttct

SEQ ID NO: 4188 - DNA, 120 bp, synthetic construct
  source 1..120: mol_type = other DNA
ctagcaattccacatatggatgtgtggccaaaagagatgaaatcaaggactcaaagaaatatctgtataacctatgtttgtgggagcattattcccaatatccaaaagtcagaaaccatc

SEQ ID NO: 4189 - DNA, 120 bp, synthetic construct
  source 1..120: mol_type = other DNA
atcaaccaacagtggcattaaaagagtaagagaagtggaaaaatacctgactgtgatacaatctccaaagacaaaagaagggctattttttcctgtaaaatggaaacttaaccagggaga

SEQ ID NO: 4190 - DNA, 120 bp, synthetic construct
  source 1..120: mol_type = other DNA
tatgcctagtttcctccaacttgcatcaatccctgccatttccatgccattttccttttctcttactaacccctcttttcttctgtgtatgtcttcttcagttcaccaaactttacatag

SEQ ID NO: 4191 - DNA, 120 bp, synthetic construct
  source 1..120: mol_type = other DNA
gcagcccagcaagactaagataatacccatagtatatgttcactaataaccccttccaggttcaaatgataattatctcccacaaaaaatgtaactggcagccataaatagcagttgaaa

SEQ ID NO: 4192 - DNA, 120 bp, synthetic construct
  source 1..120: mol_type = other DNA
cctttggggttagatctcaatctttctgatttgtttccatcttttccctacttcccctacaacatccacctttttctttgggaaagaacctggagcaacatttatttttcatcagtgtgg

SEQ ID NO: 4193 - DNA, 120 bp, synthetic construct
  source 1..120: mol_type = other DNA
tgctgaaattatgcaattcaaggataaaaaccaacaccaactctcataaatgtttaatatactgtgtttgtgtgggtgacaggggagggatatatgcacacaaccaaaaatgacaaaagg

SEQ ID NO: 4194 - DNA, 120 bp, synthetic construct
  source 1..120: mol_type = other DNA
agatgaccagcccccattgcctgcttctgcagattaatatgtgctttctatagatatgttaatatgatcaaagaataattgccctacatctattttatctccttctggggctttgcatga

SEQ ID NO: 4195 - DNA, 120 bp, synthetic construct
  source 1..120: mol_type = other DNA
agtgaattataataaagaaggtgaagaagtgctatactacagtaaaaagtccagtctgaacatagagagcaggaacacagagtttgtgtggggtggggggtgaggaagatgattcattaa

SEQ ID NO: 4196 - DNA, 120 bp, synthetic construct
  source 1..120: mol_type = other DNA
actcttaaacctggctctagaataaaattacccacagaactttaaaaaaaaaaaaaggaactatacccatgtccagcccgtctaccacactacgtcccactcctgaaattgtgcaatatg

SEQ ID NO: 4197 - DNA, 120 bp, synthetic construct
  source 1..120: mol_type = other DNA
tgttccaattctacgtctcaatattttcagtaacatgctgtccaggtgctctgatttcagtaaaaccaccaaaactttagagtctttaacaatgactcaattactgtgaagataacagac

SEQ ID NO: 4198 - DNA, 120 bp, synthetic construct
  source 1..120: mol_type = other DNA
gttgtgtggctgtccaagtaaccgccagttatatggtaatacaaaggtcataaattcccaaatcgacactcatgagtgtcaaataaacatttcctagagaatacggctacttgtcttcca

SEQ ID NO: 4199 - DNA, 120 bp, synthetic construct
  source 1..120: mol_type = other DNA
ggcacccaaaattttctgaaaggaaggaggttcagttgagacatttaggagctagaagacagtgtaaatttatattgctttccataattttttgcctaaataaaggggctgacaggcatg

SEQ ID NO: 4200 - DNA, 120 bp, synthetic construct
  source 1..120: mol_type = other DNA
ctagacagattctgagtttctggtggtatgacttgaaaatattttcttcctagagattctcactggtgatgatggtgtggtgaaagaatgggaagataaacatcttgccgaaatctctcc

SEQ ID NO: 4201 - DNA, 120 bp, synthetic construct
  source 1..120: mol_type = other DNA
aggctggggagattcattttagctaagcttagaaggttgagaatacagagaagtgggatttcaatagggcctttaaaaggaaaagacaggattttgataacggacagtgtcaagggaaaa

SEQ ID NO: 4202 - DNA, 120 bp, synthetic construct
  source 1..120: mol_type = other DNA
acagttttgccttagggatatgtcaactcttttcagtaataatatatgtaatctgaagcgatctggacatcccacagaacgtcacagtgattcattaccttgacgacatcaggcagatca

SEQ ID NO: 4203 - DNA, 120 bp, synthetic construct
  source 1..120: mol_type = other DNA
cgtggaatggttactttccttcaagattcctttagctgccattttcttcaaacagacttttttagccagaaataagccaaagcagcaagtcccctcattacttgtctctcttttgtgaga

SEQ ID NO: 4204 - DNA, 120 bp, synthetic construct
  source 1..120: mol_type = other DNA
tcaaagttgagcactggaatgccatgccaatgaattaattggtggaggtgattctcaaaatacttaatcttaggtttactttattcagtgcctctgcaggaagattcaagaagacctccc

SEQ ID NO: 4205 - DNA, 120 bp, synthetic construct
  source 1..120: mol_type = other DNA
ttccaagcagtgacaggcacaaggcttccttcctttttgtgaatgggaacctattcaaatttccctttcctaaaagcctgaggccccaaatatttgccatgcaagaaataatctattctt

SEQ ID NO: 4206 - DNA, 120 bp, synthetic construct
  source 1..120: mol_type = other DNA
ctgagttgcattacaaaaaaaggtataaataaacatcagctaagaagccatttctcctaaagggaatacccaattttattacactataaatgatcctttggtgtaaaatcaattgagagt

SEQ ID NO: 4207 - DNA, 120 bp, synthetic construct
  source 1..120: mol_type = other DNA
tatatatatacacacacaccaataggtagactaatgaagaaaaaagagaagaatcaaatagaaacaataaaaaatgataaaggggatatcaccactgaacccacagaaatacaaacaagc

SEQ ID NO: 4208 - DNA, 120 bp, synthetic construct
  source 1..120: mol_type = other DNA
cccatatctagaaagccccattgatcagcccaataggttaagttgataagcaacttctgcaaagtctcaggatacaaagtcagcgtgcaaaaaccactagcattcctatacaccaacaat

SEQ ID NO: 4209 - DNA, 120 bp, synthetic construct
  source 1..120: mol_type = other DNA
ttgcagtgagccgagatcgcgccactgcactccagcctgggcgacagagcgagactctgtctcaaaaaaaaaaaaaaaaaaaaaaaaaaaagacttacatataaaacccaaaactataaa

SEQ ID NO: 4210 - DNA, 120 bp, synthetic construct
  source 1..120: mol_type = other DNA
cctcaaagacatagaaccagaaatactatttgacccaacaatcccatttttgggtatatgcccaaaggaatatagatcattctgttataaagatacatgcaggtgtatgttcactgcagc

SEQ ID NO: 4211 - DNA, 120 bp, synthetic construct
  source 1..120: mol_type = other DNA
cgagaataaaatcagtggaaaaaacttatagacgatatgaagaaaaatggtcatagttctatttcataagagggtttggagaagatgacaacttccaaatttagtaaaaaagatgtctca

SEQ ID NO: 4212 - DNA, 120 bp, synthetic construct
  source 1..120: mol_type = other DNA
agttgagagagacaaacagaaggcaaattataaaaagaacctccgtgatgacttttcaaaaggaggtaatgagcacagaccactttgtcaaaatgtacccacttatggctaaagttcgta

SEQ ID NO: 4213 - DNA, 120 bp, synthetic construct
  source 1..120: mol_type = other DNA
tcttggcactcagtatattgcctactactgcaccttgatgagttttcaaataagagtaatgggtatgctctaatttatgcaatatatctggtcctgtgaaaactgaatgcaattttgcaa

SEQ ID NO: 4214 - DNA, 120 bp, synthetic construct
  source 1..120: mol_type = other DNA
agaagcagcaggaagaagagatgaaaacatcactagtgcccctaaaccattcattttcctacgcagaaattcaaagacgttagagatacattcccggcttcataaagagaatgagaattc

SEQ ID NO: 4215 - DNA, 120 bp, synthetic construct
  source 1..120: mol_type = other DNA
ggcattcagacagtagacagacaaatgccctaagcaaggggaagcatctttctgcttctgcctgatgtagcttttaattgttctttcctaaaatgcatgacatttgctgttaatctttag

SEQ ID NO: 4216 - DNA, 120 bp, synthetic construct
  source 1..120: mol_type = other DNA
aatagtgccaggcacagtgtttacgaagtgccagctaagtgtaagctgcaatgatttgatggtgaatttcaccaaattctcactgttaataagttctttttctgatcagggaaggataca

SEQ ID NO: 4217 - DNA, 120 bp, synthetic construct
  source 1..120: mol_type = other DNA
tgcatgagagggagattaaatatggactaaaactgggcactgatgcagatcctcaaaaggttgaacaggaaagcaaaagcaatggactatgaacaaagaattccagccaaataaaccaac

SEQ ID NO: 4218 - DNA, 120 bp, synthetic construct
  source 1..120: mol_type = other DNA
attccagacttttatgttcacttgggtgtctaatgggtaactcatatttatcatgcctaacagtaagctttggttcttgcatcccaacactggtcctcagacaaccccattttatgagtt

SEQ ID NO: 4219 - DNA, 120 bp, synthetic construct
  source 1..120: mol_type = other DNA
tcaggtcgtggaagggtttttatgccaggacagatcctttatctctgaggttaggaggagttgttgaaagatttcaagtggaagagtgatagaatcagatttgaaactaaaggaagaatg

SEQ ID NO: 4220 - DNA, 120 bp, synthetic construct
  source 1..120: mol_type = other DNA
taaagagtagcccagataatccccattttggtgatgccatcctctgagatggtaaactcaggaagagaagcaacattgatcattgatatgaagtttatacggagatgtctaggatttgaa

SEQ ID NO: 4221 - DNA, 120 bp, synthetic construct
  source 1..120: mol_type = other DNA
gccgtaagtagaaaataaagtaacaggaaagttttgtggctataattccggctaaattccagcatcagtttttataatcctgtaacagtgacacagaatgcctgtaccatgggacagtac

SEQ ID NO: 4222 - DNA, 120 bp, synthetic construct
  source 1..120: mol_type = other DNA
tatcctctgtgattattgggtatgattaatttatttgttacacatagggcagtagccacaacaaatttaaatgttaagcatagaaacagatattccaaatggatacattttgtaatccat

SEQ ID NO: 4223 - DNA, 120 bp, synthetic construct
  source 1..120: mol_type = other DNA
aatctttgcagaataggcttcagacattttttctgggggaggcagcgaaggatttctgatctgtgggatactcattgctttgaatacctacggggaaatcaattgtcatggttaaaattt

SEQ ID NO: 4224 - DNA, 120 bp, synthetic construct
  source 1..120: mol_type = other DNA
gccaacctagccttgagtcaactcagccctggatttaaatgacagtgatcagtcctcactgttatctatgtaccaaacgatagaatgcactttctgtgaataataagtcaaccacagttt

SEQ ID NO: 4225 - DNA, 120 bp, synthetic construct
  source 1..120: mol_type = other DNA
atgtttgaatactgtgctttgcaaacatactgatttgcttgaaatgccaccttccttttctttcttatttctatgtttcatgagagacagcagaggacagtgcttaagggcccaaggttt

SEQ ID NO: 4226 - DNA, 120 bp, synthetic construct
  source 1..120: mol_type = other DNA
aagtggccaatgaataaatccatattataggtaagttatttatgctatccaatggattggctcacacagttgcttgcatttaataggtcaaagcagtaactttctctcctggaaacccag

SEQ ID NO: 4227 - DNA, 120 bp, synthetic construct
  source 1..120: mol_type = other DNA
gaagttacagtgtcataaccaaatggaatataatttgtgctcagcattcactcataagcaagaaataggttagttctgaaacgcctagcatatctgaacaaattctagctaatggcatgc

SEQ ID NO: 4228 - DNA, 120 bp, synthetic construct
  source 1..120: mol_type = other DNA
ggaaactgcctgcccatatagcaaatgttatctacttctcatttcacctagtgttcaaattccatgagacagaatgtatctaaactcatagtgtccaagacggaatccactagccacatt

SEQ ID NO: 4229 - DNA, 120 bp, synthetic construct
  source 1..120: mol_type = other DNA
ttggctctttcggtgagaaagacccctctttttttcgttaaagcaaatgtcagttgtccatcaactgactaatattctatgatttaatttttaagttgaagggtcaactgccgaaacaat

SEQ ID NO: 4230 - DNA, 120 bp, synthetic construct
  source 1..120: mol_type = other DNA
ccaagtctttgctattgtgaatagtgccgcaataaacatacgtgtgcatgtgtctttatagcagcatgatttataatcctttgggtatatacccagtaatgggatggctgggtcaaatgg

SEQ ID NO: 4231 - DNA, 120 bp, synthetic construct
  source 1..120: mol_type = other DNA
aatagcatcataggactacagcatcatacacaatagtttctttcactgtcctaaaaatcttcttaatctccatatgcatccctctctcaccttctccccagcaatcactggtctttttag

SEQ ID NO: 4232 - DNA, 120 bp, synthetic construct
  source 1..120: mol_type = other DNA
tgttgtagcaaactgagcagactaagcattctaatagtatagtggtatcccgttgttgtttcatgttgcatttccctgatgatacatatgaggcatctattcagatgcttattttccatc

SEQ ID NO: 4233 - DNA, 120 bp, synthetic construct
  source 1..120: mol_type = other DNA
ttaattaatttttaatgggtgtaaggtttgtttctagattcacttttttacatatggaagtagggtggtataaatatcattcgttgaaaggactatcccttctccattatattgcctttg

SEQ ID NO: 4234 - DNA, 120 bp, synthetic construct
  source 1..120: mol_type = other DNA
ctccataattttcacattactttgaagaaagggagagattatattgatatttaaaatggaaagattgcaatgcagagaggagccacaggattttcccccaagtctcctcaccttctggag

SEQ ID NO: 4235 - DNA, 120 bp, synthetic construct
  source 1..120: mol_type = other DNA
atttccttttcaatttggtaggtattgtttaggtacctcctatgtcctagacaccagtatgaaaaaaaacatagactctccagtaactagctccctggataatagagcactcacatgtcc

SEQ ID NO: 4236 - DNA, 120 bp, synthetic construct
  source 1..120: mol_type = other DNA
cagagaggagggaagaaacaagctaaaataaacagatgggtggacagagaaaatattaagcatgaaaacagataacccaggtcctccaggaaaaagggaagtaggaaaaatggtatgtca

SEQ ID NO: 4237 - DNA, 120 bp, synthetic construct
  source 1..120: mol_type = other DNA
gtaagtcagggactataagtcactgttttttagtacatggtcagttttgataaatgttctgcaagtgcatgaaaatgatgcattcgttctatgttaggctcagaaaagtatagatttctt

SEQ ID NO: 4238 - DNA, 120 bp, synthetic construct
  source 1..120: mol_type = other DNA
ctaatagattatctttcctaacatagtttctacctttttgtttctcatttacgttgagtgaattttattctctttcggggcactccccctatggctttgtatcaggtgtgtgtggccttc

SEQ ID NO: 4239 - DNA, 120 bp, synthetic construct
  source 1..120: mol_type = other DNA
tcaagacattattcttttctattaatcactgcattaagagtaaaaggagagacacaaatcaaatcttcaaagatgttacttgtatttgcattccagacagacacattttaccagggtaaa

SEQ ID NO: 4240 - DNA, 120 bp, synthetic construct
  source 1..120: mol_type = other DNA
aactaagccgtatgtgttggtcttacccaacctatttcaatgtagtagcttcatatctaacagaaaaacaaggacttgtgaggtatggtgaccaagtatatttggctagcctagaagatg

SEQ ID NO: 4241 - DNA, 120 bp, synthetic construct
  source 1..120: mol_type = other DNA
cactgggtattcacataagccagtttgcctggggtggtgttagtttactcctgctgtactggactgattattaataatgtcctgatcattatctaacctatctcggtcatttgatcatct

SEQ ID NO: 4242 - DNA, 120 bp, synthetic construct
  source 1..120: mol_type = other DNA
ggaaacaacaaactacacaataaatggaattgagttaactggctttctgtagagaatccagggtgggtgtgttatatccctagatccctccatcaccacacatatgacacaatgtacaaa

SEQ ID NO: 4243 - DNA, 120 bp, synthetic construct
  source 1..120: mol_type = other DNA
aaaaacataaaaaaggaaaatctacagatacctcttttctgaatgagtcacctgatttcatctacaattgcttgtcagttccattctcttttttggcttaaaaccacagaaatttcttac

SEQ ID NO: 4244 - DNA, 120 bp, synthetic construct
  source 1..120: mol_type = other DNA
gtagaagagaactgatttgacatgcagctaattttctatgtaaaatcgttttttttcaaactttaggcaatgggtagaaagatgcattctcatttccttctgcttttccaacaattcatt

SEQ ID NO: 4245 - DNA, 120 bp, synthetic construct
  source 1..120: mol_type = other DNA
aaccacacactgacctagggaatacaggactttctaaaatcaggcaccctaatcggccaacccaaaaaaaaggacaaaaagcttttctcagtagttcccacgaggacatttttaatttat

SEQ ID NO: 4246 - DNA, 120 bp, synthetic construct
  source 1..120: mol_type = other DNA
tattcccaggagctcttctttagaattaacctgtcagaaagcaggaagggaataaccctgatttattactaagagcaaagtgagacttaagcttgaggaatattatgggaagggtcccaa

SEQ ID NO: 4247 - DNA, 120 bp, synthetic construct
  source 1..120: mol_type = other DNA
ctaaactgtgagctccatgagagctgggattttcactactggattgtgccaatgactgctatagtaccggaacatagtggttgcacattaaagattattggacaaattaagaaacataca

SEQ ID NO: 4248 - DNA, 120 bp, synthetic construct
  source 1..120: mol_type = other DNA
gtggcatataaattgcatccacctacacaaagatcagaggttggacataccattccacaagtcagaccaagtgggttgtcagaaaatatcatcttagcagctccataatagttctgcaaa

SEQ ID NO: 4249 - DNA, 120 bp, synthetic construct
  source 1..120: mol_type = other DNA
atttgtaataattttgaaggtctttgaaagcacagacgttgcttccatgaaaagcctcagacataagtacagattcctagtgattacagaatactgatgataacaaaaaggaacaatgac

SEQ ID NO: 4250 - DNA, 120 bp, synthetic construct
  source 1..120: mol_type = other DNA
gcagagacaggattcatactaaagcatactgttcatggctcaatagattacagaatctagttacagtgatcttattcagctatggtccatatgttgatgtaaacacacacacacacatgc

SEQ ID NO: 4251 - DNA, 120 bp, synthetic construct
  source 1..120: mol_type = other DNA
gaaggcctgagaaccagttaagttttagttttagttctagtccaagagtaggggagaaagccaatgtttcatttcaaaggtagtcagacaggaagaattatgtgtttttcagggtagagc

SEQ ID NO: 4252 - DNA, 120 bp, synthetic construct
  source 1..120: mol_type = other DNA
gaagtttgaccctatctcacaccaaacaaaaaaatgaactaaaagtaaatcatagatctgggggtctgagagggaatggacaataactgctaataagtatggaggttttttttagcggtg

SEQ ID NO: 4253 - DNA, 120 bp, synthetic construct
  source 1..120: mol_type = other DNA
ctgaagcccactgatctcttcacttagtaaaagcaactgagcaggtcatcattgttagaaataatctcaaagtcactgtcagtattctttcctcctcttatatgacatcacagaaacact

SEQ ID NO: 4254 - DNA, 120 bp, synthetic construct
  source 1..120: mol_type = other DNA
aaggaaggggaaaggtagggagcccaagagaggttacacaatgatgcctagaaagaggaaagcataggcatgtttcacagaataaagaagcatgattttgaaaatgggttgaaccaatat

SEQ ID NO: 4255 - DNA, 120 bp, synthetic construct
  source 1..120: mol_type = other DNA
cttccttcttccaatgacagttttcacagatggaagcacccttccaagataaactccaatctgctgcatttaaaaaaacacttgggctaaacttcaagaagtttgcatgtgtgagaaggg

SEQ ID NO: 4256 - DNA, 120 bp, synthetic construct
  source 1..120: mol_type = other DNA
cacatacacacacgtacacgagctttgaagtcatcaactgaatttgaattctgcttatactatgcacaagcaatatgactggggaaatgtcatatctctcagcctcggtttcatcacttg

SEQ ID NO: 4257 - DNA, 120 bp, synthetic construct
  source 1..120: mol_type = other DNA
tcccaaattgaggggattacacacgttagtctctgcacctggcctacttatcctttaatattgaaaatgaaaatctctataaaaggcaaaaataagaaagtgctttatagtttttgaatt

SEQ ID NO: 4258 - DNA, 120 bp, synthetic construct
  source 1..120: mol_type = other DNA
ttccattaccatagccaattaccaaatccaggaccacattatggcatacctgaaatattctcagttccccattcccttctaatctctacttagtctacagggctccttaaatgtcacttc

SEQ ID NO: 4259 - DNA, 120 bp, synthetic construct
  source 1..120: mol_type = other DNA
gtgtaatacaaaggcacactgaacaagaaatctagaaaattcaattatactatcaagcagctgtgtcattagctttgctgggtttcaaatttcttttctatacaatgagatgcctagttc

SEQ ID NO: 4260 - DNA, 120 bp, synthetic construct
  source 1..120: mol_type = other DNA
tagtctgaacatggtgctcaatatttattctgtagaactctttcagtttacaaagctagttttacacgcagaaaaaagctaggatactttgaaaataactgtaatgtcaaggagatgctt

SEQ ID NO: 4261 - DNA, 120 bp, synthetic construct
  source 1..120: mol_type = other DNA
aagttctttccttcctgctgagtaacacaggggtttacttttcaacttcaacaatttgatgagagaaaactggtatctcattttttcatttacatcttactgactaatatgcaagcaggc

SEQ ID NO: 4262 - DNA, 120 bp, synthetic construct
  source 1..120: mol_type = other DNA
gtcatgaataggcatgtccaaggactgaaaataacaaggcagtaagtagaccagagaaatcagtgggaatcatcttaaaggcatttgccaaaccatgtaaacaaaggcttctgttttaag

SEQ ID NO: 4263 - DNA, 120 bp, synthetic construct
  source 1..120: mol_type = other DNA
agtggaggcaacagatagcacagacagtatcatcagactcgcagagacttttaatagtaaaattgacagaatatgaaaacgaatattttaagttttaagaaataaaaggcggccaggtgc

SEQ ID NO: 4264 - DNA, 120 bp, synthetic construct
  source 1..120: mol_type = other DNA
caacccataatacataggccaaaattggcaggtcatctgtaatgaaaactggcacgagttcagaattacttatttaaatcacatggcatactcaactcagcaactctgcaggattatggc

SEQ ID NO: 4265 - DNA, 120 bp, synthetic construct
  source 1..120: mol_type = other DNA
gtgggagaaaccccaatcaacttacataatagattatgtatttggacattagtttctaggcactggggagtaactacagttactgagcaaggaagtcagaatttgagcaaagctttagaa

SEQ ID NO: 4266 - DNA, 120 bp, synthetic construct
  source 1..120: mol_type = other DNA
gaaaataaagaatggaagtattggcctaaactccactgaatcacagaagcctaacacaatacaaaacaagtgacatccttttctcaaagaggcgcaaggctcattgagtctggcgattca

SEQ ID NO: 4267 - DNA, 120 bp, synthetic construct
  source 1..120: mol_type = other DNA
cattttagaaaattagtgttaaaccttgtgaaaggattctctgtatctttatgggagacattgttcagcctttgctcatccttaaaggattagacacttgggcgagctctcaatgctctc

SEQ ID NO: 4268 - DNA, 120 bp, synthetic construct
  source 1..120: mol_type = other DNA
gtttctgtgtttcatctttggcactcctcttgggatgcataaatgagaatcatgctggctagtaactgtccctcctctcagagttccttcttgattttaagagaatcatacttatttagg

SEQ ID NO: 4269 - DNA, 120 bp, synthetic construct
  source 1..120: mol_type = other DNA
attccattgaagctgcttcttgggtcaggaaaagctaaaatgtgatgggtctgaaggttatgctaaggagcttaccttaggattacggttacaatgggggaattttaagcaagggataaa

SEQ ID NO: 4270 - DNA, 120 bp, synthetic construct
  source 1..120: mol_type = other DNA
gcccctactgagtccaagttactgacctgggaatccgcattttgaaaagggcctctgaagtgattctagtgttcatagttggaagcacattgttagaacaacattctataattattcatt

SEQ ID NO: 4271 - DNA, 120 bp, synthetic construct
  source 1..120: mol_type = other DNA
tacacttccatgtgtaaagaccttggttcatttccttcatgaaaacaataccagtctccttgtcattcttttgtgagtaagagagccctcttcattgtctgaaccaatttctcagtgcct

SEQ ID NO: 4272 - DNA, 120 bp, synthetic construct
  source 1..120: mol_type = other DNA
ttatcactctgacagctcagtaattacactactgctatagccaggtagtcctaataaaatatcaaccactgcactggaatgcatactggtgagatgttttattaaactttgagcggtggg

SEQ ID NO: 4273 - DNA, 120 bp, synthetic construct
  source 1..120: mol_type = other DNA
cctcttcccaaatatccgtgaggctagacagtttgactccatagtatgacaccaaaaatattatagtgagtaatgaaacaagcggcatttcattcttcacacatctgagaacagatgcct

SEQ ID NO: 4274 - DNA, 120 bp, synthetic construct
  source 1..120: mol_type = other DNA
acacattatttatcttcatccataacagattcctaaaaatttataagactacctctatctccacctcatagatgaggctccagtcatctcccgtaagcataaaagaccagtggccaaggc

SEQ ID NO: 4275 - DNA, 120 bp, synthetic construct
  source 1..120: mol_type = other DNA
aaatacacacatcatgaatacaggtacagacagttataaccaggaatgaaaagagaacagagcccatatgaagaaagtagcgtcagtacttaataatttctgaatctactggggctctca

SEQ ID NO: 4276 - DNA, 120 bp, synthetic construct
  source 1..120: mol_type = other DNA
gggattgagagtatgtacttaaagggattgaggaagatggcaagattcaagaagatcagagtttcctctgtcttgtagtaatgaggaaaatagtgataagccatgtacctaggacaggat

SEQ ID NO: 4277 - DNA, 120 bp, synthetic construct
  source 1..120: mol_type = other DNA
tcagtgcgtatcctattagcgggcacatatataagtgctcatacgcgtttaagaaacatttctcagtcactgtacttcaggaaatcaaacaacaaaaatacatgtcaatctcatcagtgg

SEQ ID NO: 4278 - DNA, 120 bp, synthetic construct
  source 1..120: mol_type = other DNA
gcaaaccaagatattgttccctgctcaccacaactatggtttccttcatattctagacagctgttacatgatgctcaatacacttttgatccttcacagaccttgatgacagtactaaca

SEQ ID NO: 4279 - DNA, 120 bp, synthetic construct
  source 1..120: mol_type = other DNA
gtttgaactgctgggctcaagtatacatgggcttttgttttcaaccaaacaaggattgaaagtgtagtatttgtaggatacaaaatttgtctatatggagggccaactgagggacttgag

SEQ ID NO: 4280 - DNA, 120 bp, synthetic construct
  source 1..120: mol_type = other DNA
acgctgctctctgaactcagtgattttctcaaggcccaccttcccctacctcttccatgaggttaatatcagaaggaaaaaggaatcatattaaacatatttcaaagtaaaggatcaaag

SEQ ID NO: 4281 - DNA, 120 bp, synthetic construct
  source 1..120: mol_type = other DNA
aggttctgtgttctaagttctgtgctggcaaaagggaggagttactggaacctacttagaagaggatgacttaatatactggacacatacttcatggagagggctttcaaaatatatata

SEQ ID NO: 4282 - DNA, 120 bp, synthetic construct
  source 1..120: mol_type = other DNA
gttttaatgcaatcctggtgatctttttaaaatccctgtctgatcacgacattctccttaaggggagaatcttggtacaatattatctctgagcctcggcttctattgcatttccacagc

SEQ ID NO: 4283 - DNA, 120 bp, synthetic construct
  source 1..120: mol_type = other DNA
cttgctctacagaccagcctgtggggatcatcatttcatttctgcaatagttctcataatgatagccagtaatcccagagaacttgagaaagtttcctgaaataacacattaaaaccaag

SEQ ID NO: 4284 - DNA, 120 bp, synthetic construct
  source 1..120: mol_type = other DNA
cacttaactattttctgagattttgctaagtgctggagatagcaggatgaataagttataggttcagccctcaagaatcttcacagtggtggagtcagataaataaatgcccatcctcag

SEQ ID NO: 4285 - DNA, 120 bp, synthetic construct
  source 1..120: mol_type = other DNA
ctctctgcccaaccacatttaattcacccccactgtaaacaaatcatcccttctttcaactgatctctcttcttttatccacactccatacatttgatacccaccacaacacaatatcat

SEQ ID NO: 4286 - DNA, 120 bp, synthetic construct
  source 1..120: mol_type = other DNA
cttatgtgccaccttttcattaagctgtgaaatttctcacctgctccctacttggtatttttttaaggtgaacttttcagaacaaccccacagagaggaaattgctttgcaagctaggaa

SEQ ID NO: 4287 - DNA, 120 bp, synthetic construct
  source 1..120: mol_type = other DNA
gtgagtccagggaggctgatgagggcaaggaaaatgccaggttagtcttgcattttcagcagcagccacaccaggtgttcaacaaatgctttttgaataaataaataataatactaacaa

SEQ ID NO: 4288 - DNA, 120 bp, synthetic construct
  source 1..120: mol_type = other DNA
tgtttccagcttctccaccctgtagttcttggcagtccgactagtaaaattttggaataagtccttaagagagttatttaagttcaattttgagaatcaggcactgaccttcactacagt

SEQ ID NO: 4289 - DNA, 120 bp, synthetic construct
  source 1..120: mol_type = other DNA
ctcaccgactcttaggcaatccaacaaatttatccatatggctgcttctgacctcacaaccatctttgatatttctttttcctgctagccatcaagttacacataacagtggaaaacagc

SEQ ID NO: 4290 - DNA, 120 bp, synthetic construct
  source 1..120: mol_type = other DNA
atcagctgatttcagtatcactggggatcatagaaccttggtggacgactataatgtcaaagtacagagggcacctaaagaacaactgagatacttcagggatcagagaagaaacaaaga

SEQ ID NO: 4291 - DNA, 120 bp, synthetic construct
  source 1..120: mol_type = other DNA
actgataaggtctaagatgctggtaagatggtatctacaatgtcttgaggcttatgtaacatgtaacaccaaggacatttcactctggataacctccaaagtaagacaacttaggagagg

SEQ ID NO: 4292 - DNA, 120 bp, synthetic construct
  source 1..120: mol_type = other DNA
aggaggtactactatcccttaatgacaaaacgagaatatatgaaacaaaatgagcagaaattaaagagaaatggagggtactaaaataagccaagcagaaattctaaagatagaaaatcc

SEQ ID NO: 4293 - DNA, 120 bp, synthetic construct
  source 1..120: mol_type = other DNA
gtagcaggttattgtcatagtcctgccaaggaatgataaagtcatgaacaaatagctgatagaaggaatggaaagagaccaattatttccccctgcttttctctgtaactccattaagtc

SEQ ID NO: 4294 - DNA, 120 bp, synthetic construct
  source 1..120: mol_type = other DNA
tcttctggcaaaagcacacccaatctaccttcattgtgtccatcaaggctgacctatcccttctctgaactcctccatcaagaaaggaaaatgaaaggattttaactattatatccaaca

SEQ ID NO: 4295 - DNA, 120 bp, synthetic construct
  source 1..120: mol_type = other DNA
ccattccctactcagaaattcttgtataattccaaaacacttaaaaggagatctgtatttagattttaactatctattctggtttagtacaaaggtgacattacatctgcactacatgtt

SEQ ID NO: 4296 - DNA, 120 bp, synthetic construct
  source 1..120: mol_type = other DNA
ttagacttgtgagcagtaatacatgcacgttgttctaggccactgggttgggagtggtttgatctacaacaacagctagttgatgaaagactgtgtctacaagtacaataatatgtaaca

SEQ ID NO: 4297 - DNA, 120 bp, synthetic construct
  source 1..120: mol_type = other DNA
tagtcttcccatttggcaaaagatcatgtaaaatgaggcttaaagactatgatcaaattaaggctgtggccgtaaaaccctttgttaacacctctgaaagaattaagtggtgcccaacag

SEQ ID NO: 4298 - DNA, 120 bp, synthetic construct
  source 1..120: mol_type = other DNA
caaatctaccagactactctacaggcagcaaatcccaaatgtgtgaaagagttcagtcaagataagcagaacaacctacacaattcagccctgacaggatgcataagtatactcaagtaa

SEQ ID NO: 4299 - DNA, 120 bp, synthetic construct
  source 1..120: mol_type = other DNA
gggacccaggaaaaacgaactcgtgtcctgaatgtgcccttgccagagtttatttcaacgtgaattgattctaaatacacttttttgcaagcattgcccaacatcattatataggcaaga

SEQ ID NO: 4300 - DNA, 120 bp, synthetic construct
  source 1..120: mol_type = other DNA
gaagttatctttccacttcggaagtaccatttagggtgggaatataaggtggtgaggacatgggaacaaatcagtgaacaaatgaataatcaagatgatttcacctgtgattgtgctgtg

SEQ ID NO: 4301 - DNA, 120 bp, synthetic construct
  source 1..120: mol_type = other DNA
agtgaatgctctgcatgtaaaggagaaaaactgtttggaatgtaaagatattaataactgtagtgactaacactgtacatgagaacaaactgttttcaaactgttttgagtagctagaaa

SEQ ID NO: 4302 - DNA, 120 bp, synthetic construct
  source 1..120: mol_type = other DNA
tttaacatgaacaactcaagagacgatttggggcttttatgctgttaaaagtcccaaatgttcattttatttagaatgatggcattgaagtgctggcacgctttgtggtcagccactccc

SEQ ID NO: 4303 - DNA, 120 bp, synthetic construct
  source 1..120: mol_type = other DNA
gttagcggctgcatcaacttcaatgagctatttcacatttctagtaaaaaatacttctgcctttttaaccagaaattgatctctagtaatatatcctatagagacatgcatatatgtgca

SEQ ID NO: 4304 - DNA, 120 bp, synthetic construct
  source 1..120: mol_type = other DNA
tttattaaaggaaaagttagctatccagcctgttcagttaacaacagcagtattccacctctcatcctatcttctctccacagaaaactgtagagaagccacttgaatttggagaactcc

SEQ ID NO: 4305 - DNA, 120 bp, synthetic construct
  source 1..120: mol_type = other DNA
gcttatttccacaagacatattaggatattagtaaataagtttaattcatatttactaatgatacaggagaagggcagggaagtgctggcagagaagggcattgtccccggtgagggttc

SEQ ID NO: 4306 - DNA, 120 bp, synthetic construct
  source 1..120: mol_type = other DNA
ggccatgcccaacagccacctttaaattgctttgccattttaaggaacacatgaaatcacattctactgagagtttcaagtgtgaaatacgcaataaaaagtatcttctggagagcacac

SEQ ID NO: 4307 - DNA, 120 bp, synthetic construct
  source 1..120: mol_type = other DNA
tggaagtgaataggtgaagccacctaaatttccccccctgctcttggtaacctatctgtcccttttgcctacatatttattggcaggacttttcttaattgctgtagtataataacttga

SEQ ID NO: 4308 - DNA, 120 bp, synthetic construct
  source 1..120: mol_type = other DNA
tatgattggattattttcccaagacgttctctctagtttttctatgcttttcaacatctgcctgcatgtagaagaagaagtagtggagacccaggaaaaagtcctctgttttgcacagac

SEQ ID NO: 4309 - DNA, 120 bp, synthetic construct
  source 1..120: mol_type = other DNA
attctgtggataaaagtgccagaagggaccttacagatgatcaagttcaatgtacaaatgagagactggaaccacagaacttttgacacctattcaagatttcaaagccagctaacccta

SEQ ID NO: 4310 - DNA, 120 bp, synthetic construct
  source 1..120: mol_type = other DNA
tattacctaagaaatagctgctcaattttcctcaaaaaaaatctacagggaattttcatacagagctcaaactagctaaggaaccacttggttcaacaagctctctttctatactgatgg

SEQ ID NO: 4311 - DNA, 120 bp, synthetic construct
  source 1..120: mol_type = other DNA
tccacagtagaaatttccattgcaccatgaaacatgaagtttttatacaggaactgatttattcttctctatggatccagtgattcatgtttgtaatgggttctctgtttccctttttgc

SEQ ID NO: 4312 - DNA, 120 bp, synthetic construct
  source 1..120: mol_type = other DNA
cacagggaagaaatcatggatacttcttgaacatactgcaacagctgtcaactcagaaggaggtatattctaagttctaccaagcaagtagtactctacaaaacctcattctgtcccttc

SEQ ID NO: 4313 - DNA, 120 bp, synthetic construct
  source 1..120: mol_type = other DNA
tcctgagacccaaataaatgtccaggctttccagaggccaaaccagagaaagtttttccaaaactttcaagtgatcacattgatattgatgtgcttattgataattgagttgtactacat

SEQ ID NO: 4314 - DNA, 120 bp, synthetic construct
  source 1..120: mol_type = other DNA
aagcattaccatttctgagatgccccagggaatgttttgatttgctcatccattcttgtatgtctacatatatgcatccattgagcacctactgtataacatgttccatgcatgtttagt

SEQ ID NO: 4315 - DNA, 120 bp, synthetic construct
  source 1..120: mol_type = other DNA
ccccatcacagtgagctcttccctatctgcaggtagaggactaagaattatacatttgctgggggcactgccatgtatactcactttacttcccattttactaaactgtattctaatttt

SEQ ID NO: 4316 - DNA, 120 bp, synthetic construct
  source 1..120: mol_type = other DNA
acaggaataggtattgatcatcctacttaaagtaatacttttatacaagatgacttacaccacagaaaatcagatgtgctttatcgggtttggcaagtagggactgctttcccagggaga

SEQ ID NO: 4317 - DNA, 120 bp, synthetic construct
  source 1..120: mol_type = other DNA
tgagagtgtaggtatctacttagtaaccaagcttccctggcaagaagctctaggggatatatgaagtagatctctagatgaagaggacataaagaacaagagaacacacttaagtctcta

SEQ ID NO: 4318 - DNA, 120 bp, synthetic construct
  source 1..120: mol_type = other DNA
tcaacaggcaatgacactcatccatcaacagtcttcaatgccgtatgtttttatagcagttctccaaacatgaatagaacctaaatatgcagtgagtttcaagcacatcacacaccctgt

SEQ ID NO: 4319 - DNA, 120 bp, synthetic construct
  source 1..120: mol_type = other DNA
ccaccatctatcaaagattatcttattttataccaaaggaccatccattcaatatttatccttctcatcctggaaatgtgctcacacacaagatgagggccctacctgaggagacatttg

SEQ ID NO: 4320 - DNA, 120 bp, synthetic construct
  source 1..120: mol_type = other DNA
ggcagtcatccatggcaaagttcccctgctagtctgtaatacgtgaagaagaagaaagaggtctatttacaagattcaacttaccgttaggcagagaagtagcaaacactttaaagaata

SEQ ID NO: 4321 - DNA, 120 bp, synthetic construct
  source 1..120: mol_type = other DNA
ctcccacatcactgaaatagtttgaatgagctcaagcaagaccaacgaactacccactgagtccagccaattgacacaattgcaaaaaattataagttgttattgcattaggccattgag

SEQ ID NO: 4322 - DNA, 120 bp, synthetic construct
  source 1..120: mol_type = other DNA
aaatagccttgttttttctgtgctttttttctcacctcccacacttccttccaagcccatatgacctcatgctggcctaagttcctttgctacttcataattttctcaaaagcagtattt

SEQ ID NO: 4323 - DNA, 120 bp, synthetic construct
  source 1..120: mol_type = other DNA
aaagcccagaaggattctacaccagacgaccctagagagaactgattttctacagaatttacacatttcaaacaaaaatacaatgttttcatggagggcacagaatagtctgcaacaatg

SEQ ID NO: 4324 - DNA, 120 bp, synthetic construct
  source 1..120: mol_type = other DNA
gtgaaacctattgatgcttttttccccttcatcaggtttttagcatgatatagacacagttgtagtccctgacaaatgcttttgtcaatagcaaaggtacttcgccaaagttctcatctg

SEQ ID NO: 4325 - DNA, 120 bp, synthetic construct
  source 1..120: mol_type = other DNA
tgaaggagtaatttgcatttttggtaacacagaatgtctccagagaagccatgcttaagtctagtaactaaatgtgatggtctggttgtgaatcagctggcctcagatacagttcttttt

SEQ ID NO: 4326 - DNA, 120 bp, synthetic construct
  source 1..120: mol_type = other DNA
ccgcgcctggccgctactgagctctttagtctgcatcagatcttcttaatgctaaatactttacacacatagttttctcacttagtgtttactgcatgccattatcattatctccacttt

SEQ ID NO: 4327 - DNA, 120 bp, synthetic construct
  source 1..120: mol_type = other DNA
aagtccagaaagagacccacaaatatactgacaactggttttcataaaagtgcaaagtcaattccgtggagaaatgagtcttttccacaatggtgttaaaacaattggatgcccatatga

SEQ ID NO: 4328 - DNA, 120 bp, synthetic construct
  source 1..120: mol_type = other DNA
ctcttctgtaaagttactcttttccaactctttacatattatacttttcggaaaaaagtcaccacgcttatttcacacttaaaaagtgggaagccatgcttcacttatttcagggcaggg

SEQ ID NO: 4329 - DNA, 120 bp, synthetic construct
  source 1..120: mol_type = other DNA
ccagtgttgggtaacttcaaaatgggtggcagaaaaatttacatgagaaaataattatttttaatttcctaccctctctaaaaagacatttagcaatgggaggcagtttactacatattc

SEQ ID NO: 4330 - DNA, 120 bp, synthetic construct
  source 1..120: mol_type = other DNA
ggagagagtctgaatcaacaaaagaggaaaatataggaaggaaagggaaagacaaagaaggagggtgagacagagaagagagaacaaacatccaggagtagtgatgtgaattatttgctt

SEQ ID NO: 4331 - DNA, 120 bp, synthetic construct
  source 1..120: mol_type = other DNA
agagaatacactaaaagggaagaacataactacatgacatcataagaagtcctgaattagaagcgtatatttgaaaggtcatgcatcctgagctgccaacagcttaacaaccagaggcag

SEQ ID NO: 4332 - DNA, 120 bp, synthetic construct
  source 1..120: mol_type = other DNA
agaattccctgtgacaatcaagcaaatagtgaaatagtttctgctattatgaatttatcacttactcagtgtatgaccatgggcaaatatcttcacctcaatcctgtgaggcaggtacta

SEQ ID NO: 4333 - DNA, 120 bp, synthetic construct
  source 1..120: mol_type = other DNA
acaaattatgtgatctatcataacctgaaataaacatatgttgctactctgtgatttggtctttatcccagtctgacccatttcttgagactgttacctcaagatgctctcccatggagc

SEQ ID NO: 4334 - DNA, 120 bp, synthetic construct
  source 1..120: mol_type = other DNA
aaactcccactctcccattccccagaataactcattaaaactttcctctttctcttccaatttccaagccagtcctattccattccttcttcctcaccagataacctttctttctacttc

SEQ ID NO: 4335 - DNA, 120 bp, synthetic construct
  source 1..120: mol_type = other DNA
taagcatccttaaaagacaatgcttttatgaaatggctttttcttggggcatatgaggtatatgaggtgttagggattacacttggtgccaaaaaaatgcctttggggtcagataacacc

SEQ ID NO: 4336 - DNA, 120 bp, synthetic construct
  source 1..120: mol_type = other DNA
agcagccaaaactgaccaaaacaccaatttagcttctgttcctactcctcaaatggatacagcttatgtcactaattatggccctgccacgagcttatattttactgagagagatgcatt

SEQ ID NO: 4337 - DNA, 120 bp, synthetic construct
  source 1..120: mol_type = other DNA
tgcagtaggaactttggacttacacaataagaaatatataaggaaccacagagtcagaagcagcttgtactactcaaagcacaattttccttttggggcctcagatctatccctcagata

SEQ ID NO: 4338 - DNA, 120 bp, synthetic construct
  source 1..120: mol_type = other DNA
cagttacatttcaaactgccgatttgacgcaccagtcaggaggaatgccacgactcctgctgtgctaaacttactgaaacaaataggaaaaacactttattgtgttttgttcctgtttta

SEQ ID NO: 4339 - DNA, 120 bp, synthetic construct
  source 1..120: mol_type = other DNA
cacccaagtatagcatactcaatgatacagaactctctccagagaaaagagggaattaaagaaattagaagataacaggttgcatattctagctgtaaaaacagacacttcaggataggt

SEQ ID NO: 4340 - DNA, 120 bp, synthetic construct
  source 1..120: mol_type = other DNA
gcttatattcaatcaatccatgactttgattaccaaaacaatgtgctgaggtagacacagaaaggaatttcaccttctaggcataatgtagtaagtcacaggaggccagtgaatgttctc

SEQ ID NO: 4341 - DNA, 120 bp, synthetic construct
  source 1..120: mol_type = other DNA
cacagcaaaattcaaaggaatgcagagttcccatatttctgctacccccacacaagcaaaaactccctcaccatcaacattctgaatcagagtactacacttattacaatgatgaactaa

SEQ ID NO: 4342 - DNA, 120 bp, synthetic construct
  source 1..120: mol_type = other DNA
ctttggatttgtatctaaaatgttatcaccaaatccaataacatctatattttctatgttatcttctcagaatatagtaggcatgtgttttctatttagttctacacttcattttgagtt

SEQ ID NO: 4343 - DNA, 120 bp, synthetic construct
  source 1..120: mol_type = other DNA
catttatttcttcccaaactgtacacctttattttcttttctttctcatcacattagctagtgctgccagtatgatgccaaaaagcactggtcagaacgaacatccttgccttgttccca

SEQ ID NO: 4344 - DNA, 120 bp, synthetic construct
  source 1..120: mol_type = other DNA
cggtggcttggactgaagtggtagtcttagaggctgtcagtcttttaatattttggatatatttttaaaggagagtcaacaatagtttccgattgactgagtgtagaatacgagggatgg

SEQ ID NO: 4345 - DNA, 120 bp, synthetic construct
  source 1..120: mol_type = other DNA
atattgtcaaataaacctgcaaagaaacattctactaatgtacactctcaccaatacagttccctatccatccagttacaccagagacctgactgttaattctcttctcccatccttcac

SEQ ID NO: 4346 - DNA, 120 bp, synthetic construct
  source 1..120: mol_type = other DNA
catctccacatcaaattgggttcatttttgtttaattcctcactgctacatggagctctcagagactaaggtatagtaccagcttccaaaacttcaaggctgctgtagacattttgcttt

SEQ ID NO: 4347 - DNA, 120 bp, synthetic construct
  source 1..120: mol_type = other DNA
ttgtgtggttatttgatcagtgccacctgcctgcccgttatccaattttcatgaggataaagctcatgaaaatttgctcataactgtatctccagtttctacttgtactttgtatatgta

SEQ ID NO: 4348 - DNA, 120 bp, synthetic construct
  source 1..120: mol_type = other DNA
aaagcaggaattgagggctgttcattcttataccttagcacccagccttgtgcctggtatttgacaggcctcataaattaactgaatttaatgatcaagaacagaaaaagatttgcctca

SEQ ID NO: 4349 - DNA, 120 bp, synthetic construct
  source 1..120: mol_type = other DNA
cttctattccccagccaaaataatgtcccttaaagtgggacagagctataagcctgaagttagaaaacatactaaattaaactaaatttcctagaccccttgggaaacattaggaagact

SEQ ID NO: 4350 - DNA, 120 bp, synthetic construct
  source 1..120: mol_type = other DNA
tcagatgagaggtaaggagggtagcaggggagaaacaaaactggacagattccaaggatatagctttaacaggaatttttatacaactttcttactgattagatgcgcatgtgagagaga

SEQ ID NO: 4351 - DNA, 120 bp, synthetic construct
  source 1..120: mol_type = other DNA
gtaacttaagcctaggaggaaaaatgtttcaagaaaggatagtcaattgaagcaaatgctgcagaccagtcaagtacaaattacagatttggcaacacagagcactctcactgaacagac

SEQ ID NO: 4352 - DNA, 120 bp, synthetic construct
  source 1..120: mol_type = other DNA
cagtggcactagtacctatgtctcatgtttgttgcatattggtgatttcacaagctagattgtctgtttaattcctaatcacactaattacttgaaagagtaatccaggaaatgtgactt

SEQ ID NO: 4353 - DNA, 120 bp, synthetic construct
  source 1..120: mol_type = other DNA
acagccacacctatgcattcacatatggtctacagatgcctttgtacaacatcagcacaattgaatagttgtgacagaaattatgtagcccagaaagctaaaaatacatgctatctggcc

SEQ ID NO: 4354 - DNA, 120 bp, synthetic construct
  source 1..120: mol_type = other DNA
agattggaaactgagtgtcaaatcttgctttcactcactcctaaagtgaatgaatggaagtaatattcctaatttacatggcaaacagataataccaaatgtgtgtatccgtgtgtgtgc

SEQ ID NO: 4355 - DNA, 120 bp, synthetic construct
  source 1..120: mol_type = other DNA
aaagataacatgttctctgtgcatagaagacaagagaatactcttctctgctgatttggggagtagggctttcaggaggttcctgctgatctatttagtgatagaaaacttggaaaaaca

SEQ ID NO: 4356 - DNA, 120 bp, synthetic construct
  source 1..120: mol_type = other DNA
cccttaggtcagatggtagtcaacaccagtactactgaatactaacagaggagtgaaattaaagacatacattaggctaatacacacagacgggacatacctgaaaagctgaaaaactac

SEQ ID NO: 4357 - DNA, 120 bp, synthetic construct
  source 1..120: mol_type = other DNA
ctgctttgtaactgatgaactgaacaaagctcagaaatggtgtgagttttgtttcaatagtttctccagggattcatcattgatgaatttgttctcaccagaaaggctaaatcctactca

SEQ ID NO: 4358 - DNA, 120 bp, synthetic construct
  source 1..120: mol_type = other DNA
gtggccccatccttccctttactgttcaggatttatcacaggggctaaaataggtacagaatatgatagtaaagaaatcaaatccctttggcatgattacagagttgaatcaaccaagat

SEQ ID NO: 4359 - DNA, 120 bp, synthetic construct
  source 1..120: mol_type = other DNA
aagtctcttaatacttagtgacacaatcctttccttaaatgcagcagtaattttcaatcctctgagaatgtgagaatggctgtctcaccattccatctctagccatctgtgagaatggct

SEQ ID NO: 4360 - DNA, 120 bp, synthetic construct
  source 1..120: mol_type = other DNA
tggaatcaaagcttagtgatttcttcacctacttgttagcgtatcatctcttcccccatctcaatctcaaaagtcacttctatattccactggactttgactgtttcatttatttccctt

SEQ ID NO: 4361 - DNA, 120 bp, synthetic construct
  source 1..120: mol_type = other DNA
tctccattgttgagaactctgttaagtgagaggcagtcaagtgtcatattagcaacacaaaaacttccctttagggcagcacagaacaaaccacagccactaaccacatataagtattta

SEQ ID NO: 4362 - DNA, 120 bp, synthetic construct
  source 1..120: mol_type = other DNA
aagaatcctctcttttctgttctaagctcatagaaatagtaaaacctaaataaataaggaggtacccaagatggtgaaaggccccccaacactgcagccacaataggacaatcttcagat

SEQ ID NO: 4363 - DNA, 120 bp, synthetic construct
  source 1..120: mol_type = other DNA
tccagactactgctttgtctcatagaatgggtggttggcaagttattccaggcaggtaatacttgtttttatcatcagttcatctctagttttttaaaaaacaggacatcctggtatgtt

SEQ ID NO: 4364 - DNA, 120 bp, synthetic construct
  source 1..120: mol_type = other DNA
ggaaggttactaaatgagagcagcttctaaactaaagtatatggtaactgtgtgctagcaataacaaaattgtatctaaactacctttctaggaagctcttaggtttatcctttctctca

SEQ ID NO: 4365 - DNA, 120 bp, synthetic construct
  source 1..120: mol_type = other DNA
ttctcggagagctcctcgctcaccaagagtcgtgtgcttgatgtcatcaaaattattctccagcttctcacaattctgcaacatatttaaaaattgcattaattctctaagatcctgaga

SEQ ID NO: 4366 - DNA, 120 bp, synthetic construct
  source 1..120: mol_type = other DNA
caaagttataaatgttgttgattgagaccattaagaaaaaatacacataattttttgtttgtttctttttggccctgaaattcctcatcagcttcctcctctttgccaatcctactgcaa

SEQ ID NO: 4367 - DNA, 120 bp, synthetic construct
  source 1..120: mol_type = other DNA
aaggtccattcctagcataaacagcagggttggaagattacttgactatctagtttttctagccacagagacaggagataaacacattcttggattaaaataagagacagaagcctgggc

SEQ ID NO: 4368 - DNA, 120 bp, synthetic construct
  source 1..120: mol_type = other DNA
agtaatccaggtaaagttcctaactcaccctaatttcaatctctgctcagcatgattcaaggtagcacaggagatagagatgagaagtatcttttctgttctgtagtttctgaattcagt

SEQ ID NO: 4369 - DNA, 120 bp, synthetic construct
  source 1..120: mol_type = other DNA
cgtttaccaccaataacacttctctaacattaaagacaactgcaggtaaaattgagccagcggcctccaatcaaaatctgttctcagcccactttatatgaacatggatctgagaaaaac

SEQ ID NO: 4370 - DNA, 120 bp, synthetic construct
  source 1..120: mol_type = other DNA
gttctgaataggccttcctctaggtgtcatcaaatttaaatactgagctggatggaaaatagtttactagcagagtcaaatgtagcagaagctcttgcaggattctgtctacatctgtct

SEQ ID NO: 4371 - DNA, 120 bp, synthetic construct
  source 1..120: mol_type = other DNA
ttccagattaagagaaaaaaagggggaaggctaaggtaataaaattggctctagcctcagaccttaccattactgtctacaggctaagtccttaggcaagttaattaactcagtttcctc

SEQ ID NO: 4372 - DNA, 120 bp, synthetic construct
  source 1..120: mol_type = other DNA
cctcacatccattgccatgtattagtgatatatcagcaataattacaaatctcagctggttgaaaacctgcaggatactaaattttgaaggaacctcagagaattatcacaagggaaacc

SEQ ID NO: 4373 - DNA, 120 bp, synthetic construct
  source 1..120: mol_type = other DNA
cagcttacaatcaggccctgtctaggagaatcttatatgagtcacagtgaaatacaatataatgcagtaggagaggtaggagctatgcagagagaaaatttgtttttgagtttcatctct

SEQ ID NO: 4374 - DNA, 120 bp, synthetic construct
  source 1..120: mol_type = other DNA
gtatggctgtgtaatgcagtgcatgatgtactgtaataacaccacccagtgtgtgtaagattaaagttagacaccaggtaaactcacagatgtaaacagtcttttctctagaacatactt

SEQ ID NO: 4375 - DNA, 120 bp, synthetic construct
  source 1..120: mol_type = other DNA
ttttctttggcatgtaatcctctttaattagattccactctctgttgtttcaagactccataaacgggtgtcttatgtaccagctgctaaagcaggagttactgtctaaatgatattcac

SEQ ID NO: 4376 - DNA, 120 bp, synthetic construct
  source 1..120: mol_type = other DNA
tcaactgtaatcaacagagtcagatttttcaagttactcaatattgtgttctttccaattgtgtgtttcctcggagtagaaacagtcatgtaacttaaaaataaaagaacttggccgggc

SEQ ID NO: 4377 - DNA, 120 bp, synthetic construct
  source 1..120: mol_type = other DNA
tgctcacacaacacgttttatgttgcagctttttgtgtggggtatgtgtgtgtacttcttgtttctcagtggggtctacttacttaaaaacatcagtcagcaattctttgtgtgtgtgtg

SEQ ID NO: 4378 - DNA, 120 bp, synthetic construct
  source 1..120: mol_type = other DNA
aacaccctctcccttaatcaacgaaataggagtaattttttaagcccagtgctgtaatattttggttgaatctgctttgggccaaagtgaagcatccaagcggaaaatggggttgttatt

SEQ ID NO: 4379 - DNA, 120 bp, synthetic construct
  source 1..120: mol_type = other DNA
tattttaatctctgtgcctactgcactgccttatcatcattagcttatgtgtccatctgcccagcttgagatcctagacaggtaactttgatccagcacataataggtgctgaatataat

SEQ ID NO: 4380 - DNA, 120 bp, synthetic construct
  source 1..120: mol_type = other DNA
caagcagtgaaaaaggaaactgatggcatctctccccacatgactgtatgcaatcttcaatgctatgacagctcaagaatgataatcgcctcattgctgaaatgaatatctgacataagt

SEQ ID NO: 4381 - DNA, 120 bp, synthetic construct
  source 1..120: mol_type = other DNA
gactagttctacaaagttatcagccctctattcactgacacattgctgaaatcattaaactggaaggggctttaagaatgcaataaacgtttgttaaggtgaattgacactagtgcctat

SEQ ID NO: 4382 - DNA, 120 bp, synthetic construct
  source 1..120: mol_type = other DNA
cttaacttcccttagcataatctgattgtctggcccaaagccatcatctatggagccttctgaacaatccccagtggacattacaatattgactgtgtgagaaattttattttcctagac

SEQ ID NO: 4383 - DNA, 120 bp, synthetic construct
  source 1..120: mol_type = other DNA
ctgcaaagaccctaaaagagagtcagtatgcctaaaatatgataataaggtacataatggtagaaggaaaaataggagacaggtttcagatcacagagaatcttgccaaaccatggtgat

SEQ ID NO: 4384 - DNA, 120 bp, synthetic construct
  source 1..120: mol_type = other DNA
gacctgcctacagaaagaagctacccactccaggtctcctttctgctgagagctggacactcattaggacgacctgcctgtggaaagctgctaaccactatgggtctctcgagtactgtt

SEQ ID NO: 4385 - DNA, 120 bp, synthetic construct
  source 1..120: mol_type = other DNA
cacctagttggtgtcctcagagaactggagaattacttggggtgggaaaaccccacacatctggtattagaagtgaagtactgagattggtatgaatataaagaagaaacaatatttgtt

SEQ ID NO: 4386 - DNA, 120 bp, synthetic construct
  source 1..120: mol_type = other DNA
gtagaacacatttcaaacacaggcatattctaacaaaataacagaaggtattgtcaggcagggaataaaggcatgctaattttatctgcttaaatgaagggactcaatggagcctgactc

SEQ ID NO: 4387 - DNA, 120 bp, synthetic construct
  source 1..120: mol_type = other DNA
taagcagaatctccctctgcatggcaccattaaccagcatcttgagtattacacttgttttagagaagctcaaataaagaacaaaggttttcagaggaaaacaatgaagaaaggtttcgg

SEQ ID NO: 4388 - DNA, 120 bp, synthetic construct
  source 1..120: mol_type = other DNA
taatttgtaaacacttcaacagccctgtaaaagagccatttctacattcatttttttttttttcgccagctgagaaaacggaagcccggagcttaaatgacttgcctaggtttcctgagt

SEQ ID NO: 4389 - DNA, 120 bp, synthetic construct
  source 1..120: mol_type = other DNA
cattctccacagctaaaattgcacaagctgagctgtctaagggaaatgagtcatctgtttctcaagttataagggaatcttacagaatattttgagtttgaatagctaacaccgcaggca

SEQ ID NO: 4390 - DNA, 120 bp, synthetic construct
  source 1..120: mol_type = other DNA
ctctaggttgggatttaggaaatgtggtattgatggcatgttttaggagaaaccagaacaaagagatggtccaagcattatgcatggagaaatgtagaattttgaaggagagggggaata

SEQ ID NO: 4391 - DNA, 120 bp, synthetic construct
  source 1..120: mol_type = other DNA
attttacagaaagtttctgtcccgaagtccaaatatgatatttaaccctagtcctccaaactcagcaaataccaggccaacttttgaaatttctaccttggctaatggtgacagtagcaa

SEQ ID NO: 4392 - DNA, 120 bp, synthetic construct
  source 1..120: mol_type = other DNA
ggaaactgaggactagacagttgaagtaacctcctcaacatcacagagctggtagttttccaaaattcagttttcccatctttaaactgaagaataaaacataataacatggaatctatt

SEQ ID NO: 4393 - DNA, 120 bp, synthetic construct
  source 1..120: mol_type = other DNA
tgccaaatgtgggcttacttgataaacatcagtctttatgatattgctgagcacaaccttaaggctgattttgttcctaaccaagtgtgatacatattacactacatgtggcctagagtc

SEQ ID NO: 4394 - DNA, 120 bp, synthetic construct
  source 1..120: mol_type = other DNA
aacatataatacatttatgtaatacatggttatagttcaaagagccatccactacactgggaagaagctcaggtgccccaacactcctaccatgggagcagagagagttctattcagtat

SEQ ID NO: 4395 - DNA, 120 bp, synthetic construct
  source 1..120: mol_type = other DNA
cctaagcccaggcacaggtccctgcagatttctggatgcaagtagggacaaagaacagactactggagtttttgtcactttagaagaaaaaacatatttatgagatttgtctcattcaaa

SEQ ID NO: 4396 - DNA, 120 bp, synthetic construct
  source 1..120: mol_type = other DNA
catgtttcaaaaaatatcctaatatccttgatattccaagtgaaacatttagcagagacttctgaggaccaccagggcacactctggctaaccagatctctgatgaaggaggagtatcaa

SEQ ID NO: 4397 - DNA, 120 bp, synthetic construct
  source 1..120: mol_type = other DNA
tcccctgacaacaagaagggtctcaataccagcactggattttgtcttcagaccccatagcctgaaaaatagaagtgagtcaatttcctagctatcatggagtatatgtcttaaaagaca

SEQ ID NO: 4398 - DNA, 120 bp, synthetic construct
  source 1..120: mol_type = other DNA
agtacatctgtttttcctgtttgactagtcccattaacattggctgtaatcagaattttgtcagggaaatcttcagttaagatgcttgaaactcaaactttatttctgtataccaaagac

SEQ ID NO: 4399 - DNA, 120 bp, synthetic construct
  source 1..120: mol_type = other DNA
ttggtctcttgaacatggtgctatcactactgaagtcaacaggctccagcaagacaagcaacgacaaggattcctttctctaagtctctttagtatactagtatgcaaaacctttctttt

SEQ ID NO: 4400 - DNA, 120 bp, synthetic construct
  source 1..120: mol_type = other DNA
attccagtaaatatgaggcacctgagtactggacaaatctttaagttaaaaataaaatataaccagtgacattctcagtgcacaacgacattccatacaaatgacaaaccagaaactgaa

SEQ ID NO: 4401 - DNA, 120 bp, synthetic construct
  source 1..120: mol_type = other DNA
gatgatggcggtagcaaaaagggagaatcatccagaatgttggagatgggattctggtagtggtaggaaagtgaactagatgagttctaaggtcatcattattttcaaagctgttatagt

SEQ ID NO: 4402 - DNA, 120 bp, synthetic construct
  source 1..120: mol_type = other DNA
tggacataagacatggagttatggcacacaagagaaacatgcaaagccctaagcataaaacgatgttcaaactcattagattcatcccttactagtaatttgggaaaagtcaaattatga

SEQ ID NO: 4403 - DNA, 120 bp, synthetic construct
  source 1..120: mol_type = other DNA
gaaaagccacaataatatactacccaagtatgacaaaagatacctctttggagactatccaacctaaattccctgaccagtcaacaactcttacttctccctattttatattcaccagta

SEQ ID NO: 4404 - DNA, 120 bp, synthetic construct
  source 1..120: mol_type = other DNA
tattaatcattaggataaaatgtgatatggtatgcattgagggcatccagcagaggaacatgacctaggccacagattcagaggttaccctcccctttctttgataaagaaatgccatat

SEQ ID NO: 4405 - DNA, 120 bp, synthetic construct
  source 1..120: mol_type = other DNA
tttgaatggtgattgttttcaggcctgagtcaaagagatgactctaggccactaaggagtggaattgatttggaagaaaggaagttacatctgaaagaagtctagtaggcatctctctct

SEQ ID NO: 4406 - DNA, 120 bp, synthetic construct
  source 1..120: mol_type = other DNA
gggtattcattcatttatgtgatggaaaagttaccatagactttccatctacattttcttattgcatcttgttctgttccttcaagccatcctccttcaccctctgattaaccacacagt

SEQ ID NO: 4407 - DNA, 120 bp, synthetic construct
  source 1..120: mol_type = other DNA
agtagcatagtttagtctctggaatctttgtttcattcatttaagtagccacgaggtgccaggtattgttgtagaccctgaagttacagttgtgaacaaaactgactaagctactgctct

SEQ ID NO: 4408 - DNA, 120 bp, synthetic construct
  source 1..120: mol_type = other DNA
aaccaaccgttcagtctgcagtgaacactcctctacatcttctgtcttatgtactcaaaaaaggaagaaccatatgaataattgtgggttatgccactgttgatacgagaagaaaactgc

SEQ ID NO: 4409 - DNA, 120 bp, synthetic construct
  source 1..120: mol_type = other DNA
gttgtcagaatctaaatggagtcaacggcattaaataccttgacaaatggggccacagtaggccataaaggaagggttctcacatacactcttgataacatactatcttgataacaagaa

SEQ ID NO: 4410 - DNA, 120 bp, synthetic construct
  source 1..120: mol_type = other DNA
taataaacaaaggaaacaatccaaagaggctgtatgtgagggggtcagaatgtcaccgcaaaatatgtcaccttggtataaggaccattttgagctgaaagcacttaagaaacaacaaac

SEQ ID NO: 4411 - DNA, 120 bp, synthetic construct
  source 1..120: mol_type = other DNA
aacttcaataacggagagctatgacagcagagttccacatttttgttcatattcattttaagtgcatgactgcaggaaggcgtttctcatgctatttctctgtggtccctgatattcaaa

SEQ ID NO: 4412 - DNA, 120 bp, synthetic construct
  source 1..120: mol_type = other DNA
gtcattcttcctgacagacttctatttccacctctttgttggtcatctttctgcagatgacccctcctttatcaccatcccctgctcaatcagattcttgacttttaaaattacatagga

SEQ ID NO: 4413 - DNA, 120 bp, synthetic construct
  source 1..120: mol_type = other DNA
tataagaacaacttcttctcccaagagaaatttccttgtcagacacggagaataaatatttcactcttgggccattctaagagagggaacacatttcaggttagcagttagtagccctgc

SEQ ID NO: 4414 - DNA, 120 bp, synthetic construct
  source 1..120: mol_type = other DNA
aactctctactgacaactgagctctttgggttccactgcctgccctcataaaaacccaacctcaaagataaggaagctgtgaagggaaaatttttcttcttttgcaaataaagctaattg

SEQ ID NO: 4415 - DNA, 120 bp, synthetic construct
  source 1..120: mol_type = other DNA
gttaacacctgtgcaaatgcccacttagctgtctgggcaaaaaccgttttgtccctttcccatgacttatcacagtggctggaacatgttagatcttccattaatatttagtaattaata

SEQ ID NO: 4416 - DNA, 120 bp, synthetic construct
  source 1..120: mol_type = other DNA
tgttacagagtacagcactgtgtcacacagctaaatcctttgttagatgcactccctacatcatagaacttcagaaaaaatgagtgaaatgtatttgcttctcagcacagagatggaaag

SEQ ID NO: 4417 - DNA, 120 bp, synthetic construct
  source 1..120: mol_type = other DNA
aaactatggagtgaatgtagctatcaagagaggcataattgagattttccactgttcccatcttgaaatctacaactagactctaaactttctacccaaaatgcctttgcataagcagcc

SEQ ID NO: 4418 - DNA, 120 bp, synthetic construct
  source 1..120: mol_type = other DNA
ataggaacttactctgccatctctccccactccaacagccttcatttgagaacttgctggatagagggcaggagatgatcatcattcatgataaattcaaattcaaaatcagtctttatg

SEQ ID NO: 4419 - DNA, 120 bp, synthetic construct
  source 1..120: mol_type = other DNA
atcagctcgcagaaataaggggtgagggggacaagcagggaaaaatgaatactacaagtgacacacaggtttccactctcacagatacttacaatagaattaagttcagttacaagaaaa

SEQ ID NO: 4420 - DNA, 120 bp, synthetic construct
  source 1..120: mol_type = other DNA
actctccccctaggcttttagttatttacatatatcctgatgattcaaaaattctttatctccatcccagaccctttactaatcttcaacttttgcagtgatccacaggcacaagacctc

SEQ ID NO: 4421 - DNA, 120 bp, synthetic construct
  source 1..120: mol_type = other DNA
aattctactaaaagagctctctggcaattgcataggttcagtctctagttctaccattcagttgtggaactgtgaataggtttcttatgcttccatgtgcctcaattccctcatctatga

SEQ ID NO: 4422 - DNA, 120 bp, synthetic construct
  source 1..120: mol_type = other DNA
cgtaaggagcagcattattcaaccacaccgagaataactttcaaccctagcttcatatttcacttttgggaataaaccttactgctctgagaaattcatgaatgtcacagagagtcttca

SEQ ID NO: 4423 - DNA, 120 bp, synthetic construct
  source 1..120: mol_type = other DNA
agggtgttacatgcagaagttaatgaaataccatagagctgctgagaaaacgattagcagccaaatgtgaatttaatatacttcatcttcaagaagcaatgccccatgggaggcatcttg

SEQ ID NO: 4424 - DNA, 120 bp, synthetic construct
  source 1..120: mol_type = other DNA
aagccacctagtctgtggtatcttcttgtagcatccgtaggtataaatagcatccctaggtatagcatcacaggtccaaatgaatattgtcaaagatattgtcaaactgcttttataaat

SEQ ID NO: 4425 - DNA, 120 bp, synthetic construct
  source 1..120: mol_type = other DNA
attaaactgcgtcatggcttgtaagtggcctattccttgaacaatctgaatcacactggtttccttttagagacctctactagaagcatcatgatagaaaacaaagctcccaaaactgga

SEQ ID NO: 4426 - DNA, 120 bp, synthetic construct
  source 1..120: mol_type = other DNA
gcagttcttatcaggatttcttttccaatgtttcttgtctaatttcttggccgaagtggaacacagagttgcatgagtttgtgttcgaggatttaaagccaggatactctaaagacagca

SEQ ID NO: 4427 - DNA, 120 bp, synthetic construct
  source 1..120: mol_type = other DNA
ctgaagaaaagcctggagaaaagatctgggagagacacagtgtatttcagtaggtgaagaactttcacatggaagagagatttaatttgttttgtattaacacagaaccaaggctgtgga

SEQ ID NO: 4428 - DNA, 120 bp, synthetic construct
  source 1..120: mol_type = other DNA
gctatgtgcaacagtaatcctctgtccatgatttgttcatgtagtggccaagtaagaatttgaaggggacctgagaatgcaattcctactagatttaaccaaatccaagatcaccttcca

SEQ ID NO: 4429 - DNA, 120 bp, synthetic construct
  source 1..120: mol_type = other DNA
acatgaaaatctgctaaaactggtaaaaggagtgaaggtctatggcatttgaagtataacccacaccacttcagtccagtgtgacagtcattctacctcagatgggtatagctcaaaaca

SEQ ID NO: 4430 - DNA, 120 bp, synthetic construct
  source 1..120: mol_type = other DNA
aaagtatatccagtcgctagtaacaagtcgccctcctctagagggggtttagtgtccggcaagaatagctacattatgtaagatgttcagtcttcaatttaaaaaagtatgagccatgca

SEQ ID NO: 4431 - DNA, 120 bp, synthetic construct
  source 1..120: mol_type = other DNA
agcctcaatgatatgtgatacaccactgagcaaaccaaaatactgtaatgggattacctgaaaaagaaaagacaaagcaggagaaaatacagaagttacactggcttaaaatttgcccga

SEQ ID NO: 4432 - DNA, 120 bp, synthetic construct
  source 1..120: mol_type = other DNA
gtgcctaacaacaaggcccaaaatacaaacaaatttgaaaggaaacaaatctttaaacaatactaattaaagacttcaatactccacattaaacagtggatagaacaactaggcagaaga

SEQ ID NO: 4433 - DNA, 120 bp, synthetic construct
  source 1..120: mol_type = other DNA
tagtggttgctcaggctggcggattagggagaaatgagatggctactataaaaaggataagtgatttctttttgggtgaagaaacctgattatggttatattggcacaactctgaataca

SEQ ID NO: 4434 - DNA, 120 bp, synthetic construct
  source 1..120: mol_type = other DNA
gattttctcagcaacagtccttccagtgccttaggagtacttggatgaaataatttgcttttgaaacccaccttcaaaatgctactgctttcatggctaaatgttgcatagaatgtcaag

SEQ ID NO: 4435 - DNA, 120 bp, synthetic construct
  source 1..120: mol_type = other DNA
cagagtcccctctctggatgaattgagcactttaagaagcccattaaccctttcagatacagggtacattacttatacagggagatttttctctcatcaaagaatttgacttgtttggct

SEQ ID NO: 4436 - DNA, 120 bp, synthetic construct
  source 1..120: mol_type = other DNA
tgtagagtgatttaattaatatctcagaaattcacaaaggtatctttggttcttgaataagctcagaactgatacggcccatctcctgctaggtagggaacagaagaggagagaatgcag

SEQ ID NO: 4437 - DNA, 120 bp, synthetic construct
  source 1..120: mol_type = other DNA
gtcatgggtctctgaacttatcattgccctaagccctgcaatttcaaaggcagactgcctgaaaatacaatatgctttttgcaaattaatatggcagtgtggaagggtcatgaaattcaa

SEQ ID NO: 4438 - DNA, 120 bp, synthetic construct
  source 1..120: mol_type = other DNA
gggacataaacagttcataacagacaaggaaaggattccaccacctgtggaagtatgcaaatactattaatattgggcatcaacttaaagtcacctttagcctaagagttcaaatggtac

SEQ ID NO: 4439 - DNA, 120 bp, synthetic construct
  source 1..120: mol_type = other DNA
aaagaggctaagtgtataccagcatgctaaaattatttaataccagtcaacaaatagagatgctggaaaacaggacttcaagggaaagatgaaagcaggacctgggctaactgagtttaa

SEQ ID NO: 4440 - DNA, 120 bp, synthetic construct
  source 1..120: mol_type = other DNA
aatttaaagtgaaaaagagaaacattcagctacccactgagtcttcactttcctaccactactgcaaatgctcttgtcaagtctcaccgatgatgtgcatgttacccaacattctttgtg

SEQ ID NO: 4441 - DNA, 120 bp, synthetic construct
  source 1..120: mol_type = other DNA
gtttcactgggcttcttggatttacaaattcatttttacaaatattttcttcttctctcctcccactgcttcactctcatctctggggaaattccatttacatgtatatgaggccactcg

SEQ ID NO: 4442 - DNA, 120 bp, synthetic construct
  source 1..120: mol_type = other DNA
ctctccaattgaaggattccaccaggctttgtgtggtttcccccttctgatctgcagcctataaactctctcaagaggataaactagaaaaatattagggtttccttcatttgtttatgt

SEQ ID NO: 4443 - DNA, 120 bp, synthetic construct
  source 1..120: mol_type = other DNA
aaccatgaatacaacaacttctatatcctgagggtatttatagtaaatcaattgtgcctggaggtggtcttggaacccccaatacaaaatgtacatctattccctagtgtcccaccttga

SEQ ID NO: 4444 - DNA, 120 bp, synthetic construct
  source 1..120: mol_type = other DNA
tgaggaataaataaagttctgtcttctttaagccgcttttagcaatttttcccatgttataccccaacacctggtttttacagtgcccaaggtgattctggtggtcaactaggtatggga

SEQ ID NO: 4445 - DNA, 120 bp, synthetic construct
  source 1..120: mol_type = other DNA
cagatatgatctccttcctcagggaatatgtaatcacttttagtgcaatagaattaaacataaacaatcccactcacctgcactttcaccctctgtcttctcttccactactaagagagg

SEQ ID NO: 4446 - DNA, 120 bp, synthetic construct
  source 1..120: mol_type = other DNA
agtatgccaggcaccccttcaagtgtttttcaagtacagatgagaaaactaaatcacaaggagattgagtaacttccccaggaagtaacagagattcttaacccacatattttggcttca

SEQ ID NO: 4447 - DNA, 120 bp, synthetic construct
  source 1..120: mol_type = other DNA
gccacaagggacctctatttacagatgcgcctagtgaagtaaaagaacaatccatattaaagactgagtcaagattagaaccaagtctcctaactctatgacatcaccacactcatacaa

SEQ ID NO: 4448 - DNA, 120 bp, synthetic construct
  source 1..120: mol_type = other DNA
tgggctggcacagaagagaatttgacttaatgggagacttctgtgatggaaattaataagtttgccacttaattacaaacagtgtgggttgtgagcaacattcatactatttacacactt

SEQ ID NO: 4449 - DNA, 120 bp, synthetic construct
  source 1..120: mol_type = other DNA
tttcagtgacaatatcttaatcataatggaagtgtgggagaccagaatataccttcccaaaatatgaagggttattgcactgaaggcagttaagaagaaacacaggagagttctctggcc

SEQ ID NO: 4450 - DNA, 120 bp, synthetic construct
  source 1..120: mol_type = other DNA
tccagtttgcctatttctttttccaaatttcccaacaaataaagattctgtcctgtcagctgccaaagtggccggcaaaggacaaaactggtcatttgacatgatgtagagaagtgattg

SEQ ID NO: 4451 - DNA, 120 bp, synthetic construct
  source 1..120: mol_type = other DNA
caggacagccttccttcacctgtccttggaaaatgatcacctaattcattttctggcccctaaattactggatattgaggtgaaggtgaagggaaactgtaacaaaacttatatgaattt

SEQ ID NO: 4452 - DNA, 120 bp, synthetic construct
  source 1..120: mol_type = other DNA
tttaataaatactgtctcttacaaatgttagttatccccagtctcatttattcctaatatcaaagtatctgaggtcctcccctgcttcctcctccctcccttccttacgttctttgtcct

SEQ ID NO: 4453 - DNA, 120 bp, synthetic construct
  source 1..120: mol_type = other DNA
ccaccacaccctctacccagattcagtgagaatttaacatctaattctctatgtcttcaactccactcaattttttacaccagtcttagtgacttcaacagactcttggctcatttagca

SEQ ID NO: 4454 - DNA, 120 bp, synthetic construct
  source 1..120: mol_type = other DNA
caaaagaatccctttatacaagtaattatcctgtctatgtctttcaactctagtttccccactgcaactcttcccttaatatatgtacctgctctgttatccctctccagctacttccct

SEQ ID NO: 4455 - DNA, 120 bp, synthetic construct
  source 1..120: mol_type = other DNA
ttgccaaggtcaaaactagtaagtggcagagctaggctgtgaacattagcactctaattccagagtctatactcttaaccacaaatctatgctgtccttccactacaatcagactaaata

SEQ ID NO: 4456 - DNA, 120 bp, synthetic construct
  source 1..120: mol_type = other DNA
tgggctactgcaatagcctcctaaccaatctacctgctttctcttttgacttggtataacgtatcctccttatagtagcctgagaagttgtcttaaatagaaactatgacagatgattcc

SEQ ID NO: 4457 - DNA, 120 bp, synthetic construct
  source 1..120: mol_type = other DNA
tctttcagaaaagacagagccttaagcataccaatgtctggagtctgggttgcaagtaaactttagctttaaaatgtagcaaaaatcaagagtcattttggttggcacacccaaggaaga

SEQ ID NO: 4458 - DNA, 120 bp, synthetic construct
  source 1..120: mol_type = other DNA
cccgttctgttacctagaatcagtgttaggaagatgaggcaaacggttaaactggttccatttccattttgctccttctgtctttgcaccccaaaatggtccccttttccttttttaaaa

SEQ ID NO: 4459 - DNA, 120 bp, synthetic construct
  source 1..120: mol_type = other DNA
ttcaccattgccatattttatttcaaaccatccttaaaagactgatcaacagcaaactcactgaagatcagaaaactcttcacagtggctgaatgattcccacaaggtcagagagcaagg

SEQ ID NO: 4460 - DNA, 120 bp, synthetic construct
  source 1..120: mol_type = other DNA
catctctcagtaagatcacactttaccttttcctggtgcaaaataggttatctccaaccaactgtttcctaggagctaaaagagttattcataagcaaatgcagtgtgtttagggatgct

SEQ ID NO: 4461 - DNA, 120 bp, synthetic construct
  source 1..120: mol_type = other DNA
agagttatctcagtagtataattggctccaggatatcagtgaacacccacatgactgatatttgaggccaaaaacaccttctgtcttgatatggaggattatgagcaaatgaagtccaga

SEQ ID NO: 4462 - DNA, 120 bp, synthetic construct
  source 1..120: mol_type = other DNA
ggaggctaccaaattccagcacactttacaattaagcaatcagtcaacaccatttgctatcattaagattaagcagatccaatctaaaaatcaccctccatcaagatccatcattagtca

SEQ ID NO: 4463 - DNA, 120 bp, synthetic construct
  source 1..120: mol_type = other DNA
caaggaatgggccttgtgattgtgactgtggtagcagtacagtaacagatagcaacttggtttggctacaaatatatatcaaaagtactagtattcaaatagttaaaagcttgctgcagc

SEQ ID NO: 4464 - DNA, 120 bp, synthetic construct
  source 1..120: mol_type = other DNA
ttcagagaggctaacttgcccaaacacacagcttaaagttagacctcaatcagaggcagttggtttcagaagccaggctctgaaccacattaatatatctgaaaaaaaacatgatttctc

SEQ ID NO: 4465 - DNA, 120 bp, synthetic construct
  source 1..120: mol_type = other DNA
cactggcatctttctcctcagtagaatgtaagaactgatttcgaagacaactgcagagaaagaaatcagttaagcagataacacaccattctgaaattaaagagccaaaagccacccatc

SEQ ID NO: 4466 - DNA, 120 bp, synthetic construct
  source 1..120: mol_type = other DNA
acagaaacggagtgcaagagggaatcaaaaaccgttgagaggagagaaaaatacagttagtttttctgagggcactgcatttttcatgttctgaatacttcgttccattctctccatgtt

SEQ ID NO: 4467 - DNA, 120 bp, synthetic construct
  source 1..120: mol_type = other DNA
gccttgtgcttaatattacgatatagtaaacatttcccatcccttcagcaaaccatttctccagcatttataagggaagtcaatggattaagcatgttgtacgtgatggagaactgctta

SEQ ID NO: 4468 - DNA, 120 bp, synthetic construct
  source 1..120: mol_type = other DNA
ctaaaacgtgaaactcttttgaaaagttgctcttcgtttttgctctagagcttgctgaggagaagggagagatttcctgtagagttggtcccaatccagaaaacattcacctcgtttttt

SEQ ID NO: 4469 - DNA, 120 bp, synthetic construct
  source 1..120: mol_type = other DNA
tctatgcccaaactctcagaagtcaacctcctaaatagattttgaatcattcatttctccattttgctgcatccaccatggtccaagctactggtattctagcttctattcttacctcat

SEQ ID NO: 4470 - DNA, 120 bp, synthetic construct
  source 1..120: mol_type = other DNA
gggtcaaaataactacttatcttttcatggagtaatgttccaaagtcagatgttcctgcatctccctacaaccacaccttacccacttactctagatcctcttggagatatagagagata

SEQ ID NO: 4471 - DNA, 120 bp, synthetic construct
  source 1..120: mol_type = other DNA
tgatcatgaggtgcattttttccgctgtctgattttcaagggccaaattaattcctacccatattgaccagtaggataatgactaaagatcagttaggcccaaatatttccagcattcct

SEQ ID NO: 4472 - DNA, 120 bp, synthetic construct
  source 1..120: mol_type = other DNA
atttgagcaagttcttcatatccttgccttaaagtatgtattttcccttttggttatctgtagcagatgttatgatgtgcttcacagatcaccacccatcccccaacccattcaaaactg

SEQ ID NO: 4473 - DNA, 120 bp, synthetic construct
  source 1..120: mol_type = other DNA
agcaactagtgggagagtgacccagggtgaagctgcaagataagcatgccatgttttatttagtctttgtttagggttttgaacttcattctataagaaatgggaagccatgaaagtttt

SEQ ID NO: 4474 - DNA, 120 bp, synthetic construct
  source 1..120: mol_type = other DNA
tataggcagggcagttgagcaatacatagctttcttagtctatttggctgccataactaaataccatgaagtggttagcttataaacagacatttactgctcccgattctggaggttggg

SEQ ID NO: 4475 - DNA, 120 bp, synthetic construct
  source 1..120: mol_type = other DNA
tttacaagctccattgcactctgagcagatagaccaatacaaaaaccttttataaatgtgtatgtttgtgcatgcagggtaaaaacctcattactcccacccttgatacatattaggtat

SEQ ID NO: 4476 - DNA, 120 bp, synthetic construct
  source 1..120: mol_type = other DNA
tctacatttatgtgtctgtctcatccaccagacagaactgttcaaaggcaaggactacaccttactaatctttgaatcactcagtttagacagtgtctggatttaagtagatgtgctcta

SEQ ID NO: 4477 - DNA, 120 bp, synthetic construct
  source 1..120: mol_type = other DNA
ctgggggttggtgttgcgggtgctgattactatcactcttccaagtagcacaaatacatttcacaatgtgaactttgataaatgtccaaatggattttaaaactaagcaaattgaaccgc

SEQ ID NO: 4478 - DNA, 120 bp, synthetic construct
  source 1..120: mol_type = other DNA
ctaccccaatattttgaactgaatcctatagaaagatttaaagctacagcgggctctctgttatctagggatggtttttccatttagggataatctgggcccttgtgttactgcttcttt

SEQ ID NO: 4479 - DNA, 120 bp, synthetic construct
  source 1..120: mol_type = other DNA
acaagactaatgggtggcagatcttggattcttgcccaggactccttcactcaataccttctattttacatgtctgccttgaaatagagtaatgtgttccctcacagaattttcctattt

SEQ ID NO: 4480 - DNA, 120 bp, synthetic construct
  source 1..120: mol_type = other DNA
aagtaaagcacacattacttacattggcctacaatgactatacctctgtgtatctgtgatctcatgtcatctccattttactccagcttataccacgtcagccactgtggctttactatt

SEQ ID NO: 4481 - DNA, 120 bp, synthetic construct
  source 1..120: mol_type = other DNA
ttgctataaaaatgttaaggtgtgcaaaaagcataaggtggcattttcccctccttcttattatgcctgtgtaacttccattaatactaataggaggcacagctggtcgtcaacaggaga

SEQ ID NO: 4482 - DNA, 120 bp, synthetic construct
  source 1..120: mol_type = other DNA
tgcattccttctccctctccatgaaacttctcccagttattcctgttactggtagatttctatcattcctgaacttggttggtaccaacgacctgaaattagatataataccagtgcaac

SEQ ID NO: 4483 - DNA, 120 bp, synthetic construct
  source 1..120: mol_type = other DNA
atccagaagatattattatgcttattttacagttcaggagaatgggcctctaggagtttaagttccttgacccaagacactacctagttaggcacattaaagacctagcctgagattctg

SEQ ID NO: 4484 - DNA, 120 bp, synthetic construct
  source 1..120: mol_type = other DNA
aatatgtgtaggctaggttatgctacaataacaaatcactccagaaatttcagaggcttaatgcgacaaaggtgtatgtcttgctcacgttacatatcccatgtgggctggtagaaagct

SEQ ID NO: 4485 - DNA, 120 bp, synthetic construct
  source 1..120: mol_type = other DNA
gatgtaaaacatcagggctcagattcttttctcagagtcccagtagtgactagtttttttcccttgatagggaggataggaagtgtagaaattggctgattgcatattctcccaaatctt

SEQ ID NO: 4486 - DNA, 120 bp, synthetic construct
  source 1..120: mol_type = other DNA
aaaagaggaagttcatcttccacgggagccacagccatcataaaatgttagagtggaatgaccagtgaatgagtggaaaatgcagtggaagagtaaagtttaatagtgacagtgtataat

SEQ ID NO: 4487 - DNA, 120 bp, synthetic construct
  source 1..120: mol_type = other DNA
tcagtggtggtagggaggagtgaccagattggagaataatataaaataagtagagtttgatttgtgctttgaaaaaaaggtagggtttggataggtagtagggacagaggatgggaagtt

SEQ ID NO: 4488 - DNA, 120 bp, synthetic construct
  source 1..120: mol_type = other DNA
tcagttccagtgtatatgtatggtagtgtcagaattgttaagccataaccctgcgggaaacaactttgtcaactatactacattgcttaggtaccatgtcttttgtcactagctttgtgg

SEQ ID NO: 4489 - DNA, 120 bp, synthetic construct
  source 1..120: mol_type = other DNA
ggacattaccgtatgttcttgagtcgggttaagtccatacctgaaaacttctgagacaggtgtctttattgtttcttgactccattttcctatccatatctcttctactcttctagaggt

SEQ ID NO: 4490 - DNA, 120 bp, synthetic construct
  source 1..120: mol_type = other DNA
ctggaacccttggcaaccaccggtctgttcactgaatctatagttttgccctttccaaatgtcatatacattgaactgtaagttatgtagcctttcagactaactgctttcacttactaa

SEQ ID NO: 4491 - DNA, 120 bp, synthetic construct
  source 1..120: mol_type = other DNA
aggtgtcacaatgaccatgtgtgccacaagcatttagtgtctgaggatgaatcaatattgtgcagtgtgtgaaagagtcttgcacaattaagaaatgttctattcctaatgtcaccgaac

SEQ ID NO: 4492 - DNA, 120 bp, synthetic construct
  source 1..120: mol_type = other DNA
ctaaattcattttcccccaacaattaaagaatagaatacattgttctatatttctcgcagccaactcagtaagtagtgattaagccttctggcagtctgttccgttcatggcccccagtg

SEQ ID NO: 4493 - DNA, 120 bp, synthetic construct
  source 1..120: mol_type = other DNA
taatttccaattattacaataagtcaagcaagggagaaatttggacttgctgtgtgatacaaggaagatgcaacacactcagtttcaggaactgatcggaaggaaagggtcggaatgagc

SEQ ID NO: 4494 - DNA, 120 bp, synthetic construct
  source 1..120: mol_type = other DNA
attatctaatggtctgacacagtgcctagtaaacagttatggccagagttagtgcgagaaaagcagatccataaggtctgttcaatttatatttctaggaggatgagctgggtttggatt

SEQ ID NO: 4495 - DNA, 120 bp, synthetic construct
  source 1..120: mol_type = other DNA
aaagaaaacgaaaaaaagagaagaaatacgtagccacaaacttcaactgagtaaagaatgaatcaaataagaagcatggtgaatgtttctaaaatgcaaagtctgtatttatttttaggt

SEQ ID NO: 4496 - DNA, 120 bp, synthetic construct
  source 1..120: mol_type = other DNA
gaggggtatttcttaagctatatcctctcaaattgaaggtaagaattttctaggcagcataagaaattatgctaaaatgagttccctctgtgcatgtgagctggtatatattcacattag

SEQ ID NO: 4497 - DNA, 120 bp, synthetic construct
  source 1..120: mol_type = other DNA
aggcatttggaaaatcttcacatactgacgtgtggtttcagtttaaaaggtgctgctaaatagagacagaaacaagctcaaatattcccaaatgatgcttgcatctgaaagaagaggcag

SEQ ID NO: 4498 - DNA, 120 bp, synthetic construct
  source 1..120: mol_type = other DNA
ttactatttcttccttgaatattcagtagaattcactaatagaatccaattctttaatagatacagagctacttcttcttgagtgagctttggaggtttctgtctttcaaggaatttgtc

SEQ ID NO: 4499 - DNA, 120 bp, synthetic construct
  source 1..120: mol_type = other DNA
gtgagctgaagctattgatgtgagaaataaaagggctgtctggataaatgctcataccttgaaacatcatgaaatctgctcttagagactatttcatccagaagaaaggcacttcccatt

SEQ ID NO: 4500 - DNA, 120 bp, synthetic construct
  source 1..120: mol_type = other DNA
ttcacttgctttcatcaatgttttgtgtcaacacacagaataaagggtgggtgctgaatttggggtcttcccttgctttgacttgtttcttatggtattgcaacattttgtgtttgagag

SEQ ID NO: 4501 - DNA, 120 bp, synthetic construct
  source 1..120: mol_type = other DNA
cccaatatgcagcggagctgaataatctagtttaacatttccaaaaccaatactcccatgaacacattattttcccccaactggttatgaccactcaaataagttttgggaatgctcggg

SEQ ID NO: 4502 - DNA, 120 bp, synthetic construct
  source 1..120: mol_type = other DNA
aaatttctttctttctcatgaacaattattttataaacatagggcagctccttggtgtcaggcacccaggcttcttctattaatacttgcttattccacacacctccaccagccatctcc

SEQ ID NO: 4503 - DNA, 120 bp, synthetic construct
  source 1..120: mol_type = other DNA
tctgtactagtctgcctaatctgaatgttggtgttctttcctctgcactttttcattattttttagactcctctttcccgagaaaatcctaccaacttccttatatctgagcaggtccat

SEQ ID NO: 4504 - DNA, 120 bp, synthetic construct
  source 1..120: mol_type = other DNA
aacaccaagaatagtggtgagcaaaccaaatcatggtcgaaaaggatatggcaaactcaggcttgatttgttctgagaatatcaaagtataagccagtagattggaacagagtcagcaac

SEQ ID NO: 4505 - DNA, 120 bp, synthetic construct
  source 1..120: mol_type = other DNA
ggactagggagactcaagattttggatgcagacacagtctaagacaagctcttagactgatcatagttttttcctgaggatatttgccaattctggtttcatgataagcgtctgataatc

SEQ ID NO: 4506 - DNA, 120 bp, synthetic construct
  source 1..120: mol_type = other DNA
ctcagcccctgattaaatcaagccatcactttactcactctgtcttcctggccaaaaaaaaaaaaaaaaggtgaagcttaaccctctctgcaagaagataatatcatatggagaagccag

SEQ ID NO: 4507 - DNA, 120 bp, synthetic construct
  source 1..120: mol_type = other DNA
cttatggcttgggggatttacaatgtatacagaattataatgtatcataacaacacaaaaggcagaagtggaataaattgagtcaaactattccaagatccttacatcgtctgggcagtg

SEQ ID NO: 4508 - DNA, 120 bp, synthetic construct
  source 1..120: mol_type = other DNA
tgatcaagtaaaataagagaaaagccacttgccaatatcgggaacaaaataggtctgtaggtcctgtctgttgcagaaagaaacactctttcaagttgacttcgccagtgaattcttcca

SEQ ID NO: 4509 - DNA, 120 bp, synthetic construct
  source 1..120: mol_type = other DNA
tgcactcccaatcaaaatcccagacaagttttcattctggtggaaattgatcatccgattctaaaatttgtatagaaatgccaagacctaagactagccaaagcagtcttgtaggagaaa

SEQ ID NO: 4510 - DNA, 120 bp, synthetic construct
  source 1..120: mol_type = other DNA
atgtggtgcaaccaaaaccttctgtagtgctagtgagaatatgaactggtacagagagttttgggctataagataatgaccctaaccttgtagacaatggttaaacagtatcttctgaag

SEQ ID NO: 4511 - DNA, 120 bp, synthetic construct
  source 1..120: mol_type = other DNA
ttcccaaataagttaaacatttaacttaaaccaatgtttgctgagcacctacaattttttaggtattgatccctctagctggctccctattcaatgagcacacccaaactgcctgcacca

SEQ ID NO: 4512 - DNA, 120 bp, synthetic construct
  source 1..120: mol_type = other DNA
agaatttgagatagtacccttggagttattaaatccttgaagagaacatgaagagtaattctggggtgctggtaatgttctagtttttggtctggaagctgggtacacaagcatgtttac

SEQ ID NO: 4513 - DNA, 120 bp, synthetic construct
  source 1..120: mol_type = other DNA
gcgtgcaccaccaagccctggctaagctcttttcttattttagatttgagagctattagcatgcatggataagaaaaaccattgaaattactttttcgcaataagggaagaaaaaaagac

SEQ ID NO: 4514 - DNA, 120 bp, synthetic construct
  source 1..120: mol_type = other DNA
cttcgtgatagtcttgtaatgtttatcagaatagtgtcatctgaactcttcacaaaatcctccaatggtttcactgcctttgtccccttcccttgtttctctattccctttgttcctttc

SEQ ID NO: 4515 - DNA, 120 bp, synthetic construct
  source 1..120: mol_type = other DNA
gctaacactctaagtttcttggtttgctgcaactggctacctcctaaaaaagattggacttgcacctcagctctcagataaaaagtaagagcacttgtactcagatgaaactgagtataa

SEQ ID NO: 4516 - DNA, 120 bp, synthetic construct
  source 1..120: mol_type = other DNA
tttccagatggtccagatggaccttccagcttccatcttccagaagcttatgcaagatgggctaactatcagcaaaaatgatattttacattggctattctaaatgatgacaactaaaac

SEQ ID NO: 4517 - DNA, 120 bp, synthetic construct
  source 1..120: mol_type = other DNA
ttgaattaccatatgctatgtatatatactgtatactgttacataccccggtcctcaacctgcaaaccattagtatagtcagcacacagagcgacaatgtaagtgataaccccagagaac

SEQ ID NO: 4518 - DNA, 120 bp, synthetic construct
  source 1..120: mol_type = other DNA
aagttgggagtggaaaggctgttaaggataggtaactgacagtatctgttacacggaggatgagaagtaggtgtcggaagtagcattgaaaaggttaatcgatcaacaaataattactgt

SEQ ID NO: 4519 - DNA, 120 bp, synthetic construct
  source 1..120: mol_type = other DNA
ataaattatttcatcctgcctcctaattttactaatgagatccaggtagatagaggctgacagacttttttttcaggtcatttagttggttaggtgtttgctaggactggcttcccctct

SEQ ID NO: 4520 - DNA, 120 bp, synthetic construct
  source 1..120: mol_type = other DNA
gagtatgatgagagcacataacagtgacacctaatacaacttccagaggaagttacttttaaattggatactgaaggctgagtagggagttcacaggcaaaacaggccaatttcattttc

SEQ ID NO: 4521 - DNA, 120 bp, synthetic construct
  source 1..120: mol_type = other DNA
ggtcagtgttagaaattcctgtttcgcctacctggagttgtatatttttatctaggaaaataaaatcacagttactgtaagtaacaagcctccgaccaactcagaaaattggggcagagt

SEQ ID NO: 4522 - DNA, 120 bp, synthetic construct
  source 1..120: mol_type = other DNA
gaagaaagacttcctgaacaatcttcactagaagatcgtttcagaaccatatgctaaagcaaagcttttttattgctatataactgcagaggacatttacaggaagctgggtcaagcact

SEQ ID NO: 4523 - DNA, 120 bp, synthetic construct
  source 1..120: mol_type = other DNA
cggggggcggccgggggggagggtgggtacggcttgtatttttttatgagcataaaaattaattcatttaataaaaaatgggacatattcccttttggaaaacagttctgtgccatttat

SEQ ID NO: 4524 - DNA, 120 bp, synthetic construct
  source 1..120: mol_type = other DNA
tttattttatttttgctcatgagtctgtgggtgataaattggtactccatttagcaaacaggtcatacagggctgaatggtctacagtgaccttgctcatatgtctggtgtttggtccag

SEQ ID NO: 4525 - DNA, 120 bp, synthetic construct
  source 1..120: mol_type = other DNA
gtggggcgtatagctagcatcagtactcatgttaacttatcaagaagttttgaagaactgaagccatgaatttaatctaattcaggggagtgggttaaaacttcaagaagtgcccttgag

SEQ ID NO: 4526 - DNA, 120 bp, synthetic construct
  source 1..120: mol_type = other DNA
tatttttttcttaccttatggcacaactttcacattttgacttgttggttcttcagcattctggtttgagcaagtaagaagatggataggaagtcttattactaaaataaggtgggctca

SEQ ID NO: 4527 - DNA, 120 bp, synthetic construct
  source 1..120: mol_type = other DNA
tgtgatgacagatcaatgcatggctacactacaccagagcaagcacaaactttaaaaactcatcggaattttcataatttcttcaaatgtttgaattgaagtgagtagatacccagcaaa

SEQ ID NO: 4528 - DNA, 120 bp, synthetic construct
  source 1..120: mol_type = other DNA
caaggaaagaatggggatgatcagtttttgcataaaactttagactgtagtaaagtctgtttctctcaaaattctgggttacattttattgacctgtaaagcacatgacattttaggagc

SEQ ID NO: 4529 - DNA, 120 bp, synthetic construct
  source 1..120: mol_type = other DNA
tgaaaatcactgtgcactcaatttcatacctacacctttgatttctggggtgattccagaagccattaatatatgatgtgtgtctgggttagtgcaactaaaagcacatgtctggcccat

SEQ ID NO: 4530 - DNA, 120 bp, synthetic construct
  source 1..120: mol_type = other DNA
aatctttagtcatctactattaatatgactcagctgcattgcacatattcctctatctgccctgccccaatccagctttcacggattactcaaagtttctgctcgttcacattttaacca

SEQ ID NO: 4531 - DNA, 120 bp, synthetic construct
  source 1..120: mol_type = other DNA
tctgaacaccagtttcctcctaaataaacaaggactatcatggcagtcactcacctttccaagttatcagtcatgagaagacacaggagaatgaattttgaaaagctgcaagaggctaat

SEQ ID NO: 4532 - DNA, 120 bp, synthetic construct
  source 1..120: mol_type = other DNA
ccagtgaccttctgacatttcaatctaatgcaaagacactaactaaataacaggaattgcttcttctgatgggcaactatatgaccttagcaattttattactttacaatagagtcacaa

SEQ ID NO: 4533 - DNA, 120 bp, synthetic construct
  source 1..120: mol_type = other DNA
attgatcttttcttttcaaatgtcaccttttgttttatttttccttttctttcggttcttcctaagactgaccttgctgatgcaagggggaagtgacatcccttagaggccagcacatcg

SEQ ID NO: 4534 - DNA, 120 bp, synthetic construct
  source 1..120: mol_type = other DNA
ccagaaagagtttacagtgtcctctacagcgtttccctgagcagtgtagatgttaaaagaatttctggagcagttagaaaaattacaacaaaatggagcaaatgaagctttgcttcttta

SEQ ID NO: 4535 - DNA, 120 bp, synthetic construct
  source 1..120: mol_type = other DNA
ttactgaccatgtctttatccctgaaattctgacatcctagagtaggggatcttaagatcaatgctaataaagctaataaaaagactagaatgttggttctcagccctggatgcacactg

SEQ ID NO: 4536 - DNA, 120 bp, synthetic construct
  source 1..120: mol_type = other DNA
tttctgaaacctgtttcaaaaaatctgaagccttctgggaatggaaaggactcagactatacgtaaatatttgagagggcagttccttaaaatctaaacgtgtaccactctcctaccccc

SEQ ID NO: 4537 - DNA, 120 bp, synthetic construct
  source 1..120: mol_type = other DNA
tttttcatatttctttgctcagttcctttagatggaccttacacttggatggctgactaggcttttgatttggcatatttcttctcagtttttcattctagcaccgcagtgcttgctgtg

SEQ ID NO: 4538 - DNA, 120 bp, synthetic construct
  source 1..120: mol_type = other DNA
cttggtgaatatcaccatcacaccaagcacagaagtcactcaaggctcctcctttttaatcaattaacctcagacatggattttccccatattttcccagccttatatcttatccatctt

SEQ ID NO: 4539 - DNA, 120 bp, synthetic construct
  source 1..120: mol_type = other DNA
tgtccaccccaccccaccctcagcattttgtctctctttgaccactgatctgtgagagcaaatgtaacttattttctcagcttaattatttacacagccatttcctctcaatctattatc

SEQ ID NO: 4540 - DNA, 120 bp, synthetic construct
  source 1..120: mol_type = other DNA
aataagcaaatcagcccatcatgtctaacccaagaagtctcgaagccttcattctttttgtcccatcttcatccccttcagttcaaactggcagaatttctgctcacataatctcataaa

SEQ ID NO: 4541 - DNA, 120 bp, synthetic construct
  source 1..120: mol_type = other DNA
gattcagtccaaagcaggtgcccttcctcaagacagtttatgtccatctgtaggcaatttgtcataataaactaattttaacagaacagggtgttccactgttatctgccagaaaatggt

SEQ ID NO: 4542 - DNA, 120 bp, synthetic construct
  source 1..120: mol_type = other DNA
aacttcgtttctcttgttctgtcaatgtctgaataaatgttgcagcaaatatgaagtgcctagaatgtggcaggaactctgtagatggcaaaacaaaaattaattcatgtagaacccttc

SEQ ID NO: 4543 - DNA, 120 bp, synthetic construct
  source 1..120: mol_type = other DNA
tatgttggcgtattttgtgtatttccagttttaaaattgtatagaaaaaaggatcctcaaccactgcactatgagagtaggaggggtgctcttattttcctggctcttcgtcacagcctt

SEQ ID NO: 4544 - DNA, 120 bp, synthetic construct
  source 1..120: mol_type = other DNA
gtgcattctataattctggcttatgaacattgagaagtgaatttttaggccatctacaatgggtctcagcactttagtatgtctccagaagtcaggtaacagctctccatgctagaaaac

SEQ ID NO: 4545 - DNA, 120 bp, synthetic construct
  source 1..120: mol_type = other DNA
agccaccgcgcccagcctactaatgccaacacttttgataaaatgttgaactgaggttattataaactcacctttcaatttctcattaaatatgaaagttcatacttatttccttgtttc

SEQ ID NO: 4546 - DNA, 120 bp, synthetic construct
  source 1..120: mol_type = other DNA
ccaccttctctcttaaatgtttaacttttcactgagatttatcttgtcagcacattgaagttactccttcattctcttttggtctttcctaatgctgatgaggtcttctatccacctgat

SEQ ID NO: 4547 - DNA, 120 bp, synthetic construct
  source 1..120: mol_type = other DNA
tctgagagccaaagaagtaccttgaaagaaatactgtctgagtgcaatcagatttagaaatggcaatgatagaaaggtaaagcaaagattcctctacatgacttggtcagcagatgggac

SEQ ID NO: 4548 - DNA, 120 bp, synthetic construct
  source 1..120: mol_type = other DNA
tagggaacagtcagattattttctgtcccaacaattgcaacaagagacgggaatttatagaagggagtaaatggagttatttgggtcataaatacatcagtggagagagggccttagaag

SEQ ID NO: 4549 - DNA, 120 bp, synthetic construct
  source 1..120: mol_type = other DNA
ttgctattagctccttctttgtctggggattttgttaatgccctttcttcatataagtttgtgtcgccttgttctcacatttgacaccaactgaaatagccttgcagaacctttgtttct

SEQ ID NO: 4550 - DNA, 120 bp, synthetic construct
  source 1..120: mol_type = other DNA
aataactctggttttactcttttctctctgtatttcacaactctagaataagccagggatagaaacttaatttactctgggaatgatgctgccacaggagaatgaggtcaactccacacc

SEQ ID NO: 4551 - DNA, 120 bp, synthetic construct
  source 1..120: mol_type = other DNA
ctcctctaaggcagaggcagtggaagggaagggaaacaggagagaggaaaggccagaaggaatagaaaaggaaagtggttttgcgtcagagtgtggcagaggcagtccctcaaagaacct

SEQ ID NO: 4552 - DNA, 120 bp, synthetic construct
  source 1..120: mol_type = other DNA
tcctagaaaagggtacatggtttaacaataaatccaaaaggttaccattctgacccaggttagccagtagaaatggaaatatctactctacttccaggtcatctttgagggctatagacc

SEQ ID NO: 4553 - DNA, 120 bp, synthetic construct
  source 1..120: mol_type = other DNA
ttactatgtggttttctagacttctattgaaaaatcctgctttatggacagggatgcttttcatttagattgggggccactccccaacatctcatttatttttcacagctctggtcccat

SEQ ID NO: 4554 - DNA, 120 bp, synthetic construct
  source 1..120: mol_type = other DNA
ctgtcctttttcccatggcaatcctcatgcagcctcaataccccacttctgttctgccagggctgaataccagggacttgtctctcatggcctgagcaacacttactgttagcaaagtgc

SEQ ID NO: 4555 - DNA, 120 bp, synthetic construct
  source 1..120: mol_type = other DNA
tcaactgaagatcggttcgatcaaagagacttacctcccggggtcgtggtgaggatttgatgagataatagggatatggtagatgtttgagaaatgtgaatagccattattatcattttt

SEQ ID NO: 4556 - DNA, 120 bp, synthetic construct
  source 1..120: mol_type = other DNA
tcttccttgtgaaggactgagtgaaggggagaattcacaagacatcaggggggaaatgaaagagaagcacaggagagacatagtggagaggaagtcaggaaaagtgatgtgtgtttggag

SEQ ID NO: 4557 - DNA, 120 bp, synthetic construct
  source 1..120: mol_type = other DNA
tttaaaagagtaaaccatctttttagtctgacctgtgtattgggagaggttggccaccttttaatgtttgcagcaagataacttggctctgtctgttgaactcacttgtgttcctatgtg

SEQ ID NO: 4558 - DNA, 120 bp, synthetic construct
  source 1..120: mol_type = other DNA
acttaatcactggtgagctattgtttactcttagctcatatctattattctaaccggccccacctggatttcaggcttttcgaagaaccatggcctgcatctttgcacttttgaaactgt

SEQ ID NO: 4559 - DNA, 120 bp, synthetic construct
  source 1..120: mol_type = other DNA
taggtttctagaaaatgaaactgagagctctgaaaacgtccatcatctgcccaaggtcacatgagtaagatgtgctagagctagggcttccgtcagaatcacaatctttccccttttgta

SEQ ID NO: 4560 - DNA, 120 bp, synthetic construct
  source 1..120: mol_type = other DNA
gagcatctggtttctagggacattgtgtatcacgttaaactcttcccaatggcactggcttccctgtgttatcactcagccatacctctgtaaattagattccaggtaaaattttagaat

SEQ ID NO: 4561 - DNA, 120 bp, synthetic construct
  source 1..120: mol_type = other DNA
tctgccatcccttctttcctacaaacacttattgagcaaattactgtgttccagcctctatcctaggctcctggacacagttgtgagcaattcagacacagtcctgccttcatggacatc

SEQ ID NO: 4562 - DNA, 120 bp, synthetic construct
  source 1..120: mol_type = other DNA
tctactaagctgccctggaagggaccatctagcttatcaagagaggagataattaggtgacaagtacttggtaagcatgaaatgtgaaaaggaaagatgattatttcaagggtggacaaa

SEQ ID NO: 4563 - DNA, 120 bp, synthetic construct
  source 1..120: mol_type = other DNA
tttcatacacttagcaagataaataacgcacacttagtcctaagccagacagatgttggcatggcattgctggaaatggaacaggaggaaaaaatctggatgacaagagcatgtattaga

SEQ ID NO: 4564 - DNA, 120 bp, synthetic construct
  source 1..120: mol_type = other DNA
gactcctggcctgtgtcaactgaatatttttatgtggttttgtatttgtgtttccttttggttcttccttaatatccagtcaggtcattttggaagttgcagcctgcattggctgtagta

SEQ ID NO: 4565 - DNA, 120 bp, synthetic construct
  source 1..120: mol_type = other DNA
taaagtccctacgtgaggcccagcacttagtaagcactttacaaatggtagttgggattattaaggaaacaatctacccatttcgtaaggagaaaaagtaagcccagagtgaaggaaaaa

SEQ ID NO: 4566 - DNA, 120 bp, synthetic construct
  source 1..120: mol_type = other DNA
tctccaggaagaagaccaactcctggcatttaataatgagaattttccaactcgggattttaaggtttacggctaagaattttctaaaaatgttgggccttctgccactcttttgctagc

SEQ ID NO: 4567 - DNA, 120 bp, synthetic construct
  source 1..120: mol_type = other DNA
acatggtatcaaatcatcaaacagcaaacaattctgtttggccaaaaatgtagggtatggcagtaacgttgaggataattaaactgcagggacatttacaggccagattgtgtcttgtca

SEQ ID NO: 4568 - DNA, 120 bp, synthetic construct
  source 1..120: mol_type = other DNA
accatcgctctcttcttctccccccactccctgctgctgatgatagcatcatatacttgtaaagggtttgatagtttgctaagttttttggatatactgtctcatttatcctcaaaacaa

SEQ ID NO: 4569 - DNA, 120 bp, synthetic construct
  source 1..120: mol_type = other DNA
catgtcttgctcattcctcctcttgttcttggaatgaacaaataaaaaccatactatcttgttctttcccaactcttgactctggtttgtgggcagtacgtattcaacagatgtttgctg

SEQ ID NO: 4570 - DNA, 120 bp, synthetic construct
  source 1..120: mol_type = other DNA
ttcattctctggagtgctggttacttctgcagggtaagggagagtccctgtacccaagttctgagaaaggcctcacacatttgattttctaatctattatttattattggttgttctcgt

SEQ ID NO: 4571 - DNA, 120 bp, synthetic construct
  source 1..120: mol_type = other DNA
gtcccaactctaccatttactaactttggggcctcagccagattatttggctttcctgagcccagttttcccatacacaaaatagagataacaacaattgtgagtattaagtaagatgac

SEQ ID NO: 4572 - DNA, 120 bp, synthetic construct
  source 1..120: mol_type = other DNA
tctttgtccactctggagcttgttgagggaaaatgcaaagccacataacacatggcaccttgtatttgccatgatggtcccaatttcttgttctttttttaaaatggagattggctaaat

SEQ ID NO: 4573 - DNA, 120 bp, synthetic construct
  source 1..120: mol_type = other DNA
aagttcttcctaacatctagcctaactccagccttctataatagtggctctcttcagaagcttcagagtggaacttccccaatcagaggtctagaatgcatcaaggtgcatagaaatatt

SEQ ID NO: 4574 - DNA, 120 bp, synthetic construct
  source 1..120: mol_type = other DNA
tcttttctgagatgcaaagcatttcaatgaaaaagtagagggggagaagaaagcattttgtatttgcatctcaaaagcagcctactggagtgacttgagttggataggaattgggagtga

SEQ ID NO: 4575 - DNA, 120 bp, synthetic construct
  source 1..120: mol_type = other DNA
cctggaattaaacctggccagcagttcccagtcttacctcccacctcacagtaaaaatagaagctagccttcggcactttctcaatttcctgtcaccaaatccataaacttacaggcaca

SEQ ID NO: 4576 - DNA, 120 bp, synthetic construct
  source 1..120: mol_type = other DNA
aggtgttataaggcattggaaaaagaagaagaggcacacagatgaaagtgagtgtggggatgtggggaggtggggagaggtcatagccaacacacagtctgtggaaagaaaagcacagag

SEQ ID NO: 4577 - DNA, 120 bp, synthetic construct
  source 1..120: mol_type = other DNA
tagaccagcctccttgacctttactttaatttcaggaaagaattgagaaaacatgctcttgaaagtcaattgggagacaaatcctgaaccttattgctccagatggaggaaaaacaatcc

SEQ ID NO: 4578 - DNA, 120 bp, synthetic construct
  source 1..120: mol_type = other DNA
aaaatgttttaaaatatctaatctgctccttaaccctcaccccagcgcccatccctaagaaaacagatgggtgcaagccaggcttcaaggtatctttctgatcaagttctcttattatga

SEQ ID NO: 4579 - DNA, 120 bp, synthetic construct
  source 1..120: mol_type = other DNA
attatatgagggaagaattatatgagccttataaagagggaagttgaggtccaggccatagccaagtttcctcagaattctaagtgacttaggcaacctcatgttttccagaaatgacac

SEQ ID NO: 4580 - DNA, 120 bp, synthetic construct
  source 1..120: mol_type = other DNA
atcaggtatcatgcaatcatcagcactgcattattattgtctcactgtgtggatgtctgacatgcagaaggaaaatccagttcccttggatgagccacttctctaattctcaacttaata

SEQ ID NO: 4581 - DNA, 120 bp, synthetic construct
  source 1..120: mol_type = other DNA
agacacatcaagccactagcacagtctctgagagagagaaggcactcagttgttcctattttaatggtagctaacctggaaaaatatagaatattgacttttactgctggaagaagcctt

SEQ ID NO: 4582 - DNA, 120 bp, synthetic construct
  source 1..120: mol_type = other DNA
gatgagctaagttttctgagcctgtcatggcaaacaacataatgttgctaatcaaacttcctgtgcgcccacccaatttgataaatcagccttttgatgcactaagtgaagatgaattag

SEQ ID NO: 4583 - DNA, 120 bp, synthetic construct
  source 1..120: mol_type = other DNA
cagggactgcaaactggtagcctatggaccacatttagcttgcatacaggatttgttgggctcacatagcattgttgaaaaactggcattttattgccaatatttacaattggacatttc

SEQ ID NO: 4584 - DNA, 120 bp, synthetic construct
  source 1..120: mol_type = other DNA
gctcctttaggttccttttcttccctgctgatattccatgggacacagcaaacacaaatctctctccctaaaggttccatttgctttagactttctacgattgatcatctaattaccttt

SEQ ID NO: 4585 - DNA, 120 bp, synthetic construct
  source 1..120: mol_type = other DNA
agctgtcagctcgccaggcagttagtcctctgccaaacctgtgtacaccagttcttgtcattgtcattagtttagctcactatttcataaacaatgaaatatggatgccaagtcaaaata

SEQ ID NO: 4586 - DNA, 120 bp, synthetic construct
  source 1..120: mol_type = other DNA
tttttctatctatgttcagtctctaacggggctgtatgttccttgaggaaattacatggcttacacatccacaacctgaatgactgtcttttacactccatgggccatctataaatggtg

SEQ ID NO: 4587 - DNA, 120 bp, synthetic construct
  source 1..120: mol_type = other DNA
atgttattttcttagttttgatcatcactctgtggttatataaaacgttcactttaggggaagctgagtgaagggtataggggaactctctgcactactttgctactcttctgcaagtct

SEQ ID NO: 4588 - DNA, 120 bp, synthetic construct
  source 1..120: mol_type = other DNA
ccacagtggcaatgaggcaccccctactaacattaacatactgcaaatgcaagatgggatatttggaaatagtttacccatgttgctgctaagcctcataataatcctgtaaattcaatc

SEQ ID NO: 4589 - DNA, 120 bp, synthetic construct
  source 1..120: mol_type = other DNA
acccctgttacacagaatgcttggtatgggcagatggaagtgcccatgagaatcaaaacaaggaaactttgacaggattcaaggcttccataccaccctctgaaaaaaaaaaaaaaagga

SEQ ID NO: 4590 - DNA, 120 bp, synthetic construct
  source 1..120: mol_type = other DNA
tctaaaaagcccaggagtcactgctacaatatttttccttctgaaggaggtggcatctcagtaattgcaacgtgatgctctcttgacagcagtattaatcacctgtcttcatctcagccc

SEQ ID NO: 4591 - DNA, 120 bp, synthetic construct
  source 1..120: mol_type = other DNA
caagacggtgtcagccatgggaggactgttagccagttaagctgtgattttaagctggagtaacagttgaagagagtgcagaaatggtctgaatacctagcaagtggatatactcagaca

SEQ ID NO: 4592 - DNA, 120 bp, synthetic construct
  source 1..120: mol_type = other DNA
cagcagagccaaagcagttaataaaatagtctgagaccaacagtgttggctaggtgatcatggtatccttagcagagaaatagataggcagtctactacattctcactcaatctctttaa

SEQ ID NO: 4593 - DNA, 120 bp, synthetic construct
  source 1..120: mol_type = other DNA
cacaaagggcctaaacctatgagatagatgctaacagttagaaaagatggtaacatgtgagtgatttccatccagtagagaagattgtccaaagccttatgattttgttgccctgtgaga

SEQ ID NO: 4594 - DNA, 120 bp, synthetic construct
  source 1..120: mol_type = other DNA
atgtaaataacttgaaaaataaatacacaagaaaagcagcaactgtgaagctgtggtttccagaagatggggaaagcttgtctgaagtttagcccttgctttccatgttgaggagcaagg

SEQ ID NO: 4595 - DNA, 120 bp, synthetic construct
  source 1..120: mol_type = other DNA
taacagtatctaccccattggggtagttgtacagattgagttgttgtaaattttcaatgagataatgtatgttgagtgaggatactgatgcctggtataccatacgcactcagtccgtgt

SEQ ID NO: 4596 - DNA, 120 bp, synthetic construct
  source 1..120: mol_type = other DNA
gcattattatttttggagagctagttgttaaaatatttaccagcggacactatatggtcctcttgcaataatctagttacaggtgaaggaattaggattcacgcttgaacctgggaggtg

SEQ ID NO: 4597 - DNA, 120 bp, synthetic construct
  source 1..120: mol_type = other DNA
cgatttggcaattattttttgcatatgaccccaaaatcacagtctacaaaagaaaaatcaacaaactgaattacatcaaactaaaatgtttctacgtagtgaaggaaacaataaattgag

SEQ ID NO: 4598 - DNA, 120 bp, synthetic construct
  source 1..120: mol_type = other DNA
ggttaccagagcctattggcagaatgagggttgactaagttttaattaggcaacaggaataagttttggtgatccattgcattgcaacatgactatagttagtaatgacaagttgtctat

SEQ ID NO: 4599 - DNA, 120 bp, synthetic construct
  source 1..120: mol_type = other DNA
tgtcactttactcagtaaatatccactcatccaattacagaaagctacaagtaaataacaagaaggggagatctcagcaatacaaagcgaccctgttctcttgttcagtgctgctttgtg

SEQ ID NO: 4600 - DNA, 120 bp, synthetic construct
  source 1..120: mol_type = other DNA
catatgtaatctctgacccacatgggtgatatgggatgccaggtgtgggcctacaaatatcaccagaaaaaaaaaaatgagagaaaaggttgtgtttactctttctgaaaacacagccct

SEQ ID NO: 4601 - DNA, 120 bp, synthetic construct
  source 1..120: mol_type = other DNA
aatgcagctctggatggacaaaggcagaaaagtgcgggtgttgttggttatagtctgtaagggacttcatccaatccaataccatcattttagaataaaaaatcagaggacaagaaaagt

SEQ ID NO: 4602 - DNA, 120 bp, synthetic construct
  source 1..120: mol_type = other DNA
agctctactttgcatttctttgctttttgtgtccattctattacattttcctggatctctgtgtctggcagacagaaactcagcggctatgattagaggcactatcaaattgactgtctt

SEQ ID NO: 4603 - DNA, 120 bp, synthetic construct
  source 1..120: mol_type = other DNA
actattattactattacctggtggagatgagggatcccccaaggcagactggagtatataagagaagaacattgctttgtgtgaggcatggtgagagttaaagactaggattttagtcct

SEQ ID NO: 4604 - DNA, 120 bp, synthetic construct
  source 1..120: mol_type = other DNA
aaggtgacctcatttggaagtggtctttgcagacattattagttaaggataagataggttcattctggattacagtggaccctaaatcaacacctggtgtacccttataagaagcagaga

SEQ ID NO: 4605 - DNA, 120 bp, synthetic construct
  source 1..120: mol_type = other DNA
gaataataaggctcaccaaatcagcaattttgaacccagaaatgagaagaaaggacaagaggatgatttttggagctggttaaattggggaaacttttaatgtggctacctgcagccaca

SEQ ID NO: 4606 - DNA, 120 bp, synthetic construct
  source 1..120: mol_type = other DNA
ttttctttcctattccctgtaacttccacctatttcagctctctcatccacatctttatacccacttgccaccctgtcttcacctttcttctgtttttcttccattctctgtagctatgg

SEQ ID NO: 4607 - DNA, 120 bp, synthetic construct
  source 1..120: mol_type = other DNA
tttgtttgtttgttttactgcaaattgaatcactggagttgtccctgtgcttaaaacccaatccttcaagttggcttcttttttccctcaggatggaatccagtctcctacataagactt

SEQ ID NO: 4608 - DNA, 120 bp, synthetic construct
  source 1..120: mol_type = other DNA
caaactgttactgcgtttggagggtcttgggtataatcatgcttatctgtaccttttaaagtaaggactagtccaattccccaaagtctaaacacagaaatcaccaaagcactaatggca

SEQ ID NO: 4609 - DNA, 120 bp, synthetic construct
  source 1..120: mol_type = other DNA
aaatattctaccatagctaaatggtgagcatttgtagctggccagaaatagatgcacatcaattacaagagagtcctccccaagaagggattcatagaccaagaaaaaggccaacaagag

SEQ ID NO: 4610 - DNA, 120 bp, synthetic construct
  source 1..120: mol_type = other DNA
attcataaaactcatggtgaggctcaacaacagaggagtcttctcacttattatgaggtgaacacgattattacagtcccttatttgtgcctgaaataactgatgagcaggttaagtgcc

SEQ ID NO: 4611 - DNA, 120 bp, synthetic construct
  source 1..120: mol_type = other DNA
acttcctcgctggttctcaaatttaagaatcccaaggagttattttattcatccttctccatctgctgtctccctcttcactttcctggtatcatacacaaagattactgccctttcatt

SEQ ID NO: 4612 - DNA, 120 bp, synthetic construct
  source 1..120: mol_type = other DNA
atgatgtagcatgtaacaaaaataatttcatttctaatgtctttctcctgctgggccacttagaacccaaacaataacaacaaggagggggtggaaatgagaagggcaggcacgttctga

SEQ ID NO: 4613 - DNA, 120 bp, synthetic construct
  source 1..120: mol_type = other DNA
agaaaaatctgcaattctgagggcaaatttctctcctttctctggacccaaatcaaagaaaaccaagtggctgagtcttatagttttattactcctccatccccatgtgctgacactata

SEQ ID NO: 4614 - DNA, 120 bp, synthetic construct
  source 1..120: mol_type = other DNA
cggcttcagcaagacaatctcaggagtatgtgaggccatatttctaatgaccctaagttcccatttgtttcccatagtatcaaagaaagaacagaagcgtttgtctcaatttcagattct

SEQ ID NO: 4615 - DNA, 120 bp, synthetic construct
  source 1..120: mol_type = other DNA
gcctccgcttgagattctcattcagcagtttttcaaggaagaagcaaaaatacgcatttttaaccagcttctcagggaattcattaaaaagaaaaaaacccttagagaaatgctgcccgg

SEQ ID NO: 4616 - DNA, 120 bp, synthetic construct
  source 1..120: mol_type = other DNA
aaagacgataagcatgatttctttttcaagtggtcctaatgctgcaggatgaatcagagataagcatgcatatttgcatttgaagcagggtgggagtggggagaatcgttgaacatctag

SEQ ID NO: 4617 - DNA, 120 bp, synthetic construct
  source 1..120: mol_type = other DNA
tgaggcttccagctcccgccgcatccacgcgcggccgcccctccggcagccgtccggggccgccactctcctcggccggtccctggctcccggccccgccgcgccgttcagagccccggc

SEQ ID NO: 4618 - DNA, 120 bp, synthetic construct
  source 1..120: mol_type = other DNA
gcgcccgcgcccccgcccgtcctttcctgtttccttgagatcagctgcgccgccgaccgggaccgcgggaggaacgggacgtttcgttcttcggccgggagagtctggggcgggcggagg

SEQ ID NO: 4619 - DNA, 120 bp, synthetic construct
  source 1..120: mol_type = other DNA
aacaccatggtgtttcaaaatggggctcacagcaaacttctcctcaaaacccggagactttctttcttggatgtctctttttgctgtttgaagaatttgagccaaccaaaatattaaacc

SEQ ID NO: 4620 - DNA, 120 bp, synthetic construct
  source 1..120: mol_type = other DNA
agtagttggagatttgttcctgagaaaaatataaataccacttaatttgcctgtttgtcccgcattcactcaaaacagaatgctcctgaagacaagagagagagtaggagaacagacgct

SEQ ID NO: 4621 - DNA, 120 bp, synthetic construct
  source 1..120: mol_type = other DNA
gttgtttctgaattcagtgaatatttactgagtgcatagaatatgctagatattctgggctaaaggttgaagggggggtgagttttaagggtttctgctcttgcttccagattgctttca

SEQ ID NO: 4622 - DNA, 120 bp, synthetic construct
  source 1..120: mol_type = other DNA
gttttactaataggggtatgtgttgagaaaatttcaaagttttagaatatggttcacccacatgttgcttccctgtaaatataatttttaaaaccagattctgggccgggcatggtggct

SEQ ID NO: 4623 - DNA, 120 bp, synthetic construct
  source 1..120: mol_type = other DNA
ctttctgaatatatctggaacttctcattaacaaaagactcaagttataatttaggggacaaggcacccaatgagaatgccttgcaggcagccctaagtacacctgcaattacaccatta

SEQ ID NO: 4624 - DNA, 120 bp, synthetic construct
  source 1..120: mol_type = other DNA
aaattgagccacaccaggggttctggataccagcttctctctaggtgaggctgctatagtcagcagctgattagttgcagttatcagcaactggtaatataatatattgtgcatataagt

SEQ ID NO: 4625 - DNA, 120 bp, synthetic construct
  source 1..120: mol_type = other DNA
gtggattacatgttgtatgtagctcgtaacgaaagaaatcttgtctttgctctcagacccccatttcttactcatctcatgagctccttcgagatccagaaacagttgcatatttcatta

SEQ ID NO: 4626 - DNA, 120 bp, synthetic construct
  source 1..120: mol_type = other DNA
gcacagggacaggaatgaggaaatacttgtaggccctgtgctccttcagcaaaaccctcagtttcttgttatttttataaatgcaaacatcttattaaagtagatgctaaggcattagaa

SEQ ID NO: 4627 - DNA, 120 bp, synthetic construct
  source 1..120: mol_type = other DNA
actacatgcttgcaggccagtgcacagcagatgacgtcatgattgttttagcagtcctatcgttttacttatgatgtcattacaaccctttgctaaaatttctttcctttactccaggtt

SEQ ID NO: 4628 - DNA, 120 bp, synthetic construct
  source 1..120: mol_type = other DNA
tttttctgtaatttgttgttagttataatggggagagaaaacaggttagagtctcccctctcagtttcaccttccataaaacagctaaactagacgatcgtcagactccttccagctgaa

SEQ ID NO: 4629 - DNA, 120 bp, synthetic construct
  source 1..120: mol_type = other DNA
caacgttgtgtcatcaacttctgtaaattttccagacctataaatacttgcagaaaaaaaatgaaaggagaaggcaacttgatttagcagttgggtcagttagcaatgcctatggcaagc

SEQ ID NO: 4630 - DNA, 120 bp, synthetic construct
  source 1..120: mol_type = other DNA
agaaagttcagcaatttgatgaagtgggacaacatgaagaatcaggtgagttgcctactttttcacttcactttccacctttagagattcttgtttagatgcagagtagtgacgtgcctg

SEQ ID NO: 4631 - DNA, 120 bp, synthetic construct
  source 1..120: mol_type = other DNA
ggccttaagggaaaaaatgatatctgaagatgcaatttatttcaaaaagagtttgctcccgtgaattttcactctctatgtagaacggcaccagcacacacttttcctgagcctttgcat

SEQ ID NO: 4632 - DNA, 120 bp, synthetic construct
  source 1..120: mol_type = other DNA
ctattttgagggtaaattctctgtaagtagaaaaagcaaaatgtggacatgggactaacatatgaatatacaaagcaaatgtaccgaaaaaatcttaagacctgccttgtggtgtttttt

SEQ ID NO: 4633 - DNA, 120 bp, synthetic construct
  source 1..120: mol_type = other DNA
cagaaattcctgtctcttcacctagtgtgtaataaggcctgcgcgtgttatatggaactgtaaaaaatgcgccaaccatctgtccttcctctttatctgattacttatcattgttctcta

SEQ ID NO: 4634 - DNA, 120 bp, synthetic construct
  source 1..120: mol_type = other DNA
gggaagtggccttcgagcttaacacataagacttgggaggcaaaaccttttattctctttaaatattcactttaggataagcatttttttaggtgttaggaacagggaaaactgtgtggt

SEQ ID NO: 4635 - DNA, 120 bp, synthetic construct
  source 1..120: mol_type = other DNA
ctttggaaagctggtgaggccatgttgcccgtttcaggtgttccgtgctcaaatgtattcatttcttgaaaaattcagggagtgcacacttttgtacattttcctatgtgtatatgatac

SEQ ID NO: 4636 - DNA, 120 bp, synthetic construct
  source 1..120: mol_type = other DNA
ctcttcatggagtgatgcagtagacagcaagcctcacacttctatgctcacggaagaccaaatttgccttgaaaaatctttatagtctcttcacatttctaagttgacatcaaaaatcgg

SEQ ID NO: 4637 - DNA, 120 bp, synthetic construct
  source 1..120: mol_type = other DNA
gtgtggtccctgccctcaggttaataggcaggggtggaacagttatgaaactgctctaaagtcattttctcaaactgggagtgacaaatgtatccacttggaaaagattgagaattttat

SEQ ID NO: 4638 - DNA, 120 bp, synthetic construct
  source 1..120: mol_type = other DNA
tcagagaccaggcagtcgcttgtgggtttgtgattagagtgaggttcttttataaagggagtgagaagagaaggtctgtggatacttgagtgtatcggtaattaagaaataaattgtgta

SEQ ID NO: 4639 - DNA, 120 bp, synthetic construct
  source 1..120: mol_type = other DNA
gacctgcagctaaagtcaagtagaatttagggataattaataggaggaaggtggggttggaagatctgcatgattatagtcctctgatataactggaaaattctttccattagcaaggag

SEQ ID NO: 4640 - DNA, 120 bp, synthetic construct
  source 1..120: mol_type = other DNA
aaaaaaaaaagaagtaagaagttttacataaaaacgtggagtgagcccaaggtgccatttatccagcccatacacatcgtaccatgtacagagtggacaccagataaatacattgactgc

SEQ ID NO: 4641 - DNA, 120 bp, synthetic construct
  source 1..120: mol_type = other DNA
aaggctgggaagaccataggtgctaaatgaggaactacttaaagaaagaaaatggaatttcacggacaagaaaatccatgtccatttggttctgtgacccacatcctttgtatcctatgc

SEQ ID NO: 4642 - DNA, 120 bp, synthetic construct
  source 1..120: mol_type = other DNA
gtggcatggccgtagactcaatgttagtatctgaaatatggcctacgagctgagttgtgaatcaagttaatagattttcggaatgttaaggtctaaaccagtagctcttaactgagacaa

SEQ ID NO: 4643 - DNA, 120 bp, synthetic construct
  source 1..120: mol_type = other DNA
tttctgctttatgggactttgaaataatgttgtttgtgccaaggttttagattactatacctaacaacctagaaaaagaaatgaaaaggaagccttctgccaggcagaggtcactacggg

SEQ ID NO: 4644 - DNA, 120 bp, synthetic construct
  source 1..120: mol_type = other DNA
caattgattgaacttcacttgcttttctatgacaggttttttgttcttagtaaaagaccccagttttctcacttgtgaacagaaggggttagacttcatgacagctaaggttccttccgt

SEQ ID NO: 4645 - DNA, 120 bp, synthetic construct
  source 1..120: mol_type = other DNA
ttctttctgacattctgctctctacaaggggatattatgtacacataaacctacttccaaaataatgaagtgaggcctaattccttactcttcagagagcccactgtggaagtgtcactg

SEQ ID NO: 4646 - DNA, 120 bp, synthetic construct
  source 1..120: mol_type = other DNA
ccctgaaaagagagtagcctaatgcattcaatcaaaatgtttttaagtggaaaacatattgtgtgtacttgatctggcctgctgcttttaaaagattaaaactgggactgggcatggtgg

SEQ ID NO: 4647 - DNA, 120 bp, synthetic construct
  source 1..120: mol_type = other DNA
tggacatcactgaactttacccttagagatgcatacctgcatcttttttaccctgatagggccttccatgatgctttcaaagtgtttttgtctgcttttcggttaatagactttcacagt

SEQ ID NO: 4648 - DNA, 120 bp, synthetic construct
  source 1..120: mol_type = other DNA
cctgcaggagacacaaaaagaagagaatttgaatataacttgaaatgaccgtaatctcctgccccaactcatttcattaccaaaccgcctctttcttcattatttctcctgaagcacaaa

SEQ ID NO: 4649 - DNA, 120 bp, synthetic construct
  source 1..120: mol_type = other DNA
gctatgaacatagctgtatgcctttgtcttttaaagcccaaatctgatcaagtcactccccagcttaaaaccttccactgctccccagcagtgggataaaggccagtctcccctgtaggt

SEQ ID NO: 4650 - DNA, 120 bp, synthetic construct
  source 1..120: mol_type = other DNA
aaatggactaagacaatcttctttcatcaagttagggtaccaacctttaaagactgccagtccaaggttaaaggaaacttttcaagagcagtccaaacatgatctggccctcagctactc

SEQ ID NO: 4651 - DNA, 120 bp, synthetic construct
  source 1..120: mol_type = other DNA
cattgtttgtatgcctctgtctttgatgtccctgcctgagtcgcccactttagagcccttctgttcttcagaaaccagacttttctttcaatagtttcagtaatcaatcgatcaatcaat

SEQ ID NO: 4652 - DNA, 120 bp, synthetic construct
  source 1..120: mol_type = other DNA
ttaattattactagtttaatgtatgttttgcttagttaaggaaaacccctgtggtttcttgacgtgcttcagtattctaactcacagctgattcagttcagggggctggggagatgtcct

SEQ ID NO: 4653 - DNA, 120 bp, synthetic construct
  source 1..120: mol_type = other DNA
gattccacctccaagtcactctccctttgggatatgcagcactaagttaagcttgcctggaaaacatcacttgaagctggaaaaccacttttaacacagcgggaaaagctatttgttcag

SEQ ID NO: 4654 - DNA, 120 bp, synthetic construct
  source 1..120: mol_type = other DNA
gtatttttttaaagctctccagttggtaatgcatagctagagttgagtatcgctgttctaacgtgcagatctggtcatgttaccagccttttaggtggtcttctttggctttctctatct

SEQ ID NO: 4655 - DNA, 120 bp, synthetic construct
  source 1..120: mol_type = other DNA
atagtgagcctctgtgtatgtgaaggcccgcatctggaacatgaaagaacctgtctgatgtgttctagtcaggaaagcaggtagccaatactatttatagaatttacagaaactgaagat

SEQ ID NO: 4656 - DNA, 120 bp, synthetic construct
  source 1..120: mol_type = other DNA
tggacttccctgacactgagcacctcttaattaagcatctcataagtgaacaaaacccagcccttcaaagaagtcactttatttatgtgtgggtctgcagcttggatttcttgataatgt

SEQ ID NO: 4657 - DNA, 120 bp, synthetic construct
  source 1..120: mol_type = other DNA
acagagatgaagccactgcactttagcctaggtgacagagcgagactctgtctcaaaaaaaaaaaaagaaccacttgcatatacactattcacaatagcaaagacgtggaatcaacctaa

SEQ ID NO: 4658 - DNA, 120 bp, synthetic construct
  source 1..120: mol_type = other DNA
tttccaagtaaaaacacaccaggaagcagatcttagatctctgttatctccttggcaccagctggtattcatcctcaatgctagctagagttgaaataaagagtgaaagaactttctctt

SEQ ID NO: 4659 - DNA, 120 bp, synthetic construct
  source 1..120: mol_type = other DNA
aagatataatcagtatccttcttcagtatggccaaagtgagtttctcattattttacctccccttcaggaaatgacttttcatcttgtgttttgggagccatagatggttctgggcagga

SEQ ID NO: 4660 - DNA, 120 bp, synthetic construct
  source 1..120: mol_type = other DNA
caattagcccccatatacataatcccagtttgtgtctgtatcagtacaattctcccatgtcaatgtgaattttaagccacagagggaaaggggacagagaatatgctttcattcagctct

SEQ ID NO: 4661 - DNA, 120 bp, synthetic construct
  source 1..120: mol_type = other DNA
ggttaaacagtagagacatggaggactcccgacccccatgtacccctttcttaaccctttaattaagatcacagccctagaaatagcttgcaaaataattaactactgatcatttatacc

SEQ ID NO: 4662 - DNA, 120 bp, synthetic construct
  source 1..120: mol_type = other DNA
ctcttccctggtgaagtcatttaggttcaggctcttattttactttggtccataatttagatcgaaccacatgtgctgatgtgattgaaacgatgtggaattctctggacagagatagaa

SEQ ID NO: 4663 - DNA, 120 bp, synthetic construct
  source 1..120: mol_type = other DNA
gagtactcattgcaatttcacttatccagaattggctgttgttctcagagcagcttgtgttgccttgttaaggagaatatgttagtatccagacatccagaaaggatcctttactgtttc

SEQ ID NO: 4664 - DNA, 120 bp, synthetic construct
  source 1..120: mol_type = other DNA
gcacaagtgagctgcgcagggtgagtctaaagggttaatgcactttcaaaagcctctaatttgttattccagaagagtaatttactcactagaagtatctgggtggctactaacacattt

SEQ ID NO: 4665 - DNA, 120 bp, synthetic construct
  source 1..120: mol_type = other DNA
gcatttgataactaatgaggcactgtcgtgccagctattattttcagacatttacagtccttttttaaatacaaagaaatatttggtgtgaaatgttccccgggagctggtgcaagcaga

SEQ ID NO: 4666 - DNA, 120 bp, synthetic construct
  source 1..120: mol_type = other DNA
tagacaacgcagaatgactgggaaagccccaacaagttacctactggtaaatgaggtgagaagcttaaagtgagaaccccattgctgcctctttttcactttaaaaacatttaagttttg

SEQ ID NO: 4667 - DNA, 120 bp, synthetic construct
  source 1..120: mol_type = other DNA
tatttcctgatatcttgagtttacttggacgtagagttttccttgactatggttatttctggtagtagcagctccagattaggcaatggttttcttcagagatagcttagagtgagcccc

SEQ ID NO: 4668 - DNA, 120 bp, synthetic construct
  source 1..120: mol_type = other DNA
ctaaaattcagataattaagacaattcattctcctgaaactgctgttcatgtaaaaaggaattttatcgaggtggcccttgagtgccaaacagcctgtcctcagctgcaaaatgagtcgt

SEQ ID NO: 4669 - DNA, 120 bp, synthetic construct
  source 1..120: mol_type = other DNA
tttcttcctggttagacaggataagttctgagtcccctggtatcatcagcttacttcttctctgttaaatattcacaaaaaatcactaactttcatgcctcagcaaacctccactgccta

SEQ ID NO: 4670 - DNA, 120 bp, synthetic construct
  source 1..120: mol_type = other DNA
aaggcttctgcccccattcccattccattaattgcgtgaggtagagaactcatagaagataggaacacatatgctgatttccaaaattgcctttgtatattttcacgtgaagactttagg

SEQ ID NO: 4671 - DNA, 120 bp, synthetic construct
  source 1..120: mol_type = other DNA
gctattactagcaattgtacctattactagtctgtactctgcacaactttggagtatactgcctactcaaggtggattttagagctctatttgtggcattatatcacggacaaaagcacg

SEQ ID NO: 4672 - DNA, 120 bp, synthetic construct
  source 1..120: mol_type = other DNA
agttatcaagcctctcaacccacttcctcaatctgtaaaataggtatgagtgtaggaccttcccaggggatttttttgtgactatagaatgattctcagaagactttcaggcagtatgtg

SEQ ID NO: 4673 - DNA, 120 bp, synthetic construct
  source 1..120: mol_type = other DNA
aggaccacatgttcactctgagatcccactttcatttccctcctggttgagcagcattaatactctggctagatttaaattctggctttctccagttagaactgaaagttatgacaatgt

SEQ ID NO: 4674 - DNA, 120 bp, synthetic construct
  source 1..120: mol_type = other DNA
ctccacaccggtggccacttttcattcactctgaacccttctttgtatggaggtcattttattaattgagctgtgaccaacatgacagaatttcctgttttagggcttttataatataga

SEQ ID NO: 4675 - DNA, 120 bp, synthetic construct
  source 1..120: mol_type = other DNA
ggcctatttttacacatacacaccaaccaaaagtagccaagcaaacaaaacaacatactcacaccccttcgcctattatcatctaggtgattttcaatgctcattgcaatgaaacctact

SEQ ID NO: 4676 - DNA, 120 bp, synthetic construct
  source 1..120: mol_type = other DNA
tgtaagcctagcagaaaatatggcagttttattgactactattctttgctgggtgtggtatttttaaactgagacatcagtgtgcctagcacagggcctcaagcacacagaaaaattcct

SEQ ID NO: 4677 - DNA, 120 bp, synthetic construct
  source 1..120: mol_type = other DNA
agagacactatttttcacttcgtgtttgtcactcctaaagcatgtgtgctagctgcaccaaccctgggatgcctcggtgcatagggtttatgtgcgtcctcctccttccctctgagctgg

SEQ ID NO: 4678 - DNA, 120 bp, synthetic construct
  source 1..120: mol_type = other DNA
tgtgcgtgctgaaggtgtggtgagaagcacttacaaaaagaaatggactgtgttaggattgcacattttactttgtttctcccaaatacgtgttctttgaatttttttccttccagggcc

SEQ ID NO: 4679 - DNA, 120 bp, synthetic construct
  source 1..120: mol_type = other DNA
atggatcatactttttgtgtcaggtttgagaagtctgcaccaaagtatgtcctgtggttttcccttaggtcatcttcaacaagtttcatagtattttgtttagatgtaaatctgtggccc

SEQ ID NO: 4680 - DNA, 120 bp, synthetic construct
  source 1..120: mol_type = other DNA
gcattttgaaacatacttttggcagggttccttgcagatcagaatggaaatgattaacagggcaattatcaatcatggacttttggcggcagaaggaactgtattgtttggtacagtctg

SEQ ID NO: 4681 - DNA, 120 bp, synthetic construct
  source 1..120: mol_type = other DNA
ctgcccacattttcttcataagcagctttggtgttttggcttgtttgtttcccttgtctcctacctgtgactttatagccttttggagactcacagcaatagttgtatttaaactcagtg

SEQ ID NO: 4682 - DNA, 120 bp, synthetic construct
  source 1..120: mol_type = other DNA
tgatctccagaatgtatttcaatcatcatgttcacttccttggtattctttagacaataactcagccttgaactccagtaaagggtttccctgggattttcttcttgactcactccactg

SEQ ID NO: 4683 - DNA, 120 bp, synthetic construct
  source 1..120: mol_type = other DNA
gtggaagaaaggtggtttaacaaatgcccctatgaaagatagagattggcttaccatgatgagatgtaagcccaagttatgaggttggcacacaaaaccacaaatgtcatagcttaaaac

SEQ ID NO: 4684 - DNA, 120 bp, synthetic construct
  source 1..120: mol_type = other DNA
tatcagagttgacattgggttgccccttctctgaggcattcatgtaaatccttttaagtttataaaacctccatgtggctcctgcatgcttcatcatttgcatgtgtctctttttccagg

SEQ ID NO: 4685 - DNA, 120 bp, synthetic construct
  source 1..120: mol_type = other DNA
gagccttcatccactacactgtcagctggtatctcaaccagccattacaggctgtaaaaaaattatataagatagtctatggtaatgcagaaaagtgaggttattttgctccctttccct

SEQ ID NO: 4686 - DNA, 120 bp, synthetic construct
  source 1..120: mol_type = other DNA
gcagtcttattctatgcacccgaagggataagagccatgctttcatgaaacatgggttgtgtgtaaaatgtttaaaaggtatggcaaaatgtgtttgattggcaccaaggatttctggtt

SEQ ID NO: 4687 - DNA, 120 bp, synthetic construct
  source 1..120: mol_type = other DNA
ggataattccagagtgattttaaagtcaactgccaggcatccgcacttgcaaattagatgcctggcacatgcttgtgttaaggtaataattcattacaatacaaattacaggggagttcc

SEQ ID NO: 4688 - DNA, 120 bp, synthetic construct
  source 1..120: mol_type = other DNA
acgtacttctctgtgcacgcaaaggagggcttgctagggaggcctggcagagggtgccattcaaataggattttcaatggaggaatttttaaattttcagttatttgaataagttttaat

SEQ ID NO: 4689 - DNA, 120 bp, synthetic construct
  source 1..120: mol_type = other DNA
ttcatgttttcaggagctgtacgtgcatttttagttttgatgaccaggtcctttttctgttttttaaagaacttcaaatgatctccagggtacacagcgcttgtgtgctgatgaaaaagc

SEQ ID NO: 4690 - DNA, 120 bp, synthetic construct
  source 1..120: mol_type = other DNA
ccgatttctagttttgttttgtattggatttgcacaatttcacgttctgaaagaggatgccctcaactttgcaaaatgggccttttgaatgaaaaggatcagtcatgtcaggaaaagcgc

SEQ ID NO: 4691 - DNA, 120 bp, synthetic construct
  source 1..120: mol_type = other DNA
atttcctggtgatttcatagtgtagggcacttgcaatcaaaactaggcttaaagcccaaccctcttacattttacccacccccacaaatgcagcaaataaaatgactctgattttcattc

SEQ ID NO: 4692 - DNA, 120 bp, synthetic construct
  source 1..120: mol_type = other DNA
taagcctgtaagctcttcctgctggaaccaagctttaaatgcacttgtcagtcatgtcccatgagaatagatactgccttccatgtttttttgttctgatttccgtgtttgaaatgatga

SEQ ID NO: 4693 - DNA, 120 bp, synthetic construct
  source 1..120: mol_type = other DNA
tgacaggatgacatctggtgatatcatttattcctttggaaatcaatctgtggaagtgagtttccactgactgatgaggagaaaaatgaattggcttcacccagcatccagcttcttatc

SEQ ID NO: 4694 - DNA, 120 bp, synthetic construct
  source 1..120: mol_type = other DNA
agccttatgtcagggctctcttatcgctggtttttatttctcctaataaaagtgattaaaagattcatcttttaaagaaagcaaggacacagaggtggattctccctgacgctagcacag

SEQ ID NO: 4695 - DNA, 120 bp, synthetic construct
  source 1..120: mol_type = other DNA
ttcaaaatcttctcaggcacactgatacacatacctcagatttttaattctccggttgtgttcaccaggtgcttggtcatgattaagaattccgtgatgtgtaccccatgtgtttaaatt

SEQ ID NO: 4696 - DNA, 120 bp, synthetic construct
  source 1..120: mol_type = other DNA
cagatctacaggggaagggaaggtcacacagtcatcgcaatagtaacctcagctgataaatcctcccccataaaacttattccccagtgttttttaataggaaacaataaaactgtaacc

SEQ ID NO: 4697 - DNA, 120 bp, synthetic construct
  source 1..120: mol_type = other DNA
agacagggaaaaaatgagggtgttggtagcttcgttagaaactgaaagctcactgattttttcaaaacctaaatagcctgtgtttctccaaataactaatttgcagccttcggcagccag

SEQ ID NO: 4698 - DNA, 120 bp, synthetic construct
  source 1..120: mol_type = other DNA
acaaagactgtgcttgagttctcccacatctcactcaattacacagaagtttcagattatgtaacagatgctgtgctgggttaggcagagccatctgacttgttttgctttattttagac

SEQ ID NO: 4699 - DNA, 120 bp, synthetic construct
  source 1..120: mol_type = other DNA
aatctgagacagaaccgatgcatcaaatgtgctggtgtttacagataatacaaggggggctgcatcttatggtttcaatccttttttaaatttttgttctgagagacccagccagcagac

SEQ ID NO: 4700 - DNA, 120 bp, synthetic construct
  source 1..120: mol_type = other DNA
aattaccgtgaggatgtggagcgaggctgagttctgtattttaacaccattttaattctcacctactgagaaatccatcctcttatcactgtgctttttttaacctgtcacgaatccatg

SEQ ID NO: 4701 - DNA, 120 bp, synthetic construct
  source 1..120: mol_type = other DNA
aactggacttggacatgcacactgaactgcagcgtctgctgcttcttggtggcccagctcgtcaaaagaataagatttcagcaaaacaatgtaacaattttttttaccaaaagtaatgtt

SEQ ID NO: 4702 - DNA, 120 bp, synthetic construct
  source 1..120: mol_type = other DNA
ttcccagtctctgcaagcccttcagtgtgtgtcctctctgagcaaatctgaattgtgtgcttaatacatggaaagggatttgggagggttgctttttaaactgatttcttaattaatatt

SEQ ID NO: 4703 - DNA, 120 bp, synthetic construct
  source 1..120: mol_type = other DNA
ttttatttttccatgccagaagggtagaagttcctgtgctcatattaagaaacagcaatgtcaatcgaggcccaactcaaatccaatttataggagttataaagggcgtgtgcctgtttt

SEQ ID NO: 4704 - DNA, 120 bp, synthetic construct
  source 1..120: mol_type = other DNA
aggcaagaatgatacattcatttataatgtggctccttcagaaatataccacataccttttggtgtggtttgtggctgagaagagtggggaatgcacaagtggaaaactgcagaaagatt

SEQ ID NO: 4705 - DNA, 120 bp, synthetic construct
  source 1..120: mol_type = other DNA
gccttcatttcctaatcagttttgccctgctcattcaatgcaaaatggatctgctttccttgggcaccaatatgtccagggattgtttatcaatcttcagttctgtttcctttacatatc

SEQ ID NO: 4706 - DNA, 120 bp, synthetic construct
  source 1..120: mol_type = other DNA
actagttaatgtggtaacaattatgtatttcttccctgctccttgccttctttccctccccagtttttttcttcctgatagtaggtgtgtacttttttcctatttccattggcaagccac

SEQ ID NO: 4707 - DNA, 120 bp, synthetic construct
  source 1..120: mol_type = other DNA
aaatggccataggccattcccacagaattttcaacaaaaatagaatcatgcttatgttctagtcatgacttagaacttataactcatgttcggaactgtccatgttcacgcacaggggcc

SEQ ID NO: 4708 - DNA, 120 bp, synthetic construct
  source 1..120: mol_type = other DNA
gagggacagcatttagcagaatgagcagcacagtcccataggaagaagaatttattgcctccttaggcaaataaattcccaaaccttgaacatcagaaaggaaatagattaatgtgcaca

SEQ ID NO: 4709 - DNA, 120 bp, synthetic construct
  source 1..120: mol_type = other DNA
attttcttttcctatttatgtattctgtgccagtaggaatgtagccaaaaagagagaaaaggggtctctgcagacatggatgtctctgtgacttgatcactgctaacccaagaagataat

SEQ ID NO: 4710 - DNA, 120 bp, synthetic construct
  source 1..120: mol_type = other DNA
gattccttcttacaccaaagtgcactagaactaaagtgttttgcttcattctttagacattttgtggtttagggctcaatcagccagggtatgatttgcaatccacagtaaccggtttca

SEQ ID NO: 4711 - DNA, 120 bp, synthetic construct
  source 1..120: mol_type = other DNA
gggtctcattgtgactcactttgatagccacacgatttaagggtggttcagtagtgatttgatgagtgctgtggctcagggtcattcccctgcccaagcatttcaaattccagaagttca

SEQ ID NO: 4712 - DNA, 120 bp, synthetic construct
  source 1..120: mol_type = other DNA
ttcaaaagtcaccttggaaagaggttttgttccttaaccttctgttaaataggaagctccgtgaatgaaaacaactcccttccctaaacattctagtaatgacccaacactgccaagcct

SEQ ID NO: 4713 - DNA, 120 bp, synthetic construct
  source 1..120: mol_type = other DNA
ctccacagaggtgccaaaaccaggttccttcctgtgttctcacatttcacagcctcaatgtaaaaagtaagacatgggcactctggaatattacaaaaatatagaaaagcatgttatagt

SEQ ID NO: 4714 - DNA, 120 bp, synthetic construct
  source 1..120: mol_type = other DNA
ccaagactctgttcagacaaaagtatcagaaaagtgagccaggcactcacatagtttatagtttataaaagtgagacaggcatgatctcttaacctcactatagtcctgtgaataaggtt

SEQ ID NO: 4715 - DNA, 120 bp, synthetic construct
  source 1..120: mol_type = other DNA
tcgaaagattctcctaggaaaagaaaggcttgacaacatcgattcaaaaagggcatgcattttcctcatttaaataactctaatgtgcaagtagatcccctgacctcaagctcagaagag

SEQ ID NO: 4716 - DNA, 120 bp, synthetic construct
  source 1..120: mol_type = other DNA
gtaaaagttgtcttgccacctttttagatcggtaaaagtttgttgaatgcaggcaagaaaagatgagaaataatggtacccaatgaaagacatagcagtctacaaggaggggcatttccc

SEQ ID NO: 4717 - DNA, 120 bp, synthetic construct
  source 1..120: mol_type = other DNA
atgaatcctttattcataaaatgcttagatggagattacccttttgagcattttgccagtgcttctgaaattaatggggacctcctgttggaggacacagtctgttgcaataggtgacca

SEQ ID NO: 4718 - DNA, 120 bp, synthetic construct
  source 1..120: mol_type = other DNA
tggaccaagtaagcctaaaactctgctctttcccctgctcattttacagttcaagtgccattcaatttatcctggcaagaagaggaaggcatcatcaagaccttaattttctaatacatc

SEQ ID NO: 4719 - DNA, 120 bp, synthetic construct
  source 1..120: mol_type = other DNA
gaaagttaactcttgttagtagagaaagcaatgtattacaaccacaaggacgtttacatggaaatgaaccatctgcaaagcatcccccattttccttttaaatcagccaatgggtggtgg

SEQ ID NO: 4720 - DNA, 120 bp, synthetic construct
  source 1..120: mol_type = other DNA
tttagcatgaaaacaagagctcctcacactgtcctcttcagaaagcccatacaatccaaacttctgaatgcttagctgcttacaaccatacatagattgagggataaaactctgatatgg

SEQ ID NO: 4721 - DNA, 120 bp, synthetic construct
  source 1..120: mol_type = other DNA
aaaaagacttggaggggagacctgagcccacttctggaaggaaatgataacaatttatttagataatctttgtgcaacaagtcaattcactgaagagatctgctctctaggagcctctgt

SEQ ID NO: 4722 - DNA, 120 bp, synthetic construct
  source 1..120: mol_type = other DNA
ttaaatatcacgtctgggggaagaaaatgtgatatgtgattacagacctttcctggtacaacatagtacgtttcagattaactcaaggtattgtggtgatattgcggtcaaagccaggtg

SEQ ID NO: 4723 - DNA, 120 bp, synthetic construct
  source 1..120: mol_type = other DNA
tgtgtgtgcaagtaagtgtgtatacgtgtgtgggcatgtattgtgtacatgtatgtgtgttttatgcatctgtttgcaagtatgtgtgtatgcacataaaagtgtgaatgtacatgtgtg

SEQ ID NO: 4724 - DNA, 120 bp, synthetic construct
  source 1..120: mol_type = other DNA
gaggcctaatgggcccttctccacatggcagtaagatctgtttttgtgtttgtgtttcaagttgggagaaggagattatttaatactaaaatgtgcaacatgggattgagaaaactaatt

SEQ ID NO: 4725 - DNA, 120 bp, synthetic construct
  source 1..120: mol_type = other DNA
agtcaatgctatgtcccaggactgttcgtttttgcacatactaatcctaaaaggacgatgacaacagcaaccacttacatgacctagatgctcttctgggtgttgtgcaaatattaacaa

SEQ ID NO: 4726 - DNA, 120 bp, synthetic construct
  source 1..120: mol_type = other DNA
atggtgatgtgacattttgggttttgtatttcttttgcaaattgagctagcatttttgatgagtggcagggctctgctacccaacctttggacagtttccaagcataaaatcacaattcc

SEQ ID NO: 4727 - DNA, 120 bp, synthetic construct
  source 1..120: mol_type = other DNA
tgcctgcatttgaaagacacttctgctgatcaaagcagctgatgtgtccctttgcggttcatttctaattgtccccaaggaggagaaattcaaatagtttattactgagagttaaagaaa

SEQ ID NO: 4728 - DNA, 120 bp, synthetic construct
  source 1..120: mol_type = other DNA
gttatctctttaaaggacaaaatgtgctgtgaaataatagaatgctttcagcactcaagtgtgagtgagtgctcatacatgagagaaagccgtggggactacagaagccaagaagcagat

SEQ ID NO: 4729 - DNA, 120 bp, synthetic construct
  source 1..120: mol_type = other DNA
cctattgcaagaatgtcctgagccaaaattaagattcttctatggcagaaacttggctggggcttctcctgagttaacttggtagttgttagtgatttttgagtcagtttttccttgtca

SEQ ID NO: 4730 - DNA, 120 bp, synthetic construct
  source 1..120: mol_type = other DNA
gccggcagaggctggctttccaccttctttttttttttttcactcttcaaacactttatgacatgaacataaactactggctgcatcgttctgctgacaacatgacatgtttctataact

SEQ ID NO: 4731 - DNA, 120 bp, synthetic construct
  source 1..120: mol_type = other DNA
aaagaacatttaaaccatcttgggctaggggtggatatgcaccaccccacggaagccaaacaaaatctctctgcagataaacatttgcaaaaagaatttccaatcccaatttttgagtca

SEQ ID NO: 4732 - DNA, 120 bp, synthetic construct
  source 1..120: mol_type = other DNA
tcagggcagtgagtacttctgattcatccttagcagctaccttcgcgctactttactagatatgttgtagttgaattaatgaacaaaagaacaagcaactttggtgcctggtgtgcatct

SEQ ID NO: 4733 - DNA, 120 bp, synthetic construct
  source 1..120: mol_type = other DNA
cacagacttttggaggggaagtggtattattcagttcaaaagtatgcctgtgtgtaaagagagagcccctgaacatgagtaagcaaaagtctcagcgcagagattagacaagtagaatgc

SEQ ID NO: 4734 - DNA, 120 bp, synthetic construct
  source 1..120: mol_type = other DNA
actcccaagaggtattctcactctacttagtgtatattttacaaatcacaagcttggctttggattcttttaatggctagaaggagaatcatggggttggaagtccaccagtttgggtat

SEQ ID NO: 4735 - DNA, 120 bp, synthetic construct
  source 1..120: mol_type = other DNA
tcctcctgtcatgcttccgtgcatttgagcacatttgagatgtgtatacatgttcactttgagattttagtatagcaaaagaaatgaccggtcctgattcaatgaaacctctggcaaact

SEQ ID NO: 4736 - DNA, 120 bp, synthetic construct
  source 1..120: mol_type = other DNA
agttattcctacttaataataagtagtgatcactgccagggagcagagaatgcaggataatgtgacagatgtaatggtgggtacttaagctaatgtagttgcagaacaggcttttctaga

SEQ ID NO: 4737 - DNA, 120 bp, synthetic construct
  source 1..120: mol_type = other DNA
attttaggacaaaaagttagtgctttgaagtcctaagtcatagggcctgctgctcttgatgcagtagaatttgtcttcagatttgcaaagggtaaggcaaaccactagcattttgtatgg

SEQ ID NO: 4738 - DNA, 120 bp, synthetic construct
  source 1..120: mol_type = other DNA
acagcagagatcaacgttattgtcaccattttcatatttgaggaaagcatggcacagagagcttggagaagtacttcaaggtcacccaatgaggaagtggctaaacaaaaaccttatctt

SEQ ID NO: 4739 - DNA, 120 bp, synthetic construct
  source 1..120: mol_type = other DNA
ataataaaaattctttggttcagctgagagaaacttgcaagctgacgtccttgattatttaaaatgaaagcagctgcctgttttcatctctctgcatcctgaggaaactcttctgcaacg

SEQ ID NO: 4740 - DNA, 120 bp, synthetic construct
  source 1..120: mol_type = other DNA
ccaaagccagaggccatatttcttcactcttaagataatttgggttcaaattatagtccctttacacactctctgcctcaaaaggcccaagactctcttttgttatgcttgcctaaacat

SEQ ID NO: 4741 - DNA, 120 bp, synthetic construct
  source 1..120: mol_type = other DNA
gatcttttatcacaaatttctttgctgtgtcctttagtgagaatttgtattatcagtcactaaagctcactaagttagtaagctttgcgcccagatgacctgggcaggaatgggtgagtc

SEQ ID NO: 4742 - DNA, 120 bp, synthetic construct
  source 1..120: mol_type = other DNA
acacagtggagcgaattcctttggaaaacctgcagatcatcagaggaaatatgtactacgaaaattcctatgccttagcagtcttatctaactatgatgcaaataaaaccggactgaagg

SEQ ID NO: 4743 - DNA, 120 bp, synthetic construct
  source 1..120: mol_type = other DNA
gatgatagaaaagaagggaaattgattttaaaaaactggagatagcagtgattgtgcctcactgtgcagtgggtttggggccaggaatgttaaattggtaacttcatttaacgcccacaa

SEQ ID NO: 4744 - DNA, 120 bp, synthetic construct
  source 1..120: mol_type = other DNA
aagtgactgtaggaacaggcctcagcagctccttccacttccttggtatgattgttttttaaaccaaggctgggattgtatagatgcagattagttaatgtgataccattaatagctaac

SEQ ID NO: 4745 - DNA, 120 bp, synthetic construct
  source 1..120: mol_type = other DNA
tgtttaatgtcatcagtggaacactcccactttgtaaagacttgaatgtgttcatccctgacttttccacatcttgttagttcttctttggaaacagctgtacagtttcaccatcctgtg

SEQ ID NO: 4746 - DNA, 120 bp, synthetic construct
  source 1..120: mol_type = other DNA
ctacagcactggggcaggggagagaagccatgtttagtaagtcacattaatcagaaacaaaaagtagtaagcaaaatatctgaccactagaaaagcatgtatttaccacggacatagaga

SEQ ID NO: 4747 - DNA, 120 bp, synthetic construct
  source 1..120: mol_type = other DNA
tgcaaaatttcatattatgagatcaaggttagcatttcctcagctgtctggtggacaatggggaggttaaactgtgcacattttatttttttttaatgaacctggaacggttatggggcc

SEQ ID NO: 4748 - DNA, 120 bp, synthetic construct
  source 1..120: mol_type = other DNA
ctgattgccatgaagagggttaatatccttgctatatcactctgtgaagtcatctttaaaagactaagaaaaagatgaatctcttaataaaaacctggcccagaacatgagcagcctctc

SEQ ID NO: 4749 - DNA, 120 bp, synthetic construct
  source 1..120: mol_type = other DNA
tataatagaaatttgaaaattatatgtgagtacagggtaaaaagttgaaagaatgggattgcacgctacagatctagctgcttttagcacgcctgcgtaggaccttgctttctctagacc

SEQ ID NO: 4750 - DNA, 120 bp, synthetic construct
  source 1..120: mol_type = other DNA
ctcagtttccgcagctgacatgtaaataaaagcagttcatggttcatcttcttttcttatcggggtctcaagtgattctacaaaccagccagccaaacaatcagagaataagttgaaaag

SEQ ID NO: 4751 - DNA, 120 bp, synthetic construct
  source 1..120: mol_type = other DNA
ctgttaggcccttctaaacactacttcccagcaggtatttttgttctttgtatgtgctttctgcattgcccaagatgcatctaattatttagcaggtctcaaagtctagacttgatctca

SEQ ID NO: 4752 - DNA, 120 bp, synthetic construct
  source 1..120: mol_type = other DNA
tgatgcataacaaagtctctcccagttgaatgcttaaatgatgagatgcctgtgatgtccgtcattaggacctgggcacagaacaagcactaaatactacatgcaagtatttgtcatgaa

SEQ ID NO: 4753 - DNA, 120 bp, synthetic construct
  source 1..120: mol_type = other DNA
aacagacgtatttttatcataatccataaattatgataggtgggacagtgcacctaagaaaaaaatggactttttagagaagggtctttctgactctgcagagggcgccagctgggtttt

SEQ ID NO: 4754 - DNA, 120 bp, synthetic construct
  source 1..120: mol_type = other DNA
ctaaagaaaaatgtgccacagtgatgacacagatatatctttgagatagggcttaacagagctttaaaatccataggaaaacacttcgagcctgagataccaagagcagatggttcacag

SEQ ID NO: 4755 - DNA, 120 bp, synthetic construct
  source 1..120: mol_type = other DNA
ttctcattaaaaaacaactatacatatcgtttctttaaaacagaagataaagctgtaaagctaggttaggcaatgggaaggcactgaaggttgtgacggggtggggggctctgatgagaa

SEQ ID NO: 4756 - DNA, 120 bp, synthetic construct
  source 1..120: mol_type = other DNA
aaacatttcttctgaaattttaccgttaatggctgatgttttgatatttttcaaaagtgcagtttctcctgcaggcaaaaggggacacgttaagtccaggcttgggtcattcactgcggt

SEQ ID NO: 4757 - DNA, 120 bp, synthetic construct
  source 1..120: mol_type = other DNA
ggaccagagagactttttagcaccactcttcaagaatttccactttttcagctttgacagtggaatagacatgcaggtgctcacacacaagcatctttaatatggtaatggtaatcatca

SEQ ID NO: 4758 - DNA, 120 bp, synthetic construct
  source 1..120: mol_type = other DNA
atctgtgtaggagaaaggaaaaagatgggggaaagaagagcagcagggagaggagaagcctctggatgatactctaaccccctgccatccaacacctgaacatcagtctcttcatccagt

SEQ ID NO: 4759 - DNA, 120 bp, synthetic construct
  source 1..120: mol_type = other DNA
tttcaaaaggtgcagtgtgtgcctcccacagcatgacctaccatcattggaaagcagtttgtagtcaatcaaaggtggtctggagaaacaaagttttcagggatacattgtttttataat

SEQ ID NO: 4760 - DNA, 120 bp, synthetic construct
  source 1..120: mol_type = other DNA
gtcaattcccttaatctgtttaggctttggcttcctcatccatagaatggagatatgaatgattcctacgccgtagtgctttgagagaattcagtgaaattcctgtgtgtaaaacccttc

SEQ ID NO: 4761 - DNA, 120 bp, synthetic construct
  source 1..120: mol_type = other DNA
tggttcatctagccaacaccgtggccatttgggcttttctttgtagtgcccgattcctggtgtgtgaaaataaattaacacaaattatattgccaagttaatatctgttttatgtgcccc

SEQ ID NO: 4762 - DNA, 120 bp, synthetic construct
  source 1..120: mol_type = other DNA
gagggtagaactatgcttgactactaggcagagtccagtcttactgacaaacagccgtacatctgttctgtcttttcaatcaaacatcagcttcttgcttaacattgatgtgtacatctt

SEQ ID NO: 4763 - DNA, 120 bp, synthetic construct
  source 1..120: mol_type = other DNA
tatctaagcttatcaaatcctcacatttaacggaggctgttttcacctggtttcccccatccctgacctagtcagcattgctttatcgctttcatcaaacatcctcaaattcttaacatt

SEQ ID NO: 4764 - DNA, 120 bp, synthetic construct
  source 1..120: mol_type = other DNA
cagggagaacttctaagcaactaacagtgaccatatcaagcaggtgcaatcacagaataactggttttctcctttaagaatttttctatcatttggctttccccactcacacacactaaa

SEQ ID NO: 4765 - DNA, 120 bp, synthetic construct
  source 1..120: mol_type = other DNA
gccacagtctccaggggcttttgcgtttctctccagatttctaaggttaacatggggattagctgttttgcaatgaataaaaggtaacattgcctggaatgttgcttaaagacacttttt

SEQ ID NO: 4766 - DNA, 120 bp, synthetic construct
  source 1..120: mol_type = other DNA
tgatggtggtgatgatgatgaggaggtgggagtcacaatggtgtcagtgttgatggtggcgatggtgatgaggaggtgggagtcacaatggtggtggtgatgacggtgttgacagtggtg

SEQ ID NO: 4767 - DNA, 120 bp, synthetic construct
  source 1..120: mol_type = other DNA
tgattttgaattttaacaaatatttccctgggaacaatgtaagattcttcatattttcgcctttgggtataccaacatgccagctctgttggccactttgtgagctcgatgaagcatggt

SEQ ID NO: 4768 - DNA, 120 bp, synthetic construct
  source 1..120: mol_type = other DNA
ctctcatttctcagatgggatgtattgccttctccatttctattgttaaagaaacacttacaggggtttctttaacaacttgtgaacagcagcatcagagcccagactacagcataagca

SEQ ID NO: 4769 - DNA, 120 bp, synthetic construct
  source 1..120: mol_type = other DNA
catattgaaatgtacttgtccatctttctccaggccaggaaatgagagtctcaaagccatgttattctgcctttttaaactatcatcctgtaatcaaagtaatgatggcagcgtgtccca

SEQ ID NO: 4770 - DNA, 120 bp, synthetic construct
  source 1..120: mol_type = other DNA
gccagctgtgggacaattatctgtgtcaaaagccagatgtgaaaacatctcaataacaaactggctgctttgttcaatgctagaacaacgcctgtcacagagtagaaactcaaaaatatt

SEQ ID NO: 4771 - DNA, 120 bp, synthetic construct
  source 1..120: mol_type = other DNA
aaggttgaaaagtcttattcaaactcaccaggaaagagtggtgttactctcgatggcgtctagccaggaatcatggaattatacaccgagcacctgtttgccattttggatgtttccaaa

SEQ ID NO: 4772 - DNA, 120 bp, synthetic construct
  source 1..120: mol_type = other DNA
gggccattagcagttgtgtatgttagatacataattgtattatgatgcagaaagaatctctgaatgtgcagttatacccagttggtgacatgttggtacatccatccgaggaaatggcaa

SEQ ID NO: 4773 - DNA, 120 bp, synthetic construct
  source 1..120: mol_type = other DNA
ggagcccagagtccttgcaagctgtatatttccatcatctactttactctttgtttcactgagtgtttgggaaactccagtgtttttcccaagttattgagaggaaatcttttataacca

SEQ ID NO: 4774 - DNA, 120 bp, synthetic construct
  source 1..120: mol_type = other DNA
agaaatggaggcataaagaaattggctgacccttatatggctgggatagggtttaagccccttgttatttctgactctgaaacttgcattcaattcactccaccaagttatctcatcttt

SEQ ID NO: 4775 - DNA, 120 bp, synthetic construct
  source 1..120: mol_type = other DNA
tacaaattgagtcaagtcctagtaacaaaatgttaagtctattaacataaccacaagaaatacaggaagacgggcaatctgtgaagcctttcacttacaatctctggcccctcacctgtg

SEQ ID NO: 4776 - DNA, 120 bp, synthetic construct
  source 1..120: mol_type = other DNA
aataaataaaagaaataaaagaaagctcagtttggcctcctgcttgtcctgtctcctcatcccctcttccccctccatcattttatttccttgccccatgtttcttcactgcggccatgt

SEQ ID NO: 4777 - DNA, 120 bp, synthetic construct
  source 1..120: mol_type = other DNA
agcagatgggctgctcaaactgctctggtttgcagatttttcttccctctcaaatgaatacaatatgttttcaagtctcaaccagatcttgagaaaataggaagagccagagggtttctt

SEQ ID NO: 4778 - DNA, 120 bp, synthetic construct
  source 1..120: mol_type = other DNA
tgaccaagccgttctttcctcaaaaacttggtggggagggtatttttaaaatcacacaaatatttaagtacagattatgatgactgcctcaaagcagtggctcttcagcttcatcaagct

SEQ ID NO: 4779 - DNA, 120 bp, synthetic construct
  source 1..120: mol_type = other DNA
aagtccacactcaaaacataggcattgctgagatgtgaaaagcagctgtggatgctttctgctacagtctgtgtgttcttttccatatctgaataaaaggtcaccaccatttgtatttta

SEQ ID NO: 4780 - DNA, 120 bp, synthetic construct
  source 1..120: mol_type = other DNA
gatattttaaaacacagcatcctcaaccttgaggcggaggtcttcataacaaagatactatcagttcccaaactcagagatcaggtgactccgactcctcctttatccaatgtgctcctc

SEQ ID NO: 4781 - DNA, 120 bp, synthetic construct
  source 1..120: mol_type = other DNA
aaacccctcccatctccatcccagtcttgcatcagttatttgcactcaacttgctaagtcctatttttttctaacaatgggtatacatttcatcccattgactttaaaggatttgcaggc

SEQ ID NO: 4782 - DNA, 120 bp, synthetic construct
  source 1..120: mol_type = other DNA
tcacaaggccttttcctgtgtctctgcaaccacaggcccctctcctttctcttaataaagataccagtcattgagtttgaaaattgctaagagagtctgttgtaaatcttcttagcacaa

SEQ ID NO: 4783 - DNA, 120 bp, synthetic construct
  source 1..120: mol_type = other DNA
ttatctgaagcagggaatggagagcactgccctccttgcccaggcagtctctatcacctggttttagtttcttcttagcacatattgccccagaatatctggttggtttatggcttactt

SEQ ID NO: 4784 - DNA, 120 bp, synthetic construct
  source 1..120: mol_type = other DNA
taaactcctggcatcctcaaaatgggatttattggcttataaatgtcctgtgttgactcacaaaggcacaaactatctaggtaagttttcttctaaatgttgatgggagagctggccact

SEQ ID NO: 4785 - DNA, 120 bp, synthetic construct
  source 1..120: mol_type = other DNA
ttaatgcagatgaacatcaaagaaaacgtcaaaggctcctttttacaagtacgtgggctacttaatttggtccaagtccattttaaaaagccctaggtgctttcacggctctgctactga

SEQ ID NO: 4786 - DNA, 120 bp, synthetic construct
  source 1..120: mol_type = other DNA
ttaagcatttacctgctagtgttaagcatcacatgaaatacatatagaagtaagacaaaatttcttatctccccaagtttgccaacaaatacagagcaggaagggaagcaggtcagagca

SEQ ID NO: 4787 - DNA, 120 bp, synthetic construct
  source 1..120: mol_type = other DNA
tgatggtggtcttggtctcagcatggttctggtagaggtgggttattttgaagatgatgaaccttaagcctctttctgatcttgctttaaataaatacttctgaacaacagcaacaacag

SEQ ID NO: 4788 - DNA, 120 bp, synthetic construct
  source 1..120: mol_type = other DNA
agacccatgcgtcaagtctcctctaagttcacatgggattctctccttgtcccaaagctgtctctgacttaaaaccctccaactgattacctgaattccagaatatgtcctgtgctctct

SEQ ID NO: 4789 - DNA, 120 bp, synthetic construct
  source 1..120: mol_type = other DNA
tcaacaaatgtgaagaacgaacaaaaggtacaaatgtgaagaacgaacagggtagaaagaaaggagaaagcaagggtgagggtgagaaatcaagggacagagaagagagaagaggagata

SEQ ID NO: 4790 - DNA, 120 bp, synthetic construct
  source 1..120: mol_type = other DNA
aaaccagtgaaaagtaaaacaggacaaaaatcttcataggcagtgaaccatatcagagagtccaagaaagcacaatgagagtgtggcttaaaaaccctgaacgacattcctttgcaccag

SEQ ID NO: 4791 - DNA, 120 bp, synthetic construct
  source 1..120: mol_type = other DNA
tgctttgggaacagtacttgctgggacagtgaatgaggatgttatccccaggtgatcattagcaaatgttaggtttcagtctctccctgcaggatatataagtccccttcaatagcgcaa

SEQ ID NO: 4792 - DNA, 120 bp, synthetic construct
  source 1..120: mol_type = other DNA
attttctttcgagataatgactaatgataatgtaatcattgctgtctatctattgtactgagaaaacacggcagaggaaatcgagtccagctgccgtccaaaagtcactggagattgcaa

SEQ ID NO: 4793 - DNA, 120 bp, synthetic construct
  source 1..120: mol_type = other DNA
gatttgtgtccatgaataagtgaagtttggtgtgcacctgtgagctgagccacctcaattaatggaacagataaggaaataaaggtctgctgatgcattgttatttacagccattttcag

SEQ ID NO: 4794 - DNA, 120 bp, synthetic construct
  source 1..120: mol_type = other DNA
tcctgttttctctactctctagtctctagtcaaggtgaattattcaatttaataaattaggggcctagtgtgttgtaccaaggagctaaaaagagagaactcgcaacaccttccagccca

SEQ ID NO: 4795 - DNA, 120 bp, synthetic construct
  source 1..120: mol_type = other DNA
gggcatttaggttgattccatgtctttgctattgtaaatagtgctgcagtgaaaatacgcatgcatatgtctttatggtagaatgatttatattcctttgagtaatgggattgccgggtc

SEQ ID NO: 4796 - DNA, 120 bp, synthetic construct
  source 1..120: mol_type = other DNA
agtttaaagtcaggtagcatcatgcttccagctttgttctttttgcttaggattgccttggcaattcaggctcttttttggttccatgtgaatttttaaattgtattttctagttctgtg

SEQ ID NO: 4797 - DNA, 120 bp, synthetic construct
  source 1..120: mol_type = other DNA
aacttaagctttttcatttccaatttttttatgatctaaaaatgtgcagtttacagccctgttcagaatctgcatcttcctcattctgcagatacaggtccctcagagcaggtgactgag

SEQ ID NO: 4798 - DNA, 120 bp, synthetic construct
  source 1..120: mol_type = other DNA
ctttgcatccctggagaaatgtcatcacattacttaaggcaggcacacaaatccagaaacatctgtaaataccccttcaagcattcttttaaagacacttcttgactcattgggcagtat

SEQ ID NO: 4799 - DNA, 120 bp, synthetic construct
  source 1..120: mol_type = other DNA
tgggcgtagaaaaactagagggcattattgttattctgattcaaatgtacagtgctggcatggtctttaaacagtaaccagtactagctggccaagacagaaaagtctaccacaaagact

SEQ ID NO: 4800 - DNA, 120 bp, synthetic construct
  source 1..120: mol_type = other DNA
ttctgtttcctcagaagctatttgaatctcatgtaggggctttcaagcatcaaaggatggttcatgttttattttaaggcacccacatcatgtcatgaggggaggcagctataatttaga

SEQ ID NO: 4801 - DNA, 120 bp, synthetic construct
  source 1..120: mol_type = other DNA
gaatttacagctctccactatggctctattttacatggaaaatgccttaacctaaataattttaacccagataatcttgagttttcttcctgtgtgggtttttccctgcacggctgtcac

SEQ ID NO: 4802 - DNA, 120 bp, synthetic construct
  source 1..120: mol_type = other DNA
gttgtgtctggttgtttgctgtacctctgttgtaagaatgaatctgcaaaatttctagcttatgaagcaaatcacggacatacacatctgtgtgtgtgagtgttcatgatgtgtgtacat

SEQ ID NO: 4803 - DNA, 120 bp, synthetic construct
  source 1..120: mol_type = other DNA
ctatctaatataatataaacagattatcaatattataagctattagaaaaatgcaagttaaggcagatgatatacctctttacacaccaactacacacaccaactacacacacacataca

SEQ ID NO: 4804 - DNA, 120 bp, synthetic construct
  source 1..120: mol_type = other DNA
acatacacacactctcctcaaggcagtttatcctctgagaactttaaatttacaaaagacacatatgtccattactttgagaaggacaggaaagaacccactttcttttgcagcaacagc

SEQ ID NO: 4805 - DNA, 120 bp, synthetic construct
  source 1..120: mol_type = other DNA
atgtgaggatttttattgattggggatcttggagtttttcattgtcgctattgatttttacttcaatgggctcttccaacaaggaagaagcttgctggtagcacttgctaccctgagttc

SEQ ID NO: 4806 - DNA, 120 bp, synthetic construct
  source 1..120: mol_type = other DNA
ttacagctctggccacaacagggcattttacaggtgcgaatgacagtagcattatgagtagtgtggaattcaggtagtaaatatgaaactagggtttgaaattgataatgctttcacaac

SEQ ID NO: 4807 - DNA, 120 bp, synthetic construct
  source 1..120: mol_type = other DNA
gttaaccactttcattattcattcacctcaggacatgcagaaatatttcagtcagaactgggaaacagaaggacctacattctgctgtcacttatgtgtcaagaagcagatgatcgatga

SEQ ID NO: 4808 - DNA, 120 bp, synthetic construct
  source 1..120: mol_type = other DNA
actctatattcgctgtgagtccaggttgtaagggggagcactgtggatgcatcctattgcactccagctgatgacaccaaagcttaggtgtttgctgaaagttcttgatgttgtgactta

SEQ ID NO: 4809 - DNA, 120 bp, synthetic construct
  source 1..120: mol_type = other DNA
tttgaaactgaaatctttgtttaaaagggttaagttgaggcaagaggaaagccctttctctctcttataaaaaggcacaacctcattggggagctaagctaggtcattgtcatggtgaag

SEQ ID NO: 4810 - DNA, 120 bp, synthetic construct
  source 1..120: mol_type = other DNA
aggattcatgctttaagaaacatttgttatacattcctcacaaattatacctgggataaaaactatgtagcaggcagtgtgttttccttccatgtctctctgcactacctgcagtgtgtc

SEQ ID NO: 4811 - DNA, 120 bp, synthetic construct
  source 1..120: mol_type = other DNA
tcgccaagacagccgcagtagcttcttaatggctctccctgcctctacttttgcctcttccaacctgcgctccattttgaaaaattaaaatttgcccatatcactttttttttcttaaaa

SEQ ID NO: 4812 - DNA, 120 bp, synthetic construct
  source 1..120: mol_type = other DNA
actgatactgactgagaagctgaaatgaacaaaacaaccccttagccctccaggagctgaccggaaatccagtgctaatactactttgcatcttacagattagttcttttacaatactgt

SEQ ID NO: 4813 - DNA, 120 bp, synthetic construct
  source 1..120: mol_type = other DNA
acgggcgtgagccatgccacacggccataaaatattaattttcgcagctttcttatattttagaactaacaatggaaatttgttcgggtctaaagtatttcagaggtccttgaaaaccca

SEQ ID NO: 4814 - DNA, 120 bp, synthetic construct
  source 1..120: mol_type = other DNA
catcaaatgtttattaagtttaccatgtgcaagtctctgggaacagagtgatgaacaaggcactgtacttttcatggtcagaggagggaaacaggccataaacaagtgtcaaacaaaaga

SEQ ID NO: 4815 - DNA, 120 bp, synthetic construct
  source 1..120: mol_type = other DNA
agggtacgtgttatgcgcgtagtattatggttgttatttttgagaatatatctagaaagataaaaaagaaagtggaaatagttcttgcctctggtgggaagtgggactatgtgcctgatc

SEQ ID NO: 4816 - DNA, 120 bp, synthetic construct
  source 1..120: mol_type = other DNA
ggatgaaaacctttgtgatgatccacttccacttaatgaatggtaaatatgttttttcttacttatgattttcttagtagcattttcttttctctagcttcctttattgtaaaaatacag

SEQ ID NO: 4817 - DNA, 120 bp, synthetic construct
  source 1..120: mol_type = other DNA
ggtagtgatcaaagtctggtgctttagcccaaaggagaaatgatagagactcagactagctggtgatggaggtagaataagcataaatgtatcaaaaagaggagttgatagatcttaaag

SEQ ID NO: 4818 - DNA, 120 bp, synthetic construct
  source 1..120: mol_type = other DNA
ataccaaatccgaaaatattgtgaccaggaaccattctgtccaactcttctatttcaggtggcaaagcaaagctatattcaagaccacatgcaaagctactccctgagcaaagagtcaca

SEQ ID NO: 4819 - DNA, 120 bp, synthetic construct
  source 1..120: mol_type = other DNA
gaagcaggatctttgtagagggagggacctacagttacctggacttctttcctctgtctcccctcttggtacccttgactggggctcttgagggtaatgggtgaagccaaatctgccatg

SEQ ID NO: 4820 - DNA, 120 bp, synthetic construct
  source 1..120: mol_type = other DNA
ccagaagggctgctgtgttccatacacagcaatatttctcgaatgtttgtgacagcggtccaaggaataagttaattttacattatcactctggatacctgtacaaaactccaccttatc

SEQ ID NO: 4821 - DNA, 120 bp, synthetic construct
  source 1..120: mol_type = other DNA
accccagcatagtatgtcagatgctgttttacagatgagccaactgagaccagagatgctcagtcacttgcccaaggtgacatgactgatatggaatagagtcaagattttttttttttt

SEQ ID NO: 4822 - DNA, 120 bp, synthetic construct
  source 1..120: mol_type = other DNA
agttcgtttaaaaaaaaaaaaaagtcctttcgatgtgactgtctcctcccaaatttgtagaccctcttaagatcatgcttttcagatacttcaaagattccagaagatatgccccggggg

SEQ ID NO: 4823 - DNA, 120 bp, synthetic construct
  source 1..120: mol_type = other DNA
agatggcccatccaagagactggcgctttccaggctccgaggggctccgggaacttgtcaaagaagttctctgaaattgttcagaaagttttcccgcaaagggtgtattgcgtagagcgc

SEQ ID NO: 4824 - DNA, 120 bp, synthetic construct
  source 1..120: mol_type = other DNA
acctgtgtgcattaatcataaaagctaacatatagcctgggccaggtatactctgccaggaactgtttgtggtgttttgcatgcattctcctttaatcctagaacacccctatagtggaa

SEQ ID NO: 4825 - DNA, 120 bp, synthetic construct
  source 1..120: mol_type = other DNA
ggcctagggggagccccagaggggtcaggatttttctgaaatcctttcttagaggtatgggttttacaaattgcagcaaatacatccttttaatcttgcagaactccttcatattttaat

SEQ ID NO: 4826 - DNA, 120 bp, synthetic construct
  source 1..120: mol_type = other DNA
tctttcaaggagtgggagaattattctagcgaatgtttgtgttgtcccagttctgtttacaaagcctcgtcatgtttacagatggctgcgcaattcattacctcatttaactctcatgta

SEQ ID NO: 4827 - DNA, 120 bp, synthetic construct
  source 1..120: mol_type = other DNA
agtccagagagacatgaaggactgtgaccagctctgagcagagagatggattccatgacctcaactggtcccttttgttcggagactcgtgactggacttcattcatccactcattcatt

SEQ ID NO: 4828 - DNA, 120 bp, synthetic construct
  source 1..120: mol_type = other DNA
gagcctgtggtgtttatcggtggcattgggagaattagtgtgtatttatgttggcgtggggtgtggggtggatttgtgtgtgtgcagttaggcctagtggaaggaatgtgggatctgaag

SEQ ID NO: 4829 - DNA, 120 bp, synthetic construct
  source 1..120: mol_type = other DNA
cagaaaaacaagttcaactgggcactttaatctcccctcactggcaggcctggtgtgagctgctaccccggcgcccctcaccaggggtgctttacctcctctagtattcctgaccttagt

SEQ ID NO: 4830 - DNA, 120 bp, synthetic construct
  source 1..120: mol_type = other DNA
aagaaggtgccctgcccttctgtttcctctcttgttgtggtttctcaaccaggaagtcctttctaacatctaacccccattcattttactgcagaatcagttgactctctctataacgtg

SEQ ID NO: 4831 - DNA, 120 bp, synthetic construct
  source 1..120: mol_type = other DNA
gtttatgaaatgcccccccaccattatctttcttgatcatataagaatctggtgaggcaaggtagggcgtgatctttatctctattttatcgttttatttaagcgggaacaggactgctc

SEQ ID NO: 4832 - DNA, 120 bp, synthetic construct
  source 1..120: mol_type = other DNA
tacatatgagaaaactgaggcttgcagatataagggccaaaagttacacagctagtgagtgatggggctgagtttcagactccacagtctcttaaccaccaagcagcatgcccagagtag

SEQ ID NO: 4833 - DNA, 120 bp, synthetic construct
  source 1..120: mol_type = other DNA
tacaacacagacacgtttgagtccatgcccaatcccgagggccggtatacattcggcgccagctgtgtgactgcctgtccctgtgagtgccagggagaaacacagttttctcattttggt

SEQ ID NO: 4834 - DNA, 120 bp, synthetic construct
  source 1..120: mol_type = other DNA
tggtatgtactaagtgctcctaaatgttagcttttattctatagcctggtgaggtcagttttacctttcgttttgtttttgagaccgaatttagttagctctatcgcagtggcgcgatct

SEQ ID NO: 4835 - DNA, 120 bp, synthetic construct
  source 1..120: mol_type = other DNA
ctccctttttgcaaaatgggaatctcacagtgctgatcccgtctggttgttgtgaggggtaaatggatgtcaggtgctgatgcgtggtagggcatttaagtattggttgatattattctt

SEQ ID NO: 4836 - DNA, 120 bp, synthetic construct
  source 1..120: mol_type = other DNA
ctcaaatgtgcatcactaggtgaaggaataaacaagtggcagtgtatccatttggtgaagttctacttagcaaccaaaggaaatgaactaccgatacaacataaatgaatctcagaaaca

SEQ ID NO: 4837 - DNA, 120 bp, synthetic construct
  source 1..120: mol_type = other DNA
ttaacagtgtgtgtgttcacctagaccgtttatgcatctgtagacacacacacagtgaagtgtggttttcgtcgttttggtggggaggttggtttctgtaaatgggaacatatagggagc

SEQ ID NO: 4838 - DNA, 120 bp, synthetic construct
  source 1..120: mol_type = other DNA
aaataagatttctagatcaaaggatataaatactgttttgatagatgttgccgaactaaggcctgggctttgaagcccaggatgggaacagctgggctcgatgggcaaagggtttgagtg

SEQ ID NO: 4839 - DNA, 120 bp, synthetic construct
  source 1..120: mol_type = other DNA
gcacccttcttgactcagcacagctctggctggcttggcctcttggcatggcttctctagctgggtcctacctgccttggcatccttccctccccctctgtttctgaaatctcagaactc

SEQ ID NO: 4840 - DNA, 120 bp, synthetic construct
  source 1..120: mol_type = other DNA
ccttggttttttattcctaaaatgggtattgtaataatacctaccttgctggggtgtggcaagaatgaaattaaacagggcttggcacagtgaagcacgggaaaggctttctacagagca

SEQ ID NO: 4841 - DNA, 120 bp, synthetic construct
  source 1..120: mol_type = other DNA
catgaaacacatgaatacatccttgtgataaacattttcagtaacataaaagtataaatgttacaaagccaacgtgccctttcactcaactccctgtccacccagtctctcctgtctgct

SEQ ID NO: 4842 - DNA, 120 bp, synthetic construct
  source 1..120: mol_type = other DNA
ttgcagtttattgcaattgagctccacacacaagtgagccctcttttgtatgccccctagtgggaatacagtgctggcaatgtttatcacaaggatatattcatgcatttcaatttaaag

SEQ ID NO: 4843 - DNA, 120 bp, synthetic construct
  source 1..120: mol_type = other DNA
cacaccctagagtaacttgatgccttgtgagggacacaggcaaagttcaattccttggaagtcaagggagactgagaagagtacagctgcagcactgagggagtgatgaattcttaactg

SEQ ID NO: 4844 - DNA, 120 bp, synthetic construct
  source 1..120: mol_type = other DNA
agatacgctatctttttattgagtgattgagacagggtcttgctctcttgtccagtcttgaatgtggtggtgtaatcacaggctcactgcagccttgacctcctgggctcaagttaccct

SEQ ID NO: 4845 - DNA, 120 bp, synthetic construct
  source 1..120: mol_type = other DNA
aggtgtacattcctgtacccatgcagcagtcagaatctctgggggtggggccccaaaattgtatgcatacagactgtgtgctgatttgtgatattacttaggattttttgactttacaat

SEQ ID NO: 4846 - DNA, 120 bp, synthetic construct
  source 1..120: mol_type = other DNA
ccttagtgatttttacaccatgaattgttgaagccctaagccagagccaagggcaagagtatagagaatctggagatgcggagagggttctgattgcctacaaggagtttggactttatt

SEQ ID NO: 4847 - DNA, 120 bp, synthetic construct
  source 1..120: mol_type = other DNA
atcctcctctttctgcccagggcatctggatccctgatggggagaatgtgaaaattccagtggccatcaaagtgttgagggaaaacacatcccccaaagccaacaaagaaatcttagacg

SEQ ID NO: 4848 - DNA, 120 bp, synthetic construct
  source 1..120: mol_type = other DNA
tggtcaagagtcccaaccatgtcaaaattacagacttcgggctggctcggctgctggacattgacgagacagagtaccatgcagatgggggcaaggttaggtgaaggaccaaggagcaga

SEQ ID NO: 4849 - DNA, 120 bp, synthetic construct
  source 1..120: mol_type = other DNA
aggatgtatgtagacccaggagccctagtatgttaggagcctcaaaaccttcttgtatcccttttacagtcaaagtccaaagccactcttgaggaacactcttgtacaaaattaagctgg

SEQ ID NO: 4850 - DNA, 120 bp, synthetic construct
  source 1..120: mol_type = other DNA
tctgatgttccctcaactgtcacctctcaaggaaaccccattatccctacaaaaaattcttactgccttccaacccctgtgaccccattctctccacggtgactgtgtcataccccaaag

SEQ ID NO: 4851 - DNA, 120 bp, synthetic construct
  source 1..120: mol_type = other DNA
acctgccatgccaggaacctgtcctaaggaaccttccttcctgcttgagttcccagatggctggaaggggtccagcctcgttggaagaggaacagcactggggagtctttgtggattctg

SEQ ID NO: 4852 - DNA, 120 bp, synthetic construct
  source 1..120: mol_type = other DNA
tataaaaacacacactagttagcattagtgtttgtagcgccactttactgccaatagctgacattgccctgggttaggggagaataaataaaatctgtggcatcagacaggtattaccga

SEQ ID NO: 4853 - DNA, 120 bp, synthetic construct
  source 1..120: mol_type = other DNA
gctgtaaatactcacatctttctcatagggaaagcccccattctccagcttggagaacaccagctgtccatttatctctatctcaaaggcacctggtaagaaatcaacagataaatggta

SEQ ID NO: 4854 - DNA, 120 bp, synthetic construct
  source 1..120: mol_type = other DNA
ctggacagagcacacagagctggcccctaagtaggtctcagccccaggcggccagcttagggaagaagtcaggagctcagggctggaaagagaatggctgcttctctcttccaatatagg

SEQ ID NO: 4855 - DNA, 120 bp, synthetic construct
  source 1..120: mol_type = other DNA
atattcttctccttttggaaacaaaagtaggaaactctgccacaaacctccccagagcctgccccctgcgtgaccagggtaaaggaaagtgtgaggaggagacataacatttactaaaac

SEQ ID NO: 4856 - DNA, 120 bp, synthetic construct
  source 1..120: mol_type = other DNA
actgcttcaaatgtcaccacttttgctgagacttcagggagcaccctccctcctgcactgtgttctgaaggcacctttagcacgacaaaaatggaactctttgtttatttataagagaca

SEQ ID NO: 4857 - DNA, 120 bp, synthetic construct
  source 1..120: mol_type = other DNA
aataattcaataaagtgattgcaagaaaagttctgttcaaggcaccaagagaccacaggaaaatgagtgtctggtttgccagaaaaatgagagatggcttcccaggagaggcagagttct

SEQ ID NO: 4858 - DNA, 120 bp, synthetic construct
  source 1..120: mol_type = other DNA
ttcccaccatgggctgagaacagggagcaagcgtacctcaagcccaacagcctcctgttgggcaatttcctgttccagaatcaactccactacccatcctggggccgacctacaggagaa

SEQ ID NO: 4859 - DNA, 120 bp, synthetic construct
  source 1..120: mol_type = other DNA
gtaaagaatttgtgccgattaccagtccacaaacatgggttagtgtttgttctctaggcatccctgtcgggcccattgctcattcctggggttggtcttttttttttttctttctaagat

SEQ ID NO: 4860 - DNA, 120 bp, synthetic construct
  source 1..120: mol_type = other DNA
accagttaattacagatggcctaggaggccaaacctggttactatctctggtttattatgtgccagacacttatgctgtatattttgtttaatcctctcaacaaacctgcaaaagtggca

SEQ ID NO: 4861 - DNA, 120 bp, synthetic construct
  source 1..120: mol_type = other DNA
ataacaacagccgcttctgcttatcgaacgcttacctcattgagtgcgctcattacagccttacagtaaccaggtggggggtaaggtcctgtgcccatttcacagataagtacactgagg

SEQ ID NO: 4862 - DNA, 120 bp, synthetic construct
  source 1..120: mol_type = other DNA
ttacttctaagcagatggtaaagctgagactgacggagctggtggctcacctccgcgcacagctaatgggtttgaatccagttcttctgattccagagctgtgctacgctatgtgaactc

SEQ ID NO: 4863 - DNA, 120 bp, synthetic construct
  source 1..120: mol_type = other DNA
gctccttgctgggtgaacctgcagcttctccatttctttcttggggtctctgcaggtacgagcgaaacattgaaaagatatccatgttggaaaagatctacatccaccccaggtacaact

SEQ ID NO: 4864 - DNA, 120 bp, synthetic construct
  source 1..120: mol_type = other DNA
catcactgacaacatgttctgtgctggcaagtctgtgcagggcgggctgagggaacagtggggcccaagctgggagaactgagttgtgcctgggttcaagccatgtgactttgagcaagt

SEQ ID NO: 4865 - DNA, 120 bp, synthetic construct
  source 1..120: mol_type = other DNA
ggacagccacttcctttagggcctggaaggactttattgagtgagatgggaagttattgaggggcttgaggcaggttaagaaatgatgtgactgactttaaaagtaaaaaataaaaaaat

SEQ ID NO: 4866 - DNA, 120 bp, synthetic construct
  source 1..120: mol_type = other DNA
ccttattcaaatttttgttagtcttgctaatgtcttttatagggaaaaaaaaaaaaaaaagcgtgtttctcacccaggattcaatgaaggatctttctttgtcttctatgaccttgacat

SEQ ID NO: 4867 - DNA, 120 bp, synthetic construct
  source 1..120: mol_type = other DNA
taattctgtcattccttctacatttgttagttactttattgctttccttcctttcattctatcagtgtggacttaaggatccttactttattctaagggttcacctttttttttcttttt

SEQ ID NO: 4868 - DNA, 120 bp, synthetic construct
  source 1..120: mol_type = other DNA
acctgaccctcattatctgtaatgcatttgcctatttgaacaatactagaatatagtttcaaaatcctccatccataacactattaaaaccaatcctatggctgggctcagcccactgca

SEQ ID NO: 4869 - DNA, 120 bp, synthetic construct
  source 1..120: mol_type = other DNA
ggttccacaggtgcgtgcctggctagtatttgtattatataatttttttgtgaattgtctcttcatggttttttgcccattttttggtccctttcttatcaatttttgtgagttcttcgt

SEQ ID NO: 4870 - DNA, 120 bp, synthetic construct
  source 1..120: mol_type = other DNA
aaacgacaaaaaacaacaacagaaaagcctttcctgatagctaggtcattgaggaattcactcatgttttcttctagtacctgatttcatttttctgcacttagattcctgactcatatg

SEQ ID NO: 4871 - DNA, 120 bp, synthetic construct
  source 1..120: mol_type = other DNA
caatcaatcaatctttgaactagtgatttgagatttcacctttatcacattctagattgtatcttattttcatttatttatttgaaatatagacaagtctccctgtgctgcccaggctga

SEQ ID NO: 4872 - DNA, 120 bp, synthetic construct
  source 1..120: mol_type = other DNA
attgttttaatgatagaggctttagcgtacatagctgggaaggctaatgttctcttttagtttttctttccagtggtttcctggcaattcttgcatgtttgtttttccatatgaacttta

SEQ ID NO: 4873 - DNA, 120 bp, synthetic construct
  source 1..120: mol_type = other DNA
gtgagccacagcacctagtgaaggtgtggtttttttgtgtaggttttactgttgttagtgttgttctgtattgtttgtagaggatacgtggggagatttggataaaagcaactatcatta

SEQ ID NO: 4874 - DNA, 120 bp, synthetic construct
  source 1..120: mol_type = other DNA
ctctagtatctagaaacagttgcctggcaggggaatactgatgtgaccttgaacttgactctattggaaacctcatctttcttcttcagagcccctttaacaaccgctggtatcaaatgg

SEQ ID NO: 4875 - DNA, 120 bp, synthetic construct
  source 1..120: mol_type = other DNA
tcaagagagatcctgcccaatttcagagtagagaagcccaggactagctgcgtaatttgtggggctcattgaaaaatggaaatgtcgaattccttcttaaaaaataaaggatttcaagag

SEQ ID NO: 4876 - DNA, 120 bp, synthetic construct
  source 1..120: mol_type = other DNA
agttcccatgctctgttttacaggtctgagctttccagtaggtgaaattatgttttgaaactgtgtgccatgtagtaccagctagaataaagccaacattacacattcagttctaccatg

SEQ ID NO: 4877 - DNA, 120 bp, synthetic construct
  source 1..120: mol_type = other DNA
aaagagttccaggcgaagtgcaatactttgattccatgttttaggaatgacacggataaacctggaaatgattggggggttgaaaaagttcttcacatgtcctttggtattagtatttcc

SEQ ID NO: 4878 - DNA, 120 bp, synthetic construct
  source 1..120: mol_type = other DNA
actgcatatttgtcaaatgcaaaatactgttattctcattatagcacagtcttcagattgctttctctttgcccagatgccactctaccttgtccaccatggaggatttcagcctgtatg

SEQ ID NO: 4879 - DNA, 120 bp, synthetic construct
  source 1..120: mol_type = other DNA
agagacctgataaaaccataagtagagcttgatacacagtacagttattgtcctgtctctggcctaacaaaatgcctaatcacatggttggtgatatgtgtttggagaaagatcagaagg

SEQ ID NO: 4880 - DNA, 120 bp, synthetic construct
  source 1..120: mol_type = other DNA
tcccaagactgtgtggaatccaatcttttctatttacgccaccagcaccacaattcttttttcctttctagtggcctaatttaaggataggccctggaattctatagaaagccaggaaat

SEQ ID NO: 4881 - DNA, 120 bp, synthetic construct
  source 1..120: mol_type = other DNA
aagggttcccagtaatctccccaccaagatttcttaaacgaagaagctgtgatttgcttgttttctatctttccattttccatacccaggggtgtggaacatcctatcaaaagaaaagta

SEQ ID NO: 4882 - DNA, 120 bp, synthetic construct
  source 1..120: mol_type = other DNA
aaaacgcaatgacttatggaactgtttcaaggagtggtcctgccgatacaagatctgtgttttatttgggagatgttttagactactgctatctggacattggcaaaatacccatatcca

SEQ ID NO: 4883 - DNA, 120 bp, synthetic construct
  source 1..120: mol_type = other DNA
ctgattggcagaaccattcttggtctagatcacactgagagtttacctgagtagaacctctgtttcacaaaggttttcctaggagcctaagtcactgaaaagaactaaaaattctactca

SEQ ID NO: 4884 - DNA, 120 bp, synthetic construct
  source 1..120: mol_type = other DNA
cttggcagtaaacaggctgtgccctaccccttttcctgacagagcaatgtcagaaaaagccaactttttaaaacagaagattggagcaggtatcggtaatactgaaaacagaaaaacaat

SEQ ID NO: 4885 - DNA, 120 bp, synthetic construct
  source 1..120: mol_type = other DNA
ttatataaaatataagcagaaacagactcaaggttattggtataataatggcaggcagactccttgcattcagacttctttggggaagggaatagagaggaggagaagagttagggctta

SEQ ID NO: 4886 - DNA, 120 bp, synthetic construct
  source 1..120: mol_type = other DNA
tccttttgcatgtccacctgcaatataggaaagccagtaaacagaactgtccttgtcaacaagtcacacactgcctaaattcattatacaatcagctttcttcagaactaaagagctagc

SEQ ID NO: 4887 - DNA, 120 bp, synthetic construct
  source 1..120: mol_type = other DNA
atatagtggaggttcaacaaagttttctgaatagatgaatggttgccacaggcaaagggccatattaatggggactataatgcctggctgataagaccctgtgaatctggctgaaatact

SEQ ID NO: 4888 - DNA, 120 bp, synthetic construct
  source 1..120: mol_type = other DNA
actatgttctcaaaagttgacctcaaagttacaaggttatttatatcttgatcaaggaagggataccagccactgtgctacctggatgttggcacagtgcttcatactcaacagtgctta

SEQ ID NO: 4889 - DNA, 120 bp, synthetic construct
  source 1..120: mol_type = other DNA
agatatgattatcttcctcaaacacactgaaaaatgtctccagttttcctctctccaatgcaggtatttaggtttgcagatttagagacaccagccaatcctagcttctcagtctgtctg

SEQ ID NO: 4890 - DNA, 120 bp, synthetic construct
  source 1..120: mol_type = other DNA
ccctctgccttcacatctgcattttaactgacttcctaggtttttatactgctgcacaagtagatacacttacaaacaactcattggcacagaaacatcccttctgtataattgtagact

SEQ ID NO: 4891 - DNA, 120 bp, synthetic construct
  source 1..120: mol_type = other DNA
gcagaaggcagggggaactccctttccaagcagtttatcactcttttcctcagcttttacagttccgtgctttacccgtgtatactttccattaacagtcttaattttccttaactacaa

SEQ ID NO: 4892 - DNA, 120 bp, synthetic construct
  source 1..120: mol_type = other DNA
aaccggttttagttgtagctctgggtgtctcagaagcatctcatgtctaatcttgtgaatatctaagggcagaaatcactgtgacccagtgtgatttaattaggagattagatcaaagtc

SEQ ID NO: 4893 - DNA, 120 bp, synthetic construct
  source 1..120: mol_type = other DNA
aacttctgataccaggctaagagaggtcaaggaatttcctaggattatgcattgacagggtaaaaatttaaatctgagtctgtgctctttccactatgcctgaaatggaggagttgtttc

SEQ ID NO: 4894 - DNA, 120 bp, synthetic construct
  source 1..120: mol_type = other DNA
gaagatgaaagaagcttgattcttgttcataagaagcttttaagctcctgctgaaacagacatgcacatgggcatccacactacaaatctggagacaacaggtgctatatacaaagtcta

SEQ ID NO: 4895 - DNA, 120 bp, synthetic construct
  source 1..120: mol_type = other DNA
acatggatgcccaatctcatcactcttattcaacatagtactggaaattctagtcacagcaatcaagcaagagaaagaaataaaaggcaaccaaagaagaaaagaagttaaagtatctct

SEQ ID NO: 4896 - DNA, 120 bp, synthetic construct
  source 1..120: mol_type = other DNA
cagacctcaaactataagaatcctagaagaaaaacctaggaaacaccattctggatatcagccttgggaaagaatttatgactaattcctcaaaagcatttcaacaaaagcaaaaattga

SEQ ID NO: 4897 - DNA, 120 bp, synthetic construct
  source 1..120: mol_type = other DNA
tttaacttggtgtctgaggggtttttgtctgtggcttgtcctgctacaatttgacctagcaattctattactgggtatatagccaaaaaagaaaataaattgttcagccgggcgcaatgg

SEQ ID NO: 4898 - DNA, 120 bp, synthetic construct
  source 1..120: mol_type = other DNA
tagtgaaatccagggctaaaacaaagattcagtatttgatttttttccttttgcctaaggctccagtatgtctcaatgcaacattgttacttatcctgtctttattcacaattgtgaggt

SEQ ID NO: 4899 - DNA, 120 bp, synthetic construct
  source 1..120: mol_type = other DNA
ggagtctttgaaaagaaatgtaattattcattaatcctggaaaacaaacaaatcacctatagctctcttgccacctgcacctttacaaccctctggtgcttgtggaaattcctccgaaga

SEQ ID NO: 4900 - DNA, 120 bp, synthetic construct
  source 1..120: mol_type = other DNA
agagcttggggctatcaggtgacaatggtcagattaattagaaggtcacacttatgaaagtcactggatgggtgaatgttttgtaccctaaaagtagccactcttctcacatttgttttt

SEQ ID NO: 4901 - DNA, 120 bp, synthetic construct
  source 1..120: mol_type = other DNA
aaggtagaacagtggttaacaaagggatacagaggtggagcattgagaaaatggtcaaaagataaaattcagttagaagaaataaatttagaagatctgttgtataagatggtgactgta

SEQ ID NO: 4902 - DNA, 120 bp, synthetic construct
  source 1..120: mol_type = other DNA
ctcactccctcggggccttgcttagaaatactcaggtagctagttgttctcatgtggtattgagtgcaacatttaaataggaagtcataggaaaaggtgttttaaacagagttctaatgt

SEQ ID NO: 4903 - DNA, 120 bp, synthetic construct
  source 1..120: mol_type = other DNA
aaactggccaaacctttgtacaaattctgaataatcccaggatatttcttcagcagcaatgtaataatttcttctgtttccattgttgctgcggaggtaccatgctgcaatgttgtcagg

SEQ ID NO: 4904 - DNA, 120 bp, synthetic construct
  source 1..120: mol_type = other DNA
tggagagatgactgtctgccagacttcatgttctgaggaaggggacatttgacttatatctgtggggaaggacttgtgacttcggtcatactcaagcatttcactgagctctggagaaga

SEQ ID NO: 4905 - DNA, 120 bp, synthetic construct
  source 1..120: mol_type = other DNA
tggattatttcatagctacctttctcagaagccaaatgccatctcccaaccaaaatcttagatgagttactttgttttaagagtaacagatcactaggagggtccttccagggcctcatt

SEQ ID NO: 4906 - DNA, 120 bp, synthetic construct
  source 1..120: mol_type = other DNA
gtggcaggtaatttctaataaactttcgtcaggaatattcaagtatgggctgtggaccactgcttgtctgtgacctattgattactgggtcaaaataacacaaggagagaaaaatgagaa

SEQ ID NO: 4907 - DNA, 120 bp, synthetic construct
  source 1..120: mol_type = other DNA
tacagaagtgccactggacagtgtcatcaaagcagaatccaagagtagttatgctctcaggcacatagccattgatagctgaaagtgtaaaatctgttaaaattccaagtctatgccaac

SEQ ID NO: 4908 - DNA, 120 bp, synthetic construct
  source 1..120: mol_type = other DNA
aagggacactgctgtaggcaatatttttatttacttatgtactaagcatagtaaaaaaccaaaggtatgatttctacaagggcagggctcatgtctacctcgattaccactcttagcctt

SEQ ID NO: 4909 - DNA, 120 bp, synthetic construct
  source 1..120: mol_type = other DNA
ttggaatagaagatcaaacgcatttctaaggatgtgagcctttgacctcttgcttaaaaatgttgctatgatgtcacccacggatttcatcaccaagtctttggactggaagtgaggatt

SEQ ID NO: 4910 - DNA, 120 bp, synthetic construct
  source 1..120: mol_type = other DNA
taaaaccccaaactacaaaaaccctggaagacaacctaggcaatattatttgggacatagggatgggcaaagctttcatgacgaacatgccaaaagcaatagcaacaaaagcaaaaattg

SEQ ID NO: 4911 - DNA, 120 bp, synthetic construct
  source 1..120: mol_type = other DNA
agcaaattatctacaccactgagttctcagaaaccaaagtgacatagttcttggaactactgaagccatataattcaggcatttatgagagtccattgtgtacacagcacttgttagagc

SEQ ID NO: 4912 - DNA, 120 bp, synthetic construct
  source 1..120: mol_type = other DNA
tctttgttcacattcttctgtatactttagtctcaacagagatgggccataatctgggtccaatttcactaggaactatgtctctaaatttggttgctttcagagaatctctcctctgtc

SEQ ID NO: 4913 - DNA, 120 bp, synthetic construct
  source 1..120: mol_type = other DNA
ataaaagacaccatattttgttaccactaagagacaaaactcctgaagtgagaagggtttggctgtgatttttaggatactcctacatgtatactacctgactgcagtagtgacaccacc

SEQ ID NO: 4914 - DNA, 120 bp, synthetic construct
  source 1..120: mol_type = other DNA
atagccagatcctgaacttttaataaggtatgtctacacttgctgagagcacataaaagggatcagaaatggaagaagggaaagaggcatggagaaaaaaaactgcttttgtcctttggc

SEQ ID NO: 4915 - DNA, 120 bp, synthetic construct
  source 1..120: mol_type = other DNA
cactgactgccataaagcttaggacaaaatttgaagacagccttacagggtcacatggtatctacttatctgtggctttattttctttgtccccgtattctatcccaattacatagactc

SEQ ID NO: 4916 - DNA, 120 bp, synthetic construct
  source 1..120: mol_type = other DNA
cattgttaatcatagttctgtgctattgggctatctcttccaccatctagccaattctctgagctgactgaaaagcaacctccttcacccatcttttgtagctactgggataaatacttt

SEQ ID NO: 4917 - DNA, 120 bp, synthetic construct
  source 1..120: mol_type = other DNA
cagtgaaaactctcacttttctctgatgactctcaaaatgacctccctaccctccctgaattttctaggtagccatatattaatttcatgcgtgtaattccagaatacctttatgtctta

SEQ ID NO: 4918 - DNA, 120 bp, synthetic construct
  source 1..120: mol_type = other DNA
cgcctctgctcacgagttattttcttaagattcctggttttctttgggcagtttttaatgtcaatgtaagcctgcatcccagctgagttaggacagaaagacaatgaaataactcaagag

SEQ ID NO: 4919 - DNA, 120 bp, synthetic construct
  source 1..120: mol_type = other DNA
ggagctcacccctcagtatatgccatgtatgatccattcaacacacattcattgagttcctctctgtgctagactttgtgttcatcccactgtaaaggttaatgttttcatgctaaactt

SEQ ID NO: 4920 - DNA, 120 bp, synthetic construct
  source 1..120: mol_type = other DNA
cagtgacaactcattgtgataaatggcattatacaggtaacaacagagcttagagatggtggatgtgaactcaaaaacacagggattgctaaaggattaggccaagaagggaaccaagaa

SEQ ID NO: 4921 - DNA, 120 bp, synthetic construct
  source 1..120: mol_type = other DNA
ttgagacaactaatttatccagggccacagaaggtagtctgataatctgaagtctgaactcagattatctaaggtcgaggtcagttaactaagccccagtttttacaagctcctagtatt

SEQ ID NO: 4922 - DNA, 120 bp, synthetic construct
  source 1..120: mol_type = other DNA
tgcaaaacagtgagtatggtcaacttctctagtgctttgaagaaaacaggaccgaaaaattactaatgattttactgttgtttaatggtacacagccctcgtgttacctggcattgtccc

SEQ ID NO: 4923 - DNA, 120 bp, synthetic construct
  source 1..120: mol_type = other DNA
accagcccaaacctcagatatgtcaaacatgttagccaaagttctttccaagagctctttcagcagagtataggctactgtatactttctaaaagactttggccttgaggtaaatgttac

SEQ ID NO: 4924 - DNA, 120 bp, synthetic construct
  source 1..120: mol_type = other DNA
ttgctatttcagatcttctttccaactgctgtgatcctcagctttgttttatctctttatttcatcttagccatctgattatctcaattttttcccccgagccacagcgtctaactcccc

SEQ ID NO: 4925 - DNA, 120 bp, synthetic construct
  source 1..120: mol_type = other DNA
attaaaacaattacccagtcttatagctatagttccaatcaagatagagaagagttccatcattccaaaacatttcttcatgccatttgtagccaatgccctctgggcccagacaaccac

SEQ ID NO: 4926 - DNA, 120 bp, synthetic construct
  source 1..120: mol_type = other DNA
ctaccctcccaacactttaaagatgtccctaattgtcttctggtgtgcatagtttctaacgataagtctgctatcatttcttggttttgttcccctgtatgtggtgtgtgtttttatctc

SEQ ID NO: 4927 - DNA, 120 bp, synthetic construct
  source 1..120: mol_type = other DNA
actgttccacctgttcctttcaagtgacatttttcttaccctcagtactttcctcacatgtatgtgcagatcagtattcaacttgacaaaacctctctgtagattctctagagctctttc

SEQ ID NO: 4928 - DNA, 120 bp, synthetic construct
  source 1..120: mol_type = other DNA
cctctgcctagagtgctcttcctcccgtcttccttttgataaatatgtgctcatcattcagacatcaccttgaatatctgttcacttctacctttatctccaattctgatacacattttt

SEQ ID NO: 4929 - DNA, 120 bp, synthetic construct
  source 1..120: mol_type = other DNA
ttgtctattaactgaaattagcatggctagttgatgagctgcaccatctaccttgaatcaagcatgacagcccttcttcaatgcttcttgctacatggcctcataaagttgaaaaatgat

SEQ ID NO: 4930 - DNA, 120 bp, synthetic construct
  source 1..120: mol_type = other DNA
gcttgagttctggtaacacatgtgagtaagatagaaattggtgattttcttagtttgggttgctgttaacaaagtaccctggattgagtggcttataaacaacggacacttcttcctcac

SEQ ID NO: 4931 - DNA, 120 bp, synthetic construct
  source 1..120: mol_type = other DNA
gttggtgccctaattgtgataggtttgacctctagatttcttctagggctacaattagaacacactgtcaatctggaatgagaaccaaccaatgtaagtatctaaaaattgcccaagatg

SEQ ID NO: 4932 - DNA, 120 bp, synthetic construct
  source 1..120: mol_type = other DNA
gcatacaagctttgggaaagtgaagttacataaagagcctttttggttactcattagggtgctcactcagtaactcttcccttgttacttatttttgtgaacaactcttttcctctccta

SEQ ID NO: 4933 - DNA, 120 bp, synthetic construct
  source 1..120: mol_type = other DNA
ataatcatgtctccagtgaaagctgtgggagcattttaagcaattgctcataaataattgctggctgtagggaatgtagggacaaataaacagtaaaggaagagggatagtgttgcaagg

SEQ ID NO: 4934 - DNA, 120 bp, synthetic construct
  source 1..120: mol_type = other DNA
ttcataaaagtcactgagccaggatttgcacttattagtctagttctaaaacctgcacataaaccactctcctactcaattattctctcaaaggtatgatggctggaacatgtagaagga

SEQ ID NO: 4935 - DNA, 120 bp, synthetic construct
  source 1..120: mol_type = other DNA
tttactgtacctaattccttgaggatggatgctcaagggcttatctgccttatttttaaagtgaacttttatgatgtctccgacttcagcatataaagtaggcccaagaagtcctgtgaa

SEQ ID NO: 4936 - DNA, 120 bp, synthetic construct
  source 1..120: mol_type = other DNA
agagatgaggtggatggtaggtgtgtagaacaagggaggccctatgggctacggtaagaacttgaattttcttctaagtgaaatgggacatcactggagcatttttctttttttttttga

SEQ ID NO: 4937 - DNA, 120 bp, synthetic construct
  source 1..120: mol_type = other DNA
actttaacgtgtgctccttggtgatcttgatgtctttgaaatcttgagaatctatgaccaaaagccccattccagacaagtgacagaaatcaactactgtcatttctgagccatccacaa

SEQ ID NO: 4938 - DNA, 120 bp, synthetic construct
  source 1..120: mol_type = other DNA
cctatggtaaatattatgacagaaaaggagggaatactctgaagagtatttgacagtggaatctagtccaattggaggtgagttggggaatcccttcccgaggaattaatcctttaactg

SEQ ID NO: 4939 - DNA, 120 bp, synthetic construct
  source 1..120: mol_type = other DNA
gtcctattcctttccttgaactcctactcctggagtttattctgatcttgtgcctgaagctttttgtttgtttttatgttagctttacacaggactgtggaggtcacaaagttcagtcct

SEQ ID NO: 4940 - DNA, 120 bp, synthetic construct
  source 1..120: mol_type = other DNA
taaggcaaaacaaaaggatgttttcataaatgcataccaaatactttcacgcatgtaggaaaacacatggctaaatggttttcaagctgctctttagctcctccaacagccagatggcct

SEQ ID NO: 4941 - DNA, 120 bp, synthetic construct
  source 1..120: mol_type = other DNA
atggcagtgttcaaatccagatcttctcagtcaaaataaaaggcttttccttcacgccagatttgcctccttgtatcaactactatagagttacaaaggtgaataagataccactcctgc

SEQ ID NO: 4942 - DNA, 120 bp, synthetic construct
  source 1..120: mol_type = other DNA
gacttcatggcatttctatagagtcttcccttaaatatttaagtctctgtattcctttttataaaattctcaaatgtccttaagctcctcagtacccacccccacccccgaaactaccct

SEQ ID NO: 4943 - DNA, 120 bp, synthetic construct
  source 1..120: mol_type = other DNA
gcatctcttgttaattccttccctgaagtttgtggtccaactgtgctgatccagttatggttccacaaatataccatactctcacctccaaacttttaaacattctgtgccttggtttaa

SEQ ID NO: 4944 - DNA, 120 bp, synthetic construct
  source 1..120: mol_type = other DNA
aggagtggtaagagaagtctgagaaaaccaaggggaagtggcactagaaaaaacaggtaaagcgagagcttcagaaaggaagagtgttaaatgtcctagtaatgtctagtagtaaaagaa

SEQ ID NO: 4945 - DNA, 120 bp, synthetic construct
  source 1..120: mol_type = other DNA
aaaatatcattttgcgaaggcacatctatgctcattaaactagaccataatctccatgaacccaggatatgagactgtcttgtccactattgcatccacaatgcctatttcaatgcccag

SEQ ID NO: 4946 - DNA, 120 bp, synthetic construct
  source 1..120: mol_type = other DNA
ggtgagagatggctaatggggtaaaagccctgggattcatattggaaacaaacaaatgaaaaaactgttttggaaagagtcagtaacttgtccaagagatacagttgataagtggcagaa

SEQ ID NO: 4947 - DNA, 120 bp, synthetic construct
  source 1..120: mol_type = other DNA
tagtggattctccatcactggaagcattcaagtagaaattagacaactacttggtaaggtcattggtgctgagggaaaggggaaaagtagaaggttaaagcgtggaagttgaatatgaat

SEQ ID NO: 4948 - DNA, 120 bp, synthetic construct
  source 1..120: mol_type = other DNA
catgagcaggcaagattagtgttagaaggactgttattttccttggggttttagcttacggcagttcccaaagggtgtgggtgtgacctagattatcactttgaagtacgatatttaaaa

SEQ ID NO: 4949 - DNA, 120 bp, synthetic construct
  source 1..120: mol_type = other DNA
cctgaagttaaaaaaaaaaaaagccatgacattgcaaagggaatgttctctaaaagaaatagattttcctctctagagaagcccacccggactccacacctgagttaccttgagtttgtg

SEQ ID NO: 4950 - DNA, 120 bp, synthetic construct
  source 1..120: mol_type = other DNA
gaaagagcaggaaactgagggcagaattggaaaaaatcaagttacagacacacaccacgggataacctctatacagagaggagcacacccaaaataatactatatatttatagatgtact

SEQ ID NO: 4951 - DNA, 120 bp, synthetic construct
  source 1..120: mol_type = other DNA
caatagatatttcatttccaccaatacagaagcatcagttaacagtgactggttgacacttttagaaagtggcttgagaagggccctgaatgagccacctacgtggaacacagaatttga

SEQ ID NO: 4952 - DNA, 120 bp, synthetic construct
  source 1..120: mol_type = other DNA
gaaaccatgttgaagattcctgtgcaggaagggggtgataaaatgcagaaacctgacctgacacagccaacacataactgcattgcctcatttttcacgatttttttctttctttttgga

SEQ ID NO: 4953 - DNA, 120 bp, synthetic construct
  source 1..120: mol_type = other DNA
gaaaaagacctgtactttaaacaattgctttgctgagatgttgttaatttgtagctttgccccagccactttgacccaaccactttgatccaatctggagctcacaaaaacatgtgttgt

SEQ ID NO: 4954 - DNA, 120 bp, synthetic construct
  source 1..120: mol_type = other DNA
ctaggaagactaaaatactaaaatgatggtgtgctaacttgaacagttaggttgtacaagaaaggacttgacagttccctttctgatgtcctccaagacatgggttccatttatatgcac

SEQ ID NO: 4955 - DNA, 120 bp, synthetic construct
  source 1..120: mol_type = other DNA
ggactgcctgcattcaccctgggaagcagtcaaaccccatgtgatgggtcattgggtcatgagatgctggaacatcactgtattgctggctttggagaaagatagatttttttttttttt

SEQ ID NO: 4956 - DNA, 120 bp, synthetic construct
  source 1..120: mol_type = other DNA
ttagccaggtggtagtgcgtgcctgttaattccagcttttcaggtggctgaggcacaagaatcgcttgaaccaatgaggtgaaggttgcagtgagccgagattgtggccactgcactcca

SEQ ID NO: 4957 - DNA, 120 bp, synthetic construct
  source 1..120: mol_type = other DNA
ttgcatctcagattgttccatctagtactgggtttcttctgcttgaggcacacactttttggtgagaaaatgttggtggcaaattctttgcttttgtttgcacttcaccatcatacttga

SEQ ID NO: 4958 - DNA, 120 bp, synthetic construct
  source 1..120: mol_type = other DNA
acgacttattatttcattagatctggttaagtacggttattttatgtctggctaacaattccagcgcctgaagacctcacgatctgtcgctattgctcattgtttctcttgcaatgttgt

SEQ ID NO: 4959 - DNA, 120 bp, synthetic construct
  source 1..120: mol_type = other DNA
gacactgtgtccagccatagagtctcactgtccttacagaaagccagaattcagtctgcttcttgttccctcaaagcttcctcgaagtgttctagtggaggcgagcagtgaagctctagg

SEQ ID NO: 4960 - DNA, 120 bp, synthetic construct
  source 1..120: mol_type = other DNA
tgtctcaaaaaaaaaaaaaaagaaaaagaaaaaaagaaaaaaaaaaagagtaaattgtggccaggtgcggtggcccatgcctgtaatcccagcactttgagaagcctaggcgggtggatc

SEQ ID NO: 4961 - DNA, 120 bp, synthetic construct
  source 1..120: mol_type = other DNA
aaaaaaaaaaaaagcaaattgtggctgaattctttggcattgcaggcagagaaggggtgaaaacagggctccagccttgaaccggtcagcaggggtcagggaggctgagtgagtcaccct

SEQ ID NO: 4962 - DNA, 120 bp, synthetic construct
  source 1..120: mol_type = other DNA
aagctcctttccctatctagggtccaggtgaacttggcatacttcctccctctgaaaactcaagaggtgccactccccattcagggcacaggaagagcaagaattgaacaccgggatgca

SEQ ID NO: 4963 - DNA, 120 bp, synthetic construct
  source 1..120: mol_type = other DNA
aatacttctgtggactggcagtgttgctggaagtcatcttgggtggggcagggacatggacagtaagagcggaaggtgaccccacatccttgcacctcaagctggtctcacaatgacaat

SEQ ID NO: 4964 - DNA, 120 bp, synthetic construct
  source 1..120: mol_type = other DNA
tttcctcacctgccataaatataggggatgggcttgggcttctccagctcaatctggtgcagcagtggggtgaaaatacgccaggcctcacggagctcgtcgctgaggggacatggtatg

SEQ ID NO: 4965 - DNA, 120 bp, synthetic construct
  source 1..120: mol_type = other DNA
tactggcccaggaccacattgttggcctgcacctctgagatgcatttcaacaccttgacctgagagaaagccaagggagagaatgggctccttgggtgttgagttggggtgcagggatga

SEQ ID NO: 4966 - DNA, 120 bp, synthetic construct
  source 1..120: mol_type = other DNA
aaatcaaggaaggacatggtgatgctatcactgaatcataaaaccgtggggtgcttggctgtgtaggggtccagccctttccagcccggtctgatagctcagacacttaggttttgaact

SEQ ID NO: 4967 - DNA, 120 bp, synthetic construct
  source 1..120: mol_type = other DNA
ggcatccaagccatggcttcctcattggttttgaaaatgagaagaggacctttgctttactacccccgcattcaaaaccagccagaggacaagagcctctggctgggttgggaaaccacc

SEQ ID NO: 4968 - DNA, 120 bp, synthetic construct
  source 1..120: mol_type = other DNA
aaacctgaaaattcaattcagtagaaccaagggacgacagaagtaccatgtagccacatttgtgagacgtgacctcaagtgcttacattagcaaaaaagagtggttcaaaaataaggagc

SEQ ID NO: 4969 - DNA, 120 bp, synthetic construct
  source 1..120: mol_type = other DNA
aattaaaagctaacccaaagaaaagatgaacaaagctggaaattggtgtttgaaaaagacgaatagaaacagacaaccccctggcatggttgcttttttaaaagggcataggccgggcac

SEQ ID NO: 4970 - DNA, 120 bp, synthetic construct
  source 1..120: mol_type = other DNA
agccaccttatggggcctacagagccttggtacggaaacctgatgagaaaggcacatgggaaaacccatacgcctcattcacacacacatgcagatgcagaaatcccacacgaaatatca

SEQ ID NO: 4971 - DNA, 120 bp, synthetic construct
  source 1..120: mol_type = other DNA
tcacacttataggaaatgctgaaatattaatcatccctttaagcaatcaggaacaagaaaagtgcagtaaggcaagaaaatgaaaatggctgaagttgagctgtgaggtggtgcgggtgc

SEQ ID NO: 4972 - DNA, 120 bp, synthetic construct
  source 1..120: mol_type = other DNA
cgtggtggctcatgcctgtaaccccagcactttgggaggctgaggagggtggatcacctgaggtcaggagttcgagaccagcctggcaaacatggtgaaaccccgtctctactaaaaata

SEQ ID NO: 4973 - DNA, 120 bp, synthetic construct
  source 1..120: mol_type = other DNA
acagaaagggtcagcttactgggaactaactggaccctgaaataaacggaaagaaccacagcctgcaaatacctctaagcctcactcaaagcaggtcatgtttgctcatgaccaaattcc

SEQ ID NO: 4974 - DNA, 120 bp, synthetic construct
  source 1..120: mol_type = other DNA
aggacacaaggtgacttagtagaagcagggcatgatgaagatctctagccaccaacatctggctaggccagggcaaagggacctgggccatgacctgtctgttttataaaccgaaatcgc

SEQ ID NO: 4975 - DNA, 120 bp, synthetic construct
  source 1..120: mol_type = other DNA
cagtgaaatgacaaaatcagcttggaaaagcctaaggaccctgggccctcgtttcaaaagctgtcatttgctacacgaaatgctgaggttcaggaaaaggaagacacttgctccaactca

SEQ ID NO: 4976 - DNA, 120 bp, synthetic construct
  source 1..120: mol_type = other DNA
aattttttatttagtagagacgggatttcaccatgttagccaggatggtctcaatctcctgacctcatgatccacccgcttcagcctcccaaagtgctgggattacagacgtgagccact

SEQ ID NO: 4977 - DNA, 120 bp, synthetic construct
  source 1..120: mol_type = other DNA
tcaaggttacaaggtaagttaatggcaaagatggtcatacagtaatgagcagagagattcttgagtgcatccagggttaaaagtgaaaactgagaccacgtgtaatttgagatgaagccc

SEQ ID NO: 4978 - DNA, 120 bp, synthetic construct
  source 1..120: mol_type = other DNA
ttagaaactgctggctctgggctccagccactctctcctaggcagccttcattcagggtgtacattacaaaattactcaaagcattggtgtattccgactacagcatcaattctggacaa

SEQ ID NO: 4979 - DNA, 120 bp, synthetic construct
  source 1..120: mol_type = other DNA
ccagcccctgcctctcgggcacctgcgctggaggccggcccgccggctgcctgccatacccgctgccgctgctctgcatccccaattccggcgggcacgggtgcagctccgcgtagtgct

SEQ ID NO: 4980 - DNA, 120 bp, synthetic construct
  source 1..120: mol_type = other DNA
cgccttgcttgggggaaccagcgtcctatcagaaatgatcctctttcccggggagaatggggctcccacccatcccaccctagttcatccgagtgggaagtgagggagaaactctagaga

SEQ ID NO: 4981 - DNA, 120 bp, synthetic construct
  source 1..120: mol_type = other DNA
gctttatttgctgaagctgcagctcaggcttcatcattaatcaggtttattatttttctcactggccagatgtgttcctcaaggtcacgacccttcggagagttaatctaatatgcacac

SEQ ID NO: 4982 - DNA, 120 bp, synthetic construct
  source 1..120: mol_type = other DNA
atctcttggtgcttctgcatagtactaatcccttatgtgtgtatggggttctgcagcattccagatgcctctcagaacaattacttcatttgatctctactacagccctgcaagcatctg

SEQ ID NO: 4983 - DNA, 120 bp, synthetic construct
  source 1..120: mol_type = other DNA
ctgtaaaatggggactctgagcctcactggcctcacctgtaaaatggggataaatctcacctgcttcagagggttagcagcatggaatgtgagtgggagtgtgactcgtccagtgtgaag

SEQ ID NO: 4984 - DNA, 120 bp, synthetic construct
  source 1..120: mol_type = other DNA
tcccctacacttgggcatcctctgccttaaaaaccaagagggagacactttttgattcatcacaggttttctttaaacaactgagcactcaagtcatttacacagagcccagcagggatg

SEQ ID NO: 4985 - DNA, 120 bp, synthetic construct
  source 1..120: mol_type = other DNA
cttgtccgctttgttcactgagctatccctagtgcttgcatagaacaggtgttaagtcaatatttgtcccatttaagggacctcaactcatgtttaacagacacttgttacagagataaa

SEQ ID NO: 4986 - DNA, 120 bp, synthetic construct
  source 1..120: mol_type = other DNA
atttaatagaatgagaaatcaatagcccagaggaggttaagttgtgtaagtgagaggctgactgcaaggcacgcttaatgaaaaagaaaagtttaagaaggcgtggaagatagggcacat

SEQ ID NO: 4987 - DNA, 120 bp, synthetic construct
  source 1..120: mol_type = other DNA
gctctgtgggggcacggatagggccttgtgcttttgtctctaacactaggctgacacatagctgtgaattcaacaatgatgatgacaataataatagctaataagtattcaatgcttatt

SEQ ID NO: 4988 - DNA, 120 bp, synthetic construct
  source 1..120: mol_type = other DNA
ttttggaactctccttcccttggcctgatttcttcgatccctgagtgagagggtcactggcagtattggggaagtgattagagagccacctcctgaatcacgtgccattcttttccacca

SEQ ID NO: 4989 - DNA, 120 bp, synthetic construct
  source 1..120: mol_type = other DNA
aagagctcacagggccacaaacctgagagacaggagggcagttaaaattattgtcccagactctcagaatttcagtaactagccgaaagccacatagttatttgattggaaagttggatc

SEQ ID NO: 4990 - DNA, 120 bp, synthetic construct
  source 1..120: mol_type = other DNA
tctagatgctttgtatgtattaagttgattctccagccaaccctatgaagtaggtactgttgtcccactttacacatgaggaaatacataaccacagaggttatgtagcttgcccaagat

SEQ ID NO: 4991 - DNA, 120 bp, synthetic construct
  source 1..120: mol_type = other DNA
aatctaagagcacagagtaggcaactagatggaggaagctcaccagtttatttgtgctaaaatagcatcagccgactctcctttgaaacgtaacggtcctgccagagtccagagtaaata

SEQ ID NO: 4992 - DNA, 120 bp, synthetic construct
  source 1..120: mol_type = other DNA
gtatgggattgaaaagtcaattgtgtgatcttaaaacacatttcccctggtggatgacaggactggtttctcaggttagtgtagccggcgatggagctgaaccagtacaaagagtaacac

SEQ ID NO: 4993 - DNA, 120 bp, synthetic construct
  source 1..120: mol_type = other DNA
tggctttgtcaagtcagattgagtctagccgtctcatttcacaagtgagggcattgaggttcagagagggaaggaacttgcctgagatcatgtgacttgcagaatcgaggtttgaaatgg

SEQ ID NO: 4994 - DNA, 120 bp, synthetic construct
  source 1..120: mol_type = other DNA
caataaaatggggacaatgaaaaacctaatctcacagggttggggaagagcaaataagataccacctgtgaaagggcttcttaagtctgaaggtgttttcagtacgtactgtgtgatttt

SEQ ID NO: 4995 - DNA, 120 bp, synthetic construct
  source 1..120: mol_type = other DNA
tggctaaagggcggtcacttgacagtgtccaagaggaaacctggaatgatgttaatagaaatagtggttgaacactttaggcagaagaaacattttctcatttaaacctcaacaactcac

SEQ ID NO: 4996 - DNA, 120 bp, synthetic construct
  source 1..120: mol_type = other DNA
taatttttttatattaagtctgtctgaaatatgttggtcctgtcacccctgtttgactggaggctggctgagggcagggactatgggggacccttctttcctctgagcctgtcttaggga

SEQ ID NO: 4997 - DNA, 120 bp, synthetic construct
  source 1..120: mol_type = other DNA
gcatcaagtcaccacatccacttctgtgccacactttaacacagtgtctggcttacaggaggatcttgccaaatatttgttgaaagaagcaaagcgatcgagcaccaaagagaggagcaa

SEQ ID NO: 4998 - DNA, 120 bp, synthetic construct
  source 1..120: mol_type = other DNA
caaacagtgtattagtatttattactcatgctccactgctaataaaatttgagtttaaaaaataatggtgagcaaatgaatcggtcgatggcctgtggggagaggctccaggggaaggat

SEQ ID NO: 4999 - DNA, 120 bp, synthetic construct
  source 1..120: mol_type = other DNA
gtgctttgcttaagactagacttttggagggcttagaaaatgtgggtggatttgcgattcttatgtgtaaatgctaccctacaacctctttcataattcatccatcaaggccagaaagat

SEQ ID NO: 5000 - DNA, 120 bp, synthetic construct
  source 1..120: mol_type = other DNA
aaattaataatattgtaactgttaattgaatgtccattgattgcctgtcagaggtttgatttaatctgtcctcctccctctgagccggctggctgcttaaatagtttgctcgctttgcct

SEQ ID NO: 5001 - DNA, 120 bp, synthetic construct
  source 1..120: mol_type = other DNA
gagagatggcagagaataaggtaagggttaataatatctacagaatgataatatactgcacactcactaagcattgggcagagttctgagggctttccttgtattatctagcttagtcct

SEQ ID NO: 5002 - DNA, 120 bp, synthetic construct
  source 1..120: mol_type = other DNA
cactgaaaaattttaaacagaaatagcttgaccagatttattttcaaaaataaaaataatcactctggctgtaatgtggaggatggtggccctgacacaggctggaggcacgaaggcacc

SEQ ID NO: 5003 - DNA, 120 bp, synthetic construct
  source 1..120: mol_type = other DNA
cttgtagggtttgctgatttccacggtgtaaataccatggtcaattttaagttgccaacgtgatgtcactaaatgcggagctgggaagaggtgtgtacggcccactcttgtgagcctgtc

SEQ ID NO: 5004 - DNA, 120 bp, synthetic construct
  source 1..120: mol_type = other DNA
ggagcagtggaagattataaagccatccttgaagtattgtgtgtagcactaagaaggtgagaggtgccaaaaatcaagtcaggcagatgttttcacaaagaacagaaaggtagattaaaa

SEQ ID NO: 5005 - DNA, 120 bp, synthetic construct
  source 1..120: mol_type = other DNA
cttaggaagcttcaaaatcaaatctaccatccttaatagggatgtctccttctctttattgggcatgaacagaaggcagatagatgggtgtgtgcaaatgagatctctgggatcttgcca

SEQ ID NO: 5006 - DNA, 120 bp, synthetic construct
  source 1..120: mol_type = other DNA
cccagcacaggcacatccagccattccaaatccttgagacttaacattccaagcagatttccctttcctttctccgtgagttagaatcaattttcacattagtaatgaaattgcatgtat

SEQ ID NO: 5007 - DNA, 120 bp, synthetic construct
  source 1..120: mol_type = other DNA
tcgtatccacttcgtaataggtcacaaaaggaaccacttgtgcgaacatgatcttatttgcttttcacaaccacatgatgaaaataagcactattttcccctttgcagatggactcccaa

SEQ ID NO: 5008 - DNA, 120 bp, synthetic construct
  source 1..120: mol_type = other DNA
tataatctgtttggctttcaaaggccttttcaaggttacccaccaaatgcaatgttaaaataattgagttatcacggggctggggctaggactttgtcacagtggagaagctgtttgtga

SEQ ID NO: 5009 - DNA, 120 bp, synthetic construct
  source 1..120: mol_type = other DNA
actttgaacagttatattggagcacttatcacggtgtgttgaaactatttattcctgtgtcagtttcgcccagaagattaggtacttcttaagggcaggagctgtcctatctatttctga

SEQ ID NO: 5010 - DNA, 120 bp, synthetic construct
  source 1..120: mol_type = other DNA
gaatagagagcccagaaataaatccacacatatgtggtcaactaatcttcatcagaggcacaagaatacacagtgaagaaggacagtctcttcaataaatggtgtggggaaaactggata

SEQ ID NO: 5011 - DNA, 120 bp, synthetic construct
  source 1..120: mol_type = other DNA
tgcttttcagcaaaggactgtaaagaggaaactgaagacctaggggaaggggaaactgaggcatgttgagcacagcctaggctcccagcatatgctttttatggtccattgttacaacaa

SEQ ID NO: 5012 - DNA, 120 bp, synthetic construct
  source 1..120: mol_type = other DNA
tagtaagcgttcttaccatagacatatgaaaatagttataaagagggtgagagaaactgtgggagctgatggatgtgtctgtggccttggtggtgatagtagtttcaccagtgtatactt

SEQ ID NO: 5013 - DNA, 120 bp, synthetic construct
  source 1..120: mol_type = other DNA
ccttttgtgcatctcttactacacgtccttatgtagtcaaaccagaaatggagctctttccctcaaaactgccttatctctagtcgttaagggtgttcatttggctgaaactatattaag

SEQ ID NO: 5014 - DNA, 120 bp, synthetic construct
  source 1..120: mol_type = other DNA
tagggatctttggataacaacacctagacgttctttaactcaggcttgataaagactgagaaggagttactgagaactgcggaggcctgtgctgtgcactgagtgctttcctgcatgttt

SEQ ID NO: 5015 - DNA, 120 bp, synthetic construct
  source 1..120: mol_type = other DNA
taggagtaaggatggaatttgtggggaacttcaggcccagaactgggcatgaaatggaaatgcaagatgatgattcataattttgctagagaaaccaaatacggctttgcttcctctcta

SEQ ID NO: 5016 - DNA, 120 bp, synthetic construct
  source 1..120: mol_type = other DNA
ggtttaatgtgctgaatttattttttataagaatctgttactgaacctgctcagtggaaagagccctgttagagctttaagaactcattagcgggataaatatgccgggtatgaggggag

SEQ ID NO: 5017 - DNA, 120 bp, synthetic construct
  source 1..120: mol_type = other DNA
tcattttacacacaaaaccctgaaatcccaagaggtgaagtaatccatcacactcgctcagcagaaggggccgaatctgcagggtagagagggctgtcttgcacaggagggcacttctgc

SEQ ID NO: 5018 - DNA, 120 bp, synthetic construct
  source 1..120: mol_type = other DNA
cttagaaaaaggctatgctggatgttgagatgtgaacctgcgaggtagacggcagcctcagccattttgctatcaataaattactctttatcatttaaggcagtttgagttgcgttttct

SEQ ID NO: 5019 - DNA, 120 bp, synthetic construct
  source 1..120: mol_type = other DNA
cacttctcccaacatacatggagggagggcagagaacatgagatgagagtgagggaagccggtagatttggtggtgggaagttaacgagttcctgtttgcttttgtatatgtatgttttc

SEQ ID NO: 5020 - DNA, 120 bp, synthetic construct
  source 1..120: mol_type = other DNA
cagaagtcttctgtgttggggattgttgggatggagagcagaggaaaaacaatttgagggctttccccaacaccttgttttctgatggatggagagacaaggcaatgagctgagggtgtt

SEQ ID NO: 5021 - DNA, 120 bp, synthetic construct
  source 1..120: mol_type = other DNA
aaaaaaaaaagaagggaggaagggacaaaggattggggttatctgcaaaggagagattagagtgggctgtaattatgcatctccagttaccttctagatagaaaagatgctggatataaa

SEQ ID NO: 5022 - DNA, 120 bp, synthetic construct
  source 1..120: mol_type = other DNA
agatgaagtttcaaaactggagttgggcccaaatgggaccagcaaaaatatctgttaagtctacagatgagtttctgaacccaggatatcattggcagacaaggtttatgttctaaaacc

SEQ ID NO: 5023 - DNA, 120 bp, synthetic construct
  source 1..120: mol_type = other DNA
tgtttctccaagtctgatttgcatagagcttgctaaaaaagctttctaccgggctgcttatgtactcgccgagccagcattcacacactttctcctcttcactcagtaaaatttgctctg

SEQ ID NO: 5024 - DNA, 120 bp, synthetic construct
  source 1..120: mol_type = other DNA
ggcaatgaccaggttgacacaggcacttctcaccacagacaggtcatatttctaatggtttacttacatgttagactgtcggctacttgaaaccagttcttctcatggaaatgcattttc

SEQ ID NO: 5025 - DNA, 120 bp, synthetic construct
  source 1..120: mol_type = other DNA
ttctcttgaccacttgtttgcagtttcccagcctctcctgctgtctgggtgatgggagtactcagccaagacaatctgaattaattttgcaagtaaaatttcatcagacgacctatctag

SEQ ID NO: 5026 - DNA, 120 bp, synthetic construct
  source 1..120: mol_type = other DNA
gttatgaggttaaatgagataaagcacatgaagtgtcagtactatagtaggtattctataatgtcagctccttttcctatatgaagtaagttaaaaccctcaggctgtgcacggtggctc

SEQ ID NO: 5027 - DNA, 120 bp, synthetic construct
  source 1..120: mol_type = other DNA
accagggactcctagtcctgaccagctggatgtttcattacacattggaatctgtatttcagctggcatctcaggagaatctaacttacctctttcatcaccaaaacattaacaaaaatt

SEQ ID NO: 5028 - DNA, 120 bp, synthetic construct
  source 1..120: mol_type = other DNA
tgtatctcaggagaaagttgagtccctagcagtgacattcctgtactccttgtgttggtgtggcattgttttgaatatatgcccagttttccaagcagatttttttttttgagacagtct

SEQ ID NO: 5029 - DNA, 120 bp, synthetic construct
  source 1..120: mol_type = other DNA
ccttccacgcctctgggaagatctttatttggcctcagccttaaatggatattaatgcggaaatgttagggctggagatttccacagcctttgaatagtagacatttggaaaattaaata

SEQ ID NO: 5030 - DNA, 120 bp, synthetic construct
  source 1..120: mol_type = other DNA
gagctaagaatcaaactgacatttcactaactccaaagccgagacttttaatcattttccaataaggcaatgattgtgaaataatgacgtgtgaaaaagtcaacagggaccccggccttg

SEQ ID NO: 5031 - DNA, 120 bp, synthetic construct
  source 1..120: mol_type = other DNA
tgacaagcttgtaaaaagagagaaacaatccctatatttttggtccctgggaaggaagtagggtggacagcagccttaactttctggagcaaaatgtgaacttttgagagctgaagacca

SEQ ID NO: 5032 - DNA, 120 bp, synthetic construct
  source 1..120: mol_type = other DNA
gcctaaacattattttcccatcgcggaggaggtgttcccggtgtgtctcatgaatttaacacaagctgccggagagcctttgaaaggttagggggtgggtagggaggcagtttatgtagt

SEQ ID NO: 5033 - DNA, 120 bp, synthetic construct
  source 1..120: mol_type = other DNA
tcctctcctcctttaattagcaggaatgcgctggacaagttgttacaactgcagggaaaacgataaaagatggctttgtattagtgtggcaaattttattaaaccgggagaaagggtaac

SEQ ID NO: 5034 - DNA, 120 bp, synthetic construct
  source 1..120: mol_type = other DNA
atggcagcctggatttgtgctttgcactttaaagcctgttctttgcctattaccctaggcctcagattttatttgacaaatgaaaaggcaaaaaattcttcatttgtagaggccgtttag

SEQ ID NO: 5035 - DNA, 120 bp, synthetic construct
  source 1..120: mol_type = other DNA
ctcctgggctcaagtgattctcctgcctcagtctcctcagtagctgggaccccaggccatgccatcacatccagcttgttttttgatgttatttttttagagatgcgatcttgctctgtt

SEQ ID NO: 5036 - DNA, 120 bp, synthetic construct
  source 1..120: mol_type = other DNA
atgtcaacaggaggtatgtcttatgtgacagtgttgggctttttaaaagtcttatgttctattccccttctccaaggcaggtacagaccaaaaacatcccataaagatagttgtctagca

SEQ ID NO: 5037 - DNA, 120 bp, synthetic construct
  source 1..120: mol_type = other DNA
aaatatttttcaagtgattcatctacaatccaataagaacaacggctgttgccatttggatgaaaggagctgaggagcattagtgagcgatttgattttatgaaggggaagtggcacagg

SEQ ID NO: 5038 - DNA, 120 bp, synthetic construct
  source 1..120: mol_type = other DNA
ttaatcattctagtctcattagttgtgctttttgggattaaggccaggacccatttccatagcaaaggagttacatagaactctccatagcagagttacatgaaaatggtgttggctgct

SEQ ID NO: 5039 - DNA, 120 bp, synthetic construct
  source 1..120: mol_type = other DNA
cctctcattttgttctgaagttggtaactgccttgttttatcatttgcttagttttctttgtccttaccaatagcctctcagaatgattttccacaaggtcactctctccaggtgatcag

SEQ ID NO: 5040 - DNA, 120 bp, synthetic construct
  source 1..120: mol_type = other DNA
ctccaccctcctgatctagtcacatcccaaagcctccatcccttaatacttcgtcaccttggggggtaagacgttcaacaccggaattttgagggatgacacaaacattcagcccataac

SEQ ID NO: 5041 - DNA, 120 bp, synthetic construct
  source 1..120: mol_type = other DNA
taatacagttgtgtcttttaatttgaggtatttaaaatgtgtttaaagcgaagtgttctcttgtggattgtagttacctcgaggccatgagccaggttggttttgccagtttggtgtggt

SEQ ID NO: 5042 - DNA, 120 bp, synthetic construct
  source 1..120: mol_type = other DNA
atcataacaataatagccaaaatagcaaacaagtcacagtaccagaggctgtggtgacaccttacgtatatggtctcttaaattctcccaacagtcctatgagacgggcactgttttact

SEQ ID NO: 5043 - DNA, 120 bp, synthetic construct
  source 1..120: mol_type = other DNA
ctaacattgaggacatgggaactaaagactatatcttctgcaaagaactcccttcatttgcatttctcctaaagctgtgtcatgctttgagaatgcatcctgcatagccttctaagagtt

SEQ ID NO: 5044 - DNA, 120 bp, synthetic construct
  source 1..120: mol_type = other DNA
tgtgagtggccataatttactgggctcctgggtaaatttgtatttcattctgattattgaatgtgtcgcctaattgcagctataaaaaggaatagtccatcttccccatgaaagcccatt

SEQ ID NO: 5045 - DNA, 120 bp, synthetic construct
  source 1..120: mol_type = other DNA
aatataagagaaactgtttatccaggtggttaatatttgaataatcctgaaggtcatatggcatgtttctttcaaggaaagattctgtcctcaccttggtgcatatgtggagaggcgggg

SEQ ID NO: 5046 - DNA, 120 bp, synthetic construct
  source 1..120: mol_type = other DNA
agctggagtttagagctgctcctaggtgtgcaagggaaatagccatagatgtggacaccaagaggttctgccacacacaacatgcatgacctctgtgaggtcccataaaaatgaggatac

SEQ ID NO: 5047 - DNA, 120 bp, synthetic construct
  source 1..120: mol_type = other DNA
ctgccacgtggaagccatacactatccctctgtgagtgcccaggaaggcttggaggcatactcctacctgaatatgatagtccagcccaagtggcatttattgagcatccactgtatgcc

SEQ ID NO: 5048 - DNA, 120 bp, synthetic construct
  source 1..120: mol_type = other DNA
cgggtcccgatctgtacagtttcaggtttttattaaggtatgttttacacacagtaaaattccccgtttagcataaagttccatgacttttgacaaagtcctgagttgtgtaaccaccac

SEQ ID NO: 5049 - DNA, 120 bp, synthetic construct
  source 1..120: mol_type = other DNA
aatagagcaaggattaaaacatatgtaattccttgacacagacacttcctttactgtcatttagagaacggtttcagaagacagcctcttggagaatcttagtttgatggtccagatttt

SEQ ID NO: 5050 - DNA, 120 bp, synthetic construct
  source 1..120: mol_type = other DNA
gatttttcacactaagaatagtttgtaggcaggcttgagaagaacctaacagaagtttcttctaccatgagcatctatagggccattcagatacccaggcctgaaaagtaataacagtct

SEQ ID NO: 5051 - DNA, 120 bp, synthetic construct
  source 1..120: mol_type = other DNA
attcagactggtgtgagatgatatcgccttgcggttttgatttgcatttctctaatgattcgtgatgttgagcattttttcatgcttgttggccacatatatgtcttcttttgaaaagtg

SEQ ID NO: 5052 - DNA, 120 bp, synthetic construct
  source 1..120: mol_type = other DNA
ctgattttgtacattgattttgtatcctgaaactttgctgaagttgtttaacagctctaggagcttttgagcagagactgtggggatcctttctcttgtctgattgctctggctaagact

SEQ ID NO: 5053 - DNA, 120 bp, synthetic construct
  source 1..120: mol_type = other DNA
gccaggttttggtatcagaatgatgctgacctcacagaatgagttagggaggagtccctcctctttaattttttggaatagattcagtaagactttccgtcttttttaaggttgaataat

SEQ ID NO: 5054 - DNA, 120 bp, synthetic construct
  source 1..120: mol_type = other DNA
tttgttgaaaagtctatccttcctctagatacgtttttgagataaggattgacaaggtgtgattttggatgtggaacatgaaggagggggaggaactaatggtgactgagttctggcttg

SEQ ID NO: 5055 - DNA, 120 bp, synthetic construct
  source 1..120: mol_type = other DNA
ctctttctctctctgtatgcattacacatgcttatttattagaggcggcagtctctgcttgtaatcaagctgatgtttatgatggggctgttttataaagccaggcagagatgatataag

SEQ ID NO: 5056 - DNA, 120 bp, synthetic construct
  source 1..120: mol_type = other DNA
taagagatctttctaattccatcctgatatggcataattattccagctctgcagggctcagtatgaaaaccgctgtcagtcacttggctgccgggatttgtcaaactgtattcatgaatt

SEQ ID NO: 5057 - DNA, 120 bp, synthetic construct
  source 1..120: mol_type = other DNA
cttatttcttcctaggagaagtcaaaatcctaccttggccaccatctaaatgccaagggcttttctagagagggcttgacagattggatacacctgcttttgactgaagataaagcttgg

SEQ ID NO: 5058 - DNA, 120 bp, synthetic construct
  source 1..120: mol_type = other DNA
atttgtctcttttcatatatatttaaaaggtattgatagccaaaaaggccagagggacacacacagtcctgcttgggcagctggcattttcacacttctttatcccttcactcctagaag

SEQ ID NO: 5059 - DNA, 120 bp, synthetic construct
  source 1..120: mol_type = other DNA
tttgtggaatacttagtatatgccaggcaccttgctaagtgatttatacagattgttgattcagcaacctctgagatgggtactgctatctctgtcctcctggcaggttaaatgaagctg

SEQ ID NO: 5060 - DNA, 120 bp, synthetic construct
  source 1..120: mol_type = other DNA
tagaatgcaggtggacctctctttaggaaaatccaataggtggaggtcatttacatcacaaaagaccttgctttacagaaaaagatttgctgctggggtccttaaaatcagagatctttt

SEQ ID NO: 5061 - DNA, 120 bp, synthetic construct
  source 1..120: mol_type = other DNA
aaaaaaaaaaaaaaaagccgcctgcagttgtacctcttcttctgttccatttctgctcccttttgtagccaaacaactcagaagagttgtgggcatacactgcctccacttcacctcccg

SEQ ID NO: 5062 - DNA, 120 bp, synthetic construct
  source 1..120: mol_type = other DNA
ccaccatctctcctctgacctaagacagtagcctcctaattggtttttctccttccacttctcttgttccttgttcttcacacagcacagcattttaaaaactatgcatttcaaatacat

SEQ ID NO: 5063 - DNA, 120 bp, synthetic construct
  source 1..120: mol_type = other DNA
gggagatgtgcacacgccattccctctgtttggagcactcttcgtcctgcttttcacacatcctttaagtttcagattgttttcacataaaggtttctctgctgtattattttctttatg

SEQ ID NO: 5064 - DNA, 120 bp, synthetic construct
  source 1..120: mol_type = other DNA
aagatgaaaaagaaattgtctccattcttacattctagaaagggagacaggtctattaaccagtaaaaaaaatgcaacgtgatgagtgtgggaaaagaggctgtgggaacaccgatgagg

SEQ ID NO: 5065 - DNA, 120 bp, synthetic construct
  source 1..120: mol_type = other DNA
agatttgtgttccatccagttctcccctcacttggggcttctatatatgtaagcactgggggcctcaggacccctggcttagtcaacggctgctcccagagctgggaacatgacagcttc

SEQ ID NO: 5066 - DNA, 120 bp, synthetic construct
  source 1..120: mol_type = other DNA
tgatggaatgaataaagacgtcatgttttctgcattttacttagagagttgctgatgcggtgaatgttggatgaaacgtctctttcctcagagagattaaaaactaagtgcctcagcgac

SEQ ID NO: 5067 - DNA, 120 bp, synthetic construct
  source 1..120: mol_type = other DNA
ctgtgccagacagatgcctcattttgtttgtttgatgcgtgtgttgctgttttttaaacacgcagagaatgtgaaaacacaacttcccttttgaattgatccttgttctcacaactagtc

SEQ ID NO: 5068 - DNA, 120 bp, synthetic construct
  source 1..120: mol_type = other DNA
tggtgcactgtcagcctttatgggtcccattagggcaagagagtaagaggttttatgggagtttttcccccctctgtcttaaaaaaaaagaaaactagagttttcctgcgaattaaacaa

SEQ ID NO: 5069 - DNA, 120 bp, synthetic construct
  source 1..120: mol_type = other DNA
caggcagcatcacaaatatgcatggaaagtgaaattggaaggggtaaatctgtagctttgttctgattctcaaagaggtcagtgaccttcaaaaagattaagaactcatgagaggctggg

SEQ ID NO: 5070 - DNA, 120 bp, synthetic construct
  source 1..120: mol_type = other DNA
tccgtagattgccccctctttcttcttggttgcttttgacaagctgtggaggccccccttctagtttctctaaaatgataaaaaggttgaaaacatctttttgctattctcaactgattg

SEQ ID NO: 5071 - DNA, 120 bp, synthetic construct
  source 1..120: mol_type = other DNA
gtgtcttattaatattagagtgctagatctgacgatacaggcctgaaggtaggagagaaggaggaaggtggcagagggatgatcttctgatggggaatctccagagctgaggtcacaaat

SEQ ID NO: 5072 - DNA, 120 bp, synthetic construct
  source 1..120: mol_type = other DNA
gttcaaagacaagtcctttgccttcaagcgtcataccccttgatggggcttaactccttggttttcatttggggggaaggtttggcaatatctgaggacatttttgttgccacaagtaga

SEQ ID NO: 5073 - DNA, 120 bp, synthetic construct
  source 1..120: mol_type = other DNA
cagcacagccaagtctgaattttaaaaaactttccaagtgatactgatgactggccaagttagggacccctgggaaagatgaacgtgttacttgtcagtgatggctgttaaatatcaaaa

SEQ ID NO: 5074 - DNA, 120 bp, synthetic construct
  source 1..120: mol_type = other DNA
cccatctcccttcctgagaaatgatacccttcaggtgcagacacttgaaaaagttcatctgcttggtgcttgatttatcattcaaaccttcagtaactgatttccagtctcataaaatat

SEQ ID NO: 5075 - DNA, 120 bp, synthetic construct
  source 1..120: mol_type = other DNA
ggagacattcaggaagtggactgcatggtggtgaccggttcagtattggtgggcccttaggctgggtttccccaaaagtacaccctgagaaaatgacttgtattgtaacgggtttggttg

SEQ ID NO: 5076 - DNA, 120 bp, synthetic construct
  source 1..120: mol_type = other DNA
ccatctatacaaaaagtataggaagaaaaggagaaatctgggaggcggagtgcaaggaatacttgctaagactcaaaatcactaggctaagaggacacatttacaaaggctcttggggcc

SEQ ID NO: 5077 - DNA, 120 bp, synthetic construct
  source 1..120: mol_type = other DNA
cagattgattttgtagccaccagtgcctgtaacaaattccaagtgaagtttggattgcacaattgtggggtaatgacattttaattgcatgtcatatttagtctggctcaatctgaagcc

SEQ ID NO: 5078 - DNA, 120 bp, synthetic construct
  source 1..120: mol_type = other DNA
agagtgactcagtgaggagctgatttgctcccttcccccagaacagccaagtaattgaagaaaacatgaatgttaatgatgcatttagcgtttggaagttagaggggtgattaatatgtt

SEQ ID NO: 5079 - DNA, 120 bp, synthetic construct
  source 1..120: mol_type = other DNA
tagagagatttgaatcctagctctgctgattactggatgtgtggctgtgagaaagtggtttcatctcttcgggccttagtatctccatctgtcaaagaggaacaataatatttaatatgc

SEQ ID NO: 5080 - DNA, 120 bp, synthetic construct
  source 1..120: mol_type = other DNA
ccacaaagccttccctagtaattccatcttttctgtaccgctcctgtaatacttaattcattcttctcctgacatgcttgtcatactttaccttgtcctgtatcacttacttatgtgatg

SEQ ID NO: 5081 - DNA, 120 bp, synthetic construct
  source 1..120: mol_type = other DNA
actgatgacttcactgaaggcaaaagatctcagttaaagggaattattagacttgacactagaagttgtcagtgtagccctcattatcgggctactttgtggtggatgggaactggcttt

SEQ ID NO: 5082 - DNA, 120 bp, synthetic construct
  source 1..120: mol_type = other DNA
atttaaaaattgtcctgataatccttctggcaaagttgccagccctactatagcctagaaaagaggaatctgtgaactcaaagacatgctgttctgttttgactcagcaatgggcaatct

SEQ ID NO: 5083 - DNA, 120 bp, synthetic construct
  source 1..120: mol_type = other DNA
aaacaaacaaaaaccgtaagcaaatatgcattcatcgtgggtttcgtttgtgtcaggcaccatgctaggtgctttttctgtgtatctcatcttggtccttttgatatcccatgaagcagg

SEQ ID NO: 5084 - DNA, 120 bp, synthetic construct
  source 1..120: mol_type = other DNA
ggatcctctttaactgggtgctcagttttcattttaatctgacaactgaagagctctggagtaggagccaggagatcttgatttcagtctcactcattgcttatgtgtccccctacttct

SEQ ID NO: 5085 - DNA, 120 bp, synthetic construct
  source 1..120: mol_type = other DNA
ttcagatatgggagtgggctgctcagattttacaagataacccttttgtctcaggcaatgaaccagtcagctttccttgcaccaaacaagcttataatacactacagttacctgtacaag

SEQ ID NO: 5086 - DNA, 120 bp, synthetic construct
  source 1..120: mol_type = other DNA
tttggaactgggtaataggcagaggctgagagagtatggagggctcagcagaaggcaggaagatttggaatttcctagagactttttgaatggttgtgacccaaatgcagatagtgatat

SEQ ID NO: 5087 - DNA, 120 bp, synthetic construct
  source 1..120: mol_type = other DNA
gagaagagggtcaccatcctccacaccccagaatggtagatccaccagcagcttgtatcttgtgcctggaaaagctgcaggcactcaacgccagcccttgaaatccactgtgggggctga

SEQ ID NO: 5088 - DNA, 120 bp, synthetic construct
  source 1..120: mol_type = other DNA
agagttaacagtgtattataatttattttatttgacaatctaggaagttcgcagccaccagcagttctagtgcagtttcagtgtaattgggagtttgggaatctcggtggagctgttagc

SEQ ID NO: 5089 - DNA, 120 bp, synthetic construct
  source 1..120: mol_type = other DNA
ttagtattttgctccaatcacatcaggtattgtagtattattactagtactgctaccacccccactgtcactattatttccccactgacaactatcagacactacttattgggcatgcac

SEQ ID NO: 5090 - DNA, 120 bp, synthetic construct
  source 1..120: mol_type = other DNA
attttcttcctttctaaagtgaaggcacttaattgcatgattttagtcagttttgacatactgtcatccgtagagacttctcagctgcagcggcagtacaagggggtctttgtaatgatt

SEQ ID NO: 5091 - DNA, 120 bp, synthetic construct
  source 1..120: mol_type = other DNA
ccagaggttctgggagttaggtcatgtgggtcgccttttaacccactacatttatggacttgtgaatttttacagattcagtgtatttcagtcagttctcctaactattctttttgcatc

SEQ ID NO: 5092 - DNA, 120 bp, synthetic construct
  source 1..120: mol_type = other DNA
ctccatcactgcctggacttcattttgccattctaagaggctaatgtgaaaattgctcacagatggcataaacaatatggaaaagagcctctctcttcattagagtaacacaagatagtg

SEQ ID NO: 5093 - DNA, 120 bp, synthetic construct
  source 1..120: mol_type = other DNA
ccaggaaaggaaagtatagaaagctacacagaaataaagacaccttcatgtatttgattatcttggggggatggggtgcagatttaagagatttaagagagacctagagaagatgaaacg

SEQ ID NO: 5094 - DNA, 120 bp, synthetic construct
  source 1..120: mol_type = other DNA
gctgaggtaggattacatcaaggaggatgaaattaaaggcttttcatggaaagagatctccaggataatttgatggaagactttaattatttcagattcaaagtgtccccccgccccaac

SEQ ID NO: 5095 - DNA, 120 bp, synthetic construct
  source 1..120: mol_type = other DNA
cacatatcaagggctttgtagggcaaacagatgaaaacaattgtcttatgatctaccctaaagaaacatggcttgatgtgattgacagaaagccagccctagtgatggtaaacactgatg

SEQ ID NO: 5096 - DNA, 120 bp, synthetic construct
  source 1..120: mol_type = other DNA
tccccttttccagcatgaaatcattcttcaagtcataacatatttcctgaggaataaaggtcaagacaaacttcagagtgaacttctgaactcatgtcacggtgctgctagcaatttgct

SEQ ID NO: 5097 - DNA, 120 bp, synthetic construct
  source 1..120: mol_type = other DNA
aagcataattgagaacaaaactggtatagggcagtggttgatgatctgagtttgaatcctgtctataccatgaaatatccatgtggccttgacaatttcccttcctatgtgagcttcagt

SEQ ID NO: 5098 - DNA, 120 bp, synthetic construct
  source 1..120: mol_type = other DNA
agcagacaaaccaggcctcccgtgacctgctctttaactcagacaaaagactgcctgaccattttgtggtgtgtttctgaaagcagaaagaaacatgcttgaagaagagcagtgaataag

SEQ ID NO: 5099 - DNA, 120 bp, synthetic construct
  source 1..120: mol_type = other DNA
gctgttttgtttgccttcattgtaatgatcattgtcgtcatttcattgtatctcctagttctgacagtgttggctctgcagctcaatggggattcccaagtgcttctcaagcatttatta

SEQ ID NO: 5100 - DNA, 120 bp, synthetic construct
  source 1..120: mol_type = other DNA
gactcttgccttgaactcctaattttctcataatttagggctgattattaggattgcctcatgggcttgtctctccaattatgctgaaaaccctttgaggacaaaggtcttgtctcaaat

SEQ ID NO: 5101 - DNA, 120 bp, synthetic construct
  source 1..120: mol_type = other DNA
aagagtagagtcaaccaagaacattatatgttcagtgacagtgagttcagagtcttcttggcctggagcttcgtttaagatgaagtgccaatggcaaggtaattatcattttgggcatat

SEQ ID NO: 5102 - DNA, 120 bp, synthetic construct
  source 1..120: mol_type = other DNA
ttatgagcagtgtaacgttagagcagcggctgcacctttctgaacctcatttctaaaatggggctctttagacctgccttccagtgtgtgtgcagattaagcacgataatatatgtaaag

SEQ ID NO: 5103 - DNA, 120 bp, synthetic construct
  source 1..120: mol_type = other DNA
agatgtttgaataattcttggaaacatgctgcaaccacccaaggtgcactgagtcagctatgcaaattgagaggcgtaggtcagagtcctgtgtgtattttgaagttgcaaattccctgg

SEQ ID NO: 5104 - DNA, 120 bp, synthetic construct
  source 1..120: mol_type = other DNA
tggttggtggacatttggatgtctagcttttgactttcatgaatggtgatgctttaaatgttcttggccatatctgtcttcttcttttatgtctgaggttatgtgctgttctcctgggaa

SEQ ID NO: 5105 - DNA, 120 bp, synthetic construct
  source 1..120: mol_type = other DNA
gaagcaggtgtcctcatgttggagttgtattgtttgtaccagcaagcgacacagtggaagcaggaacatgagcctgttgaaatccaatgtcagggtgccctggtgggacaggcttgtttt

SEQ ID NO: 5106 - DNA, 120 bp, synthetic construct
  source 1..120: mol_type = other DNA
ccaggcactcttctaagctctttgacaaatactgacccacttaaaactcttaacactctacagagaggtagagttactacccctttggagaaatgaattagtatccccattttccaaatg

SEQ ID NO: 5107 - DNA, 120 bp, synthetic construct
  source 1..120: mol_type = other DNA
atatcttctaaagcggcacggtgagcaagggcctgcctttttcagggattagaactattttttctgtgccctaatatcatttctatccaaggtggcccttgaccttacaagagcaggggt

SEQ ID NO: 5108 - DNA, 120 bp, synthetic construct
  source 1..120: mol_type = other DNA
aaattgcagtcagagtgacctttccataagaaattctggttatgtcatccctttatgtaaaaatctcagtggctctttggtacccctagaatacaatctagacttcctagcatggctgct

SEQ ID NO: 5109 - DNA, 120 bp, synthetic construct
  source 1..120: mol_type = other DNA
ttgactctacaggctttgaacttcgtggcatagccactttgccatatctgcaggagagctgttctatgtgaaacatctcagagttgcaaatatcacatgtgaatgatatggctactttaa

SEQ ID NO: 5110 - DNA, 120 bp, synthetic construct
  source 1..120: mol_type = other DNA
ggatttgatggctacctgtgtgtttttcccaacacacattatctgtcttgcacacagctatgtccccagtacggaatacagtgctgagttatggaagacagtttttaaaaaagttattag

SEQ ID NO: 5111 - DNA, 120 bp, synthetic construct
  source 1..120: mol_type = other DNA
ggcaggcattgttctaggtgtttaggacccataaagaacaaagcaaacaaaatccctgctctctaggagctcgctactctttagcaagcgtatagaggggaaactcatataaataagaaa

SEQ ID NO: 5112 - DNA, 120 bp, synthetic construct
  source 1..120: mol_type = other DNA
gtataatagtccctgagctgcctactgcttaggctttagtaattatccagtctaacaatgcagataatagtactttatatatagatgacaagtttccaggggagagggtctgtgtgtgtg

SEQ ID NO: 5113 - DNA, 120 bp, synthetic construct
  source 1..120: mol_type = other DNA
aaaaaaaagaacttggtggagatatgagagctttgggccttacgcttccttcttaggtgcctaaaacctgaggatgcatgtatgtatgtgtctacgtatatgtacatgtatcaatgatgt

SEQ ID NO: 5114 - DNA, 120 bp, synthetic construct
  source 1..120: mol_type = other DNA
ttaaggcatttgagaggcttaatccattggctgtcacaaagtactcaaaatcatccacactaatggaaaatctgtacctaaataccagtctccccaaatcatggtgatttggctttggac

SEQ ID NO: 5115 - DNA, 120 bp, synthetic construct
  source 1..120: mol_type = other DNA
cttccttaattctcactgcatgttatcaaaccatttttcacatgtaacatccctgatcattgaacagcctggtgaagtaggcagggcaggtagtatgtctcctattttatgggaaagtaa

SEQ ID NO: 5116 - DNA, 120 bp, synthetic construct
  source 1..120: mol_type = other DNA
ttgttttgtgacagaggccaccctgacttatgaaagcggcttcgctgtggccgggcatgctgagttcccgcagcctgttttactcttcacacaaggacatcctacttctccagggagctt

SEQ ID NO: 5117 - DNA, 120 bp, synthetic construct
  source 1..120: mol_type = other DNA
atgcgggctaagggggttaaggaacaggcccaggtcttggagctaggtattgagagagtcaggattctttattgtgtttgtaattattaaccagactttttaagtgaaacaaacaaacaa

SEQ ID NO: 5118 - DNA, 120 bp, synthetic construct
  source 1..120: mol_type = other DNA
aaacacccagagagatgcctagcagaggagagagggttatatttatctggaggtgattaaaatgctgtccttaaaagttgttctctccaagttggtcttctctcctgctcatttgattcc

SEQ ID NO: 5119 - DNA, 120 bp, synthetic construct
  source 1..120: mol_type = other DNA
taattctacttccatgatctcattgaatcctattaacaacccagtaaggaagatgatacaaatgtcatttcccaccttacagcagaggaaatggaagccccaagaggttatgtgatgggt

SEQ ID NO: 5120 - DNA, 120 bp, synthetic construct
  source 1..120: mol_type = other DNA
tttagcttgacttattctccaacattattatgatcatcataatcacattcctacattttctcaagtgccaactgcatgctaggttctgggacatgcagggaaggtgggtgtagtgagtga

SEQ ID NO: 5121 - DNA, 120 bp, synthetic construct
  source 1..120: mol_type = other DNA
ttatgaactggctgctgctcatgaatcagcaaacatttattaaacttctagtcagtatggacataatagcaggtgtggcaggtgatacatgccccaaagagatgttcccctgctttaaaa

SEQ ID NO: 5122 - DNA, 120 bp, synthetic construct
  source 1..120: mol_type = other DNA
ttcctcctcttcagtgacaccaaataccactcacatgtaaatacttgcagttgacagagtgtttccacatatgttctctgattggactctttttttattccagcagatactttctgagtg

SEQ ID NO: 5123 - DNA, 120 bp, synthetic construct
  source 1..120: mol_type = other DNA
ttgtttccctccccttctcggcatatattactgtgattccccttggcctgcatctgctgcattatgtctgcttaggttgtttgttttaactacagtgaatatacaaaatgcacacaccaa

SEQ ID NO: 5124 - DNA, 120 bp, synthetic construct
  source 1..120: mol_type = other DNA
gagaaaccccccatggagggtaatggtcgtggaaagagcaacctggtgctctaacttcaggataagttcttttttcgcccctgaattattaaaatattttctgttaataaaggatgcatt

SEQ ID NO: 5125 - DNA, 120 bp, synthetic construct
  source 1..120: mol_type = other DNA
gcacgaactgcgtgtagttctgtcatcaaataaaatttacacagggtaatctgacacctatttagcagtctgcttaataattatggtgcagcatgctgatcaggcataaatggaaggcat

SEQ ID NO: 5126 - DNA, 120 bp, synthetic construct
  source 1..120: mol_type = other DNA
tcgtgtcccctgccattctctaccctaaccatgaaactggacttccaacagcacagagtggtttggtctatttttacactttatatagacagaattattctgtctctagaatgtgtaatc

SEQ ID NO: 5127 - DNA, 120 bp, synthetic construct
  source 1..120: mol_type = other DNA
acaggcgtgagtctgtattaaaattaaacattttaatactactctcccaatccaggcacctgggattagcatatccaggtgctcatcagccgcaccctcaccccagtgaagccagcagag

SEQ ID NO: 5128 - DNA, 120 bp, synthetic construct
  source 1..120: mol_type = other DNA
atgaggttcttcatttctaatgacacgccatgaatcatccaaccacagttacagcaacctgccccatgtcggtcacagagctgaagttagaacctgagccttctttgagcccggcatgta

SEQ ID NO: 5129 - DNA, 120 bp, synthetic construct
  source 1..120: mol_type = other DNA
ggccactagaataaagatgctgataactccctagtgcagtcaatgtaggttcagcctagcaggttaagaggcagctgtcggggaaaaaggagggtgaggatggccatggggactccaaat

SEQ ID NO: 5130 - DNA, 120 bp, synthetic construct
  source 1..120: mol_type = other DNA
ttaatttataagatgcctatagtttttcagcgtttgctgcaaggtcttctccctctctaaatgagtgaataaagtggcaacccatcaatttccatttgtcgctaatgggaagcggaaagg

SEQ ID NO: 5131 - DNA, 120 bp, synthetic construct
  source 1..120: mol_type = other DNA
gatggctgtttttcattcaagtgaggtacagggcaggagatacagccaaattgtctattacagtgtttggtgtttacccctcgaatgaggttttgggtaaaagaaagggattttatttat

SEQ ID NO: 5132 - DNA, 120 bp, synthetic construct
  source 1..120: mol_type = other DNA
aacagaagggcccaacacatgatgcaaagaagtatatgggtgcagtttaatgaatgtgatggatagatgaatccatggttcttgcaagactgggttttccaataacatgtttggtatcat

SEQ ID NO: 5133 - DNA, 120 bp, synthetic construct
  source 1..120: mol_type = other DNA
tcagcaggttattgcagcaattgaatctctcttgtttaaggtttccctgtgtggtaaagcagcaagagcttggatttattttatactctgtcttacgaggaccctccaagcactttataa

SEQ ID NO: 5134 - DNA, 120 bp, synthetic construct
  source 1..120: mol_type = other DNA
gggtggttttgggatgtttattctctcttttgccctttccaaaacccattgtgcactgtaacttcatctgtaatctcttctactgagaggttagagatgaattaggcctagatattccgt

SEQ ID NO: 5135 - DNA, 120 bp, synthetic construct
  source 1..120: mol_type = other DNA
gtattggattcaacagggatgaacaccatattgaaagagtgatggtgatatttcatgagaatttcaaaagcctgtctccagctctgtgaagtcatttacaaaacgtcttgggatgtggag

SEQ ID NO: 5136 - DNA, 120 bp, synthetic construct
  source 1..120: mol_type = other DNA
gagaggcactgtgactcagtctaatgctcaaccctgactggaggtctctggaattgagactctatctatctgagtatgacccctttagaaaaggttcatcgtgtctgtagtcccagctac

SEQ ID NO: 5137 - DNA, 120 bp, synthetic construct
  source 1..120: mol_type = other DNA
ttttataagaattcaataagttcctgcatagaagcacttaggatggtgtcaggcatacagtaagtgctatgaaagtgacatctgtaattgataatagtactactgggccagcctgtttcc

SEQ ID NO: 5138 - DNA, 120 bp, synthetic construct
  source 1..120: mol_type = other DNA
agattcatccccactgggatgtctaacagaaactcagatttgccatgtccaaaatcgagttattgattctcccctccatgcctgcttctcctactgtctactcatttcataaatggtaat

SEQ ID NO: 5139 - DNA, 120 bp, synthetic construct
  source 1..120: mol_type = other DNA
acctggatatctgtgtggttcactttctcatgccatgcaggtcatgccctgaccatcctctagccctgcctctgcccctgacactttctgtccttctctgcttcctttttctttttttta

SEQ ID NO: 5140 - DNA, 120 bp, synthetic construct
  source 1..120: mol_type = other DNA
catttattaaatacagaatcctttcctcgttgcttgtttttgccaggtttgtcaaaggtgagatggttgtagacgtatgttgtatttctgaggtctccgttctgttctattgatctgtat

SEQ ID NO: 5141 - DNA, 120 bp, synthetic construct
  source 1..120: mol_type = other DNA
tcttctctgctttatttttctataacattcatcatcatctgacatatgggtcctattgtttattgtctgagtcctcccatggggaaaaaccctttgtttagttctctgctgtttccccag

SEQ ID NO: 5142 - DNA, 120 bp, synthetic construct
  source 1..120: mol_type = other DNA
actgtttgcttttccttagattcacaaaatctgcatgctggcagggccctcaagtaactcattcctcctttgaatcattctgaccattggtttttctattgagcctgactctatctctct

SEQ ID NO: 5143 - DNA, 120 bp, synthetic construct
  source 1..120: mol_type = other DNA
aattttccttgcacctcctggagctgctggagtttctgaaattaaaagggcctttatctggaaattatggttgaatgccagtttcccctgtagagtcaatttggaaaacctaaagcacta

SEQ ID NO: 5144 - DNA, 120 bp, synthetic construct
  source 1..120: mol_type = other DNA
cttagtggcttaaataagacaaaattatgatcttacagcctgtaggtcagaagtcttaactgagctaaagctaagattttagtggggttgcattcctgtctgaaggctctaggagagaac

SEQ ID NO: 5145 - DNA, 120 bp, synthetic construct
  source 1..120: mol_type = other DNA
atcaaccattttgcataagaaccaggcatcccagagcaccgaagctgatgtgtttttttcaatggacagagggaactggacatgttggctcttccattactgcaactgagattatgccac

SEQ ID NO: 5146 - DNA, 120 bp, synthetic construct
  source 1..120: mol_type = other DNA
tattgagcatctactgtgcccatcacttccataagttatatgattaatttttataacaacctccagaggtaggtttggtaatgtctgctatttgggtgtggaaactgaggtgtggaggga

SEQ ID NO: 5147 - DNA, 120 bp, synthetic construct
  source 1..120: mol_type = other DNA
gtttttgtttttaaagagccaatccttaaaatagagggaataggggtgggagtgcagagaacaccctaaagggagagaagagtttgagataagagttgggacttctggagctagaaatat

SEQ ID NO: 5148 - DNA, 120 bp, synthetic construct
  source 1..120: mol_type = other DNA
agaatactcttcttctcaccttgcctgcccagcagaattttattcaccattcaaggccttgcttatatatgacctcctcctctgaaggcccttctctgatggccctttcttttcttgaga

SEQ ID NO: 5149 - DNA, 120 bp, synthetic construct
  source 1..120: mol_type = other DNA
tccatagtaggtgttcagtaaacattagtcaagtgaatgtaggaatgactcattcttatcctgggctgctgtggaaaaggtgtttgtttcaattggggccacatactcactggcttgaaa

SEQ ID NO: 5150 - DNA, 120 bp, synthetic construct
  source 1..120: mol_type = other DNA
agtgctccgggtaaaggctctccaaggggaagcataatgcctgctctttcagcagctgttaattagttgcagatgatgagataattcataaaaattagcaatgatttccttcattgtgtt

SEQ ID NO: 5151 - DNA, 120 bp, synthetic construct
  source 1..120: mol_type = other DNA
tctgtctagaccactatttgcccccatcttttttttttttttttcccatctggccaactcctatttatcctacaggtaaaatgccatttctgcattttgaaccatattcccagtgcccga

SEQ ID NO: 5152 - DNA, 120 bp, synthetic construct
  source 1..120: mol_type = other DNA
ccgtttgccaggctagaaaacgttatccctagcaatgtgttggaagattctgaacacagacttgcaaataagtacagaacttttccagaccactaacactttctggcaagactttttttg

SEQ ID NO: 5153 - DNA, 120 bp, synthetic construct
  source 1..120: mol_type = other DNA
actctaaatatatggtaaagagcctaggtgcaggagaattcaccctttctttaccagagtagtcaaggaaagcttttctgtgcttacctgacacggtgattcatcttggaggagtaaata

SEQ ID NO: 5154 - DNA, 120 bp, synthetic construct
  source 1..120: mol_type = other DNA
cctctctccaactccagctgtgcgcagagttcaacatgtgttgatctacttaggctgtagatttcagctgagggatgttgggtaaattaatttacttttgagtctcagtatacctttaaa

SEQ ID NO: 5155 - DNA, 120 bp, synthetic construct
  source 1..120: mol_type = other DNA
aaagctagtttagggttttcagttgtccagggataattcccaaagtgcgttattaactccaacataagtaacagtgagttggctgttgtgctattatttccctcttagctttctctggtt

SEQ ID NO: 5156 - DNA, 120 bp, synthetic construct
  source 1..120: mol_type = other DNA
tggccagaaaacactctctgctttatagagactttcggctgagattttttggccttctcctccattcagcttcagaattctgtaaatgacttaaggagaaaattgggaccctatatttga

SEQ ID NO: 5157 - DNA, 120 bp, synthetic construct
  source 1..120: mol_type = other DNA
cagcaaacagattgtgtttcagcccagataatccaatatggagatctgcatgagagccgaaaataattaatcacattttaatggggttgagagaggctagtcaaggatgctttacattgg

SEQ ID NO: 5158 - DNA, 120 bp, synthetic construct
  source 1..120: mol_type = other DNA
ctcctttggtgccttgtgcattcctggtgctcgataaatatttattgatcgaatgagtaaatgagtatcgaatgggctttccatgtgttttgctccaggtgtctcttattgtaattaaag

SEQ ID NO: 5159 - DNA, 120 bp, synthetic construct
  source 1..120: mol_type = other DNA
gaaataattcttgcccttcttttatgtggctctgtctcgcatatttatgggaagttatcacgtccttgtaggccctcgttctctaggttccacatattatgttcatttaacctcccttta

SEQ ID NO: 5160 - DNA, 120 bp, synthetic construct
  source 1..120: mol_type = other DNA
agaccatatagctaataaatgataacacctaggatttggacatgggctgtgagatgacccccaaaagtattttttccactctatgcagcctcctttaaagaaagtaggagagaggggttt

SEQ ID NO: 5161 - DNA, 120 bp, synthetic construct
  source 1..120: mol_type = other DNA
aggacagacagtcgggaagacgagactggagaggaacccaaacgatggagacccggtgtgccttagtaggaagcttgaactttgttttggagaaacaggcaactcttttttttctgagac

SEQ ID NO: 5162 - DNA, 120 bp, synthetic construct
  source 1..120: mol_type = other DNA
agttagtcctttcaataaatatttcttgggtacctagtatgtgtcagatactgggaaagtcctgggtatagagaggtagataagaaagacagtctctgcccaccaaaggtgacatagaaa

SEQ ID NO: 5163 - DNA, 120 bp, synthetic construct
  source 1..120: mol_type = other DNA
ttcattgttgtctttcagtggcctgattaatatctaagccctttaatttgcttccctttataaaaagaagaagacaggcaagcaacacaggtcataaaacactgcagcccgtaacacttc

SEQ ID NO: 5164 - DNA, 120 bp, synthetic construct
  source 1..120: mol_type = other DNA
tgtcacttgtcctataaatgacaatagagctaacaatatctaattgactattaaaggagaaagcagccctgtagatgctgcaggctaattaaccctgggagtgcagagcgagaggaagaa

SEQ ID NO: 5165 - DNA, 120 bp, synthetic construct
  source 1..120: mol_type = other DNA
tattcagtgtcctcgttgccacaccccatgacgtttgttatgtttcttcttatgaatggatctgcctctgcctcctcagctcatccttcaacccgttcgcttcccagctcttttcctctg

SEQ ID NO: 5166 - DNA, 120 bp, synthetic construct
  source 1..120: mol_type = other DNA
ggctttgtgtggtgtggcgtttctccactcaaccctgtccattttacaagtgttttgaaaaaacctactttactctgtcaagatgaaacctaaagagagtataacgtttctacatacatg

SEQ ID NO: 5167 - DNA, 120 bp, synthetic construct
  source 1..120: mol_type = other DNA
cactctaagtgcaaacatttttctctatttttggtgcattagattaatcaggagaagtgggcttttggatttcgttggtcccctgtgaggcctagctccaggtaagtgtccttcataaat

SEQ ID NO: 5168 - DNA, 120 bp, synthetic construct
  source 1..120: mol_type = other DNA
agtcagagatgtaggtgtgaaggtcaaaccacaggggttctttagggtaaaatgggaaccaggtagaacgtttgagcaaagtaaggccatgattggacttcaaattttttacagaaataa

SEQ ID NO: 5169 - DNA, 120 bp, synthetic construct
  source 1..120: mol_type = other DNA
acacaatgactaaatcaccaaacaaagcatttctcagaccgtatcccattgttaagcaatacagaactgtacaatacggttttattaactttaatcttcattttgtacactagatctcta

SEQ ID NO: 5170 - DNA, 120 bp, synthetic construct
  source 1..120: mol_type = other DNA
caggatgcagcagtaaaggtggtaagaaaggttggaattctggatagattttgaaggtaaagccaacagaatttcttgatggtctggatatgagatgtgtatgtgtaagagagacagatc

SEQ ID NO: 5171 - DNA, 120 bp, synthetic construct
  source 1..120: mol_type = other DNA
acgtttctatctgagtagagcttgaggcttcagccctgcagaaagcaggaaggaagatgtatttgtatcgaaaagaaaaaaggaagttaccagcacacttttaagttcactgtcttgttt

SEQ ID NO: 5172 - DNA, 120 bp, synthetic construct
  source 1..120: mol_type = other DNA
gtacctattattaccattactatttcggttgtgtctgtgtgctgctttctgaatctctttataaactcctggaggcaggtgaattatgtcctgtttcctatacatggtaggtacaggatg

SEQ ID NO: 5173 - DNA, 120 bp, synthetic construct
  source 1..120: mol_type = other DNA
ttaacctctgccattctagctcaaatggagtcacaaacaacatataaacaaatgagcaggtctatgttccaaaaaatgtactttacaaaaacaggtggcatgtggttttccagttgtccc

SEQ ID NO: 5174 - DNA, 120 bp, synthetic construct
  source 1..120: mol_type = other DNA
acattgatctcatatcccgcaaatttgcagaatttgtttattagctctagtagtgttcgtggattctctgggattttctggaggccccagcatctcaggctcctgtctgacattctcctt

SEQ ID NO: 5175 - DNA, 120 bp, synthetic construct
  source 1..120: mol_type = other DNA
atttctggcctagaaaacgttcgacctatggggatctttatcacctaagacatataggtagtctgctgcatgcagtatcaaagcaatatgtgaggttgagagaagggagcgtatgaccaa

SEQ ID NO: 5176 - DNA, 120 bp, synthetic construct
  source 1..120: mol_type = other DNA
taatttaacacagcaacaatcattgatttagcttacaaatctttactttgggcaaggctcagtagggaagattcaaaaggctaatctgtgctccatgtagcatcagctgaatgggcagct

SEQ ID NO: 5177 - DNA, 120 bp, synthetic construct
  source 1..120: mol_type = other DNA
ggagtccggagtcctttccaaggcatatttttcaaagggagggccaaggatcacctatttaaaatcttacctggagactctattaaaaatgtagacttcagacctactaaatctcaaatg

SEQ ID NO: 5178 - DNA, 120 bp, synthetic construct
  source 1..120: mol_type = other DNA
agttcccaaagcctcttcctttttgaggctcttttaggttttctgattataccaaagagagtcccagtttttctgaactaaaaaatcagagtagtgtagaagacagagtcctggacaagg

SEQ ID NO: 5179 - DNA, 120 bp, synthetic construct
  source 1..120: mol_type = other DNA
aaagcagagtaagctgttgctgcatcaccattttaaatgttaatgatttgtattattttaaaatctgtttgtgtgcctggaggcctctttgccagaggcccagaaagtaaggaagtgggt

SEQ ID NO: 5180 - DNA, 120 bp, synthetic construct
  source 1..120: mol_type = other DNA
tgtacgggatgaaaagcttggaagtcctagcaactgaatcctacccattccgtggtctgagtagcttcattaagaatccaattcattcatatatccatgcactcaggaaatgattattat

SEQ ID NO: 5181 - DNA, 120 bp, synthetic construct
  source 1..120: mol_type = other DNA
cagcagtttgccacagctggctcatgtcaagcgtgtggttctaaaaacaaatgaaaaaacaaagctcatgttttcctcttttaataaacttgtccaagtcaagtgtccccctgtttatag

SEQ ID NO: 5182 - DNA, 120 bp, synthetic construct
  source 1..120: mol_type = other DNA
ccctaagagatgtacaacatgaatattcatagttctgttcacttaggtgactgctttgctagctttatctcttcacagcagctttggaagatagggaaaggaaggctcaattctccattt

SEQ ID NO: 5183 - DNA, 120 bp, synthetic construct
  source 1..120: mol_type = other DNA
caagctgagactggagtttaaataaaaggtagatgttactctagatgaaggggacatggaacagtgctttttcagggcctgagtcaagagagaatatgattctttttgaaatgtagggag

SEQ ID NO: 5184 - DNA, 120 bp, synthetic construct
  source 1..120: mol_type = other DNA
tactggcggcaaatgttcccacttttgagatagaactggggagactgaagcagaaaataggacgcagcctcctctgggttccagccttaatttaatttaaatgaattaaacatattcttc

SEQ ID NO: 5185 - DNA, 120 bp, synthetic construct
  source 1..120: mol_type = other DNA
ataaaatctatttgcacagccatggactgagaatttagctcagatggttagagagggcgtgcttagggactaggatccaaatcctttaaatatttgctgtggggatgtcttcatacccaa

SEQ ID NO: 5186 - DNA, 120 bp, synthetic construct
  source 1..120: mol_type = other DNA
gtttaaaaaaaaaaaagcgatgggagaacttgatttgtgatgttggctgtatcagttgacctctttggtcctcatttccttacttacaagaggggaaataagaatcctcctgcttcctgc

SEQ ID NO: 5187 - DNA, 120 bp, synthetic construct
  source 1..120: mol_type = other DNA
gactacaatcagaatggtttcaggactggctaagccctgtttttaagaacaagagttattaaccataggaatggtttgctaagaaagaaggtggccctcccctttctagaataaggtata

SEQ ID NO: 5188 - DNA, 120 bp, synthetic construct
  source 1..120: mol_type = other DNA
agaaagctaagcaacaatgactagccttattccagaaggatccttctttttatgtataggtatttgctaaggcacttctaccgcagagcatttttctctccacattagctgctgctgtta

SEQ ID NO: 5189 - DNA, 120 bp, synthetic construct
  source 1..120: mol_type = other DNA
aagatactggaatttttaaaatgaattgagaaatcattgctctgtctcagtgtgtgatggaaaggttagaggaatggagggtgaggatggagggaaaagggagagagatgaatgcaaaga

SEQ ID NO: 5190 - DNA, 120 bp, synthetic construct
  source 1..120: mol_type = other DNA
tcccgggtcagcaagaccccaagatgtcgaagcatcaaaatacagaaaatgaaagacacggttaataccagcagttaagggaatcatcattgataacatttattggacactatatgtgag

SEQ ID NO: 5191 - DNA, 120 bp, synthetic construct
  source 1..120: mol_type = other DNA
tgaacccaaatgagattcacttggtaattatgttttccttaatgaagtttaaaaggggtggtaactaacagggctttatcctgacaccagccattcctcatccgtaaatggtgcttcgta

SEQ ID NO: 5192 - DNA, 120 bp, synthetic construct
  source 1..120: mol_type = other DNA
atatagtgaaattcactttttatgagtgtaccttctatgagtgttgacgaatgcatgcaagcatgtaaccatcaccataatcaagatctggaaccattgcagtgccctggaaactccctt

SEQ ID NO: 5193 - DNA, 120 bp, synthetic construct
  source 1..120: mol_type = other DNA
caccctcttcactcttgccaacttggtttgtggtatttgtgttgccaacacaatactcctgtattagtctgaatttgtggttgctgtgtttatagtgattctatataagggtgcaaacat

SEQ ID NO: 5194 - DNA, 120 bp, synthetic construct
  source 1..120: mol_type = other DNA
tattgggtcactttctgttcccttggccatatccagaggcatttggaaatacatttggcaggcaaatatttatgggccacttattacataccaggtgttatccttttccacaaagagaat

SEQ ID NO: 5195 - DNA, 120 bp, synthetic construct
  source 1..120: mol_type = other DNA
taaacatttgaaagtcatcaacaggagagcctctggtaacatagcagcagtggtggcagcatggtttgtggatcttcccaaatccccacataagacagatgaaacaacaaaataacaaaa

SEQ ID NO: 5196 - DNA, 120 bp, synthetic construct
  source 1..120: mol_type = other DNA
aagaaagagagaatgagatgagtaacatcctgctgagcatgaaagcacaccagaaactcatgctcagaaaagcagaaaaaaataaaaacctatggcacactgtttcacgatgagctcaaa

SEQ ID NO: 5197 - DNA, 120 bp, synthetic construct
  source 1..120: mol_type = other DNA
gaatctgctaacgaatgaatttcagacaacaaaataactagagagagattgacataaaaccaatgatgagcattaaacaagattgagagttaatagggatatattatgatctgacaatat

SEQ ID NO: 5198 - DNA, 120 bp, synthetic construct
  source 1..120: mol_type = other DNA
aagttttttaatttgatgtgatccttatttgtcaatttttttctgtgtttgcctgtgcttgtagggtattactcaagaaatctttgcccagaccagtgtcctggagagtttctccagtgt

SEQ ID NO: 5199 - DNA, 120 bp, synthetic construct
  source 1..120: mol_type = other DNA
gttttttagttttcattgtagaggtctttcacctctttagttaaattaattcataggtatttaactttatttgtggctattttgaatgaaattactttttgatttctttttcaggttgtt

SEQ ID NO: 5200 - DNA, 120 bp, synthetic construct
  source 1..120: mol_type = other DNA
tggtctattcaggttttggatttcctcctggttcaatcttggaggccgtatctaggaatttgtctatttcttctagattttccaatttattggtatatagttgcttatagtagccactaa

SEQ ID NO: 5201 - DNA, 120 bp, synthetic construct
  source 1..120: mol_type = other DNA
tttgtgacgtagcatatggtctgtccttgagaatgatccacgtgctgagaagaagaatgtgtattctgcagccactggatgaaatgttctgtaaatatctattaggtctatttattctac

SEQ ID NO: 5202 - DNA, 120 bp, synthetic construct
  source 1..120: mol_type = other DNA
ttttttttttttttgagatggagtcttgctctgtcacccaggctagagtatggtggcacgatcttggctcactgcaacctccacctcccgggttcaaatgattctcctgcctcagcctcc

SEQ ID NO: 5203 - DNA, 120 bp, synthetic construct
  source 1..120: mol_type = other DNA
tctgtgtattttcaaatagcctgtcttcaggctcactaattcctccttctggttgatcaattctgctgttaagagactctgatgcattcctcagtatatcaattgcatttttcaaatgca

SEQ ID NO: 5204 - DNA, 120 bp, synthetic construct
  source 1..120: mol_type = other DNA
ctaagctggcacaaagtccttcccactcttccctctcctttccacaggcagaggagcctttcctcatggcctccaccaccactggcccatggggagttctgccagaccactgctaatgtt

SEQ ID NO: 5205 - DNA, 120 bp, synthetic construct
  source 1..120: mol_type = other DNA
aaaggacttagaagccaacgtaagaggattcccactagccgaagatgacaacttgagctttaataaggatagtcgttgcaatggattggaaccgatgtttagacatggtctagtatattt

SEQ ID NO: 5206 - DNA, 120 bp, synthetic construct
  source 1..120: mol_type = other DNA
tagaggctacggttgggatgaggacatggggggctttctgggtggttggcaaatttctatatcttaacctgcatagttattatgaggtgttcaccttataatgattcagtaaaccattta

SEQ ID NO: 5207 - DNA, 120 bp, synthetic construct
  source 1..120: mol_type = other DNA
aggagcagagtagccttttgttcattccaagatcagagccaaaaagttgaagcagagaagtttcacagcagggctggatactctcttcagagcagcctggcaatataaaaagagcatttg

SEQ ID NO: 5208 - DNA, 120 bp, synthetic construct
  source 1..120: mol_type = other DNA
attctgtgtttctctgagacaacatgtttagacatctcttatttcaacatatacctatcagagcaaaattctgcattgcaatacggggcactttggagtcccaagatctaggggtgagtg

SEQ ID NO: 5209 - DNA, 120 bp, synthetic construct
  source 1..120: mol_type = other DNA
ccttctcctggccatgtatctgcataatgctttattatgggccctctcctgggtcattctcaccttaccatagagacgaggcatgtttatttggttttatttgacgcaagatctgagact

SEQ ID NO: 5210 - DNA, 120 bp, synthetic construct
  source 1..120: mol_type = other DNA
attcatgtgagtgccccacagggtatcttaacttttcaggttaaatataaaatgccttctgttttcattcatggatatcagtatacatgcacgcatacatgcacaggcaagcacagacac

SEQ ID NO: 5211 - DNA, 120 bp, synthetic construct
  source 1..120: mol_type = other DNA
aaagcagaattaccattttactcaacaatcccattactgggtatatacccagagaaatagaaatcattctaccataaagacacatgcatgtgaatgttcattgcagcactattcactaca

SEQ ID NO: 5212 - DNA, 120 bp, synthetic construct
  source 1..120: mol_type = other DNA
atcccagctctgcccattactgcctggggtattgttgcaaagatggtgtgttgaaggatttggcacaaagttcagcacatacaaagtctcatagatgctttttgaaaatttttttcacta

SEQ ID NO: 5213 - DNA, 120 bp, synthetic construct
  source 1..120: mol_type = other DNA
gtggaagttagtgctggaaaaagcaacagttctatgtagaatattaatggaatccattttcttgccatctcctgcaggaacactttggaagtgcaaggggaaaaaatcgctttgcagtaa

SEQ ID NO: 5214 - DNA, 120 bp, synthetic construct
  source 1..120: mol_type = other DNA
ctcattatgtcagactactgcacaaaaccctgaaagatcttttgggaattggtgattttgcttatttaggggccaggatgaagactgagaaagagatagagcttgttttggactgtagaa

SEQ ID NO: 5215 - DNA, 120 bp, synthetic construct
  source 1..120: mol_type = other DNA
attaaggctccatttctattcagccacaatccattcccagaaatcaagaaatattcatgagctgcaagcattggatggcaatgtctctctgtcatcatcaggaatgacagattcctcaga

SEQ ID NO: 5216 - DNA, 120 bp, synthetic construct
  source 1..120: mol_type = other DNA
gtgaacattattgtcaaataattttaatcagaattttatcaaagtgtctagaagtcagcttagggcctggcacaaaatctttgcgtgtgcgtggctacgcacacatgcaaacctatgcac

SEQ ID NO: 5217 - DNA, 120 bp, synthetic construct
  source 1..120: mol_type = other DNA
tggtgctacagccacaaagccaagtcaaatgaattagaagtgggaacccattaactttttgatccaggctttatggccatttttaagttatttaacctactatctcctcctcctgctgat

SEQ ID NO: 5218 - DNA, 120 bp, synthetic construct
  source 1..120: mol_type = other DNA
ttggtgggactccacagaaggactgatgggctcagcggtgggcggggggaagtttcagaatcattttaaaatttacttttatgctattaattttttgctgacagattagaaagataaatc

SEQ ID NO: 5219 - DNA, 120 bp, synthetic construct
  source 1..120: mol_type = other DNA
gctctccaaagtgaggtactctgtgttccatttaattaatgtcataataatctattgatgagctattttgtaatggatgctggactgagtaccttggacagatgcttccatggactcttc

SEQ ID NO: 5220 - DNA, 120 bp, synthetic construct
  source 1..120: mol_type = other DNA
gctccaaatcccaatttgcatctcatctgggagtcatttgcataggaagtcctatcggtagctttatgaaataaaataaataaaataaatggccgataaggctgccaagcagactcccat

SEQ ID NO: 5221 - DNA, 120 bp, synthetic construct
  source 1..120: mol_type = other DNA
catcatctagtttatgttttttcattccttttaaagttttcccattttcattagttgattttactttccaccctccctgcagctctcagggaggagggagcacacagctttttagacagg

SEQ ID NO: 5222 - DNA, 120 bp, synthetic construct
  source 1..120: mol_type = other DNA
aaacagtcatcattttcaattcaacaaatatatgagtagttattctacatccagcccaatcttaggtgctgtgggggagacaacaggtaagagatgatgccggcccttgtctttcaaaat

SEQ ID NO: 5223 - DNA, 120 bp, synthetic construct
  source 1..120: mol_type = other DNA
acagtgtcctttgaaggaacacatctgaatccgaactgcaaacgatgtcagtgttaattacaatgaaacatcattaatttggactctggtaatttggaatgggtcagggcagaggttcaa

SEQ ID NO: 5224 - DNA, 120 bp, synthetic construct
  source 1..120: mol_type = other DNA
taatttactatgcaaatcaacaatgaaaactatttaggaaaagagcctgcttgtgaaggtccctcaagcctttatggcttttatttccatgctaacagacaatgtgattggccttgccct

SEQ ID NO: 5225 - DNA, 120 bp, synthetic construct
  source 1..120: mol_type = other DNA
actcttcataactcttaaactaagtttaccatcactgccttttgtctcttgtgcaaatggaccccagtagtctcatcctgtggatcttccatattttccattgatctataggggacacag

SEQ ID NO: 5226 - DNA, 120 bp, synthetic construct
  source 1..120: mol_type = other DNA
aaagggagaagagttccctgggtctggcagaaggcagtgaaacctcaatctcttccagacccctatattttatttttttggatttcaaaatagggcttgggctctagaaatactggtttg

SEQ ID NO: 5227 - DNA, 120 bp, synthetic construct
  source 1..120: mol_type = other DNA
gtgaaacattacagaagacaaagggagagggcagctaaaaataatcaccagctgttaattggtctatagtgggcatctataaatgggagtgtcttggtgtcttatctaccaacttctcaa

SEQ ID NO: 5228 - DNA, 120 bp, synthetic construct
  source 1..120: mol_type = other DNA
tagcattttttttttttcaagtctaacatgagagtaagaaccaaagtcttccctcaagtcttaatggggccaatctggctcacttaaccaccctgaactgattattgtcatgggggaatg

SEQ ID NO: 5229 - DNA, 120 bp, synthetic construct
  source 1..120: mol_type = other DNA
atgcagtgtttggttttctgttcctgtgttagtttgctgagaataatggtttccagcttcatccatgtccctgcaaaggacacgaactcattctttttttatggctacacagtattccat

SEQ ID NO: 5230 - DNA, 120 bp, synthetic construct
  source 1..120: mol_type = other DNA
caccatttgttaagtagggaatccttttcccattgcttgtttttgtcaggtttgtcaaagatcagatagttgtagatgtgtggcatgatttctgaggcctctgttctgttccattcgtct

SEQ ID NO: 5231 - DNA, 120 bp, synthetic construct
  source 1..120: mol_type = other DNA
tattgagataatcatgtggtttttgtcattggttctgtttatgtgttggattacgtttattgatttgcatatattgaaccagccttgcatcccagggatgaagccaacttgatcatggtg

SEQ ID NO: 5232 - DNA, 120 bp, synthetic construct
  source 1..120: mol_type = other DNA
tgccttaatttcattatttacccagtagtcattcaggagcaggttgttcagtttccatgtagttgtgcagttttcagtgagtttcttaattctgagttctaatttgattgcattgtggtc

SEQ ID NO: 5233 - DNA, 120 bp, synthetic construct
  source 1..120: mol_type = other DNA
gtgtataaaggattttatttctcttttacttatgaagcttagtttggctggatatgaaattctggattgaaaattcttttctttaagaatgttgaatattagcccccactctcttctggc

SEQ ID NO: 5234 - DNA, 120 bp, synthetic construct
  source 1..120: mol_type = other DNA
tgctttctgtttgttatttttccttctaacagtcaggcctctcttctgcaagtctgctggaggtccattcaagaccctgtttgcctgggtatcaccagcagaggctgcagaacagcaaag

SEQ ID NO: 5235 - DNA, 120 bp, synthetic construct
  source 1..120: mol_type = other DNA
gtccctcatggcttcccttggctaggggaggtagttctctgaccctttgcacttcctgggtgagacgacaccccaccctgcttctgcttgccctctgtgggctgcacccactgtctaacc

SEQ ID NO: 5236 - DNA, 120 bp, synthetic construct
  source 1..120: mol_type = other DNA
gtttcaggtcttacatttatgtcttctatgcatttcgagtttatttttgtgtgtggtgtaagataagggtccaatttcattcatttgcatgtggaaatccagtttttcagcaccatttat

SEQ ID NO: 5237 - DNA, 120 bp, synthetic construct
  source 1..120: mol_type = other DNA
tgggtttttaatacatagcctttattgtattgaggaatttttcttctatacctaaactgttaagaggttttatcaagaagggatgctgaactttgttaaatgtttttctgcaccagttga

SEQ ID NO: 5238 - DNA, 120 bp, synthetic construct
  source 1..120: mol_type = other DNA
cactaataagagctcattcctggagcgtggtttcagtccctaaattatgttgctgttgtataatgaaggagacatggaatggataggaagtcaacttcagtatgctctactaacagcttg

SEQ ID NO: 5239 - DNA, 120 bp, synthetic construct
  source 1..120: mol_type = other DNA
gtctcttctctgaccttgctccatcctttataaacaaagatctgccattggccagtcctacttgaggctggctgacaaggtatactttcttttggatgaatttcatttatttgttctctt

SEQ ID NO: 5240 - DNA, 120 bp, synthetic construct
  source 1..120: mol_type = other DNA
aaagtgtgttgagagagaacactaagggtgtaaacaggtaactctttgatagggagattggtatgctatctcagtggaatccaggacctattatacaagacaatggaagaatgacccata

SEQ ID NO: 5241 - DNA, 120 bp, synthetic construct
  source 1..120: mol_type = other DNA
ttttctcctggcatcctcaaataaaaattagattttcttgagcacctactgcatgctaggctctgtagtaagtaagtattggggatgacaagaggagaactactgtatattccccatcct

SEQ ID NO: 5242 - DNA, 120 bp, synthetic construct
  source 1..120: mol_type = other DNA
ggataaactgggctctgagttagaaaaaattgtcccctgggactttataaccacagactactctcaaagggtttgaagtttaaacttataccctctgctggtccaagaattaccaagtta

SEQ ID NO: 5243 - DNA, 120 bp, synthetic construct
  source 1..120: mol_type = other DNA
gatttaaatgttaatcatataaaaaataccttcatctagactggtgtttggccaaacattcaggcactgtagcctaacccaggtccttatagtctgcattctctctgtgaatagggaggt

SEQ ID NO: 5244 - DNA, 120 bp, synthetic construct
  source 1..120: mol_type = other DNA
tttaaacctgatgacaatccgacaatcctgatgagaactcttggttcagaccaatcaaataacttgcctaagggcaaaaactaaatggtctagctgaaattggagtttgtgagagccaag

SEQ ID NO: 5245 - DNA, 120 bp, synthetic construct
  source 1..120: mol_type = other DNA
tcagaggggaattaggctgtaagaacaatgtattgctttgtaacaagttatcccaagacttagctggcttaaaacaagaacgatttgttgtctcacacagtctctgagggtcaggaatgt

SEQ ID NO: 5246 - DNA, 120 bp, synthetic construct
  source 1..120: mol_type = other DNA
taaacaaaacagacacaatccctgccccggctgtagtgggggctgacagacagacaaagaagccaagaaatgtggaatgtgttgggtgttgatatacactatggacaaaaggacagaata

SEQ ID NO: 5247 - DNA, 120 bp, synthetic construct
  source 1..120: mol_type = other DNA
ttaccctttgggtctgccagctctaataataaataaagcaaaagctgacctcattaccaacagattcatggagtgggctaacatttggtagattacccagttctggatgctgagaaatga

SEQ ID NO: 5248 - DNA, 120 bp, synthetic construct
  source 1..120: mol_type = other DNA
gttggtttttccctctatacctaaatcatgaggcaggaatcttcctcaaatcaaatcattgcttctcactctctccttgcctgttttctttctcttagctaggcaggtagtatttctaca

SEQ ID NO: 5249 - DNA, 120 bp, synthetic construct
  source 1..120: mol_type = other DNA
gtggtattgctacatcatatggtaattctatttctaattttttgaggccttacattatccggggttttttttgtttgtttgtttgtttgttgttttttttgttttgttttttgagacaga

SEQ ID NO: 5250 - DNA, 120 bp, synthetic construct
  source 1..120: mol_type = other DNA
gaagcctagaatcaggttcaggactttgggctaggtttagaaccctccagtgactgttaatcacacctggaataagacagattctcaccatggcccttgaggccatgtgacaacctgtgt

SEQ ID NO: 5251 - DNA, 120 bp, synthetic construct
  source 1..120: mol_type = other DNA
tctttataagggccttaatcacactcacgagggaggagccctggtgacctaactacctcttaaaatccccactgcttactaccttcacattggggacccctgaaatttgaaaagagacac

SEQ ID NO: 5252 - DNA, 120 bp, synthetic construct
  source 1..120: mol_type = other DNA
aaatttactagctctttccttccatggcatatggcatcggaataggactgctttttatcccctgtggtaagtgatatttctttcccctcgtccctctatgcattttgaatattctgacaa

SEQ ID NO: 5253 - DNA, 120 bp, synthetic construct
  source 1..120: mol_type = other DNA
tgatctcctgggaaaagagacagataactccaaggtggaaacaatcgaagtaatggccctccagatttttctacccatattcttgcaaagaactcaaagccattctaatctgtcattttc

SEQ ID NO: 5254 - DNA, 120 bp, synthetic construct
  source 1..120: mol_type = other DNA
ttactcatacattttgttccaggggtcatgttctttagctaattgtgggagtgtgaaagatgaagggatagaccaaaaggtgaaccttgtgaaagtccgagagttagctcatatcagggt

SEQ ID NO: 5255 - DNA, 120 bp, synthetic construct
  source 1..120: mol_type = other DNA
tacgcagtgctatagccattagtattgagcccctggaacgtggctcatctgggtggagatgtgctttaaatataaaatgcacactggattttgaagttctggtatgaaaacaagaatacg

SEQ ID NO: 5256 - DNA, 120 bp, synthetic construct
  source 1..120: mol_type = other DNA
tgtatttttagtggagatggggtttcactatgttggccaggctggtttggaactcctggcctcacgtgatccacctgccttggcctcccaaagtgctgggattacaggtgtgagccaccg

SEQ ID NO: 5257 - DNA, 120 bp, synthetic construct
  source 1..120: mol_type = other DNA
cctgtggagaatgctcagtccttgttttatctgacttctgttctccttagatcctctggtctaaccattgcttctcagtctttttccctacactgtcccaaatgttgagtcctcagagtt

SEQ ID NO: 5258 - DNA, 120 bp, synthetic construct
  source 1..120: mol_type = other DNA
ctcatttctctttcctggactattaaaataaccctcaagctgatcttcccaactcgtatttctgttctcactccagtgtatctatgggagtgatcgccctaaaatgcaaatcttatgacg

SEQ ID NO: 5259 - DNA, 120 bp, synthetic construct
  source 1..120: mol_type = other DNA
taatgggttacatttgggacacagaatttggacatttggacatttcttactagtagccagaaaaaggagtctgatgtgtagatgagaaattgggggtggagataggggttttggagttat

SEQ ID NO: 5260 - DNA, 120 bp, synthetic construct
  source 1..120: mol_type = other DNA
tcagttttccacaaatgcacgggtcaaagtagtaattatgaaggaaggaatagaagttggcatagaatccctcaaaagccaagacaagtttggctcaaagattcttgaagttctcctgct

SEQ ID NO: 5261 - DNA, 120 bp, synthetic construct
  source 1..120: mol_type = other DNA
ttaagaggttgcagttaagtcgttgagatgaaaggaccgaagtagggtggtggtgttaagactggaaagaagtggactggtttgagaaattttgaggaagtacaaccaaaagcaattgga

SEQ ID NO: 5262 - DNA, 120 bp, synthetic construct
  source 1..120: mol_type = other DNA
aaaggtgatgttaggggctgagagtagggtgacggtttgaggtgaaggcagtggttacaggtgaagggtggtgttaggggctgagagcaggtagatggtttgaggggaagggtagtgtta

SEQ ID NO: 5263 - DNA, 120 bp, synthetic construct
  source 1..120: mol_type = other DNA
atttctatattgaagccccaccccctaagacatcagaatgtgactctatttggtgttgaggtaagaaagttaaaacgaggttgttaggtttgtcccgaatccagttggacttctgtctac

SEQ ID NO: 5264 - DNA, 120 bp, synthetic construct
  source 1..120: mol_type = other DNA
caaaggagctgaaaagatagacaaatcagcataatgaaaaagtggcttgtgtctaatgaagggtacagaggaatttctgtgggagttcaaaggaagggaaaattaatttgggatggggag

SEQ ID NO: 5265 - DNA, 120 bp, synthetic construct
  source 1..120: mol_type = other DNA
ttatacaagcagttgagggaactcacaggtacagatagaaggataaatacccctccaaggcagtgtgcaaggaatagtctgtttgagtggtgggagtttctcgggaaatccaaggagaaa

SEQ ID NO: 5266 - DNA, 120 bp, synthetic construct
  source 1..120: mol_type = other DNA
tgttgtcgtcctagttattctgatcctcatatgttttatgccagccaaccactggttgaggccgtttccagccagataggaatcactgtcgaaaacctaattaaaagtggtccctgaatc

SEQ ID NO: 5267 - DNA, 120 bp, synthetic construct
  source 1..120: mol_type = other DNA
aacttcagtatatgaatttggtgggacctgctgaagtccacagcacactcttgaatgtttactttgccaaaacaaaatggggataggtgggactgctggctccggagcagaccctttggt

SEQ ID NO: 5268 - DNA, 120 bp, synthetic construct
  source 1..120: mol_type = other DNA
ctccaattcctcgtgtccaagtgaagataaaatatccacctcatggacttgttgcagagattaagtgagatagagtccactaagtggttatgctgacattgtagcttaatgtaaagcttg

SEQ ID NO: 5269 - DNA, 120 bp, synthetic construct
  source 1..120: mol_type = other DNA
tgcctcggacttgggatgtacctctgtcgccccatgcatggccaacctgagtaaatgacatttaacttttattattcaatgaagttatgcatgtaaataaatccacaaatcaaggaagaa

SEQ ID NO: 5270 - DNA, 120 bp, synthetic construct
  source 1..120: mol_type = other DNA
ccagttgtctgtgataccataacatttatccttaacactgctcccagaagttgggcaactgttggtattacaccactgcagttgtccacactgaataagtcacactgattaaatctgtgt

SEQ ID NO: 5271 - DNA, 120 bp, synthetic construct
  source 1..120: mol_type = other DNA
tctctcacctcagggagagtttctcatatgttcagaatactatttcaaaggacagccactacccgcctcactttgcacaatgcctgcttgcctgtgtgcatggagacaggtatccaagta

SEQ ID NO: 5272 - DNA, 120 bp, synthetic construct
  source 1..120: mol_type = other DNA
ccagcctattgtgagatttaaattattttaaatacaggaaaatctgtgaattgcagtgttttacaggcatatgtagtaggtcgctcaagtcacacatatggagcccctactatgcgctgg

SEQ ID NO: 5273 - DNA, 120 bp, synthetic construct
  source 1..120: mol_type = other DNA
tgtttattcattcagaaacttttattgagcattgactctatctcaggcataattcaggatatcgggcattgggaacaaagcaggaaataagatagatgtgctcctgacctcaggtggctt

SEQ ID NO: 5274 - DNA, 120 bp, synthetic construct
  source 1..120: mol_type = other DNA
agagaactttgggcatctttttaatgggcttcttttaggcaccaggtattttcttagcaagtgggcctcagttcagtttttacatctcagtgtgtttgaggtacgattagcatttgttag

SEQ ID NO: 5275 - DNA, 120 bp, synthetic construct
  source 1..120: mol_type = other DNA
cttactttgagtaacagggatttcagaaagctctgtccacatcacacttaatgaatcctattcagggtgggagagtcagttgagggaagcaatggttatttcaagaatcaaagattatga

SEQ ID NO: 5276 - DNA, 120 bp, synthetic construct
  source 1..120: mol_type = other DNA
tgagggctagcatccctccttcagttcaacagagtcagttgaagttggcttaaggaaaaaaaagtaagaagccagaagagaaaggcatacaaatagtgatgagtcattcagcaaacattc

SEQ ID NO: 5277 - DNA, 120 bp, synthetic construct
  source 1..120: mol_type = other DNA
gtgaagattaaatgagatggtgcttaaatgttacttagtagtagtagaattcatatagtgactcctccctctcagggttgttgtagagattcaggtggcacatgtgcctggcacttggaa

SEQ ID NO: 5278 - DNA, 120 bp, synthetic construct
  source 1..120: mol_type = other DNA
ttcagttccactggactcatttgggatcatttcagttcagttgagcaaacatttaatgagcaatttctttttgccagggctgaatagacatgacccctgatctcaaggccatttatgatc

SEQ ID NO: 5279 - DNA, 120 bp, synthetic construct
  source 1..120: mol_type = other DNA
tggatgctgaagtatgagtgggagtttgctaggcagaagggcaagagaagcctagaccatggtagtctggagatgctaatgaatcccttctcagataaatgtttttaaatgaataaaaac

SEQ ID NO: 5280 - DNA, 120 bp, synthetic construct
  source 1..120: mol_type = other DNA
ttcccgtaagagtgcttcgaacgggccatagttaacactcagtacatgtagtctttaataacatcttctcataatcattcctcagtgtataagtactctctgtatttgcttagttgtagc

SEQ ID NO: 5281 - DNA, 120 bp, synthetic construct
  source 1..120: mol_type = other DNA
attctcacagcaaccttatgagagaggtgttattagtatcttataggtgagaaaacaggcccagaggtttgataatttgctcaaggtctcgaaactagtaagtgacagagactcaaaccc

SEQ ID NO: 5282 - DNA, 120 bp, synthetic construct
  source 1..120: mol_type = other DNA
aagaaaccttgtactagtcccttaacctcaattgctaggccagggaaattgctctgcctgactcctaatacaagtaggaagaaaatacatatggagttaagccttgagttttgcagacaa

SEQ ID NO: 5283 - DNA, 120 bp, synthetic construct
  source 1..120: mol_type = other DNA
ataaataaatacataaataagcccaggaaggtctaaggagaaggtggtgtcagaactgatcccggacaggtgagcgagtgttcagtccaggagggaaaggccagatgccaggcatgctgg

SEQ ID NO: 5284 - DNA, 120 bp, synthetic construct
  source 1..120: mol_type = other DNA
ctccctggttatctgtttacatatcgggattctggggaagaatgccttcggggaaggcattgccacattttattgctaaaataaagtttgaaagcctctgtcatataagttctctagaaa

SEQ ID NO: 5285 - DNA, 120 bp, synthetic construct
  source 1..120: mol_type = other DNA
atgccaccactgtctcttatgatccagggctcagtgagtccctgacgctttgggcagaagaatatttatcttcccgattttaggagcccactctcagaattgtgtgcacgtttaagtgcc

SEQ ID NO: 5286 - DNA, 120 bp, synthetic construct
  source 1..120: mol_type = other DNA
atgtttcttctagagcaacttttcctctctgctcagattatgcatttattttaatgttttatgaggctgaactgccttatgctgattctcccctgctccagggaaaagcaatggagttct

SEQ ID NO: 5287 - DNA, 120 bp, synthetic construct
  source 1..120: mol_type = other DNA
tcctagttgaattcagaagtttttcccctagtttctgctaaatctttatcctcttcccacctcagtctcagaggagctctggtctccagctgacttctcccaaaaatttaaaaggataaa

SEQ ID NO: 5288 - DNA, 120 bp, synthetic construct
  source 1..120: mol_type = other DNA
atgggactcttctcttagtcccagggtagcgatttttctctttctgccgtctctgctctgatgtattaactacaaataaaatattctaaggattatgctttcaagagccaactgtctctc

SEQ ID NO: 5289 - DNA, 120 bp, synthetic construct
  source 1..120: mol_type = other DNA
tttggaaatgtgttttctatgactctcagtcaatttgtgacataaatttagtgtttatgagatttagctaatttaagccagcaccttccagcaaatctgtgcatctgtgtgctcccggcg

SEQ ID NO: 5290 - DNA, 120 bp, synthetic construct
  source 1..120: mol_type = other DNA
tacactctatgtacggcataagagagcaacacgcagcctctgttctcaaagatgaagcagacttgatggaaaactaagcagggtcgatggtcatgaagcaattaacacagtaaaatcggt

SEQ ID NO: 5291 - DNA, 120 bp, synthetic construct
  source 1..120: mol_type = other DNA
gaacattcccatcatggaggaaagttctacaggacagctcggctttgatgatacgtgttttgtggaccaggagttttatggcaaaaaaataatgtttggataacccttcattctatttcc

SEQ ID NO: 5292 - DNA, 120 bp, synthetic construct
  source 1..120: mol_type = other DNA
atgctaatactgttgcctcccagcccagggctcttcccattagaattatgacattccttgacattcaaacagttccgtgcagatggcaaagcactttcacttaacatttctccattttac

SEQ ID NO: 5293 - DNA, 120 bp, synthetic construct
  source 1..120: mol_type = other DNA
ttatttttctttaatgggaaaaaaagaacatttgcaagtgcctgtttctgatgaggctgggggaggagatgtgatgagcagcccaggtgtggtcctcctggtcagagctcacagagcctg

SEQ ID NO: 5294 - DNA, 120 bp, synthetic construct
  source 1..120: mol_type = other DNA
agacgataataatgtctattgaggtaattggatgggaaagtaactgggcccagaacacgataccacatttaattactgttattttattctgcaactctgcttatggcagtgggggtggag

SEQ ID NO: 5295 - DNA, 120 bp, synthetic construct
  source 1..120: mol_type = other DNA
ttctgtcttgactcagggataataatatccacctcccagggcagtcaggaggatgaaatcagttgtgtatgtgaaggaatttaggaaacactgaaggttattctcagagcagggatgtct

SEQ ID NO: 5296 - DNA, 120 bp, synthetic construct
  source 1..120: mol_type = other DNA
tggcagctgcctttggtgaatcccttagttccattaaacagataaaggtgaggagaatgacaattcgaaaatgccaaactgccctgaaaactcttaatactctcaatgtaactaaaccac

SEQ ID NO: 5297 - DNA, 120 bp, synthetic construct
  source 1..120: mol_type = other DNA
acatctatgcacatacacatacttacgcatatacgtgctctcaaatactttctatggtttaaaaccaagactatctttggtgggttggataatcctgtaagaggtgggagacgtgagaag

SEQ ID NO: 5298 - DNA, 120 bp, synthetic construct
  source 1..120: mol_type = other DNA
tcatctctgaggaagaggcggtaaatactctctccactttacatataggacaaaatgaggctgccccctaaaaaaaaaattaaattcaggctgccaaacaaaacggggatgtgatttgaa

SEQ ID NO: 5299 - DNA, 120 bp, synthetic construct
  source 1..120: mol_type = other DNA
tccttcctacctccgattctcctctgtgctggggattataatactttatgggattgtcgtgaggacttacatgagataagccatgtaaaatgtttcgcacattaactggaacacaataag

SEQ ID NO: 5300 - DNA, 120 bp, synthetic construct
  source 1..120: mol_type = other DNA
tttactagatctgttttctgggccttgggatcttaagggaattgctcctccacctccaaaatgaaaacaaaggctcttacagagcccagtgtaacatttgtgagggtttaatgtgtccga

SEQ ID NO: 5301 - DNA, 120 bp, synthetic construct
  source 1..120: mol_type = other DNA
atagaaatggttccgtagtttaacaacaggaccatcacaccagtgtgtactgctgaatgccagctctgtctttagtcctgacacggtgcacaacagttacacagcacttctgtgtagtcg

SEQ ID NO: 5302 - DNA, 120 bp, synthetic construct
  source 1..120: mol_type = other DNA
aggtagaagcttctgggggccagccttgtgccctccatagctcccagcatctgatgttgcactattattttttttattcgaatagcattactagttcattgttgaaattttggaacatat

SEQ ID NO: 5303 - DNA, 120 bp, synthetic construct
  source 1..120: mol_type = other DNA
tttcaggaggatttgcagagcaatccctgattttattgagcggctgttccagcaacgaactccatgtttacccagaaatcaggccttaaaaaccaaggatctcttgtcttttatctctag

SEQ ID NO: 5304 - DNA, 120 bp, synthetic construct
  source 1..120: mol_type = other DNA
ctcacaaaattatttgagttccttgggagatgaacactatgtaagaggaaaaatgtaatcatccttggtctggtttctcctccatccacctcaatagtcatgacaaaacgggtctcccag

SEQ ID NO: 5305 - DNA, 120 bp, synthetic construct
  source 1..120: mol_type = other DNA
tcttttttattatttgcttcatttccctaaaagtcattttggtttcagtaatgtctggctatatccatgggagtatgttgtgtacaagaacaccagctactacgcatgccactgcagggg

SEQ ID NO: 5306 - DNA, 120 bp, synthetic construct
  source 1..120: mol_type = other DNA
ctccagaaatagagcattaccagcaccccagaatccccctcatgcccctcaaaacataaaacagatgaacttgtttcctttttttttttttaacctaacactgctgctataaattagagc

SEQ ID NO: 5307 - DNA, 120 bp, synthetic construct
  source 1..120: mol_type = other DNA
gatgctggttgaataatagtcaagaaaacgacagcagaaccattgcaaaaatctgccagtaagagaatattctagaagcttctcatgagtgtgttggctttctaaaagggacaaacctct

SEQ ID NO: 5308 - DNA, 120 bp, synthetic construct
  source 1..120: mol_type = other DNA
ccagcttatgcctcccatgggctaaaatgaatggaagatgcttattttgctccccagccatgcatgacctgtgaaagtgactcctaaaatgccattttatttatttccagataagaaata

SEQ ID NO: 5309 - DNA, 120 bp, synthetic construct
  source 1..120: mol_type = other DNA
aaggaacaaattaagagaaataaaattactgtgcagagtcataaaagcatgccaacacagagaactagtttctgccttcatccagaaatcaatctgcctgcctgcctgcctttgtttgca

SEQ ID NO: 5310 - DNA, 120 bp, synthetic construct
  source 1..120: mol_type = other DNA
ggtaattatccgtttatttattgagaaaccaccgaacattttccagaatgaccacaccatttttcgttcctgtcagcaatgtacaaaggtcccggtttctctgcaaccttgacaatactt

SEQ ID NO: 5311 - DNA, 120 bp, synthetic construct
  source 1..120: mol_type = other DNA
catctatttcatgtatactaaaaaagcaactagaatcccaagccctggcttgtctttttagaggataactgatcctaaaagtggaaatcagcacttagttataaggatgtcagcttcccg

SEQ ID NO: 5312 - DNA, 120 bp, synthetic construct
  source 1..120: mol_type = other DNA
atttacgtgagtaagtgctaataagtgcttcacagttttttcccatttaaacctcacgacaactctagcaggagacacagttttatccctgttttagagatgagcaagttgagaccctct

SEQ ID NO: 5313 - DNA, 120 bp, synthetic construct
  source 1..120: mol_type = other DNA
cagcaccctgtgttcttgtttttgtagcattcatctcaagtgggaatccatttttctacgctaacctttccaccagactttgagcttcataaaagcaagatcaaatcagtcttgttcatc

SEQ ID NO: 5314 - DNA, 120 bp, synthetic construct
  source 1..120: mol_type = other DNA
ccttccctctcttttttctcacttacctgtcaagtatttccatccttagacctcagtttcctgatttactgcctctagctttccaaaactctacagctgttatcagaaacatttcagttg

SEQ ID NO: 5315 - DNA, 120 bp, synthetic construct
  source 1..120: mol_type = other DNA
tcccactgactgtgtgatcttggacaagccctttcttctctggagacaagctagaaggtctccaaagacctttcaactctgaaattctattgagtttatggattggatgaatacataatg

SEQ ID NO: 5316 - DNA, 120 bp, synthetic construct
  source 1..120: mol_type = other DNA
tcccagacatttgctttttagctaaggccttaaccaaggaagcagattgcatgagaaattgtggagcttgtaaggaaggtattttggaggtggggagaacctttcagaactttcatatta

SEQ ID NO: 5317 - DNA, 120 bp, synthetic construct
  source 1..120: mol_type = other DNA
tgaatcagtatatccaggggggaaatgaggcattattgtcagttatcctggaagaatagccagacactgtaccctggggatgcaggatcactaaaaatgaaaattaaccaattaggtctt

SEQ ID NO: 5318 - DNA, 120 bp, synthetic construct
  source 1..120: mol_type = other DNA
tccgtctactgatccaacaatttccaattattcacaatcaagagagtctaataataaaaatctacccatttcccaaagctggtattctcacaataggcgctgctggctcttgagtaccag

SEQ ID NO: 5319 - DNA, 120 bp, synthetic construct
  source 1..120: mol_type = other DNA
ggctggtggccctgaggaatttgggccctgctgagaagagtgtttgagatttaatgaatgtttggaaagcagaaggagactgaaaataaaaggcattatggcaaatcacattattattat

SEQ ID NO: 5320 - DNA, 120 bp, synthetic construct
  source 1..120: mol_type = other DNA
ttccacctgctactaagtttaagcatcttgaggacaggcatggagtgtgcttatcattctatttctagtgcccaacatgttgtgtgttctcaaggagacactcatgtttttgttgaatga

SEQ ID NO: 5321 - DNA, 120 bp, synthetic construct
  source 1..120: mol_type = other DNA
aatgaataggaaacatgcagggagaagaatccaaagctgggagatttaggaccaaatctcctattaaatagaattcattgacaggtgtgaattagcctcccagctgctactgtcttcaaa

SEQ ID NO: 5322 - DNA, 120 bp, synthetic construct
  source 1..120: mol_type = other DNA
taatgtcctcaaatgacaataaatgagtgcatacctgcttacatgaatgaatgaatgagatgtggacagtgagagcatggaaggggaggatgcattctaaattctagcttgattgacagg

SEQ ID NO: 5323 - DNA, 120 bp, synthetic construct
  source 1..120: mol_type = other DNA
gcctccgcacactgccttcctcactacctgctaatgatccctgaaagtgcatgaaacatgcattccttgagctattctattattacttctaataatactaataaggagtctgtatcatac

SEQ ID NO: 5324 - DNA, 120 bp, synthetic construct
  source 1..120: mol_type = other DNA
atgtgaggcaaacctcagctctctcatgttctcagtgaagtgctcagttttgcctggcgcacagttggtggtcagtaaattgtagtagttattattagaattattgctttcttgtgatta

SEQ ID NO: 5325 - DNA, 120 bp, synthetic construct
  source 1..120: mol_type = other DNA
agagacatttaagagatagatttgacagaattggcagttgactgggtgtggagttaagaaataagggagttgaggctgtctctgaagtttctagcttaggtgcctgggagaatagtaatg

SEQ ID NO: 5326 - DNA, 120 bp, synthetic construct
  source 1..120: mol_type = other DNA
ggatttaaaaaaaaaatacaataatgcaattcacagaggacagtcagtggttagcacagcttctactcatgtttttacaccttctggaggtgtgacagggtgtgcttggtgttagagttg

SEQ ID NO: 5327 - DNA, 120 bp, synthetic construct
  source 1..120: mol_type = other DNA
aaaaaaaaacccatagtcctgctttgttccatggtcagtgtgtttgggaagttcagggttaaacaaaattaaaccagctgcttcactgctggactcttttcagcctttaatatgctagtg

SEQ ID NO: 5328 - DNA, 120 bp, synthetic construct
  source 1..120: mol_type = other DNA
tattgtttctttttaaaaaacaaggatctgaagcccagaaggttacagaccttgccgaaagtcaaacagccagtatggtaaggaacctggatttgaacaccaaagcctgaatccactata

SEQ ID NO: 5329 - DNA, 120 bp, synthetic construct
  source 1..120: mol_type = other DNA
agggcaacaagtgtgtctctctcatccatatcctccatgcctagaaccatgtctggcacatgataaatgcttaaatgtgtatcaagtgaatgaaaaaattagtggtaaatgaaggcacca

SEQ ID NO: 5330 - DNA, 120 bp, synthetic construct
  source 1..120: mol_type = other DNA
ctctctagctagtgcatcttgtatataacttgtgtagagatcattctgctattttttttctcctccatcctccaccatcacagtgttaactcccagaaaaactgctctcattaactctgg

SEQ ID NO: 5331 - DNA, 120 bp, synthetic construct
  source 1..120: mol_type = other DNA
gtgtacatttgttaaaaggcaagttctcaggagactaggattatgtggctttttatgccctgtcctagccccattatacacaatattttatttttaaaagccccatgaggcagcccttgt

SEQ ID NO: 5332 - DNA, 120 bp, synthetic construct
  source 1..120: mol_type = other DNA
ctggagtgggaaattctctggtgagtttttaaaataggagcgatgcctgtctctgataagacatgcccagaggcaaagtcatatctagacatctatacacttggcatctaattagtactt

SEQ ID NO: 5333 - DNA, 120 bp, synthetic construct
  source 1..120: mol_type = other DNA
gtgagccatcattccagtattttaataggtgctgacaaacttgaaaggcttgcagtacaatatcaagaaaggagaaaaaaacatctgtctctttcccttcaacccaagcctcaccacatt

SEQ ID NO: 5334 - DNA, 120 bp, synthetic construct
  source 1..120: mol_type = other DNA
tctcattttcttggccaaagaaaggcacacacacaaactcagtgttagggagtgaggaaatgtactctcccttttagaggaaaaaaaatgcaaaggcacatggtaaaaagtctgaatacc

SEQ ID NO: 5335 - DNA, 120 bp, synthetic construct
  source 1..120: mol_type = other DNA
ctcaggactgcagctggtccttgtgctgatcagattctgcgtctactttagtcagctttctctcagccaagcccctttggttttcttgccaataaaatggacgagtgttctttcttgctg

SEQ ID NO: 5336 - DNA, 120 bp, synthetic construct
  source 1..120: mol_type = other DNA
ggatgtcgcaaatggagacacacacccgctagcttcacacgccgttcccattaatcacgctgcaaagaacaaaaatcctggaaaatcattaaaattacagatggctagattaagtaatta

SEQ ID NO: 5337 - DNA, 120 bp, synthetic construct
  source 1..120: mol_type = other DNA
aaacaagagaatcgagggttcattgccaagcaacgttttggggccaagaaagaggagaggattttaaatgaggattgagccatttggggtatttaatatttagaagagacagggacagga

SEQ ID NO: 5338 - DNA, 120 bp, synthetic construct
  source 1..120: mol_type = other DNA
cattagtactagaagcactcgaagaatcttgaaggccatggaattagagatgccaaagaacattgccaacaggcatgcacggatctcagcatccacatcatgtgctaataagagagcatc

SEQ ID NO: 5339 - DNA, 120 bp, synthetic construct
  source 1..120: mol_type = other DNA
acaaagggtactgggcctccaggccttgctttgtgaccttgggcaagagaagaatgccttgtgcctcagtttcttcattcgtgaaagaagacagatgagtggttttttttttttttggtt

SEQ ID NO: 5340 - DNA, 120 bp, synthetic construct
  source 1..120: mol_type = other DNA
ggtttatagcatcatttaaatagccaaacagaaggatctagaagccagtttcagttggggcagctaacttgctgtcaatttgtctaagccggaaagggagaatctgcagcattagtctgt

SEQ ID NO: 5341 - DNA, 120 bp, synthetic construct
  source 1..120: mol_type = other DNA
gtttgtttgttttttgccagggaccccgcatacattaacatagtgtggtattatctcctccttagatggcacgttcctcaaggacaggtgtcttctgtctttccactcctaccacctcca

SEQ ID NO: 5342 - DNA, 120 bp, synthetic construct
  source 1..120: mol_type = other DNA
atcctgctgtaatcacaggaataggctcctactcatctttgggctttgaacttaccatgtgcttcatacctactcatcaagttgtacagtacaaagtggactaatattaggcacatttag

SEQ ID NO: 5343 - DNA, 120 bp, synthetic construct
  source 1..120: mol_type = other DNA
gtgtctgttattacagccccagataaatcagtgatctctggtgaccccagttgaatggatcatgagccacatttgttccctaaaccccaataaccactgagaattcatggaagtttgttc

SEQ ID NO: 5344 - DNA, 120 bp, synthetic construct
  source 1..120: mol_type = other DNA
aactcactctctcttggacaggtagaattggaaggtcttaccggccacattgaattcaacagcaaaggccagaggtccaactacgctttgaaaatcttacagttcacaaggaatggtttt

SEQ ID NO: 5345 - DNA, 120 bp, synthetic construct
  source 1..120: mol_type = other DNA
gaggctcagggtgactgactgacttatccttgaacaaacagtaatgacagagctggttttggacccagagagatctacctctaaagtctaagttcttaaccattacaacaaattatgcat

SEQ ID NO: 5346 - DNA, 120 bp, synthetic construct
  source 1..120: mol_type = other DNA
aaattgtcaggcagacttttctctgagccccaatgtgcttgagggatgtgaagtgaagaacattcattcattctttcaagacatctttgttgattgcctattatgtgccagactgtcttc

SEQ ID NO: 5347 - DNA, 120 bp, synthetic construct
  source 1..120: mol_type = other DNA
tcacagctatgaattccagtttagtaaaactggatgtattccaggaatccgcataattttaaccagctccgagatagatgattacagtgcaggtggtccacagactaccctttgacaaat

SEQ ID NO: 5348 - DNA, 120 bp, synthetic construct
  source 1..120: mol_type = other DNA
ttttgattgtttagaaagccccacgcagcgacctgctgggttgcaattggtaaaacgtctgaaccaaataccacattctctgccggtggctgattaaaggattattaccattttaaaaat

SEQ ID NO: 5349 - DNA, 120 bp, synthetic construct
  source 1..120: mol_type = other DNA
gtgctgagtggtgtaagtatgtatttaaaatttttcatcatttcgtcaaccctgcaggagagctattctgtcagcttgtaggtgaaggaattgagacacagagagagaagaagtcatgta

SEQ ID NO: 5350 - DNA, 120 bp, synthetic construct
  source 1..120: mol_type = other DNA
taattattccacttgcctttctcccaccaggtacacaggtttcttttcatgtgaacttttctagaaattagacctgagccacactttccttagaccatggatttatttcactctgctcct

SEQ ID NO: 5351 - DNA, 120 bp, synthetic construct
  source 1..120: mol_type = other DNA
gagggagcagaaaaagagatgggtggctggggggctgctttgaaggttactgagaagtcacttatttcttctttttaattaaggggaattggaatgaggtttaaaatagttgacaacatc

SEQ ID NO: 5352 - DNA, 120 bp, synthetic construct
  source 1..120: mol_type = other DNA
agaagcttattcacacatcagccggcaaacaaattagagctacttaaattttcaagctgggggctgcttttgggcagaagagcagggttttaaagtgctgcattttaaatgtatttctta

SEQ ID NO: 5353 - DNA, 120 bp, synthetic construct
  source 1..120: mol_type = other DNA
attgtttatagctgtgctttgaggattctactatatttgcaaattttagttctgtcatctcacccagagatgactatctatgtatctgtctatctttgtgtgccgtattcccggagtctc

SEQ ID NO: 5354 - DNA, 120 bp, synthetic construct
  source 1..120: mol_type = other DNA
cggcaatttgaggaaggccaatttgatcatccccaaaaatgtttagaagtgagtctgtgagattttcaactatgcaagaaaagaagaggaagttggggtgtaggcaacataaattcttct

SEQ ID NO: 5355 - DNA, 120 bp, synthetic construct
  source 1..120: mol_type = other DNA
ctgcattctggctgagtgagcgtgctgttgtttaatgttaacgcatcaacagcatatattaagcgaggtgcctgcaaacagcaacacatgtaaaacaaagtgattgattgattgaagaaa

SEQ ID NO: 5356 - DNA, 120 bp, synthetic construct
  source 1..120: mol_type = other DNA
cactcacaaaagtaaaaaagaataagcccatctctctcaggctctgccccaagccactctgcaaatttacatcactttataaataaacccagcattttcaggaattcctgtttgagctgg

SEQ ID NO: 5357 - DNA, 120 bp, synthetic construct
  source 1..120: mol_type = other DNA
aagtgaccaggactaggagttcattgatgcaaaagaatatatttattgagaaccagttatgttccaggtactcagctaaggtctgatgatagagtagtgaacagatagagtgtccagatc

SEQ ID NO: 5358 - DNA, 120 bp, synthetic construct
  source 1..120: mol_type = other DNA
cacctgaatgtcacttttcctgcccatatgtcagaatcacttctgtgcactcaagaagccacaaatacattattaatatgcatctttcctagtaagaacttcaacttagtaccctgaacc

SEQ ID NO: 5359 - DNA, 120 bp, synthetic construct
  source 1..120: mol_type = other DNA
gtaaacaagttcatgatgatcagagaggaattgagaaggcccaggccttaaggtcaagacaagatacacctgtcctaactcaaccagatggtatagtaataaatagaacctaagttccaa

SEQ ID NO: 5360 - DNA, 120 bp, synthetic construct
  source 1..120: mol_type = other DNA
caaaaataactccctcttaaagataggctgaaggttaaatgagattctacaggcaatgttcctggtgcattcacttaactcgattttattgagcatctgtgataagctaggcactgtgcc

SEQ ID NO: 5361 - DNA, 120 bp, synthetic construct
  source 1..120: mol_type = other DNA
tagtaagagttttggtctctatccttaagccaacatgggaaagaattgaagggttttaagcagggactggcgtgtatgtgagatttggtagtgacgactggctgctgctgtgtgaagaac

SEQ ID NO: 5362 - DNA, 120 bp, synthetic construct
  source 1..120: mol_type = other DNA
aaatattgtggaaccaattaagcagccattggccttgtctggaatcctattttttctactcaccagctctgcgagttaggtaaattattaacttatctggaccctgctttccttatgaat

SEQ ID NO: 5363 - DNA, 120 bp, synthetic construct
  source 1..120: mol_type = other DNA
caggagatcccaccttctgccttgggcaatggtattaaaaactaataagggttgacacagtaccttgcacatacaccatctcccttaatcttaagaacccctatgaggtaataattacta

SEQ ID NO: 5364 - DNA, 120 bp, synthetic construct
  source 1..120: mol_type = other DNA
ccaattctatccatttttcagacagggaaactgagcctctttgaggacaataatttcacctggctttgtggagtgtcaagaccaaggagaagaaagctatgtatttggacttcttaatgg

SEQ ID NO: 5365 - DNA, 120 bp, synthetic construct
  source 1..120: mol_type = other DNA
ccttatctgtaaaacggggcttgttgtatggatgtgtatgaggccttgcttgtaaactgaaaaggaacatgaacacacacagaaccatgctgcccttgcagagatggggacagctgccca

SEQ ID NO: 5366 - DNA, 120 bp, synthetic construct
  source 1..120: mol_type = other DNA
tccgttgggaaaaacaagcaatctaaaaacccattgctgttgagtttagatttaggtaacttaccagaatgaagaactgagtaagttgtggatttttttcacctggagttctttgagaca

SEQ ID NO: 5367 - DNA, 120 bp, synthetic construct
  source 1..120: mol_type = other DNA
ctcaaaataatgtgattccacatgttccattcctttctgtgtgagagaacttcaccaaactgcattcattcctgatttatttctccattttcctctcccacctctcccccacatctttat

SEQ ID NO: 5368 - DNA, 120 bp, synthetic construct
  source 1..120: mol_type = other DNA
tgagtaggactcagctctgttctctatcctgaggttgtaagttagtagatgggataagtcaagtgcatacatggccaaggtattatttgtcttcccctctgaagaccttatgtttaaaag

SEQ ID NO: 5369 - DNA, 120 bp, synthetic construct
  source 1..120: mol_type = other DNA
gctcagagtgcatccatgaaccaaaaagacaagaatccctgcctgtaaggagcttacattccagcaaggaatgtgtgatagacagtaaaaagcaatgttgtcaaacaatgaattagaagg

SEQ ID NO: 5370 - DNA, 120 bp, synthetic construct
  source 1..120: mol_type = other DNA
atttctcttattagaggtcattatttaaagctttacctccccttctaggatgagagctcctcgaaggtagaggggctgacacaaagtaggagctcaataattagaatctgagtgaaggaa

SEQ ID NO: 5371 - DNA, 120 bp, synthetic construct
  source 1..120: mol_type = other DNA
ctccaagaccggccttgtgtctgttcactttgaatatgtcaataagttttaaattaacttgagagtagtgagtatttggggagaagaatttgtgacaccccttgggacaatcaaagatac

SEQ ID NO: 5372 - DNA, 120 bp, synthetic construct
  source 1..120: mol_type = other DNA
caccagctagcatggttctttcctcctcttttctccccttttccagggattttcccttcctgcctgtaaatacaccctggactgtcccatcctaaaacaccatcgccttcacctttccta

SEQ ID NO: 5373 - DNA, 120 bp, synthetic construct
  source 1..120: mol_type = other DNA
tcctactacttagtattccttactcgcagccttgcgtctttaaaacgcttgatgcttcccccctataccttgtgtaatgtgcagccaccacttcctggcatctgagtcccatccatctac

SEQ ID NO: 5374 - DNA, 120 bp, synthetic construct
  source 1..120: mol_type = other DNA
ggattggaagagcatgaggttgtgctgcacgctcatgaaccctccatttgttcagtcaatcattcatgcatttgtcatttatttgtccactcattctataaatcttgcctggactggcac

SEQ ID NO: 5375 - DNA, 120 bp, synthetic construct
  source 1..120: mol_type = other DNA
tttacatgcattatctctaatcctctttaaacacaccttttagctggttgttagtcccactttacaaatgagcaatcgagcccagaaagcttgagtgacttgtcgggagctatactgtta

SEQ ID NO: 5376 - DNA, 120 bp, synthetic construct
  source 1..120: mol_type = other DNA
ccacacaccgagtgacttgaacagtcagaatcttagaattcaccccagatctttcaagcaaaaatactgctgctttggcctcattgagacttggctacttgacatgaactaattaattaa

SEQ ID NO: 5377 - DNA, 120 bp, synthetic construct
  source 1..120: mol_type = other DNA
catcttgatgttagacagacctaagctaaaatttcagttcattcatttactagctgtgtgtgcttaaacacattattttatcctttccaccccttcccccacagctctagtgttcatctg

SEQ ID NO: 5378 - DNA, 120 bp, synthetic construct
  source 1..120: mol_type = other DNA
agaagtatatgtttgctagtacaaagaataaaattaggccaattgtcaacagctgagagtgaaaaccattgtaacacattgggtaagcctaggatttcttcttgggggtccagggatcct

SEQ ID NO: 5379 - DNA, 120 bp, synthetic construct
  source 1..120: mol_type = other DNA
ggaggagaattcaagcatattttctgcatatgtgtgaaaatcatcagagcatgtcttttcctgtaatcccattaaaaggggaagtgtggttggagtgaaggcaagtggattcacacaaac

SEQ ID NO: 5380 - DNA, 120 bp, synthetic construct
  source 1..120: mol_type = other DNA
cactggaggcaggggagccgggaagaaggctttcactgttgcaagagatggtgagaaccaaaagtagcttgggagttagaagaaggtacagattccaaaattctcttttttttttttttt

SEQ ID NO: 5381 - DNA, 120 bp, synthetic construct
  source 1..120: mol_type = other DNA
ggattatactatatgcagtgttgtgtaacccattaaaaactatttaatagagaaatcatcaggaccaggggacccagtggatgtggaatgtgagagagagggagaatgtaggatgactca

SEQ ID NO: 5382 - DNA, 120 bp, synthetic construct
  source 1..120: mol_type = other DNA
aactccatgttggcggaatggcacatttaagttcaaagagaaaagggctttggaaggcttagattcaaggctcataagccttggacatcaaatagctcttaccaatgacattttgatgaa

SEQ ID NO: 5383 - DNA, 120 bp, synthetic construct
  source 1..120: mol_type = other DNA
aagagacggacaggtaaaccaagaattactgtacagtgtgacacatgctatattaataatagttataatgatggtaataacagcagctgacaggtatgaagtgcttcctatgggccaggc

SEQ ID NO: 5384 - DNA, 120 bp, synthetic construct
  source 1..120: mol_type = other DNA
ccacaaacatgttcatgcactctctccacaacactctgcttcattgtgagttcccaaaaggttcttttctgtcagtaggagtcctttcactcacctgagaaaagggcaataatggcagtt

SEQ ID NO: 5385 - DNA, 120 bp, synthetic construct
  source 1..120: mol_type = other DNA
aaaaggcagacagatgcgagcagaagttattttaatgaggtcatacaggataagtgctgtattagacatagcaaagtacatcgtaaatgactaggaaggtaggggcagaaatgacttctg

SEQ ID NO: 5386 - DNA, 120 bp, synthetic construct
  source 1..120: mol_type = other DNA
gaaaagaaaagaaagccaggctttccatttatgaatcaatcagcagacagtgatttaacacctatgtgccagtcactgtgctggggtgtggggtaaaggaacagatcaggtttggttctg

SEQ ID NO: 5387 - DNA, 120 bp, synthetic construct
  source 1..120: mol_type = other DNA
ccttcagcttttactttcatagagttcacacagtttttactttcatagagttcacatcctgtatacataggacctccatgtatggtttgtgcaggttaagacatggtgaaggaggaatgg

SEQ ID NO: 5388 - DNA, 120 bp, synthetic construct
  source 1..120: mol_type = other DNA
gacaatcacttagaccatgggaaggagctgggactccattttaaagagagtggagagtaactggagtttttaaagaagatgagtaatattagatctttggtgtaaactttagagcagcgg

SEQ ID NO: 5389 - DNA, 120 bp, synthetic construct
  source 1..120: mol_type = other DNA
aagtctcccaacgtttctcaaccctggtgtcttcaccctcaaaatgaaaataatagtacccacccctggattactatgagaaataaatggaatataattcctgtagcgtgcctgcacttt

SEQ ID NO: 5390 - DNA, 120 bp, synthetic construct
  source 1..120: mol_type = other DNA
caccctgaaggacccccatcctctcatttagtcaccttctaccacattaccctgttttatgatcttcaaagaaattattactgtctaaaaccaccttgcttattatgggactatgtgttt

SEQ ID NO: 5391 - DNA, 120 bp, synthetic construct
  source 1..120: mol_type = other DNA
ctgtgcctgctccacagatagtactagcctcattactgtgtgccaggaacaatacttgctttacaaatgttctcctatttaatcttaggacaacattacaagggcaaaagtatattgccc

SEQ ID NO: 5392 - DNA, 120 bp, synthetic construct
  source 1..120: mol_type = other DNA
ctcgtgcacaaaggatggagacaagatgccagaatcaggaacagcttaatagaagaatagcaacgaacacttactgagcacttgccccatgctaggcccgatccatttgctcattttttt

SEQ ID NO: 5393 - DNA, 120 bp, synthetic construct
  source 1..120: mol_type = other DNA
ggctcctcaccacagagtcagcagagcgtttagtggcaggctcaacagtggccattctcctacttgggaaaatcacttaacttaaaaaaatatatattgaaatagacatatagaaaagtg

SEQ ID NO: 5394 - DNA, 120 bp, synthetic construct
  source 1..120: mol_type = other DNA
cccacagaagttggtggtactttattttacccaacaaaaacagtcctaataacaggcccgtgaatctcaccattcctaattacagggctgacaagtgggagggaaaatgaaaggaagaca

SEQ ID NO: 5395 - DNA, 120 bp, synthetic construct
  source 1..120: mol_type = other DNA
tctgggctttgccacataccataacctgcctggacctaagctctcagttccctttctctttcacacctcaactatataaacactgacatctataatgcatattagttttttaatcatggg

SEQ ID NO: 5396 - DNA, 120 bp, synthetic construct
  source 1..120: mol_type = other DNA
gtggtcaacaaagcttcatggtattaaccacacctgtgactttgtcaccaatggtattaatttagtgttgctgttagacacacttccagctcttgttatgtaaagaggcacagataccac

SEQ ID NO: 5397 - DNA, 120 bp, synthetic construct
  source 1..120: mol_type = other DNA
ggaagaggggattgtaagaagcaggacctcacatgagctctgtttacacagggagttgaatttaaccctcaccacaatcttaagaagtatacattattttgcctattttagagatgagga

SEQ ID NO: 5398 - DNA, 120 bp, synthetic construct
  source 1..120: mol_type = other DNA
ggtaaactgatcaaaagacaggaagtgagcagataatctaatttgaaatgggctgagatacagatgttattctgctcaaatgcacagcacaaaaggactggggcctggggagaattggga

SEQ ID NO: 5399 - DNA, 120 bp, synthetic construct
  source 1..120: mol_type = other DNA
tagtaagagctaacatttattgtgagttatctgtgtcaggcctaagctttgtgtgggttgctcatttaattcccatagaagctccatggaggtgggaactatcattatccctactttact

SEQ ID NO: 5400 - DNA, 120 bp, synthetic construct
  source 1..120: mol_type = other DNA
cctatctcatagaggttttgtggatactgagtgaggtaacatgtaaagggcttagttcagtgcctgatacataggaagagatatgtgttagctgtattgatattacaagtccaatactgt

SEQ ID NO: 5401 - DNA, 120 bp, synthetic construct
  source 1..120: mol_type = other DNA
ttttttttttttggcaatctgatacttgttcgcctcctctattggttgtaaattttttgctgtcagagactgtgcctgtatttgttcaccatagtattccagcaccttgcacactgcctg

SEQ ID NO: 5402 - DNA, 120 bp, synthetic construct
  source 1..120: mol_type = other DNA
aaaactaagttcagttaccccctctactgccttaatagccccttattgatatggcagcgctctacagtgttatgatttataaggctcttctacaaccatcatctcttttgactctcacat

SEQ ID NO: 5403 - DNA, 120 bp, synthetic construct
  source 1..120: mol_type = other DNA
cttgtaaactctacaaacatccaggagataaaagaggggatctctcagaggcagaacacaaagctcttcaaagaacactttcagtcaaaaatagggagaggagagaggtctttctctcgg

SEQ ID NO: 5404 - DNA, 120 bp, synthetic construct
  source 1..120: mol_type = other DNA
cattttacagttgaggacactattccagacggtggaataatttgcctaaggtcgtgatgaggttgtggcccacaagtgacaagagtcagggctgctttttggtttaaaatgttaaaactt

SEQ ID NO: 5405 - DNA, 120 bp, synthetic construct
  source 1..120: mol_type = other DNA
gtgcattaggatcttttaactttttttctgtctcccctttaggagagatacgggtttcatttctctttcataacaggtcttttccacctttgccctgtctgcagattttcccttctcttt

SEQ ID NO: 5406 - DNA, 120 bp, synthetic construct
  source 1..120: mol_type = other DNA
cagccataatgtctttgactaggtaaaataacgaaggcacatgtgattggaataatctgatcccatgtgattgttgctgataccccagtgccttcaagctaaagtaggtaattactcctc

SEQ ID NO: 5407 - DNA, 120 bp, synthetic construct
  source 1..120: mol_type = other DNA
tcagcactgtcttggagaaatacagaatggatcattcacattttctattttgtagtgaaaatccccttcatctgcaccctagttgctttttaaggatgacctcaccatataaggctccga

SEQ ID NO: 5408 - DNA, 120 bp, synthetic construct
  source 1..120: mol_type = other DNA
aaattagatacaaggaaaaacttcctgacatagaagagtatgaggaagtctacatctttcccagaagggtttaattcagggctaactctcatcagatgtgggcacttgaggtacagtttg

SEQ ID NO: 5409 - DNA, 120 bp, synthetic construct
  source 1..120: mol_type = other DNA
ggcctcaccattacagctgaacgggagaaggtgattgatttctctaagccattcatgactctgggaattagcattctttaccgcgttcatatggtaagagacttattttataagcattta

SEQ ID NO: 5410 - DNA, 120 bp, synthetic construct
  source 1..120: mol_type = other DNA
tttgcagatgtactcaagtgaaggtgcagccatgctagattaggctggactctaatccaatgtctgacgtccttataaaaagaagggaatttgaacacagacacatagaggagaatgcct

SEQ ID NO: 5411 - DNA, 120 bp, synthetic construct
  source 1..120: mol_type = other DNA
aaaccacaattcaccaatcctctggacatcccaaattggattgttgactaaatgtttcctaccacctgaaaacctgtatgagtttccctgcattcatttctgggatgacaacttttctgt

SEQ ID NO: 5412 - DNA, 120 bp, synthetic construct
  source 1..120: mol_type = other DNA
caaatatttattgagtgcattctgtgtgtgagacaccatgcttaggaagtaccaaaaagtcagctgaggggagaacaatcccaaattgactaacccaggggagatatggttagaataagt

SEQ ID NO: 5413 - DNA, 120 bp, synthetic construct
  source 1..120: mol_type = other DNA
tttttgtctttctctttctttctcacccaacttaaatgtccatggtccttttctattcttattctaccaactctccctggataatctcactccctcccaaatctgtgaatctaaccctgg

SEQ ID NO: 5414 - DNA, 120 bp, synthetic construct
  source 1..120: mol_type = other DNA
ctctccctttgtatcctccgatgggaggtatattaagggaaaggtaccctcttgtcagaccatagatttttatgatacgatttttggtatggaaaatgtggtcatcctaaacatgcagta

SEQ ID NO: 5415 - DNA, 120 bp, synthetic construct
  source 1..120: mol_type = other DNA
atttacctaatgatgttttgctcagattaatattaaagtgagtttgtattcctcaagcacaccccgactattatagcaaggcatcatcagactgcgccagaagccaaactgggattaagt

SEQ ID NO: 5416 - DNA, 120 bp, synthetic construct
  source 1..120: mol_type = other DNA
tgctgacattaaattaatgcacgacattgctggatatattacccgcttttcaagaaggtctgtttcatttcagaaagactgtctaggaaaatggagaacaatgctaagtaaaccagtgaa

SEQ ID NO: 5417 - DNA, 120 bp, synthetic construct
  source 1..120: mol_type = other DNA
ctttctataaattgccatttagttctaaagactgtagaaatgcatatgaaggaccctttgtccttggctatgctgggaggggatagagtttcaggaaagaagagagctcgtatcatgcat

SEQ ID NO: 5418 - DNA, 120 bp, synthetic construct
  source 1..120: mol_type = other DNA
atcagggatgctgattgatggtcagtctgatgcacagtccaaatgtcaagggagctaattctaattttgctgttgtctaattttcaatttcatccgcagagcttgacctgtcttcaacat

SEQ ID NO: 5419 - DNA, 120 bp, synthetic construct
  source 1..120: mol_type = other DNA
ttgccaacgtgactgatatgtttctgggggagctttgtttatgtcatggtttttgttcgtgtgatgttctctgttttataactttggtctctaggaatttttcccacagctgtgcatcat

SEQ ID NO: 5420 - DNA, 120 bp, synthetic construct
  source 1..120: mol_type = other DNA
gtaaaaatgacatgccttgatagtgacagtaggttgcgccatgactgatacaattttgagcttaaacgcttacctgttcatagaaccctgagcttagtactgattttcagtcctatccat

SEQ ID NO: 5421 - DNA, 120 bp, synthetic construct
  source 1..120: mol_type = other DNA
tgtaaaatgagaataataatttgtgcctcccaggactgttttgaggttgacgggggaaggtctcactgtgtgagatcaccctgcaaacaaaacccagagactccggttgtattagcatcc

SEQ ID NO: 5422 - DNA, 120 bp, synthetic construct
  source 1..120: mol_type = other DNA
gcaggaagatgactctcattaagcactgtgcatttggctgccctggcatcagtcattgccacaaaggatctgccacaaagtgccgaatgacaaggaacagagcctgcaaatctggactgg

SEQ ID NO: 5423 - DNA, 120 bp, synthetic construct
  source 1..120: mol_type = other DNA
tctgcacatacctcttctagtggagaccaaggtccccaagatcaggaaggtctttggggcccacaagatgcagccaaaaaaagacaggccttgctgacaacctggtcattttcaaacgtg

SEQ ID NO: 5424 - DNA, 120 bp, synthetic construct
  source 1..120: mol_type = other DNA
ttgtacttcgggtaagattttacagggaaaaaaaaatgtctgaaaacaacagctcttaggtagccattcccaagagagctgatcttcagagtcctgtagggagcttttagacatttgaat

SEQ ID NO: 5425 - DNA, 120 bp, synthetic construct
  source 1..120: mol_type = other DNA
tgagccaccgcacctggccatcctctattctgtattttggagttccacatcagaatttattgggggtaaaaatgtctctttgattaaaaaaaagtttgagaaccatcaacccagttcaac

SEQ ID NO: 5426 - DNA, 120 bp, synthetic construct
  source 1..120: mol_type = other DNA
cctcagcaggtgtgggaaaacgcaactcttgtcgttcagagttgagcaaatgattcaatgtgtgggaaagctctttgaaaacttgaaagtgctacataaacatatggactgatcattgtt

SEQ ID NO: 5427 - DNA, 120 bp, synthetic construct
  source 1..120: mol_type = other DNA
taccagatagtttggagaagtcactgaatggatcaccatggagaacaggagctcaggtctccaggaagagggatggacgatctcagcaaggagagtcacggaagtcccacccacaacatc

SEQ ID NO: 5428 - DNA, 120 bp, synthetic construct
  source 1..120: mol_type = other DNA
gttaatcactatgcattcatcgtcagtgtctctatgatggataaagccccatgaactcaggctccactgattcagaatttgtgattctccatcccaaactgtgcttagatctatctttga

SEQ ID NO: 5429 - DNA, 120 bp, synthetic construct
  source 1..120: mol_type = other DNA
cccgcagctcattcactagctcatttctcacagtctccaaaactgtctcatgtgcatggactacacctcttttgaataataacccaataatcatctcctttaggaaataagaaaaacaaa

SEQ ID NO: 5430 - DNA, 120 bp, synthetic construct
  source 1..120: mol_type = other DNA
atgaggtcccaaaagaactttgcgttaatatcagccggtgccagagtggtggtacttgagatgattttaggtctgatgtggtggaactgttttttagttgccatagtttcatgtttatat

SEQ ID NO: 5431 - DNA, 120 bp, synthetic construct
  source 1..120: mol_type = other DNA
tttagggtggatggaaaataggaaactgcttcttcaaagggtatctctgtatagtcctaaatgaacctagtcctaaatgaacctaagttcactgccccaaattgagggacaatgaaggta

SEQ ID NO: 5432 - DNA, 120 bp, synthetic construct
  source 1..120: mol_type = other DNA
tggcttgcttctccttggccatttctctgttgattgctatctctactagcagtgggaagaaggatgagatggtaaaatttgaatcagttaattttgctatttgttagcgttgccagtgaa

SEQ ID NO: 5433 - DNA, 120 bp, synthetic construct
  source 1..120: mol_type = other DNA
aaacaaagaaaatgaacataggtaataatatggttcatctctgaactctgtaaattatggcactaggagttctgtgaactgtgaactggaggcttcactctgggtactcagaaacctgca

SEQ ID NO: 5434 - DNA, 120 bp, synthetic construct
  source 1..120: mol_type = other DNA
tttgctgggctagacagttctctctaaacctgaaatgttcattagtctcaccacctaacaacatctgttagacaactcgttcatgtgtccattcacggcagatgtgtaataagtacttac

SEQ ID NO: 5435 - DNA, 120 bp, synthetic construct
  source 1..120: mol_type = other DNA
tggtgacctgattctcacactctggggtggctcttctctcattgattggtgacttctctggataaacagttgtcaggtgtaatgtagtgagagttacaagtgcctaagaaattaattaat

SEQ ID NO: 5436 - DNA, 120 bp, synthetic construct
  source 1..120: mol_type = other DNA
ggaagatcacagagctaaaggtaaggacgttcagggccatcctcctcctgccctagaggaccaaagtagcttgtttctcgtgttcaaattccaggtacacataatgacttgtaggaccca

SEQ ID NO: 5437 - DNA, 120 bp, synthetic construct
  source 1..120: mol_type = other DNA
tccctgagcacccaggattttctgtaggggaacacttaccctagtttgcccaggatggtatagtcttgtttctatctattgtagatcagttaatgcctataaattatttctagacagtgt

SEQ ID NO: 5438 - DNA, 120 bp, synthetic construct
  source 1..120: mol_type = other DNA
agattacttctccttgttcagagtaaaagaaaatgggggggatgcagaaaaaagtgtcaaggcacttttgtggattggatagaatgaactggattttgaagatgcccaggacctgaatag

SEQ ID NO: 5439 - DNA, 120 bp, synthetic construct
  source 1..120: mol_type = other DNA
ctccttactagtccgggatttcctgctttcctttcatttttcaaccctattccatttgatctcttgagcctttgtttcccctttagacttgctactgagttgatcacatctttccagttc

SEQ ID NO: 5440 - DNA, 120 bp, synthetic construct
  source 1..120: mol_type = other DNA
tcccccctatagacaataagcaactcaaggacagggactgtgtcttattaatttttgtgtcccaatgcccagaacatcacctgccatcagtatttgatgaaacaatgaacaacaaatgaa

SEQ ID NO: 5441 - DNA, 120 bp, synthetic construct
  source 1..120: mol_type = other DNA
gaattctgagctcttggcggcattcatggtcccaggggatagttattgcctcaggagaaatcaagtcaaattattggctttaagttccaaaataagttcttaaagctcacagcagagata

SEQ ID NO: 5442 - DNA, 120 bp, synthetic construct
  source 1..120: mol_type = other DNA
tggaaatggaagttggaggtggaatagaaatataaagttataattgttgcagttgttggccttggaaacagttccgcatccacagaggtctagatggttccacagtttttggaagactgt

SEQ ID NO: 5443 - DNA, 120 bp, synthetic construct
  source 1..120: mol_type = other DNA
atttttttcctgtgtctcagactgaacagagggcagtagttttcacctgctttcccaagcagctctaaatttgttttttagaatttgaatcagttggctttcacgtgtgcctaaaggaag

SEQ ID NO: 5444 - DNA, 120 bp, synthetic construct
  source 1..120: mol_type = other DNA
acctgaatatgggaatttagatagtgtttcagagagatgctgtggaggaagcctctctctgatcaaattagatctatttttgagagagagaaactccagagggatttccagaaaccatga

SEQ ID NO: 5445 - DNA, 120 bp, synthetic construct
  source 1..120: mol_type = other DNA
cccatagctcgtgtttggataaattgcaaaatttatcacatacctctcccatccctcttctagtttgagttccttttgcctacttttctcctattattctctccagaatgtgctaggtct

SEQ ID NO: 5446 - DNA, 120 bp, synthetic construct
  source 1..120: mol_type = other DNA
ttcatttgcatttgtgaactatcattttttgggcaaaatatttgcgggcaatctgcgggtgacaccaaagttagtatttagccaaccaggagtttgtggggagagcgtgattctatttca

SEQ ID NO: 5447 - DNA, 120 bp, synthetic construct
  source 1..120: mol_type = other DNA
attattagtaaaacacaaaagtagtatacctaaaagtcaggtaagagtagagaaggcagcctggaggaagtgacctccgagctaagtcttaaagcaaaggttaaggttagccagatgtgt

SEQ ID NO: 5448 - DNA, 120 bp, synthetic construct
  source 1..120: mol_type = other DNA
agatggctcctccaaatgtaagtgtttttaagggcttttagaaggtcttaaaataattctgatgtagaccactctcaaaaagctcggccatggaaggagagagaagtgttggattagaca

SEQ ID NO: 5449 - DNA, 120 bp, synthetic construct
  source 1..120: mol_type = other DNA
gagtgaaaactttctacccaaatgccccaggttagagggacaggtgttaacgtaagatgtgggtgcattttcttctactttcttttatgtgagattgggcctccaaatataggtgtttta

SEQ ID NO: 5450 - DNA, 120 bp, synthetic construct
  source 1..120: mol_type = other DNA
acacagtggaaatgaaacagccatatcatatcctataagtatttattgactatatactgtgtgccaggtatcatgctttgcaatgaggacatgaccagaaacaatgtctgactcccagga

SEQ ID NO: 5451 - DNA, 120 bp, synthetic construct
  source 1..120: mol_type = other DNA
catgcacatataaggttatttcagacgcttaccacaggaagtgcagcaaagagaatcccagtgcccagcagaggggatttggatcaatgcttcattacttagtaattattatgaacaaca

SEQ ID NO: 5452 - DNA, 120 bp, synthetic construct
  source 1..120: mol_type = other DNA
aggattatcctcttttgcccctgtatttttttctgcctgctctttctccagtccaccattgtgaacgtgtctgccatatttcaaaataataggaagattactgttgctcttgctctatcc

SEQ ID NO: 5453 - DNA, 120 bp, synthetic construct
  source 1..120: mol_type = other DNA
ctaggaaagtgtcctttcaactcagagtagagcactcaacagagcatgtacaggcttggagttgataggtttaggtccaaattcagagtcagctattagtcaatttttggcaacatacat

SEQ ID NO: 5454 - DNA, 120 bp, synthetic construct
  source 1..120: mol_type = other DNA
caccgggtgtgatacatactctactgtttgtgctttgtattaccctcctcttgttttggttatcatgaggatacatccacctcctgctataaccagttggctaaaagaaataagaatcct

SEQ ID NO: 5455 - DNA, 120 bp, synthetic construct
  source 1..120: mol_type = other DNA
gagtatagggtggggggtccctacccagaccagtccaatgaattggtggaatcatcagttgaatttccccctagtcaggggccaatgtaccctccgtctagttcttacagaaaaaaaaaa

SEQ ID NO: 5456 - DNA, 120 bp, synthetic construct
  source 1..120: mol_type = other DNA
gtttgatttgatctttttgtgaatgtagtctctgaagacagacaggggaggagaacagaatgcacaaagtatcctaggactttgtttaaggagcggaaagagcagatagaattttcccat

SEQ ID NO: 5457 - DNA, 120 bp, synthetic construct
  source 1..120: mol_type = other DNA
atgcttctcacagacaacgtggttcctactgtcagatcacatttggggcgggaagggtggttttttaaaaaaactcgtttttatgagcaggctatcttgatcaatagcaaacttttttta

SEQ ID NO: 5458 - DNA, 120 bp, synthetic construct
  source 1..120: mol_type = other DNA
aggtcccagtccccatctcctggcccagatgagagaagtctgcgctttgctcttcttagtcttgccctgtgtccttgtcctgtcctctcggtgtgacctcggtgacagtgttgcttcagg

SEQ ID NO: 5459 - DNA, 120 bp, synthetic construct
  source 1..120: mol_type = other DNA
agttataagataacgctgttctgtttgagaagtcgaatccaaaggaataggctccagacaccccccttccagagcaggggtgaagaaaaaaaaaaaagaggacaaatatctgtgtttagc

SEQ ID NO: 5460 - DNA, 120 bp, synthetic construct
  source 1..120: mol_type = other DNA
tttgactgtgcctcttatccctgactgtgaactccaaataggtcatggaaaataatcatccttagtggaagtcagattgaagctaagccagttttctttttacactaccttcctatctgc

SEQ ID NO: 5461 - DNA, 120 bp, synthetic construct
  source 1..120: mol_type = other DNA
aagagttatattctggtcctgagaagcgcaatgttgatttaatattattagtgagtccggtcatttcctggatttatttcaaatagaatcagtcagtctcaatcccccctccctctctgg

SEQ ID NO: 5462 - DNA, 120 bp, synthetic construct
  source 1..120: mol_type = other DNA
aaatgcagagaggaatacgtaatacgtgcatttaatgtgggttttggtcttatatattgcaattctgttctgatttcaggctgcggtgttattgagcagtttctttaacacctgcagcat

SEQ ID NO: 5463 - DNA, 120 bp, synthetic construct
  source 1..120: mol_type = other DNA
gattgataatcaggtctccacggtcactcctgtgacagagcaggtatctttttattttatttatctgattttgcctcatgaatttcatgattcttatcctgggagagagcaccaattggc

SEQ ID NO: 5464 - DNA, 120 bp, synthetic construct
  source 1..120: mol_type = other DNA
caaaaggttaccccattttccctaagcaataatgtctaccgtctgttactatcattatggtacagctaatttgggatgctatcaatcagccaggttattagcaaccaggtcagtttggtt

SEQ ID NO: 5465 - DNA, 120 bp, synthetic construct
  source 1..120: mol_type = other DNA
gccaccgcgcctggccaaaagaatgttcttgagctttatattttgacccaaattaggcaatagttaccttaaagaaaaatgatacagtcaaaatcattttggctttattaaagctcctca

SEQ ID NO: 5466 - DNA, 120 bp, synthetic construct
  source 1..120: mol_type = other DNA
taccctatctccaaataagatcactgtctgagggttaggggctaactggggaatagaactctaacataaacgttttttaggatgggacgaattcaacctgtaacaggtacctctgaaaca

SEQ ID NO: 5467 - DNA, 120 bp, synthetic construct
  source 1..120: mol_type = other DNA
catgccccaccaggtctagtcatatgtggcgggggcggagggggagtcctgtgtttagaggtgcacagtgtgtgcgctgctgtgtgtgtgtgttatttactctttaaaaaaatttttttt

SEQ ID NO: 5468 - DNA, 120 bp, synthetic construct
  source 1..120: mol_type = other DNA
gtatattttacttgtactttgttcgtcgggctttctccctaaaattaagctttataagaggaggaagttttatttgctttgttcactgctgtatttttcatgcctagaacagttcctggc

SEQ ID NO: 5469 - DNA, 120 bp, synthetic construct
  source 1..120: mol_type = other DNA
aggaaagtacttagctcaggtaatgtggaggatcagacaggagggctttatggtccaaccctggaagtgggtacacccgtttttggttgttttttattctgatagttttggggaaacagt

SEQ ID NO: 5470 - DNA, 120 bp, synthetic construct
  source 1..120: mol_type = other DNA
aaggctcaagcagttcaaggctgtcttcatcctggatccaagttcttcagcactatatttctctcagaaacatagtcagcttttgatcttgttaagctaaatttataggtggccattggt

SEQ ID NO: 5471 - DNA, 120 bp, synthetic construct
  source 1..120: mol_type = other DNA
tgcttttgtctttcaaagccttttccagtcttattttccactgtttgggggtccaggaacaggcggcctttcatactctctaaaggcccaaatttctggtctgtttgcacttttttttta

SEQ ID NO: 5472 - DNA, 120 bp, synthetic construct
  source 1..120: mol_type = other DNA
cttaaaatctctgttgtttgtggagcaataagaatagaatttatttttcatttccataaaagccacgttgagggcggtcagggagggagtgggtgagtagactgtgctttgtgcagtcat

SEQ ID NO: 5473 - DNA, 120 bp, synthetic construct
  source 1..120: mol_type = other DNA
agagttcactggttccagaggctcaaaatcgtagttggcatcagttctgtggtggagatgccactagggggcaggtgttctttcaagagcatcttatctcaattgctgccgtcctaaaaa

SEQ ID NO: 5474 - DNA, 120 bp, synthetic construct
  source 1..120: mol_type = other DNA
agtgtacctggtctcagaaatacctgcatatgtgccaaatgtaggttgtgaaaagcatgaaatgcatgaaggatgtgaaagaatttcttgtggggttattttagacactcctcctaatgg

SEQ ID NO: 5475 - DNA, 120 bp, synthetic construct
  source 1..120: mol_type = other DNA
ttaatctccacaacaagcctactagatgctgagatctcaatgtgcaaataccccagaacagcacctagatgaggcacagggactcactggaagccttgtcttccttgggcccatctgtga

SEQ ID NO: 5476 - DNA, 120 bp, synthetic construct
  source 1..120: mol_type = other DNA
gtctgcctcctgcccttgttcatggtgccctggctgtttgtgtgccctggcctgcactgagctgaactcagccacgccttggcctccctgccatgctcattggtgtccaaagtctggagg

SEQ ID NO: 5477 - DNA, 120 bp, synthetic construct
  source 1..120: mol_type = other DNA
tggctgtcactgacacagcacttgacatattctctggcattggcaggtggttgttacatgtttattaaataaacaaatcttaacagaaagaaaaaatgtggactggatttgagggggaag

SEQ ID NO: 5478 - DNA, 120 bp, synthetic construct
  source 1..120: mol_type = other DNA
cctctgcctaaatgtgacccctgtagggaggtcttctctgatcctaccttagtcaaaacagcaccttccacctttaccctgcttgattttgtttcatatttatcactatatgattagcat

SEQ ID NO: 5479 - DNA, 120 bp, synthetic construct
  source 1..120: mol_type = other DNA
ccagtgcagtgagcttagacattccattggtgagtaaatagtgcctactaatgcttggatggtacatctggcatgataccattcattagatgttattctttcttgagttccatgtttgtt

SEQ ID NO: 5480 - DNA, 120 bp, synthetic construct
  source 1..120: mol_type = other DNA
ttagtcagataaaaatatggtatatcagtgtaacagaatactctgcaactgtaaagaatgagagttagctacaggtcctaacatgagcctaaggagtcagatacagaaggccgggtgtgg

SEQ ID NO: 5481 - DNA, 120 bp, synthetic construct
  source 1..120: mol_type = other DNA
gccaccgcgcctggccctcagtgtctttttttcatacagaagttttagtatttttatagagacaaatatatcagtcttttcctggttagcttctgagctttgtgttatctgtaggaagga

SEQ ID NO: 5482 - DNA, 120 bp, synthetic construct
  source 1..120: mol_type = other DNA
tcgagactagcctggccaacatggtgaaacctgtttctactaaaattacaaaaattgggccaggcgccatgactcatgccggtaatctcagcactttggcaagccaaggcaggtggatca

SEQ ID NO: 5483 - DNA, 120 bp, synthetic construct
  source 1..120: mol_type = other DNA
tggactgtaatgattctatttgtttgcttcttatccctttgcttcacccagaaaaggattatagcagtctttgtgacaagcaaccgataggaagacgtctcttcaggcagttctgtgata

SEQ ID NO: 5484 - DNA, 120 bp, synthetic construct
  source 1..120: mol_type = other DNA
taccagaaaagtgtcctttctgcactcaactggccaatgctcttaacttaaaaacgctttaacccagaagcatatggaagggataaagtttgtgtaagaagaatgatcactttggatgga

SEQ ID NO: 5485 - DNA, 120 bp, synthetic construct
  source 1..120: mol_type = other DNA
ttttgtttttttgatggcagttgtgtaggttcagaaataatgtctgattgtgccattttgtcacacttactgctttgactatcctcgtgataggtgatgacaggctctgtgagcttctca

SEQ ID NO: 5486 - DNA, 120 bp, synthetic construct
  source 1..120: mol_type = other DNA
gaagtattgctctaaaacttcattaacctcctttaaaaaactgacttcttccgcctcatacaccttactttcccaaagaagagctgtagactcttgatcagtagagttggtctgtgactc

SEQ ID NO: 5487 - DNA, 120 bp, synthetic construct
  source 1..120: mol_type = other DNA
agaccctgtctcaaaactacctcccaacatcaattaattaatctttaaaaagcttgaatttattataaatgttcctcttttgcattttgtttgatgtcatgaggaaactaacaattagat

SEQ ID NO: 5488 - DNA, 120 bp, synthetic construct
  source 1..120: mol_type = other DNA
acacctagtaagtgtcagaaccaggaatcgaacatgtggagaatggaattagtgaatagtgtggtgagaatgagttcaaaatatttggatttgaaacatagccaactggatatagggcca

SEQ ID NO: 5489 - DNA, 120 bp, synthetic construct
  source 1..120: mol_type = other DNA
cgtgaaccactacacccggctccatttatctagttattattctttttaaattagctcccttttctttcttcacctcttctgaagaaatacccatatagcaagggagggcatcaagaagaa

SEQ ID NO: 5490 - DNA, 120 bp, synthetic construct
  source 1..120: mol_type = other DNA
tactggcagggttttaaaggcaaagggaacaaggagtgagctgatacaatgttgtttgacccgaattctcactggtttaagagagaacaatgatccactgatcattggctatatattgtt

SEQ ID NO: 5491 - DNA, 120 bp, synthetic construct
  source 1..120: mol_type = other DNA
tgtcacagtggcaattaaatgtcatcatgagctttgtgggggatagacaaatgtttagataatagcacttggtaatagagagatgtttatgggctgcctggagatgatgtagctggaaag

SEQ ID NO: 5492 - DNA, 120 bp, synthetic construct
  source 1..120: mol_type = other DNA
ataacaattaaacgtcaacatgagctttgaggggaagggaccaacgttcaaatgatagcacttgataatagagagagagagacgtttatgggctgctcagcctgataaatgatatctatg

SEQ ID NO: 5493 - DNA, 120 bp, synthetic construct
  source 1..120: mol_type = other DNA
tgcagaaattaacaagcaagctaatcttagaactcatatggatagtcaagggacgtggactataacattctttaaaaagaatgtagttggaggactcgcactcctcaatttcaaaactta

SEQ ID NO: 5494 - DNA, 120 bp, synthetic construct
  source 1..120: mol_type = other DNA
cttagctttttatcaggaacctgccgcaatgccgcaacaataacaaaaccagtcctgagattgcagcatgaatccattcctgaggggcagagtcctcatgatcttatcacctttttaaag

SEQ ID NO: 5495 - DNA, 120 bp, synthetic construct
  source 1..120: mol_type = other DNA
gactttggaggggaaatgactgttaaaatattgtctttgtcttctgagaatattttgtcttgttttctgctgtgtccagtgcctggaacaatgcatatttgtggagcaaatgagtgaatg

SEQ ID NO: 5496 - DNA, 120 bp, synthetic construct
  source 1..120: mol_type = other DNA
tcctctggtcgcttggccctatcacagtcagaaatcagtctggaatgcatttcttgtttctaattacaaattaggtggacaattgagcatgacttgggtattttttcattgaatctggac

SEQ ID NO: 5497 - DNA, 120 bp, synthetic construct
  source 1..120: mol_type = other DNA
gaggctgcaatgagccgagattttctgtctccaaaaaaaccacaaaactgaacatatatttttcccatttgcatgaggaaaaagaaactatctgaagaggtgtgtgtgtttgatttttaa

SEQ ID NO: 5498 - DNA, 120 bp, synthetic construct
  source 1..120: mol_type = other DNA
tttttttaaaaggctgaataatattccactgtgtatatatactgcattttatttatccattcatccacagacacctgggttgttttttgctatggtgaattatgctgcaatgaacatggg

SEQ ID NO: 5499 - DNA, 120 bp, synthetic construct
  source 1..120: mol_type = other DNA
aaaaagcctttgaggaatgtactaggtaagtggttcatgctgagccctgcatatattatctatgactaaccccaaaacagacagctttcaggaggtttctctgcataagacaagttccta

SEQ ID NO: 5500 - DNA, 120 bp, synthetic construct
  source 1..120: mol_type = other DNA
taaataaaaataaaaaacaaggctttctctctctatctggctttctcttgaggtgtggcttctctgcacactgaggagctgggtggtttagatgcttattcctttagtgagaattcagcg

SEQ ID NO: 5501 - DNA, 120 bp, synthetic construct
  source 1..120: mol_type = other DNA
aaaaaaagaaaagagatgttggctccatggctccatttgattgcttctctggtatggcagacaggacaggcttggtctttgctctctgatactggtcctgggatattgtgataagaatca

SEQ ID NO: 5502 - DNA, 120 bp, synthetic construct
  source 1..120: mol_type = other DNA
gacaccctcactcccaagaagggaatgcatccttctatttcactgcttttttcattcattctatttcacttctgttttcacttatagcgttagaacctaacgtggacttctgtaattgca

SEQ ID NO: 5503 - DNA, 120 bp, synthetic construct
  source 1..120: mol_type = other DNA
tagactctgttctctctttttaaaatggcaggtatccctgttggttcagtggctagaaaataaaacttagcttagatttttagtgctagaataggatgcaatgggtgggacctggcagtt

SEQ ID NO: 5504 - DNA, 120 bp, synthetic construct
  source 1..120: mol_type = other DNA
accctttgtcccgggcatcccctttgagcagaatggttcaataaatgaggcgaagacaagcgctgagtaaacttttcttttttaaaagaacaatgcaatgtgagacctgaaacttgtttt

SEQ ID NO: 5505 - DNA, 120 bp, synthetic construct
  source 1..120: mol_type = other DNA
agaccactgtagttggtggatggagaacagcagcagttctggtctggggatttaaagagatattaattaccttactagttacctggagtgatcatatggagttcaagaacttttaagtcc

SEQ ID NO: 5506 - DNA, 120 bp, synthetic construct
  source 1..120: mol_type = other DNA
taattatgattgtatagattactttttaacagatttacttgggttcccaaacaaatgattggctgcacgaataaagcatggcagtttcccacagacttgctctggaggtgttgtactctc

SEQ ID NO: 5507 - DNA, 120 bp, synthetic construct
  source 1..120: mol_type = other DNA
tttattgatagataaaattaaatcatgtcttatgtttgcttttaaagcagtcccctgtggggtgtgcagtggatgggagttggaagaaacagcagcctaatgttgatgacacagaggcac

SEQ ID NO: 5508 - DNA, 120 bp, synthetic construct
  source 1..120: mol_type = other DNA
tacacatatggggacatttaaaaattaaacatttaccgtgatcacctatgccaactagttccatttgtacactgtcttagagttgatagagtacagtgcatcactgagggaggagccgac

SEQ ID NO: 5509 - DNA, 120 bp, synthetic construct
  source 1..120: mol_type = other DNA
tgcagaggctccaggtccattagttacccgtgtttcttggtgaattgccctttcctttcccttatcacagccagccagagcttatctctgtttgctctcagcctccagtcaatttctctg

SEQ ID NO: 5510 - DNA, 120 bp, synthetic construct
  source 1..120: mol_type = other DNA
actgaagtatgaagactggttgaagggagagtgtgaacgagaatttataaaatgatttgtagtgttagagctatttcctccaagccatttatttcttagcccggaggttagctgctttgt

SEQ ID NO: 5511 - DNA, 120 bp, synthetic construct
  source 1..120: mol_type = other DNA
aaaacaaaaaaaacccccgtgtaactaccttggaacatagaaatccacaatctagctttatgaaaagaacagaaacagttgttacagtttcttttgcttaaatgctttgatttctatatc

SEQ ID NO: 5512 - DNA, 120 bp, synthetic construct
  source 1..120: mol_type = other DNA
cagggccatgctcaccactgcatcccagctgcccacaacaaggctggcgtgataaaagattctcaatataattttaatatatattaagcagatgttgaatgaatattcacaagaggagag

SEQ ID NO: 5513 - DNA, 120 bp, synthetic construct
  source 1..120: mol_type = other DNA
ccactgtgcccggccacaactcattattttcgaacaacatcattgtatgtggagacattcccagatttttagataacctattaaggatttaaccaagtgattaaatgtgaatcagccact

SEQ ID NO: 5514 - DNA, 120 bp, synthetic construct
  source 1..120: mol_type = other DNA
gttctctcttttggctacacagctgcggtaaaatcttcagcatgccaaggtccaagaggcacgtgatatgtcctgtacatttctctgaaacatatagtattcacatgttctgattgtaaa

SEQ ID NO: 5515 - DNA, 120 bp, synthetic construct
  source 1..120: mol_type = other DNA
acttcatagtttagtgtaatcaatgtatttagttttaggaaaaaacaattccccctcctgtcccttaaatgctggagttcctgggctctgagtctcttctcagtcactctccctgggtaa

SEQ ID NO: 5516 - DNA, 120 bp, synthetic construct
  source 1..120: mol_type = other DNA
agacgatgagcttcttgggagtccttgatctcatttcttcctattctgatggacctttggcttctccttatcttatatatcccacagccaatatgggataaatatctcttaaggaccaga

SEQ ID NO: 5517 - DNA, 120 bp, synthetic construct
  source 1..120: mol_type = other DNA
caacttctgaataattgggccttttgttgttgtttcttgtagagacttgaagcctgagaatattctccttgatgatcgtggtaagtgggcaagcctttcacatctaatgggtagactttg

SEQ ID NO: 5518 - DNA, 120 bp, synthetic construct
  source 1..120: mol_type = other DNA
tttatgcctctgccagatgctttcatgcttatctaattcatgtatgacaccctgccctgtgaggaaggagggtactggaattctcatttaatggaaggcgataccaagatttaggaatca

SEQ ID NO: 5519 - DNA, 120 bp, synthetic construct
  source 1..120: mol_type = other DNA
tttaggagatttttctgtgtagttctctcttctttagaactttaccccacatgtttgagctgagctgtctttccccagtgctaactcctgcctggctaacttagcaagacccctgctctg

SEQ ID NO: 5520 - DNA, 120 bp, synthetic construct
  source 1..120: mol_type = other DNA
aaaaaaaaaaagtcactcagtatcattcccttctgtgcggttaaaccaccagctggatacaccattaggttcattttcttaattttgctttcaatttttagcgatctaattttttttttt

SEQ ID NO: 5521 - DNA, 120 bp, synthetic construct
  source 1..120: mol_type = other DNA
catgtaatttcctatttcgttgaatgtatccttgatagagtcctagaagtgggtgaattcatacgcaatttgtcagatattgccagattccgctccagggtgtttcccgtctgcattccc

SEQ ID NO: 5522 - DNA, 120 bp, synthetic construct
  source 1..120: mol_type = other DNA
atgtacctggaagttgtatgacataaaataataaatccagtgtttctgtcttatcaagtggtggcctatgattaaagggcttcctgatcaatagccaggcaaaaatcgaattttcctgct

SEQ ID NO: 5523 - DNA, 120 bp, synthetic construct
  source 1..120: mol_type = other DNA
tcaggaggtggagccttccctagaccaccatttcccttgtgaatgtgactctgtggcaattcagctcatcttggatgaatcatacaaatgtttaaaaatattagctttattgggatataa

SEQ ID NO: 5524 - DNA, 120 bp, synthetic construct
  source 1..120: mol_type = other DNA
tagtcccgattggtggggacttggctgtctgatctatgaaatgattcagggacattctccattcaaaaaatacaaagagaaagtcaaatgggaggaggtcgatcaaagaatcaagaatga

SEQ ID NO: 5525 - DNA, 120 bp, synthetic construct
  source 1..120: mol_type = other DNA
tctgcctctgggactggactgtgttaccacccctcactgcccagacactcaatcagtgagggaaactctctttgttacttactttaaaccagtatttttttagcacattttttttttcat

SEQ ID NO: 5526 - DNA, 120 bp, synthetic construct
  source 1..120: mol_type = other DNA
tgtgaacggtctcttatggagcttctttttctcagatggtcagcccctagtggggagcaaaggtgggaggcaggtgtgaggaaaggggaggcttgaaggcttggaaagcaggggtttcct

SEQ ID NO: 5527 - DNA, 120 bp, synthetic construct
  source 1..120: mol_type = other DNA
cactgacagggctgcaagaatgtataaatatgtaccagaaatggagtctgcccctaagagctcacagtttaatgttaggcctaaaacaaacagaaatgactgcagtgaaaaagcagaatg

SEQ ID NO: 5528 - DNA, 120 bp, synthetic construct
  source 1..120: mol_type = other DNA
atgggagtggagtatgctggcagcaagctcaaccatggggctgtggagtccctgagatgcagaaatggtatttgcattacacttaattttcagatctgttttattaatttatttgttgtt

SEQ ID NO: 5529 - DNA, 120 bp, synthetic construct
  source 1..120: mol_type = other DNA
ctttcatgtgttgcttttgagcacagccctgctttttctgattgatgagaattgcggaggaaggcttatttgcctttgtgatgatggtaaatatgtatgtgaggaatactttctaaagag

SEQ ID NO: 5530 - DNA, 120 bp, synthetic construct
  source 1..120: mol_type = other DNA
aaagaaaaaaaaagaaatgatttgttagatgcacctgctctgccctcccgagtcctttggttattattatgcaggggagttttgagttttcatttttatccagaggctcaagtgggttgc

SEQ ID NO: 5531 - DNA, 120 bp, synthetic construct
  source 1..120: mol_type = other DNA
ttgagggtatgaatgagtgaagagcagctactctaacagctgtgctgaccgtggcctttggagccactgctttgctgaaacactcactgtagtgcacaagtcctgggtgaaaagtttctc

SEQ ID NO: 5532 - DNA, 120 bp, synthetic construct
  source 1..120: mol_type = other DNA
acagtaccacaaaattggtgacactaaaagctggcgaaccacctcttcagaggacacattctgtgatttagaaaatgcctcaagtgagaggggcctggcaaaagaatggagacagggaga

SEQ ID NO: 5533 - DNA, 120 bp, synthetic construct
  source 1..120: mol_type = other DNA
atgatcgaatctgggtgtttcaaagacatcaacaaaagtgaaagtgaggaagctttgccattagatctagacaagaacatacataccccggtttccagaccaaacagaggcttcttctat

SEQ ID NO: 5534 - DNA, 120 bp, synthetic construct
  source 1..120: mol_type = other DNA
gaaagaaaaatggaatcctttggaaagactttctgtaatagcattaaatgtagacaagccttttttccatgcaaagtgtctctccttggattcgtgggccatcctactttgcaccctgtg

SEQ ID NO: 5535 - DNA, 120 bp, synthetic construct
  source 1..120: mol_type = other DNA
atgcctcagccatggtacatgcagaacttacctgctgcatttcctatgtatgtgagctaagcatctaccacatcatgaagtaaataaggagaaaatttttcaggtttttgcctgccttaa

SEQ ID NO: 5536 - DNA, 120 bp, synthetic construct
  source 1..120: mol_type = other DNA
tcggcagctgttgaaaggtcagttggaaaagcattcattcggggagcgacgagcaaacatgcacataaaatagcgtttcaagtcggcccgggatggttctgtgtgaactggtgtgtgtgt

SEQ ID NO: 5537 - DNA, 120 bp, synthetic construct
  source 1..120: mol_type = other DNA
gctttatttgatacaaggtagaaggcagactgagtaagggcttgagtttagaaggatactcggtgagcagcccatgaaaatgtcttacctgcttaatattttcattcacctactttgatg

SEQ ID NO: 5538 - DNA, 120 bp, synthetic construct
  source 1..120: mol_type = other DNA
tttataatgctttgcttagagtgggcaaagtgatatcaattccacccgccccctccaaattgttctccccagtattttttcaccaacgtgaatttactgtctgatattgttgttcgttag

SEQ ID NO: 5539 - DNA, 120 bp, synthetic construct
  source 1..120: mol_type = other DNA
aagaaaaggtagaggtatgggttcaagattttgaaccacggaaatgtattttggggcctgtttatttgtcctgggtctcatgagaaaacatcaactcgatcactcttaggaactttagat

SEQ ID NO: 5540 - DNA, 120 bp, synthetic construct
  source 1..120: mol_type = other DNA
ttttaatgttaatcttaccaagcgacagctttcatcctggttaaggcagctcggtgtgtgtaaaagcagcctggcctgttaaacacaatgccgttaaatcaaactgcctttctttttttt

SEQ ID NO: 5541 - DNA, 120 bp, synthetic construct
  source 1..120: mol_type = other DNA
aacttgagaaaacagaaagtgactaccaacaggtgacacattgagaagataattaggaatttcctcaatcatacagccctcagcacccatttctcacatcaaaatagaatggtggagccg

SEQ ID NO: 5542 - DNA, 120 bp, synthetic construct
  source 1..120: mol_type = other DNA
ataggcttctgaaaatcttacaagagtaaaatttatttgttcagcatttggttgttgaaggacccagtgcggaggtgacattcgggtgtcagcctcagataatacaatgtgaaatgactg

SEQ ID NO: 5543 - DNA, 120 bp, synthetic construct
  source 1..120: mol_type = other DNA
tttgacatagcctgtcacagggaatgaccgaaaagattaaaggtacctgttcctcttcaggggctctgttcaacgtagtagccactagctgtatgttgttatttatacttaaattaatta

SEQ ID NO: 5544 - DNA, 120 bp, synthetic construct
  source 1..120: mol_type = other DNA
attttaacaataactcagagcacacttagaaagaaagtgtttgaaacaataaaacagttcattgcttgttccctggtgtccgaagcaagggagtctatctgacgtaccagagtcaactgg

SEQ ID NO: 5545 - DNA, 120 bp, synthetic construct
  source 1..120: mol_type = other DNA
caaggtcacttgaactgtggacttttggggagcaattgcaagtggatctcccctatcctccaaagtgcttttatgttccaaaataaatctttcttccttcctctcataatatatgccaaa

SEQ ID NO: 5546 - DNA, 120 bp, synthetic construct
  source 1..120: mol_type = other DNA
tatgaagtggccttttcccccagaaaagctctctccggatgaccccttgccatttttcagtggtaaccttgagtgtttgcatttagaaaccatgtcaacccgtttgtgtgtgtgtgtgtg

SEQ ID NO: 5547 - DNA, 120 bp, synthetic construct
  source 1..120: mol_type = other DNA
tgtcacagattagggagagtgtgtgtctaatgaatatgttcctggaacatagtaggtgttcaaaaatatttccagaatgaatgactgatgctacacagcttgagtatccctaactgaaga

SEQ ID NO: 5548 - DNA, 120 bp, synthetic construct
  source 1..120: mol_type = other DNA
gctgatgacctggcatttgaaggatgtaatcgttaaagaaaaattgcctttctgctcatgggcagggaggctggatccaattaagacaaggaaaacgtatgttaacttggaggaaaaatt

SEQ ID NO: 5549 - DNA, 120 bp, synthetic construct
  source 1..120: mol_type = other DNA
ctgagggacaaagtaaaactatatctcggaaaaaaaaaaaagtccaaaggaccatgtaaagcatctctctctgtcttcccatgcacccctgctaccaatcccaccactcagaaataatta

SEQ ID NO: 5550 - DNA, 120 bp, synthetic construct
  source 1..120: mol_type = other DNA
aaattaaggttgagttcagtcaaagactttagttgtagatgacttttcagttgcccttggattttgcatgtgtaaatcaggcagggggtacactcagaaaacaagcccacagcttcgtaa

SEQ ID NO: 5551 - DNA, 120 bp, synthetic construct
  source 1..120: mol_type = other DNA
gagataagcttggcatgagggcatagtccagagccccacggccttcagtaattttgttaacaattggaggagaatggcattttcttctgggaaacatttgcagatgtgtgagctagctct

SEQ ID NO: 5552 - DNA, 120 bp, synthetic construct
  source 1..120: mol_type = other DNA
ctatatatattagataggcttcttgcctcacccactaaattgtagacttcctgagggctgacaccagggctttttctttgtatcttactggaactaacgagatgctaaaagtaaacccaa

SEQ ID NO: 5553 - DNA, 120 bp, synthetic construct
  source 1..120: mol_type = other DNA
gcagcttggccaggtgatcctggagtctcttctcacccttcaaatcttgagaatttgcaggtgcattttccactgataattcaactgtgggtacttcagaataaaatttgatgttaattt

SEQ ID NO: 5554 - DNA, 120 bp, synthetic construct
  source 1..120: mol_type = other DNA
cccgggttcacgccattctcctgcttcagcctcccgtgtagctgggactacaggtgcccgccaccatgccttgctaatttttgtatttttagtagagatggtgtttcaccatgttggcca

SEQ ID NO: 5555 - DNA, 120 bp, synthetic construct
  source 1..120: mol_type = other DNA
tatgagccaccactactggcctgcctctctgtatctttatcatcacataggaataatgccctattgatcacagagaccaaataaaaaatgtaaataagatggggagtccagatgcaaacc

SEQ ID NO: 5556 - DNA, 120 bp, synthetic construct
  source 1..120: mol_type = other DNA
agacatcaaaagccttaaaattgggtaacccttgaccttgaagttccacgtctaagattttatcttaaggaaaaattagcgtaccaatgacgtgcaggaagttgttcagtagatgatgtt

SEQ ID NO: 5557 - DNA, 120 bp, synthetic construct
  source 1..120: mol_type = other DNA
aggattattccagctgtgttacttcaaggattcttgaaactcttcttggacccatttgttgactgactgctttgatggactgtaaatacacatcattaaggctagatgccttaacgcatc

SEQ ID NO: 5558 - DNA, 120 bp, synthetic construct
  source 1..120: mol_type = other DNA
aaggaggctttatagagatagatgtatttttcaccacggtccaatgcattaggtttcattgtcttttgcacatgacaaatctgacaggctaaggacacattcaggtaggtgttggagctt

SEQ ID NO: 5559 - DNA, 120 bp, synthetic construct
  source 1..120: mol_type = other DNA
aaaaaaaaaaaaaaagagccactgagagtttttcagcagaggaggctcaaaaactacctgtacttgaagacaccagatctggcagcagaagctgtagggccaaatgggcagtggttcttg

SEQ ID NO: 5560 - DNA, 120 bp, synthetic construct
  source 1..120: mol_type = other DNA
gtatggaggttcctccaaaaactacaactagaactaccatatgatccagcaatctcactactgggcatttatccaaaataaaggaaataagtgcatcaaagagacatctgcacccccatg

SEQ ID NO: 5561 - DNA, 120 bp, synthetic construct
  source 1..120: mol_type = other DNA
tgtaccccataaatacgtagttatgtgtcagctaaaagataaaaaactataatatttgcacccaggtgatgctgcagggcagtcaggagatgtggctggctctggggaaaggtgtcagct

SEQ ID NO: 5562 - DNA, 120 bp, synthetic construct
  source 1..120: mol_type = other DNA
tttgatatttgccacaaagaatacaatccttaacctggctgcccttgtgagactccaactgtagcaaagaaagattaggaaacaaacatcccagtcaccatggaaatgtgaacccaaggt

SEQ ID NO: 5563 - DNA, 120 bp, synthetic construct
  source 1..120: mol_type = other DNA
aggctgggataagtgtaatttctaaatctggctttcatcagtggtgatgttcttcatgtgtagatttatactagggaaacaaatcaggagggggaacaaggtggacagagaataatagca

SEQ ID NO: 5564 - DNA, 120 bp, synthetic construct
  source 1..120: mol_type = other DNA
catcagtttcatgggaacagggcctgtgtctttttattgctctttttgtgtatgtctgtagacaataggtgctcaataagtactttgtgtaaatggtgactttaggagcacctggattct

SEQ ID NO: 5565 - DNA, 120 bp, synthetic construct
  source 1..120: mol_type = other DNA
gtgcagttaaatattgattgtctcttttgtggcaagattccagtctcttccttttaccacaggccacaatagttcctcttgtctcatatcaagtcccctttactcatttatatcacctga

SEQ ID NO: 5566 - DNA, 120 bp, synthetic construct
  source 1..120: mol_type = other DNA
ggaaaatagaaaggacaaaggaaatggaagcaagtgcgctgggaaatgcccaagtttcagcttgaatgatgctgtttacatgttcttacaggaaagactattatgggccagctgttaatg

SEQ ID NO: 5567 - DNA, 120 bp, synthetic construct
  source 1..120: mol_type = other DNA
cctgtttgggcaataaagttgatggttactctaccatgaaagagcagaaaaagctgagcagaaaactttgttttggaaaagggggtgttgaagccaaggcattagagaaacgtgattttt

SEQ ID NO: 5568 - DNA, 120 bp, synthetic construct
  source 1..120: mol_type = other DNA
gtatatgtgccatgttttctttatccagtctgtcattgatgggcatttgggttggttccaagtctttgctattgtgaacagtgctgcaataaacatacgtgtgcgtgtgtctttatagta

SEQ ID NO: 5569 - DNA, 120 bp, synthetic construct
  source 1..120: mol_type = other DNA
ggccacttgttctctccttaaccgtggactattgcaaagggtggagatcggagactggaaaaaaatccgtgttctagtcccttgttgcgtgcttcctggtggactgacctgtagcagata

SEQ ID NO: 5570 - DNA, 120 bp, synthetic construct
  source 1..120: mol_type = other DNA
ttggttgggggttacaaatgaagttgacaaaagattaacaagagaaaaaatggatttaattggattcttaggcactggagttcatagggaaatgtggctcaaggaggcagctaggatttg

SEQ ID NO: 5571 - DNA, 120 bp, synthetic construct
  source 1..120: mol_type = other DNA
ctgaactgtgagtcaattaaacccccttcctttataaattacccagtctcgggcagttcttatagcaatgtgaaaacagactaataggccaggcgcagtggctcacgcctataatcccag

SEQ ID NO: 5572 - DNA, 120 bp, synthetic construct
  source 1..120: mol_type = other DNA
gcacccctgataggacctagtggttcatcagtcacttctctgcctgagtggtaggagcctagattttatagttgttttcaatgacaaaaatcatagtttataaaagagcataatctgacc

SEQ ID NO: 5573 - DNA, 120 bp, synthetic construct
  source 1..120: mol_type = other DNA
ctgttggtggggatataaaatagcatagtcagctactatggaaaatagtatggaggttcctcaaaaaattaaaagtaggattaccacatggtccagcaatctcacttctgggtttttatc

SEQ ID NO: 5574 - DNA, 120 bp, synthetic construct
  source 1..120: mol_type = other DNA
agaacagatctcatgttgtgttttttaaaatcacaataaaaatatacagttatcccttagtatcctttggtcattggttccaggtccccccttatatactaaatccatggatgctcaagt

SEQ ID NO: 5575 - DNA, 120 bp, synthetic construct
  source 1..120: mol_type = other DNA
acataaaattgatcccatcacaaaagaggaattaagattgccttgggttaagggttaagtaatgtcctatcaccagttaatctgccaaggatgttggtcatggccacattcaagaagtgg

SEQ ID NO: 5576 - DNA, 120 bp, synthetic construct
  source 1..120: mol_type = other DNA
atatacagacaatcatgaaagtcccccccaccctgcctggctgctgacatttggtgataatctttccagacatctttctaaatgctgactgtttatatgtgagtgaacaagtgtttatat

SEQ ID NO: 5577 - DNA, 120 bp, synthetic construct
  source 1..120: mol_type = other DNA
atgaaaacggtgtgaaattcaaaattcagtgtccattaacttgttttgttgaacagcatgctcatttgtggatctattatctagggcttttttcatgccacagaattgagtagttgtgac

SEQ ID NO: 5578 - DNA, 120 bp, synthetic construct
  source 1..120: mol_type = other DNA
tactattactgtgtcattgttattgtaagtgcataactctttgtgcacgtgtgcaaggatgtcacagatacctggcagtgggcttaaagatgaagggtcttaacaaattgccttccagaa

SEQ ID NO: 5579 - DNA, 120 bp, synthetic construct
  source 1..120: mol_type = other DNA
gtaatagagtatgttactatatttttcatatcccgatgccatagcctgtgctgcccagtcacactgagaacaatgcagttctcatagataacccgttgttgggtgatatgtctatttcta

SEQ ID NO: 5580 - DNA, 120 bp, synthetic construct
  source 1..120: mol_type = other DNA
ctcccacgttattttcttgctgtcttctaaagcgatgatgaaagatgtctgggggaaagaaaataaaacaaaaaaccttctagcatctacacacctaaagcagggtttgtcaaccttgac

SEQ ID NO: 5581 - DNA, 120 bp, synthetic construct
  source 1..120: mol_type = other DNA
tttttatgggtcgtagaggatacctcaataaatagcatttttcttccctgaacaaattgagagatgaggccatggttgaaactttgaactttggaacttgcccagatgtatcaggtcagt

SEQ ID NO: 5582 - DNA, 120 bp, synthetic construct
  source 1..120: mol_type = other DNA
ttttcatgaggcacacttattttcagatgttcacatggactctttttgagattccccaggggaaaaggagaaagtacagaaagccgtgacacctgatggaaaatattacgctttagtcaa

SEQ ID NO: 5583 - DNA, 120 bp, synthetic construct
  source 1..120: mol_type = other DNA
ctgagtgtggatgactctggactatttctccaggaggaggtgggattcacaggcagagacatatcaaaacagggaccttgggatgtatgatgtattttgtaagaaaaaaatggaaaaaca

SEQ ID NO: 5584 - DNA, 120 bp, synthetic construct
  source 1..120: mol_type = other DNA
gaggaatgacacaggagctggcttgggctatatagtctctcactttgctgaacttccatttcctagtaagtaacttggatatgactgtgaagttattgcaaccattgtgtaaaatagtta

SEQ ID NO: 5585 - DNA, 120 bp, synthetic construct
  source 1..120: mol_type = other DNA
actcatccactgatgctaccttcgttttaacttcagttacagcctcctgctgtcccttgagttctttggggagtgttcttatttttaatttctctaatggaaactttggtcagtgttctc

SEQ ID NO: 5586 - DNA, 120 bp, synthetic construct
  source 1..120: mol_type = other DNA
ccctggctgtgacaaggacaggattctggcacagctagtctaagatcatgttttggggtccttgctcagagtgttgccttcattctcttttatttttttcccatttatttagtgaaaatg

SEQ ID NO: 5587 - DNA, 120 bp, synthetic construct
  source 1..120: mol_type = other DNA
tttataagaaacctgcaagctgctttccaaagagctgtaccgtcttgcattctcaacagtgatgcatgagcattcattatctttcattatgttctaggctctcacattgatcagaggcaa

SEQ ID NO: 5588 - DNA, 120 bp, synthetic construct
  source 1..120: mol_type = other DNA
agctaactgaatgttgacaccccaaagagagaaaaattggttggtgagttagtcactgcttttctcttggacagagccctcaatttaagtcatctggtaggcacaccagtcattgttggc

SEQ ID NO: 5589 - DNA, 120 bp, synthetic construct
  source 1..120: mol_type = other DNA
ctacttctttctacacagacacggcaaccatccgatttctcaatcttttccccacctttccccgctttctattccacaaaaccgccattgtcatcatggcccgttctcaatgagctgttg

SEQ ID NO: 5590 - DNA, 120 bp, synthetic construct
  source 1..120: mol_type = other DNA
agggagagggagagggagaggaccgtctgctttaaaaatgggaaatatcagtatttgaggcaatgaagtcaaaattgacctaatgagatgttgatacgattcttttcctgaagctttaat

SEQ ID NO: 5591 - DNA, 120 bp, synthetic construct
  source 1..120: mol_type = other DNA
gggttcctactcaagctatgccactgacttgctggctttgtgatctttagcaagtaactgtaattttctgagcattgctttctccatctgtaaataaggaattttgattacacatgcatc

SEQ ID NO: 5592 - DNA, 120 bp, synthetic construct
  source 1..120: mol_type = other DNA
tggcaaacagggatggatgattctttggcttttctgagttaaatgtctcagtgtccttggacaaggaagaagttaagtctcttttcaatcatgttctcagctttttctctcctctcttct

SEQ ID NO: 5593 - DNA, 120 bp, synthetic construct
  source 1..120: mol_type = other DNA
catgaatcaagttcatgtttgttatctcaaagtgctccccaccagcctttaattttgggggcctgctcaggtgctggactctgtcctccttgctttctgttcgttagtttttatcttgtt

SEQ ID NO: 5594 - DNA, 120 bp, synthetic construct
  source 1..120: mol_type = other DNA
agctgatcagtacagtcggagttctcaacctccattggagtgagtgcctgggctccactgtactaaaagcaagtagtcctcctctggaagggcgtatgcatatttccaggcattttggag

SEQ ID NO: 5595 - DNA, 120 bp, synthetic construct
  source 1..120: mol_type = other DNA
aaaaaaaaagaaatgatgctggttgttatcaagaagagcccttcccaaacacccagctaccttccaatgggcttttccttcccttcataacttgggtgttttcaagggtgaggaagttta

SEQ ID NO: 5596 - DNA, 120 bp, synthetic construct
  source 1..120: mol_type = other DNA
ctcactgtctctgttgtggacactggcctcacccacagctccatgcacacgcctagatgcagaaattttctgtattggttgtttatccatcaccaacttctaaagcagcagatgggaaaa

SEQ ID NO: 5597 - DNA, 120 bp, synthetic construct
  source 1..120: mol_type = other DNA
actggaactctcttacctcattctagactcttccaggcagctttctgtttgttctctaacagaaacatagaaacaaaccagcatcttttctaaacaaagagggacttttcacaggaagtt

SEQ ID NO: 5598 - DNA, 120 bp, synthetic construct
  source 1..120: mol_type = other DNA
ctccttggagtaccttgaatgtaccttcctattgctgttccctctgcccagagtcccgtgctctcctctccacattccttcactgctcattggcattcagggttgggcataaatattacc

SEQ ID NO: 5599 - DNA, 120 bp, synthetic construct
  source 1..120: mol_type = other DNA
aagctgagagttaagtagggttttgtaggtgtaacaataggcattttccttccagcagctcaaactgcagtgtgcttggcacgttagtgcaaaggaaaaaaactcacttcattcttaaga

SEQ ID NO: 5600 - DNA, 120 bp, synthetic construct
  source 1..120: mol_type = other DNA
aatgtgtttcctacagattttgtttgcctgcattgacttctttgtttagctctagtaaacagacatttagcatatacagatctgcacacttgacaaagaggaatttggagccctggacgg

SEQ ID NO: 5601 - DNA, 120 bp, synthetic construct
  source 1..120: mol_type = other DNA
gtccttctaggattcttttacggaaccaaagataatagtcccctttgataccacatacaagccagtcgtattccatgcctcggaatatgaacaaaaccagaccggcgatggcttaagcct

SEQ ID NO: 5602 - DNA, 120 bp, synthetic construct
  source 1..120: mol_type = other DNA
ctactttgcaaccctagtttcgtgatttggttaatggtgtttaagtggctgagccatgtatctggggtttttcagtgccgtcactattatttcttgttgagatttttgcacagtctcctt

SEQ ID NO: 5603 - DNA, 120 bp, synthetic construct
  source 1..120: mol_type = other DNA
aaacaaagacccttttagtttaaaccttcttggagacagcaattttgcaaagcagtaagaacctgggatttgaattatggtttagccacaagctagcttcctaagcactcagcttcctca

SEQ ID NO: 5604 - DNA, 120 bp, synthetic construct
  source 1..120: mol_type = other DNA
ttaaagtcatgacatactgtgcttttggctgctgctgtttctgactgatgaccccaatgagactccaaaaaattagatgggtgcgtttggaaggcattcagaaattactcattggaagaa

SEQ ID NO: 5605 - DNA, 120 bp, synthetic construct
  source 1..120: mol_type = other DNA
cactgacgttttaaaagtgaaatcagagagtgtttttggttttcttgaagctgcctttgacattttagcaacacagctgggagggtaaggtagaaaactccaagaagttggaattcaact

SEQ ID NO: 5606 - DNA, 120 bp, synthetic construct
  source 1..120: mol_type = other DNA
accctaagcagccactgttcttgctttctgtcgctctggattcgcttgtattttctggatttgcttgtattttctggatttgtctatagatggaatcatatagcaagtaccctttctcat

SEQ ID NO: 5607 - DNA, 120 bp, synthetic construct
  source 1..120: mol_type = other DNA
ctctttcctctccctcctcttttcttcttagcccttccacctatcactcattcattgccccttcctaggttctgtattcatttgctgggggctttaacaatgagacgttattttctccca

SEQ ID NO: 5608 - DNA, 120 bp, synthetic construct
  source 1..120: mol_type = other DNA
agtgcagtgcttatgatagaaagatgagctggatagttcttccccttgtgcagctcagcatcctgggggagagaaagtgggaagatccagttttctgatgaaagaagatggaaggaggag

SEQ ID NO: 5609 - DNA, 120 bp, synthetic construct
  source 1..120: mol_type = other DNA
gctctggtcagctgtcattcgtcctcccatctctcagcctttgtaggatagttgatacctgttttattcttttattgttattttaggggtctcagcatggaaatatattggtgtataagt

SEQ ID NO: 5610 - DNA, 120 bp, synthetic construct
  source 1..120: mol_type = other DNA
aatgtccctgctgtgaaccagtgatggagaaccaggctgctacttagctttgtagatggattcggtaaagactaaatctcttatttctaagacgtgatctcattgcacagacaacagcct

SEQ ID NO: 5611 - DNA, 120 bp, synthetic construct
  source 1..120: mol_type = other DNA
ggggcacatctcagggcctttcagagctgataaggggcctggcctgctttcagttttttggttttgttttgaggcttccagttcattaaaacaattaaaatgccctaagaaagctataaa

SEQ ID NO: 5612 - DNA, 120 bp, synthetic construct
  source 1..120: mol_type = other DNA
ccttcaaagcctaaattggggataactctggcaagagaatgtttcaaggttcatctttgtgtccccagagcctggcatgtcatagggagatagaaagtatctgttgaatgagcaagagca

SEQ ID NO: 5613 - DNA, 120 bp, synthetic construct
  source 1..120: mol_type = other DNA
ttaacaagatattttacattcctttttctatgctaagcagttacaatccagtttatcttacctcagagcacctctgaactcccaccagccacatctcaagtgctcctcagcttctgtgtc

SEQ ID NO: 5614 - DNA, 120 bp, synthetic construct
  source 1..120: mol_type = other DNA
ctcatattagatgctgcatgtggaagtacagagcaaagtaccccacaaatccagggggttattctttctattaaccccactgtgaatgttttactttcatttttattaaccccactgtga

SEQ ID NO: 5615 - DNA, 120 bp, synthetic construct
  source 1..120: mol_type = other DNA
tttatctgtttgggatcaaaggctcagtgtgtataacaagcttctggtaaaactctttttcttgtccgtaagatggcattggtgatgactctgggcagttgtgaggatgaaatgtaaggt

SEQ ID NO: 5616 - DNA, 120 bp, synthetic construct
  source 1..120: mol_type = other DNA
tttctcttcttttttttcttgtagaaattatatttccatctctggggcttagctcaactgatatctcacctcttaaattgttttggccttcctctggcaaagtccagccccccacccact

SEQ ID NO: 5617 - DNA, 120 bp, synthetic construct
  source 1..120: mol_type = other DNA
ttcccagagagcctgcacaagagggctgagtctgtttatttttcaagatttcaaaaaacatgccttttccccctctgaccttaagcaaaacttttttttccctccaacacttgtattttt

SEQ ID NO: 5618 - DNA, 120 bp, synthetic construct
  source 1..120: mol_type = other DNA
ttctttggtttttcagtttgtataaccatgttctttgttcagctcctatcagggttagggaggtcaaacacctatgtgtcaggatacgcctgacacacactatttaaaactcacactgtt

SEQ ID NO: 5619 - DNA, 120 bp, synthetic construct
  source 1..120: mol_type = other DNA
tgttattctggttcagtctcatttcttctctcggacttttgcaatagcccctaaaatgctgtcctcctggttttgctgacatcgtgacgattttaaagctgcatctgaccatttcctttt

SEQ ID NO: 5620 - DNA, 120 bp, synthetic construct
  source 1..120: mol_type = other DNA
ctcttcttcctcctcatcctcttcctgatcctcctccttatcctcatcctcctccttcttctcttcttcctcttcatcctcttcctcatcctcctccttatcctcatcctcctccttctt

SEQ ID NO: 5621 - DNA, 120 bp, synthetic construct
  source 1..120: mol_type = other DNA
ttcagataatttaaaaaaacccaataccctaaacctccccaaacctaattctcaccctcagggcctaagtacatttgaaattgcacacaaacttaaggttgctgtgtgctagatgggatg

SEQ ID NO: 5622 - DNA, 120 bp, synthetic construct
  source 1..120: mol_type = other DNA
gtctggagtaggaacaatactctattgttacgttaaacctgaaatagacgccttcagatggagggggtgagtatgaatctattacgatctaataatgacaagagcactctgtgtcttttc

SEQ ID NO: 5623 - DNA, 120 bp, synthetic construct
  source 1..120: mol_type = other DNA
gacatataatttctagaacttctgaggttctaggacaggggccagcaaactgtgacccttaggccagttctatttttacaaataaagttctttagttcttttggaacagagccatgccta

SEQ ID NO: 5624 - DNA, 120 bp, synthetic construct
  source 1..120: mol_type = other DNA
aaacccatcaggatgatttgggcttcaagaaataaggcttgattacaaatggtttaaacaatagcaaatgtttatcatcccacattagaagaagtctggagctaggtggccccaggacga

SEQ ID NO: 5625 - DNA, 120 bp, synthetic construct
  source 1..120: mol_type = other DNA
ctctgatgagcgtctctcatggctttggcatattatggagtttttcctcctaaaatcagttttgcggccctcatagaacaacccttgaggggggttgtatatataatctttattttctag

SEQ ID NO: 5626 - DNA, 120 bp, synthetic construct
  source 1..120: mol_type = other DNA
agactaagcagacttctgggttgaactcaatggaaacttcttgttctaaccttatgatctctgagcagcatttgaaattgactcactgtctttgcttgaaattcatttattgctggggct

SEQ ID NO: 5627 - DNA, 120 bp, synthetic construct
  source 1..120: mol_type = other DNA
catatctctcttgatgccattgactctgccagggtgttctcggcatctcaaacttagcattttcgataggttttattgctagtgttgtttttgttctctctgaatgtgctctgccttttc

SEQ ID NO: 5628 - DNA, 120 bp, synthetic construct
  source 1..120: mol_type = other DNA
ctttcataccaggagagacagtaaaatcctgggtttcctttgtggagccttaagttcatctaactcagtagtttccaaacttgcttaaatgtcttagaaacctgttgtgcctcactttag

SEQ ID NO: 5629 - DNA, 120 bp, synthetic construct
  source 1..120: mol_type = other DNA
ctttgggagatgatctcacctgcctttcatttccaagagatcagtagcacttgtattttaagaggtgagtccttctatgaatatcttgaccttgaggtttacaaaggacttccagaccat

SEQ ID NO: 5630 - DNA, 120 bp, synthetic construct
  source 1..120: mol_type = other DNA
cacttaatgaaatctttctgcttttgtagtgccaggtggtacaagcagagttgcactttctgctgaggagacttgatttcttatgaaaataccaagcaatgaaggaacgctgcatttcta

SEQ ID NO: 5631 - DNA, 120 bp, synthetic construct
  source 1..120: mol_type = other DNA
cttgttattacagttcaactggctggggtttgtcaggcctcaagccagcctacctggtggtttcaaaccagacttaatcaaaatgtaaatacttcttggggccagaaagcaggactgtcc

SEQ ID NO: 5632 - DNA, 120 bp, synthetic construct
  source 1..120: mol_type = other DNA
ggaggcatttggacttgattctaaacctgttgggaagtcattagaggatttcaaatgagagaattccatgagttgctttgggtttgcataactctggctgctgggtggagatagtttgaa

SEQ ID NO: 5633 - DNA, 120 bp, synthetic construct
  source 1..120: mol_type = other DNA
tcttccctacctgtttttctttcatctctcccttccctctctcctctcccaccccctcccttctcttctttccatctctccctgcagtttttcttttgctgacacctgtttctgaaaaat

SEQ ID NO: 5634 - DNA, 120 bp, synthetic construct
  source 1..120: mol_type = other DNA
tcatttgagaggtaaaaacctggaagacctaacctacgtgtctctcaacaggagagtggatggaggaattattttgacaaaacctgtgggtatgcaggtttaaagaaattttgttcccat

SEQ ID NO: 5635 - DNA, 120 bp, synthetic construct
  source 1..120: mol_type = other DNA
atgtgcgcttcttctaggattttctgaaacttggtcaggggctcctggatcatgattgcagattgagagccactgagccattccaggtcctgttttctgatgtgaaatggaagcccagag

SEQ ID NO: 5636 - DNA, 120 bp, synthetic construct
  source 1..120: mol_type = other DNA
cctttctgcatacacactggattttgaattctgaggggtaacaacctcatcttgccaacagagccctccttggccatttcacaattcaagaagcattttctaggaagccttttaaagccc

SEQ ID NO: 5637 - DNA, 120 bp, synthetic construct
  source 1..120: mol_type = other DNA
atctacaaaatgggtgtcatgctgcagccctgccgaaattgtgtgctcatggtagaagtgactgggaagaactctgcgtgtggcaagggctctcgctgctgcttcggtacagtcatctgt

SEQ ID NO: 5638 - DNA, 120 bp, synthetic construct
  source 1..120: mol_type = other DNA
cagctcacatttactgagtgctaaccacaatctcactttggccctagcagccttcttaagagggtggtgtttccccattttacgcttgaacaatctgaagctcagagagggtaagcagct

SEQ ID NO: 5639 - DNA, 120 bp, synthetic construct
  source 1..120: mol_type = other DNA
actttttttttccagttctgctacttcttgggaaaagacatttttaagaagatcaatagtgttgcaagaggactaggggtctgctttctcctaagagatgtagagggatagagggaaaag

SEQ ID NO: 5640 - DNA, 120 bp, synthetic construct
  source 1..120: mol_type = other DNA
aaaaagagtgagtagaggattttccttcctagtgacagaaatgttttaaatgttttggaattaaacggaggtggtggaagctcaacactgtgagtgtactgaatgctactgaattgttca

SEQ ID NO: 5641 - DNA, 120 bp, synthetic construct
  source 1..120: mol_type = other DNA
aatttcatttcaataaatgattattttttaatggcgatcagggtcagcctcatggagaacgtgagagctgtgcaaaagctgcaaggaggccaaacctgttaacccaaggctgttttctcc

SEQ ID NO: 5642 - DNA, 120 bp, synthetic construct
  source 1..120: mol_type = other DNA
gctacatttagtggcacctatgaggtgctaggtattttgcatatggtgctaatccttaacagagcaatgccaggtgggtagcagtgtctcagtttgcaggagaaaacacggagggactta

SEQ ID NO: 5643 - DNA, 120 bp, synthetic construct
  source 1..120: mol_type = other DNA
aagccccatctcgagagattctgggtcacaggtattttggcagcccttcatgttttcttctaaacctctcaatctggggatagttactgggagcagtctcctcctgacgccactagacct

SEQ ID NO: 5644 - DNA, 120 bp, synthetic construct
  source 1..120: mol_type = other DNA
ttttcagggctttccttcctccccctccaaattcatagtcgaaagaccccgcttcatgacatagtttgggtttctaacaaatgtggtcccctgcattagcataatgctgacttttctgaa

SEQ ID NO: 5645 - DNA, 120 bp, synthetic construct
  source 1..120: mol_type = other DNA
acagattcagggattcccctgaagctctcaggttggataattcgctagactccctcgcagaacccagtgcagcgctacactgacaattacagttctattgttgcaaaaagatacccaaac

SEQ ID NO: 5646 - DNA, 120 bp, synthetic construct
  source 1..120: mol_type = other DNA
gaggaatatttttcagtcaacttttccaagcgtgtgtgtgtctcttcaggtcctttttagaagacgtagacagggcagaaataacaagtcagagaggaagaaattcctagaaagagtggt

SEQ ID NO: 5647 - DNA, 120 bp, synthetic construct
  source 1..120: mol_type = other DNA
ctttcctttctgggactctatttctgaatctgtcaaacgggttcaatactaggacctacgtcacgggggtgatgtgaggattgaactagatgacatgttactggtgcaaattccctgact

SEQ ID NO: 5648 - DNA, 120 bp, synthetic construct
  source 1..120: mol_type = other DNA
gtgctcagcccagaaggctggcagggagggaggttgtcatttattcctgcaagcattcatgcctttacccagtcagccaagtaacttaatggaagcttgcaattaaacaagaattagctg

SEQ ID NO: 5649 - DNA, 120 bp, synthetic construct
  source 1..120: mol_type = other DNA
agaggttgaatgagtccatgaaaatgtgctgcatgcgttgagagaatggatctgtaagctgatgtgcagttcaacacagagacagacagactgaccgaccagtgcttcctacacacttcc

SEQ ID NO: 5650 - DNA, 120 bp, synthetic construct
  source 1..120: mol_type = other DNA
ccacagctgccccatcactaacagatctcccccaacccctgttcttttcctaaatgttggtaaaatggtcattaagtaaagcagcattttttccacatccctacccttgacttacttttt

SEQ ID NO: 5651 - DNA, 120 bp, synthetic construct
  source 1..120: mol_type = other DNA
atattggttgaacgaatcagtgaacctatgttaactttcttaatgaataaatctataagtgtgcatgtataaaatagactcctgggttccatagactggctgcctgagagtcacctgggg

SEQ ID NO: 5652 - DNA, 120 bp, synthetic construct
  source 1..120: mol_type = other DNA
gttatgcatattttgccatatgcaaaaaatggtgcttcatgcctgccaggtctgagaatcagtagtgtgcgagaggaatggggagcaggggatggacccgtcgagttctaacgaccctcc

SEQ ID NO: 5653 - DNA, 120 bp, synthetic construct
  source 1..120: mol_type = other DNA
tatatgtacatgaaatgtgtgtgcacttgtgtgtgtggcccccgttggcagaaagagtgagcgtggcatgggtgatttcttcctcaaagagtcattctgaggattaaacaagataatgta

SEQ ID NO: 5654 - DNA, 120 bp, synthetic construct
  source 1..120: mol_type = other DNA
agtgcaaggatgacgggaacacctgtgtgcgcctcatgtggttctgcacgttacacgtgactgttcattacatgtgttcattactagtgcacattcattgtgcgtgtgcatgttcatcat

SEQ ID NO: 5655 - DNA, 120 bp, synthetic construct
  source 1..120: mol_type = other DNA
gacctttttgctaatcaacataaacaggcaaccagtattcattgaatatatggcatgtgccgggcagagtgacctcctcccagttatcctttgaggcaggtgctattatttaatatttca

SEQ ID NO: 5656 - DNA, 120 bp, synthetic construct
  source 1..120: mol_type = other DNA
ccgcttattattgtcagaggtcatggacgtgctgaacacgtttaagaagactcaagtccactgaaggctgggcacggggtggtgctgcccagaactccataggcccagcttttctgggga

SEQ ID NO: 5657 - DNA, 120 bp, synthetic construct
  source 1..120: mol_type = other DNA
tagccatttcctcatgggggaccattttgttcttcatgctaattttggctcagagagaatagggcctgttgtgggactggggaggagaccttagttgccatggttgcaactcacccatgt

SEQ ID NO: 5658 - DNA, 120 bp, synthetic construct
  source 1..120: mol_type = other DNA
tttctcaaaaatataaaagatgaaaatatgaaatataggatttatggttccagacaagagggagtagatgcggtgtttcctgtccttcccgctaaggacagtcaaaaaccctggacatta

SEQ ID NO: 5659 - DNA, 120 bp, synthetic construct
  source 1..120: mol_type = other DNA
gttacctccaaataacgtcacgctgggggttaggtttcaacatgtgtgttgcagggaggatgcggacattcagtccatagtctaggactaggttcagtgccaacctattcctagattcaa

SEQ ID NO: 5660 - DNA, 120 bp, synthetic construct
  source 1..120: mol_type = other DNA
tctgctggggtcctgctggaaggctttttaaaataaaattctcatttctttcctagaccaatacacaaaccaaacagtggccaataccgcatttatttttcttgtggacacatgagctca

SEQ ID NO: 5661 - DNA, 120 bp, synthetic construct
  source 1..120: mol_type = other DNA
tacattcataattgaaggaagtgcaaattttcagttagaggttggtgaaaagaaagatgacatttttctccaccccagtccatggactctctaaatcctatccatggtccttttggcagt

SEQ ID NO: 5662 - DNA, 120 bp, synthetic construct
  source 1..120: mol_type = other DNA
gcagggagactacttaggtgctcaaaggggtggacgtttctgtctctcttgtatcttgtaagtgtgtgcagcgagttcctctgcttattcaatgcatgtttagtgagcactgaaaacatg

SEQ ID NO: 5663 - DNA, 120 bp, synthetic construct
  source 1..120: mol_type = other DNA
ttagagagcccaaatcaaagaatttcttaggatgtccgaaacttggaaggctggaatgtcatcacgaagataaaagattgttgaggtctgcaaatatttctcagtgacgcagaaaggtct

SEQ ID NO: 5664 - DNA, 120 bp, synthetic construct
  source 1..120: mol_type = other DNA
tgtcactgtcatcaagatgaagtggtggtgctgctgctgccagccctgtgactttgagcaagtagcttactttctctagtttgcagtttatttgtgtataaactggagacactaacacca

SEQ ID NO: 5665 - DNA, 120 bp, synthetic construct
  source 1..120: mol_type = other DNA
aaaaagaatgaattggcatgttctttgtctaattaaaaatcaaatgaataaagaccaaataccctgcctgattccacagtggggcagagggaatggtgacactgtttccccctttccttg

SEQ ID NO: 5666 - DNA, 120 bp, synthetic construct
  source 1..120: mol_type = other DNA
ttatatttgggcttccgtgtcagatttcattctagggctaaatttgagtttgaaacgcactgttctaggccaggtctcccatttccagataagtgaactgagtcccagagaaacaaggtc

SEQ ID NO: 5667 - DNA, 120 bp, synthetic construct
  source 1..120: mol_type = other DNA
aaatcttcataaatgtgatgtacatttttccatttgatgcatatttagtgagtgtcaggcatggtggatacatcagtgagcaaagtgcaaaacttcccatctcatgggctgccctcctgc

SEQ ID NO: 5668 - DNA, 120 bp, synthetic construct
  source 1..120: mol_type = other DNA
ttctgaacaccccagagctagtacccgaaaggcaggagtggggggttgcagggaagaaaagccatgggttgtaggatatttggggccaatataaacttccaaattcaaaaacaaaaacta

SEQ ID NO: 5669 - DNA, 120 bp, synthetic construct
  source 1..120: mol_type = other DNA
gggaaaataaaaactgccaatgagataaggataaacactgttaacactttggtctgttgcccttttgtagtttgttctgcttctagggagagaattgtaccagcctcgactatcatcttc

SEQ ID NO: 5670 - DNA, 120 bp, synthetic construct
  source 1..120: mol_type = other DNA
tgagtgtctaccctgtaccaggcacttgtagaatcttgtttagatattttgttctcccctggagatggaaaaacactcaatcttcccaagtgttagactgattgctgatgggtcttattt

SEQ ID NO: 5671 - DNA, 120 bp, synthetic construct
  source 1..120: mol_type = other DNA
acggagacagcagtgaggaacatgagctccagtgtcagagggacctggttttcatccaggctctattccttactggttgtgactttgagcaagtgattagatttccctgaacctcagttt

SEQ ID NO: 5672 - DNA, 120 bp, synthetic construct
  source 1..120: mol_type = other DNA
acacttttgggtcagcaggttcagcgttatccaaccagcaaacatttcctggatgcttactgtgggccaggcaccaggctatgtgctttgcagacacacactcgtccaatcactacaaag

SEQ ID NO: 5673 - DNA, 120 bp, synthetic construct
  source 1..120: mol_type = other DNA
catgaatgtcacactggctgtctctttgcctgtgctgtgcgtggggccgtctagcccgagagatcagctcaggcatattccaggtgcggcttatgttggtgagaagttctcataacctga

SEQ ID NO: 5674 - DNA, 120 bp, synthetic construct
  source 1..120: mol_type = other DNA
actggtgcagtagcctcttctttggtcctctgtttctagctggtatcttttttcttccttcccatttattatgactttcttgcttgctgttcttaacactcagaagattcttgacttctc

SEQ ID NO: 5675 - DNA, 120 bp, synthetic construct
  source 1..120: mol_type = other DNA
catttgcttcagttatttactgaccatgatctcctaggtcagatttatcatttactgggtcaggaaagaaaaagccccatggggccaggtttatagagattaaatccactcatgccgaag

SEQ ID NO: 5676 - DNA, 120 bp, synthetic construct
  source 1..120: mol_type = other DNA
tctgttgcctctcggccttccacaagagtctgcagggattctctcttattgatgggacacagattgtcctcagccaggccttcatgaaacaccacagtatttcatgtatgtgtgtgtgtg

SEQ ID NO: 5677 - DNA, 120 bp, synthetic construct
  source 1..120: mol_type = other DNA
cctcttttgctgtttgtttcctgttctttgtcttttatggaacaattgaacatgtgcctttattggaagatgctgtggatcgttttgggaagtaagcaggcaatgaataagtcagtgcgt

SEQ ID NO: 5678 - DNA, 120 bp, synthetic construct
  source 1..120: mol_type = other DNA
ccttggaagcaggcatgggttcagttccttgcccctccacttactcattagatgtccttgggcaagccctcacgcctttggaggcagttacccgcctgtactgtgggacaaataaataac

SEQ ID NO: 5679 - DNA, 120 bp, synthetic construct
  source 1..120: mol_type = other DNA
aattttccatcaaaacttttccattgctcaaaagtgtctctgacaccgaggctggatcctgcagcatctttgtcacagctcacattttatttggaatctggtgttttcagaatgtcacca

SEQ ID NO: 5680 - DNA, 120 bp, synthetic construct
  source 1..120: mol_type = other DNA
gatggactaagacactattataggtggtaggtaaaaaccatgacagcagctcatgaatgactggtatctggaaaaaataagttcaggtgtattttgtgttgattggttgccaggggcttt

SEQ ID NO: 5681 - DNA, 120 bp, synthetic construct
  source 1..120: mol_type = other DNA
ttgttccaaagaagtagaaaaagataagagggaaagggtaaaagtacatatctcccaatgtgtgagccccttgaaggagcttttctggaagggaaagctaacaagttattcttgcatctc

SEQ ID NO: 5682 - DNA, 120 bp, synthetic construct
  source 1..120: mol_type = other DNA
ctaattacagtaggctcaatacttaccattgaaacaggtcctggagagcctctccttggcaacactgttagacattctgttcttgaaatagaaagtccatattctttggtgaaagctcta

SEQ ID NO: 5683 - DNA, 120 bp, synthetic construct
  source 1..120: mol_type = other DNA
acaaggtcttgctctgtcactcaggctggagtgcagtggcgcaatcatgcctcactgcagcctcgaccttccaggctcaattgaccctcccacctcagcctcctgagtatctggggctac

SEQ ID NO: 5684 - DNA, 120 bp, synthetic construct
  source 1..120: mol_type = other DNA
ggcttgctgggtcatgtggtagttctgttttccaatgtggaaaatattaaaaggtataacccacataaataaaagctcctggctaggtgtggtggctcacgcctgttatcccagcacttt

SEQ ID NO: 5685 - DNA, 120 bp, synthetic construct
  source 1..120: mol_type = other DNA
gactttatagaatcagtctctagtcccagaattttatgtttttaccatgttcgtggctcatgctttcttgatttctggcatcctgtctgatttctgagtttgggctagctagagtcttgt

SEQ ID NO: 5686 - DNA, 120 bp, synthetic construct
  source 1..120: mol_type = other DNA
gatgccttgccctatcaaagtaatgaaagtgatctggaaatggtgttttttctcattttaatgacagagcagggctgggtaaggaataactgtaagtgcagatgaagcttgtttatgctc

SEQ ID NO: 5687 - DNA, 120 bp, synthetic construct
  source 1..120: mol_type = other DNA
ccccattttagagaccaggaaactaaggcccagggattcctcagaggtcaccaagcttgtaaatggcagcactgagcctcaagccttgctctttggatcatccactttgtattagtctgc

SEQ ID NO: 5688 - DNA, 120 bp, synthetic construct
  source 1..120: mol_type = other DNA
gtaatttttgttaagatgaactaagttgggactgcatctcacacagtggcctttgtataaattcgcttgccttcctcatccggtatctgtcccctctttggttcacaccctggatgcagg

SEQ ID NO: 5689 - DNA, 120 bp, synthetic construct
  source 1..120: mol_type = other DNA
gtagaacttcctgtttctcatgtttcctctctgtagaccacagtgcccagccctgccccaaagcagagccagagcttgtgtccatttcttgggtgtgtagtgtgcctttggcttctcttt

SEQ ID NO: 5690 - DNA, 120 bp, synthetic construct
  source 1..120: mol_type = other DNA
tgttctctgcactggggcacacaaccatggataagacagaccaggacttgtgctccaattctatgttgaaggtgagggaagaagttaattaagcaatcagccaagcggatttcaaaggac

SEQ ID NO: 5691 - DNA, 120 bp, synthetic construct
  source 1..120: mol_type = other DNA
aaatgtgattcctaatgtgttgcctcgagttcctggaaccagggtgtttgttttatgtaatagacagcagagaccattctgttgacttcagagccttcctgcatctaaactataactctt

SEQ ID NO: 5692 - DNA, 120 bp, synthetic construct
  source 1..120: mol_type = other DNA
tctagataggtcatactattattatttctattctaggaccagggaagtaaatctgagaaaaggtcatgcagctagtacgtggttgtagaaggcagagtataggttcagctgctgtagcaa

SEQ ID NO: 5693 - DNA, 120 bp, synthetic construct
  source 1..120: mol_type = other DNA
actgcatatgaggagtttaaagtttgcctgtctctgtgactgtattttctgagcaaagcttttctccatgcaggtgcgcagaaggaaaaataagtaagcataagaggttccagtttggaa

SEQ ID NO: 5694 - DNA, 120 bp, synthetic construct
  source 1..120: mol_type = other DNA
agataaaaatgaaaatgcatgaggcatgttgcttttttccccctcttgatgattaaaaaacgtctacttggctctctgcagagacagcccttgaagatttatatgaaacacctgtgtggc

SEQ ID NO: 5695 - DNA, 120 bp, synthetic construct
  source 1..120: mol_type = other DNA
ttaaggagcaacggatttgttttgacaaaaggagtgtaaacaggatcctggtgaatagctttctcatggctgctcctgctttcatcaattgcatatttattggtgacctcataagtgtcc

SEQ ID NO: 5696 - DNA, 120 bp, synthetic construct
  source 1..120: mol_type = other DNA
atcggagctgtatctaagactctaagagcacagaataattgctttcaaacatttgtcctctacatcccaagaatgacagccaaagggcagtataacagaaagacaggcttggtctcaaaa

SEQ ID NO: 5697 - DNA, 120 bp, synthetic construct
  source 1..120: mol_type = other DNA
tcacagccccactgtgaagctaccgaaatgggaggcatttaagccccccttgttcatcagccctattttgtaaaaggggaaaccaaggtccagagagaagaatgatgggtcagaggtcat

SEQ ID NO: 5698 - DNA, 120 bp, synthetic construct
  source 1..120: mol_type = other DNA
gtctggcagtcacagttctttgctttccaggctcttcctgatctcagtgattttgcagctgtgcttttaggagagctgttttcccctcatttgtaaaaactcaaaaatatggaaaaatag

SEQ ID NO: 5699 - DNA, 120 bp, synthetic construct
  source 1..120: mol_type = other DNA
gcagggcttggtttgggtgtgtttgtgtgacacaccatatgtcattttttattcacacaaaaacatctttcttgaagtaatagaaggccactcagctgttgctaaccacataccaaatgt

SEQ ID NO: 5700 - DNA, 120 bp, synthetic construct
  source 1..120: mol_type = other DNA
tgaaaacagtgacagcatttatttatcttaactatcaatatcattcctgtttctcagtccgctgggggtatgagtcttgaaggaattgactgggttatgagatttgaacctcgggcatgt

SEQ ID NO: 5701 - DNA, 120 bp, synthetic construct
  source 1..120: mol_type = other DNA
agaagttctttaatagtactgccccatcttgctgtggtgtcctgacagtgtagcactttactgcaaagcctttgcatataggttttcattttgagtcttccagatactcattatatctga

SEQ ID NO: 5702 - DNA, 120 bp, synthetic construct
  source 1..120: mol_type = other DNA
ggaacaggtgataaagcagttggctgttgtcagactcacgtggaaagttgggaacaatggagatttacaaaagtatcagtccgtgatggattggaaatttaaaaaactggttcttttcca

SEQ ID NO: 5703 - DNA, 120 bp, synthetic construct
  source 1..120: mol_type = other DNA
gagatcaggaatccctattgaggttggatggaaacagtttttggaatcctggttgaaactgacctccaaggttgatcttggaatctggtctaagtccctgtaatcatctgcatttgtgaa

SEQ ID NO: 5704 - DNA, 120 bp, synthetic construct
  source 1..120: mol_type = other DNA
attgacttatgcagttttgttacatagacattgttatgtggcttctctttccagtgttatccatgaatgtgcctccctctcacactggccagtgagcaaactgctaaggacaaggactaa

SEQ ID NO: 5705 - DNA, 120 bp, synthetic construct
  source 1..120: mol_type = other DNA
tccccacgtgttgagttcaagaagatacccttaacatcaaaggaaacttctagtatcaaaaagcaggagacctcagaagagagtttgttgagtgaatgaaggacccaaaatagcaaagtt

SEQ ID NO: 5706 - DNA, 120 bp, synthetic construct
  source 1..120: mol_type = other DNA
actttgatttgcgcctcctcctgtcaccttgatcattcccaaattcgtattcttccttctgtggcctccttatccatttctataggaactgtaaatgttgcactagggatgattttgttt

SEQ ID NO: 5707 - DNA, 120 bp, synthetic construct
  source 1..120: mol_type = other DNA
tccatgctgatccaaatactcactcgggagagaatgaaacgttttagagtgccttcttcaacatacgctacttagaccgggcgaattcctcccaaaaaaaccttgccctcaggtaggtta

SEQ ID NO: 5708 - DNA, 120 bp, synthetic construct
  source 1..120: mol_type = other DNA
aacagaccaaattatcacatccataacgatgagaaatggggtttattaatgtgccagcatctggtctgagtggtttctatgtattgtcttattcattcttcgggacggtcctaggagtta

SEQ ID NO: 5709 - DNA, 120 bp, synthetic construct
  source 1..120: mol_type = other DNA
ctaaacaaggagaatgtgttgtctcataaatcagcttttcagatatggtttgagctacaggcatggtttgatccagagattcatgacatcaccagggcaccaactctacttcttctaatt

SEQ ID NO: 5710 - DNA, 120 bp, synthetic construct
  source 1..120: mol_type = other DNA
tctcatgggttagaagactgaggaataaactcactgcttacaaaactcccactacagactttgattaggaatgcaaaattgtctgaggatctaaacacatgggtgaccttgggtgacctt

SEQ ID NO: 5711 - DNA, 120 bp, synthetic construct
  source 1..120: mol_type = other DNA
aggcacccttcaccccacctttatgaacccacaattatgaactcatggccaatcttctttcatccattcctccatcctttactctgtaacactttgtagcaattttcacatattatctca

SEQ ID NO: 5712 - DNA, 120 bp, synthetic construct
  source 1..120: mol_type = other DNA
ttcgacttcctcagtggtttcatgttcttccatcaggggacatacaccatctggttgtctttctttttgaaatggtagcagctattgctagtctgtacctgaatctgttaattaacaagg

SEQ ID NO: 5713 - DNA, 120 bp, synthetic construct
  source 1..120: mol_type = other DNA
aggtgtttaacccctcgtgtacttcgtgtcttcatctgtaagtggggatatagctgtatctgatgatgggcgaggtgttaggtagagactacatgagttcttaccgctcacaaccatgtc

SEQ ID NO: 5714 - DNA, 120 bp, synthetic construct
  source 1..120: mol_type = other DNA
gaagtggttggatttgagacttgtgtggaaggtgtattctctgatggattggggatgagagaagagttaaggaagacttcaaagttttgacctgaacaaatggaaagatggagtaaggat

SEQ ID NO: 5715 - DNA, 120 bp, synthetic construct
  source 1..120: mol_type = other DNA
gcagagtgaggctaagcctaggagtcggtggaattttccagccacgtgttttgttagacacttacagtcagtttgaaaaggggggaaaaaaatccaatggatgcccattttcattctggt

SEQ ID NO: 5716 - DNA, 120 bp, synthetic construct
  source 1..120: mol_type = other DNA
gccttctgtgcagtcttaatgtccacatttctcaagtcaagtggaaggctgcagctgttttttaatgacggcccaggtgattttctgggcagcagaactgtttgcgcgtcatttactaga

SEQ ID NO: 5717 - DNA, 120 bp, synthetic construct
  source 1..120: mol_type = other DNA
caacaccagctacaagttaaaatatttgttcagtattagctttgggttttttgttgttgttcttttttgagacagagtctcactcttttgcccaggctgcagtacagtggtgtgacctca

SEQ ID NO: 5718 - DNA, 120 bp, synthetic construct
  source 1..120: mol_type = other DNA
tgaaattttattgtgaaatgatccactctgcctcactgggggctaagtattctgcttctcttgtttatgagaatccagtatttgtctttgtctttctctcactggtgtgatcccccaaaa

SEQ ID NO: 5719 - DNA, 120 bp, synthetic construct
  source 1..120: mol_type = other DNA
attgttttcacttagaacaaaaagagtaatggggaaagttaaagacctttcctggtagcctttagatccttggttggatgcagagacagagaaacaattctgagagggaaggaggaaaag

SEQ ID NO: 5720 - DNA, 120 bp, synthetic construct
  source 1..120: mol_type = other DNA
tcaggaaatctggagttgctcctaccactttcattctccacccaatgtggacaggagtccattcttccctcccttctcaggttccatcccatctattgccctaagttgggccagtgaatc

SEQ ID NO: 5721 - DNA, 120 bp, synthetic construct
  source 1..120: mol_type = other DNA
taagatgcacatagatgtttccactctttggaaggcacagatgtagaaataattctttgttccttaagctcaatgtaatagtctgcattttgtgttagagcagcatctccccgcaaaggc

SEQ ID NO: 5722 - DNA, 120 bp, synthetic construct
  source 1..120: mol_type = other DNA
gttatttttttaacgtgggttttagtacccacagcaagagtatttttagctggttattgaggctgattagtgagccccaggcctccatttggttaaatagagccaccttcacagatgtat

SEQ ID NO: 5723 - DNA, 120 bp, synthetic construct
  source 1..120: mol_type = other DNA
tgtgtgtgtgggcgtgtgtgtgggtgtgtatctgtgtgtctgtgtgggcacgtgggtgtgtgtatctgtgtgtctgtgtgtgggcatgtgggtgtgtgggtgtgtgtgggtgtcggtgtg

SEQ ID NO: 5724 - DNA, 120 bp, synthetic construct
  source 1..120: mol_type = other DNA
aggctgacaaatccttgggtggtggattttgaaatggttataaacaatttgcaattagctcttttgtctaaatgagaaagggccgcttactcaggctttttattgactcgaggcccttta

SEQ ID NO: 5725 - DNA, 120 bp, synthetic construct
  source 1..120: mol_type = other DNA
ttattgtttatccttgcaaggtgtaataatcacaatggcggtaactatagcaactgtttattattatttatgatgggccaggccccaggccaagagcttgatcacttccgtctgtataat

SEQ ID NO: 5726 - DNA, 120 bp, synthetic construct
  source 1..120: mol_type = other DNA
tagttgaagcatcggggtaccattgtcctcagggtccagcagcctcggttctccaagatctgcttcctcttgactcaccttcacagaagtgtgttctcaacccatttagtgttctagtgt

SEQ ID NO: 5727 - DNA, 120 bp, synthetic construct
  source 1..120: mol_type = other DNA
tgcacttctctttctgtgaactgcaaacacccccagcccttttgcacttttcagaaatgacagaatttatgtttataaaacacttctaggcatagaatagggctagtttgctctggacaa

SEQ ID NO: 5728 - DNA, 120 bp, synthetic construct
  source 1..120: mol_type = other DNA
tttcccttaagttctcctcaatttaaaaaatttaagccacaccatatgttacggccagggaggcctccaggggaggtggttgatccatgccttgggtcagctgtttccctacaataaact

SEQ ID NO: 5729 - DNA, 120 bp, synthetic construct
  source 1..120: mol_type = other DNA
agatacttgtaattggcagaattgtgggggagggaagtgctcctagcatctgatgcgtagaggccatggatgccgttgaacattctagagtgcacatggcagcttcctacccagagttac

SEQ ID NO: 5730 - DNA, 120 bp, synthetic construct
  source 1..120: mol_type = other DNA
tcttaaaattgctggaagccaggatagaaagcccctgcctaagcaatgcctatgccttgagctccgttctccctcaccacggaggacgccctacaaacccgtgcctgaagtttttatctc

SEQ ID NO: 5731 - DNA, 120 bp, synthetic construct
  source 1..120: mol_type = other DNA
caggagaggggagggtcactccgagctgaggtggcccaggaaatgttcccattgtaataataataataagtgaaaacagaattatatttcatccagcattacagatgactttttgaaata

SEQ ID NO: 5732 - DNA, 120 bp, synthetic construct
  source 1..120: mol_type = other DNA
ttctatggttttaaaaagattcaaaatcttataaccatcactgctttctgattccagggcattttatcaccccaagaagaaactgttgtacctgttagcagtcactccctgttccccttt

SEQ ID NO: 5733 - DNA, 120 bp, synthetic construct
  source 1..120: mol_type = other DNA
gtttttcgttttgatgacattcagccttcatttttgttacttgtttttaaataacttgttttcattttgtcttacctgtccttgtaagaaggcctcagtttttgaagggaaagggtgtgt

SEQ ID NO: 5734 - DNA, 120 bp, synthetic construct
  source 1..120: mol_type = other DNA
ccacacaaacgaaatctattcgtagtgcttgttgggctctctggaaaacatccacattttataaagtcaagagcttgaatgaaaggaaataataacgactccaaattccctcctctggct

SEQ ID NO: 5735 - DNA, 120 bp, synthetic construct
  source 1..120: mol_type = other DNA
ttttcaccgagtgattcaatattatctaattgtgtccctgtacttcctaagacctctcatcatctttagaagatgctgggctaactctctgcttcctagctatgatgcgttatggaaatg

SEQ ID NO: 5736 - DNA, 120 bp, synthetic construct
  source 1..120: mol_type = other DNA
acattcgtaatgtctgtgcaaagcagagaagttggctgttgccggaagttctactagttaagcactaagtcattaactctctgggttttagtggaagaggtgagagaaaatagcattaat

SEQ ID NO: 5737 - DNA, 120 bp, synthetic construct
  source 1..120: mol_type = other DNA
gcgcatgcctgtagtccttgctacacaggaagctgaggtgggagaatcacctgagctctggagttcaaggctgcagtgtgagctatgattgcaccactgctctctatcctgggtgacaga

SEQ ID NO: 5738 - DNA, 120 bp, synthetic construct
  source 1..120: mol_type = other DNA
tttaccacaatgaaagaaaaagagcaagaaaagagtggaatgtaagctggcctgtccgatgctggagcctgtgatctttctcttcctctgcgttgtcttcttgaaagttaaccaaagaca

SEQ ID NO: 5739 - DNA, 120 bp, synthetic construct
  source 1..120: mol_type = other DNA
ttccttatttctgtgaagccactggaatagcaaaggaaatgtgggtcagggtctttcaaacccagtccattttatttttcttgaagggctgcagctatttctgaagggctgggtttttct

SEQ ID NO: 5740 - DNA, 120 bp, synthetic construct
  source 1..120: mol_type = other DNA
agagttggagacaagggaagatccagagtttctttgaggggggactgaagcttaaataacttgctgagcatgctttttaagaaaaagaataggaggttaggtacaaaagtgaatattgag

SEQ ID NO: 5741 - DNA, 120 bp, synthetic construct
  source 1..120: mol_type = other DNA
cggactgatttatttttctccccagtgaccccgaaaaccaaaccctgccttctttcctttggtctgttcttgtctggggcttgtggatcacgtctcctgcctggccatggacagagaaag

SEQ ID NO: 5742 - DNA, 120 bp, synthetic construct
  source 1..120: mol_type = other DNA
tggttttaattaagaaaattccttagcactgtgattggcccagcatgttacaaaggcaggaggcagagcagatgaccccataaaggaccttctggtggacagacctgctattctctatct

SEQ ID NO: 5743 - DNA, 120 bp, synthetic construct
  source 1..120: mol_type = other DNA
tgaaagctgagcctgtccacgttgggaaattgcaaatagtttacatggggaatgtcagctgcccacatatgaaaatatacacatcattaagccctaagtgcttgcgtctggagatagagt

SEQ ID NO: 5744 - DNA, 120 bp, synthetic construct
  source 1..120: mol_type = other DNA
atgctgtgtggtgcagaaaaactcctttggggaccattgtgtcaaatgaaagagcaaagagtagcagagacctgtgaggagcctcctcaatagtccaaacaagagaagagaattctccaa

SEQ ID NO: 5745 - DNA, 120 bp, synthetic construct
  source 1..120: mol_type = other DNA
agtacaactgattccatctccaccctgacacttgaaacaagggatgttaatacagggagatgctttgggaaccagagcctcaaacatctggagtttcgcactgatgcaggaaatgatgtc

SEQ ID NO: 5746 - DNA, 120 bp, synthetic construct
  source 1..120: mol_type = other DNA
agccagcaagtcaccccattcactctaaacccattgctgtacaaatgcagcttcaggacaggcccctagttcttctctccaaccacactgccaccccaacagtctcatcattgaaaattc

SEQ ID NO: 5747 - DNA, 120 bp, synthetic construct
  source 1..120: mol_type = other DNA
tatgttccaagtgatgggaagagcttttctccgtgccctgtggtgcccagaaaaacatcccaggcaagtttcatctcttgctacctgaagaggtacattctggtcatcacagatatcagg

SEQ ID NO: 5748 - DNA, 120 bp, synthetic construct
  source 1..120: mol_type = other DNA
tctttgtaagtgacttccagggaaggaccagacatcctctggttccattgatgcaaataataaatgtccgactacaactactcgcttcttacccttctggcaggtttgggctttagtttc

SEQ ID NO: 5749 - DNA, 120 bp, synthetic construct
  source 1..120: mol_type = other DNA
ggtttcctcatctgcaaaatggacactataataatagccacctcaggatatgattcagtgaattaatgaagcaatgtgtttagcccaggacctaactagagttagccttcagtatatgta

SEQ ID NO: 5750 - DNA, 120 bp, synthetic construct
  source 1..120: mol_type = other DNA
ggatttgtgctaatattcagttgctctgaagtagcctggaggtactggttcccaagagactcagctgccagaatttccaagaaagttctccaagtcttagaggcacaagcccccagttgt

SEQ ID NO: 5751 - DNA, 120 bp, synthetic construct
  source 1..120: mol_type = other DNA
gggtaggacacagcaactctctgaaatgtcctttcaaatttaaaatactcaggccagcagcttaacctagaaagataaagaaacaacggtggtgacatttattacgtgcttgctactact

SEQ ID NO: 5752 - DNA, 120 bp, synthetic construct
  source 1..120: mol_type = other DNA
atgcctgacagcttcagccaagttataccaactgtttgtatacttcccacgaagagaaaaagatatcaaggtgccaagtccaaagaaaacatctgctgcaaagggtattgaaagcaagtg

SEQ ID NO: 5753 - DNA, 120 bp, synthetic construct
  source 1..120: mol_type = other DNA
acacacaggctcatgaaagttctccaaagccaggttaccccacatagttggatgatcttaggggctttttgtgtgcccttattcagcaccacagacatcaattgagtacctactgtgtac

SEQ ID NO: 5754 - DNA, 120 bp, synthetic construct
  source 1..120: mol_type = other DNA
gatcagggaggcagagggtacacatttttcatctgagaattcatataaaaatcagttacctcccgtgggctcatggttaaaacaaaattaacccgactccccctgttaattaagttgtgt

SEQ ID NO: 5755 - DNA, 120 bp, synthetic construct
  source 1..120: mol_type = other DNA
gtttctctccacctgactggtggggatgacagcgtgaccagagatagtctccttagtggccgctgtccaccctgcacaggcacatcatgactccaggaaagcttgagaggcaaaggattg

SEQ ID NO: 5756 - DNA, 120 bp, synthetic construct
  source 1..120: mol_type = other DNA
tcatcagcatcactgctgttatcaatatcccaccgccatcatcagcatcaccgccatcatcagtatcaccgccatcaacagcatcactgccttcatcaacatcaccaccatcatcagcat

SEQ ID NO: 5757 - DNA, 120 bp, synthetic construct
  source 1..120: mol_type = other DNA
gccctttattcctaggagttcaaataatgacatctgacacatcaccagtttacaaagagccctccactggatgtaaggccttctcatgatcattttcctcagaggagttggagcagcctt

SEQ ID NO: 5758 - DNA, 120 bp, synthetic construct
  source 1..120: mol_type = other DNA
tttagtcttggagagccaagagccaattttcacgttttaagctgattatttgtagccaaacagaccagcaatgcaaaccacaagccctctgcaccgtgatgtcctttatggcaactagat

SEQ ID NO: 5759 - DNA, 120 bp, synthetic construct
  source 1..120: mol_type = other DNA
aaaacactttcaggcagtatcgagtgctaggaaaagggggcttcggggaggtgagtgaacattcacgtttttaattgaaagttcttacattcaagtcacctttcctgtcccttctaaatc

SEQ ID NO: 5760 - DNA, 120 bp, synthetic construct
  source 1..120: mol_type = other DNA
cgcagacaatgtgaggcagagctaagacttaagcccaaatgctttggttcccgcttatctggattatgaagtcagtgttcttgaggatctcctatcactgcctcccaaaacaaacttctc

SEQ ID NO: 5761 - DNA, 120 bp, synthetic construct
  source 1..120: mol_type = other DNA
tgccagccagaaccagtcaacacagagacaagttagtttcaggggaggctgggaaatgtgaagtgcatggatatttggtcagctctaatatcttctgctacacactgttataaaaaataa

SEQ ID NO: 5762 - DNA, 120 bp, synthetic construct
  source 1..120: mol_type = other DNA
ccttgtctctgaagggacagtgctggcgggttctgctcagggaagaggatcatgtgattcacaaagctgggtggcacgtctttaagggccttcagttacgatggctgcaccttctttaac

SEQ ID NO: 5763 - DNA, 120 bp, synthetic construct
  source 1..120: mol_type = other DNA
aggagaaactgcccacaattcaattatctcccaccgggtccctcccacaacacataggaattatgggagtacaattcaagatgagatttgggtggggacacagcccaaccatatcattct

SEQ ID NO: 5764 - DNA, 120 bp, synthetic construct
  source 1..120: mol_type = other DNA
ggctgcacacagcacggggaccctggactcagcccgtgaaaccactttttcctcctaggcccctgggcctgtgatgggaggggctgctgtgaagacctctgacatgccctgtagacattt

SEQ ID NO: 5765 - DNA, 120 bp, synthetic construct
  source 1..120: mol_type = other DNA
caaaccatatcaactaggcacatcctgcatgcaagagaaagcctttaccaggccatgttccacttcccaaagccccactgcccctccagctcacccttacttggccctgtgagaatggct

SEQ ID NO: 5766 - DNA, 120 bp, synthetic construct
  source 1..120: mol_type = other DNA
agggccaggggtccagattccactcacaatgagcagtgcccttcagatttttctcccagtccttctgaaagaattttgaaaaatctctgtgatgctgcattttaagtagacatttgaaat

SEQ ID NO: 5767 - DNA, 120 bp, synthetic construct
  source 1..120: mol_type = other DNA
ataaaataacttcttctgtcgagttgccattgtaattagtagtagatctcatttctaatcagtcctttggaagcaggggttttgacatctggagtgggtcgctacagtcatactcgggag

SEQ ID NO: 5768 - DNA, 120 bp, synthetic construct
  source 1..120: mol_type = other DNA
aaataacagcaacaaaagtattttatgataaataaggatacacaaacaccaattatcatttgatgaggctcactggctggatttgggtacattaaccactccgcatgaggacagctgcca

SEQ ID NO: 5769 - DNA, 120 bp, synthetic construct
  source 1..120: mol_type = other DNA
catgacagcttgagagggaattgcttgtcagtctagccagctgtaaatgtctcaggcattacgtttgtgcattaccatcattattttctcttggctgtggacactgaataataagaacaa

SEQ ID NO: 5770 - DNA, 120 bp, synthetic construct
  source 1..120: mol_type = other DNA
tgaagagaggtctgcatgggatactgccctgtggaggggcggtcggagggcccaggcctgccgcccctctctggatgtgcccggtgcctcccttggtctaagaaccaagcccacgctgct

SEQ ID NO: 5771 - DNA, 120 bp, synthetic construct
  source 1..120: mol_type = other DNA
ttgcatctttatgttccactcctgaagagtgggcattttcctgtgtcctcccacacctgcactctcccaaggctcttgtggtcactctgagatggcagattggggtccctgttgtccttg

SEQ ID NO: 5772 - DNA, 120 bp, synthetic construct
  source 1..120: mol_type = other DNA
acatgtgtggatgcatttccctccagacatacgtgctgatgctgcagaactatcttttctgtatttctatggtaaatctgtaattcggtttatcaaagtggtacagaagacatagcaaga

SEQ ID NO: 5773 - DNA, 120 bp, synthetic construct
  source 1..120: mol_type = other DNA
tgctccctccacctctggatcctaaggtgttggtttaagacgaagggctacagggggtgggggcgacgatttcagtctttgaacatcttataacaaagttttccaccactagatggactg

SEQ ID NO: 5774 - DNA, 120 bp, synthetic construct
  source 1..120: mol_type = other DNA
agcagtgcagcactggtcgggtaaatggaaatgtgggtgtgagccatacttggctgtctcattgggagatatctgtcaggtgcgacaaaacgagacaagggaaagaagaaggggtcagac

SEQ ID NO: 5775 - DNA, 120 bp, synthetic construct
  source 1..120: mol_type = other DNA
gggtttcaaatggcagcatataggcgggtgttcaacctgcacacggtttttcaaaagaagtaaatggtaggttcattgccaagatttagaaatgaggagatttcatgtaataacctggat

SEQ ID NO: 5776 - DNA, 120 bp, synthetic construct
  source 1..120: mol_type = other DNA
aggaagtgtacatgggatgaatatgagcaaagcgcacagggcattgggaaaagacaaggctgggcccctaccccaagcagtctgctcctctggattttagcctcaaagcagacacttagt

SEQ ID NO: 5777 - DNA, 120 bp, synthetic construct
  source 1..120: mol_type = other DNA
ggaggtacaactctgcaaattagctgagtatgtgcacgagacagagctattgatgcagtccttgccttttgttgcttaccctacacagaagaggtgacagtgactcgacacccattaatg

SEQ ID NO: 5778 - DNA, 120 bp, synthetic construct
  source 1..120: mol_type = other DNA
catctccagagagctcatgtgcacctctcttcccaattccgtgtccaatggctttgcgtcggtagcttacagtagatctggtggtagcatctgcacagcagcaatttgcaaatgctacaa

SEQ ID NO: 5779 - DNA, 120 bp, synthetic construct
  source 1..120: mol_type = other DNA
gagttttgaaacctccccagctgattctagcgtagagccagggttgagagtcactattatgggaagtgccacatgcaaggagtgtgttgtttgttgtttgtttttagtgccaagggcttt

SEQ ID NO: 5780 - DNA, 120 bp, synthetic construct
  source 1..120: mol_type = other DNA
tcccatccccacaccactgtcggggctgctgccacattcctaaaccacgagcactgtgagtgacatcatctttttcacttccattgactctttttttaaaataaaaatcaatgtatttta

SEQ ID NO: 5781 - DNA, 120 bp, synthetic construct
  source 1..120: mol_type = other DNA
caaccttgaactcttagagggcagggtccacccaggttcatctctgccctggcatagagcaggcccccagtgcacagctgagggacgagtaaggcaaaagatatgcctaccataataata

SEQ ID NO: 5782 - DNA, 120 bp, synthetic construct
  source 1..120: mol_type = other DNA
agttgacggcctgtgttttgttttcacggcccctccagatgatagaaacagaatgctttaaggagctgaacgtgtttggacctaatggtaccctcccgccagatctgaacagaaaccacc

SEQ ID NO: 5783 - DNA, 120 bp, synthetic construct
  source 1..120: mol_type = other DNA
tgataatataaaaatacaacgcttcaatgcttccatcaagtaaaacggaagttccagaaagaatgacctctccctcccctgatggccaggcatgctaagaacaccctgggtcctagaaaa

SEQ ID NO: 5784 - DNA, 120 bp, synthetic construct
  source 1..120: mol_type = other DNA
aggcggccccggccggggtggattggatttgtctttggtgaacattgcaatagaaatccaattggatacgacaacttgcacgtattttaatagcgtcataactagaactgaattttgtct

SEQ ID NO: 5785 - DNA, 120 bp, synthetic construct
  source 1..120: mol_type = other DNA
cctctttccttctaagcaggtcctgactgctaaagccagtcatttgcaagaggtttgcattgggggatttttgctctatttttaacagaagcataggaccgtaaagatgtgtcatgaaac

SEQ ID NO: 5786 - DNA, 120 bp, synthetic construct
  source 1..120: mol_type = other DNA
gttcaagaccagctcttgttttatgaggctccttccattacctttcttgggctgaatgcaaaacaaatacagccacattcaagtcttccaaggaagtagaaaactctttgaatggtatct

SEQ ID NO: 5787 - DNA, 120 bp, synthetic construct
  source 1..120: mol_type = other DNA
attttaaaattaaaagcaaacaacactgtccacccatctacctgtccaggataaggcatatttggacggtgaacggatttactctcgttcatgcatttgagcgcttcacagaagagtctt

SEQ ID NO: 5788 - DNA, 120 bp, synthetic construct
  source 1..120: mol_type = other DNA
tgttttcataacccaacactctgagataggatcttccaactttttagccccggctgtggaaagatagtgagtatgaagtctttgtgcatttggaagtgacatcgctgtgtggattatgaa

SEQ ID NO: 5789 - DNA, 120 bp, synthetic construct
  source 1..120: mol_type = other DNA
ctggaatacacagactcaagctatgaggaaaagaagtacacgatgggggacggtaatggcaccctcgtgttcgggctctgcccactcacgctaagttggcaccaagcaacccatggtggc

SEQ ID NO: 5790 - DNA, 120 bp, synthetic construct
  source 1..120: mol_type = other DNA
atcagcagttattctcacgactccaatgtcatgtcaacaaaagcagaggcaattcccaccaaccttaggacacgatccaggcatcccagggtagaaattcagttcctgtatggtaaagtt

SEQ ID NO: 5791 - DNA, 120 bp, synthetic construct
  source 1..120: mol_type = other DNA
tttgcaggaaacaaggtaaaggaggagtgatatggggaatgagatctgttttgcttcacgtgttatggaggttccagcccacatattcttggccttctgcagatcacttttgtagatttt

SEQ ID NO: 5792 - DNA, 120 bp, synthetic construct
  source 1..120: mol_type = other DNA
ttcatgaccatagatggagctggcaatagtaggactgacacaacggtgacattgatgtctagtactgaacccacaggcaatattcatagctacctccagaagctttgcatgattggaccc

SEQ ID NO: 5793 - DNA, 120 bp, synthetic construct
  source 1..120: mol_type = other DNA
acccttgctgatcttgtttcagagcacaaatcctactttagtacagatctgggaatttgaggcattagtccaacgggcttctgagcctagaatctgtttccctttcccatcaagaaatct

SEQ ID NO: 5794 - DNA, 120 bp, synthetic construct
  source 1..120: mol_type = other DNA
aggccagaactggagagagacagaaccaggctacactgcagttctattccccttactaggtatttaaatgtaaggaagttgctgaacttctgtttcccacatgagaaatggtgataatag

SEQ ID NO: 5795 - DNA, 120 bp, synthetic construct
  source 1..120: mol_type = other DNA
tctctgggtttacttcctctctttcctgggtacctgtgagagaaatgtctttagtccttgcataactgaaagtgcctttacatgcttactgaatactctggctgaggatttagtctgttc

SEQ ID NO: 5796 - DNA, 120 bp, synthetic construct
  source 1..120: mol_type = other DNA
tactgcgcctgaccatatcttttgcttttttacttaagctttttctgtttatcattctgaggtctataattccaaaggccgtgtggggatctacaggttgatctcttcctgactcacatc

SEQ ID NO: 5797 - DNA, 120 bp, synthetic construct
  source 1..120: mol_type = other DNA
ggaatacttactctgctataatgaaaataaatgtgctaacactatgtgcaaaaacatggatgggtctcacagatgtgttgagtaaaaggatccagacaggagaaaggacacacaatctca

SEQ ID NO: 5798 - DNA, 120 bp, synthetic construct
  source 1..120: mol_type = other DNA
aaaactgtatatgttggcagtctatatgcatgcctacttctaatattgatggctatctcacattagttcctgtggattaactatagtttgcctagtcattcttatgctatggcgtatgtg

SEQ ID NO: 5799 - DNA, 120 bp, synthetic construct
  source 1..120: mol_type = other DNA
atgaatctacttgttcgtgaatctcctgtataaaactctctgtttacccattctctaccggtggcttagtcatctccaggagaaagattaaagaatgatcttgtggcagtcaaggctttt

SEQ ID NO: 5800 - DNA, 120 bp, synthetic construct
  source 1..120: mol_type = other DNA
atggaaagcactgtctgagatgcctcacagtaaactccaaggagattttgagggaagatattatctttcctggtaaatctccgtgttgatgatcattgttttaaagtctccagagatgaa

SEQ ID NO: 5801 - DNA, 120 bp, synthetic construct
  source 1..120: mol_type = other DNA
tgtttacctttttatattgatctagcgtcagagtttgagaaattgtagaaagattagaaacgactctgattaccctagatactaatgtttccacatgggctttctgccccccagagtacc

SEQ ID NO: 5802 - DNA, 120 bp, synthetic construct
  source 1..120: mol_type = other DNA
tctcttaaggtaacttattgcttccacttctgtttccatctctaactttgtgcctgttctactttcttgaaattctagtttgtttgccttattcttggtatcacaggcatgttggaaaaa

SEQ ID NO: 5803 - DNA, 120 bp, synthetic construct
  source 1..120: mol_type = other DNA
tcccacctgatatgtagttggagatgggcaaatacagcgtccttgaagcatcattttattcatagtgcctggaatgtagtaggatctcgacaattgttgtttcaataaaggaatgaccaa

SEQ ID NO: 5804 - DNA, 120 bp, synthetic construct
  source 1..120: mol_type = other DNA
tttaatatggacatttatcggttcccaaattaatacttttataatttcttatgcctgccttactttaatctcttaatcctgttatcttcttaagctgaggatataggtcacctcaggacc

SEQ ID NO: 5805 - DNA, 120 bp, synthetic construct
  source 1..120: mol_type = other DNA
cagtccagtcctcagaaacgcttgttcggctccctgatgattggtgaattttctatgtattgtctcgggtaactatgggtcacatggagtctaaatattatgcttatctctgctatatta

SEQ ID NO: 5806 - DNA, 120 bp, synthetic construct
  source 1..120: mol_type = other DNA
tttcccttatctacacatacttttactgtcacttctatgccaactccatctcatgtgcctgctcttgaaacttccatgcaatgcttattacgccagaacaaagaaacaagtggattagag

SEQ ID NO: 5807 - DNA, 120 bp, synthetic construct
  source 1..120: mol_type = other DNA
gatggcaatcaaactggcttgactgaattcttttcttggagcctgctataattgtggtcaacttcatcatacccaaaaaaattgcactgttaaaagcggccaagccagctcaacaaacat

SEQ ID NO: 5808 - DNA, 120 bp, synthetic construct
  source 1..120: mol_type = other DNA
aattaatattccacataactcttctcgtgctcccagtcaacatataatggaaaacgtggggactgttcctggactcagtctcggtccaaaacatgaaggaattactaaattcctttatgg

SEQ ID NO: 5809 - DNA, 120 bp, synthetic construct
  source 1..120: mol_type = other DNA
ctatgggttataaataccctcctctgtgcctcggacatgcaactcgttgtatccatctagaaactcaagtctgggctgcttatcttctggagagattagctacaggaaaatggggacatt

SEQ ID NO: 5810 - DNA, 120 bp, synthetic construct
  source 1..120: mol_type = other DNA
tcctttacgggactccaattggcattacgataattcttatcgacccaggtatgcccctctacttcttcagcatccccaggcacctcggtttgcttctttatggtggagaacatcgggcat

SEQ ID NO: 5811 - DNA, 120 bp, synthetic construct
  source 1..120: mol_type = other DNA
agttcgaggtaggagcatgtgtctggcagggaagggaggcaggggctggggctgcagcccacagcccctcgcccacccggagagatccgaacccccttatccctccgtcgtgtggctttt

SEQ ID NO: 5812 - DNA, 120 bp, synthetic construct
  source 1..120: mol_type = other DNA
tgaatgacggcgtggaggacctccgctgcaaatacatctccctcatctacaccaactatgtgagcatctgcaccagggttgggcactgggggctgaacaaagaaaggggcttcttgtgcc

SEQ ID NO: 5813 - DNA, 120 bp, synthetic construct
  source 1..120: mol_type = other DNA
tgtgtctgaatgtgaggtctagaaggatcctccagagaagccagctctaaagcttttgcaatcatctggtgagagaacccagcaaggatggacaggcagaatggaatagagatgagttgg

SEQ ID NO: 5814 - DNA, 120 bp, synthetic construct
  source 1..120: mol_type = other DNA
aactcagagctaaggaatgatggcaaatttaaagtaagacaagcaggagtcacagatacattgtctgggaaagtgcaacttagtagctttgtgagtcctgttgtaatgcttttggacaca

SEQ ID NO: 5815 - DNA, 120 bp, synthetic construct
  source 1..120: mol_type = other DNA
aactccgcagtttcttttctccctctcccaacctacgtagggtccttcatcctggatactcacgacgcggacccagttctcactcccattgggtgtcgggtttccagagaagccaatcag

SEQ ID NO: 5816 - DNA, 120 bp, synthetic construct
  source 1..120: mol_type = other DNA
tcctgtaccagagagtgactctgaggttccgccctgctctctgacacaattaagggataaaatctctgaaggagtgacgggaagacgatccctcgaatactgatgagtggttccctttga

SEQ ID NO: 5817 - DNA, 120 bp, synthetic construct
  source 1..120: mol_type = other DNA
cctgtctcattactgggaagcaccgtccacaatcatgggcctacccagtctgggccctgtgtgccagcacttactcttttgtaaagcacctgttaaaatgaaggacagatttatcacctt

SEQ ID NO: 5818 - DNA, 120 bp, synthetic construct
  source 1..120: mol_type = other DNA
agctgtgctatggggtttctttgcattggatgtattgagcatgcgatgggctgtttaaggtgtgacccctcactgtgatggatatgaatttgttcatgaatatttttttctatagtgtga

SEQ ID NO: 5819 - DNA, 120 bp, synthetic construct
  source 1..120: mol_type = other DNA
aatttatattcagattcttattttcagtagggaagtaagaagttgcagctcagtgcacgtaaagttgagacagagatggagacatccagccccacctctctggaacaagaaagatgactg

SEQ ID NO: 5820 - DNA, 120 bp, synthetic construct
  source 1..120: mol_type = other DNA
tccatccttcattgtcacatgtgctgcacaaaagagtaagtgctggcacacagggtcccaggctgcgttagcccctgtgtgcatgctgcttcccagtaatgaggcagggaacacttctac

SEQ ID NO: 5821 - DNA, 120 bp, synthetic construct
  source 1..120: mol_type = other DNA
attctagggactgtcttcccctccatttcctcagagacgtcattccttaattgtctagagagaagagggggccctcagaggaaactcaggaaaactcatgccattctccattcaacggag

SEQ ID NO: 5822 - DNA, 120 bp, synthetic construct
  source 1..120: mol_type = other DNA
ctgattggcttctctagatatccaatacccaatgggagtgggaagtggggacgcgtcacgagtatcctggaagaaggacccgacacaagttgggagaagaagtgaaactcaggggagtgg

SEQ ID NO: 5823 - DNA, 120 bp, synthetic construct
  source 1..120: mol_type = other DNA
tctgtaactctgggttgttgcatttaaaattatcttcattccccaccctgagtttccctgtgtgagtccagaacatctcctgaatataaagaagcagggtttgttactgtctattgcaac

SEQ ID NO: 5824 - DNA, 120 bp, synthetic construct
  source 1..120: mol_type = other DNA
tccttcaccctgaagcacttcctttaaaattaaatgtagtacaggacccctaggaaattaattttatggctttgattatctaaaaatgtctttatttttgcctcccctcccccccccctt

SEQ ID NO: 5825 - DNA, 120 bp, synthetic construct
  source 1..120: mol_type = other DNA
attgctgggccatgtggtaatagatgggtaactgtataagaaactgccataccactttacaaattggctgccacattttttgcattcctaccagcaatatcagacattcctattttttcc

SEQ ID NO: 5826 - DNA, 120 bp, synthetic construct
  source 1..120: mol_type = other DNA
cagcactattttcaatagcaaagacatggaaccaacccacatgcccatcaatgatagtctgggtaaagaaaatgtggtagatatacaccatggaatactacacggccataaaaaggaatg

SEQ ID NO: 5827 - DNA, 120 bp, synthetic construct
  source 1..120: mol_type = other DNA
gaaagtgcatgtctggaaagagcgtatggttgggttccgtgtttttttaaaccaagtcacacaatctctgcccttcattggagtgttgattcatataggtttttgtcattattgatatga

SEQ ID NO: 5828 - DNA, 120 bp, synthetic construct
  source 1..120: mol_type = other DNA
aacaaatcctagccagtcttgagtatcatcatcctacgatttcagaactatcgtgaatataaaagtaatcaaagaacagtcctgcccagaaagaggagttatccctaaatatggtgtccc

SEQ ID NO: 5829 - DNA, 120 bp, synthetic construct
  source 1..120: mol_type = other DNA
gtaatttcttgatatgacagatgaggatttagctcttacaccatcactaccttcacttttccccccatattgtcccaaagtagttaccagatttaggggctaagtagtcaccacatcatt

SEQ ID NO: 5830 - DNA, 120 bp, synthetic construct
  source 1..120: mol_type = other DNA
tcatttctcaaaggcatctcaaactcagtgggcccaaacccagggcaaactccatcagaatatcctgctacttctgactttaaaatatatcttaaatcacagtttcttactacatgcaac

SEQ ID NO: 5831 - DNA, 120 bp, synthetic construct
  source 1..120: mol_type = other DNA
tgttaccagtgagaacctgctcactggctttaaactggttttcttaccttctcagttccatttctccgtacctcaattgatgatttctggtaagacctagaaaataaactgctttcactg

SEQ ID NO: 5832 - DNA, 120 bp, synthetic construct
  source 1..120: mol_type = other DNA
acagaactgccaccaactatccaaatcatgtctactctatttgctaattctggttgttaagtaagttttaagatctcaaccagacttctggcaagaaaatgagctcgttgtggaggttcc

SEQ ID NO: 5833 - DNA, 120 bp, synthetic construct
  source 1..120: mol_type = other DNA
aatttatattcaggttcttaacttcattagggaagtaagaagttgcagctcagtgcaccatgaatttgagacagagatggagacatccagccccacctctctggaacaggaaagatgatc

SEQ ID NO: 5834 - DNA, 120 bp, synthetic construct
  source 1..120: mol_type = other DNA
tctgtccttagcagggaccttcccctgactcatgaatgctggaatcaggaccccaacaccataatcatcaaggtgatacatccgtccttcattgtcacatgtgcttcacaaaagagtaag

SEQ ID NO: 5835 - DNA, 120 bp, synthetic construct
  source 1..120: mol_type = other DNA
aatctcctattcattggaaagttctagtctctgagggaggaacagcgacttctggtcctgacctgagtggaggctgcaggactcagaaaagctggaatcaaaccttcagacacattgagt

SEQ ID NO: 5836 - DNA, 120 bp, synthetic construct
  source 1..120: mol_type = other DNA
ctcggtcagcctgtgcctggcgcttgtacttctgtgtctcccggtcccaatactccggcccctcctgctccacccacggcgcccgcggctcccctctcggactcgcggcgtcgctgtcga

SEQ ID NO: 5837 - DNA, 120 bp, synthetic construct
  source 1..120: mol_type = other DNA
ctagagtgggttgcgacttgtaggaagaatgagatgaggttgtgtgggtgcatgacagggattgagtgtaggttatcagacagccaaggaagcagtaaccaagtgaaaaatctcttcttc

SEQ ID NO: 5838 - DNA, 120 bp, synthetic construct
  source 1..120: mol_type = other DNA
agttcaaccattgtactctcaggacatttctagtccaaatttacaccaacactctgagaggaaggactgcaaagtaggtaccttagttttccactgacttccacttttcctgcttacacc

SEQ ID NO: 5839 - DNA, 120 bp, synthetic construct
  source 1..120: mol_type = other DNA
atagcttaaagaggctgggggagaaaagcttggctgagacaacccatagggagctagaggtttttaatatatcctattctgaataagagacgaattcattcagatcagtggtttcaaacc

SEQ ID NO: 5840 - DNA, 120 bp, synthetic construct
  source 1..120: mol_type = other DNA
ggttaataaactggagaagttaatttgtggagcatgaaacagatgagcagaacaatcacagcaccttaatttccccagtgtgcccaagaacagagcaggcctgaagatactcaaacagaa

SEQ ID NO: 5841 - DNA, 120 bp, synthetic construct
  source 1..120: mol_type = other DNA
aagaaatatatttctacatctcctacatgcaaaacaacaggagcaagttgaggaattctcaagaaactggtcgagaagagagagcgcttagctatggaaaagagaaagaaggaagggagg

SEQ ID NO: 5842 - DNA, 120 bp, synthetic construct
  source 1..120: mol_type = other DNA
aactggacagttgtgatttggccaagacagaaaagcctgtgaaagagaccaaaaaaacccaagtgcagtgtgaggagaggcccgcagagaagagtcttggaagctgaggggaggtgacct

SEQ ID NO: 5843 - DNA, 120 bp, synthetic construct
  source 1..120: mol_type = other DNA
aaataaaaataacgcaattggcaaaaactgttactaagactttgtagaggcaccaatcagtgacatggcagcattttctttcacagtaatcaactgccagattgcagacagccctgatgc

SEQ ID NO: 5844 - DNA, 120 bp, synthetic construct
  source 1..120: mol_type = other DNA
gtaattcacaactgagatttagacataagttgaatagtgtaatggacattgagttaaccgaggtaatgaagtagtgagacacaggtgcccctgaaataaactcacattgagggaagaggc

SEQ ID NO: 5845 - DNA, 120 bp, synthetic construct
  source 1..120: mol_type = other DNA
cgcagcacagaggaggaacttgaaaaaggacgggatttctactactcaagcatgtaggagctcaggatattctgtaaatatgaagattttgagtttttgtaggtgaggtaaaaaaataca

SEQ ID NO: 5846 - DNA, 120 bp, synthetic construct
  source 1..120: mol_type = other DNA
aaaccctcacacttaggaactgacctcacacataggaacagttctcttccttcagcattttagcctcttctcaggcattttgagaggcaacttccagaatcagcatttgccaccttgttg

SEQ ID NO: 5847 - DNA, 120 bp, synthetic construct
  source 1..120: mol_type = other DNA
attatataacctttcgtctttcatttcagttcaacgaggatctgcataaacaggtaatattcctgctttgatttccttgtggggtgggttgcaggaggatatgagtcctttctgtgcatt

SEQ ID NO: 5848 - DNA, 120 bp, synthetic construct
  source 1..120: mol_type = other DNA
taatacactttaaccattttctttgtgtgccatcacaaatactccttaaccaaatacggcttggacttttgaatgcatccaatagacgtcatttgtcgtctaagtctgcattcatccacc

SEQ ID NO: 5849 - DNA, 120 bp, synthetic construct
  source 1..120: mol_type = other DNA
cgatggaaggaggtcatgagaatagcagaaagtcttcaaatcgagatcattatgaaatcctcagacccagagcacataaatcctaccctcagagtcactgagcagttaacattacaaatt

SEQ ID NO: 5850 - DNA, 120 bp, synthetic construct
  source 1..120: mol_type = other DNA
ttttaataaccacttgctaccaggccagtgaacacttaccatagttgatgccttttgagcatgttgcattgtaaactgtccctgaaattactgtgcacttggcttatgggatgaaacatc

SEQ ID NO: 5851 - DNA, 120 bp, synthetic construct
  source 1..120: mol_type = other DNA
aagctctgtttttaggtgcatatgcacttaagattgttatgtctctttagagaaataaccctttatcattaagtgatgtctgtctttatccctattaacatttctcgctccaatttctgc

SEQ ID NO: 5852 - DNA, 120 bp, synthetic construct
  source 1..120: mol_type = other DNA
gtcctgtaacacacatgacagcctcccacaaaaaaaaaacattatcctctggctcaaaatattaatagttctcaggttgagaaacctcattttagagcattttttaaacttttgagttca

SEQ ID NO: 5853 - DNA, 120 bp, synthetic construct
  source 1..120: mol_type = other DNA
ctcccattctgtatgttgtctgtccactctgctgatagtttcttttgctgtgcagaagctctttagtttaattagatctcatttgtcaatttttgcttttgttgcaattacttttgccga

SEQ ID NO: 5854 - DNA, 120 bp, synthetic construct
  source 1..120: mol_type = other DNA
taccatagtctctgcaaagtcttcatgaaataacctcttaggtttagctgtagaatactctggagctatggagaaggtagatctggacatggaggtaattttgcatgtttttcagtagaa

SEQ ID NO: 5855 - DNA, 120 bp, synthetic construct
  source 1..120: mol_type = other DNA
tgagctagtactatgacttgctttgaataacagaatgtaatggaagtgatgttgtgagttttaagtttcagctcaagacacctactgtttctatcttgcacaggagagctttccagcacc

SEQ ID NO: 5856 - DNA, 120 bp, synthetic construct
  source 1..120: mol_type = other DNA
attaaaattatgacctgaagacataagcaactggaacaacgttcactgtgttatggccggatgaagcaggaagaggaaagagacaaaactaggttaaagatagaaatggcatctattggg

SEQ ID NO: 5857 - DNA, 120 bp, synthetic construct
  source 1..120: mol_type = other DNA
ctaaggaatttccatgagatacaaagcaggtaagtctggatacaggaaaaaagataaaaacatgttatttgctacacagccagaagggtattgagtggcaaagggagcacatctcaaagg

SEQ ID NO: 5858 - DNA, 120 bp, synthetic construct
  source 1..120: mol_type = other DNA
cttgttttaggtgattttggggaggatttaagaaagagggattttgcttttaattggattctgacagaaagtggagggttggggtggcaatgttatgattgggtagcttcataaatccta

SEQ ID NO: 5859 - DNA, 120 bp, synthetic construct
  source 1..120: mol_type = other DNA
tactcaatgcaaagaaaaactgtataaagtctcatatagttactatagacagccccatctgacattataacccctttttattgccctggccaaaaccacctggagcttttgagcacttga

SEQ ID NO: 5860 - DNA, 120 bp, synthetic construct
  source 1..120: mol_type = other DNA
aaagagataaagcgatttgcagagaaactgtagagatttcctaagggccctttcagtattaagacaattaaaaattatagctgttcctccttcaggaaaccagagccccaacctactctt

SEQ ID NO: 5861 - DNA, 120 bp, synthetic construct
  source 1..120: mol_type = other DNA
tccatctctttccacctctcttcatgcatccctttctccctcttccctttcaggatccatctctgactccctgctcctttatagagatggacagtgggtttgtaaaacaaaagttgaaaa

SEQ ID NO: 5862 - DNA, 120 bp, synthetic construct
  source 1..120: mol_type = other DNA
caactgtcattcaatacacatgtttgagcacacagtgagctaagttttaaggattcaaagatgaaaagtcatgctgtcttccctgcagagggtgctcagattagtgatggaaacagtatg

SEQ ID NO: 5863 - DNA, 120 bp, synthetic construct
  source 1..120: mol_type = other DNA
ggggggaatgacagaaatccaaaaactagtagagcttccacttttcatttcagaagaaatcagttgctctcctctaaggaccattactattaacaaaacagagaccttagaaggaggcat

SEQ ID NO: 5864 - DNA, 120 bp, synthetic construct
  source 1..120: mol_type = other DNA
ccctccataccagggttcattattttcttcccaagaggtccccagatcttcttatggcaattgctgaaattttatcatctcccatctctaaaatcacatattcccatgtaatacaagggt

SEQ ID NO: 5865 - DNA, 120 bp, synthetic construct
  source 1..120: mol_type = other DNA
ccagcctcttctgaaacactggggtaaggatgagtttcatcattttttgattctttcttgtctgtcaagttcagaacttcctgccttttactcctatatccaaaaacttgttttccacac

SEQ ID NO: 5866 - DNA, 120 bp, synthetic construct
  source 1..120: mol_type = other DNA
ggcactgccacccacccctcaattcaggcaacaatgaaattaatggataccgtctgcccttggcccagaattgttatagcaaaaattttagaaccaaaaaataagtctgtactaatttca

SEQ ID NO: 5867 - DNA, 120 bp, synthetic construct
  source 1..120: mol_type = other DNA
aaactctcacagaggaaatgggtcagcagcgacctcatggctctaaacagctatgaaatccatgaggatatttctaaccatgctacctgcatcagtgagtttaaattttaattggagaaa

SEQ ID NO: 5868 - DNA, 120 bp, synthetic construct
  source 1..120: mol_type = other DNA
aaatgcacaacgtgctaagaagcttttagcaatagggtttcaaatatatttcatatacatttcaatgattcgtgaggcaagaacccagcattttggagttgtgtgcatttgtgtgtgtgt

SEQ ID NO: 5869 - DNA, 120 bp, synthetic construct
  source 1..120: mol_type = other DNA
acttcatgcacagactggcacatagtaagtagtcgataggtgttaacaatttgtgttattgttattttctggagtccaactaacaaatcccacagtgaatgacatcacagggatgcaacc

SEQ ID NO: 5870 - DNA, 120 bp, synthetic construct
  source 1..120: mol_type = other DNA
catgtttaattatgtaaaaaagctctaaagtcaggtaatgtttttcatgtgcttctcttgagcagtctgaggaaagaatagaaacagaaaccccttgggacctgagtagacgcagctggc

SEQ ID NO: 5871 - DNA, 120 bp, synthetic construct
  source 1..120: mol_type = other DNA
gaaaatgacacacatgacttagagttacattctcttcccacccatgttcttccaggccttcagcaccctaatttaaaatcccctaaaacaaaggaaattgtcactagaaagaaaggaagc

SEQ ID NO: 5872 - DNA, 120 bp, synthetic construct
  source 1..120: mol_type = other DNA
tcaagaactcatccataaccttagaccctaagatcccagtcaccagccctaagaatcagtccctcagagctatcaggactgggattcagagcaacagtatgtagagtaatttccctagca

SEQ ID NO: 5873 - DNA, 120 bp, synthetic construct
  source 1..120: mol_type = other DNA
attactagctgtctaccctactccatttccttgctattgacaattactttcttgttctgaaatcagacattatcgtgtatgttctccacagaaaatattctgagatccgtgcagaggtcg

SEQ ID NO: 5874 - DNA, 120 bp, synthetic construct
  source 1..120: mol_type = other DNA
taagcctctgtttttttcttgaacctaactggattggcagctgagtacatttattcatgaatttaacagaagatcattgagctcacaccacataccagtcaatgtgtcaggtaccaggca

SEQ ID NO: 5875 - DNA, 120 bp, synthetic construct
  source 1..120: mol_type = other DNA
tgtcgaagcgcgcgtactcctctcggttatagatgtatctggtcacaagacgcacgcgctccgtcccgttggtgaagtagcacatgcccttaaactggaacacgaaatcctctgcgggga

SEQ ID NO: 5876 - DNA, 120 bp, synthetic construct
  source 1..120: mol_type = other DNA
gaagtgagtggtttcacaatatgtgttatttcccttctttacatcctccttcctactaaattcagtccaccattaactcgggtctctgaatcccactcaagtcaccatttgcccataaat

SEQ ID NO: 5877 - DNA, 120 bp, synthetic construct
  source 1..120: mol_type = other DNA
tgacgtcttcaaattgtactggatgaacatctgaggtgaaaatttcctctcgattatagaagagctgaagaacgaatgcctcggggattttgagaggcaaaagaaaaaaatgcgattcaa

SEQ ID NO: 5878 - DNA, 120 bp, synthetic construct
  source 1..120: mol_type = other DNA
tgacagtgactaggggcaatactaatggttataaagcaattagaacaacgcctggcaaacattacttctgacctcaaccaagacaataaatatctccacttctcttcttctctccctttc

SEQ ID NO: 5879 - DNA, 120 bp, synthetic construct
  source 1..120: mol_type = other DNA
acaaattgtggtttggtggagttcttccctcaccacaaactgaagtaagtcaaatttggtttagagggtcaaaactgagttgtgtattgatgaatagcaaggtcctgctacaagccaaac

SEQ ID NO: 5880 - DNA, 120 bp, synthetic construct
  source 1..120: mol_type = other DNA
agagccatacatagggatacttacctagaaagacagaggatcttcccttggtttgtgaagaggcagctagtatatttgtgtgtgtttgcatagatgcaaacggtaaataaattcctaggt

SEQ ID NO: 5881 - DNA, 120 bp, synthetic construct
  source 1..120: mol_type = other DNA
gatcccagagtttaaaacccaacctttcaaacagcgtttctttcttcttagagtacaatgttctgagaaagagatcctctggaattctggcctaagtgtatttaatgcccgggtaaagaa

SEQ ID NO: 5882 - DNA, 120 bp, synthetic construct
  source 1..120: mol_type = other DNA
ttgtgttagattattgtaactgattttccctccaagggtctaaccttgccattaacaagccccaaattctcatgccagaggtctgagaactttatgggtttgatcctatcttgttgtgct

SEQ ID NO: 5883 - DNA, 120 bp, synthetic construct
  source 1..120: mol_type = other DNA
ataacttttctctttattaagaaccctacatttgattctgagtgttacttcttcccacactcattaccatgtactctgccttatttccccccagagtttgatgctccaagccctctccca

SEQ ID NO: 5884 - DNA, 120 bp, synthetic construct
  source 1..120: mol_type = other DNA
tgcaaagtcaaaggattaagagagaagaggaaggaatctgaagcaaggagctcaaaactgatcttcaactccttggtaactatgtgtgtcttgctataggtgatggtgtttcttagagag

SEQ ID NO: 5885 - DNA, 120 bp, synthetic construct
  source 1..120: mol_type = other DNA
aaatattgtagacgagatgaagaaagagttctgattgacttgctggctggtttctcatctcatgtttgcccagtttgtttcagttgttatagtctgttctcagtttttatgcattgcctt

SEQ ID NO: 5886 - DNA, 120 bp, synthetic construct
  source 1..120: mol_type = other DNA
agaggaggaattttggtgtaaattgcctgatcagaaatttggatccaaagtctttcctattatttctgtctcatgccttatcacctctaccatcattctggtgtgtcctgagtttgttcc

SEQ ID NO: 5887 - DNA, 120 bp, synthetic construct
  source 1..120: mol_type = other DNA
gctattatgctttcacatagtaaccatgcactgatgatttctggattagcaggacattagagccgtttggggaaagaaaggctttattcagggccactcatatactgagaactaacctca

SEQ ID NO: 5888 - DNA, 120 bp, synthetic construct
  source 1..120: mol_type = other DNA
tcaaatattacagccttgatgtaaggcacaagttcaacatctgatccacagaaagcctgagactcaatgaggataagtagtttgtctagagtgacaaagctaataaaaagcagggctgag

SEQ ID NO: 5889 - DNA, 120 bp, synthetic construct
  source 1..120: mol_type = other DNA
taaaatatataaaacaatgactgaagatagccttcagtttatgaggtcagaaagcttctcactccattccactgtgagggcactcatcacacttgagtgctccacttggcacctatttat

SEQ ID NO: 5890 - DNA, 120 bp, synthetic construct
  source 1..120: mol_type = other DNA
aaagaagcttcagaggtgcctcagaggtctactcagttcctctagaaattaatctattgcttttacaaacaaacagcacacacttttaattcagagattacacgaagggtgtatgccagg

SEQ ID NO: 5891 - DNA, 120 bp, synthetic construct
  source 1..120: mol_type = other DNA
gactcctcctggttatagaagtatctgtccaggaaccgcacccgctccgtcccattgaagaaatgacactccctcttaggctgccacaggaaacgtgctgtggggacacgaaccatccgg

SEQ ID NO: 5892 - DNA, 120 bp, synthetic construct
  source 1..120: mol_type = other DNA
gaactagcagcccttgcatttctgtccccactctaagaaacagcctggtacatatgaatatcagaaattgtgtcaataattcagacacaatatagtcactactcactaatgatggtcaaa

SEQ ID NO: 5893 - DNA, 120 bp, synthetic construct
  source 1..120: mol_type = other DNA
tctctatcatattctcacttgcccctcctcttagtggtactcaccacaattggcctctcccttctccttgaaaataatctattttcctggacttacacacatgatgttctcttggttttt

SEQ ID NO: 5894 - DNA, 120 bp, synthetic construct
  source 1..120: mol_type = other DNA
catcccttagatcttcacgactgtctacttattttgttgtctcagctgaatgtcactttctcaggtggagctccctaacatatgaactaaagtaggtgaatccatgtctctctttttcac

SEQ ID NO: 5895 - DNA, 120 bp, synthetic construct
  source 1..120: mol_type = other DNA
tctttcaatgaatctcatagtgctaaggttctgtgcaagctttagagatttctggaaatgatgacaacatagctggggaaaaatagaaactggaggaagaggtaagcagacatggctagt

SEQ ID NO: 5896 - DNA, 120 bp, synthetic construct
  source 1..120: mol_type = other DNA
atttctaaatcctctaaagaccctgaggacatgtgatgcaaaggttttattggtggagatttgaaaagaaatgatttgtgcaaaggccccttacacaagtctcatgaagagggcaagtac

SEQ ID NO: 5897 - DNA, 120 bp, synthetic construct
  source 1..120: mol_type = other DNA
ttaagtaagacataataaagccctgcaccaggcggagagcagaaggaacgcacagaagacgcaggagaggcacatttcagagagaatccagtatgcaatggatgtcgcacacaagagaga

SEQ ID NO: 5898 - DNA, 120 bp, synthetic construct
  source 1..120: mol_type = other DNA
ctgctgttcgttagcacctttcttttaggtgacgggaaagatctctgtaaatactgctgactaacttagaaccatgaaagaaccgtggattggtgtagatgtgtctggttatttacagga

SEQ ID NO: 5899 - DNA, 120 bp, synthetic construct
  source 1..120: mol_type = other DNA
agagtgtgagtatgcgtgcatgcacacactctttgtattcctttatggtctagtttctagactatagatagccacattatggaattacatggtctacttaggttgacccatgtgaaattg

SEQ ID NO: 5900 - DNA, 120 bp, synthetic construct
  source 1..120: mol_type = other DNA
cctgagaaatgagattgtttataattatggttacttttgacacaccctcataagattgctcagtttgtttccaaataggtggagttctctgtgtttaggggcggctgacagaatcatgtg

SEQ ID NO: 5901 - DNA, 120 bp, synthetic construct
  source 1..120: mol_type = other DNA
atgtaaaatgtttctccttcccgtaccccattaataagttccctgaatgctctgcatttagccttaaactagagggcatgggttacatccatatctaggtgccttaaaaaaaagtcgtct

SEQ ID NO: 5902 - DNA, 120 bp, synthetic construct
  source 1..120: mol_type = other DNA
ctgttccagcttttgattagttgtgaaagtttggagcttttcacatctaatgcttttccattggtcttctagcactattgttgatgaatctgctagaagaaaagcagccaccacagcaaa

SEQ ID NO: 5903 - DNA, 120 bp, synthetic construct
  source 1..120: mol_type = other DNA
tgggaagtcatagtggggacagtgacactgaccatctgcatgatgtccatgaacatgtttactggtaacaataagatctgtggttggaattatgaatgtccaaagtttgaagaggttagt

SEQ ID NO: 5904 - DNA, 120 bp, synthetic construct
  source 1..120: mol_type = other DNA
gaatttccttttctttctctcctattaggatgttttgagcagtgacattataattctgacaataacacgatgcatagccatcctgtatatttacttccagttccagaatttacgtcaact

SEQ ID NO: 5905 - DNA, 120 bp, synthetic construct
  source 1..120: mol_type = other DNA
gtgcccggcctccatgtccttaatgttaaactaaattgtttgtaatggctatatgtattctcttctgtctaaacgtcttgtagtttattaatcatctaatgttggactgttaggttatgt

SEQ ID NO: 5906 - DNA, 120 bp, synthetic construct
  source 1..120: mol_type = other DNA
gaaggattaatagcgtttcttcatagcacaagatttaagaattgcccaaagttttaagtttaattctcaagtcccaagactggtctccataagtgccccaggaacagtcccctgtatcta

SEQ ID NO: 5907 - DNA, 120 bp, synthetic construct
  source 1..120: mol_type = other DNA
tgatttaaatgacagagttaatgcactacctcaaaggaatattcctaacaaatatcttattcagtggaaagggaatcagggcactatatgttcttttttaaaaatttggctgggcgcagt

SEQ ID NO: 5908 - DNA, 120 bp, synthetic construct
  source 1..120: mol_type = other DNA
tttccagcccctgctgttacttagactcaattggtgacttggttctttgtgttttaattatcatgtagggagaaaagagtcaggaattggacagatctgagtaagattcacctaataagg

SEQ ID NO: 5909 - DNA, 120 bp, synthetic construct
  source 1..120: mol_type = other DNA
acttggaagtaaccctttgaaaaagccagtacaaaaagaagaaagtcttagcttcttggatgtctgtggattggtgctgtttctttgtgtgtagagagacttatctggggacacagtaag

SEQ ID NO: 5910 - DNA, 120 bp, synthetic construct
  source 1..120: mol_type = other DNA
ggcaaattgcttttctcctaacaagtgggattagatcaatagtgtcactggggttttgctctgttagagtagcctgtcctctccttatttaataataaggcactactgcttgacaaaaag

SEQ ID NO: 5911 - DNA, 120 bp, synthetic construct
  source 1..120: mol_type = other DNA
cagtggggtcactactttagttagttgcatagcaagcttggggctttttttttttcatggtaaggggaagctatgagagataatgtctggctgtccagttgctagggataagaaatttaa

SEQ ID NO: 5912 - DNA, 120 bp, synthetic construct
  source 1..120: mol_type = other DNA
ttgggaatgcagaggtgaggatgataacataaactccaatgtggcatttttcattacaaaggagctttttcaaggaagaaaaatctagtatctgctgaacactacagctaagttctgggc

SEQ ID NO: 5913 - DNA, 120 bp, synthetic construct
  source 1..120: mol_type = other DNA
tgcattcttcaatcatatgctttttagctaaacttagtcattgttctttaaatacagttcccaactctgggttcctattcttgtcatctgacatgtctccccctctccaggtgttcacac

SEQ ID NO: 5914 - DNA, 120 bp, synthetic construct
  source 1..120: mol_type = other DNA
gtgagccactgcccccaggctggaaaggtcttttcttacattggtggtgagaaggcaattggaccgtgtttattcaaattaataaatttgtaaaaattataaaaatttataagattgtaa

SEQ ID NO: 5915 - DNA, 120 bp, synthetic construct
  source 1..120: mol_type = other DNA
actcatgagcgtggtgtatctattcgccgacagttactttccaagaagctttcagaaccttcttctctccagtacctaccttacagggattataattactccttggtatgttattttctc

SEQ ID NO: 5916 - DNA, 120 bp, synthetic construct
  source 1..120: mol_type = other DNA
agaagtgaaagcctggctcgaaacatctgaagggttcgcagtgataaaggaggcatttgacagcactagcaggtgtgtgagtggatttgtatgtacagttatatctatttgtttatttta

SEQ ID NO: 5917 - DNA, 120 bp, synthetic construct
  source 1..120: mol_type = other DNA
tggacgcaacctttatatccgtttccagtccaggtcaggggatgccatggggatgaacatgatttcaaaggtaagtgtaggcagagtatctgaaagtacttttattaaaatgaaagtact

SEQ ID NO: 5918 - DNA, 120 bp, synthetic construct
  source 1..120: mol_type = other DNA
aatgggtggttgttatttagtaagtacagagtttttgttttgtgagatgaaaagagttctgggagcaaagacatggaaccaacccaaatgcccatcaatgatagaccggataaagaaaat

SEQ ID NO: 5919 - DNA, 120 bp, synthetic construct
  source 1..120: mol_type = other DNA
agggtacagagaaagcactttcaaaacttcacgagtatttccctgaaatgcagattctagccgttagtggtaactattgtactgacaagaaacctgctgctataaattggatagagggaa

SEQ ID NO: 5920 - DNA, 120 bp, synthetic construct
  source 1..120: mol_type = other DNA
gcaggtatgatgtatcaggcatagagtccacaagcctagttctgactctctgggtttctctttctatctgagactatgtatcactcacctctattttaattggtcttttccaaactcttt

SEQ ID NO: 5921 - DNA, 120 bp, synthetic construct
  source 1..120: mol_type = other DNA
gagaggtctcaggttctttccatgcagactcctcagatctgaacacagtttagtgctttacatgctgtgctctttgaagagatttcaacaagaatattgtatgttaaagcatcagagatg

SEQ ID NO: 5922 - DNA, 120 bp, synthetic construct
  source 1..120: mol_type = other DNA
aagaaataaaaatcaacttgtgtactgataaaatactctagcctgggccagagaagataatgttctttaatgttgtccaggaaaccctggcttgcttgccgagcctaatgaaagggaaag

SEQ ID NO: 5923 - DNA, 120 bp, synthetic construct
  source 1..120: mol_type = other DNA
tacacttttgctgtaattagaggtaaaaaggtatgtgtgagcactaagaaagaaccaaggcccagatactagagaatcagtttgagtttttctctgaaatgacctgtggtcacctgtatg

SEQ ID NO: 5924 - DNA, 120 bp, synthetic construct
  source 1..120: mol_type = other DNA
ccgagtgttggctaataaaaatttaattggaattaacccgagagatgtaataactaactagaaaatgttatttgaatttggtgctcctcacacgcccccctcctgtcccagaacaacact

SEQ ID NO: 5925 - DNA, 120 bp, synthetic construct
  source 1..120: mol_type = other DNA
actttataaatatgtctcattgatgcacaaatgggaggagcaccctttgctgaaagcagtacagtgacttagttcaatttggctacggtagcactttaaaaaattaccatgagatggcgc

SEQ ID NO: 5926 - DNA, 120 bp, synthetic construct
  source 1..120: mol_type = other DNA
ttagggagcccagtgtcaatgagtaatactgaaatgagtgagtttttggagaaatagaagaaaaattttgctcaaaactatggtagttataaactggcttgagattgaggtgcgtatttc

SEQ ID NO: 5927 - DNA, 120 bp, synthetic construct
  source 1..120: mol_type = other DNA
actgtcagtagccggaaacctgagttcatcctcaatcctgacacagttacatcaatatacatttactgctcaaaagagtgcatgcatgatgcagtcatttcacagcaagttaccaaatac

SEQ ID NO: 5928 - DNA, 120 bp, synthetic construct
  source 1..120: mol_type = other DNA
tcccatttgaagttggctagacttgtaggccaaagccggtattgtgttcactaaaattaactgcaatggttttttgttttccttgtactgacactgaatataccgtgaaaaggctgacct

SEQ ID NO: 5929 - DNA, 120 bp, synthetic construct
  source 1..120: mol_type = other DNA
ttctctctagaaaatttgggaggtacaaaaatgtaacaatgaataaagaaaaataatatgtattctcaccagtcaggggcaaccataatttacatttgcatcatttcttcttccacttac

SEQ ID NO: 5930 - DNA, 120 bp, synthetic construct
  source 1..120: mol_type = other DNA
acagccatagactttttattgacaaatataaaaagtaggtataggatgagataatacaggggaacatgggcctatatggttcattgctccatcacccagatttgggggatctgtaaggct

SEQ ID NO: 5931 - DNA, 120 bp, synthetic construct
  source 1..120: mol_type = other DNA
cattgtttgcaacattcaagaagagattgatgagctgtgcctccaaggagaacatcctctgagaccctggatattgaccagttttgcttatccttcggaaaactcttgattgtaaaagta

SEQ ID NO: 5932 - DNA, 120 bp, synthetic construct
  source 1..120: mol_type = other DNA
agaggatgtggtaagaggttacacgcagagctgttctgtctggaagggggatattaatttggaagtggagaatcaagctgatcagttatttaaatggcctattcatctttacatataaca

SEQ ID NO: 5933 - DNA, 120 bp, synthetic construct
  source 1..120: mol_type = other DNA
gtgaaggactggctttattcttaatcttggactttttctgagacagtgtacatttcttgggaaataagaagattgccttcctagataaccattctcttgtagggaacaggacagtggcag

SEQ ID NO: 5934 - DNA, 120 bp, synthetic construct
  source 1..120: mol_type = other DNA
gttgggggcaaaatcaagacctctactcagggttcttaattcttatggtggatttttaaaaactgcttatttgttcctttgaaggtagttacaaaagtctatgactacctctgaggtttt

SEQ ID NO: 5935 - DNA, 120 bp, synthetic construct
  source 1..120: mol_type = other DNA
atcatagattccttataaagtggtctctgtctcctctgaccctccttccttttcttttccatttcatagcctagaggttgtgcttcaatataaagatcttgcactgaaaggcgaagagat

SEQ ID NO: 5936 - DNA, 120 bp, synthetic construct
  source 1..120: mol_type = other DNA
ctcttctttatgttatgtcttgaactattcaggaggatattacccatagcaagatttttcaaccagtcacagagtgtgatttaaggagcccccaagtcctgcctcctctcatatatgtct

SEQ ID NO: 5937 - DNA, 120 bp, synthetic construct
  source 1..120: mol_type = other DNA
caattatttgggagtgctttgggaatctgcagatggagatcatgtttccaaaccacaccctacaatttttttcaaaacgtatctcaaggcacatccgctatatgaaaccttccccaaatt

SEQ ID NO: 5938 - DNA, 120 bp, synthetic construct
  source 1..120: mol_type = other DNA
cttaggctgcttaactttcaagcttccatctgtaaggtggagataatataaagaggcctcctctaattttcatgcaaggctttggtgaaaaagcagtgagatgatgagtctgaatcattt

SEQ ID NO: 5939 - DNA, 120 bp, synthetic construct
  source 1..120: mol_type = other DNA
gcttctgcttcagtctgttgtgaagttacatagcatgtatcctctggaaaactctctaccctcttaaaagggtgaatgggagaaaggaaaataatatcttatcatagtcatgcacccata

SEQ ID NO: 5940 - DNA, 120 bp, synthetic construct
  source 1..120: mol_type = other DNA
gctgctctttggtggaactgaggctataagccaatgtcctagctacaaagaagggtgggaatttgagtttcgattcttgggaatttcccaaaatactgaaaggctagttgaaagaaatat

SEQ ID NO: 5941 - DNA, 120 bp, synthetic construct
  source 1..120: mol_type = other DNA
acttcttcttgtaacccaagctaaacttctgtatctccctcttgtcttacccactgtttcctagagcttctaggattctagaagcttcttcacagtttcactttttatcactcaacagtc

SEQ ID NO: 5942 - DNA, 120 bp, synthetic construct
  source 1..120: mol_type = other DNA
agaactttgagatgcatatggaaattactgctatctgatattacttatacgtgggaagcaggaatagaaacaggagataggaaactgaaaataacaaaacctccaccccaagggctaagc

SEQ ID NO: 5943 - DNA, 120 bp, synthetic construct
  source 1..120: mol_type = other DNA
tagcagttgccactgtatgagattatcttgtttggtctatttatttgcttgtcatctctctgtttacgtgaatgtgagctccataaaagcagatacttttcctaagacagtgcatggcac

SEQ ID NO: 5944 - DNA, 120 bp, synthetic construct
  source 1..120: mol_type = other DNA
tatttcttacaatgcttattttctttccatggttcccagctaattggtgtcccgtacctgtgctgatgttgaatgtttttcctccaaattaacctatagatgatttctggggtgggggtg

SEQ ID NO: 5945 - DNA, 120 bp, synthetic construct
  source 1..120: mol_type = other DNA
cttttagcaacattctgggcatgaaaggcagttgtggatccagccaaataagctgcaaacttcccgatgatatattcaccgcttttctacattttgtgatagtaataaggaaggtgttag

SEQ ID NO: 5946 - DNA, 120 bp, synthetic construct
  source 1..120: mol_type = other DNA
gtgaaattagcaccagactgggagacagaagccctgatttctttccttggcctgtccacatacaagctatgggtgtaatgaacttttgttttcccataaacattttaaaatcacttagtc

SEQ ID NO: 5947 - DNA, 120 bp, synthetic construct
  source 1..120: mol_type = other DNA
tctcagctgtcactctcagctctcctccatctaaaacatcttagttttacagttgtgcttttcatatgcctagaaatttctgggctacatttctttcccatatatggacttcatgaccgt

SEQ ID NO: 5948 - DNA, 120 bp, synthetic construct
  source 1..120: mol_type = other DNA
cacgaccaataacagaagtcagcagagactcctaggcacagagatgtgataccataattaatattttgatagcattccaaacagcaacagaataatgcctttggccaggaaatcacagat

SEQ ID NO: 5949 - DNA, 120 bp, synthetic construct
  source 1..120: mol_type = other DNA
taaaatataacatgtccactagccagatcagctgatagtagggcatataaagttatgtttaatgtggtgtattgtgtataacatatgatgtgggtggggtccgcaaaagtaagggtgcca

SEQ ID NO: 5950 - DNA, 120 bp, synthetic construct
  source 1..120: mol_type = other DNA
atctaattacacaacaaatccattcatctggcaaatacttagtgaatatctactaagtgccaggcagaatgctaaacaaacttgtccaaaacagccacatgatagcaggggcacgataac

SEQ ID NO: 5951 - DNA, 120 bp, synthetic construct
  source 1..120: mol_type = other DNA
aaaaacaagaagggcttattcagacaaatgaaataaatgccctggaggcaagaaagcacagcatataagagctgaaagtaatttgatatgaggtaaggatcctccagagagaggaacctg

SEQ ID NO: 5952 - DNA, 120 bp, synthetic construct
  source 1..120: mol_type = other DNA
tgagaaaagcagggcagatgcgccataaaccctgatctcacaattgactgaaaaatcatgagtcactaagacgttcgaattcttgatccctgcaaggaacagcaattttaattactttca

SEQ ID NO: 5953 - DNA, 120 bp, synthetic construct
  source 1..120: mol_type = other DNA
tgatacaaggtaaagattgtgcctgcttcttttacctgagtatagccagtggcagctttatgccctggcctatcatcaccatcctataaatactaattaagttcacggctaaagaacagt

SEQ ID NO: 5954 - DNA, 120 bp, synthetic construct
  source 1..120: mol_type = other DNA
tccattactgaaataatgaaatttgatgggttactattattaagatttgctaatggttttacattgcagagcttgagaccagtgaaacagagctgcttactcaggcaggctgaccacagg

SEQ ID NO: 5955 - DNA, 120 bp, synthetic construct
  source 1..120: mol_type = other DNA
tagtgtttgggagagggaaaaaggcactcctaagagttggaagagatcatttttacctatcttacaatttccaagaggagggcccttctgtggcttaactagtatttattgccaaaactt

SEQ ID NO: 5956 - DNA, 120 bp, synthetic construct
  source 1..120: mol_type = other DNA
gggagatcacatttgttagtggcttccgctaagtgaactatttgagacaacttataacttatgttgggtcaggtaactctagaagtgccctctagttggtaatagatagcttgtaatatg

SEQ ID NO: 5957 - DNA, 120 bp, synthetic construct
  source 1..120: mol_type = other DNA
ctcatgccagtcagaatggtgattattaggaagtaaataacacgctggcaaggttgtggagaaaaaggaacacttatatactgtcggtgggagtgtaaattagttcaaccattgtggaag

SEQ ID NO: 5958 - DNA, 120 bp, synthetic construct
  source 1..120: mol_type = other DNA
tccttatgtgaggactagctagttgtttatctagagaatgcctatgtaataggatgcatctgtttggctgtataaaagagtgagattcgtctttgcaatccctcagtggattccctctat

SEQ ID NO: 5959 - DNA, 120 bp, synthetic construct
  source 1..120: mol_type = other DNA
aatattacaaggcttgcgctatttggagagaaatctcctgtgtaggatactgatcagcatttatcactgattggaagatgtacagatactagagttgaagtggtcctagatgttgttggc

SEQ ID NO: 5960 - DNA, 120 bp, synthetic construct
  source 1..120: mol_type = other DNA
gtgcacagtgtaaacagtaatgcacttgaagtcacaagacctggctttgagtcccagacttgccttgttaattatgaaattctgactaggtacttagtctctttgaaacttacttttctc

SEQ ID NO: 5961 - DNA, 120 bp, synthetic construct
  source 1..120: mol_type = other DNA
aggtttgtttcctgctcattatgaagatttgggtttgttaagctcggttttctttcctgtatacaatccactgtgtctgtagttgccatatggccctctttacatcaccctgtgaaaact

SEQ ID NO: 5962 - DNA, 120 bp, synthetic construct
  source 1..120: mol_type = other DNA
acctactcacgggggtatatatgaaattccctatgttcaactgagtttctattttatcctgtatgcagcatttccattatttgtccttgggcaattcccaaaggaagtctagggcagttt

SEQ ID NO: 5963 - DNA, 120 bp, synthetic construct
  source 1..120: mol_type = other DNA
ataagccagacagaaagagaataaatgttgtataattgcacttgtataaaatatctggaacagatgaattaagagacagcagattagaggttaccagggagttgggttggaaggagtggg

SEQ ID NO: 5964 - DNA, 120 bp, synthetic construct
  source 1..120: mol_type = other DNA
gaaattagcttaggaattcagtagtccaagttcttttaacaaaggaaaaaactgaggtatacagcccatgtgctgacaaaagccagacagtagccaagcttgcctgtcttaatactctgc

SEQ ID NO: 5965 - DNA, 120 bp, synthetic construct
  source 1..120: mol_type = other DNA
gcgggtcatgtggaaacttagaagtagaatctctgccaacagaacaaaagcatctttgttcagaggcttgctgacaattttaggtgttgaaacccaacagtagaaaatggaattatagag

SEQ ID NO: 5966 - DNA, 120 bp, synthetic construct
  source 1..120: mol_type = other DNA
gtacatgcagtataattcatgagtagatgttaaaagtctgctccaatcctaaactgatagtgtaggcagtgcttctcagagtgtcccaatttttggacttcccattagttcctactcaga

SEQ ID NO: 5967 - DNA, 120 bp, synthetic construct
  source 1..120: mol_type = other DNA
aaagggctagaggggaggagttctgaaggccataaccagaatctaaaagaagttcattcccctgaggaaaattccctattaacactgttcccataattgctttcacttttatgagaaatg

SEQ ID NO: 5968 - DNA, 120 bp, synthetic construct
  source 1..120: mol_type = other DNA
ccatgtaagtcaggaacactgatgcatggttttcagagagaaaccaatagacagatactgtcttgcattgtatctaggaagcatgtctgtttaaacagatgcaaacaatggaagggcaag

SEQ ID NO: 5969 - DNA, 120 bp, synthetic construct
  source 1..120: mol_type = other DNA
gctattatagacccttaaacagggccctagagtgtgaggaaaggtcagaaaaatgctgccttatgaaatgagagccaaggaggatcatcataaaatggatgaaaatgttcacctacagaa

SEQ ID NO: 5970 - DNA, 120 bp, synthetic construct
  source 1..120: mol_type = other DNA
tttttaacaaaagttcgtgagaatatatctgtcaaactcttttgctagatgctttatgttcactgaatcctcactgtgtcccccacatgcttgtatagtcccttatccactgtggaccct

SEQ ID NO: 5971 - DNA, 120 bp, synthetic construct
  source 1..120: mol_type = other DNA
ctaatgattataatcgaatatgtgaaaatatagagatatggaggggttttggaagaatcaaagcagggcaagtacctcatttatagagggaaggggaaatgtgaaggcttcctggaagag

SEQ ID NO: 5972 - DNA, 120 bp, synthetic construct
  source 1..120: mol_type = other DNA
tagctgaacccacgaaaagaaaaggacccagcagaagcaagaataaaaaatgagaaggtagagaatgggtctctggagaatattaccatttaaggaagaggagaaaaggagtctgcaaaa

SEQ ID NO: 5973 - DNA, 120 bp, synthetic construct
  source 1..120: mol_type = other DNA
caattggaagatgggagtagaaaaaaacaattgtgcatgatggtcttttcttggggaagaatgggacatgattatctgccttagacagtggcaatcaaaggctgtaaaaaggacctaaac

SEQ ID NO: 5974 - DNA, 120 bp, synthetic construct
  source 1..120: mol_type = other DNA
cacctctttctttcttatgacctgatcgtttcttaattattctcaccagtttccagtggccatggatcatctatgctgtgctaagtgctgttttattgagcatgttttcccaaagatgag

SEQ ID NO: 5975 - DNA, 120 bp, synthetic construct
  source 1..120: mol_type = other DNA
gagaaagtgaaaagatagagaaaccaaaggagacttggactaattcaagtttccgtttgtattctggtagatgctaacttaccatatgatctcccagaagtggaagtgaggacaggtaac

SEQ ID NO: 5976 - DNA, 120 bp, synthetic construct
  source 1..120: mol_type = other DNA
ggaatgcagtagatggcaaaggtggtatatgaagtctatggggaaacaaatgatgctgggacaataggttgccatgcagaaaaagataaaattagatcacgtgttaatttctaaatggcc

SEQ ID NO: 5977 - DNA, 120 bp, synthetic construct
  source 1..120: mol_type = other DNA
taaagtagcttctattttctcttctcatggcattggcagatggaaaaaggatacatcatgaagggtccatgagaaaagaaaccatcctgaggaaagggtttgctcattttatacgttgcg

SEQ ID NO: 5978 - DNA, 120 bp, synthetic construct
  source 1..120: mol_type = other DNA
tttaccagaatgagctcacaccatgcataccactccaaaacttgcttcttgcatttaacattatgaacattccttcacttaaatatcaaatacagtggtccccccttgtctgagggccat

SEQ ID NO: 5979 - DNA, 120 bp, synthetic construct
  source 1..120: mol_type = other DNA
gattctctcaagtggaattggtaggtcaagttttaatagcttttgctagatggcccaagaacaaataattcacatttccacaagcagggttttgagagagtgcaagtggtgccatattca

SEQ ID NO: 5980 - DNA, 120 bp, synthetic construct
  source 1..120: mol_type = other DNA
gaaaaggtgagaaaatagcctggggagagtcaaacaaaaaagatagagtaatattagtaccacataaagcagaattcaaggtcccaaacctgtccttggggtcagggagagaaaaagcaa

SEQ ID NO: 5981 - DNA, 120 bp, synthetic construct
  source 1..120: mol_type = other DNA
aaaaaattaccagacatatcaacagacagaatgaagagaaaaacaaccccaaaactcagaaaagagaaatccctaggtaatcccacaacccagaaaagagagatccagataacttgtgat

SEQ ID NO: 5982 - DNA, 120 bp, synthetic construct
  source 1..120: mol_type = other DNA
aaacattctgaagcagcagggcgtggcacaaggtgatgtttctgaaggaataaaaataagactgacagctggattcttacaaacaaaaaatataagcctggaatgttggatttgccacct

SEQ ID NO: 5983 - DNA, 120 bp, synthetic construct
  source 1..120: mol_type = other DNA
ctgtaggtccttcattagatctgcctttttcctttttacattttccgcttgccccctcctcagggcacacacctcagacttctagtatagattctatgtaacttttttttattcttttgt

SEQ ID NO: 5984 - DNA, 120 bp, synthetic construct
  source 1..120: mol_type = other DNA
attataagtgatatcatcctgtgcaactgagttctctgaagctgattttctttaaggggctttgtatactactgggtccgtactcagtgctcagaaactgttaccttactactggtgtta

SEQ ID NO: 5985 - DNA, 120 bp, synthetic construct
  source 1..120: mol_type = other DNA
attattgtgttggctcttattattggtactattattccaatgctgtggataagctcactcaagcccttgatttcaagcggtggaatctcatagtctctcatattagcggatgctggcact

SEQ ID NO: 5986 - DNA, 120 bp, synthetic construct
  source 1..120: mol_type = other DNA
ggtggtggcaaagggcaacacaatatatttttagtatttgaaaaaagcccactggcaactgtacttaactatgataagctagcactggctgatgaatgcagggtttgaaaatttctagtg

SEQ ID NO: 5987 - DNA, 120 bp, synthetic construct
  source 1..120: mol_type = other DNA
gtaagagatactgcaggtcacctgctatatgaggaaggttagagtgtgctttatggacataaacaaagtgtcctggttttgtgttttggagggggattaagcagttatgtaaaccttaat

SEQ ID NO: 5988 - DNA, 120 bp, synthetic construct
  source 1..120: mol_type = other DNA
ccttcctccttcacattctctagggctgggttgatgttttttaatcttagcccctaagacttgaccagaaaatttccctttaaagatagctatcataacctgtctctaagctctgagtga

SEQ ID NO: 5989 - DNA, 120 bp, synthetic construct
  source 1..120: mol_type = other DNA
taaaatataagtaacatagtaggctctagtctataaacaaagacttctatttatagtttgtttgccccctgagccccatctcatctgctggtggcatgcacatgctctttattaccagtg

SEQ ID NO: 5990 - DNA, 120 bp, synthetic construct
  source 1..120: mol_type = other DNA
ccagtgttaatcccatagtaattggatgtactttgggttacagttctcagccattcttaagctgaattgccacagctgctgtcaggaatttcagctcctataatgttgcttagctaataa

SEQ ID NO: 5991 - DNA, 120 bp, synthetic construct
  source 1..120: mol_type = other DNA
ttcgtccgtttagagtagtgtagttagttaggggccaacgaagaagaaagaagacgcgattagtgcagagatgctggaggtggtcagttactaagctagagtaagatagcggagcgaaaa

SEQ ID NO: 5992 - DNA, 120 bp, synthetic construct
  source 1..120: mol_type = other DNA
atttggttactgttctatattttgaaaaggattgcgaaaaagtctccagcgctgcctcttattcctgtactcagttttacctgacaagcagtctttacagcgttcctcggaattgctaaa

SEQ ID NO: 5993 - DNA, 120 bp, synthetic construct
  source 1..120: mol_type = other DNA
atgtcaaggtaggatttggggtgctttagcaaaaatgacggtgtttttctatctgcattatctagagagggttattaaccctttctatgctttcttgaggggtttatctccatctagagg

SEQ ID NO: 5994 - DNA, 120 bp, synthetic construct
  source 1..120: mol_type = other DNA
tccagtctaatgtgtgctcaagttatggatctctccaacactgccattcttcaagacattttaagaaggctttttcatatactgagaacattgctgcaagacagtctagtcatctccatt

SEQ ID NO: 5995 - DNA, 120 bp, synthetic construct
  source 1..120: mol_type = other DNA
tattgaaagctattagaaagcctttagaactgcattgtccagtgcaacagccaccatatatgggtatttaaattcagagttgaattagcgttaatggcaaggtgtggggttgagctcaat

SEQ ID NO: 5996 - DNA, 120 bp, synthetic construct
  source 1..120: mol_type = other DNA
ttgaaattcaagcagtaaaatagaagctctgaaggtctaagaccgactgacagaaggatcagtaaaaatcgtttatctctttccgtaccgatagtgctcccgaaaacatggtgaatgttc

SEQ ID NO: 5997 - DNA, 120 bp, synthetic construct
  source 1..120: mol_type = other DNA
cgtttcaagccccacctcttgcaggaagcttttgttgactagcccacatatatgataagtgccttgcccatagtaggtaatcagttaacatatcttgattgattgtattgtattccaatg

SEQ ID NO: 5998 - DNA, 120 bp, synthetic construct
  source 1..120: mol_type = other DNA
tagcaagggcagattctttagtttggaggattattacccacctctcactgggtaactgtctgtgtcaaattttcctgcttctactaccaaacctcagccaatttcctaaatttcacgtaa

SEQ ID NO: 5999 - DNA, 120 bp, synthetic construct
  source 1..120: mol_type = other DNA
ttatagactcttagggttagtaattgaaagctcatttcagacaactccctatctcatgtttgaactctgcacatctcccactctctttacaatggcaccaaataatgctacccaattcct

SEQ ID NO: 6000 - DNA, 120 bp, synthetic construct
  source 1..120: mol_type = other DNA
aagcactgtgggaaaggtatttatagtgcaaatttggagttaactagaacctaagttctagtctgttataagcctctatgtcctcctccgccaaaagagaaaatcagactggatggttac

SEQ ID NO: 6001 - DNA, 120 bp, synthetic construct
  source 1..120: mol_type = other DNA
ctatagctctaaaggcttcagaaagagagattacaaataacatgtagacaactccaaatttcttgatcttactacagattcgctaatgcagatatgtttttttgagattcatcccaatat

SEQ ID NO: 6002 - DNA, 120 bp, synthetic construct
  source 1..120: mol_type = other DNA
gcaagcacgaaccaccatgctcggccctaaaatttcattctatttccagtactttcccctctcttcatgtcatggatatttagttccagagaacttcagatgcttagaaataaatgatac

SEQ ID NO: 6003 - DNA, 120 bp, synthetic construct
  source 1..120: mol_type = other DNA
tatgatcattttgcccctgtactagaacatttattttttgaggagtattcagtttcctctatttgtattcagaactcctttgagtctttggggggtgatcccaaatggcaggaagaagaa

SEQ ID NO: 6004 - DNA, 120 bp, synthetic construct
  source 1..120: mol_type = other DNA
ttggcatagagaggaaatgaattggagcttgaggacaagtagggtttgaattgacacagaaggacaatattccaaagggccataggatattcatgtttcacggtatgagaagaggtaaat

SEQ ID NO: 6005 - DNA, 120 bp, synthetic construct
  source 1..120: mol_type = other DNA
ccaaacctctttttgactgactcacagagattttcggatggataagacttttgtttaacaacagaaaaagcctccatgagtctggagtcattcatattcagtcctgttgcttttattccc

SEQ ID NO: 6006 - DNA, 120 bp, synthetic construct
  source 1..120: mol_type = other DNA
taaggaaaccagtgaccttcatgtggtttttaaggacaatgtctctgtgaactacagactatgtgaaagatgaaatcataacatgaacaatcaaacaagctcaatggcatgatctaaaag

SEQ ID NO: 6007 - DNA, 120 bp, synthetic construct
  source 1..120: mol_type = other DNA
aagtcatgtgcccaaacacacagctaataaggcgttgagccaagattcaaacccatatctgtctaattacaaaggttgtgtgctctttttccatagtaccttgattaacagccttaaggt

SEQ ID NO: 6008 - DNA, 120 bp, synthetic construct
  source 1..120: mol_type = other DNA
ttaggaaaatcaccagtggtctatatgctggtacaatttaagcaagaagacagttgagaggaagagataggcttgcaaatcaaggtacagaattgccccagataacttttttcatgtgcg

SEQ ID NO: 6009 - DNA, 120 bp, synthetic construct
  source 1..120: mol_type = other DNA
tttaaaagacctttagtccattctacttttcttgaagacggaggaccataagggatataaaggtttcactgaatactaagagcccgaaaaactgcttggctgatttgactaataaaactc

SEQ ID NO: 6010 - DNA, 120 bp, synthetic construct
  source 1..120: mol_type = other DNA
ggaaggaaaggagttgttgttttgtagaaggtgctggggtttgagagatcattcggacacgattggcagagggagcacgtgtgtttttatgagaattatgccgagataggtaacagatga

SEQ ID NO: 6011 - DNA, 120 bp, synthetic construct
  source 1..120: mol_type = other DNA
gttacccgaagctcggcatctgtgatggtctagggggcttccgaggcgatcgggcagtgtcagtcttcagccgctaatccgagaagatctgggaaggagtcagtcagagagccttgggcc

SEQ ID NO: 6012 - DNA, 120 bp, synthetic construct
  source 1..120: mol_type = other DNA
actaggaagggactgacgtgtaaaagaatgcctggacgtcaggcacctcagaccatttgcctattttatgacaagaattatttagattttgcaggatggaaaaattcaaagtgccatttt

SEQ ID NO: 6013 - DNA, 120 bp, synthetic construct
  source 1..120: mol_type = other DNA
ggtccacggataaaacatgtctcctttgtctctcccagaaaatgaaaggaattgaaattaagagaagggagagattgaagagtggaaaggagaaagtggttgatggacagtgagagaggt

SEQ ID NO: 6014 - DNA, 120 bp, synthetic construct
  source 1..120: mol_type = other DNA
cctcaccaaagaagtcactaggacctatggtacaacgttaagatcaatgatgaaaaagagtcatcctcaatggaagagtatgcatcattctgattatacacaagcattgattatttgctg

SEQ ID NO: 6015 - DNA, 120 bp, synthetic construct
  source 1..120: mol_type = other DNA
taggcaaccagtaatcctttttatctctgtagatttgcttattctgagaacctgcaaacttttaagggatgtacttgctgggaatgtcagagaagttgtttgagattaagaagggttggc

SEQ ID NO: 6016 - DNA, 120 bp, synthetic construct
  source 1..120: mol_type = other DNA
ggtttttttctgttgtaattactcttttggttgaccacgttcggttggacttctgaccattgttccaagcatccactccattactctatttgacatgacacagtgagtttaaaggacagt

SEQ ID NO: 6017 - DNA, 120 bp, synthetic construct
  source 1..120: mol_type = other DNA
aaatattctgtgcacaatttttgtagaatggaatggcatggtgtttggattaatatgtacggcaaggttatggtcaggcacatctatgttttctatctagagtcactcgcctacaaaggg

SEQ ID NO: 6018 - DNA, 120 bp, synthetic construct
  source 1..120: mol_type = other DNA
tgagatgatctcatgcgtttctgcgatgcgatgtataattcttgttgtatagaataataacttggccaccagcttcttcaccaagcatggagtctcatcattgctccaagattgctatta

SEQ ID NO: 6019 - DNA, 120 bp, synthetic construct
  source 1..120: mol_type = other DNA
caacttgacatttgacttagaattttgctgattcatttagaattcttaactaatatttaatttcctctttagcagaaggacgaacactgacttacctgctataggaatggggtccggatc

SEQ ID NO: 6020 - DNA, 120 bp, synthetic construct
  source 1..120: mol_type = other DNA
ttttcagccattcattatatgtgaatggtatacctactctgtgtggcaccttacttatggagttcttactgcatttttctcaatgtttgcttttagggttatcagctaacacccgcgagc

SEQ ID NO: 6021 - DNA, 120 bp, synthetic construct
  source 1..120: mol_type = other DNA
gcgtgaaccacctagcccagcctgctttcagtaacaaactcttatatccatgattggggtgtaggaaatctagctgttgttttctatgataaattttagaaaacatagctagctcttcaa

SEQ ID NO: 6022 - DNA, 120 bp, synthetic construct
  source 1..120: mol_type = other DNA
gatgttttcaatgcgttggtgaaataggttaacctggacatgcaggtaagtttctactctcaggcttcaaacaatgttcacacaagactatctcacatatatcattggcatggtaagcct

SEQ ID NO: 6023 - DNA, 120 bp, synthetic construct
  source 1..120: mol_type = other DNA
cataagccaccgcgcccagcattttaagctatataattcaataaatcttaaaaagaaatttgtctccactatcatttgaacttagtaataccttccgtaaagccttacttatgctaccta

SEQ ID NO: 6024 - DNA, 120 bp, synthetic construct
  source 1..120: mol_type = other DNA
tttatgaaaggagcagagaattgagtgtgttaagtaacaataatttgttctatatatagcacatgtattttatatcacttacaggaactaacatgaagtcttgcacataatatacattca

SEQ ID NO: 6025 - DNA, 120 bp, synthetic construct
  source 1..120: mol_type = other DNA
cctccagcaaattaaacatatggcccagacaagtagtacattgtgcacataaaatttctaacaattcctttcagagattgccactgtgtagatctaagtacagttgtccacttagttctc

SEQ ID NO: 6026 - DNA, 120 bp, synthetic construct
  source 1..120: mol_type = other DNA
aggaaaataccaaaatctttatcatggtttataaaagacaacctgatctggttcctcttcagcatcatatattccctcacccccctcatgaatagttgggccccactgatctactttcag

SEQ ID NO: 6027 - DNA, 120 bp, synthetic construct
  source 1..120: mol_type = other DNA
ttttattatcctggtcatgtttcctgtttttcatctgctaaaagattgatgattttaagacagcatgatgagtgctagactagtgcagtcagtctggggaggaatctgagttctgcattt

SEQ ID NO: 6028 - DNA, 120 bp, synthetic construct
  source 1..120: mol_type = other DNA
ttacagttgagctaggacttgaagaaggaaggcttttcctggacagacaagtaggagaaagtgaaagacaaagatgtaagccagcaacagcattagtatgttctctgaactgaaagcaat

SEQ ID NO: 6029 - DNA, 120 bp, synthetic construct
  source 1..120: mol_type = other DNA
ttttggaaactctcttctcccaattatttttctatttcccatctcgttctcacccatttccccacaggatgctgtccagttgttttggaggtatgtttcattggaatagtggagttaaga

SEQ ID NO: 6030 - DNA, 120 bp, synthetic construct
  source 1..120: mol_type = other DNA
catatgaggcctaggggcttaagcgagttatccacagtcccctgagtcctataggtttctattgtgtcaatctggtaatattaagtacctaacacataccagatgttaaacaaatgttaa

SEQ ID NO: 6031 - DNA, 120 bp, synthetic construct
  source 1..120: mol_type = other DNA
ttatgggcgtgacctaccccacccagccccaaaagttgtcttttaatagttgaagcaatgtttactggtagagcataagcgctcaataaatgtgttaaataaatatcagatgaaagagta

SEQ ID NO: 6032 - DNA, 120 bp, synthetic construct
  source 1..120: mol_type = other DNA
gtgagaagtggcttttgagctcaacattgaagacagaatagaatttagaatttgaagggggaaagagaaagagtatctcaaagtgtgtgttggagtaggggagtttcatgaaaagcttgg

SEQ ID NO: 6033 - DNA, 120 bp, synthetic construct
  source 1..120: mol_type = other DNA
atgctttgtgctaattattatacctgtaacaaacatcccttgccaccaggtggctacagagttatgccatgttttcaagagcttaagactccaatgtagtgaaagcttttccaactcaca

SEQ ID NO: 6034 - DNA, 120 bp, synthetic construct
  source 1..120: mol_type = other DNA
agaagatccttaaggaagtgctcttatcaactgggatgaattgtataatcattttctgtcattatctctttcatatcattgcacagtctcctttttatgccccatgcaggcccttgcaca

SEQ ID NO: 6035 - DNA, 120 bp, synthetic construct
  source 1..120: mol_type = other DNA
ccaccgcgcctggccaatatccttatattaaggaactcttatttgtttagaaatgctcctcttaaatttcagtcctccaaataaacaaacacattgaccagtatttgttgcaactagtag

SEQ ID NO: 6036 - DNA, 120 bp, synthetic construct
  source 1..120: mol_type = other DNA
cccatacagggaggacaggcaagaaagtaatgggacattttatacctattgtaagaaccaagcatttgtgggaacgtgaaccaactggatctcttacacattgctagcagaaatataaat

SEQ ID NO: 6037 - DNA, 120 bp, synthetic construct
  source 1..120: mol_type = other DNA
atgaagtagttattactgattccatttaatatatatgaaaacagaggctacaagaacttgagtgagtttaccaaagtcccacagctagtcagtgacagtgctgggattctgagcccagat

SEQ ID NO: 6038 - DNA, 120 bp, synthetic construct
  source 1..120: mol_type = other DNA
ggttttctccttttgatgtgatgaaaatgagattataattatcttatagatgatggcacccatgtatttgccccacatttctactagcttcctgacaagctaggcttccccagcctcttc

SEQ ID NO: 6039 - DNA, 120 bp, synthetic construct
  source 1..120: mol_type = other DNA
attgaggggggactcccacaaaaaggacatggccctcattaacccaaggtcatatttatgttctgatcataaatcagatcagatcaggtagcaaaagaatgtacacaatctgcatttcat

SEQ ID NO: 6040 - DNA, 120 bp, synthetic construct
  source 1..120: mol_type = other DNA
gcatttaccctcttgccagcttgatgtatctgcactgcctatttgttctttgttactgtcaagatagcaaatttctatctggagcagatggtgtaactgccattgttcaaatgcttcaaa

SEQ ID NO: 6041 - DNA, 120 bp, synthetic construct
  source 1..120: mol_type = other DNA
acgttctaacagcatgcccccctcaccccatgtagaaagccatcatacttcatattttaccatcaggaaggaattagaaacaaggctaatttttttactctccaccatattttcaatgct

SEQ ID NO: 6042 - DNA, 120 bp, synthetic construct
  source 1..120: mol_type = other DNA
ttaaggctagtttaatggagttgctgtactaaaagacattgtgggcatgaagtcacatagttatggggatgaagacgaatatggtctacagcggatcaatcaacagtggaaatgactgaa

SEQ ID NO: 6043 - DNA, 120 bp, synthetic construct
  source 1..120: mol_type = other DNA
aatgcagatcatgtttaagttgatagctcattcttttatctttgtcacttgtcagaagtcagagacagatattgtgtgtgcctctacaggatatagttaaagccaggtggagtctacctc

SEQ ID NO: 6044 - DNA, 120 bp, synthetic construct
  source 1..120: mol_type = other DNA
aatgagctcaattatttcagggtctagaagcaaacacaacgtaaacctctactcatcgtgtatgtgtgtcggtatgtgttagtgtttaattaccactgtggcaaaataagagcatgatcc

SEQ ID NO: 6045 - DNA, 120 bp, synthetic construct
  source 1..120: mol_type = other DNA
aaacagggagtttcctctcagatgagctagtgaaaacctactcatgccccaaacaatgtagtaaacacaaattgagagcgagcaacaaaatagcccgagagttcaatataatgtggaaat

SEQ ID NO: 6046 - DNA, 120 bp, synthetic construct
  source 1..120: mol_type = other DNA
ttcgttgggatagaagatggacccgctggttgtaatcaatgcattgaggactctcagatcagtgggactgtgaaattttaaactcctcaaggtagaacacagtggtaatgttttgaaatt

SEQ ID NO: 6047 - DNA, 120 bp, synthetic construct
  source 1..120: mol_type = other DNA
agaaataagggaggcttcttatatgacacggaatgctagttagaataaagtacacggctgggccattgggaagttgaacattaaagactttgccaatcacatcttatcatttgccacact

SEQ ID NO: 6048 - DNA, 120 bp, synthetic construct
  source 1..120: mol_type = other DNA
ctctgttagaagctcttctgatatggtgacattgattagtatattctcatttaaaagtggagaaacagttctgtgaaatactgaacatggatttctgactagctctcatagtgagggttt

SEQ ID NO: 6049 - DNA, 120 bp, synthetic construct
  source 1..120: mol_type = other DNA
tttaggtgttgttgcttggcttttgttttgtttgtagggctgctgtacctgaatgataacatttttctagcttctgagtttgtttagaaaaatgtgtgatcttgtaatttagggcagtgg

SEQ ID NO: 6050 - DNA, 120 bp, synthetic construct
  source 1..120: mol_type = other DNA
atgttggctttttttcaagtgaaaatatgaaccacagttaaattggatgatttaacctgggcagtatggggatagtaacagggtgggaaagagtctttgagctttgactttgtgtcctgt

SEQ ID NO: 6051 - DNA, 120 bp, synthetic construct
  source 1..120: mol_type = other DNA
tcttacctctttatggtttatcgagttggcatatcacctacttatgggatctgaacgttttggtgcttgagcctctgttgagtattacatgcctctgctaataaactaagtactgctaga

SEQ ID NO: 6052 - DNA, 120 bp, synthetic construct
  source 1..120: mol_type = other DNA
agggagtgattgatgggggaagtggaagaaggagagagagggagaacgtaataataaaaaaaatgagtaaatgacaaaaaattagggaagcaaactgccccagttgaaaactgatttcca

SEQ ID NO: 6053 - DNA, 120 bp, synthetic construct
  source 1..120: mol_type = other DNA
gtgatattcttagagacatctgtgatttgaccatatggctgatcattctatttttagtgcataccacagatctgttaataaaggctaaattgtctttaattttaggttcagacctatgat

SEQ ID NO: 6054 - DNA, 120 bp, synthetic construct
  source 1..120: mol_type = other DNA
cccttttaattttcctcaacttcaaatatgtataggtagtttgcttagcactgttcacttctctgtttactatatgcctactgtgggccagacactgtggcaggtgttaggaacccaaaa

SEQ ID NO: 6055 - DNA, 120 bp, synthetic construct
  source 1..120: mol_type = other DNA
atgtcaaggtgccatgttttggaataacacgtcctggtctccatcattattgtactactacggtcttctagaaacttcctttttccattaaaagttatacaggtccaggcaccgtgactc

SEQ ID NO: 6056 - DNA, 120 bp, synthetic construct
  source 1..120: mol_type = other DNA
aatgcagttttctctgaagaatgctttgtgtcttctgaattgggggacaccagcaaggcttttagccataggaacataagaaattcttgtggtcacagagcaaaggtaatctttcatctt

SEQ ID NO: 6057 - DNA, 120 bp, synthetic construct
  source 1..120: mol_type = other DNA
ttgtacttggtgttctctctggaacactagttttccatttcttcaaatgactagatcatcctcattcttcaagtctcatgtcatatgtgactgcttggaagagttccatcctgatcatgc

SEQ ID NO: 6058 - DNA, 120 bp, synthetic construct
  source 1..120: mol_type = other DNA
tggctctaggatgtgctcattgcatgggctgtgtatagtattattcaatacccagagcatgcagtgtgaacataatagagattgaaagacagccagaagggtaaaacatgaattcttaaa

SEQ ID NO: 6059 - DNA, 120 bp, synthetic construct
  source 1..120: mol_type = other DNA
tcttatttgagcacctgttatgtggaggatacaatcctacgacccagacagaccttatgatctagtatgggagagaagaaatataaggagaatgcacaagtgatcgccatatctgaaagt

SEQ ID NO: 6060 - DNA, 120 bp, synthetic construct
  source 1..120: mol_type = other DNA
agggagagtgttaggagaaaagcaaactgattgtcccacccaaaatatttatgcctgtcttgtaagtgatatgcagatcactttgactctaagctagttttctcatccccttttcatgca

SEQ ID NO: 6061 - DNA, 120 bp, synthetic construct
  source 1..120: mol_type = other DNA
tggcactgaaactttaccccacattgttcttttattcattaactaaagttgtaccctaatacttggttctgtactaggagctgcagatacagcaatgaataagacacaatccctcccttc

SEQ ID NO: 6062 - DNA, 120 bp, synthetic construct
  source 1..120: mol_type = other DNA
aaataattttacagctacctcatgtatcagcccaaaatgttagtaaatgacttgtcttcctacaactctggatgagatatatctatatctgccttttaggggctggtggggctacacact

SEQ ID NO: 6063 - DNA, 120 bp, synthetic construct
  source 1..120: mol_type = other DNA
aaagtcctgctttcaaggagtcaggttctgcttttgctttacctataactctctatagtctaaaaaggaaggagaaatggagtgagaaacagaaatagagagtttttaatccagagagac

SEQ ID NO: 6064 - DNA, 120 bp, synthetic construct
  source 1..120: mol_type = other DNA
gaagtaaccgattgcaatgaatagaagaaatctgttttaatgtggtaagtctacctcccttaagatacagtttgtctagggcagctgtgaatttgttcctatacttcatggcccacctaa

SEQ ID NO: 6065 - DNA, 120 bp, synthetic construct
  source 1..120: mol_type = other DNA
ctgtctctatcaccagatagccaaagtagaattttagtatgtgctcatggaatggtgggtggatcgatgaagattatcaggaatattggagggtttctattttatctcttgtggtatggc

SEQ ID NO: 6066 - DNA, 120 bp, synthetic construct
  source 1..120: mol_type = other DNA
tagaagaataatcagcagacttcactttaaccaagtaatcaaggttataacagtgacagtttttatgctcatcccatctcctcaccatcatataatgcattgagaagaacacagcatcac

SEQ ID NO: 6067 - DNA, 120 bp, synthetic construct
  source 1..120: mol_type = other DNA
ccctgtcaattcattattaggagaaacaagaatcttgaaaaagtctttcctatgcatccagcaataaatgtattctactccaccatggactgtttattgactttattacaagtccattat

SEQ ID NO: 6068 - DNA, 120 bp, synthetic construct
  source 1..120: mol_type = other DNA
tccttttggcgtccagagatctcaaatccttgagcatttcagggaccactactgtgtaatacccaactgtggttttgttcttgactttcatttaaatctgccatgaaaacacacataaca

SEQ ID NO: 6069 - DNA, 120 bp, synthetic construct
  source 1..120: mol_type = other DNA
tgactgtgcagacacatgcagaatccattatgcattaaagggaccaataacttctcctttcactgataataattcatgtagtgttataaacaatgctaatcttgccaggagatggcttct

SEQ ID NO: 6070 - DNA, 120 bp, synthetic construct
  source 1..120: mol_type = other DNA
atatgatgctaagagctctgaaacagcagggctgttttccaaatttagcccccactaagtgagggaaatgcatttccaactctatgtttgcttttaattatttatttaccaggttgccct

SEQ ID NO: 6071 - DNA, 120 bp, synthetic construct
  source 1..120: mol_type = other DNA
catctgacatatacccgtgcaaagttttaagattcagcagtaaagcttttattctcctaccacaatcactatggctgccactggttgtgaaaatcacctcattttattgtttttttcttc

SEQ ID NO: 6072 - DNA, 120 bp, synthetic construct
  source 1..120: mol_type = other DNA
actgatctgtttcaggatctgtctgcttccttagagtttcaatttgattatttggcctttggcatgattgcctccatttttgttcgatctgctctttagggccaactgtagtagctaaat

SEQ ID NO: 6073 - DNA, 120 bp, synthetic construct
  source 1..120: mol_type = other DNA
cagaacctgtttatgaaaagatgtgccttctcacttcgtgctgctgaagaaagatccacagtgatagtagagaaagcaacatattagctgctaaaaagattgcaaacataaactacaatt

SEQ ID NO: 6074 - DNA, 120 bp, synthetic construct
  source 1..120: mol_type = other DNA
ggtgacattgaagtaacatgtaaaatgatttctaggaagccaaggaactaaattgtactcaactagtttttcctgtgagcccagattgtgcacagaccctcttccaaacgtgtttcacaa

SEQ ID NO: 6075 - DNA, 120 bp, synthetic construct
  source 1..120: mol_type = other DNA
ctcttacataaccctcctgctttggaggatctaaagcacaaaatggaagagagattatatagccacagtttttccttgggattattaggtatttcaagtaagtgttagatacttagggcc

SEQ ID NO: 6076 - DNA, 120 bp, synthetic construct
  source 1..120: mol_type = other DNA
ccaaactcttactgagcccccttcgtctattacttagaattgtgatgatcatatgaattgggaatcatttaattgagcataataatcatcaggcaagccagtgaaccaggttgttgaaca

SEQ ID NO: 6077 - DNA, 120 bp, synthetic construct
  source 1..120: mol_type = other DNA
atttttgacagatagattattaatatcctctatatgcaaacccatagactattatcacgagttagccatgtgtttgcctttaggcagtttgcccgaataaaaaatattcaagagcaaatt

SEQ ID NO: 6078 - DNA, 120 bp, synthetic construct
  source 1..120: mol_type = other DNA
ctcacaagatttggatttgtaacacgttgctacaagatttgggtttgacatttgctttaacgtttaattcaattatttttacatttccactgagattgacttgtataacaacatggtgtt

SEQ ID NO: 6079 - DNA, 120 bp, synthetic construct
  source 1..120: mol_type = other DNA
tgggtattccttacctttgatatgagagttaaatggaatagtgtaattatatacctagctgtaaaatagctatagctaattctccattaaaaatattcacttgtacacatgcacacaacc

SEQ ID NO: 6080 - DNA, 120 bp, synthetic construct
  source 1..120: mol_type = other DNA
agtaagagattaagaaatctaaggtcattatgattcaacctttccttccctataaactttcagaaaaccctctttgctactctctcttctcgggatcttcatctccaagggaggggattc

SEQ ID NO: 6081 - DNA, 120 bp, synthetic construct
  source 1..120: mol_type = other DNA
tctaaatctgcagtagtcaggatataaaggagaaatgtgtcttctggcgccccttttcctatctgcttctctacttcagatgtttatttttgtatttctgctcatatcctcccaaattgt

SEQ ID NO: 6082 - DNA, 120 bp, synthetic construct
  source 1..120: mol_type = other DNA
cggagctttgttgtagtacactgaaataatgactcatcatacaatatgtgatgacctaaaatagttgctgtagcttcccaatgtgccagaaagaaatagctgaagccctgacatcttgtt

SEQ ID NO: 6083 - DNA, 120 bp, synthetic construct
  source 1..120: mol_type = other DNA
caccgcgctcagcctttaagactttttgataaccatatctcatattgtgtaggtaaataagaaccctgaaaatcatctgcctgcaatcataagttttgtctgtagcttcctaatgcatat

SEQ ID NO: 6084 - DNA, 120 bp, synthetic construct
  source 1..120: mol_type = other DNA
tacgggaaataaactatggtggcaattttgagaagaactgaaatgggtaagagtctggaagcaaggaaaaatatggcgagactattggaataatctagatgaaagttgatgagggcctag

SEQ ID NO: 6085 - DNA, 120 bp, synthetic construct
  source 1..120: mol_type = other DNA
tcgagataagagagagaaaactaagctctagtgatgcagtggcagattggcgattagtaggcagaccattctggggaatgaatagagcctcatgagtaattatttaacatgaaagatagt

SEQ ID NO: 6086 - DNA, 120 bp, synthetic construct
  source 1..120: mol_type = other DNA
gccactgcaccttgcccagtgtgacagatttttaaaagcgaagatgaccttggagataatccagtgagaaaatcacactcaactggaatgtaaactccatgaaataagccatttcatact

SEQ ID NO: 6087 - DNA, 120 bp, synthetic construct
  source 1..120: mol_type = other DNA
aagacccaaagacatcattagagctgaacacctatatgctgaattggacaaaaagtaataagctgtgaaaatgtgacaaggcaaaagttctagggctatgggacttgtttgggtggagat

SEQ ID NO: 6088 - DNA, 120 bp, synthetic construct
  source 1..120: mol_type = other DNA
ttgatgcttcaagagaacgacttatcctagatcaactagtggcagagcaagttttagcaatgagtaacactgcaagaaacaaaaggataaagaagactcaagttacaatttgcagttggg

SEQ ID NO: 6089 - DNA, 120 bp, synthetic construct
  source 1..120: mol_type = other DNA
cttcatagaaataaatcttatttcttttgtttacccaggaaaagagaaagaaatctgtagttcatttagagataaggtctgtctcctgctcaccctccgcctttccttccctccatccct

SEQ ID NO: 6090 - DNA, 120 bp, synthetic construct
  source 1..120: mol_type = other DNA
ttttttttccttgcattctctatccctagtaaatgtaagctgaagtttcatcctggtatcgggggagagggataaagggactcatcatccataaaacttaggtattggtaaagaagaaca

SEQ ID NO: 6091 - DNA, 120 bp, synthetic construct
  source 1..120: mol_type = other DNA
ttaccctggttctcttgactatttcttgaaagggggagatatttttctaaggaaaaataggcagataatttctacttttatgagactctttacaaacactctaagaataagtgcaaaaac

SEQ ID NO: 6092 - DNA, 120 bp, synthetic construct
  source 1..120: mol_type = other DNA
tggagactgtcagtaaaactatctcttttcattgctaacacttcattggaccgattagatgacttctgaattcattagtgaagtgctaacttcctactggaactggaactggcatagtgt

SEQ ID NO: 6093 - DNA, 120 bp, synthetic construct
  source 1..120: mol_type = other DNA
aatatgaaaattcttcagctgaaggaataatttttagctaccccacttcatggcatgttccagaaataattccccactgggtcaacatcccccagagctcttcttcacagacaaatagag

SEQ ID NO: 6094 - DNA, 120 bp, synthetic construct
  source 1..120: mol_type = other DNA
acttgctttggaaaatgctatgcagaacagttacttagcatgtgtagcaagatacgaagtgggaaatacagatgaaaaacaagtttacactgtttagaaaacaatttggtctagtgctgg

SEQ ID NO: 6095 - DNA, 120 bp, synthetic construct
  source 1..120: mol_type = other DNA
gtaagtaaataggcgttttgtttaacaaatcagactgaacagagttagtacaatttggctggccagggcctagcattaaagagaaaactgagaaaatttgcatagctgtggtgttccaga

SEQ ID NO: 6096 - DNA, 120 bp, synthetic construct
  source 1..120: mol_type = other DNA
tgccagacaaccatttctgtgtgacttcaaagacagcatcacttcctccaaatgaaagtgagtataggatttgtagtagtgaaatgactcattataaccaatcaatgtaaagatggtaaa

SEQ ID NO: 6097 - DNA, 120 bp, synthetic construct
  source 1..120: mol_type = other DNA
cagcttgcaacccagccatttcctcctctccaagtagggggcaagaattaaatatgctaacatgcagaagttcttcctagcacagtacctttcatttaatatgtgatagttttcctttta

SEQ ID NO: 6098 - DNA, 120 bp, synthetic construct
  source 1..120: mol_type = other DNA
gtttgtgagctagaaatgggcatatacaggactagggtaaaatgaaaatcacattatcaactgcccgatgctaagtgttagaggttacagaacaatattagtgatgaagcccacttatca

SEQ ID NO: 6099 - DNA, 120 bp, synthetic construct
  source 1..120: mol_type = other DNA
ttattcctgcccactcatttcataataagacttcaagtaatttattgcctaatataagacaattagtgagttctacagtcaacgacatggacaatgccagttcttgtgaacatttccaag

SEQ ID NO: 6100 - DNA, 120 bp, synthetic construct
  source 1..120: mol_type = other DNA
aggataagggaagtatggagagaaaagaagtgtctccatattactccatatcaaggattataaaatagcttcagatgaccagtataagagctctgtgtagaacatcccaggacttcctgt

SEQ ID NO: 6101 - DNA, 120 bp, synthetic construct
  source 1..120: mol_type = other DNA
ctgcctcagattttagaattgccccacttagcttttccctgggaaaataatattgctcatctaaaggaaaaaagtaagataattaatgaaactgtttattttccttcactcttgaaagca

SEQ ID NO: 6102 - DNA, 120 bp, synthetic construct
  source 1..120: mol_type = other DNA
cactagctgggaaccaccaacactgtgcaaatagtagctacagtgagcaaataattcctatgaggttttgtgagcttttcactcagttaattgaacaatacagttatatgctcaccctga

SEQ ID NO: 6103 - DNA, 120 bp, synthetic construct
  source 1..120: mol_type = other DNA
cactggtatcttttattaactacaacagtcacgtcacccttcatctttggcaatatagtgacttttaggctatgcctatatctgttttaccttcttccttccacctctacttgcaaacaa

SEQ ID NO: 6104 - DNA, 120 bp, synthetic construct
  source 1..120: mol_type = other DNA
aaatgtagacatttcctcaaatccattctctttgatagggaagaaacagttttacctaacaaaaaggccaggctttcacctgctacatcctgcaattcttctgttcttcacccctgttct

SEQ ID NO: 6105 - DNA, 120 bp, synthetic construct
  source 1..120: mol_type = other DNA
acttgggttagcatggtagaaaaagttccgttatcatggaaagacttccagtacccttcaatttttttgactgctatccatagcattgaaatgcgttgttctgtgcaatccagaacacag

SEQ ID NO: 6106 - DNA, 120 bp, synthetic construct
  source 1..120: mol_type = other DNA
gcacagcatgaatctttcaggttccagttaattgttaacttcttgaagaaaccacatttgaccaaccaatcaaaattaaactttccatagcttcctgccccttcccttcttagcactgat

SEQ ID NO: 6107 - DNA, 120 bp, synthetic construct
  source 1..120: mol_type = other DNA
accctgcagaaagagaagcctcaaggatgttttgctgatgggatctgaatcaatataatggctttaaatgaattggacatgctcattttacccacatctacttccctgatttttctgaac

SEQ ID NO: 6108 - DNA, 120 bp, synthetic construct
  source 1..120: mol_type = other DNA
cacaaaaacctgctgttctgcagccactgctgctgataaccaggcaaacagggtctggagtggacctccagcaaactccaacagacctgcagctgagggtcctgtctgttagaaggaaaa

SEQ ID NO: 6109 - DNA, 120 bp, synthetic construct
  source 1..120: mol_type = other DNA
aatattcaacattcttaaagaaaagaattttcaacccagaatttcctatccagccaaactaagcttcataagtgaaggagaaataaaatcttttacagacaagcaaatgctgagagattt

SEQ ID NO: 6110 - DNA, 120 bp, synthetic construct
  source 1..120: mol_type = other DNA
aagaaactcactcaaaaccactcaactacatggaaactgaacaacctgctcctgaatgactactgggtacataaggaaatgaaggcagacataaagatgttctttgaaaccaatgagagc

SEQ ID NO: 6111 - DNA, 120 bp, synthetic construct
  source 1..120: mol_type = other DNA
gttcaatatacacaaatcaataaatgtaatccagcatataaacggaaccaaagtcaaaaaccacatgattatctcaatagatgcagaaaaggcctttgacaaaattcaacaaccttcatg

SEQ ID NO: 6112 - DNA, 120 bp, synthetic construct
  source 1..120: mol_type = other DNA
aacgcctcatatctacaactatctgatctttgacaaacctgagaaaaacaagcaatggggaaaggattccctatttaataaatggtgctgggaaaactggctagccatatgtagaaagct

SEQ ID NO: 6113 - DNA, 120 bp, synthetic construct
  source 1..120: mol_type = other DNA
atgtcctttgtagggacatggatgaaattggaaatcatcattctcggtaaactattgcaaggaaaaaaaaccaaacaccgcatgttctcactcatagttgggaattgaacaatgagaaca

SEQ ID NO: 6114 - DNA, 120 bp, synthetic construct
  source 1..120: mol_type = other DNA
ccttcctacttttttcttgactgatttgccaaaagctgcagattttagctgaggatggtgctacaattcagcttcttttaaagatgaaggtgactagagagtgtacttatgctgaacctg

SEQ ID NO: 6115 - DNA, 120 bp, synthetic construct
  source 1..120: mol_type = other DNA
tcaacttattccattactgtatgcattttaacctgaaggtttagagacatagagttggtttcctgactcaaaagttttagcattggcctggtgtggtgggtgatacctgtaaatctcagc

SEQ ID NO: 6116 - DNA, 120 bp, synthetic construct
  source 1..120: mol_type = other DNA
gaaagcaactgtgagatttaacagagttttgcataaacaacttatgtttgagagtagtcctgccagcatattcctgccagaatttgtccttgtaacagcagacattacataaccatgcag

SEQ ID NO: 6117 - DNA, 120 bp, synthetic construct
  source 1..120: mol_type = other DNA
tagtgcaaccccgtctctaaacaacaaaactacacaaagcaacagaaacttggatggtcttcaagtaccctctttcaatactgctcatgagagtatgcttattagacatagagattgaca

SEQ ID NO: 6118 - DNA, 120 bp, synthetic construct
  source 1..120: mol_type = other DNA
gagagaacaagaatgtaacctctacatgggcagagctctttgccttattcactcatatatccctagtatatagaacattaccaagcacatacttggcattaaataaatgcattgaataag

SEQ ID NO: 6119 - DNA, 120 bp, synthetic construct
  source 1..120: mol_type = other DNA
cagtcagttgcctttctctgaataatcatattgttgtcctgaaagatatttaagacctttgccaaattagaggtatggcctatatttagtgaatcatcatcattgcacctccccagggag

SEQ ID NO: 6120 - DNA, 120 bp, synthetic construct
  source 1..120: mol_type = other DNA
atagaacaagtctgtgtgatagaaactgtctccatggcactcaagtgagtggaatgatcgtgactgaattctatatatagaatctttcagtgagaagtaaaaacagatgttgtatgaagc

SEQ ID NO: 6121 - DNA, 120 bp, synthetic construct
  source 1..120: mol_type = other DNA
ttagcaagaaaacccaattcacagcatttcagagcaaaaagggatagaggtcctctattgcaacttctgtgtcatggatgaaaacagtgaggctcaaaaagtttgagtgacacatcaaga

SEQ ID NO: 6122 - DNA, 120 bp, synthetic construct
  source 1..120: mol_type = other DNA
ttcacttttcatgactcagctggaaccctccacaaccagaagagcctgttataaagtgaaaagtttgtgatctcttaatctaatgaaatgggaagtaggaattgcttgtgggtgaagaga

SEQ ID NO: 6123 - DNA, 120 bp, synthetic construct
  source 1..120: mol_type = other DNA
ccacctatggagaaagcagtttcaaattgctgggcattctgcccactaaggcaaattctctccatgtctgttactaccatcatagagtgatttgcaatagctactttaagtctatcaatt

SEQ ID NO: 6124 - DNA, 120 bp, synthetic construct
  source 1..120: mol_type = other DNA
tagctttagaagttgcaaggcaagcgttttcaataaagttgcaagcttctatcctctccaagcacaatttgggcaaaaccacagctcttcctttattcttagatagtatcttttgacttc

SEQ ID NO: 6125 - DNA, 120 bp, synthetic construct
  source 1..120: mol_type = other DNA
ccagtggagattcgattttggttcagttgttttggagtgttcacactattttggatgacatatgctgtatgacacatggcatatagccatataagcatagatttcataggcatgaattaa

SEQ ID NO: 6126 - DNA, 120 bp, synthetic construct
  source 1..120: mol_type = other DNA
tattcccatcacaccatgttccgaaactcttaccaccagttcacaggtattttctatcatgtctactcagtgttcatgcaaattttaacagcatgaggagacatgattttgcctacaagt

SEQ ID NO: 6127 - DNA, 120 bp, synthetic construct
  source 1..120: mol_type = other DNA
ggcctgactaatggtcagggtgatatagctctctctctctcacacagaatattttgagttcctagatattggaaggccatattttatgtattacggtagtaaggggatgatttggagatt

SEQ ID NO: 6128 - DNA, 120 bp, synthetic construct
  source 1..120: mol_type = other DNA
aaatttgtttaagttcattgtagattctggatattagccctttgtcagatgagtaggttgcgaaaattttctcccattttgtaggttgcctgttcactctgatggtagtttcttttgctg

SEQ ID NO: 6129 - DNA, 120 bp, synthetic construct
  source 1..120: mol_type = other DNA
gctgaagttgcttatcagcttaaggagatttggggctgagacaatggggttttctaaatatacaatcatgtcatctgcaaacagggacaatttgacgtcctcttttcctaattgaatacc

SEQ ID NO: 6130 - DNA, 120 bp, synthetic construct
  source 1..120: mol_type = other DNA
tattgcgtctatttgattcttctctctttttttctttattagtcttgctagtggtctatcaattttgttgatcctttcaaaaaaccagctcccggattcaataattttttgaagggtttt

SEQ ID NO: 6131 - DNA, 120 bp, synthetic construct
  source 1..120: mol_type = other DNA
ctccatccttttattttgagcctatgtgtgtctctgcacgtgagatgggtttcctgaatgcaacacactgatgggtcttgactctttatccaatttgccagtctgtgtcttttaattgga

SEQ ID NO: 6132 - DNA, 120 bp, synthetic construct
  source 1..120: mol_type = other DNA
aaggacttctctgtattggttattctagttatacattcttctaaatttttttcaaagttttcatcttctttgcctttggtttgaatttcctcccgtagctcagagtaatttgatcgtctg

SEQ ID NO: 6133 - DNA, 120 bp, synthetic construct
  source 1..120: mol_type = other DNA
ctcttcggccatcttgagaagtttttgaagaatatattcttaatttctttttcaaaacattgatttgaagccatgtctactccaagagggggaaatttggtataaaccatgtataaataa

SEQ ID NO: 6134 - DNA, 120 bp, synthetic construct
  source 1..120: mol_type = other DNA
gtagctggatgggaaaaaccaatgtcatcctcagaagtattgatgcagtgacccagttgcagccaataatatacaacataaagggtgtaggtaaagatacaggagattcaaataataagc

SEQ ID NO: 6135 - DNA, 120 bp, synthetic construct
  source 1..120: mol_type = other DNA
tgtttacatctgacaagactccttccttcaataattcagtatttgtcttacagattcttttattaaaaaaaaattttctgaccagtagggataggctagataactacttgaaacagtcca

SEQ ID NO: 6136 - DNA, 120 bp, synthetic construct
  source 1..120: mol_type = other DNA
ggttaagtgactggtcaaaaattactgaagtcagatagccaggacattggccacatgccacattcaataaatacagtgacagagtaatcaaagctgagagcgaataacttgcttctgttt

SEQ ID NO: 6137 - DNA, 120 bp, synthetic construct
  source 1..120: mol_type = other DNA
tagttccagtgcatgaaaagtaacaaatccataggcattaatcatcaccacaaatcattatctagcctagaacaaggcccacaaaatataagacaagacagaaatgtggagagtggcagg

SEQ ID NO: 6138 - DNA, 120 bp, synthetic construct
  source 1..120: mol_type = other DNA
catcataataatcatgacaataggtggcaacatccttgtgatcatggcagtaagcatggaaaagaaactgcacaatgccaccaattacttcttaatgtccctagccattgctgatatgct

SEQ ID NO: 6139 - DNA, 120 bp, synthetic construct
  source 1..120: mol_type = other DNA
cagtgggcattttaccactctattgctccaaaattaagaaaagattactggaatgaagtgaaactatgatttagaaggtatactgtgttctgtggtgtctgtttcgccagcttctccctt

SEQ ID NO: 6140 - DNA, 120 bp, synthetic construct
  source 1..120: mol_type = other DNA
ctagaaggtcagctttcagataaggtactgaaaagtatgcataagactcaagaaagcagccttggaaaattaactctttggaggtggaaaaaggtaaaaaaggaagcaagaggtgacttg

SEQ ID NO: 6141 - DNA, 120 bp, synthetic construct
  source 1..120: mol_type = other DNA
ccaataatgtcttccagatatgaaagagagtctgactctacatattgataggttcaacccagtgctagaaaattgacctgaaacaatgaactctgagataaatctgagacactggatttt

SEQ ID NO: 6142 - DNA, 120 bp, synthetic construct
  source 1..120: mol_type = other DNA
tatgttttatctgttctaacaatctggaaacaatgcaaccaaaaattaggaagagaaagaggaaggggaagaggagagtagaatcatttcgttgattcttctataaacgaatgataagaa

SEQ ID NO: 6143 - DNA, 120 bp, synthetic construct
  source 1..120: mol_type = other DNA
aacccttacaacccagggattagtaagcgctaaaaataaaggggtaggtgaaagtataccaagcaaatggtaacaataaagcagaaattgcgatcttgatatctgacaaaagaaatttga

SEQ ID NO: 6144 - DNA, 120 bp, synthetic construct
  source 1..120: mol_type = other DNA
caggcgtgagccagcgcgccagggcactcctgactttttaaaagatttttcacaaaatagaaaattgctagctagttttaacaaggaaaaaggaatagagcataaatatatcaaatataa

SEQ ID NO: 6145 - DNA, 120 bp, synthetic construct
  source 1..120: mol_type = other DNA
tggggtgatatggggtggggaagggagataggaattgttgtcaaagagtacagtttcagttagacatggtgaataaattctggagacctattattgtacagtataatgacaatgcttaat

SEQ ID NO: 6146 - DNA, 120 bp, synthetic construct
  source 1..120: mol_type = other DNA
taactttgtcagacagctggcatcttagttcataggaaaacaataaaagcacttgtcctaagatcaggaaaaatatgagcatgccttatgtttccatttccacttaacattttgctgtag

SEQ ID NO: 6147 - DNA, 120 bp, synthetic construct
  source 1..120: mol_type = other DNA
aaatgcaaaataaatgacaccatgataccattttttaacctatcagattggcaaaatatgacaagcttgaattgcactgtggcaaggctatggggacatcagcactctcgtatattgctg

SEQ ID NO: 6148 - DNA, 120 bp, synthetic construct
  source 1..120: mol_type = other DNA
atgagattggaacaccttttcagctgaaaagtaaggaagtgaacatagaataatggaaacattaaaaaaaaaaaaaacccacaggagccagcttaacagagcccccactgaccaaatgtg

SEQ ID NO: 6149 - DNA, 120 bp, synthetic construct
  source 1..120: mol_type = other DNA
gaaaatttaatgtatttaaacatccatccaagtcagagaccatgccctgaatgacatgtgtgtgggacagactcaaagcagcgtagccaaggttatgaaaacaaaatacattgaatccac

SEQ ID NO: 6150 - DNA, 120 bp, synthetic construct
  source 1..120: mol_type = other DNA
aaaaatgaacaatgcctcaagaacctgtgggattcagccaaattacagaaaatttgtgccattagagtcccaaagggagaggagaaaaagacgggttggtgcagaaagaaaatttgaaca

SEQ ID NO: 6151 - DNA, 120 bp, synthetic construct
  source 1..120: mol_type = other DNA
atcatgagtggggtggtgcagatgaaaagggttattaaatgggaagaagagaagttgaggtgcagtggatatgttgattatctagatagtagtgataatttcacaaatatacatatatat

SEQ ID NO: 6152 - DNA, 120 bp, synthetic construct
  source 1..120: mol_type = other DNA
aattagtacaactccattagtatggggaacagtttggaggttcctcgataaactaaaaattgagctgctatatgatctagcaatcccactgctgggaatatacacaaaagaaaggaaatc

SEQ ID NO: 6153 - DNA, 120 bp, synthetic construct
  source 1..120: mol_type = other DNA
agcttctaaaaatctccatgcctggatagcttcactggcaaattctactgtacatttcgggaagaaaaaaataagaattctatacaacctctcccagaaaatagaagcaaaagaatacat

SEQ ID NO: 6154 - DNA, 120 bp, synthetic construct
  source 1..120: mol_type = other DNA
caacttgataaaggggatctacaattatccttaagcagacgttgtactttatggtgaaagattgaatgacttcacctgaagttcaagaataagatcaggatatccactttcaccactctt

SEQ ID NO: 6155 - DNA, 120 bp, synthetic construct
  source 1..120: mol_type = other DNA
aagtgagtttagcaagctcttaggatgcaaagcccatatgcacaaataaattgtgtttctatatagtagtggtggaaattggaagtcaaagtttcaaagagtaccatttataatatcata

SEQ ID NO: 6156 - DNA, 120 bp, synthetic construct
  source 1..120: mol_type = other DNA
cttacagtagagaggctcaaaagcagacagttaccctgaaatatggcaaataggatgaaagagaattgtaggatcaaaaaaggtggtcaatttagtgtcagaaagcttcccagaggaagt

SEQ ID NO: 6157 - DNA, 120 bp, synthetic construct
  source 1..120: mol_type = other DNA
acgcatctgtgtgtaagtgcaactacctcaagaaatggctaacttaaacggtaccttcagaggcactgaaacgtgaattatcattctaccccatcattgcatttcaactaacaatgaact

SEQ ID NO: 6158 - DNA, 120 bp, synthetic construct
  source 1..120: mol_type = other DNA
ctaggttctgtgtctggtgcacaaaacaaatttttgccttcatgcagcttacttatttctcatttaggcaataacttgcccagggtcacatgattagactactagacagcaaagtcagaa

SEQ ID NO: 6159 - DNA, 120 bp, synthetic construct
  source 1..120: mol_type = other DNA
attttttcttgctattcttagaatatcttcagatccccttccaagccacctagtaaatgttctccaggtaccttttgattctctcaaaagaaaagcgcatgccttctggtccactgtacc

SEQ ID NO: 6160 - DNA, 120 bp, synthetic construct
  source 1..120: mol_type = other DNA
gtggtttttttttatctccagtaccctctctgggtactggagaggcctgtaactcaggatcaccaacagttgtagacaaaaaccaaagaaaccaaagcaggaacttagaaaaagactcat

SEQ ID NO: 6161 - DNA, 120 bp, synthetic construct
  source 1..120: mol_type = other DNA
accttgaaaaagaatgcattaagaggaatcactgtacctgatattaaggattacaagacagctgcagtaatcaagataatatcatatttgcagaggaagggacacatagatcaatggaac

SEQ ID NO: 6162 - DNA, 120 bp, synthetic construct
  source 1..120: mol_type = other DNA
aggtcaaaagtctgaaatcagtactattaaactgaaatcaacttgtctgcaaggtcatgctccctccctccagagattctaggagaatatcctttctttgggagttttagattctggtga

SEQ ID NO: 6163 - DNA, 120 bp, synthetic construct
  source 1..120: mol_type = other DNA
gaaatagagaccagattaatgcttttcagggtttaaggatggggagcagagaaggaaagtgggtgtggttataaaaggccaacaggataaatccaaatggtgatgttaatgttctgccat

SEQ ID NO: 6164 - DNA, 120 bp, synthetic construct
  source 1..120: mol_type = other DNA
caggagaactccaaaatgtataaggccaagtctttatctttcttttgtaaattctactgcagccaaacaagtacccaaatcgttcaggtaaactagacactctgtgcctatgaactcaac

SEQ ID NO: 6165 - DNA, 120 bp, synthetic construct
  source 1..120: mol_type = other DNA
ctttgcccagccacataccatgtaatcctatgcctctttttcctgcagatttgctactctaagttttaataatgaccacactcacatcatgaaattatacaccagtttattcaaatcaat

SEQ ID NO: 6166 - DNA, 120 bp, synthetic construct
  source 1..120: mol_type = other DNA
ctcagaggagacatcaggctgcctagtttactagatcttcatttattccttctaattttgtggtcgctctgctagtaacacattgtaaggtttagactcaatctaccccaggcttattta

SEQ ID NO: 6167 - DNA, 120 bp, synthetic construct
  source 1..120: mol_type = other DNA
aacaaagatctggatggcaccctcactttggaaattggcagtcattcataagacacagatatattcggagtaaggagagggaagcaactgggaaaatatcctttccagtaataagcaaaa

SEQ ID NO: 6168 - DNA, 120 bp, synthetic construct
  source 1..120: mol_type = other DNA
ggaactaaccaaccggttaagtatgttaattggaatttggaaggatttgagaactggaagggagagaactaaaattgttgactagtaactttgtaaagccctagacaacaatcaacccat

SEQ ID NO: 6169 - DNA, 120 bp, synthetic construct
  source 1..120: mol_type = other DNA
agatattgtcaaacctagaccagaactatatttgggaaagagggtttgggaatggatctagaaagtgtagatccatcatattttccactgtcatccctggggattttcaaggattccatc

SEQ ID NO: 6170 - DNA, 120 bp, synthetic construct
  source 1..120: mol_type = other DNA
ctgccaaatctacaaaccctcaagataccaggtgtgctgcatttgcgtcagtattcattgtacttagctgtgttccttgcataaattaggaaaatgcccctttataactgtggcacattt

SEQ ID NO: 6171 - DNA, 120 bp, synthetic construct
  source 1..120: mol_type = other DNA
tctggttgcaaaaataatttcactacaggcagataggcagcactgtcaaagctaaataacaacggccaacacttgagtttttgctcagggccagacattgttccaagtattatacatgta

SEQ ID NO: 6172 - DNA, 120 bp, synthetic construct
  source 1..120: mol_type = other DNA
ttatattgtctgctaatgtgccaattcctagagagctaagttctcagtccttacttcatgaacttttccctcaaagcctgtatgtctatgccaagagccttttaactgggttgaatgatg

SEQ ID NO: 6173 - DNA, 120 bp, synthetic construct
  source 1..120: mol_type = other DNA
tcagcttagggttcaataaaagctctgtctttcaaagagaggacaccaccagccatcactagtggttatgcaaagaatttgtgcctggaataagagcttgaactagattttttttgaggt

SEQ ID NO: 6174 - DNA, 120 bp, synthetic construct
  source 1..120: mol_type = other DNA
agttcgtacttagagtatacatgggataattagaacaggctgtcttctgcagagcaagaggtttccttattctagatcatattcattcttggaacccaaaagcttgcactggctaagaaa

SEQ ID NO: 6175 - DNA, 120 bp, synthetic construct
  source 1..120: mol_type = other DNA
agtcactggttatctctacaaactagattctcttttataaatgacttttactgtgcatctatcttgataagtattttaacctacagtatctcacttagcatctgcttcacaggtatttgt

SEQ ID NO: 6176 - DNA, 120 bp, synthetic construct
  source 1..120: mol_type = other DNA
acagcaaagctgtggccttgaggaaatgattttatgctatgaatacaataacaataacaaaaataaggctaataatacatataggtacagtatattggattccagctagatgccaagcag

SEQ ID NO: 6177 - DNA, 120 bp, synthetic construct
  source 1..120: mol_type = other DNA
gctttctggctctcacagcttctgatgaagtcaactgttaatcttatttgggtccctttgtatatattgagtcatttatctcttgcttcttccagaatttgctctttgtcattgcctttc

SEQ ID NO: 6178 - DNA, 120 bp, synthetic construct
  source 1..120: mol_type = other DNA
cccctgaatcagcattgtttgtagtcagctaatgattgttcagaatattctgttaaatgctatgagccagtttttcttttaccctgttccaaggagatttttgtgggaggtcacaccttc

SEQ ID NO: 6179 - DNA, 120 bp, synthetic construct
  source 1..120: mol_type = other DNA
cagagggagacaaaaagtcaaagaagtacttcaattgttggggagacttgtacatgtttatgggatcaagggaaatcactatactttctggcttaagaaacagccctattcatgtcttgt

SEQ ID NO: 6180 - DNA, 120 bp, synthetic construct
  source 1..120: mol_type = other DNA
ctaagacctttcttaagcaggtatatgcaataagtaaaaactgtttttagtaactgagcttaacatttttgctttcctcaccctgaaaatcaggtacacaagaacttctttccccctttc

SEQ ID NO: 6181 - DNA, 120 bp, synthetic construct
  source 1..120: mol_type = other DNA
catgaggttatgtgctaatgatggaatgcatcaaataaataataggtggttaagaagttcagaggaggtacatgtctccctagtcaattggtaagaatagggctcacaatggtgcaattt

SEQ ID NO: 6182 - DNA, 120 bp, synthetic construct
  source 1..120: mol_type = other DNA
accattaatcttaccttgaagcttctcatctttgactgttgctttcatgtggaatgcataggactcaagtgaattcttggatgacactttgtccctctgcctcttatcttcagctttgta

SEQ ID NO: 6183 - DNA, 120 bp, synthetic construct
  source 1..120: mol_type = other DNA
caggtcaaagataaacacatttctttcagctccaacctttttgtctaagccgtaagcaatatcagcagcacttggctcattgataattctaagtacattgagaccagcaatagttccagc

SEQ ID NO: 6184 - DNA, 120 bp, synthetic construct
  source 1..120: mol_type = other DNA
aaatttcaggccaccaaatattattgaatgcccattctgtgttaagcattgcacttggcattatggaatacagagatgtgtaccagggccctagcctccaagaaaatgcttcacttttag

SEQ ID NO: 6185 - DNA, 120 bp, synthetic construct
  source 1..120: mol_type = other DNA
aggatgagataaagcaatgaggaaaaaaaggagaaaatcagccttttccaaaaaaaaacaggcaaaaactgcaatatcacataagtcagcttacaaatggaagtgccttccagaccacag

SEQ ID NO: 6186 - DNA, 120 bp, synthetic construct
  source 1..120: mol_type = other DNA
agtatgtggcagaacaggtactaaaagaagacttctttcccccttacctacaaccattacaaccacagaatatgttttctcttgtgtctttcagagtgtacctgttaacagtactgatgt

SEQ ID NO: 6187 - DNA, 120 bp, synthetic construct
  source 1..120: mol_type = other DNA
gagagtaaggaattagagagtaaaatctatatgaaggatggaacccagatgtgggcagctcaggactgagcagctattgtcttgtggaaatttgcttaacaagggaatttttaagtatgc

SEQ ID NO: 6188 - DNA, 120 bp, synthetic construct
  source 1..120: mol_type = other DNA
gaagagagaattcataaacagaaaattatcagaagaaagtgtcaaaaatgcaaaagagagggagatgttgaaaacataagagaggttaagaaatatgtaacataggctgggttcagtggc

SEQ ID NO: 6189 - DNA, 120 bp, synthetic construct
  source 1..120: mol_type = other DNA
cagaggaactttctaaccagtaattcctgtttcaggaatttgaaaaggaagtatttcagtaaaaaggaaagtgaatctagatagaaggtctgaggagcaaaaaagaatgaagagccaagt

SEQ ID NO: 6190 - DNA, 120 bp, synthetic construct
  source 1..120: mol_type = other DNA
gctactgaaatagataaaatagctaagagagtaaaagaacattactggagacgtagctgttaacttcatagttatacaaagttctattcatcaggaagatacagcaatttgaaacgtgta

SEQ ID NO: 6191 - DNA, 120 bp, synthetic construct
  source 1..120: mol_type = other DNA
tttatgcccaaaattgaaaagttagaaatatgtacaaatatctagacaaacataacttgacaatactggcagtcgtagcttgtgaggtctttccaaggaaattaccacacattcgtggct

SEQ ID NO: 6192 - DNA, 120 bp, synthetic construct
  source 1..120: mol_type = other DNA
tttaacagattagatttgcagattgatatggagagaatggacttttccataagtggctctggaaacacagggtatcaatatggaaaaaaaatcaggccactccctcatactataccccaa

SEQ ID NO: 6193 - DNA, 120 bp, synthetic construct
  source 1..120: mol_type = other DNA
tgcaggtgaagaagctgaggtgcaaagaaatgcaaatgtttaccccaaatcacaataattaagtgacagaggtaaccacttaattgtggctgcaagcaatctaacaccaaacctttagct

SEQ ID NO: 6194 - DNA, 120 bp, synthetic construct
  source 1..120: mol_type = other DNA
atatagtctttggcatgcatttgtactagtcacccacttttgggcaacagagagtctttccaaattcaaagacccagacgaatctttttctggaccgcattatatcctgaataagaagga

SEQ ID NO: 6195 - DNA, 120 bp, synthetic construct
  source 1..120: mol_type = other DNA
tttcctgttcctacccctgcatttcctctcttctatctccggaccaactacagatttagactaaccatatacagtttgggttctaataacgtttttacccttcatgagttcatgagtatg

SEQ ID NO: 6196 - DNA, 120 bp, synthetic construct
  source 1..120: mol_type = other DNA
gattaatgttttatcatactttacacttacaaggaacggaatatcctcgtgcttctcactgactgcaggcatacaccctataaaatgttgaggcagatattcccagggcttcaatttctc

SEQ ID NO: 6197 - DNA, 120 bp, synthetic construct
  source 1..120: mol_type = other DNA
tatggtacatggagttagatgtctgtcctctttttacagatctctagggacaagatcccatcccactcttctttttcaggataatcaaaaaccttatggtattcaagaagttccacaata

SEQ ID NO: 6198 - DNA, 120 bp, synthetic construct
  source 1..120: mol_type = other DNA
tgcattggtatgagggagagggagggtatggggtagaagaaagaagtgaattcttcctctcttctcagaaaacactggaaaatttcctcccactcccaagtttataactatttaattcaa

SEQ ID NO: 6199 - DNA, 120 bp, synthetic construct
  source 1..120: mol_type = other DNA
tggatcagcattcaaaactcactgttccgtgtgatctttcttttagaaagacaaattctactactaagccccaaggtctatccattattgtccagacaaataatacttttccatttttgg

SEQ ID NO: 6200 - DNA, 120 bp, synthetic construct
  source 1..120: mol_type = other DNA
gtattatcctattcccaccctcctttaatgggagattattatggattttcatacttatctttctctttcattcatagggagtacgggattgaaagtcaggagatctggtatctagatctg

SEQ ID NO: 6201 - DNA, 120 bp, synthetic construct
  source 1..120: mol_type = other DNA
aatgcctgcaccttatttctagatgtgttctttgttgcttgtgtaaaaggcaggcaataataaacacctattatgcttgtttttgctaatttatggctacctcttttaagcagcagaata

SEQ ID NO: 6202 - DNA, 120 bp, synthetic construct
  source 1..120: mol_type = other DNA
tgtaggttgcctgttcactctgatggtagtttcttttgctgtgcagaagctctttagtttaattagatcccatttgtcaattttggcttttgttgccattgcttttggtgttttagacat

SEQ ID NO: 6203 - DNA, 120 bp, synthetic construct
  source 1..120: mol_type = other DNA
ctaaaaataaatttgcagaagctcaggattgggtattttacatgtataatctctgtagcacataacctggcagtgtgaattccgttttggacaggtaaggctgttaaatgcagcagaggt

SEQ ID NO: 6204 - DNA, 120 bp, synthetic construct
  source 1..120: mol_type = other DNA
agttcagtttcactgattggtcaacactgtgtcttgaatttctaacctatgccacagtgtatataaactaaacatccatgggcacagaagtggccttcagattttacttcctggccttaa

SEQ ID NO: 6205 - DNA, 120 bp, synthetic construct
  source 1..120: mol_type = other DNA
cacagtcctttacaatcaagagaaccctaggcacttagggcttctcaagaatacctggccttggttatgccaagaacttattaatctgataaattcacagtgtttggggtattaatgtca

SEQ ID NO: 6206 - DNA, 120 bp, synthetic construct
  source 1..120: mol_type = other DNA
acagtaagataaatctcagcattgtgaaccctttggcatttgttatcattacttgtttcaccccttgtgagttacaaagagttagcatgaaccataagtccaaaggtcactcgaaatccc

SEQ ID NO: 6207 - DNA, 120 bp, synthetic construct
  source 1..120: mol_type = other DNA
gaagactgaaggcatttatcttttacccacatccatcttttatacattttctcaagccttctcaaatcatcatcctatctgaaggacatttatgccccggaagtaactcgtggcatcaga

SEQ ID NO: 6208 - DNA, 120 bp, synthetic construct
  source 1..120: mol_type = other DNA
aatgcaacatcattcattagttgctatagatagatgtggtatcctgatgtggtaaaataaactccaatcaggagtaattttcgtgcatgactctgactattggggatgtatctgcctgcc

SEQ ID NO: 6209 - DNA, 120 bp, synthetic construct
  source 1..120: mol_type = other DNA
ttacttaacagataggggcctctggaagctagctgcaaagttcaatctaatgatactgttagatactatgatgggaaatcatagatgagagcaggagcttttgcactgaatttctgtgcc

SEQ ID NO: 6210 - DNA, 120 bp, synthetic construct
  source 1..120: mol_type = other DNA
atcgccacactgacttccacaatggttgaactagtttacagttccaccaacagtgtaaaagcgttcctatttctccacatcctctccagcacctgttgtttcctgactttttaatgattg

SEQ ID NO: 6211 - DNA, 120 bp, synthetic construct
  source 1..120: mol_type = other DNA
aaaggaaaataactcatgaacgaggggacagttccaagaaaggatttgtggaggtggttacacctaagctactgatattctgtctcaaacttaggtttttctagtctcaaagtccacact

SEQ ID NO: 6212 - DNA, 120 bp, synthetic construct
  source 1..120: mol_type = other DNA
ttttcttccttcaccagaactgaggcccttctcttgtgatagagtgccaaagtcaatccattattacaactctgcacctgtctccacccctttttttttttttttgccatttcctgactt

SEQ ID NO: 6213 - DNA, 120 bp, synthetic construct
  source 1..120: mol_type = other DNA
cacaccatatatatacactacatatatacaccatatatatacaccatatatatacacaccatatatataccgtatatatacacaccatatatatatactgtatatatatacaccatatat

SEQ ID NO: 6214 - DNA, 120 bp, synthetic construct
  source 1..120: mol_type = other DNA
accatgtatatacaccatatatctataccatatatatacaccatgtatctataccatatatatacaccatatatctataccatatatatacgccatatctataccatatatatacgccat

SEQ ID NO: 6215 - DNA, 120 bp, synthetic construct
  source 1..120: mol_type = other DNA
ggcaggatctcttttttttatggctgaatatactccattgtgtatgtgtacattttctttcttcattcatctgctgattgacacttaggttacttccaagtcttacctgttgtgaacagt

SEQ ID NO: 6216 - DNA, 120 bp, synthetic construct
  source 1..120: mol_type = other DNA
caaagttcttcccattcttcccttccctttcatccagcagaggaatcacttcccatggccgccaccaccccatgcacgtgacgagtactgcctggctacccctagcaatcactcaaggcc

SEQ ID NO: 6217 - DNA, 120 bp, synthetic construct
  source 1..120: mol_type = other DNA
actaggtctcatgcaccccaagtgcactggctccaagcccagcacagcaccaggacttgcctcatagcctagactgcctttcaagtttatttaggacccggggggcacttttgcccatgg

SEQ ID NO: 6218 - DNA, 120 bp, synthetic construct
  source 1..120: mol_type = other DNA
cactattaatgggagaaagaggtttgaagtaaagaaagggcccaaaggccagtctttttttttttttcatggtttccctcagaccccacccaatacgtttttttggaagattaacatgct

SEQ ID NO: 6219 - DNA, 120 bp, synthetic construct
  source 1..120: mol_type = other DNA
ttacccccaactttttccccaccctctacatgggttataaacttaacaaacgaacattatgaaaaccaggctatattccatgaagacaccctccagtagttcagacagagcaagaatgtt

SEQ ID NO: 6220 - DNA, 120 bp, synthetic construct
  source 1..120: mol_type = other DNA
cagagtaggataacatagttgaaccacaaatcctgttcccatcttggagtctcactcagacagttgaattcaaattcacaagtctaaagtaccaagatacagtccaaattggagtacctg

SEQ ID NO: 6221 - DNA, 120 bp, synthetic construct
  source 1..120: mol_type = other DNA
ctgtctcagctgggtctttaattatgggtagacatttgcctgtgtgtacaggaaggaggtttgaaaaaggggtatattacagatgtcattctaggcaagacagacaaaagtatacaaaag

SEQ ID NO: 6222 - DNA, 120 bp, synthetic construct
  source 1..120: mol_type = other DNA
ttctaacaaataggcacacctttctttttgatcctttcctccaaccccaggccacaactaaaactgcttcttttgaattaccttcaagtaacagagtatgtaaacgtggtggagactgtt

SEQ ID NO: 6223 - DNA, 120 bp, synthetic construct
  source 1..120: mol_type = other DNA
acttcactctcttccctctccagcctgctttgaaaaagcttatctcataagcttgaagagaattaagtatatcatacacagtactcccagaacatcatgtgtactgcctctgtcatagaa

SEQ ID NO: 6224 - DNA, 120 bp, synthetic construct
  source 1..120: mol_type = other DNA
atgcttgcagcaacccagaatgtgtttgtttaagaaaatggctgaatgttgttaagaatagcaatctccgtgacattttaacttgtcctattcccattcccccttcaagtgccatggtag

SEQ ID NO: 6225 - DNA, 120 bp, synthetic construct
  source 1..120: mol_type = other DNA
ctaatatacatagcatttgctctatccctgatcacttcaagcaacagcattgaacataagaataaatcatctccatcaatcaatacatccaccacatctcagcttcacccttcctagctc

SEQ ID NO: 6226 - DNA, 120 bp, synthetic construct
  source 1..120: mol_type = other DNA
tttgcccaatttattatttaactaattttgaccacataatactcctcactatattataaaaccatgagaacaagtataattttaccttctgaatcattatctccttctgcccagtagatt

SEQ ID NO: 6227 - DNA, 120 bp, synthetic construct
  source 1..120: mol_type = other DNA
gaatggaatgtataatagtcacatcatgaagaagggggtaggagttttttttagtttacattactttaatattggacccctgaaacacactgtcctttgtttaaaaaagtaaatttgaaa

SEQ ID NO: 6228 - DNA, 120 bp, synthetic construct
  source 1..120: mol_type = other DNA
tgagtacgtacagactatcagatcacaaacagcagttagtaaggtgatctaactaaaagctgtagatggtgtctctttgaactaatgctactttgagcggtctaaaagcatgattgctac

SEQ ID NO: 6229 - DNA, 120 bp, synthetic construct
  source 1..120: mol_type = other DNA
ctttttccccactactgagaggatagagtcacatagtacaaatcagcagaagtcctcattattatattcttgcttaggcaagaattcatgattgcttctttgtccttatcccttttccac

SEQ ID NO: 6230 - DNA, 120 bp, synthetic construct
  source 1..120: mol_type = other DNA
gtttaagttcaagtaagagatgagttattggttgacaagcttttggatcatttaggctacttgtaatcacaaccagttcatcaggaaaagaccaccaggccagaagaggctttcatgaca

SEQ ID NO: 6231 - DNA, 120 bp, synthetic construct
  source 1..120: mol_type = other DNA
agaaagttagcggcatgtccctacaaatatttcagagatataatttctgtcagctgcagtatccaatcatatccagggaattctgtcaaaagcaaggtgataggaaatatcgagagcagg

SEQ ID NO: 6232 - DNA, 120 bp, synthetic construct
  source 1..120: mol_type = other DNA
cacacgttgtttgattgcaaccattttaatttcttcaggtatattttatgagccagaatatggtctttcctggtcaattttccatagttcttgaaaagaatgtgtactttcctgttgtca

SEQ ID NO: 6233 - DNA, 120 bp, synthetic construct
  source 1..120: mol_type = other DNA
tttactttatctgttattaatataaaaattctagcatttgtttaattagtgtttgcacagtatatcttttatccatacttttattatacaggttgagcatctctagtcccaaaatctgaa

SEQ ID NO: 6234 - DNA, 120 bp, synthetic construct
  source 1..120: mol_type = other DNA
ttttcctttagtgtaatttccttctgcctgaaaaacatcctttaacatttttagaccaagtctcctagtttagagagacttgttttagagcaatgagttcctagtttcccttcacctgag

SEQ ID NO: 6235 - DNA, 120 bp, synthetic construct
  source 1..120: mol_type = other DNA
atactcattatttgagaactcctacctttctattcatttcaagagaggccgccttccttcactgagcatgattagggtagctgccttgaagtctttgtctacaaattccaacatttgcgt

SEQ ID NO: 6236 - DNA, 120 bp, synthetic construct
  source 1..120: mol_type = other DNA
tttcttgcattctgtgggctgtttttacactcttctgatagcactctgatgcagaaaaaatttttaatttaatgatgtccaatttttctatcttttctgctaatgctactggtgtcatat

SEQ ID NO: 6237 - DNA, 120 bp, synthetic construct
  source 1..120: mol_type = other DNA
agtatttttcttggaggtttctttctgcacatccactacacagtttgaagatttcgggccgtactaaaatctaagccaggaggtaagggaagtgggaagggaaaggaaaataattctttt

SEQ ID NO: 6238 - DNA, 120 bp, synthetic construct
  source 1..120: mol_type = other DNA
acactgacttccacaatggttgaactagtttacagtcccaccaacagtgtaaaagtgttcctatttctccacattctctccagcacctgttgtttcctgactttttaatgattgccattc

SEQ ID NO: 6239 - DNA, 120 bp, synthetic construct
  source 1..120: mol_type = other DNA
atctgtaaattaccttgggcagtatggccattttcacgatattgattcttcctacccatgagcatggaatgttcttccatttgtttgtatcctcttttatttccttgagcagtggtttgt

SEQ ID NO: 6240 - DNA, 120 bp, synthetic construct
  source 1..120: mol_type = other DNA
ggaatggtaccagttcctccttgtacctctggtagaattcgcctgtgaatccatctggtcctggactctttttggttggtaaactattgattattgccacaatttcagatcctgttattg

SEQ ID NO: 6241 - DNA, 120 bp, synthetic construct
  source 1..120: mol_type = other DNA
gtctcgttgatctgtctaatgttgacagtggggtgttaaagtctcccattattaatgtgtgggagtctaagtctctttgtaggtcactcaggacttgctttatgaatctgggtgctcctg

SEQ ID NO: 6242 - DNA, 120 bp, synthetic construct
  source 1..120: mol_type = other DNA
gggaagttctcctggataatatcctgcagagtgttttccaacttggttccattctccccatcactttcaggtacaccaatcagacctagatttggtcttttcacatagtcccatatttct

SEQ ID NO: 6243 - DNA, 120 bp, synthetic construct
  source 1..120: mol_type = other DNA
taatcaagcctgggcaatggcgggcgcccctcccccagcctcgctgccgccttgcagtttgatctcagactgctgtgctagcaatcagcgagactccgtgggcgtaggaccctccaaacc

SEQ ID NO: 6244 - DNA, 120 bp, synthetic construct
  source 1..120: mol_type = other DNA
ctggcacttgttcttggactagttaaacctctagattattttatatttatcttgtatccagccagactattatattctctcagtaaatccagcatagtttttagaagagtctcagattcg

SEQ ID NO: 6245 - DNA, 120 bp, synthetic construct
  source 1..120: mol_type = other DNA
tttgtttccaagtgctagctttgggattacttcacagttgtccccacattcccatacatcttaattaaattatcagaatactgaacttttattcttttctcaaaggcaaaaattgtctac

SEQ ID NO: 6246 - DNA, 120 bp, synthetic construct
  source 1..120: mol_type = other DNA
ccaaaacagagatattggcaatcacaacacttggaaaaaagaaacaacagaggttgagtttccaactttcaagacttatagcttaagaggaagatgcaatttctgccagaagaggtggct

SEQ ID NO: 6247 - DNA, 120 bp, synthetic construct
  source 1..120: mol_type = other DNA
gagcgaaacacattgagaaaaaaaagaatggactctcaggaatctgtgaaacaatatcaaatgctctaacatgcatgtgatttgagacccagagaatgagagggaaaatgggaccaaaaa

SEQ ID NO: 6248 - DNA, 120 bp, synthetic construct
  source 1..120: mol_type = other DNA
ggtagtcatgcctactaaggttgcataggagaagagcccagtatctaagataattctcactaacaactccagcagactagaatatgacacatcgtaaaacaattcaccaacagcagattt

SEQ ID NO: 6249 - DNA, 120 bp, synthetic construct
  source 1..120: mol_type = other DNA
atttccagatatgcagctaatttgaggatgaaagcctgcactcctgatgcaagttgctagtgccaaagaaatacagatcttttcctcaaagaaatgtgcttgtctttttagacttctctg

SEQ ID NO: 6250 - DNA, 120 bp, synthetic construct
  source 1..120: mol_type = other DNA
attatccagtccaaggagcataaagagaaaataataaataaaaatgaacaatgcctaagggacctttgagacactatcaagtttaccaatatatgcacaatgggatttccgggacatgag

SEQ ID NO: 6251 - DNA, 120 bp, synthetic construct
  source 1..120: mol_type = other DNA
ccccaggttaaccaaagtaaacaattaaaataatacaaagagaaagagacaagaagagaatccctacaaaaaaatcagttaatcacaaaaaaatcacttaatcacaagtgaaggcagtga

SEQ ID NO: 6252 - DNA, 120 bp, synthetic construct
  source 1..120: mol_type = other DNA
ccaataagtgaaagaagaaaatacaaatgaaattcaaaaatattttgagaatggcagaataaaaacttaatataccaaaaaattatgggatgcatcaaaagctgcgctcagagggaaatt

SEQ ID NO: 6253 - DNA, 120 bp, synthetic construct
  source 1..120: mol_type = other DNA
acacatactaccaaaagtgactcaaggagaaataatctgaagagtcatataaaaagtaactacattgaatcagtgatcaaatacctctcaacaatgaaagctcaagacaagaagttttcc

SEQ ID NO: 6254 - DNA, 120 bp, synthetic construct
  source 1..120: mol_type = other DNA
ccataaaaaatgatgagttcatgtcctttgtagggacatggatgaaattggaaatcatcattctcagtaaactatcgcaaggacaaaaaaccaaacactgcatgttctcactcataggtg

SEQ ID NO: 6255 - DNA, 120 bp, synthetic construct
  source 1..120: mol_type = other DNA
ctttttggccataagaattgcagcggctatgctcaatactttcggattatgtactgtgaacaacgtacagacgtcgactggtaacatttgcgtttgatcgggttcttttatttagtaatt

SEQ ID NO: 6256 - DNA, 120 bp, synthetic construct
  source 1..120: mol_type = other DNA
aacccaagaaaaatgattatgacttctagttcacttttgccaatgatgcattataaacctgaagatatgactgacaggtggagacgatcatttcagactcgcaagcaatggaggactaga

SEQ ID NO: 6257 - DNA, 120 bp, synthetic construct
  source 1..120: mol_type = other DNA
aacacttcagcaagaaactgcaaactataacaaatgacattaagatttgagaaacacctagaaaatatggaacttaagcataatatgaaaaactaagggccaggcagtgtcttacacctg

SEQ ID NO: 6258 - DNA, 120 bp, synthetic construct
  source 1..120: mol_type = other DNA
aagaggacagaacttcagggacagatagacaagtctacaatcatcgcataagatcttagcacatccttctcagcgattgtatgaaaacaattaacaaacctgaactcactgacaagtgaa

SEQ ID NO: 6259 - DNA, 120 bp, synthetic construct
  source 1..120: mol_type = other DNA
gatgctccaacagtcaaaactaggcaaataaaatactcagagaagagtcagttcctcttctattccgtggttaacccattcattagtttctagggcatacttcttgaatttatttttgca

SEQ ID NO: 6260 - DNA, 120 bp, synthetic construct
  source 1..120: mol_type = other DNA
attcccaccagcaatgcaagaaagcctctgtttccccaaagccttgctaatgaagtttattttcaaactttttagattttgcaaatcccataagtgagaaatgttacctcagtgtaattt

SEQ ID NO: 6261 - DNA, 120 bp, synthetic construct
  source 1..120: mol_type = other DNA
tgctttctctaatctgtatactaatttaggtggtggccactctgtcttccaaactttactgccaaacctatatgtcactctcatgtcttccttatcaacatttataatgtatctcataag

SEQ ID NO: 6262 - DNA, 120 bp, synthetic construct
  source 1..120: mol_type = other DNA
gcaacaatttgctgtggttcagataattgcggtcattcttatttgacagtgcactaaaactctgcaagtagtagtttcttaagttctgtggcaatgtacaatcagaaaccaaatcactga

SEQ ID NO: 6263 - DNA, 120 bp, synthetic construct
  source 1..120: mol_type = other DNA
taggaatccaacttacaagggatgtgaaggacctcttcaaggagaactacaaaccactgctcaaggaaataaaagaggatacaaacaaatggaagaacattccatgctcatgggtaggaa

SEQ ID NO: 6264 - DNA, 120 bp, synthetic construct
  source 1..120: mol_type = other DNA
gtttccttttctcctatttctctgtctgctccaaatcattttcttcattttctgctttatccccgttcttccccaggattctgttccttccaattgcttatatacttttcctggcttgca

SEQ ID NO: 6265 - DNA, 120 bp, synthetic construct
  source 1..120: mol_type = other DNA
gttgactcagcatcatttattggaaagattattcttgcctaccgaattacaatggcgtcattctcataagtcaggttaccttatatatgttgtttctcctgggctataagttctgttcta

SEQ ID NO: 6266 - DNA, 120 bp, synthetic construct
  source 1..120: mol_type = other DNA
aggtttctaatttattggcatcaagtggtgtaattaccatccttttaatgtctatataatgtgtagtgacttcctgtttcgcccagagaatggttatctctgttttctctctttttgtgt

SEQ ID NO: 6267 - DNA, 120 bp, synthetic construct
  source 1..120: mol_type = other DNA
gccacagtggccagggtatatacactttatgtttccatcatttgacttttattgtcattgccttttggccagcatatggtttacagtgataaatgttctatgtctacctcaaaagactat

SEQ ID NO: 6268 - DNA, 120 bp, synthetic construct
  source 1..120: mol_type = other DNA
ctttagtttccacatagaagtgagatcatacaaaatgcttctttctgtgtctggcttatttcatttagcatgtcttccaggctaatccatgttgtagcaaatggcatgatctcattctgt

SEQ ID NO: 6269 - DNA, 120 bp, synthetic construct
  source 1..120: mol_type = other DNA
cttttgtagcctgcacttttgacatgatatacaaaaattcatttccaagcctaatgtacaagagcttttcctttatgttctcttctaagagatttacagtgtctagtgttgtatgtaggc

SEQ ID NO: 6270 - DNA, 120 bp, synthetic construct
  source 1..120: mol_type = other DNA
tgttcagaagcatgttctttgcttttcacatgtttgtgcattttctaatattcctcctaatattgatttctcgtttcgtgttattgtaatctgaaatgacactagatatgattttagtct

SEQ ID NO: 6271 - DNA, 120 bp, synthetic construct
  source 1..120: mol_type = other DNA
ttctgacacatacaaacactctaggcttttaccttccttcctcacaatttacatttttgatgtcacaacttttgtcttgttatattgtgagttccttaacaacttagtgtagcttccatt

SEQ ID NO: 6272 - DNA, 120 bp, synthetic construct
  source 1..120: mol_type = other DNA
aaacatccatccccatcaaaagtttcctcaagcacatttgtaatactcccctccctaatacttcactgtccctaggcaatagctgacttgtgttctgtcactatattctagtttgtattt

SEQ ID NO: 6273 - DNA, 120 bp, synthetic construct
  source 1..120: mol_type = other DNA
tgcgcctggccccagtgcgttttttaaaatattttcattgtcagtgacttaaccttaaatttcttaatagtctctatggaagaagaaagtttttaattgtcatgaaattcaaattattaa

SEQ ID NO: 6274 - DNA, 120 bp, synthetic construct
  source 1..120: mol_type = other DNA
tttccatttctctgatgagcaattacgttgagcacttttttgtatgcttgtttgtcatttgcttgtcttcttttggcaagtgtctattcaaatatttagcccattttttgattggattat

SEQ ID NO: 6275 - DNA, 120 bp, synthetic construct
  source 1..120: mol_type = other DNA
tttcctattgacttgtatattaccttacagcatttctccccattcagctgtccctagtagaaatccataggctaacctggtactgccgattcgttgtctttaatggctgaataataaccc

SEQ ID NO: 6276 - DNA, 120 bp, synthetic construct
  source 1..120: mol_type = other DNA
gtctatcattgatggacatttgggttggttccaagtctttgctcttgtgaatagtgccacaataaacatatgtgtgcatgtgtctttatagtagcatgatttataatcctttgggtatat

SEQ ID NO: 6277 - DNA, 120 bp, synthetic construct
  source 1..120: mol_type = other DNA
catgcaccaccacatctggctaatttttgtatcagagatgaggttttgccatgttggccaggctggtcttgaactcctgaccttaagggatctgcccacctcggcctccaaaaggactag

SEQ ID NO: 6278 - DNA, 120 bp, synthetic construct
  source 1..120: mol_type = other DNA
ttgaagtctctaactcttattgtacttgggcctttctctctcattgattatttttgtgccagtaacaataaaagtactctgtctgtggcttacgatttttgtgacatcttcatctgtttt

SEQ ID NO: 6279 - DNA, 120 bp, synthetic construct
  source 1..120: mol_type = other DNA
gctacaagtttttcttctaagcactgcttttactatatcccctaagttttcttctgcttgtggttttattttgtttttctcaaaatatttcaaaaatccctcgtgattcttctctgactc

SEQ ID NO: 6280 - DNA, 120 bp, synthetic construct
  source 1..120: mol_type = other DNA
agtttttcaagagtccatcattcctgggcctcctttattgagtttttcatcttctgatcagcagttgttgctttagggttttttcatatcttacagtttttaattgtatgcccagcatta

SEQ ID NO: 6281 - DNA, 120 bp, synthetic construct
  source 1..120: mol_type = other DNA
ttataacaaaaatttgtacattttgaccaatatttccccaacccccaaccccagccccagaaatacatcattctactctctgctcccgtgagttacactttcttagattccgcaaataag

SEQ ID NO: 6282 - DNA, 120 bp, synthetic construct
  source 1..120: mol_type = other DNA
ctccatatcctaataccatcactttggaagttaggattccaacatgtgaatttgagtgggacacacattcagaatgtaacacctccttatcaaacatatggtttgcaaatatttttttcc

SEQ ID NO: 6283 - DNA, 120 bp, synthetic construct
  source 1..120: mol_type = other DNA
gaaatgcaactgatttttgtatgttgattttgtatcctgaaactttactgaatttattaattttaatagctttacagtagatactttagggttttacttatataaaatcatgtcatctgc

SEQ ID NO: 6284 - DNA, 120 bp, synthetic construct
  source 1..120: mol_type = other DNA
gagcttagaagtgttctttcatcttgaattttgtgaacaagtttgagaaggtttggtgctagttcttcatgaaatgtttggcagaactcaccagtaacaccatgtagtcttgggcttctc

SEQ ID NO: 6285 - DNA, 120 bp, synthetic construct
  source 1..120: mol_type = other DNA
acactgttgaaagtagggtgctgatgtcttctatttaatactattattgtattcctatttctcccatcagttttggtaatacttgctttatatatttgtgcttcagagttgagagcatat

SEQ ID NO: 6286 - DNA, 120 bp, synthetic construct
  source 1..120: mol_type = other DNA
tgcatcccagcatatgttccagtgtttcctgattaaaatgccatcgacacttgaatagaattgtatcttgctattgtataaaatgtataaatgttaactacgttcaatttgttcatagta

SEQ ID NO: 6287 - DNA, 120 bp, synthetic construct
  source 1..120: mol_type = other DNA
aaacattttcatcactgcaagacaaacattataccctttagctatcaccaccctacttacccagaacaccatgcctaagcaagaacgaattgactatctgtctctgtagatttgcctact

SEQ ID NO: 6288 - DNA, 120 bp, synthetic construct
  source 1..120: mol_type = other DNA
tcttaccccttacttttaggtctttgaactattttgagggtttttttttttctgtgaatggtgcaagataagggtatgattttattgtttagcatgttggtattcagttatcctagcacc

SEQ ID NO: 6289 - DNA, 120 bp, synthetic construct
  source 1..120: mol_type = other DNA
atttccctctgtagaacctctagtacaatgataaatgaaaggggccagactgaatattcttgacttgctccttatcttacgaggaaagtattgagtctttcatcattaagatgtctgctg

SEQ ID NO: 6290 - DNA, 120 bp, synthetic construct
  source 1..120: mol_type = other DNA
gaacttttcattgtgcatagttttgggttagtggtcagtgtgtttacttggtatacgtccagtcacattgtctttttttgagtcatttttggtaggttgcacctttctaaaaatttgacc

SEQ ID NO: 6291 - DNA, 120 bp, synthetic construct
  source 1..120: mol_type = other DNA
ataatgctgcaatgaacatgggagtgcaggtgtctcttcaacatattgatttcatttccttaggatatatatgcagtagtaggattgctggattatatattagtcctatttttaattttt

SEQ ID NO: 6292 - DNA, 120 bp, synthetic construct
  source 1..120: mol_type = other DNA
atattctttatcctttaaagtttgtcgaggtttgttttatgatatagcatataatccagcctggagaatgtgcgaggtgcactttagaagaatgtaacagacactgggccctaaccagag

SEQ ID NO: 6293 - DNA, 120 bp, synthetic construct
  source 1..120: mol_type = other DNA
tttagctctcttgtggttgctctttgcatgattcattttccatcttttaatttcaatatatttgtatatagagttgtatatacattgtgcctcctgtgtacagcattagttggatcatga

SEQ ID NO: 6294 - DNA, 120 bp, synthetic construct
  source 1..120: mol_type = other DNA
gctgggtagatgacgctgtagaggtatttttttgtgtgaagttgtaatgctttctgcagacttttgtgatagttgtgttatcagatataccaacatgagaacgctctcttcacggccttt

SEQ ID NO: 6295 - DNA, 120 bp, synthetic construct
  source 1..120: mol_type = other DNA
ttagttaattgactttcctagatatgtagatgtgtaatggtgttcttctctctgagtagtagtcccaatctagaatttgagtgctaagtgaaagggctaggccgtagccataggtcttta

SEQ ID NO: 6296 - DNA, 120 bp, synthetic construct
  source 1..120: mol_type = other DNA
cagctgataattggacagagattaccttaattgcctggaacaaataaatctctcagttgttgctaaggagttctgtgttgctgttgggacacatcttcaacattcagccaatcagtatac

SEQ ID NO: 6297 - DNA, 120 bp, synthetic construct
  source 1..120: mol_type = other DNA
gagcacgggatgggaaaggaacggttcttagtgatattgagacaattatcttgaatgaatgtttcccatgttgctgcaagttttgggttagtttttatagttctgatgatgttgaatcta

SEQ ID NO: 6298 - DNA, 120 bp, synthetic construct
  source 1..120: mol_type = other DNA
tttctggactcaaactataaaacctgtgtcccccacattgtgcaacagctgacatttcttttcagttttcttgacttctagttgcttctttttagtgtgttcctcccatctttcccttgt

SEQ ID NO: 6299 - DNA, 120 bp, synthetic construct
  source 1..120: mol_type = other DNA
ctccttttccattatctgacactgttcacataaaattggtaatatttctctcttaaatgtttgaccgaattcaccaatgaaggcatttgcatctgaattctttttctggagggggtttca

SEQ ID NO: 6300 - DNA, 120 bp, synthetic construct
  source 1..120: mol_type = other DNA
taaggaaaagtaatggacctaggagagttaaaataattttgaaaaaaaatctaggagcatttatctgatctcaagacatacaatatagctaaagtaatcaagagagtggttattggcaca

SEQ ID NO: 6301 - DNA, 120 bp, synthetic construct
  source 1..120: mol_type = other DNA
tataacagagtatatccaaatggcagtaagtatatgagacattgttcagtgtcatagactgtgatgataatgcaactttaaaaccacaatgagaactggcttcacaccactagaatggct

SEQ ID NO: 6302 - DNA, 120 bp, synthetic construct
  source 1..120: mol_type = other DNA
caacaatctgtgagacactgacaagtgctctaatatgcattgatctcagaaagggaggaaagacacactgaggacataaaatgtttgaagcatatagaaagtgtacatcccttcttatat

SEQ ID NO: 6303 - DNA, 120 bp, synthetic construct
  source 1..120: mol_type = other DNA
ttgaagctgtgtcactgggggaaacacatttaggatttgtatgccttttgaatttgtccttttattattgtgaatacccactttcatctctgctaatattgcttgtcttgaaatacactt

SEQ ID NO: 6304 - DNA, 120 bp, synthetic construct
  source 1..120: mol_type = other DNA
aaataaaaagtagtctgtttacttacatgtttaccattttgggtgctcctctttcctccagtagttgtgagtttccacctggtatcattttcaacagcctgaagaacttcctttagcaat

SEQ ID NO: 6305 - DNA, 120 bp, synthetic construct
  source 1..120: mol_type = other DNA
tctttgaagaagtgtctgttcatgtcctttgcccactttttaatggagttgtttttttcttgtaaatttgtttaagttccttgtacactctggatattagacctttgtcaggttgcaaag

SEQ ID NO: 6306 - DNA, 120 bp, synthetic construct
  source 1..120: mol_type = other DNA
tgtataggaatgcgctatctcaggcaggctccaccctgttgctggtggctggctggaattccaaaccagtgggtcttatcttgtgagatgccatggaagtggggcccgcaggacaatgct

SEQ ID NO: 6307 - DNA, 120 bp, synthetic construct
  source 1..120: mol_type = other DNA
tgtcccttgctttgatgacacataatcaagatatgatgtctatctcatatcataaagagcaaaatgactcagaggaggatagtctgagatactgtcaacacacatgggtttgccaggagc

SEQ ID NO: 6308 - DNA, 120 bp, synthetic construct
  source 1..120: mol_type = other DNA
tctctgtggcatttgaaactgttgcggatgtcttcttcagaacactccttccctttgttcgtaatgacataacttttcacttacactgaattgttgtcatgtagctgacactcattttgc

SEQ ID NO: 6309 - DNA, 120 bp, synthetic construct
  source 1..120: mol_type = other DNA
tgctaagacaaacttaacacatttgctgaacttaactctctagcacttaaataacttaatgcattaacatagaacagcagttctcaagctctttggtgtcaggacccctttatactcttc

SEQ ID NO: 6310 - DNA, 120 bp, synthetic construct
  source 1..120: mol_type = other DNA
atgcagttttaaagacagttaggaaaggaaaacctagcaagctttctaacagtctcagacacccccctagggtccttgaatcacactttgagaactgctgacacttaccttttatttttt

SEQ ID NO: 6311 - DNA, 120 bp, synthetic construct
  source 1..120: mol_type = other DNA
gattacaaaggtagaattataaaataaagcccatgaactcatcatccagctccaagatttatcagcctgtggactgtcttgtttcatccatactttcatccacttctccctcccgtatta

SEQ ID NO: 6312 - DNA, 120 bp, synthetic construct
  source 1..120: mol_type = other DNA
gaagtcttgtcatatctgttgtggcttcctcaccctgttacttggcttcctactctaggaaaaggccagtcattttagaaattccatgtctgaggaagaagacttaaagatcactttcaa

SEQ ID NO: 6313 - DNA, 120 bp, synthetic construct
  source 1..120: mol_type = other DNA
ttatcgagtgccttctctgagccaggacgattcttggaactggaaatccaacaaatctgacacaatccaccctttgacacaaccgtgtctctaatatagttaatatcaataagggtaatt

SEQ ID NO: 6314 - DNA, 120 bp, synthetic construct
  source 1..120: mol_type = other DNA
ttgttcaggaatcaatcctctggtgtatactctgttcaacaaaatttaccgaagggcattctccaactatttgcgttgcaattataaggtagagaaaaagcctcctgtcaggcagattcc

SEQ ID NO: 6315 - DNA, 120 bp, synthetic construct
  source 1..120: mol_type = other DNA
ggtccttagtaaattcctaattctatgattaaactgggaaatgagatcccagagttatttcccaacccaggattcaacatcaattgggttttgatctcagcatcctggaaatttgtgtgc

SEQ ID NO: 6316 - DNA, 120 bp, synthetic construct
  source 1..120: mol_type = other DNA
cacatacagatggtgtcctgcatgtatgccatgtatgttgcatgaatccatcgatttgtattaatgtagggcagaatagctgatagaagaaggactgaagaaaatccttcagcaatcctt

SEQ ID NO: 6317 - DNA, 120 bp, synthetic construct
  source 1..120: mol_type = other DNA
tgacaataaattaagccaagtggctaatttataaataaaatctcaggttgcatgactggcggaagggtcagacacacaggtccccgctggcaacacaattcaggtctcgcgtgaggaggc

SEQ ID NO: 6318 - DNA, 120 bp, synthetic construct
  source 1..120: mol_type = other DNA
gatgggattggaggatggctgacaacaggataggggaggttaactgctgggaggatggtagaggaccctcttcttcaggaaaacatgagtcagtccctgcagtaggagcatgagatagcc

SEQ ID NO: 6319 - DNA, 120 bp, synthetic construct
  source 1..120: mol_type = other DNA
ttgctgtaaggtgcacctcacaatcatcatacggaaaacaaccaatgcgatcaaaacactctttgataactggcaataaatttaaaccgggagacagaatagcaaatgcacaggaacttc

SEQ ID NO: 6320 - DNA, 120 bp, synthetic construct
  source 1..120: mol_type = other DNA
ctctctgcatctgcccgtggccctcccagccgcagactcgagcccggatttcaggacacccagaggacccgactccggtctggatgggtttttccgctaagcaggacagattggcaaagc

SEQ ID NO: 6321 - DNA, 120 bp, synthetic construct
  source 1..120: mol_type = other DNA
gtgtatgggaacccggtggggccagggtcccagggggcacaggggctgggcggtgacttacgtagcggtccctcagcgccttggcagccgccagcgtccggggctccagcgagcggtagt

SEQ ID NO: 6322 - DNA, 120 bp, synthetic construct
  source 1..120: mol_type = other DNA
accaaggtgggaagtagagaaaggcattctctgagagcaggagccaaacaagagagctgggagcagggaaaaccctaggcccctgtctcttcccgagggaatgtggccgctgagcccaac

SEQ ID NO: 6323 - DNA, 120 bp, synthetic construct
  source 1..120: mol_type = other DNA
ccctcaagatgaccctgtgacagccactgccaagggcaaggatgggcaggacggtgagaccagggagtgtcactcacagaagggacccgggaccctgtccctagatactctggtatgcag

SEQ ID NO: 6324 - DNA, 120 bp, synthetic construct
  source 1..120: mol_type = other DNA
ccagcctgctctccacgtcgccccggggccgccgacccgggctggagagggggatgttgaggaggctgggggtgggggcggggcatcgagggagctcctggtactggcggccccgactgt

SEQ ID NO: 6325 - DNA, 120 bp, synthetic construct
  source 1..120: mol_type = other DNA
tgggaaaacccttccctgcccccaatgtgattttgccccaggcaaagactgagtttgggacttttgtaggctgctctatgataccatttgacagacagggaaactgagacagagaagcat

SEQ ID NO: 6326 - DNA, 120 bp, synthetic construct
  source 1..120: mol_type = other DNA
cccaaaccccaggtcccaaacaccctcttagccaatcactgcacccttataagcaatgttcttcaaaccaaagatcagaacacagtagtgaatcaaaaccagcatttttttttttttttt

SEQ ID NO: 6327 - DNA, 120 bp, synthetic construct
  source 1..120: mol_type = other DNA
cccttgggctctagacctccatgttcttatttgtaaggcatagagaccattcccgccctgggctgtcacaaggatttaaccccatcgcctatgtgacatatacctcccaccccaaaaggg

SEQ ID NO: 6328 - DNA, 120 bp, synthetic construct
  source 1..120: mol_type = other DNA
cagccaatgagcatgacgcagatggagaagatcttctctgagttggtgttgggagagacgttgccgaagcccacactggtgaggctgctgaaggtgaagtagagcgccgtcacatacttg

SEQ ID NO: 6329 - DNA, 120 bp, synthetic construct
  source 1..120: mol_type = other DNA
tagggcactttggtgacgctacaaaataatggccccttgggatggacgaattagaaaaaaaggtgtcctgtgtggccctctgcaacctgcgaggagcttgtgtggagagaaggagcatag

SEQ ID NO: 6330 - DNA, 120 bp, synthetic construct
  source 1..120: mol_type = other DNA
aaaaagcttccatcagaatgcccacccctcagccaagcgaccacagcaaatggccacccccaggtttgggcatcatggttcccaaaatgccacacagcacaggactggctccaaacagtt

SEQ ID NO: 6331 - DNA, 120 bp, synthetic construct
  source 1..120: mol_type = other DNA
aagactccccttcatactcaagctgggcttgcccaagacaccttcacagatggcgctgctgggagaacatctccttagaggaaataactagaagtcaagacgggtcatagtcaaagattt

SEQ ID NO: 6332 - DNA, 120 bp, synthetic construct
  source 1..120: mol_type = other DNA
atctcattcctgtcatctccccactttgcattttgagctccaggactgtgggccatggcaggcacaggagcggggaagtcccagcaacggaaactctgtaagcccagcctgggagggaat

SEQ ID NO: 6333 - DNA, 120 bp, synthetic construct
  source 1..120: mol_type = other DNA
ttacatgagccaacccaggcagctgctgtggaaggggcaggagggaacagcttgggacaggagtcctccacattatcccaggcttctcactcactgcagagatctgcactcctgacccac

SEQ ID NO: 6334 - DNA, 120 bp, synthetic construct
  source 1..120: mol_type = other DNA
ttgtgggttcgctcctttatcttaggtgctatgatctcacggtcactggtgggcgaagccaagaaggggtcgcccttgaggtccacaaagttgagggtgatttggggaatcttgctaatg

SEQ ID NO: 6335 - DNA, 120 bp, synthetic construct
  source 1..120: mol_type = other DNA
aatgtaatgggatgaatggacatttaatagcgcaacaagccacttaatggaattaaataagtgcttaatgggatttccatctcccaggcacccaggacgtagtgaaaaggtcagaagccg

SEQ ID NO: 6336 - DNA, 120 bp, synthetic construct
  source 1..120: mol_type = other DNA
tagggccagttttactgacactgtcattttagagtgtaagaaaccaagaggtgagcacttttgtcatgatgctgagggaaagattaaaattaagccaaagagggcatcctgacagaggaa

SEQ ID NO: 6337 - DNA, 120 bp, synthetic construct
  source 1..120: mol_type = other DNA
ttaagcccacagactttaggcctacgatctctgggttcatagcccggatctgctgcttaatcacttatgcttttttcctaaattatttaacatccttgtgcctcattttttccatctata

SEQ ID NO: 6338 - DNA, 120 bp, synthetic construct
  source 1..120: mol_type = other DNA
ccaacccgtgctgatttctgaaggagccccttttaggccaagcactcagttccacctaaggcccagctcagaacctcctgcccacaggaagtccttaatgaaaccagaaggcagttaaca

SEQ ID NO: 6339 - DNA, 120 bp, synthetic construct
  source 1..120: mol_type = other DNA
cctaagtcctccaccagggagcttgcctcagagaagtctagagtctggagccaagatggactcaaacttcagaatgggctggagactgtccccaacacagggccccagaaattccaacct

SEQ ID NO: 6340 - DNA, 120 bp, synthetic construct
  source 1..120: mol_type = other DNA
tgcaacacagggtgatcctgcccaccccctagggccgtaggggtgaaatggcctaagatatgtgaagctcagagcctggcttgaggtcaccataagcttgagacagaagagaggcagaca

SEQ ID NO: 6341 - DNA, 120 bp, synthetic construct
  source 1..120: mol_type = other DNA
attcccagagtggcaggtacagcgccatcctgctaccacagaaggtgtccatcacttctcagaacacaacgccggcttgctttcatttggtgccaatccacacccagcagtctacctggg

SEQ ID NO: 6342 - DNA, 120 bp, synthetic construct
  source 1..120: mol_type = other DNA
atttatagggtcttgggggccgctgtagtcatctagacccacccaaatccactgcatgtggcatgcctgagccatctctgccccggaccacagcaatgcctcagaagatctctgtcctct

SEQ ID NO: 6343 - DNA, 120 bp, synthetic construct
  source 1..120: mol_type = other DNA
aatttgcccatttcaagcccgtggtgccctccagcccaagtctggacagcagatggagcaaccatgggaattaaggtgccttttgatgaagcaaaattcaacctggtcatcagttttcat

SEQ ID NO: 6344 - DNA, 120 bp, synthetic construct
  source 1..120: mol_type = other DNA
atacgtcttttacaatagcaacaaaaactcttaagtgtccaggaattgaccaagaaggcacaagaaccctgttggagtcggggcaaaagggaacaaaaccttaaactagcaagaaataca

SEQ ID NO: 6345 - DNA, 120 bp, synthetic construct
  source 1..120: mol_type = other DNA
tggaatacactgaatgtttaacagtatgcattggtatctctagagtacacaagcaactcctgcaaatcaacaaggacaaaagacggcgacgtcaaaattaaaatgagcaaaggacatgag

SEQ ID NO: 6346 - DNA, 120 bp, synthetic construct
  source 1..120: mol_type = other DNA
acggttgcctatggggagggtaatgagactggagagtgagataaaagggaaaaggaaaaaaatgaaagagaaaggaaaaagcaataacacaaatgctgtggtttcaattatttgggggag

SEQ ID NO: 6347 - DNA, 120 bp, synthetic construct
  source 1..120: mol_type = other DNA
ctgttaaactccctcacactaaagggctaaatactttctgtctctatactgggagggggcaatgagagagaacgtgtttttaaggaaaaaggagcactctaaacgcagaagttctctaag

SEQ ID NO: 6348 - DNA, 120 bp, synthetic construct
  source 1..120: mol_type = other DNA
cctgatagcttcagtgccacaggaaaagttctcctgtgtctaagccccatcctctgggatcgctctggtctgcctcctatctcaagacaagaaaacccacttatacaccaatccctgtcc

SEQ ID NO: 6349 - DNA, 120 bp, synthetic construct
  source 1..120: mol_type = other DNA
gggaagaagacaggaggaggcaccagagaggagataaagaccaagggacagagagtaagccaggcaggcagaagacaaaggcaaggagatgtggggagtgagagaggagccgagaaggtg

SEQ ID NO: 6350 - DNA, 120 bp, synthetic construct
  source 1..120: mol_type = other DNA
gttatcccagaagtagaaacaggcccagggaagtcaaccaacttgtccagtagtgtataatttccagcattgtcttagacacaaacccaggacttatgggttcatattcttttcagtaca

SEQ ID NO: 6351 - DNA, 120 bp, synthetic construct
  source 1..120: mol_type = other DNA
ctcatctgtcctgcccatctccaagagcctagtgcctgccaggctcacaagggttgagtcaatgcttatgggacacacgctaggaagcagcaaggtttgcacgcgttccagagccgcctc

SEQ ID NO: 6352 - DNA, 120 bp, synthetic construct
  source 1..120: mol_type = other DNA
caggtgcagggtcgctgcatcacctcggcccgcgagtagccgcacagctcgcagaagccgtcgttgcagtagatgacggcgcagttctccacccgagcgttggcgatgatgaacttacgg

SEQ ID NO: 6353 - DNA, 120 bp, synthetic construct
  source 1..120: mol_type = other DNA
tgaggggtgggtgtgccagagaggatgagggaagttacacgttgaacacctaaggacgctgcatctcattaggtcctctgacaaccccataaggtaggtgttattatcctccttttatag

SEQ ID NO: 6354 - DNA, 120 bp, synthetic construct
  source 1..120: mol_type = other DNA
ccagcttcatagaagaaaaaccaccccttgtcctctctcccaggctggggaaagaagagcaagtttcttcgaaggcatgccccaccccaccacacacccttcactgagatcctggaatac

SEQ ID NO: 6355 - DNA, 120 bp, synthetic construct
  source 1..120: mol_type = other DNA
ccccccatccacactcggaagagctcggcccgcccccagagccccctccccgctcagccccctcccccactcactctggccctcaaacttgcggatgatggtgtccaggaaggtgttctg

SEQ ID NO: 6356 - DNA, 120 bp, synthetic construct
  source 1..120: mol_type = other DNA
ctcaggtcagataaggctctgacatcttcccttgagatggagggaataatctaggtatattttaaaatgattacttctttccatcccccagaaagaggaggagatttttcttggctcttt

SEQ ID NO: 6357 - DNA, 120 bp, synthetic construct
  source 1..120: mol_type = other DNA
aattagcagtctctaccacaacagtgttccaaggctttcctcagattatgaaaggtgtctgtttcacaacacagcttaagaaaactctgctttacaaaattgctgtgagagttgtggtca

SEQ ID NO: 6358 - DNA, 120 bp, synthetic construct
  source 1..120: mol_type = other DNA
tctggtaagggtctttctggacatttcttctcttccttgccttgagggactataacataagacttattcccacacagcctgggtcttagctggggactgaaggggaaacagagaaagctt

SEQ ID NO: 6359 - DNA, 120 bp, synthetic construct
  source 1..120: mol_type = other DNA
tgaaatggaaatataccttgcatgtatggtacgaggggttgtctatgtggtatgcacatagggatagaagatggtgtcgtattacacaaggtttgaagatgagggtagcacaattatgtg

SEQ ID NO: 6360 - DNA, 120 bp, synthetic construct
  source 1..120: mol_type = other DNA
caagctttagaggcccaagagacctatgtaaatgtgttggttaaaatagttttagataataaaagggccctcaattatttatgggcctgtcaaggcaaaatctgcacaacagccagtaca

SEQ ID NO: 6361 - DNA, 120 bp, synthetic construct
  source 1..120: mol_type = other DNA
tttactttcatttcagaggcttcttgtcctcagattttttcctgaagactgaacaaaacactgggccagttaaaagcttttagagcggctgccaaccttatgagacttaagatacaggct

SEQ ID NO: 6362 - DNA, 120 bp, synthetic construct
  source 1..120: mol_type = other DNA
tgtaagcataaaaactcctctttcaacagccaggaagaagctaccctgggaagacatattttagcctcagtgttatccccattggagggagaacagccattcaatttttacattcttttg

SEQ ID NO: 6363 - DNA, 120 bp, synthetic construct
  source 1..120: mol_type = other DNA
gggtgatgttatgttgctcttaaactcttaactactacagagaaacaggtagccctgcaggcagcagaaaaattcagagatgaacaacatgtcttctatagccactcaataaggaaagaa

SEQ ID NO: 6364 - DNA, 120 bp, synthetic construct
  source 1..120: mol_type = other DNA
tgagagaggctgtagtgaaacacacttccttgtctcctgttaggtatgtttatacctcacataaataattcaattgagggacagctaattttgaaagacaagtttattactcagacagcc

SEQ ID NO: 6365 - DNA, 120 bp, synthetic construct
  source 1..120: mol_type = other DNA
acctggactgtactgcctcagggatttagagatagcccccacctatttgggcaagtattgtcaagagatctcttcgaattcttccattctcaggttaaagttttacaatatgtagatgac

SEQ ID NO: 6366 - DNA, 120 bp, synthetic construct
  source 1..120: mol_type = other DNA
gtcaccctaaataacattgaaaatgtgcctctctcaccaggcacacacactcaatcagttgagctgatccctctcacaagagcacttgaactaagcaaaggaaagacagctaacatttat

SEQ ID NO: 6367 - DNA, 120 bp, synthetic construct
  source 1..120: mol_type = other DNA
ataaatggcattcaatgtcttttggtgtgggtgcataccttcattaactgggtagaggcattcccatgcccaacagaaaaggcctctgaggtggtgagaatactaattagttaaataatt

SEQ ID NO: 6368 - DNA, 120 bp, synthetic construct
  source 1..120: mol_type = other DNA
caaacaaacaaacaaaactcaatttatcaggtggacctttctcatttagcatgtaaaattccaaatggcatcgtgagtgactatcctgagtatagatatccccatcccaaagatgttcct

SEQ ID NO: 6369 - DNA, 120 bp, synthetic construct
  source 1..120: mol_type = other DNA
agtagttatgcaaaatagacaggccctagatatccttatggccaaagtagggggtacctgtgcacttttaaaaagaagcatgtcacttctagatcaatacctctagtcaagtagaagaga

SEQ ID NO: 6370 - DNA, 120 bp, synthetic construct
  source 1..120: mol_type = other DNA
ttgctgataaccccaacatcagcaatgatgcttatggaaaaagaaaacaaaccctttatgatcagctggatcctttagttgtttgcaaagatgactccaatcctacacccttccctgaat

SEQ ID NO: 6371 - DNA, 120 bp, synthetic construct
  source 1..120: mol_type = other DNA
tgaactatatcccgagatctccagctgctgatctcggggatctggggtggccaagactttctcagagtgtatattaggtgctagaataacatcattttatttgatgtcattttgttatca

SEQ ID NO: 6372 - DNA, 120 bp, synthetic construct
  source 1..120: mol_type = other DNA
tattttatttaaagtcataatttccaagatcctatcaactccattaagtgaggacttactgtactgtagcctgaggctcatcttagtcttccctcatcccccctgcctttccttcacagt

SEQ ID NO: 6373 - DNA, 120 bp, synthetic construct
  source 1..120: mol_type = other DNA
cagcttctttcaagctggaatcaatctgttgttcttcggacctgaggtcaacatgactttgatgaacggaattcatgtcttcttgctaaagttatctggacacttggtacaacacagagt

SEQ ID NO: 6374 - DNA, 120 bp, synthetic construct
  source 1..120: mol_type = other DNA
gcattagacagactttggctgaaatcttggacctgcctcctactagctgtgagatcttagcaaattacttcctgctataggctaaatgtctgtgtccccctaaaatgcacatgttaaatc

SEQ ID NO: 6375 - DNA, 120 bp, synthetic construct
  source 1..120: mol_type = other DNA
tctgctgtcacatgatgactaagggatgcaatcctggaggcagaatatcacaaacaaaattatcacagaagttcctgctgggctgagtagtgctcaggtgaacttctttgtccagttgag

SEQ ID NO: 6376 - DNA, 120 bp, synthetic construct
  source 1..120: mol_type = other DNA
ctggcaaagaaacatgaccaagggcaaaataaaagcaccgtctctctttaacacttgtttggccgtttcctcagcatgtagctgattcagcagcaatcacaatagttaacatttattgag

SEQ ID NO: 6377 - DNA, 120 bp, synthetic construct
  source 1..120: mol_type = other DNA
aagaaaagcccagagtttaggtcatgagggggaggctttattgacaacggagaaggcagagttctaggcaagttcacacaacactgctccaagggtccaggcacgggtcaaacccgtcag

SEQ ID NO: 6378 - DNA, 120 bp, synthetic construct
  source 1..120: mol_type = other DNA
gagaggggtgagccagtcctgaattgggttgggaggagcagggacaaaaataacccagtacaggttcctgctgaggccagaaatagcatagtgacaagtgccttgtaacaccctggatga

SEQ ID NO: 6379 - DNA, 120 bp, synthetic construct
  source 1..120: mol_type = other DNA
gatgttctgcacgatgaggatcaggatggccagtgggcactcctcagtcaccatgcgccccccaaagccaatagtcacttggacctcaatggagaaaaggaaggcagacgagaaggagtg

SEQ ID NO: 6380 - DNA, 120 bp, synthetic construct
  source 1..120: mol_type = other DNA
ccggatctctcccactaaccggacctcacccccacctccgggtctcccgcctcacctgtctggccttcgggctcccaggctccagctcaggtcctggccacccccgccccgtctctcctc

SEQ ID NO: 6381 - DNA, 120 bp, synthetic construct
  source 1..120: mol_type = other DNA
aaggggctccggagtcaagagcggggagagagggcgcgcgcgccctcctcctcccggcgggcacggccccccggcattaacacgtcgaaagagcaggggccagacgccgccgggaagaag

SEQ ID NO: 6382 - DNA, 120 bp, synthetic construct
  source 1..120: mol_type = other DNA
tggaggtggtggcgacagggacaacttgggcagggcgtgtggaaagcagccgctaggttgcagactttttgctttcgtacatcccgtgctcgcccctttctgccgcggcgccgtttcatt

SEQ ID NO: 6383 - DNA, 120 bp, synthetic construct
  source 1..120: mol_type = other DNA
cacgagggagtgttcggattctctggaggatttgatcacctagcttaaaacaacacatctggtctttatgtttttgtgccttgacctttttaatatcagttaagctatgtgaactagaac

SEQ ID NO: 6384 - DNA, 120 bp, synthetic construct
  source 1..120: mol_type = other DNA
tacctatttctagtagtctcaatgagcctaggaagtagtactattattacccctaacattttacagctggagaaactggctaaggataagccctaaatcatcagtggtgaagcctgatga

SEQ ID NO: 6385 - DNA, 120 bp, synthetic construct
  source 1..120: mol_type = other DNA
tgcaggaatccaaatatgcaaatttcatgtgcagttttggtaacttgaatagatattgccacagctataagtccggattgaagaaggcctggggaagagttagaggaggtaaaagtttgc

SEQ ID NO: 6386 - DNA, 120 bp, synthetic construct
  source 1..120: mol_type = other DNA
ctctctgtgccagtaaatgtgttgctacatgtaaaacttttagagtggtgcctcatagtacaggctcaatatgtgttagccataattatcgtctgtaaaacaggaattattattgtccct

SEQ ID NO: 6387 - DNA, 120 bp, synthetic construct
  source 1..120: mol_type = other DNA
caaatttcttgataaaagtttaggttgggggaatgtctgcaaatggccattttctgtaggtgaataagtacatgtagttcacctagggtccatgaaagcagtcaaggagcttttccatga

SEQ ID NO: 6388 - DNA, 120 bp, synthetic construct
  source 1..120: mol_type = other DNA
tccccagcctgttccaatagtctgacgaagcgagaggccaagccctgccttaaaacttggacactcccttgctgtgggcaaccaagactaagggagagtctgtttttattatttatttat

SEQ ID NO: 6389 - DNA, 120 bp, synthetic construct
  source 1..120: mol_type = other DNA
tagtggaaataaagccaagaggaggggtggcctatttgagggagagaatatgatgttggactctgctgggtttattcattgattatttgtgagctgcattttcttgaaactcaatttcac

SEQ ID NO: 6390 - DNA, 120 bp, synthetic construct
  source 1..120: mol_type = other DNA
gaaaaccaagtaattgtcattttgaaatggttcttaggtcctccccaactcagttggtttgatggccctttaagggcctgcctgaaatcgtttgggaataattcagaaatgggaaaataa

SEQ ID NO: 6391 - DNA, 120 bp, synthetic construct
  source 1..120: mol_type = other DNA
cgccgacagaacgtctgtagagagtagcggaagatgagatgggataatttttagggcacctggatttttattcttcaataattgaagtctttcctgcagtgctatatgtgatgagatttt

SEQ ID NO: 6392 - DNA, 120 bp, synthetic construct
  source 1..120: mol_type = other DNA
atttctagaacaggattcaattggcttctggggaaaatatttactggagattttagaagtgtgaaaggtggcaggagacgttggctgtctgttattctacttggctagtgcacacttaaa

SEQ ID NO: 6393 - DNA, 120 bp, synthetic construct
  source 1..120: mol_type = other DNA
aggtgtagtagtgaacataccaggcaaaagtctttgtcctctcttggggcttatgttttagtgaattatttttctctccaggagagagaaaagtccaggagtccagaaaggaaaaaaaaa

SEQ ID NO: 6394 - DNA, 120 bp, synthetic construct
  source 1..120: mol_type = other DNA
aaccttacacctgggattcttaggccctcagctgaagaacttgatgaatttcaactttaaagaggttcttctaacacttggccatttcaaccaggctttgctataaagtcctgtgaaatt

SEQ ID NO: 6395 - DNA, 120 bp, synthetic construct
  source 1..120: mol_type = other DNA
acatttcaaataggatagtgtaatgaaccctcatataaccatctagcttcaacacttaccaatacggcctctacccactttatcttcccattattgggaagcatgtctcaagcatcatag

SEQ ID NO: 6396 - DNA, 120 bp, synthetic construct
  source 1..120: mol_type = other DNA
agcatacagcaattatatactctgctgtctcccttgttaccatcatttagtcttagctctacaggtaaatatctgtttaatgctggcggccagtctttatatcatggctttcctggcatt

SEQ ID NO: 6397 - DNA, 120 bp, synthetic construct
  source 1..120: mol_type = other DNA
atagcttctttcatttagttaatttctcttggctccttctgaaatattaggtcatagctttcctttgtgcccttctggcgtgattttattgtttacacgatggatgtcattctgctcctt

SEQ ID NO: 6398 - DNA, 120 bp, synthetic construct
  source 1..120: mol_type = other DNA
tgctgccaccaccatcttcccagaatctatattgacattttaacacaaaatttggcaacctttgggtcaatgaaatctggataaagtcctgtcttgaaatctcaactcagaggtagctgc

SEQ ID NO: 6399 - DNA, 120 bp, synthetic construct
  source 1..120: mol_type = other DNA
tttagaaaattggtgaatggtatctgactactcaccaagaaatatctggtattttacagggctgtgtggaagaacacagactgtccagggaggatatttgctgtttttcactcactacaa

SEQ ID NO: 6400 - DNA, 120 bp, synthetic construct
  source 1..120: mol_type = other DNA
gctagttaaaaagttaaagccctcgtggattcttcaattctcttaatgtcagaacgtcagaccagggtgcaattctcagttctccttgtgtcagactaagaaagatagatatgagtttcg

SEQ ID NO: 6401 - DNA, 120 bp, synthetic construct
  source 1..120: mol_type = other DNA
tgtgggttgtgtttcttcccacccacttccaaatctatttgttagaagatacgcactcctttgccttttagtcaatttactttggcctggttgaagccagtgttttttattcctattcta

SEQ ID NO: 6402 - DNA, 120 bp, synthetic construct
  source 1..120: mol_type = other DNA
tctgactccaaaacccacacctgttttcataatattcctcttgttttcatctgctcacccaagctcagagaagcaccttaatttccagtgtctgatcctccttctaaactttccaatatt

SEQ ID NO: 6403 - DNA, 120 bp, synthetic construct
  source 1..120: mol_type = other DNA
gttcagtgtgggatggaggggaaggtgcaattttccctatttgacaggcccattaaagcaggatttcagagtatgttcactagcaaaatgtactgatttacccattataatgaaaattag

SEQ ID NO: 6404 - DNA, 120 bp, synthetic construct
  source 1..120: mol_type = other DNA
gccttatttgtcttcctcaaaactccatttcccctcctgagcctgcagggaattgacattttgcagaagcttgagtttcctgataggaggaaatttggtgattagtgaatattggagcgc

SEQ ID NO: 6405 - DNA, 120 bp, synthetic construct
  source 1..120: mol_type = other DNA
gtctttgctgctggtaaggtgtgtgtatctaggagaagtctgaccacataattagctgagaaaggtccgtctttgagtgtcgaatgatacttgcatcttcatagttaattataagatgtc

SEQ ID NO: 6406 - DNA, 120 bp, synthetic construct
  source 1..120: mol_type = other DNA
ctgagattacaggcacatgtcaccatatccggctaatttttttggtatttttagtagagacagggtttcagcatattggccaagactggtcttgaactcctaacctcaagtgatccatct

SEQ ID NO: 6407 - DNA, 120 bp, synthetic construct
  source 1..120: mol_type = other DNA
aaaagctttgacagatgtcctgtctctaaaacacactcactggaagcttgagtcgttgctgctgggtcctcttagtaagtttccttagaagcacacagaacatttaacatgttctctatc

SEQ ID NO: 6408 - DNA, 120 bp, synthetic construct
  source 1..120: mol_type = other DNA
catctagagatcctggtttgactactgtgggcaaagctctggtggttccgacatgcagctgggattgctaatgagtgtatgagttctatgattgtttctcctcactgctgtcagtggcca

SEQ ID NO: 6409 - DNA, 120 bp, synthetic construct
  source 1..120: mol_type = other DNA
gaatctttttctgagccttctccacttgcccactgccttagtttcccagctcagttctacataatactctgccctgttttagcctgtacttgcttcattgtatggtaattatgtgagtct

SEQ ID NO: 6410 - DNA, 120 bp, synthetic construct
  source 1..120: mol_type = other DNA
attacaatgaaaggtaaggaggagatgatgtcaatcagttacctatcattcacctcatgactaaacctgagtaggttttttctttttcttgaaatggggccttactccactcctcaggct

SEQ ID NO: 6411 - DNA, 120 bp, synthetic construct
  source 1..120: mol_type = other DNA
caatcaaacatcctcaatgaaaaagcattgctctgtagggtgatgccacaaattatttaaccattctttcctttctgcccctttgcatcttctgtactgtagacattccttccccctgca

SEQ ID NO: 6412 - DNA, 120 bp, synthetic construct
  source 1..120: mol_type = other DNA
agttccttatatttgtgtccaaaagaggacaggtttagaaaggacttccttacttttaaccgcagctatcaatccagttgttggagctttagccttttgtgaaggatagaaagaccttgc

SEQ ID NO: 6413 - DNA, 120 bp, synthetic construct
  source 1..120: mol_type = other DNA
ggggctcacagaggctaataatagaggccagtgtgatcagataaaaaagtgtcaagatagctgaggcaggttttaggtttagccgggccttaaagaattgttgagtttttaaaacattaa

SEQ ID NO: 6414 - DNA, 120 bp, synthetic construct
  source 1..120: mol_type = other DNA
cctagcttaaagccgtcattccttatagtgctagttggtctccagagtgttgggttttgccacctatcctttttttgggttaattaattaacatgtgttcagggaacagaaaacaactct

SEQ ID NO: 6415 - DNA, 120 bp, synthetic construct
  source 1..120: mol_type = other DNA
atgtttttattactgtgctagagggaaaagtacgatttaggatccttacctgcaggatctaagaccttggagtggatgtaggagatatggacacagttgaacatcagtacaaggcaaatg

SEQ ID NO: 6416 - DNA, 120 bp, synthetic construct
  source 1..120: mol_type = other DNA
atgtcacacagctagacttagctgcattggcctggtgtgtctcaggaagtcaaggatgtttatttgactggattgtaattatctatatccatcagatcaacccatgagaaaatggaattg

SEQ ID NO: 6417 - DNA, 120 bp, synthetic construct
  source 1..120: mol_type = other DNA
agccctttaagatcaatgcttggttggttcctcaaacccttttctttaatgatctgatcttgttttttaacttcacaaggtgtcactggaccaccatcatctgaattccaggtcataagc

SEQ ID NO: 6418 - DNA, 120 bp, synthetic construct
  source 1..120: mol_type = other DNA
aaaccctgaaatgtatgtgaggaccatgtgtcacactagcatggacttttccccagcatctagcatggtgcttttgtagatgataattaatgaataggtatttgaatacatggaggcatg

SEQ ID NO: 6419 - DNA, 120 bp, synthetic construct
  source 1..120: mol_type = other DNA
tttattgtagagtacacagaagatggaactcagtattggaagaagtgctttatttcgccaaggaagaagatcatactcaacacgattctgtttttcttggcaggctcttctcaaccatct

SEQ ID NO: 6420 - DNA, 120 bp, synthetic construct
  source 1..120: mol_type = other DNA
ggctgtctttgaaacaggcctgagaggccttatccatggtattgtgaatgaataatggatacttttattctagattggagatcttaggtacctcctgagttcagttcctcactacagtat

SEQ ID NO: 6421 - DNA, 120 bp, synthetic construct
  source 1..120: mol_type = other DNA
ctgtcataaacactaatggtgttcactttcactcacaagtgtcctggtgggctatggtatttgccacagaattcctgaaactcacaagctccccttgtgcatttgaaattatttgatttc

SEQ ID NO: 6422 - DNA, 120 bp, synthetic construct
  source 1..120: mol_type = other DNA
gaactcacttatctaaagaagacttctcttctcgttgatccaccttagtgtagtcaatcagggagctagctgttcatagttcccccagcttcaaaaaatgtcatctgcttttgaatttgt

SEQ ID NO: 6423 - DNA, 120 bp, synthetic construct
  source 1..120: mol_type = other DNA
cacatcctcctgacaccatcaaggttgtctgaaataaagattaaagcagcttctctatgctagggcttctacttggtttggaaaaagtgttttccagaagtattataatctcacagtggg

SEQ ID NO: 6424 - DNA, 120 bp, synthetic construct
  source 1..120: mol_type = other DNA
taaccatggtgattgccataatgcaaagacagtgtgatgatattcatgtagacctgtgatggatgatatcttgctaaatgaagcctgccattgactggtagaatggattgtaccatagac

SEQ ID NO: 6425 - DNA, 120 bp, synthetic construct
  source 1..120: mol_type = other DNA
ctaaaccctcacatttttacttgcttgtaatcagaatctttgacagtatcctaacttatgggctttgggtttggatgttcatgctgcatctcttatgactgcactattcctttcagcgct

SEQ ID NO: 6426 - DNA, 120 bp, synthetic construct
  source 1..120: mol_type = other DNA
gggtatgaacatcctggtaagctcctttccagaaggatttttctgatttataatactgtcagatgctttaactctattaggtttaccaaagcctcgccaaggaatcacccttgatctcat

SEQ ID NO: 6427 - DNA, 120 bp, synthetic construct
  source 1..120: mol_type = other DNA
tagatgtctcttataccttggaactcccttcagtagtttacaagattctgctgggtgagaactgcaggatgagtttccaagctagttgttgacattgtgattctgttttcattcttgcaa

SEQ ID NO: 6428 - DNA, 120 bp, synthetic construct
  source 1..120: mol_type = other DNA
agatctagttccttctagtaaggactgaattggacttttcctccctagtattccctacctccttatctcacctgttctctaagcataaagattatagcataaaccttcaggaaggagtgc

SEQ ID NO: 6429 - DNA, 120 bp, synthetic construct
  source 1..120: mol_type = other DNA
acaggaacaggaggagacaaacagaaaagtaattttttagtggctgggaggagggtttggatccatgatggagtgatgaagagaacagggctttggtatcactctttttttaagaaatta

SEQ ID NO: 6430 - DNA, 120 bp, synthetic construct
  source 1..120: mol_type = other DNA
aacattagggctcccttgttttcccttaatttatgacaccttatcacatatataattatatattgggtctgtgtatgaactcactatttattccaaattcttttaacctaataaacatca

SEQ ID NO: 6431 - DNA, 120 bp, synthetic construct
  source 1..120: mol_type = other DNA
agttttctcacttgtaaaatggaggacagttttctagagatctgagcttagctcaaagcagtaactttcatgtactcgggatacagcaagtctcttcagagaaaaagggaagttagtacc

SEQ ID NO: 6432 - DNA, 120 bp, synthetic construct
  source 1..120: mol_type = other DNA
acaagtttctgaggaaagacagtgactttgttttggggtttgttggatttgagattgatagtgggatcttgagtgggattgtttaggtaggaagtatcttttgccaaacgccctagaagc

SEQ ID NO: 6433 - DNA, 120 bp, synthetic construct
  source 1..120: mol_type = other DNA
agttgtcttttctttgtagatacgtaagtgaacttcatctaacgagattaaaaggcaccgaaggaggcacttacacattcctagtgtccaattctgacgtcaatgctgccatagcattta

SEQ ID NO: 6434 - DNA, 120 bp, synthetic construct
  source 1..120: mol_type = other DNA
caataaatgactattggaattggctttcctgggtgtgtggaggatgaggagacaactggaatatttcatagaaaagagcttaggcgttatgctgggcactttatgtgtgttgggttatag

SEQ ID NO: 6435 - DNA, 120 bp, synthetic construct
  source 1..120: mol_type = other DNA
atatgagtttagatgaagaaggtcacattcgtgtaattaaacacatatctttattactggccttcccagaatcctaatatgctaatgtgactttgccagagggggccatgggataggatg

SEQ ID NO: 6436 - DNA, 120 bp, synthetic construct
  source 1..120: mol_type = other DNA
acctcactttgagagttcagtggttgggaattttatgaagtgaggtactttgtgttaccactgtttccctggctttaagtccaaaggggtgtttaaatgtgtctcttttcttcttttttc

SEQ ID NO: 6437 - DNA, 120 bp, synthetic construct
  source 1..120: mol_type = other DNA
cttagaatagttgtggcctttttgacatcattttagctgagccagttacatatgtaggtgtactgtatggtttattttgtaaataagctgagcctcaaggacaaaagggattgtgttctg

SEQ ID NO: 6438 - DNA, 120 bp, synthetic construct
  source 1..120: mol_type = other DNA
cctgtaaccttaaagtggatagttcaaaacatgatctggtagcatttccagggcggtattatgcatttaaaatatgtggcaaacggtatttacggatcataaatagatcccgctcccatt

SEQ ID NO: 6439 - DNA, 120 bp, synthetic construct
  source 1..120: mol_type = other DNA
agggagaagctcctgcagataaagcacatagccatctagcttttggccagccaaccagaaatgatcccaggtagactatcagtgcatttgtgttgctgttaaaaaaaaaaaaaaaaaatg

SEQ ID NO: 6440 - DNA, 120 bp, synthetic construct
  source 1..120: mol_type = other DNA
aatatctttctataacatcattttggcatctcagtgtatggatcttttataatttctctagcccatgcctgatgcaattttgagacatccaggagcgaggcgggactctgaaatgatgtg

SEQ ID NO: 6441 - DNA, 120 bp, synthetic construct
  source 1..120: mol_type = other DNA
gtttgtgtggtttggccatttttttatgttgatggtggaaaagcaggagaaacaggtttaggtatgtagccatgtaaacttctgctggaattgactctaaacttgggtacatagacttcg

SEQ ID NO: 6442 - DNA, 120 bp, synthetic construct
  source 1..120: mol_type = other DNA
agtgtccacaaggaaagttttattgaaaacagccatgcctatttgattatataatgtctatgggcacatttgtactacagctgcagagttgagttgcaggaaagaccttatggcccacaa

SEQ ID NO: 6443 - DNA, 120 bp, synthetic construct
  source 1..120: mol_type = other DNA
ccattggcttgtgtattgcctttcagccaccagccctcagctttgttatctgtactatgttcttaaaattcattttgttcttgctttccacatggactggatggtgatgaaaaggaatat

SEQ ID NO: 6444 - DNA, 120 bp, synthetic construct
  source 1..120: mol_type = other DNA
ttgccagccatggctgttgtataactgctaccaggtgtcacgctagaaggcttggatgttagagcatacttgtaaccaaagctaaatggaattgattatgtaattttgagctgttccaat

SEQ ID NO: 6445 - DNA, 120 bp, synthetic construct
  source 1..120: mol_type = other DNA
aagacgatggcttgtcttcttgctctatttgtaaagctggcattggatccaaactctcaaggatgcccctaccttgagattgttttggagagtttctcttttgtgtatattagccaaatg

SEQ ID NO: 6446 - DNA, 120 bp, synthetic construct
  source 1..120: mol_type = other DNA
gggaacaaaaatttagagagatgtagaaacttactcaagttcaaagaactgagaaatgtaagagctggtattcagatgtgtccactatgcatggggctcccgtaattctgtgcttagact

SEQ ID NO: 6447 - DNA, 120 bp, synthetic construct
  source 1..120: mol_type = other DNA
cacaataacttgaaattcctagggcaggtacagttgcttgaaatcccattggcaggaatcctttaaagtagatttttacctgtggaacactttggagtcctagagtttgattagaagcag

SEQ ID NO: 6448 - DNA, 120 bp, synthetic construct
  source 1..120: mol_type = other DNA
gcattacctgaagacgaaaatggggtcaccacagctgtttttatccatcaattgctattttatgctcaggctttaaaagcccaggttaacatcacaattgaatagttagtatggtcgcag

SEQ ID NO: 6449 - DNA, 120 bp, synthetic construct
  source 1..120: mol_type = other DNA
ccggccccttgaagattttttatgctttcctcctctatgctatttcttttcaaccattcgtgtacccttttgaagcttgtttattttagggatctactgtgtaccagcatatatgcctgc

SEQ ID NO: 6450 - DNA, 120 bp, synthetic construct
  source 1..120: mol_type = other DNA
catgtgtgactaactctcttaacaagttaaaagatcttttgggcaaactgatgaattggtacaaagtgggaagacaaagaaactgggcacttactttttaggccttcttggggttttgtt

SEQ ID NO: 6451 - DNA, 120 bp, synthetic construct
  source 1..120: mol_type = other DNA
cctgttcactcctttgctgattggtttcgtaatcgtagctggcatgatgtgcattattgtgatgattctgacctacaaatatttacaggtaaccatttatttgttctctctccagagtgc

SEQ ID NO: 6452 - DNA, 120 bp, synthetic construct
  source 1..120: mol_type = other DNA
agaatgcagattttaattttatcattatggggtagaacagcccaggacataccctagttattgtcgtatttgtaacatcaacgacatcagcctcttgaatatctcatcccgaccagaagg

SEQ ID NO: 6453 - DNA, 120 bp, synthetic construct
  source 1..120: mol_type = other DNA
tggccatgaccacccttgggtatttttatgggaggcagaattaatctatatatctcaccttctttctaaccttttcttatgtgcttttagggcccaccctggtcattacagaatattgtt

SEQ ID NO: 6454 - DNA, 120 bp, synthetic construct
  source 1..120: mol_type = other DNA
acagaagtcatggttattttgcccagtcccctatactgtatattgctgcagttgtgtggtagatttctcctatccttttcatgcactttatatccactgcatcttgcaatggcaagacat

SEQ ID NO: 6455 - DNA, 120 bp, synthetic construct
  source 1..120: mol_type = other DNA
ttacagaacaggattttcaaactctttattcaaactttacatgactttcctcaaattggtccagtctattatgtagcaaaggggatgaggaggtagagcatgacccatgagtgcccttct

SEQ ID NO: 6456 - DNA, 120 bp, synthetic construct
  source 1..120: mol_type = other DNA
tacaaggcttggggtgaagcatagacttgagttttattgaagttagatccaaatattatatgtgtggcttatgaagtgtcaggaaataaggggtcagagggagtaataaacacttgggag

SEQ ID NO: 6457 - DNA, 120 bp, synthetic construct
  source 1..120: mol_type = other DNA
gccagaaatatcctccttactcatggtcggatcacaaagatttgtgattttggtctagccagagacatcaagaatgattctaattatgtggttaaaggaaacgtgagtacccattctctg

SEQ ID NO: 6458 - DNA, 120 bp, synthetic construct
  source 1..120: mol_type = other DNA
gcccagtcttgatgaattctgcaatctgtctccattatttcatgcctgtgtaattttgtcaagagttgtccaatacctctgaatctttgtttttctccccttgggaataatagtgattcc

SEQ ID NO: 6459 - DNA, 120 bp, synthetic construct
  source 1..120: mol_type = other DNA
tcatctagaaattagcgaaaataaggatgtcatttttcctttccaagttcacaggcccctgaatttgacacccatagatctcaggttaggagcccttataggaactttagcacaacatct

SEQ ID NO: 6460 - DNA, 120 bp, synthetic construct
  source 1..120: mol_type = other DNA
tcttaatctccatgccgtactgacatagtgctcacatcttaaaatggggataatgcacttgtgagccatgtatttcagaggtgattgggatcatctgagttcatataggtaaaaggtttt

SEQ ID NO: 6461 - DNA, 120 bp, synthetic construct
  source 1..120: mol_type = other DNA
tcttgcaggtatgacataatgaagacttgctgggatgcagatcccctaaaaagaccaacattcaagcaaattgttcagctaattgagaagcagatttcagagagcaccaatcatgtgagt

SEQ ID NO: 6462 - DNA, 120 bp, synthetic construct
  source 1..120: mol_type = other DNA
gtcagtatgacttgggttttggccacaaagttcttggaaaccacttctctcttaagagtttccatcagttagttgtgatcttgacactgtaagtatgccttttgttgctatgttcgttgt

SEQ ID NO: 6463 - DNA, 120 bp, synthetic construct
  source 1..120: mol_type = other DNA
gccagcacttgtatatacgcatctataaattgtccgtgttcatacatttgaggggaaaacaccataaggtttcgtttctgtatacaaccctggcattatgtccactgtgtatagaagtag

SEQ ID NO: 6464 - DNA, 120 bp, synthetic construct
  source 1..120: mol_type = other DNA
cactggagttctatgctctcgcacctttccaaagttaacagattttggggttgtgttgtcacccaagagattgttgtttgccatactttgtctgaaaaattcctttgtgtttctattgac

SEQ ID NO: 6465 - DNA, 120 bp, synthetic construct
  source 1..120: mol_type = other DNA
agaaattggcactcaaaggaaaaatgcaaaagtattttcaacatgaaaacacaagacagtggaattggaaactttcggataaaacactgtaacccagttagctctgtgggggtgtggggg

SEQ ID NO: 6466 - DNA, 120 bp, synthetic construct
  source 1..120: mol_type = other DNA
actgcagttcctgaagtatggccatttctttctctgtgtagaaacgaggtactgtgtaagtcttaacaccctacctaaacagtgttccaaagatctgtagtttcacatagcaattcagaa

SEQ ID NO: 6467 - DNA, 120 bp, synthetic construct
  source 1..120: mol_type = other DNA
tattcataccaggtttgaaaaatcctactgtcgctaatggattgggcagcaaagagatgttcaaagcatcagccaccacctgaaaattagtgattaggtcaaatccctttatggtatctg

SEQ ID NO: 6468 - DNA, 120 bp, synthetic construct
  source 1..120: mol_type = other DNA
caaaggttcacacagggcctggccttgcaaccttggtctcttcaacacctaataagctataactggcccaaataatcttttaatgtcacaagcagaattaaaactatcttcaaagactca

SEQ ID NO: 6469 - DNA, 120 bp, synthetic construct
  source 1..120: mol_type = other DNA
gcatgcaccaaaagccccaagacagaaatcttaggtattcagtttctttttcacaggcattgctagttcaaaaaccaaaactctgggaatactggcacttagaggaaaaaaaaacttcca

SEQ ID NO: 6470 - DNA, 120 bp, synthetic construct
  source 1..120: mol_type = other DNA
gtgaccccaacacaggagaataccactttaaaaaaaacactaatacctcagatttgtggagaaattagctaaatcatttgaaaggtcttatagtttaccaatttggaggagattctttct

SEQ ID NO: 6471 - DNA, 120 bp, synthetic construct
  source 1..120: mol_type = other DNA
aataagaggctagtccacattaagcaaacagtaggataaaaaccagcattatttatttgagcactagtgaaagtctccaataaagtccccaaactgcactcactgatgtttcccactctc

SEQ ID NO: 6472 - DNA, 120 bp, synthetic construct
  source 1..120: mol_type = other DNA
ccatgtgatggacacagagaagacacattttatggtgaaaacacagaatttgaaaacattacttcctaagattctgacaaagattctaggcttatgttgcaatgaactctcctctctaca

SEQ ID NO: 6473 - DNA, 120 bp, synthetic construct
  source 1..120: mol_type = other DNA
tattttctgagcaagacagagtttaatacgggtttagaaacgaaaatgagaattccacgcaataaatatttactgggtagttactatgtcccaggaaccttactaggcaatgggtgtgca

SEQ ID NO: 6474 - DNA, 120 bp, synthetic construct
  source 1..120: mol_type = other DNA
tgacatttctttaaagtgtatctctccggtttcacaatgaatgatggcagcaactggtaaaccaaataggaggttctaacagtccaacaagaaatgataggggcctgaactaatgatgac

SEQ ID NO: 6475 - DNA, 120 bp, synthetic construct
  source 1..120: mol_type = other DNA
ttgtcggatctctctcaccaatgtataaaaagcatcctccactctctgcattgtaaaacacaacttctttaaagtctgttgcattggtaagagtaatttactgggaaagccatgtgcaag

SEQ ID NO: 6476 - DNA, 120 bp, synthetic construct
  source 1..120: mol_type = other DNA
taatattttccaatctagaaaattaggcagtcatcaaacggggcaaagtgcttagttaactgtgctgctagtttgttcagaaaagcataccatcaaagtaggggcacagagaaatacaca

SEQ ID NO: 6477 - DNA, 120 bp, synthetic construct
  source 1..120: mol_type = other DNA
ttagttaactagttagctaagccaactacaaactttcaactacattcgttggcactttaagttagatacccacttacacctgtatataaaagattttaagtgtcaggtgtggtgactaat

SEQ ID NO: 6478 - DNA, 120 bp, synthetic construct
  source 1..120: mol_type = other DNA
gcaatgcagagagaattggaagccaataattaaaaagaagagattattatccaccaccaagaattcagtgtcaggacctcagtggctcatataattaacagcacagggtgacttttacca

SEQ ID NO: 6479 - DNA, 120 bp, synthetic construct
  source 1..120: mol_type = other DNA
ttcttgcaaaactctgtcaaggaagcaacacatcaaataccctaactatatacaaatgcaagactaccagccttttggtggggaagggcatggaggaacaagatgtattctaaaacccaa

SEQ ID NO: 6480 - DNA, 120 bp, synthetic construct
  source 1..120: mol_type = other DNA
ctaggaacatagggactacacaatgtactagcagaaaataattctatttgcctttcagatatggactgaactgagtgtaaagaatatgtaacgcattatattctagccaagtaattagct

SEQ ID NO: 6481 - DNA, 120 bp, synthetic construct
  source 1..120: mol_type = other DNA
ggcatgagccacagcatgcggccagcctatttttatactatgcacaagctaacaacgatttttgcattttaaagggtcataattaaaaaaaaatgcaacagataccacttgtggccctca

SEQ ID NO: 6482 - DNA, 120 bp, synthetic construct
  source 1..120: mol_type = other DNA
tctgaggtagtaatcatacaaccaccaaaaaggagacacagctattttaggatattatcaaatgagaagtggacagcaacaaagtgggactaacaagactctttttatgtcctctactgc

SEQ ID NO: 6483 - DNA, 120 bp, synthetic construct
  source 1..120: mol_type = other DNA
gtaccttctctcctaagaaaagtcaaggagactgtaaagacagtaaaaagaaaaacaaaaaccaagcctcttcctggtctttggaacctggaaatggatttatgtgaaatcttaattcct

SEQ ID NO: 6484 - DNA, 120 bp, synthetic construct
  source 1..120: mol_type = other DNA
attgaacagaaatttaaaaaaatatataaacttagggtagcccaagtgtaggtttagacacacaaaacttaccattgtgttaacaattgccttatagtcattagtacagttacatactgt

SEQ ID NO: 6485 - DNA, 120 bp, synthetic construct
  source 1..120: mol_type = other DNA
tccccacctcttgaattctaaatgttaacatgtgctcagaattgaagagaaattttcaatgtagaaagaaaccaaagccaaaagcagtaccatggacactggattaagaagcaatgccct

SEQ ID NO: 6486 - DNA, 120 bp, synthetic construct
  source 1..120: mol_type = other DNA
caaattcccggttccgaacaccattagctgggtaaacttggataatagagctgaaatttggtaactcctctataaaaatactaccactaccacccacccaaatgtcttttcctctattac

SEQ ID NO: 6487 - DNA, 120 bp, synthetic construct
  source 1..120: mol_type = other DNA
tgtcgagaatatccaagagacaggtttctccatcaattactacttgcttcctgtaggaatcctgagaagggagaaacacagtctggattattacagtgcaccttttacttcaaaaaaggt

SEQ ID NO: 6488 - DNA, 120 bp, synthetic construct
  source 1..120: mol_type = other DNA
gggggagggaggattactggggactatttgacaggtacagaattctaatttgggatgataaaaaaaagttctcaaaacagatagtgctaatggttagacaacatggtgatggttgcacaa

SEQ ID NO: 6489 - DNA, 120 bp, synthetic construct
  source 1..120: mol_type = other DNA
gcaatactcaagattctaatggcctcatccacttctgaaaactgtggaaaaataatctaacagccagatggatatctctaaagagcaatattgtttcatctgcaaatcctgaggggcctc

SEQ ID NO: 6490 - DNA, 120 bp, synthetic construct
  source 1..120: mol_type = other DNA
acagcaaaactctgtcccaaaaaagacatttatctcttgcttatctcttttctttgtactagatgctatgttaaatgtttttctttggttttcaattttttaaagtatgaaaacctacat

SEQ ID NO: 6491 - DNA, 120 bp, synthetic construct
  source 1..120: mol_type = other DNA
ctgtaatgtgggatattagtagtttatgtacatatttcataagatgcttccatggtgaatacaccagtgcgaccgagaaactgggaaagcagtcccctattcactgataaatctcattcc

SEQ ID NO: 6492 - DNA, 120 bp, synthetic construct
  source 1..120: mol_type = other DNA
atcaatgtagactctttcaaaaaatttagagtctaaataaggtttcagcaagctactgcccacaggccaaatcttgcccactgtttttgtattgcccattagctaggaatagttaaatag

SEQ ID NO: 6493 - DNA, 120 bp, synthetic construct
  source 1..120: mol_type = other DNA
aacgaaggtaggttagatcatgtcattcacttgctcaaagtcctccaatagcactcttcggtcttaaaaataaaaatgcaaagcactcttccttctctggtacctcctatgtttccttca

SEQ ID NO: 6494 - DNA, 120 bp, synthetic construct
  source 1..120: mol_type = other DNA
taaattattcagtgtgttcaccttttaacatactcgagtatgggttttccaactcaggcagtgactctgacacagagacatattccatgtatcaaaacaaaacaatatatacattccaag

SEQ ID NO: 6495 - DNA, 120 bp, synthetic construct
  source 1..120: mol_type = other DNA
atctacccacatcagtctcccttgtatcatagaaacacttattgaaaatctaggtgtcacattccgtgtcacacattatatagtttctgacctcaagcaactaaggtgagtggaagagac

SEQ ID NO: 6496 - DNA, 120 bp, synthetic construct
  source 1..120: mol_type = other DNA
tcttcccagcattccctgaatcttaggagtagtgcccattcttgatgttactgtgttacttcagtgtttttttgcctttcagtcttccaacacctaattagttctctgtgctgaaatatc

SEQ ID NO: 6497 - DNA, 120 bp, synthetic construct
  source 1..120: mol_type = other DNA
gtatgctatgtgaatacatttcaattttttaaaataacagagcttaccgacaggggatgagtacaaaggggagggcgaaggaaaagatgagtgatattgggcatgttgaattccctgtac

SEQ ID NO: 6498 - DNA, 120 bp, synthetic construct
  source 1..120: mol_type = other DNA
tgtgtaacctgttcaagtcagatggcatttgcccacaagtgatcacttgaagtccaggtaagaatgagaggctggaatgaccgtggatccaatcttaatgccaatataatgttcatattt

SEQ ID NO: 6499 - DNA, 120 bp, synthetic construct
  source 1..120: mol_type = other DNA
aatttacacaaggagaaacagggtagaaccagggttctcactgcgggagaaagaaggtgaaaaatagttaactcttgatttcttagtaacatgcatttctaagctctgtgccttgaaaac

SEQ ID NO: 6500 - DNA, 120 bp, synthetic construct
  source 1..120: mol_type = other DNA
tttgcgcctcagtgtatctctagcccacaggaagactgcatggtacaaagtgggcagtgaagaacatttctaggattaaggaattagttgtattgttaaaaccagaatcttaggagattc

SEQ ID NO: 6501 - DNA, 120 bp, synthetic construct
  source 1..120: mol_type = other DNA
ccttatgtcagggacatgaatttgacaatttaaaggatgtttaaagctacaggttaacatatcaaggtttggatcttaacaccattgaggtttggggtcagataaccctgttgtgggggc

SEQ ID NO: 6502 - DNA, 120 bp, synthetic construct
  source 1..120: mol_type = other DNA
caatacaagtaaaggtgattatgtgcacagcctcgaatacaaacatactccatctatgtgtcatacctgaatgattttacatcatacctctgccactaagttgccattagatagcaggct

SEQ ID NO: 6503 - DNA, 120 bp, synthetic construct
  source 1..120: mol_type = other DNA
gtcagggaccgtcagtttcaaagttcacaggtaaccaatgcttcccagagtcaagtcttctggtttggcagaaatcataagcagagttataggtttaagtttataaactttttcagcctt

SEQ ID NO: 6504 - DNA, 120 bp, synthetic construct
  source 1..120: mol_type = other DNA
taataaatatgttctgaaaatgagttaacaaggacagttggggaatgtcccctcctggaggtctttgagattaaataaatcctcatctgcttgggatggaagttctactccatgaccttc

SEQ ID NO: 6505 - DNA, 120 bp, synthetic construct
  source 1..120: mol_type = other DNA
atcatattcgtccacaaaatgattctgaattagctgtatcgtcaaggcactcttgcctacgccaccagctccaactaccacaagtttatattcagtcattttcagcaggccttataataa

SEQ ID NO: 6506 - DNA, 120 bp, synthetic construct
  source 1..120: mol_type = other DNA
aatctctggggaaaataaagctaaaaaccaagagaactccgaattaactgttcagtacaatacataatcctgtatcaccgctgcacaaaaaaagataaagattagaaagccgggtgcggc

SEQ ID NO: 6507 - DNA, 120 bp, synthetic construct
  source 1..120: mol_type = other DNA
tctacctagacttattggctgcttgtctagggtgaagttaacaaccactacaaacatgtatcttatcccgtttgcctccacgctttatttcaaatgtaggccaaagcaattaggaataga

SEQ ID NO: 6508 - DNA, 120 bp, synthetic construct
  source 1..120: mol_type = other DNA
gggtagaggggtcgttaaggccaaaaagtttactagcctaggaaatactgtggacagacattggattagagtttgtgtatatatatgaattcagagccacatgtatcttccggtttactt

SEQ ID NO: 6509 - DNA, 120 bp, synthetic construct
  source 1..120: mol_type = other DNA
gtaagtgctgttttggagtactgtaataactcttgagatgtagaacacatctgcaaaatgagggtagtataaaagagacgaggggatgagggtaatacataagaaataggggaaaggaca

SEQ ID NO: 6510 - DNA, 120 bp, synthetic construct
  source 1..120: mol_type = other DNA
gcatttttttccaaacacaataacctcaaacagtggtctctaagcactttcctatgctcttccaaaacgtgacctcccctcttactcacacatcccctacacacggaaaaggaccactat

SEQ ID NO: 6511 - DNA, 120 bp, synthetic construct
  source 1..120: mol_type = other DNA
ataaagtagaaaaataccaaaatttctttcataattctctctacccaaaggcatcggtcagtccctctccagaccagaagcagttagttctgacaccaacaagtggtgataagaggttga

SEQ ID NO: 6512 - DNA, 120 bp, synthetic construct
  source 1..120: mol_type = other DNA
cagctcgatgccatagttgcggatggcagcatcgttgtctttgattggctcaatcacgtccttgatctcctgtggcacctccagcttggacagcttcacaagctgccgaagggagtggta

SEQ ID NO: 6513 - DNA, 120 bp, synthetic construct
  source 1..120: mol_type = other DNA
ggacctggagatccactttttgaaaaagcttatcaagtggttctgatgacagccacctttgggaaacactgatttaagcaggatttgtaatgagaattagaatcccttttggtgatgctt

SEQ ID NO: 6514 - DNA, 120 bp, synthetic construct
  source 1..120: mol_type = other DNA
ccatagaaaagagaaaatgctacagttagcactggctgggcagcatctggggtagtaagcttgacttttctctaggcaccggattaaacattgtttttaatgtaacactgaaattactca

SEQ ID NO: 6515 - DNA, 120 bp, synthetic construct
  source 1..120: mol_type = other DNA
aaggcagttccgttcttaagaaacccagagtcatcaaaaaatgaatataaaaactattgtttcaaggggtaagggagtgggggataaagcaatggggcttcacacttgcaataacaaagc

SEQ ID NO: 6516 - DNA, 120 bp, synthetic construct
  source 1..120: mol_type = other DNA
tttagatgctactccataacatagccatgtttaatataaaaatggtaggatttctcccagaatattggcaaaaaaactgtcatcccagaaaatgtgccaatcccgggacttcctgtccct

SEQ ID NO: 6517 - DNA, 120 bp, synthetic construct
  source 1..120: mol_type = other DNA
gttttaaagaaaagaataaggccaagcaggctaagggcacagccaggcagaggaacaaaaagctaggggtcgatggtggcaggcccaggaggggagtgggtgatacaaaaggagcaagga

SEQ ID NO: 6518 - DNA, 120 bp, synthetic construct
  source 1..120: mol_type = other DNA
atgactcactacccacaatgcctactgacactactggcggggatgggatcctgcggatcctcagcgtggggcccaggaagaagtaaaggaccatttcaggaaccaagttcaggctaccaa

SEQ ID NO: 6519 - DNA, 120 bp, synthetic construct
  source 1..120: mol_type = other DNA
ataatcactattacagaggtaagacacaacaacagcgctatcattttgtgtgagagcagcacttcagacttttcacagcgcttgcctgtttattatctcaggtgagttaagacatcatga

SEQ ID NO: 6520 - DNA, 120 bp, synthetic construct
  source 1..120: mol_type = other DNA
agttccctcaaagaatacagtgtgagaatcaacatttttaacccattgaagagtgtgtctaaaataccttgacactgtggagggacttttacaggcaacagagaagttgcagatcagatg

SEQ ID NO: 6521 - DNA, 120 bp, synthetic construct
  source 1..120: mol_type = other DNA
gttccaaaaatagccagacccaagttcagtaagggcacgaatttctcagaacaaaagctgccccatctgtgcttgccttgcaggctgctcttcttacacatcacagaattcaattcaaat

SEQ ID NO: 6522 - DNA, 120 bp, synthetic construct
  source 1..120: mol_type = other DNA
gataagttacagggcaattgcttttcagagtacttttacatttctattccattcttgtcagtaaagacaaggatcccataagctgatggagaaactgaggcctctagaaactaaacgctg

SEQ ID NO: 6523 - DNA, 120 bp, synthetic construct
  source 1..120: mol_type = other DNA
attgcttgctggaacagaacctagagtaggaggaagctgaaccacctgtaaaccctctgattttcaaagacttattgcattcctagtatatgccacgcatgtgccatatttgtaagccaa

SEQ ID NO: 6524 - DNA, 120 bp, synthetic construct
  source 1..120: mol_type = other DNA
gactcagaacgctcggccgccggccgcaccactgtggccgctgcaggggcggggaacgcagtgaaggggcgcggcgcaggtgtcaggttgctggagaggcgggcctacagggcggaaacc

SEQ ID NO: 6525 - DNA, 120 bp, synthetic construct
  source 1..120: mol_type = other DNA
accatctcccatttcacctcatacttaacccaaacccctctcaaaagtatggcccttggacctactgactccaaaaccttgggggacaggcccaggaatctgcattcttaatactcctca

SEQ ID NO: 6526 - DNA, 120 bp, synthetic construct
  source 1..120: mol_type = other DNA
gctgcagctgtgacttgttctcatagaataaaaaacagaactgaacttagccttcccagggaaggaaccatgccccacacatccagggagtgatgacagaggggacagcttgaagagctc

SEQ ID NO: 6527 - DNA, 120 bp, synthetic construct
  source 1..120: mol_type = other DNA
accaagcacaagggttcagactgccttcaacccttaaggggcactttttctctcaaggctcagaatagacaactgtgccaaaaagcagcatggtaggtgtcagcccaatgcccatccagg

SEQ ID NO: 6528 - DNA, 120 bp, synthetic construct
  source 1..120: mol_type = other DNA
ggcaagattaacagggctctccaagggctctgctcaacaggacatttcccggaatagaacaaggcccactgccagtatcacttcccacccctgcccagaaataaacaccctgcatcagca

SEQ ID NO: 6529 - DNA, 120 bp, synthetic construct
  source 1..120: mol_type = other DNA
taccttcacattgacaaggtggtaattaacccggagctcgtacttcttcagcacttgcagaagtgcttccgctgtctcgcgggaagtgaaaaactctaagtaggcctgtgggagagacag

SEQ ID NO: 6530 - DNA, 120 bp, synthetic construct
  source 1..120: mol_type = other DNA
tcaggatagtaacagcagctgcctttcagggagtgcttcctgctcttaccatgtgccaagcacgttacatgctttgttaggtttcatgcccagaacacaagctacatcccattttacaga

SEQ ID NO: 6531 - DNA, 120 bp, synthetic construct
  source 1..120: mol_type = other DNA
ccactccagcatcactcactttgtgaccattccggtttggttctcccgagaggtaaagaacgaagacttcaaagacactttcttcactggtcagctcctccccccacatcttcagcagct

SEQ ID NO: 6532 - DNA, 120 bp, synthetic construct
  source 1..120: mol_type = other DNA
ctgaattggatttcacttaagaggccaggcatctgattaagttagagtctgaacagggttcaaaatcaaattggattcaacagttaactagattggatccagttaaaggccttggggtag

SEQ ID NO: 6533 - DNA, 120 bp, synthetic construct
  source 1..120: mol_type = other DNA
aaactggtagcgatcttctctgaggtagtttagggaaaaatttttcttgcatgttccacatgctatggaaagcctcttgaattccattctaactcactgtctttcagcaaacagactaac

SEQ ID NO: 6534 - DNA, 120 bp, synthetic construct
  source 1..120: mol_type = other DNA
acatatttgagacattgacttcaatttaattgaatttctagacggagcaaattatacccccaaagaacttgagtggatgcttcaaggtcacctgccagggagactttctaaaacgagctg

SEQ ID NO: 6535 - DNA, 120 bp, synthetic construct
  source 1..120: mol_type = other DNA
taatctaactgagaatatctcaagacagtctattgagatggataaagtaagaaacagagacagagcttgttgatgtgtgtgtgagtcatcctccttgtgaggttctgtgtgtgatgaatg

SEQ ID NO: 6536 - DNA, 120 bp, synthetic construct
  source 1..120: mol_type = other DNA
acggtctccccacacctctgggcaacacaatctcagaacaagtatgtacaacgctgtgttgatcttcttatattcctgctgcctggttttattaagttcaatatttctgtatcatattca

SEQ ID NO: 6537 - DNA, 120 bp, synthetic construct
  source 1..120: mol_type = other DNA
catacaagggtttcctattctccagatccttgctaacacttatcattcctcttttggataatagctattttaacagatgtaaggcaatatctcattgtgttttaaatttacatttccctg

SEQ ID NO: 6538 - DNA, 120 bp, synthetic construct
  source 1..120: mol_type = other DNA
agattatatcaacagacagtctcatttattccttcctcatctgtctcttcccaatgaaaaagaattaacgctcagaattacagtatcttttcttgttccctcttttacctatcccactat

SEQ ID NO: 6539 - DNA, 120 bp, synthetic construct
  source 1..120: mol_type = other DNA
tccaggagaatccaaaaggcagcttagaagacggatgtttctaattatctgagtgactttgggcaccttttatttaatgtagccttaaggacccttccagttttgaggttatcttagctt

SEQ ID NO: 6540 - DNA, 120 bp, synthetic construct
  source 1..120: mol_type = other DNA
ctatgggctccattcagtttcctctctgttcaaattctagagtttagctgacaagcttttcaagtctaataccacttactcctctagatttgtcttttcaccttacgcttcaacctcact

SEQ ID NO: 6541 - DNA, 120 bp, synthetic construct
  source 1..120: mol_type = other DNA
ttgcactcatatgcatggcattgtgtttagcctcatgaaagacacacagaaacacaaggaaggcactgtttctgcctgcctctaatgatttgcagtgtagaaagattaaatcttaagcaa

SEQ ID NO: 6542 - DNA, 120 bp, synthetic construct
  source 1..120: mol_type = other DNA
ttatacctcataaatatatgtaattataatgtatcagtttttaaaaatgaggtggctgggaatagtggatttatttctggattctttgttctgctccattagtctgtgtgtctgttctta

SEQ ID NO: 6543 - DNA, 120 bp, synthetic construct
  source 1..120: mol_type = other DNA
tagcctttattgttgtgagatattttccttccatatccagtttgttgagacatttcaccatgaagggacgttgtattttatgaaatgtttccgcttcagtcaggtagtggtgaagcaggc

SEQ ID NO: 6544 - DNA, 120 bp, synthetic construct
  source 1..120: mol_type = other DNA
tttgcttatggtgtgagctatagattgcttcgtttttaaaaagaaactcttttcactgctttgcagtgtcatatttgtcatgaatttggtgtccacatgagtgggtcatttctgagctct

SEQ ID NO: 6545 - DNA, 120 bp, synthetic construct
  source 1..120: mol_type = other DNA
ttcccttacagaacggaagatatgggtgagactgaagcatggttcatcctgagacgaatcccctcccacaataaacctatgaaatcaaactatttatttatatgtttccagaatacagtg

SEQ ID NO: 6546 - DNA, 120 bp, synthetic construct
  source 1..120: mol_type = other DNA
ggcccttccactttctgccatatgtggatcctgcattctacttccctctagaacatttcaccagtttttgcgtgcactcatttttctaatgcatgcttgtgcaaaattctatgacatttt

SEQ ID NO: 6547 - DNA, 120 bp, synthetic construct
  source 1..120: mol_type = other DNA
tggtgtaattttgttttttactgcttctgagtctgtgacaatattccccttttcaatcctatattgttggtctttgtgcgttccctctctgtatctgtcttttggtcagtctcatcaggg

SEQ ID NO: 6548 - DNA, 120 bp, synthetic construct
  source 1..120: mol_type = other DNA
atctggcaaaaagtaagctgttccttgtgcctgaggagttggtgactcttgatttcatttgtacttaaacacctgtattccccgccataacatcttttgccacctatagctggaatgaag

SEQ ID NO: 6549 - DNA, 120 bp, synthetic construct
  source 1..120: mol_type = other DNA
gcgcatatgccccggaacctaaaagtttaacagatcctgaaagaaactgctacttttaatccatttattccctctcaatttgtatgctattatcttgtatcttaaacacacacacacaca

SEQ ID NO: 6550 - DNA, 120 bp, synthetic construct
  source 1..120: mol_type = other DNA
gacttcctccagttatctctgacactaatgacgaaatttttctttgacttttatcaaggtaaaattcattttaagaaatgaccactgatttgtttaagatattccagcatgggggaggag

SEQ ID NO: 6551 - DNA, 120 bp, synthetic construct
  source 1..120: mol_type = other DNA
ttgcagtatgggctggttacactgtgttccacctgcatgatgactgtgaagcttagaagtcacagagttctgtggttgttgtttaggatcactgttatgtagtattgacatttgattatt

SEQ ID NO: 6552 - DNA, 120 bp, synthetic construct
  source 1..120: mol_type = other DNA
tgctgaaatagcatgtggagcactgatgcaggaggccagttttatgccttctgtcttggacaaagaaagcaagctggccctgacatccagttgtcatactttaagaataaaaaataaata

SEQ ID NO: 6553 - DNA, 120 bp, synthetic construct
  source 1..120: mol_type = other DNA
taataaaacctctgaagttttttataaaaacttttatgtatacaagcctgtttctttttctaagatttttgcatttcacaagagaaaattccattcttaacattaatgccatccccatca

SEQ ID NO: 6554 - DNA, 120 bp, synthetic construct
  source 1..120: mol_type = other DNA
cttggaaccaacccaaatgtccaacaatgatagactggattaagaaaatgtggcacatatacaccatggaatactatgcagccataaaaaaggatgagttcatgtcctttgtagggacat

SEQ ID NO: 6555 - DNA, 120 bp, synthetic construct
  source 1..120: mol_type = other DNA
tcacatacttttcaaaaacatacagaaccaggtccttaaagagacagtccttctatcatgtaattcctgtgaaaaacgggatattgtaataatgctacctgtaaacctgctttttttttt

SEQ ID NO: 6556 - DNA, 120 bp, synthetic construct
  source 1..120: mol_type = other DNA
tatatgatctctgcctatgatgacaattaggatttctcagattttcttcttactctgatgtttagcaccaggaccaagtcgtatctgttgagtccacttgtgatggtggaggtctgttat

SEQ ID NO: 6557 - DNA, 120 bp, synthetic construct
  source 1..120: mol_type = other DNA
tggacccatccccagagaactgtatacgcttcctgctttcaaataatatgtgtaatcctatggggtctgactggcagacttacttttttttctgattcaaaatgccattcctgtatatta

SEQ ID NO: 6558 - DNA, 120 bp, synthetic construct
  source 1..120: mol_type = other DNA
aagttgtgcctctataaaagccacccaccaaacacaggacaaacatgaaagtagatgatgacagactaacacttcagtacaaaaagagatgctttataggaccttaaactatctccactc

SEQ ID NO: 6559 - DNA, 120 bp, synthetic construct
  source 1..120: mol_type = other DNA
gtagtgttgagattcagaaacactggtatgttctacactttcattagggtcctgatgaaactcttaaaacttggtgtggcggtttgtctaaacagcatcctttctctcattgttcttgct

SEQ ID NO: 6560 - DNA, 120 bp, synthetic construct
  source 1..120: mol_type = other DNA
ctacacttgtccctcagggtaagtcactgagttatgaatggtgtttgttcaactacaatagtccttcctaaccacataagattcttaaatccccttctatcagagaataactcttgtagt

SEQ ID NO: 6561 - DNA, 120 bp, synthetic construct
  source 1..120: mol_type = other DNA
ttttgtttggcgcctttcttgttggcgtgatttttgcctctgtaacttgttcttccatttccttccatgcctgttcttccttccttttgccatctttgatatcacacgaaaaaaatctag

SEQ ID NO: 6562 - DNA, 120 bp, synthetic construct
  source 1..120: mol_type = other DNA
taaaccactgtacgggattgattaattaagtaatatgtaggtatcaggcatacgtgatcaatcccttcatttgtttatattggaggaaggatgggatccagccccattcacctaggagaa

SEQ ID NO: 6563 - DNA, 120 bp, synthetic construct
  source 1..120: mol_type = other DNA
ctaatcctagggctaagacagtaattaaaatgagtactataataagtactaattttaggctgttcattcggaagggaagagaagaccctcactgcaatcaggcatccaggacagtgatca

SEQ ID NO: 6564 - DNA, 120 bp, synthetic construct
  source 1..120: mol_type = other DNA
tagctaacaattattttggggaactgaacgggcaatcaagagattgatcgtctaaagcgcgaagggaaactatttgaaaactgtcaaatgaagacccttataaagctattgtgtccggaa

SEQ ID NO: 6565 - DNA, 120 bp, synthetic construct
  source 1..120: mol_type = other DNA
cacaaatgttgcttctgtgacatttttgatacttctttgacttttctgtgagcttatgttatgtcttggagccattagatttcaggctctaaacaaatggccacagtgaggcctggggac

SEQ ID NO: 6566 - DNA, 120 bp, synthetic construct
  source 1..120: mol_type = other DNA
ggtatataccccagagagtatacagccttcacttgggtgtacatgggtacttgggacccaggatgagtagggaagtcagtaaggagtgtgtcatagtttcaaaattcttttcagtaactt

SEQ ID NO: 6567 - DNA, 120 bp, synthetic construct
  source 1..120: mol_type = other DNA
caaagcatttcatagtgcggttacagcaagatccattcttgctcacacgtgccagcagcagtggtagtggcagcatggtaggttgcacgcttgtcagctgaggcagagtgctagcaggtg

SEQ ID NO: 6568 - DNA, 120 bp, synthetic construct
  source 1..120: mol_type = other DNA
cctctaagatcttcacaaggcaaagatgcgcactcttgccatttctattgaatacaggactgtatgtatgagcaagagcaattagtcgagaaaaaaataaaaagtacacaagcccttttt

SEQ ID NO: 6569 - DNA, 120 bp, synthetic construct
  source 1..120: mol_type = other DNA
ccaggctcttgttttggttccatatgaattttaaaatagtttttttttctaattctttgaagaatgtcagtatgtcagtggtagcttgatgagaatagcatagaaattataaattacttt

SEQ ID NO: 6570 - DNA, 120 bp, synthetic construct
  source 1..120: mol_type = other DNA
atagaaccttccagtactcattcccctgcagggacatcaagttcaacaaatatcctcacgagcccaggcggcacagtgtgaagacagagtctacctccttaggaagtaaaaggaatgtta

SEQ ID NO: 6571 - DNA, 120 bp, synthetic construct
  source 1..120: mol_type = other DNA
caagagttgtagatcaataccatgaatgtaaataaaaaacaccagcataaacaaagccatatgacatatatcaccctcataccacacacatggggctctttcagacacattgcccagtgc

SEQ ID NO: 6572 - DNA, 120 bp, synthetic construct
  source 1..120: mol_type = other DNA
agtggtgacagttacaggtccttgattcaaactgttgggtttacagtcacagccactttatagctgtgagaacttggcctagtcacttagtttccctaaaactcagtttctttttcagta

SEQ ID NO: 6573 - DNA, 120 bp, synthetic construct
  source 1..120: mol_type = other DNA
acaaaaaatcagacatactgtttgctcttgaatgcttgaaacacaaaacaggtgacaccaccttcctcctcaaaaggaactttttaactgtcaactttctacctgcacgctgcccagaga

SEQ ID NO: 6574 - DNA, 120 bp, synthetic construct
  source 1..120: mol_type = other DNA
caactaaacaatattcatgaactctgcagaaaaacaccagcattttgctcaacattcaggaccctctagaagttgcctcattctactctcctttcttacctttcttttacacagctctcc

SEQ ID NO: 6575 - DNA, 120 bp, synthetic construct
  source 1..120: mol_type = other DNA
gttctgttaaaaatcttttcattggcgggccatcagactgggtgactcctgtggtttcattttcactcattttactgtttaccagtaaacagtagaaaactagagacttcaccaatcaga

SEQ ID NO: 6576 - DNA, 120 bp, synthetic construct
  source 1..120: mol_type = other DNA
gagtcagtgttcaccaacactcctttagtgtgacctctctactttttggttttcatattcatctacttgttcactggccatgaaaccgaaactatcaggatagctcagttattgcatttc

SEQ ID NO: 6577 - DNA, 120 bp, synthetic construct
  source 1..120: mol_type = other DNA
tgcactttttgcattctccacttcggaagcaccaattgtctttgcattggcttgtccttgactgcgttctattttattctatcttaattgctttatcatttcattagcctttagtaggaa

SEQ ID NO: 6578 - DNA, 120 bp, synthetic construct
  source 1..120: mol_type = other DNA
tttttataattgccaaacgttttggttttagagtagcttctaacagcgctgatacttgctgcccattttctatgggttgccctgagtaggttaaatatcctctctctttccatagcatcc

SEQ ID NO: 6579 - DNA, 120 bp, synthetic construct
  source 1..120: mol_type = other DNA
ggagaaatttggtatccagtttctacaacagcctgccagtccccgaaatcctctaagttgtttcttagtgatgggcattgggaaagctaaaatttctctcacattatcagggttaatact

SEQ ID NO: 6580 - DNA, 120 bp, synthetic construct
  source 1..120: mol_type = other DNA
gccacaagacgatgtttcaacactactagtactaaattgtggtacgttgtcaggacattttgtaattcggtattcttggtctcctggccccaattctaaaaaaagttcacgttttgatga

SEQ ID NO: 6581 - DNA, 120 bp, synthetic construct
  source 1..120: mol_type = other DNA
cccatcagcgttgcacccatctccatagttgtagtttccacacacttatacaactcaaatgttcactttactgtgcagtccattccctctgttttgtgatttttaggaaatcttcataat

SEQ ID NO: 6582 - DNA, 120 bp, synthetic construct
  source 1..120: mol_type = other DNA
ctctctgagtggtagaactttagagcttgaccaaatgttacgaaagggtgctggtggaagttaggatgagaagaaatgcaatctaatagatttggagaaatgatgttgtagacaccaaga

SEQ ID NO: 6583 - DNA, 120 bp, synthetic construct
  source 1..120: mol_type = other DNA
ttccagcttaaggccttgttattttctgttttcctacttggaacaatcctcctcacgcatatccttaggccttattctctggcatccttcaaatcttagcgagtgttttttttttggtgt

SEQ ID NO: 6584 - DNA, 120 bp, synthetic construct
  source 1..120: mol_type = other DNA
ttgaaagaattggctataagaagtctaggaacaaattggacttggaaacattaactgacattcttcaacaccagatccgagctgttccctttgagaaccttaacatccattgtggggatg

SEQ ID NO: 6585 - DNA, 120 bp, synthetic construct
  source 1..120: mol_type = other DNA
ctcttcctctcatctttcttgtctcttaaattactttacttccttgcacactttgccatacaagaatgaacatgagcttttcttgtgtagatctgagttgaaatcctgtggacactgggc

SEQ ID NO: 6586 - DNA, 120 bp, synthetic construct
  source 1..120: mol_type = other DNA
ccatctgttttctctaaggctgctagctggaggtttcatctacatgacataaaccatggttcccataagcccttttaactcaagcatttaattgtactgaccgcaagtctttagacaaaa

SEQ ID NO: 6587 - DNA, 120 bp, synthetic construct
  source 1..120: mol_type = other DNA
gggaaacttgagaatgaagacccaacttcccagtaagttacagaaactcatgtattattccgaggccacagtaaagagtggagactcaaagcatggccagaaacaggtaaattagtttta

SEQ ID NO: 6588 - DNA, 120 bp, synthetic construct
  source 1..120: mol_type = other DNA
tttccctggaagttcaaaccaggtgttccactgaactttctgagaaggcctcacatcagcagatatgcatgaaggttgtttataagttactgttattttctcctgataccttcagtttgc

SEQ ID NO: 6589 - DNA, 120 bp, synthetic construct
  source 1..120: mol_type = other DNA
ttttacccattacaggccagaaacctgtaaaggaacctgtaaaggaactgcatagacaagctgtgaggccagttttatccacagggctattatcagctttataaagtcccaatatcaatt

SEQ ID NO: 6590 - DNA, 120 bp, synthetic construct
  source 1..120: mol_type = other DNA
ttgattttcttcagtccccactttgaaacttaaaacaagtttcatatattaaaagccaaggtaatagctttggagagatttgggttacgggtatttagatagagacagatattgtggtgg

SEQ ID NO: 6591 - DNA, 120 bp, synthetic construct
  source 1..120: mol_type = other DNA
gcaaggaaataactttaaatgtgactagttttgtctaatgtctcagttctcaaagcaatctaggtaaactgctaacaatgaataaattgaacaaatataagtgggatggataaatgcttg

SEQ ID NO: 6592 - DNA, 120 bp, synthetic construct
  source 1..120: mol_type = other DNA
atagcctgatgctgaagtgtttcgtcttaaagcttcaaaaaaagcaatgttttcttccattatcacttaattctgtgctgttggcttttcctcctatgagtaagggccagaaaccctctg

SEQ ID NO: 6593 - DNA, 120 bp, synthetic construct
  source 1..120: mol_type = other DNA
attctttgttagtattgttcttcagtgggttctccccagtagctttgggttgatatcctcccagcttctagccttgcagcataatacatgtgcttagatttcagcaaaaatgcctcaata

SEQ ID NO: 6594 - DNA, 120 bp, synthetic construct
  source 1..120: mol_type = other DNA
tttcttgcttaggggatcatggacattgaagcatattttgaaagaattggctataagaactctaggaacaaattggacttggaaacattaactgacattcttgagcaccagatccgggct

SEQ ID NO: 6595 - DNA, 120 bp, synthetic construct
  source 1..120: mol_type = other DNA
ccacatcattttgttccttgcagaccccagaaggggtttactgtttggtgggcttcatcctcacctatagaaaattcaattataaagacaatacagatctggtcgagtttaaaactctca

SEQ ID NO: 6596 - DNA, 120 bp, synthetic construct
  source 1..120: mol_type = other DNA
tgagttatcataattaggcaactggctgagcatgcaaaggactcaggtctccctattttaaagccaccagttgcccgcttatgataactcattaattcatgagtagtgggttaatctatt

SEQ ID NO: 6597 - DNA, 120 bp, synthetic construct
  source 1..120: mol_type = other DNA
caaacactttcttcgcttggctttcgggacaccacactcagctctcctgcatctctgaacaccagttttgtttttttttttcatgtcagacgggaaatgtactgatgtcataacaagatt

SEQ ID NO: 6598 - DNA, 120 bp, synthetic construct
  source 1..120: mol_type = other DNA
ctttgagaaatttacacaaaattgcagtgaagatgaaggcaacaaaatattttcaaactgaaacacccagccgtcagctattgtggatactgtcgagagcaaaaaccaccagtgccagtc

SEQ ID NO: 6599 - DNA, 120 bp, synthetic construct
  source 1..120: mol_type = other DNA
cataaacaagcattagatggctaactaccaaacaagttaagtcccttagggcaggtagattcagtcttttccttctctgagcaattcccttctgccataaactacagagaggtgattaat

SEQ ID NO: 6600 - DNA, 120 bp, synthetic construct
  source 1..120: mol_type = other DNA
tttcttgtttttctcctcatcctgtacctcttttttcattaagaatcctgcctggaagtttaggtcaaagaggctgcttggagcaaaatacagtggtgtctcatcccaaatattctccag

SEQ ID NO: 6601 - DNA, 120 bp, synthetic construct
  source 1..120: mol_type = other DNA
ttatgaccatgctttcatcttcacaactcaagatctattttcagatgctatcttgaggttttgaaccccacgaaggctcaatgaatgaattcccctgaaggttcgttgaaaatgaggtac

SEQ ID NO: 6602 - DNA, 120 bp, synthetic construct
  source 1..120: mol_type = other DNA
gacaagctctttcatctggaaggtctcgaagggttccctgtgcaggatttgggcctccaaaaaatgaagacaggccttcttttgtttttattatggaaatttttaacacatgtaaatgag

SEQ ID NO: 6603 - DNA, 120 bp, synthetic construct
  source 1..120: mol_type = other DNA
gcattttaaaacaaatcccaaacatcatgtcattccatctgtaaaaacttgatcatgcgtctctcccgaaggacctggagcctaggcttaggatctaattgtgctcaaaaccctgcatca

SEQ ID NO: 6604 - DNA, 120 bp, synthetic construct
  source 1..120: mol_type = other DNA
cactttaaggaaagagatcattattgtccttggtcagccaacttgacagtcttctttttccctgaaaatgcaaatattgagtgggtccgagtaaagctagatacacagaagacttgttga

SEQ ID NO: 6605 - DNA, 120 bp, synthetic construct
  source 1..120: mol_type = other DNA
gggtgactaaggttcatcagggacttcccatgagaaagtcttgtctgacctcttatcctaataaaagcagagtaaggactataccaggaggttttcttatccttgattcatgatttaaag

SEQ ID NO: 6606 - DNA, 120 bp, synthetic construct
  source 1..120: mol_type = other DNA
gttcaatatcaaaagactggctggaattgtaaaagcaaagtcattgagtacagtcacatttataggaaagatcactgacgagatgcacgcacaatcccagcattgtctgctaaacggtaa

SEQ ID NO: 6607 - DNA, 120 bp, synthetic construct
  source 1..120: mol_type = other DNA
taaagtaatcacccttatttgcagagaatgcagtaaagtgggtaactgtttaagatctcatagctaattaggtacatgtctaggacaataagcacgcaaatgtccctgacaccccttccg

SEQ ID NO: 6608 - DNA, 120 bp, synthetic construct
  source 1..120: mol_type = other DNA
gtggggataagaactgcctcaacctttagggaaagtaatgaggcagaatctcttgaaactttaaagacacataaatcttttatctcgctctccaatttgggggaatctgttctacagact

SEQ ID NO: 6609 - DNA, 120 bp, synthetic construct
  source 1..120: mol_type = other DNA
tatatgtagtgactcaaaaagatatccatgctatattattaactgataaaaaagcaagtgaatatgaacccatttttatttaaaatgaaagaagtgagaggaagggagagagggaaggga

SEQ ID NO: 6610 - DNA, 120 bp, synthetic construct
  source 1..120: mol_type = other DNA
aatcaatttctcttttttattaactacctagtcccaagtattatgtatggcagcacaaaatagactgagacacaccctatgaggtcaataccatgagtagccccatgttacagatgagaa

SEQ ID NO: 6611 - DNA, 120 bp, synthetic construct
  source 1..120: mol_type = other DNA
cgcccagccggcatctgcaacttttttgcaccatctgaataactagaaataactaaaataactagaaaggcacatttaaaccttaagctctcttcctgcttttattattgaccacatcta

SEQ ID NO: 6612 - DNA, 120 bp, synthetic construct
  source 1..120: mol_type = other DNA
tgttaacaagcattttctaagtagtaagacagtcaaggcacttctcagaaaatgagcaaatcaggatatccatctcttgctctttcaaggagctcagactctaatagctataagcaggcc

SEQ ID NO: 6613 - DNA, 120 bp, synthetic construct
  source 1..120: mol_type = other DNA
aacaaacaaaaagatgcttgtgaataggcaatttaaaagttttctgggccctggagggttcattttcccttcctgccacttaactagctgagcaacatgacctgggaggagttagactat

SEQ ID NO: 6614 - DNA, 120 bp, synthetic construct
  source 1..120: mol_type = other DNA
ttttttgtgtttaagctacacgtaaatacagaacattctgtaagattgaaaagtcaggaaatagttcctgccctagtattggaggagagggtgccagtgcctcgacgctgaagaatgaaa

SEQ ID NO: 6615 - DNA, 120 bp, synthetic construct
  source 1..120: mol_type = other DNA
aagtgaaatcacccattttaatgttagcaacttatttcaaagtgttttagatactatagaccaaaagaggtatgggctgtgaccgtaagcctgatttggcctctgacggccagtttctga

SEQ ID NO: 6616 - DNA, 120 bp, synthetic construct
  source 1..120: mol_type = other DNA
caagcatccacttgagaaatgtcaacccctaggaaatcccagcctcaagtctttctcatcccttgggaagtgcaaattggatagagaagaaaccaattaaaaacaaaacaaacaaatcat

SEQ ID NO: 6617 - DNA, 120 bp, synthetic construct
  source 1..120: mol_type = other DNA
ctgtgtttttgtagtgaagagacctgaaagaaaaaagtagggagaacataatgagaacaaatacggtaatctcttcatttgctagttcaagtgctggacttgggacttaggaggggcaat

SEQ ID NO: 6618 - DNA, 120 bp, synthetic construct
  source 1..120: mol_type = other DNA
ttcctctcccacatggcctctaatgatatggtcagagttgaaaggatgctaagggaggcctcagaggcttatttaatcagttggttaatgggaaaaagtattttgtggtacacaaatacg

SEQ ID NO: 6619 - DNA, 120 bp, synthetic construct
  source 1..120: mol_type = other DNA
tttactgccagaccattgtgtctgtgtgtgtgttcatctatgcatagatggactattaaacctatctgttgccatgttgttctaattctgtttttccactcaatagcaagacttggagac

SEQ ID NO: 6620 - DNA, 120 bp, synthetic construct
  source 1..120: mol_type = other DNA
gcataatgctgagtagtagccatgaaagtagatagtctcagaagtgatgcatacagttgtgtgggttctatactgcacaattctaggagatactctttacaaacacttagatgtcctagg

SEQ ID NO: 6621 - DNA, 120 bp, synthetic construct
  source 1..120: mol_type = other DNA
agaaaactccaggatgatcatgacttccctttctcatgcctctggcttagcataatcttataaattttggcctcttgagacttcctttactttcctaccagctcaatcctgcatgaaaaa

SEQ ID NO: 6622 - DNA, 120 bp, synthetic construct
  source 1..120: mol_type = other DNA
ttcttgaattcataaaccgtgactttggctatctgagtttcctctggaggcctgccccatgccagggccagtgaggaggttttgttaataatacttgatttgtttcataaagaatttaaa

SEQ ID NO: 6623 - DNA, 120 bp, synthetic construct
  source 1..120: mol_type = other DNA
tgtttttttatccatttacccccttttacttagactctgttgcttcaaattcaagttgcccactcttctcttcccataatctcagtgacctggttccaaagcttgtgctttgactcattt

SEQ ID NO: 6624 - DNA, 120 bp, synthetic construct
  source 1..120: mol_type = other DNA
atttcctagcaccataaagttgtttttattgacaagatcatcttctccatgccagtctgtttgtgtactgccaattttctgtctggttagttggatttccctgctactactgcaagtgtg

SEQ ID NO: 6625 - DNA, 120 bp, synthetic construct
  source 1..120: mol_type = other DNA
cttctctctgagtgcactgtggctgccatgcacagggcaggactgaggcaccccaaccagtctactattttggcttccttttcaatttaaattcaatttaaatattatttaaatatttga

SEQ ID NO: 6626 - DNA, 120 bp, synthetic construct
  source 1..120: mol_type = other DNA
ttttccaaaccacacaacttcttggaaggcatgtttaagtgttcacataataaaacagtacatttcttccttgcaaacagccctacaccacatatttttccatttctggctctgtctgcc

SEQ ID NO: 6627 - DNA, 120 bp, synthetic construct
  source 1..120: mol_type = other DNA
gacagctcatgtgacacacctgtcttcttctgatggaggaaggaagtaataccattttctatcaaaagcattctttgatcatccctgtcctaaaaaaaagttacttgatgggtctcttgt

SEQ ID NO: 6628 - DNA, 120 bp, synthetic construct
  source 1..120: mol_type = other DNA
cacagccccagtgattcttaacactgccttccttctgcctccactccagaaatcactgtgaaatttcatgattggcttaaagtgaaggaaatacagataaaatcacttcagatctcaaaa

SEQ ID NO: 6629 - DNA, 120 bp, synthetic construct
  source 1..120: mol_type = other DNA
acttagcatctgaccctttttccacattacgtctctttctctgatcaaacccaggaaagcttttctaattttaagattcatgtgattagactaggcctgcctggataattcagcacactc

SEQ ID NO: 6630 - DNA, 120 bp, synthetic construct
  source 1..120: mol_type = other DNA
actcctcacaattgatccttccacctcagcctcccaaagtgctgacattagaggcatgagcccccacacctggcctatattcttttttcttaaataggactgcccaggccaagcgccatg

SEQ ID NO: 6631 - DNA, 120 bp, synthetic construct
  source 1..120: mol_type = other DNA
gttctgttcttttgcttgaatttctttcacttggcttcttgactctttctaaactacaatccccccattctcactgccttagttttccctctctctgtgtttctcaaactatatcccacc

SEQ ID NO: 6632 - DNA, 120 bp, synthetic construct
  source 1..120: mol_type = other DNA
ccttgctccttctgtagcagaaacttcacacacattttctttcaaattctcctccattgctatctccagttgcaccgctcttcttcatttctttccctccacattcaaacttgtcttctc

SEQ ID NO: 6633 - DNA, 120 bp, synthetic construct
  source 1..120: mol_type = other DNA
gggtgtcagcctccaggcattcagctatcggactcttactctaaagaggaaagggaaaactgaggaaatacagacaattatagaggagaaaatgaaaataattccaaccccaaattcatc

SEQ ID NO: 6634 - DNA, 120 bp, synthetic construct
  source 1..120: mol_type = other DNA
ctgtccgattcttgtgtccgtaacatatgttaggctatttcactgagtctcgtgtgtctcttacgccctgttcttttcttaatgctcttttttgtttgtttctgtgcttcggtttatata

SEQ ID NO: 6635 - DNA, 120 bp, synthetic construct
  source 1..120: mol_type = other DNA
tcctgctagcagtgcataagggctcagtttctccacattattgccgattcttacctctttttgatttgtagccattcttgtgtattgtaagatgtatttctttgtggtttcaatttgcct

SEQ ID NO: 6636 - DNA, 120 bp, synthetic construct
  source 1..120: mol_type = other DNA
ctcctttgaagcttttcttgccttcatccctttgtctatattatcttccatttatttttcattaatcatagggtgttttttggtcgtttttttcccctttttgtggagaatgcggtcttg

SEQ ID NO: 6637 - DNA, 120 bp, synthetic construct
  source 1..120: mol_type = other DNA
ttcttctgatgagatttcaccgattactaagcaccgtgagaagcaggtggagccctcagaagcaaacacagttgtattcagttaaaagtacacatctaattggtctccctaaatttgcat

SEQ ID NO: 6638 - DNA, 120 bp, synthetic construct
  source 1..120: mol_type = other DNA
ttttctggtcctttggtgatatttcttttatcttcttggtccatgtcacctgtgggcttctcctgtgattcatgtagtcatgttgtacttgtcacttccattatggggaagagcatttat

SEQ ID NO: 6639 - DNA, 120 bp, synthetic construct
  source 1..120: mol_type = other DNA
ggacctgaataatcattattttccattttggtatctgttccatcccatattctctaatacaaaatctgtcccaaaacactaatcctgaacctaagattgctgcagctacctgctgaaacc

SEQ ID NO: 6640 - DNA, 120 bp, synthetic construct
  source 1..120: mol_type = other DNA
gcgtcaacctgggaggtggagcttgcagtgagccaagatcatgccactgcactccagcctgggtgacagagcgagactccgtctcaaaaaatatatatatacatatatatttacatttaa

SEQ ID NO: 6641 - DNA, 120 bp, synthetic construct
  source 1..120: mol_type = other DNA
attcatgacttctgagtatttgctcatatttctttgaaattatatgtgattatttgtgcctaggtataaagtggaaagtgagttcccccaaaaaggaggatttctggccagacgcggtgg

SEQ ID NO: 6642 - DNA, 120 bp, synthetic construct
  source 1..120: mol_type = other DNA
ttctactgaacatcctcagtgtctgttccaagtagaattcaagttatgctctcaaggtggaagttgcctggggaggacatccttgagtacagctcaattttttttctttcttttagagat

SEQ ID NO: 6643 - DNA, 120 bp, synthetic construct
  source 1..120: mol_type = other DNA
cttctcatttcttcctccctcttacccttatctttcccatgctcctgttcacatgttctactccagggctctatttttgtgtacaaaatgtcatgattacagctctctttataacaattc

SEQ ID NO: 6644 - DNA, 120 bp, synthetic construct
  source 1..120: mol_type = other DNA
acaggacacttgtcgccaattggtttggcaataaggaaaatgtgttacctctcctaacaggaagtctgaaggcctccaggttagtgagttcagcagctcatttctttccatttttctctt

SEQ ID NO: 6645 - DNA, 120 bp, synthetic construct
  source 1..120: mol_type = other DNA
agcatctgatacatagcatacctttaaataatgtgagccccggtttcatcttttacccattctcagtggactttgatgtagcatcagagttttcttacccaggccagttgggaaggcaaa

SEQ ID NO: 6646 - DNA, 120 bp, synthetic construct
  source 1..120: mol_type = other DNA
gtgccctctgtctcccctcagttgctcctgcatcattctttttgtccccttcataattgttgtaatggtttgaaaccacatttgcgggtaggagtgtgaatctgggggagggaagcagga

SEQ ID NO: 6647 - DNA, 120 bp, synthetic construct
  source 1..120: mol_type = other DNA
gggtcttggagacccagacacctctgaagagtcttggtatataattcaccagaaaatgataattgtagatgccatttactgaacatctcttatgtaccaggaactatattaggcacccta

SEQ ID NO: 6648 - DNA, 120 bp, synthetic construct
  source 1..120: mol_type = other DNA
tgacttttgtgaactggtgtttcttgatcccagcacattaactatgtctgtgctctaagtgccctccttcccctttgcactgatagatatctcaagtggcccttcacagcccaaataact

SEQ ID NO: 6649 - DNA, 120 bp, synthetic construct
  source 1..120: mol_type = other DNA
ttctgtgaaataagaacacatccgaagaacacccagcacagagtgggcattcagatagtcttttgtactctcccttaaaggggcaggaatcacatgttgacagttccagagcaaggaatg

SEQ ID NO: 6650 - DNA, 120 bp, synthetic construct
  source 1..120: mol_type = other DNA
gtttggaatggggttcagatggtagcaaataagcttaaaggggcagggagagaagaatacttataaatgtggacattgggagatctttggtgaaatccagtgactgacaatttaacacca

SEQ ID NO: 6651 - DNA, 120 bp, synthetic construct
  source 1..120: mol_type = other DNA
aggaagatggaatggtggaaaacaagatattggtgagggatgattagatcttggtcagcttgctgagaagctgcccctccatcctgttaccatccacaggtggcttccagcaacttctac

SEQ ID NO: 6652 - DNA, 120 bp, synthetic construct
  source 1..120: mol_type = other DNA
acccagagacaaacttggattttacggagcccaaggccatgaagggttaaggccaacactgagtattatagtgtgaacctataaactgaaatccttatttggcctgcacagctttctttt

SEQ ID NO: 6653 - DNA, 120 bp, synthetic construct
  source 1..120: mol_type = other DNA
aaaaaaaaaaaagacacagctcccatgaatgggatgggagtggggagagtattgggcaggctgttctgcctttctcatctacagggtaaaagagaagcttacggaattcagccaagcctt

SEQ ID NO: 6654 - DNA, 120 bp, synthetic construct
  source 1..120: mol_type = other DNA
gtttatagttaaaaaaacaaacagaaacacaaacgatttggatcaaaaggagaaatgataagtgacaaaagcagcacaaggaatttccctgtgtggatgctgagctgtgatggcgggcac

SEQ ID NO: 6655 - DNA, 120 bp, synthetic construct
  source 1..120: mol_type = other DNA
caatcccatacaaccctgagtcccatcatcactgctgttgagttttttcattcggtactggcgtatttctcttaccagtgtgtaaaaagcatcttcaacaccctataaaaggaaaaaatg

SEQ ID NO: 6656 - DNA, 120 bp, synthetic construct
  source 1..120: mol_type = other DNA
gtatcaactgtccttgttggcaaatcacacttgtttcccactagcaccataggtacatcatccgagtcttttactcgcttaatctgctccctaaaaacgggaatatattatcagaacata

SEQ ID NO: 6657 - DNA, 120 bp, synthetic construct
  source 1..120: mol_type = other DNA
agccctattaacttgtagtatttttgcttttttctaccacttagagaagacattgtatactaaggagactgctttagacttgttgcagcagccatcaggaagccataagtacaagctcac

SEQ ID NO: 6658 - DNA, 120 bp, synthetic construct
  source 1..120: mol_type = other DNA
ctaaaacaaaacattgtatctggaagcccaagcgataaaatagaaaacataagaactgctcttagtaaagggaggctgaagcatctagaactcctgacagcacccctttcaatgacatgt

SEQ ID NO: 6659 - DNA, 120 bp, synthetic construct
  source 1..120: mol_type = other DNA
acaggttaggaaaagaacacttgaattcagtgttggaccaatctgcttttgagagcagacatcttcacatggatagaaaataagccaagactcaagcctttaggcagaacacttaagtag

SEQ ID NO: 6660 - DNA, 120 bp, synthetic construct
  source 1..120: mol_type = other DNA
tgtgcctggcctatcttttccattacatactgaaagatgtttcttggagatgttttcctctctgaaattccttcgtgatctctaattacaacaactctggttccaagtcattcccagtag

SEQ ID NO: 6661 - DNA, 120 bp, synthetic construct
  source 1..120: mol_type = other DNA
cactgtgttcctggaaaagattaagaaaacacagtaactcaaatgacaactctactgcagccaggaggctacagattaagtacccagtgtatttcactaagctatgaactggactgtttt

SEQ ID NO: 6662 - DNA, 120 bp, synthetic construct
  source 1..120: mol_type = other DNA
gtgagccaccgtgtccggcaaaaccctttatttaaagagccttaggtgccacttactgaagacaatctgtaccatgaactctcataataacaatagaatccctaagtactattacatagt

SEQ ID NO: 6663 - DNA, 120 bp, synthetic construct
  source 1..120: mol_type = other DNA
ataatcaatggaaatgaaaaccctagtgtgaccttccatttggttcttaaagtgactagagaacgcaaaaacaccggattaatatcggcctcacacttctggagtagttttctagcaacc

SEQ ID NO: 6664 - DNA, 120 bp, synthetic construct
  source 1..120: mol_type = other DNA
cggacatcctcccctccctccagagcagagttcatacaattccatcttaggtcagtactcaggcttttaaaaatcatcttacgttttgaaatataatacaactactctggtaacaagaat

SEQ ID NO: 6665 - DNA, 120 bp, synthetic construct
  source 1..120: mol_type = other DNA
ctgaattttggccccatttagaaacttctgtgcttagaacatacttggaaaactctaagtacatacatacaagggctattggcacaagagcccaagatgagtaactatctttctccctaa

SEQ ID NO: 6666 - DNA, 120 bp, synthetic construct
  source 1..120: mol_type = other DNA
aatgagcaaatgcagaagaatttctttctctgtgatgctaactggattgttcaagttttgaaactgtgaccctggtccattagcaccatgctttactcaactgaaataatcaagccccta

SEQ ID NO: 6667 - DNA, 120 bp, synthetic construct
  source 1..120: mol_type = other DNA
gaaaaataacagggagtaacaagaggtgcattctctggtcagacagccaagtgaggaggtagttattctgagaacttctcaaatagagattattgtactaaactactgagagctggggaa

SEQ ID NO: 6668 - DNA, 120 bp, synthetic construct
  source 1..120: mol_type = other DNA
gaggtgtgtttctcacagcttacacacaaaaggaggaaagcaggtgtgtgtaaacctccagcagcccgatattgtcagctaagacattgcaccgtttccatgtgattgattgattgatcg

SEQ ID NO: 6669 - DNA, 120 bp, synthetic construct
  source 1..120: mol_type = other DNA
ataaatcacatttgggtcagtatgattcacttccaagcatttaaaagtccaatccaatttaaaccttcagtgtcacttccagtttctaatccctcccctgcagtgcataaaggaggtgtg

SEQ ID NO: 6670 - DNA, 120 bp, synthetic construct
  source 1..120: mol_type = other DNA
ctagtctggccttccttagcttgagcttgagctcagatgacatctgtttgcccttttgcttgagaatttagaagtgctttttacctattgtcttcagttttgaggcttaaattgaaattc

SEQ ID NO: 6671 - DNA, 120 bp, synthetic construct
  source 1..120: mol_type = other DNA
aacctgggaagaatgtgctcaaagggaaacctgggaagaagcagctcttcacctgaaaaatgttcactttgcctcagttgtgaattctttcattgagaaggagaattaccattatgttac

SEQ ID NO: 6672 - DNA, 120 bp, synthetic construct
  source 1..120: mol_type = other DNA
aggagagttaataccatccatttacggtaaataattacactgataaaacaattattgtttcacagcagttgggttcttcttgcctgccacccagaaaaagccagtaccctgagacagtag

SEQ ID NO: 6673 - DNA, 120 bp, synthetic construct
  source 1..120: mol_type = other DNA
tctaatagggaagaatcttttcattcaacagatacctattgagtacagtgttttgagtattgagacactgttctaggcactaaagaaacaatggtgcgtagaacaaagtccctgccctct

SEQ ID NO: 6674 - DNA, 120 bp, synthetic construct
  source 1..120: mol_type = other DNA
agttcttttggcttatacattttgaactcttccctgccaaacacagtgtctgactcataatcagaattcaaaatatgttgaaggaaggaaggacccagtgaatgaacatacaagccaacc

SEQ ID NO: 6675 - DNA, 120 bp, synthetic construct
  source 1..120: mol_type = other DNA
ctcattagtgtatggtcacagttactgatcacagttactcttcctgtacttattccagtttcatggattttcggcccctgcattcccaaagtgaaaatacgtacctatatacctgtattt

SEQ ID NO: 6676 - DNA, 120 bp, synthetic construct
  source 1..120: mol_type = other DNA
tctggggactgcgttgtttaaaagaacaaggctatgatccatttaaagaagatctgaaccatctggtgggatacaaaggaaatcatctctaggtggccgagaagatttgattttctttaa

SEQ ID NO: 6677 - DNA, 120 bp, synthetic construct
  source 1..120: mol_type = other DNA
ctcattttttcatgagtatgcagaggagttttcaagaggctatctggtgtgatattgtaataggctgaatgcaaaagcagatacaagattccagctttcgtctgtcatcagacattgaag

SEQ ID NO: 6678 - DNA, 120 bp, synthetic construct
  source 1..120: mol_type = other DNA
tattttgttgaagaaatccttttcattgcatttgctggaagaggaggagtaagggctgcttgacactcatctcttaaatgctatacattctaccttgtccctgtgatgtaagagcaggaa

SEQ ID NO: 6679 - DNA, 120 bp, synthetic construct
  source 1..120: mol_type = other DNA
caataacaccaatggaattgagtatttacaatcattgttgcttcagcaaaaggtttggactgaacaaaaggtttggacataactatgggctaaataatagaagtgtaacaagctacgatt

SEQ ID NO: 6680 - DNA, 120 bp, synthetic construct
  source 1..120: mol_type = other DNA
gtggttggcagggctgggggggtacacaaatagcatatgaatgaatttgtttcataatatttattgcatcatatccttgatgatttaggcctgccaaaaagaggaagagagttttcaagt

SEQ ID NO: 6681 - DNA, 120 bp, synthetic construct
  source 1..120: mol_type = other DNA
agaaagtcatattgttgatcctagagtcaaagaacagagcaggtcatcctacgcattgagagaaggaactggagagtcacatagtaaaggatatagagacaaggaagggtaagaaatggg

SEQ ID NO: 6682 - DNA, 120 bp, synthetic construct
  source 1..120: mol_type = other DNA
aaaaaaaaagcccagctaagcagagatttcaccataagctatgtccttgaatacgttactgctgggcccactgagcacagatatcctttcatttatgtggtatatgcatttctaaaaggt

SEQ ID NO: 6683 - DNA, 120 bp, synthetic construct
  source 1..120: mol_type = other DNA
aattacatatgcgtgtatcctttgacccagcattaactctaggaatctacctcaaagacacagtggcaaaaatccaaaatgcacagggcaattcactgtactcctgtttagaacagcaaa

SEQ ID NO: 6684 - DNA, 120 bp, synthetic construct
  source 1..120: mol_type = other DNA
gtggactgtatttttcactgtgataagagctccagtatacagcagaaagagacggagtctggtggagagtttctcaattggaaatcaggtcactagccaaataaacagaaaaaatttctc

SEQ ID NO: 6685 - DNA, 120 bp, synthetic construct
  source 1..120: mol_type = other DNA
attcatgatcacacaccaagtgagaggcactgaactcttcaccatgtagaataatgtaggtatttacagcactccccagggaaaccacagacaaaagattcactgaaatcttctgatttt

SEQ ID NO: 6686 - DNA, 120 bp, synthetic construct
  source 1..120: mol_type = other DNA
ctatcccctgacccaggataaactttctctgcatggtttatacggaaaaacaaagtgtgttctattgaaacaaaatgtgttctatttgggttcaaggcccaccttccttatatccagcat

SEQ ID NO: 6687 - DNA, 120 bp, synthetic construct
  source 1..120: mol_type = other DNA
ttttttgtagagatgggttttcaccatgttggccagggtcgtctcaaactcttgggagcaagtgatccatccacgttggcctcccaaactgctgggattataggtgtgagccaccgcacc

SEQ ID NO: 6688 - DNA, 120 bp, synthetic construct
  source 1..120: mol_type = other DNA
gtggcttgtcatttcattctcttgacagtgctttcacagagtaaatgtttttaatttaatgaagtacagcttatcaattatttccttcatcaatcatgcctttggtgttggatctaaaat

SEQ ID NO: 6689 - DNA, 120 bp, synthetic construct
  source 1..120: mol_type = other DNA
tagcttttaatttcttcatcagagttttataaattccctcataaaggtcttatatattttcgttagctttatgcctaagtatttaacttgggggaactattgtaaatgggattttgtttt

SEQ ID NO: 6690 - DNA, 120 bp, synthetic construct
  source 1..120: mol_type = other DNA
actggtctatgtgtctgtttttatgccagtaccacactgttttggttactttagctctgtagtacaatttgaagtcaggtaatgtgattcttccagttttgttcttcttgctcggagagc

SEQ ID NO: 6691 - DNA, 120 bp, synthetic construct
  source 1..120: mol_type = other DNA
gtcatgatgaattatctttttaatatattgttgaattcaggttgctggtattttcttgaggatttttgcatcagtgttcatcagaggtcttggcctatagttttctttttgtgctgtgtc

SEQ ID NO: 6692 - DNA, 120 bp, synthetic construct
  source 1..120: mol_type = other DNA
atcagaggagatgcttgatatttaattttgttgaatgttttagacattaatgtttatggtccatccttgagaatgcttcatgtgcttaggagaagaatgtgtattctgtagctgtttcgt

SEQ ID NO: 6693 - DNA, 120 bp, synthetic construct
  source 1..120: mol_type = other DNA
ttatgtcttgaaaagttgctgtagttattattttttattggtttgttatttattccttctacttaaggtaagtttagattacatactaaagttataatgttataatattctgtgggtttc

SEQ ID NO: 6694 - DNA, 120 bp, synthetic construct
  source 1..120: mol_type = other DNA
catagctattttaaattatttgtctgatatgtcacatatctttgtttctccaggaatagtccctggtggcttatttagttcatttagtggggtcgtattttcttggattgtcttgatact

SEQ ID NO: 6695 - DNA, 120 bp, synthetic construct
  source 1..120: mol_type = other DNA
tcctctagcccaaggcaggcccagaaatgccatgcaaaagccaagtcctagaaccccatgaacctactaagtactctaccccactgtggccaagctggtgtctaaggtgcaagacaaagt

SEQ ID NO: 6696 - DNA, 120 bp, synthetic construct
  source 1..120: mol_type = other DNA
cttttattctgccatcttgcttcaccagaaatccaatattattatcttatttggtctagcttatcagtagcccttctcttgtaggggtctctatgtctcttccatggggctttgctaagt

SEQ ID NO: 6697 - DNA, 120 bp, synthetic construct
  source 1..120: mol_type = other DNA
gaatacctgacatactgtagacctctgagagtctccccttggtgtgcatttacgtttaagaagaggatatattaatacgtttatgaagaagggtaaatcctggtttttgctcttgaggtt

SEQ ID NO: 6698 - DNA, 120 bp, synthetic construct
  source 1..120: mol_type = other DNA
tggactgctttcattgttcttacatgaaagcagtcacagaacagataaatacaaagacaagttacattagcactgctctctgaacctgcaaatggatgcaaatgaagcctagactatata

SEQ ID NO: 6699 - DNA, 120 bp, synthetic construct
  source 1..120: mol_type = other DNA
aagggtttgtcctcaaggaccttagatgtcaggatgtttaactttatcctgtacattatggggagccaacaagcatgatcagcaagggcacagtctgatttccattcttttaatctgttt

SEQ ID NO: 6700 - DNA, 120 bp, synthetic construct
  source 1..120: mol_type = other DNA
ttgccttgaggaactcaggagatggtgatgccattaagagaactatgattggataggaaggtgaaaatgctttgggcatgttgtatttccagtgctcatgagttatttaagtggaaatgt

SEQ ID NO: 6701 - DNA, 120 bp, synthetic construct
  source 1..120: mol_type = other DNA
ttttcactgtattgtatttttgcacaaatgaggcataagcaatcatgagttcaactgctaataccttagcaggaatcgaaacagtgaccccatggcatactaagagtcactgtactcttc

SEQ ID NO: 6702 - DNA, 120 bp, synthetic construct
  source 1..120: mol_type = other DNA
gagactgaaacatctgacaactgtttatctattagaaagtgataaggggctgtactagggtaatggcaaacctctgtaactggaaattgaagagcaagacttgaatagaaatgaggttcc

SEQ ID NO: 6703 - DNA, 120 bp, synthetic construct
  source 1..120: mol_type = other DNA
ttatttgcagtccatctccttttatgagagacttgaactttcacaacagacttcagaccaattgagtaggaaatgaacaattatggaggaaacagggaatataccatagggaaactctga

SEQ ID NO: 6704 - DNA, 120 bp, synthetic construct
  source 1..120: mol_type = other DNA
catatatgtttaatatagaaagaaacacagagagtgagggagggagtccactatgtattaagtactgtgttagtgagcagacctcccttaggaaccttattacggagtacaaagctagga

SEQ ID NO: 6705 - DNA, 120 bp, synthetic construct
  source 1..120: mol_type = other DNA
cctgctaacagacatatgaggtgaatattattagcctaccctcgccttttttaagtaatgagaagactgtcatcctgtagggtaaagtaacatgtccaaactcatacagctacaaagtta

SEQ ID NO: 6706 - DNA, 120 bp, synthetic construct
  source 1..120: mol_type = other DNA
cccaacaggtttgtagggaagaaaattggagaaacattattaccttttcttagatgttggcaacggaggcaacaaggactgcaaaagaaaattgtgtgtcccccattcctaaataatcaa

SEQ ID NO: 6707 - DNA, 120 bp, synthetic construct
  source 1..120: mol_type = other DNA
gggaggtaaactggggggactctggaggagaccacggacagtgattgttatttctatgagaaaacctacttttctgttttttcttcaactgataaagaaagaattcaaaatttcaggagc

SEQ ID NO: 6708 - DNA, 120 bp, synthetic construct
  source 1..120: mol_type = other DNA
acccagatgttcccggtatatttggcagagtgtggaagctctcagtattgactgagattgatattgattgtgttggtgttgatgtgtatattcaaatactacatgtgaatgtgaaatgcc

SEQ ID NO: 6709 - DNA, 120 bp, synthetic construct
  source 1..120: mol_type = other DNA
cttcttgatattttccttcctcatttttctaccctttagtttatgctttgcaatacagagagagccaatagagtggcaactggctgtgaaatgagcagattggtcttattccagtgtaga

SEQ ID NO: 6710 - DNA, 120 bp, synthetic construct
  source 1..120: mol_type = other DNA
tctttttccaaggtttgttcatgtagctatgaacatggtatgtacagacactgttgaaaagtggagggctagaaactttgagatttctgtgggctgcgtaaaccatccttccagtaaatt

SEQ ID NO: 6711 - DNA, 120 bp, synthetic construct
  source 1..120: mol_type = other DNA
gagagagagagatagacagactgaaacagttgaagtctcttctctgctcctaataccctcctgtcactgagactaccactatcataaatttagtggtgagttattcacatgcatgttttt

SEQ ID NO: 6712 - DNA, 120 bp, synthetic construct
  source 1..120: mol_type = other DNA
aaggtcagatgcaagaaaaaataagctcattttgagaaataacatacaactatatgagatttaaaaatgtactagtggtggtcaggcactgtagctcttacttacaatgccagcgctttg

SEQ ID NO: 6713 - DNA, 120 bp, synthetic construct
  source 1..120: mol_type = other DNA
gtttactcttctagtttcccactccttgccaagcaaccacttttcaaaatggttcaccttcacacaaggtcgtatctcacactctgctgaatatccttcctgttattttataattggtga

SEQ ID NO: 6714 - DNA, 120 bp, synthetic construct
  source 1..120: mol_type = other DNA
atggcaacttcaatgactattaagagcatgtttttcccagcaatacaatctggaggaaaagaggaatcatccacaaaactaaacaatcgtggttgccattccatcacagccctttggatt

SEQ ID NO: 6715 - DNA, 120 bp, synthetic construct
  source 1..120: mol_type = other DNA
caagtgaactttcgtaaaccaatggatagggctttcccataagatgaagtgtgtgatgggtttaaatgagagagagatcattctgttctggatatgtgtctgtccaggcaaaaatgttgt

SEQ ID NO: 6716 - DNA, 120 bp, synthetic construct
  source 1..120: mol_type = other DNA
atagtcaattcccattattcatgatagttatggtccataaagtcattatgactacagaattcgtgagtactgaagctttgcttctaggggatatatagggcaggttcctgtgagcctctg

SEQ ID NO: 6717 - DNA, 120 bp, synthetic construct
  source 1..120: mol_type = other DNA
ggtagcaaattcatgacatgatgacaagttgtatgttttattataatcaggtagaatcgtttgaaaacaaaatggattcccatataactcactcatgagtcaccagatacccaaccacat

SEQ ID NO: 6718 - DNA, 120 bp, synthetic construct
  source 1..120: mol_type = other DNA
gaacatcaaaattatccttacaatgtaggatttcatttatctgaagtcttatgcttttttcagtaaagctctaaaacatggaaaggaaacttttacctaataagtaataaccatgctata

SEQ ID NO: 6719 - DNA, 120 bp, synthetic construct
  source 1..120: mol_type = other DNA
aattccattactgggtatataccagaaggaatataaatcattctactataaagacacatgcacacatatgtttattgtagcactgtttacaatagcaaagacatggaaccaacccaaatg

SEQ ID NO: 6720 - DNA, 120 bp, synthetic construct
  source 1..120: mol_type = other DNA
agttaccacaaaccagaacagttgccatagattgctatgacagagcatattgctcttctggaactgaggttgaagttgtgctataataatcaccacacaaaattatctctatttcacccc

SEQ ID NO: 6721 - DNA, 120 bp, synthetic construct
  source 1..120: mol_type = other DNA
ctcagaggaaactttctcccatgtacaggaattctttagattagccagatgaccatcaggaaaaagttcgcaagaagagttaagttaaaggagagtttaaactgggtgacatagagtcca

SEQ ID NO: 6722 - DNA, 120 bp, synthetic construct
  source 1..120: mol_type = other DNA
cacctaacacctactaggtcgcccacaaaaatttaaattaaaaaacttgaaaagcagacatgtttagatgtctgccccttactagtgactacactagacacctaacctacttgaatctca

SEQ ID NO: 6723 - DNA, 120 bp, synthetic construct
  source 1..120: mol_type = other DNA
tgatgttcgaacaaaacagcatttttgttacttaaatcttggtgtgaaagaatctcaagcaggatctaagtctaaatgctaactgcatgtgacaaaactcctttgtccccagcagcactg

SEQ ID NO: 6724 - DNA, 120 bp, synthetic construct
  source 1..120: mol_type = other DNA
tataacctgaacatcagagcctcattgtgcctgccaagaagaacaagggaaattattatcaacattataatttcattcttactcagcccccataagctctggaaagaaaaccacatgggc

SEQ ID NO: 6725 - DNA, 120 bp, synthetic construct
  source 1..120: mol_type = other DNA
tactctcactgtaatggaacgatgaccagtctacttatgaataccctgtcacacgaagacaggcaagagaaaaatcaagccggaagtccaacctgaaactttcacattttaaaaagtttt

SEQ ID NO: 6726 - DNA, 120 bp, synthetic construct
  source 1..120: mol_type = other DNA
cttttatatcttactttccagaattgttccctaattggcagcctattttccttattgataggctctaccttgtggaaatcggaatgaaggaaatgagatgcctgtctccttgcaagtcaa

SEQ ID NO: 6727 - DNA, 120 bp, synthetic construct
  source 1..120: mol_type = other DNA
tattttctacattcgagttgagaagagaacctaagcccatgaagtgtctgccttttcctcttcccaatttattgccgcaaggaatccaaatgggagaggggttatagcaagataatagta

SEQ ID NO: 6728 - DNA, 120 bp, synthetic construct
  source 1..120: mol_type = other DNA
aggagaacaataggggcagaatgcttccctagaaaatgggaagaaagaagtcacaagacaatgtgtcattaagaaatccagattcatcttagagatgtatcccacaaggaggttatactg

SEQ ID NO: 6729 - DNA, 120 bp, synthetic construct
  source 1..120: mol_type = other DNA
taaagctcaataacatttttgtctttagctaggaaaagtgtgaaatgtataactttgatcacgaagttagagtattaaatataacaaaatgttcccagagtttggctgtacttgttaagt

SEQ ID NO: 6730 - DNA, 120 bp, synthetic construct
  source 1..120: mol_type = other DNA
gggacttctttgctttgccaaattactggtttattcatgaatcatattttctccttacaaatgctattgagttttccacagggaaaggaaaataccttccaaaaaaactctctgactgaa

SEQ ID NO: 6731 - DNA, 120 bp, synthetic construct
  source 1..120: mol_type = other DNA
attgattcatgcaacataaagtttccattttaaccgcttgtaagtatacaattcagtggtctgaagtacatccatgtcattgtgcaatcattagtatcattcatctctagaactcatttc

SEQ ID NO: 6732 - DNA, 120 bp, synthetic construct
  source 1..120: mol_type = other DNA
ctcttgttgaaaatcatttgggcatgtaggcaagggtttatttctgggatctctactctattccattggtcaatatgtatggctttatacaagtaccatgctgttttgattaccattact

SEQ ID NO: 6733 - DNA, 120 bp, synthetic construct
  source 1..120: mol_type = other DNA
ttctaatttaggtgtatttttttttcaaatttatttcttttacctattttctctggttagaactctcatgctacatagaacagaagtggggaaagcagccatcattgtcttgttcctgat

SEQ ID NO: 6734 - DNA, 120 bp, synthetic construct
  source 1..120: mol_type = other DNA
agtgagaaggctgcacctgcaagccaggaaaaaaatccctcaccaggaattaaatcagttagcatcttgattttcaattgaccagcctccagaactacaaaaaacatttttgttgttaaa

SEQ ID NO: 6735 - DNA, 120 bp, synthetic construct
  source 1..120: mol_type = other DNA
acctagttggtttgttgtgttttgtaagtcctctatttccttacttatctcatctgattattctatcctttgttcagagtaagatattggcactacctccttccctcttcaattctgtcc

SEQ ID NO: 6736 - DNA, 120 bp, synthetic construct
  source 1..120: mol_type = other DNA
tgcatttccaccaacattgtgtgaggatttccatttctctccatccttgccaccacttaccttttgtattttttgtaatcatcattccaacaggtacaagctgatatctcattgtagttt

SEQ ID NO: 6737 - DNA, 120 bp, synthetic construct
  source 1..120: mol_type = other DNA
tgacccccaaaaaaggataagaaggaaaaacaaatgaagtaggggggaaatggtcctggtaatttaaattccctggaagttgcttcagctatagggaaagaaatttgtaatattcggagg

SEQ ID NO: 6738 - DNA, 120 bp, synthetic construct
  source 1..120: mol_type = other DNA
agttactcattggtctgtgggttcacagcattttaatggagccaactttgctcttaagatgagtaagcagttggtatgactcaggaatctctaagaatgtttctaccttaaaaggcaggt

SEQ ID NO: 6739 - DNA, 120 bp, synthetic construct
  source 1..120: mol_type = other DNA
gctagagttgtcattgagcagtggtcaatgacaataagaagcagtggttacttaatgttaaccaggaaagggagatgcttggcatttttatggttgtgggtgattttggttttatctctt

SEQ ID NO: 6740 - DNA, 120 bp, synthetic construct
  source 1..120: mol_type = other DNA
ttgcctgcttgaaccactggtgacctctgcacacggataccagcccctttaaaatttagaaaatagagtacttttatgttttccttgggaagctgaatctcaaagaaagagagaaatgga

SEQ ID NO: 6741 - DNA, 120 bp, synthetic construct
  source 1..120: mol_type = other DNA
agtgactgcaccaggaaagagacagggcagcagtgggaacacagcaaacagaagaatttacacttgaggaaacagaataaaaaagcagtcacacaaggactttaaaataagtcatatcag

SEQ ID NO: 6742 - DNA, 120 bp, synthetic construct
  source 1..120: mol_type = other DNA
aaaggtagagaacaaaagcaatggaagagaggcaatattggaagaaataatagccccaaacatcctataactaaagaaagggatgagactgaactgatgtctctgtgttccaggcacaat

SEQ ID NO: 6743 - DNA, 120 bp, synthetic construct
  source 1..120: mol_type = other DNA
gatgaaatgcctaccccatcaactttatgaattacttagtgcaatacttggcatgtagacaacattcattatcattactcttcttctcatgtataaggagatgctcgaaaaggctatctc

SEQ ID NO: 6744 - DNA, 120 bp, synthetic construct
  source 1..120: mol_type = other DNA
ttccagatcctgaatctgacacctcccccaaaactgagctcttcaatccatcatcctaactccttttttataaactacaaatctcaaatgagcacctaatactgccaagcaaatgtttct

SEQ ID NO: 6745 - DNA, 120 bp, synthetic construct
  source 1..120: mol_type = other DNA
atctatttatcatccaaccctaccactccaaggaatttgccaaggttattaacaggtattttgccaaaggcagtgaacatatttctgttactcagtctctctgcattccgcaaatttgac

SEQ ID NO: 6746 - DNA, 120 bp, synthetic construct
  source 1..120: mol_type = other DNA
aaaagactaaaagaatatggcttatgccataggccatagattagaaaataaaagctggtgaaaatgttgatgttcctgccacacagagaggaagagaggagagaggaaaacgttctgggc

SEQ ID NO: 6747 - DNA, 120 bp, synthetic construct
  source 1..120: mol_type = other DNA
ggcaggggctcgaaatatgtgggatgaggctcaagactcatacacactggagtgctctgtaagaagacgatagaaaatcacaagtaaaaataagaaactaaagcagataattcaatggaa

SEQ ID NO: 6748 - DNA, 120 bp, synthetic construct
  source 1..120: mol_type = other DNA
aatgaacagtctcctttgtcccacaacaccatacatccaaagtgtcaacaccaaatctacttttcctctctgccttctctgttagacaatgatattatcatctatccattctcccatgct

SEQ ID NO: 6749 - DNA, 120 bp, synthetic construct
  source 1..120: mol_type = other DNA
agcattcactataacgagaaaatgtctcaagatttccaagatactctcagcacagtcatatttgaaaagaagataagaaagctttgcatgcctacttcgacgtggtcagagaggtggaag

SEQ ID NO: 6750 - DNA, 120 bp, synthetic construct
  source 1..120: mol_type = other DNA
ctgatacgtgctatccatgtcctgaagtaaaattttcagaaatcgaataatgcaggaaatgggcacttccggaaagcataatacaaaaatgggaaagcaaggtctcttggctataatgga

SEQ ID NO: 6751 - DNA, 120 bp, synthetic construct
  source 1..120: mol_type = other DNA
cattttatattttctatatacaaagttcatcatggttctgagaaagcaacttccccttgctctgtctgaaagatactcatggtttgtcatcgggggacccgaaggaagaagaaagcagag

SEQ ID NO: 6752 - DNA, 120 bp, synthetic construct
  source 1..120: mol_type = other DNA
ttagccccaaaagagatgaaactcttccgtccatcaccattgactctattgtgaacttatgaaaaaggtagttgagcaatatgaaggccatgatgtggaattaaacacacacacacacac

SEQ ID NO: 6753 - DNA, 120 bp, synthetic construct
  source 1..120: mol_type = other DNA
aaaaggcttgtgttttaatagccaggagttctactcggacccactcaggtaaactgaatggcaaagataattcttcctgcaggtcatttcttttgctagtttgctaactctgagtcctat

SEQ ID NO: 6754 - DNA, 120 bp, synthetic construct
  source 1..120: mol_type = other DNA
cataaaacaccattaaagataagccacgaaatgtaaggtctgctgggtaggaaagtggcaaatgcaatgaagcatgtctttagatcatgcaggtctataaccaacggtgaatctagcaaa

SEQ ID NO: 6755 - DNA, 120 bp, synthetic construct
  source 1..120: mol_type = other DNA
gcctatcccaaagcacctggactgagaacgggaaatgagtggttcccagagtgaaactgaggtactattactaaattaaggtaaatatatgtggaatgttaaaaaaaaaatgatgtccaa

SEQ ID NO: 6756 - DNA, 120 bp, synthetic construct
  source 1..120: mol_type = other DNA
aaaataaaaacaaagcaaacacacttgggttcctcatcatggattggatagagtctaatcttaccatggcatacaagttcttcatgtactggcctctcttcttccccagtcagatccctt

SEQ ID NO: 6757 - DNA, 120 bp, synthetic construct
  source 1..120: mol_type = other DNA
ggaagcttacctatattttacactagtgtcttttactgattctcactcttcttcctttatctcctagatacaccaagatgaagactgccaccaacatctacattttcaaccttgctctgg

SEQ ID NO: 6758 - DNA, 120 bp, synthetic construct
  source 1..120: mol_type = other DNA
tgctgctaatttttcctttaaattcctttcttctaggttccatagattgtacactaacattctctcatccaacctggtactgggaaaacctgctgaagatctgtgttttcatcttcgcct

SEQ ID NO: 6759 - DNA, 120 bp, synthetic construct
  source 1..120: mol_type = other DNA
ttttcattttccccagaattattatataattcatagatgttgctgcaatacccctcttatttctcaaaagccagtcttgctctggttctgtgattaaagagagagggtgagtgccttgcc

SEQ ID NO: 6760 - DNA, 120 bp, synthetic construct
  source 1..120: mol_type = other DNA
aggaactcacaccccctagagagcatgaggtaatgatggcagacccacttccagacaaagggaaattaacttattatgtctcagttctaattccatttcagaaatgaatgccagaaagaa

SEQ ID NO: 6761 - DNA, 120 bp, synthetic construct
  source 1..120: mol_type = other DNA
agaactggacacagaagagaggctgccaggaaaagagggaaagatgctctgacatatttaaaaattaagataaatcaaagctccctttggctaatctccactgatgtgtcatcattagaa

SEQ ID NO: 6762 - DNA, 120 bp, synthetic construct
  source 1..120: mol_type = other DNA
agagagaaaagaggaaagcgtcttttggcatagagtaggaattggcatacggtcaactctgtggttttataggtcaaataaagtcatcctgccaacctagattcaaagggtgagaaatta

SEQ ID NO: 6763 - DNA, 120 bp, synthetic construct
  source 1..120: mol_type = other DNA
tctaacgcgtacttttgataaggagaccaagagattgattcagtgccctaaagaggtctttccctagctgagtatgaaaaaacaaaaaagatggtctcgtgttttttttgtgcatgcctg

SEQ ID NO: 6764 - DNA, 120 bp, synthetic construct
  source 1..120: mol_type = other DNA
aaatcattatataagatcaaacagccaggaagaggtagaatccagacaagcacccagggcttcgaatattactccacagcttttctctgctttcctacacaatgctactttgcactcaat

SEQ ID NO: 6765 - DNA, 120 bp, synthetic construct
  source 1..120: mol_type = other DNA
taatcatattagatatggattgtaacctctactctatagttgaggaaactaatgtttaaggaagtaacttgcccaaggtcatagttaaaatgtagtggctgagggttgggtgcagtggct

SEQ ID NO: 6766 - DNA, 120 bp, synthetic construct
  source 1..120: mol_type = other DNA
atcagtcctctcccttcacactcagaatttgtttctttatagagtagagtttctgagtttcacgtgaataggaacttttcatgatgaagaaaaaaaattagagccagaccaggtgcagtg

SEQ ID NO: 6767 - DNA, 120 bp, synthetic construct
  source 1..120: mol_type = other DNA
tgtgggtaggggaggctagaaacaagattcatttcaaatgttaaattgtaattgtagtttttaaaaacatggagagttttcataataaacatgaagagtttcataaaaacatgagttttc

SEQ ID NO: 6768 - DNA, 120 bp, synthetic construct
  source 1..120: mol_type = other DNA
cagtcatccccattgccagtggtgtgtgctaaaggaatacacccataaatattaaccctaactggtgtgagataagtatgaatttaaggtagtgcttgttgctttactgtgtatgaatca

SEQ ID NO: 6769 - DNA, 120 bp, synthetic construct
  source 1..120: mol_type = other DNA
ctggatatgtcaagcagatgcaaaatgttcacagttcttcgaacactggaactgaaaaagaacactgcagactgtcttatccaaacatccttttcctataaatggagaaattgaaggcca

SEQ ID NO: 6770 - DNA, 120 bp, synthetic construct
  source 1..120: mol_type = other DNA
gatattgccaaatgtctcctggagtggaggcaggcagcagaaatcagtcaagaaccattgatctaacctgtttaattttgttcaatagctggagaaacattaaggtccaattagttgtga

SEQ ID NO: 6771 - DNA, 120 bp, synthetic construct
  source 1..120: mol_type = other DNA
tggacccggaaattaggtaaaccctataccaattgtgtttctaacaatagatttgacaagctcttactaatttctgtaatactatactgtgtttatgatctaggtaatagtacaatgagg

SEQ ID NO: 6772 - DNA, 120 bp, synthetic construct
  source 1..120: mol_type = other DNA
ctagtttcccatttttactaaagacaaatcatggtaaggctgatttgctttattatacatgacctgattatttgtataaagtgcagcaagaataattatttttcacataagctcttttta

SEQ ID NO: 6773 - DNA, 120 bp, synthetic construct
  source 1..120: mol_type = other DNA
acacagaattttacacaacagttataaataacatacactaagtcatattagaattataggagtttcccataactttggaacatataccagtaacacatttatgcaaatatagtctaaagc

SEQ ID NO: 6774 - DNA, 120 bp, synthetic construct
  source 1..120: mol_type = other DNA
cttggtaaatttgagattttagttgtgtgctaggtgtgaagcctggcccagaacactccaggcagaagtgcagataagagctggctctccagcacagctgagggcatgactaactccgca

SEQ ID NO: 6775 - DNA, 120 bp, synthetic construct
  source 1..120: mol_type = other DNA
aatgcaaagccttggccactgagctacaatgcagggcagtctccatttcccttcccaggaagagtctagagcattaattttgagtttgcaaaggcttgtaactatttcatatgattttta

SEQ ID NO: 6776 - DNA, 120 bp, synthetic construct
  source 1..120: mol_type = other DNA
aagtagggcctctaaccccgctttataaacttttaattgactcccatcttaacagttgcaatccatggaggaatgcttgataacctcggtgataagataaaaaaccaagcatactagaag

SEQ ID NO: 6777 - DNA, 120 bp, synthetic construct
  source 1..120: mol_type = other DNA
taatggtggtccgtgaatgagaagctctatagacaagtgttaggaaatgtggcctaccttattttggtcatggggactgataatatgtataagcatttaaaaggctgtgaaaagccctac

SEQ ID NO: 6778 - DNA, 120 bp, synthetic construct
  source 1..120: mol_type = other DNA
aaaagagagaattaggactcatttctgggtttgactgattacaccattcagactccagggccagcttctgttagtggacaataaatgtaatgaccaacgctttctcttgtgaaagaaaga

SEQ ID NO: 6779 - DNA, 120 bp, synthetic construct
  source 1..120: mol_type = other DNA
tgggcacaccacttcacctctcaaggttatgtttgcttccatagattgacaaggttgaaaagacaatctcttcaattttctttagttccaaaagtgcaggaaatacacaccaacctttgc

SEQ ID NO: 6780 - DNA, 120 bp, synthetic construct
  source 1..120: mol_type = other DNA
gaagatgattagatcttgcagttcagctcagtcagtaagaatgggcagggttgttcagtggactgcctctcccaataattcacattcaacctagaatattcttggctgaacttaaatttt

SEQ ID NO: 6781 - DNA, 120 bp, synthetic construct
  source 1..120: mol_type = other DNA
cagtgtcaggagaagcacatgaatcagtatgagctgtctgagtgattgtgcaggtaaaaagggtgattaattttggggagctgactttgatacaccaggcacagtagaataattctggac

SEQ ID NO: 6782 - DNA, 120 bp, synthetic construct
  source 1..120: mol_type = other DNA
ggccaaaatcaaaaatggcacaccaggtgctatcacagggaattgattcatttacagtcacaatgtctgtaacagccaggactataataccaactaaattcagttggcatgatctaacac

SEQ ID NO: 6783 - DNA, 120 bp, synthetic construct
  source 1..120: mol_type = other DNA
cattgttccccccatcaggtgtaatgcctctgattcctcttgggaatgaagagagcttgtccttaaaggagtctaaatcaggatatagaagtttaaagttagacagtagaggttctgagg

SEQ ID NO: 6784 - DNA, 120 bp, synthetic construct
  source 1..120: mol_type = other DNA
gtagcaaaccttattgtgggacatgattctatctcaatgacataatttgcacagtgttttaaagtataaggtcccacatgagacagccttggttctgcatgctctaaggcataacctttc

SEQ ID NO: 6785 - DNA, 120 bp, synthetic construct
  source 1..120: mol_type = other DNA
agggtgtgcagggacactcctggccatgatggactgcctctccctaaagtgagaatgacctaatctgttctttattcttagaaaaaatgtactgagatatttaagggtaaagcatcaaat

SEQ ID NO: 6786 - DNA, 120 bp, synthetic construct
  source 1..120: mol_type = other DNA
agtatacatgaaggtcttcaatgcagttcttacgagcagaagatgctcaacaaatgtgtgttgcaaccgtatctgaaatgttcactgtctttgctctttctctcctttcagctagaaaat

SEQ ID NO: 6787 - DNA, 120 bp, synthetic construct
  source 1..120: mol_type = other DNA
tatttaagtgttcacaaaaggtaatagtcaatgagctcatcacttcatccatgcaggaagtcaagcattaaaatgtactctttatttctcactggtttctccatactgcaggctccccac

SEQ ID NO: 6788 - DNA, 120 bp, synthetic construct
  source 1..120: mol_type = other DNA
cacaatgtaatatttgtatgtaaataactgaggaggaaaatccatgcttttcatgggctaggatggtttctcccaagagatgacatagtattgcttttgctcatcaggctgtttctcagc

SEQ ID NO: 6789 - DNA, 120 bp, synthetic construct
  source 1..120: mol_type = other DNA
gacggagaactcctaatgtggccatttgaaacacttctcaacattgaaatagacagttgaagttttaaaataacctcttctaagacacggctatgagtaggtaagagagcattcattccc

SEQ ID NO: 6790 - DNA, 120 bp, synthetic construct
  source 1..120: mol_type = other DNA
gttcaggatacatagtcatagaacagggcatgcagattgtatttaagaccactgcaagtaaggtctaaggcaaaagtaaattaatgagtccaactctggggcatccatttaagagccatt

SEQ ID NO: 6791 - DNA, 120 bp, synthetic construct
  source 1..120: mol_type = other DNA
tgctccatttttgcctgtagctatgatttttcaggcagcctgcttctccgaggactagtcttagctgtttacctaactgattggtccttttcttctccctgaaaagcaagtttattaaga

SEQ ID NO: 6792 - DNA, 120 bp, synthetic construct
  source 1..120: mol_type = other DNA
aaacagtcctctgacctcctgtgacacatggggtgagcccttcctttttgtctcaatctcaaaaaacagtaagtctttaatccatttgcatcaaaaagtacttcatatgctcgaaactaa

SEQ ID NO: 6793 - DNA, 120 bp, synthetic construct
  source 1..120: mol_type = other DNA
agagagagagcacagagtccctttgagacagtggggaaaattcatcttcatattgtcacatgcactgtaataggaatgtttagcaaaaaaaaccttccagagaaaggtggtttccaatat

SEQ ID NO: 6794 - DNA, 120 bp, synthetic construct
  source 1..120: mol_type = other DNA
aaaactgctttaattaacaagaccagagagaagggagaggagactacatttgtgtgacctaatggttgtgatttcactgtccaagaggacaaagacaaagaaattctgggaaggagaaca

SEQ ID NO: 6795 - DNA, 120 bp, synthetic construct
  source 1..120: mol_type = other DNA
cctcgctttcactaaataacaactctcttctctccatcattttgacttagagccagtcagaattcaatctccaatatcctgactagcacaagaaatccataggttgattcttgttctcct

SEQ ID NO: 6796 - DNA, 120 bp, synthetic construct
  source 1..120: mol_type = other DNA
tttgaaactcacagtaggaaattgagagatcaatttggttactgttttatcattgatcctgaagacagttgaagcaatcatactggttgttctcgaactagctggtttcccagagacagc

SEQ ID NO: 6797 - DNA, 120 bp, synthetic construct
  source 1..120: mol_type = other DNA
atctattcttgaaacatatttctttagttcaaggtctgatgagctcccagactgttggggattgctctacagctgctcaagcttttgaagactcctgtgatttttttaaatggctggttt

SEQ ID NO: 6798 - DNA, 120 bp, synthetic construct
  source 1..120: mol_type = other DNA
tggcacatacatttccattattttaatgggaattaaagaaaaaatgcctgttttcactaagtcatccttcccctggcaatacatttcctgaacttttacatacttaaatagccagttatg

SEQ ID NO: 6799 - DNA, 120 bp, synthetic construct
  source 1..120: mol_type = other DNA
gacccctgctgctctgcacgtagattcagtttgtatgccagggtgacattttaatttacagtagtccagacacctaaacaggacatagaaatgtcaactggtcatattaaaataaaaaag

SEQ ID NO: 6800 - DNA, 120 bp, synthetic construct
  source 1..120: mol_type = other DNA
aaacaaagagtttgataaggtgaaattcagagcatgctctgggttgttaggtacaattttttgaagtggaaacgtctcaacatgaaaacactttatggtaagaaaaaaacggctgggcgt

SEQ ID NO: 6801 - DNA, 120 bp, synthetic construct
  source 1..120: mol_type = other DNA
gtgccagaattcaggcagtccaatgtgtgttggtctgtttccaactgttgaatttttccattgatctgtccattctgttttagatactgtgcgtttgcaatgagtcttgattatctagca

SEQ ID NO: 6802 - DNA, 120 bp, synthetic construct
  source 1..120: mol_type = other DNA
caagcttctgactcagatagaaggagcgatcaggccaacctgcaaattgcagatagttctcttcgagaaactggctagctgagcagcgaatttaaaatttaacatgcattttttttttag

SEQ ID NO: 6803 - DNA, 120 bp, synthetic construct
  source 1..120: mol_type = other DNA
atatagatattttgtcaagcatactacagcttaatgtttgcccagatgtgggggaaactttgttttttaactctgtcttcttcctagtggcaggctccctggccaacttgaaaaggctat

SEQ ID NO: 6804 - DNA, 120 bp, synthetic construct
  source 1..120: mol_type = other DNA
ataatggtgtcaatttcagctgaatcatctagaaagagatgtcagatatatctaagtgattctgtagactgaactcatctaaatctctcatacccacctgaggggccctctctagaatgg

SEQ ID NO: 6805 - DNA, 120 bp, synthetic construct
  source 1..120: mol_type = other DNA
gaaacaccatttcagccacaattggcctggaaaacttcacaggtaaaatagaagtatgaaatcgaaatcaatggataggacaagagggatgttggaagaagaagaatttgcatgagccag

SEQ ID NO: 6806 - DNA, 120 bp, synthetic construct
  source 1..120: mol_type = other DNA
ggttattctaggccagttattcagttgaatcgcctgattgctttaaaataaaaaataccaatgtctggaacctgctgcagatgaattatatcagcaagtatctggaggtgggacctggtc

SEQ ID NO: 6807 - DNA, 120 bp, synthetic construct
  source 1..120: mol_type = other DNA
cacattataaaccagaaaataagaaaaccagaataagctgaagagaaacagctaccatgccccaaggatggagcaatcaacaaaaacagtgctttgaggatctcatgtctctagcatctc

SEQ ID NO: 6808 - DNA, 120 bp, synthetic construct
  source 1..120: mol_type = other DNA
ctaactactcagatgctgtttttaatgtgatcaagtccattcaagagttggttgtcacatgtccatttgaggccagcactagatgctgtagaagccagactgaatgaatgactcacgtat

SEQ ID NO: 6809 - DNA, 120 bp, synthetic construct
  source 1..120: mol_type = other DNA
gagtataaatattctaacggttagcttacccctaagtctcagtgctctatcccctaggtctgtcatgccaaaactccagtcttttccattaattttctcccaaattatttcctcttggag

SEQ ID NO: 6810 - DNA, 120 bp, synthetic construct
  source 1..120: mol_type = other DNA
actgctcacacttggccttttagccttgcagtccatggtttctgccactcttctcattctctaatgcagcctcatctgaggttcccccaattccatcaaataactgagacctatctgaac

SEQ ID NO: 6811 - DNA, 120 bp, synthetic construct
  source 1..120: mol_type = other DNA
tcatcaggacaagaaagatagacaggaagcaaagagtaacaagaccacagagtgaagtgtaagaatataaattgccttctcttgcataaactactgggaaaggagtttggagacagatag

SEQ ID NO: 6812 - DNA, 120 bp, synthetic construct
  source 1..120: mol_type = other DNA
ctacacaatctctttgagaaaattgaagagaacacttcccaatttactttcaaagctactgttatattgataccaaaccagataaagatagcaccaaaaaaatttacagaccaatattca

SEQ ID NO: 6813 - DNA, 120 bp, synthetic construct
  source 1..120: mol_type = other DNA
gaataaattgggaggaagcagcagtctgccctatttcgatacttatgtagctacaggaatcaaagatgtgcggtattgacagagggatagagacatggatcaaatgaacagagatagaaa

SEQ ID NO: 6814 - DNA, 120 bp, synthetic construct
  source 1..120: mol_type = other DNA
atacattaaggtgacaagttagggaaaagagcatttgcattctagcttcattcttgggactgacaaactatggtgcaaggagaaacacaatatcatccttaatatgctgtgcttcccctg

SEQ ID NO: 6815 - DNA, 120 bp, synthetic construct
  source 1..120: mol_type = other DNA
gttgcttcactgagcgagttataactgagtgtgagcataggcataccaagagacaccctaatagatcatgtgaatgccaaccatactcttccttcttctattaagaaacagcaaatccta

SEQ ID NO: 6816 - DNA, 120 bp, synthetic construct
  source 1..120: mol_type = other DNA
tcatagcccatttttggcttgaacatttagaaaccagtgagaacatgggtcatctattacttgacctctgtatacccctaccttaacacagaggccatgatattttttgagtagttcctg

SEQ ID NO: 6817 - DNA, 120 bp, synthetic construct
  source 1..120: mol_type = other DNA
gagagagagaaacttcccatatatcttgtctttagaaatgccacattctattattctattagcaatctcccaagatcttccaagatccatatggttggtcccatatggtcaaggccccag

SEQ ID NO: 6818 - DNA, 120 bp, synthetic construct
  source 1..120: mol_type = other DNA
aagatcctgactttgacattgaagactggccaaggccaagtgtttaatcttctttgaaattctgtcactcttgtacctgattttgaactctttctgccttcggaccacagaagattagta

SEQ ID NO: 6819 - DNA, 120 bp, synthetic construct
  source 1..120: mol_type = other DNA
gacttctgggttgatgttgtgtttatgccttcctagaatacgtgactggaaaaacaagcagactggcatcaaggaattagctataaatccaggttcgttcgtttgtttgaagagaaacaa

SEQ ID NO: 6820 - DNA, 120 bp, synthetic construct
  source 1..120: mol_type = other DNA
gaggctgcagactaggtcaaatccatcagtctgacatggcaccaagcagatcataaacctaagatgttaaggcctaaattatcctttgcttgatgatacttgattctcaaaagtgatttt

SEQ ID NO: 6821 - DNA, 120 bp, synthetic construct
  source 1..120: mol_type = other DNA
ggatatttgaaagggagatttgcagtaagcaggatagtgttcagtcctaatcactggaacctgtgtagacgtaacaaaggggaatttaggctgcaaatcaactgaccttcaaatagattc

SEQ ID NO: 6822 - DNA, 120 bp, synthetic construct
  source 1..120: mol_type = other DNA
aaaataaaaacaagtctagaagcgattttgatgactgccaccagagggcactgtaaccttgttgtagacgatcaaaacgcagccattaaacacttccagccacatgtttatttctttgag

SEQ ID NO: 6823 - DNA, 120 bp, synthetic construct
  source 1..120: mol_type = other DNA
ctgaagaagaaatgccccctaaaactatgtggatatggcagcttttctgtacttaacattactcattaaatcatgtatgtggctatatcaaaatactgtctttcggccaggtgtggtggc

SEQ ID NO: 6824 - DNA, 120 bp, synthetic construct
  source 1..120: mol_type = other DNA
caaagtgctgtgtaaatgtaaggcatgggtttcacattgaaatctgactccaaacacaatctctttcttacgcttcctggagtctttgtaatcctatactttaggagtctttctaggcct

SEQ ID NO: 6825 - DNA, 120 bp, synthetic construct
  source 1..120: mol_type = other DNA
ccttggctaagtaatcccagggatcttttttgccttaagtttcaatggtactaaaggagtttacagttgaaaggctggggaaatatgtcttcacgaaaagccaaaggaaagcattcaaag

SEQ ID NO: 6826 - DNA, 120 bp, synthetic construct
  source 1..120: mol_type = other DNA
caagagatagaaatctaaatttaagagctcatgggggttggggtggggaagaaaatgaaaaattatgaatgcatgccccatttttttcccacaagatttcctgagcattcctcagacaca

SEQ ID NO: 6827 - DNA, 120 bp, synthetic construct
  source 1..120: mol_type = other DNA
cttcttttgaaaaacagaatgtttccatgggcaattactcctggtaaaatttgattcttgtccatagcattctctggagagcaatgaacagaagagacatttctcacatcccccctagag

SEQ ID NO: 6828 - DNA, 120 bp, synthetic construct
  source 1..120: mol_type = other DNA
ggctactaaccttccatcaaaacagtatgtattccaataatgctaataaacaacctattggtgctattccattctgcctcctctgtaaccaatggcacacatttctgaaatgtctagctc

SEQ ID NO: 6829 - DNA, 120 bp, synthetic construct
  source 1..120: mol_type = other DNA
gcacctggcctacccaatttttcaaaacccgtaaatctatacttgaggcatcacattgtccaggaaaccttccctgcactcccaaaattggactgataagcttttaagtttttatgttct

SEQ ID NO: 6830 - DNA, 120 bp, synthetic construct
  source 1..120: mol_type = other DNA
cagcacctaaaacaattgactactcctccttcttgaacagtttcattgttgtgctcctatgatacattctcctgatttttcttgtaccacaattgctacttactcccaccttagttgctg

SEQ ID NO: 6831 - DNA, 120 bp, synthetic construct
  source 1..120: mol_type = other DNA
tacatttaatagtcaattatgtttgtttattctcctactaaaacataagcttccggaaggcaggcctttttatctgacatgcccagtgctatagccccaagtgcctgaaagaatgactgc

SEQ ID NO: 6832 - DNA, 120 bp, synthetic construct
  source 1..120: mol_type = other DNA
agggattccaaaaataccatgaaagagagaatgctgtactttcagtttttactccaaatagtcagtgtgtggctcgactcaagacctaagcattggaaatgtgttccaccagagtagcta

SEQ ID NO: 6833 - DNA, 120 bp, synthetic construct
  source 1..120: mol_type = other DNA
gcactcagaagctccattcacatcccctctcagtcccatcctctcctcttcctcaaagacaaccactctcttgactgctttgaattttaaaaacaattagaaataattattatacccttc

SEQ ID NO: 6834 - DNA, 120 bp, synthetic construct
  source 1..120: mol_type = other DNA
caaagcaccctgagcacatctcaaccagagtatttttgcacttcattttaatcatgtatttgttttcctctgtttctacaccggtagagtccattcaatggtcccagtcacctagaatag

SEQ ID NO: 6835 - DNA, 120 bp, synthetic construct
  source 1..120: mol_type = other DNA
gacatttccttctggatgcagtcctgaagactggtacccttgtatgaatcagatgaaaattcgagatcttatttatacgactgtttattctcaccagttgatgatctctgtctctcatca

SEQ ID NO: 6836 - DNA, 120 bp, synthetic construct
  source 1..120: mol_type = other DNA
caatattcacatggggtgttccctgcatgcatgtctctgtgtccaaactccccctatttatgagggtatcagtcatgttggattagaaacctgccctattaactcatcttaactagttaa

SEQ ID NO: 6837 - DNA, 120 bp, synthetic construct
  source 1..120: mol_type = other DNA
acacacacacacacaaaatatcatctaaaccaggtattgctgaaactcagtgggggagtgattcatcctgagacaaaattcatctccatctttaaacccatgcaagtcgacaaatatctg

SEQ ID NO: 6838 - DNA, 120 bp, synthetic construct
  source 1..120: mol_type = other DNA
tcccctatccatcccagaaagtcaccaatactctttcataaaacagaaagcaaagatgatgcactcacttcatagctgacttaaaatgttcatcagcacaacctcctttttctctaccaa

SEQ ID NO: 6839 - DNA, 120 bp, synthetic construct
  source 1..120: mol_type = other DNA
ctcaataaaactataaaaagtagtcatttatgagattgtcatgagagctgatgctacatagcagaaatactaagcatggccacagtcatggggtcaagctggagacactggaaagtctta

SEQ ID NO: 6840 - DNA, 120 bp, synthetic construct
  source 1..120: mol_type = other DNA
tcccacagtcttcgcaaccagcagaccaggagattccctcccatgcctggctcggtgggtcccacacccatggagccttgcttgctgctagcacagcagtctgagattgtcctgggatgc

SEQ ID NO: 6841 - DNA, 120 bp, synthetic construct
  source 1..120: mol_type = other DNA
ctagaatagccagtgtagagaagagtttaaatgatcttttggtgctgaaaaccacagtacaagaacttcgtgaagcatacacaagcttcaacagccgattcaatcaagtggaagaaaggg

SEQ ID NO: 6842 - DNA, 120 bp, synthetic construct
  source 1..120: mol_type = other DNA
cacacaggctcaaaataaagggaaggaggaagatctatcaagcaaatggaaagcaaaaaaaaagcaggggttgcaatcctggtctctgataaaacagactttaaaccaacaaagatcaaa

SEQ ID NO: 6843 - DNA, 120 bp, synthetic construct
  source 1..120: mol_type = other DNA
aagaagaaagaagaatcaaatagacacaataaaaaatgataaaggggatatcaccaccaatcccacagaaatacaaactaccatcagagaatactataaacacctctacacaaataaact

SEQ ID NO: 6844 - DNA, 120 bp, synthetic construct
  source 1..120: mol_type = other DNA
caaaatctccttaagctgataagcaacttcagcaaagtctcaggatacaaaatcaatgtgcaaaaatcacaagcattccaatacaccaataacagacagagagccaaatcatgagtgaac

SEQ ID NO: 6845 - DNA, 120 bp, synthetic construct
  source 1..120: mol_type = other DNA
tttataagaaaaaaacaaacaaccccatcagaaagtgggcaaaggacatgaacagacacttctcaaaggaagacatttatgcagccaacagacatatgaaaaaatgctgatcatcactgg

SEQ ID NO: 6846 - DNA, 120 bp, synthetic construct
  source 1..120: mol_type = other DNA
agataatggcaagaagtatgtatgttcacataggattaaagctgttcagaaaatgaggaaataatgaaaggcaaattatcactcagcttcctgcctctcagccatccctctctcctcaga

SEQ ID NO: 6847 - DNA, 120 bp, synthetic construct
  source 1..120: mol_type = other DNA
ctctctcccattggagacgggagccaaattaattatttccgcccccccttatcttctgaagcaaaataaatgaattttgtctgacagtcaagtgtttccaatgcaatttttatccttcct

SEQ ID NO: 6848 - DNA, 120 bp, synthetic construct
  source 1..120: mol_type = other DNA
aacatgatccttcttggtgacattagcaaatgagacaaaacaacatttttagccaacagttataagttcactcctttccaagaccctgccaaatgaatgtgctgctcccttctcctcctc

SEQ ID NO: 6849 - DNA, 120 bp, synthetic construct
  source 1..120: mol_type = other DNA
gttcttttgaatgaaagtcagtgaagactatatatttcaaattaggcaatatatagtcactgagatagcagttgactgaactggacagaccaaggctcagatccctgcttgaactactgc

SEQ ID NO: 6850 - DNA, 120 bp, synthetic construct
  source 1..120: mol_type = other DNA
cgtttatgaggtatcagttgaatgagaacaaaatggtagcagtgggtgggaagctggaaaatgacctaaattctaggatacgaatccaatgcattgtagataaatatgttagctgtggca

SEQ ID NO: 6851 - DNA, 120 bp, synthetic construct
  source 1..120: mol_type = other DNA
aagattacctgaatgatagtgccaaggagaggtgcgctctatagaataccaaaggatgctataaaggtatgttctaactaccatactgacaaagtgataaaaagaaagattgggctgggt

SEQ ID NO: 6852 - DNA, 120 bp, synthetic construct
  source 1..120: mol_type = other DNA
aatattcacaccacagaaaatgatgcagttatcaaaaataacaaggtagagctgcatgtactaacaaggaaggcttatgtggaaaaacaggctacagatggatatctgtcacctaattct

SEQ ID NO: 6853 - DNA, 120 bp, synthetic construct
  source 1..120: mol_type = other DNA
gtcttctgtatttccagggagcagctatagacatggagcttaatgactgcctaagtgttcaaactgccaaggcacacttcattccaaatatgaagatattcacaatgtacctttcaaata

SEQ ID NO: 6854 - DNA, 120 bp, synthetic construct
  source 1..120: mol_type = other DNA
ctttcaaaccgcatgtcagcaaattccattgtctcattttaaaatatacacagcatctgactgctttccatctcaacctagtgttttgttgctagcaaatcccatcacctccacctgaac

SEQ ID NO: 6855 - DNA, 120 bp, synthetic construct
  source 1..120: mol_type = other DNA
ctttcgtttgctttttgcccagctcatggcatggtgcttggcatataaaaagcacttgacaaatattgttgaatgaatggagttcccacacccagagatatcataatagtatttacatgc

SEQ ID NO: 6856 - DNA, 120 bp, synthetic construct
  source 1..120: mol_type = other DNA
ccaatttcatgtactggaaaattttagaccataacgatttctgtttcccccagattgaatctaaaaatgtaacgcaattcatgccaaagtcccacagactgtgtgtatgcacgcatgtgc

SEQ ID NO: 6857 - DNA, 120 bp, synthetic construct
  source 1..120: mol_type = other DNA
ggctttgagagcgctcatccatgctgaagagatgtattttggtggaaccaatttataaagcaatttcatctagtaaagttgaagataggcatacatcatggccagcaattccatttccag

SEQ ID NO: 6858 - DNA, 120 bp, synthetic construct
  source 1..120: mol_type = other DNA
tctgctctcatgtacttcctatacttatattgactcagtttgaatctggtcccaaaaactcacaaaatataagactgtcaccaacatcacataagcaaaaatcattaacttgtacatgta

SEQ ID NO: 6859 - DNA, 120 bp, synthetic construct
  source 1..120: mol_type = other DNA
gccaggcgcggtggctcacgtctgtaatcccagcactttgggaggccgaggcaggtggatcacctgaggtcaggggtttgagaccaacctggacaacatagtgaaaccctgtctctactg

SEQ ID NO: 6860 - DNA, 120 bp, synthetic construct
  source 1..120: mol_type = other DNA
atgacaaattgctttctaaattggttccaccaaaatatatctcttcagcatgggtgagcactctcaataccccacaccctcacaagtaatttgctggctgatttctgtttcttgacccaa

SEQ ID NO: 6861 - DNA, 120 bp, synthetic construct
  source 1..120: mol_type = other DNA
tttaatcaacaacaagaagttataagaaagagaagaaaaattgaagacccctctgataactttccaaccctctacaccgctagaccacatgataagcaaaacaaacacttcggccttgct

SEQ ID NO: 6862 - DNA, 120 bp, synthetic construct
  source 1..120: mol_type = other DNA
cctcacctctaaatttattcctttctgagtggaagattcctcttaccttattcacattctgtctcttctgaacctactaccttcctttttcaattatgacctccaactcctcaacccctc

SEQ ID NO: 6863 - DNA, 120 bp, synthetic construct
  source 1..120: mol_type = other DNA
tttctaaagcatacttccaactcaccctgatgagaaatggtcatccattagctgtttaaattaaggaacacctatcccagtattcaacctcaaccaaatgtcctttccatcccctttacc

SEQ ID NO: 6864 - DNA, 120 bp, synthetic construct
  source 1..120: mol_type = other DNA
ttcgtcttatttgctgacatgcagcttttcagcatccagagtaaggtttcttcattcattaagtagaagtgacattgtctccacattgtcagcaggtagtgtgtgttgtacatatgtgac

SEQ ID NO: 6865 - DNA, 120 bp, synthetic construct
  source 1..120: mol_type = other DNA
ggttgctgtttccatagagatgactttaagtggttcagttcttctgggaatttaaccaaatccccagcagcagaagaaaatcatcagcaaaaattctgtagcatatgagaactgccaaca

SEQ ID NO: 6866 - DNA, 120 bp, synthetic construct
  source 1..120: mol_type = other DNA
cagtgacaaggtttcctttctcctccctatgctactcattcacctctagaaataggttggtttgccagactttatttactccagttcttctaatctagatagttggcctaaataaagggg

SEQ ID NO: 6867 - DNA, 120 bp, synthetic construct
  source 1..120: mol_type = other DNA
ctccgattggtggaaaagtatcattattttatgatcacatgtcttggagttctgaagcaattggttagtgacacttatagcaagtaattagtggcctagtagctggagttgtccacatgc

SEQ ID NO: 6868 - DNA, 120 bp, synthetic construct
  source 1..120: mol_type = other DNA
gaatgcttcagaatactgcattacactttgagcaaaatataatttgcaatctatcactgaattcacactgatggaacaagaaagataattatgaaaaaggagaggctgggtgcgatggct

SEQ ID NO: 6869 - DNA, 120 bp, synthetic construct
  source 1..120: mol_type = other DNA
tattggccaacaaaatcaaaaaatctagactccagtactctacagatcaccctatatctccaacagcagacaaggtagagaaggcattttatggttcagttgcattacatcatcctatgg

SEQ ID NO: 6870 - DNA, 120 bp, synthetic construct
  source 1..120: mol_type = other DNA
tggaccagtcctgacacgttcccctattgtgagctattttagtaaaattcaacttctatgtgatcaacttccttttttcgaaacaacaccaaataagcttttcctcttactcctgctgac

SEQ ID NO: 6871 - DNA, 120 bp, synthetic construct
  source 1..120: mol_type = other DNA
cctggtgcttctgcggttatttctatcataataggtggaatgtcattttgtgtatcaacttacacagttgtcccttgaacagtagggattcaaactgcacaggtccacttaaacacagat

SEQ ID NO: 6872 - DNA, 120 bp, synthetic construct
  source 1..120: mol_type = other DNA
aaaccagtcaattgttgttaagccccaggaagtatcatgtttgtatttctcctatatgccaggagaagcatcaccctaaataccagaagaccttgtaatagtacactccttctctgtcac

SEQ ID NO: 6873 - DNA, 120 bp, synthetic construct
  source 1..120: mol_type = other DNA
ttgtcagtccttgaagtaatttgtttgaattattactgcattgtccctcttcctcaacacagaactcaagatgctcaagggagaagacaccatctagttccattcagcatccctgtattt

SEQ ID NO: 6874 - DNA, 120 bp, synthetic construct
  source 1..120: mol_type = other DNA
caaaagcactagacaagtggaaagtagtatatttctcattcacatggggaaatatttgtggaacaagaaatttgcgggggttgtggatgaagtcacaataatcactcacccatccatctg

SEQ ID NO: 6875 - DNA, 120 bp, synthetic construct
  source 1..120: mol_type = other DNA
gcgtgactgactgccaggagagcaggctgtgaatgaagatgagctgttaaagccagaggcaaaaatataaacacgaattttagcaaagtcttaaaatcagttagatattcaaccatatgg

SEQ ID NO: 6876 - DNA, 120 bp, synthetic construct
  source 1..120: mol_type = other DNA
tggctcctctattctttgccacaacccaatctctaccccatcacatcctgactcactggactccacttctgatgtagcatatattttccttattatgtggattttttattaacagtctcc

SEQ ID NO: 6877 - DNA, 120 bp, synthetic construct
  source 1..120: mol_type = other DNA
aaaaatatttttgcccctaggcttgtatatctaagtcatcgctagcctatactgtattgggccaaacactagctcaattcactctctgcataaaagctatgactgagtgcagtggcttac

SEQ ID NO: 6878 - DNA, 120 bp, synthetic construct
  source 1..120: mol_type = other DNA
attggtgggcacagtgtgagggagaatgaacttgaggaaaaaatggagggagaacaactaaacatttgtatgttacaggttaaaataggagagagacacagaagcagacatagagacaaa

SEQ ID NO: 6879 - DNA, 120 bp, synthetic construct
  source 1..120: mol_type = other DNA
cctcagtttccttaaccatgaaatgaagacaggaatatctacttcctcatgacctagaataggaaacaatttttgaaaccagtgggaaaaaaaggcactcaccacaatgaaggtgatgga

SEQ ID NO: 6880 - DNA, 120 bp, synthetic construct
  source 1..120: mol_type = other DNA
ttaatgcactaaccccactcctgacttcctgctctctttctggctctccttttttctttctgctcttttttcatcctaaattcattttgcattgttatagtacatgcacataggcaaggc

SEQ ID NO: 6881 - DNA, 120 bp, synthetic construct
  source 1..120: mol_type = other DNA
acgaagctagaaggtggtggaggccatgtcatagaaggccttacataccaggacaaggagaagttttgtgtgtagttttgtactaactcacaatctataaatagacaatgggtacttatt

SEQ ID NO: 6882 - DNA, 120 bp, synthetic construct
  source 1..120: mol_type = other DNA
gagtttgttatgaaattaggtcatgattctaccatcagtctgcacatttccagaaagagcataagtttgtgccatcgaaacctaaggcctctggtttcacaatactttccatactcaagg

SEQ ID NO: 6883 - DNA, 120 bp, synthetic construct
  source 1..120: mol_type = other DNA
ccacctgtataactgtcagataattaggaatccttacgcaaccctcaacctgccatggtcttgttgtacctgttatttttgaatagaaaatatataacaaattcaatgccgggagcggtg

SEQ ID NO: 6884 - DNA, 120 bp, synthetic construct
  source 1..120: mol_type = other DNA
atttcctgttataatgaagctaatgagaggactaagatgggggtggggggtggttgtaatgacctggaaaagatatgaacaaattatgaacaaatatatcttctgtaattgtgcctttga

SEQ ID NO: 6885 - DNA, 120 bp, synthetic construct
  source 1..120: mol_type = other DNA
agatgaatttatatatatgagctccctctgccacatggagatgatcctcgctggaaaggaagaaattgttcctaaaccacaagaggtggctgcatggagaaaaaaaaaaaaaagtgtccc

SEQ ID NO: 6886 - DNA, 120 bp, synthetic construct
  source 1..120: mol_type = other DNA
ctgagaaaggcagctcccgtctttgctgagaaacgaactctttcattacccttaattacttacccctgtacttttaaattgagactcactacagaacatgcggagtttctactaaactta

SEQ ID NO: 6887 - DNA, 120 bp, synthetic construct
  source 1..120: mol_type = other DNA
cagataaacatggaagggtctcacactttcatcggtttaaaaatgcaccttactgtgtaggaggagaaattcactaggtaacaaacaaagcactgagaagcaattgtttctctgctactc

SEQ ID NO: 6888 - DNA, 120 bp, synthetic construct
  source 1..120: mol_type = other DNA
aaataataagagacactaagaattctgagaatagggctaaatcaaagagaatgccctctgatatctccaatcagcacctcaaatacagcctgattcaaacagccattgttgaccaggtgc

SEQ ID NO: 6889 - DNA, 120 bp, synthetic construct
  source 1..120: mol_type = other DNA
tatattcccattaaggatggggtttaccagtttcctctacttacacgttcatttcctgcacattctcagctgcaaaataaaaggtcttgatctgtggatggctgatcttaaaagcacttg

SEQ ID NO: 6890 - DNA, 120 bp, synthetic construct
  source 1..120: mol_type = other DNA
gaatcagcactggacatgtgcaaccacaccacagaggcaaagacttaaagctaacaccagtttactaaccttgttaaaagaaaactactcaattgctgcaactagtcacataggacaaaa

SEQ ID NO: 6891 - DNA, 120 bp, synthetic construct
  source 1..120: mol_type = other DNA
atcatatacatggaatagggatggtataaatgacatgagggagaatcaagagataccaaccaccctgaatcaccatggaggtgtcccagatacacagctcatgagaaagattaatgttct

SEQ ID NO: 6892 - DNA, 120 bp, synthetic construct
  source 1..120: mol_type = other DNA
gggtgctttcagtttacttgatcattctgctctttcctttattgccaactagagtgcaacttgcattcttttcttcagaaaaattaaactgtgaggcatccaaccctatgcccatcttct

SEQ ID NO: 6893 - DNA, 120 bp, synthetic construct
  source 1..120: mol_type = other DNA
atgaaatatccagaagtggaaatccagagagacagaacacagctaattggtagctaccagggtcccaggcagtaggaaatagggagcaactgctcaatgggtaaggggtttccttttggg

SEQ ID NO: 6894 - DNA, 120 bp, synthetic construct
  source 1..120: mol_type = other DNA
ttcccatgggccccgcaagagtaacaaattcaaaatcaaactcattatcttactccataaaatgcccacttctttctcctgtgttcttgacttcagtgaataatatcactttctagccag

SEQ ID NO: 6895 - DNA, 120 bp, synthetic construct
  source 1..120: mol_type = other DNA
caatagttccatggagctgaattagaatcagcacccaatttatggcatgattagtttctagacaactcattttcagtacaataaatcgatctcaaatgatataatacacaaatcaatcaa

SEQ ID NO: 6896 - DNA, 120 bp, synthetic construct
  source 1..120: mol_type = other DNA
tttaaaaaaaaaaaaaaagtttcctccaggttctatgctggtacctgcaagcttccctcgaaatcctgatgtaataaaaaacttgttctcctgccagaggtatcaaacccatcgtttggc

SEQ ID NO: 6897 - DNA, 120 bp, synthetic construct
  source 1..120: mol_type = other DNA
ggccctcccttacaggacctctcttactgtatttaattatctggttgtttgtctgcttctccaatggattgtgagtaccttgaaggaaataactgtgttgttcatacatattatttataa

SEQ ID NO: 6898 - DNA, 120 bp, synthetic construct
  source 1..120: mol_type = other DNA
aaagctgtttttaaaaacatgaggttcatcagttataacaaatctcccatgcagatggggatattgataatggggaggttgtacatgagtatgggcggggatcatatgggaaatatctgt

SEQ ID NO: 6899 - DNA, 120 bp, synthetic construct
  source 1..120: mol_type = other DNA
tgcaaaatggaactcaacagaaggaaactggataataatcagcaaaaatgcacttgcccattgacccagaaattccacttctgggatctgtcctaactataccttggagaatatgtggaa

SEQ ID NO: 6900 - DNA, 120 bp, synthetic construct
  source 1..120: mol_type = other DNA
agcatcgggctgtgacaagcactgcaccaaaagaaagaaaaaatgtctgtgttttattttcttctagatatcagaagcaggcctggtagggagtgtgcttggaatccttttaagaaatat

SEQ ID NO: 6901 - DNA, 120 bp, synthetic construct
  source 1..120: mol_type = other DNA
ccaaagtgcaaaataagctttttgactgagtgcattgtaagctgagccatccgactagctgtttctgtgtctcggctctcctctcttttctttgcatcagattaatggttataaaaacat

SEQ ID NO: 6902 - DNA, 120 bp, synthetic construct
  source 1..120: mol_type = other DNA
aaggagaactttattaacttttctaccctctctcacttccctattgcctttccgagtatctcctggatcacttctcaagtaaactgctagcacccaaatcctcttctcaagaatctgctt

SEQ ID NO: 6903 - DNA, 120 bp, synthetic construct
  source 1..120: mol_type = other DNA
gtctcatctctgccctattctttcggaagctttaaaaccccaaatgtgctactgttttcacatatatgggctggtctctgcaccagcatagtcaaaaaaagaaagaaaacaatacatatg

SEQ ID NO: 6904 - DNA, 120 bp, synthetic construct
  source 1..120: mol_type = other DNA
actactctgaaatcgttatttgtcagtgaagaatgaaaatgcattttccaaggtaagttttacaagattcaaggtgtgaaaatatcagtggctgacctgctgttaatgagcaccatctct

SEQ ID NO: 6905 - DNA, 120 bp, synthetic construct
  source 1..120: mol_type = other DNA
ccatcttgtagcttaaaatcatcctttacacggggtcggtaggtgtatttttggactttcttacacaggacagatcatagtcactgagaaaaaccattcctggtatctgaaaattcctag

SEQ ID NO: 6906 - DNA, 120 bp, synthetic construct
  source 1..120: mol_type = other DNA
cactacacccggccaagcctgtatgatcttaattcatttatttctctctgtgtgtttgcttccatgtctgtcttctttttttatttcgcttacttctattttcaaatttttcctatgagc

SEQ ID NO: 6907 - DNA, 120 bp, synthetic construct
  source 1..120: mol_type = other DNA
ttcaagaaagtcctcaatcattctaacatttaggtttccaaatgttaactaagcaagcatttttacccctttgatccatgagtcattgtcttgcggtaaaccggtcacctacagctgctg

SEQ ID NO: 6908 - DNA, 120 bp, synthetic construct
  source 1..120: mol_type = other DNA
ggtacatgctctgtacctgccaacttctaggatacagaaacacagtttaaatcagacaagtaaagaatacgtcctctgctgcttatgttgtagctgggggagaaagaatataataagcta

SEQ ID NO: 6909 - DNA, 120 bp, synthetic construct
  source 1..120: mol_type = other DNA
gagaaacagatagttggatgattcattttttctagtcaaggctcaggggcctcaagcttccttgaactggtgatgcaatggcacacatggtgtcaataaatgaaaactaaaaaacacaag

SEQ ID NO: 6910 - DNA, 120 bp, synthetic construct
  source 1..120: mol_type = other DNA
aggacctaatcggaaccttggggcctttctagcaaattcagattgctccttttcccatatctgtttttaagaatagaggtggaaatcctttcctggaaaactattttctgtcaaaatcag

SEQ ID NO: 6911 - DNA, 120 bp, synthetic construct
  source 1..120: mol_type = other DNA
ccaggaagtgaacgtgtaccttcttgtaagggcaagggaaaacaaaactgtggattttaaatccaagattttaccagcttggatttctacggctgttaaacttgcatatggttttgtagg

SEQ ID NO: 6912 - DNA, 120 bp, synthetic construct
  source 1..120: mol_type = other DNA
tttcacagttggtgtccgcacagagaagaggaatatcactgctaattaagcattcattgagtagccttttttccctcacagtaaacatataattaagattcggtgtgtgtgtgggtgggt

SEQ ID NO: 6913 - DNA, 120 bp, synthetic construct
  source 1..120: mol_type = other DNA
agttgttataactcaccaaatgcttggaaaaaaaaaatgtatttttatggaacccaaagaggagctttgtgccacatttttcatgaggtgaagctggagcaataagtttgggggcagagc

SEQ ID NO: 6914 - DNA, 120 bp, synthetic construct
  source 1..120: mol_type = other DNA
gaatagtaacattaataacagaacttaaaagtctcctttagcaaggatgtaaatgtcgacactcccttcctccccagccagagtagtcaaacaggatgggtttcttctccataaaacaca

SEQ ID NO: 6915 - DNA, 120 bp, synthetic construct
  source 1..120: mol_type = other DNA
tgagctgcacgtttctaaggtagggaggaggaagatgcccccaattaagttgatctttgagccaaggaggctggggagcagcctccccaagctagagccctgcagagcgagtttcccttg

SEQ ID NO: 6916 - DNA, 120 bp, synthetic construct
  source 1..120: mol_type = other DNA
ctgggctgttacggattaattgtgagagctttgatttacaaagatctggacaactctcctctgaggagaaaatcgatttacctggtaatcattgtactgactgtttttgctgtgtcttac

SEQ ID NO: 6917 - DNA, 120 bp, synthetic construct
  source 1..120: mol_type = other DNA
aacaaaacactaaactcatcagttcatccggcatcagatcaatggatctctgagcggggtgtttttttcagtgtcttataagcatagatgatagttgactgagtttctttagggcattga

SEQ ID NO: 6918 - DNA, 120 bp, synthetic construct
  source 1..120: mol_type = other DNA
cagtgtcaaaggaatttttagttttggaagctatccctcataaagtcaacatcagagtttgcaactgatggtggcataacttgtttgaaagcactttacaagtagagcaacatggggctg

SEQ ID NO: 6919 - DNA, 120 bp, synthetic construct
  source 1..120: mol_type = other DNA
tttccaaagtgtttcttctttagcttcatacatcacatatggacactgatgacatgtgaatgcatgccacatagtaacaagaatgatcttgccaactccttccaagccaaaagaagcctc

SEQ ID NO: 6920 - DNA, 120 bp, synthetic construct
  source 1..120: mol_type = other DNA
tcacagattatgatgtggacctgtcacctgtaaattgtctcaatctactcagacaagacactaaactgtctttggatactatagatgtcagtgcttatagcagctggaatttggctagtg

SEQ ID NO: 6921 - DNA, 120 bp, synthetic construct
  source 1..120: mol_type = other DNA
gatggggagagaaaaaggcagctggtataatcggttactgctgcttagttctacttaattttttgtgttgcttcttcttaaggtgagatagcataatcttaactgttttgagatggaatt

SEQ ID NO: 6922 - DNA, 120 bp, synthetic construct
  source 1..120: mol_type = other DNA
tatgattactcattttggcaaaactctgcaaaacatgaattctgtgtagttttgcatgcagcatgacaattggatgtcgtttgttttgctgctaatacagctacagtttagattagtttt

SEQ ID NO: 6923 - DNA, 120 bp, synthetic construct
  source 1..120: mol_type = other DNA
taatttactatttcatgccagactagaccgaactctgatttaaggaaagagcatttcttcacattcttgtctctcggctgcctgttggtcagaatcatgttaggcaaagagagtaagaac

SEQ ID NO: 6924 - DNA, 120 bp, synthetic construct
  source 1..120: mol_type = other DNA
ccctccatgccttttagctttttggtttctattcacagtcacttttccccccaacgtccttatttctgagcttcttttactgtagtaccgtcaaaacagttgagagagaaatgatggata

SEQ ID NO: 6925 - DNA, 120 bp, synthetic construct
  source 1..120: mol_type = other DNA
tcagcatctcctcacctatttagcgctttaaaataatgctaaacaaaacctaatgttttccaatacaagatcactgattttaacctttcctgctactgctgtgtggtcttagttcatccc

SEQ ID NO: 6926 - DNA, 120 bp, synthetic construct
  source 1..120: mol_type = other DNA
actcaaaatgcgtgctggctagggatgttaagtctctggccctttgtttttcccttggttaataatgtcattattttaaacctgtgtttgattaactcctttgtaggtgaaacagcttcc

SEQ ID NO: 6927 - DNA, 120 bp, synthetic construct
  source 1..120: mol_type = other DNA
ttatgtaaatattgctttgcagaaacacacctccctggtgtctcaaactgcagtgtccttctgttatcagtgggaatcatttgtgttggtgcctttgctgtgaacacgttttggtttttt

SEQ ID NO: 6928 - DNA, 120 bp, synthetic construct
  source 1..120: mol_type = other DNA
aagaggccccagtagtgagaagtgaatctcgtgtgggatggttgtacgtctttcaataaaataaggaccatactctcctttacagcaaattgtaaatgctaaaggatgtttatgatgctt

SEQ ID NO: 6929 - DNA, 120 bp, synthetic construct
  source 1..120: mol_type = other DNA
gaatgccgtcttttgtgacctagttatctgacatcccagtcttaagtgttctgcttgcaagaagaggactagtagatatataaatatcagtcatactgtggactataagctgtgtagaac

SEQ ID NO: 6930 - DNA, 120 bp, synthetic construct
  source 1..120: mol_type = other DNA
taaaagaggtagcctgacgtctcctgtaacagactctccagttgatgcttttccttgtccaacaactgtatccttgagggaataaacaagagtaatttttgggtgtttatctcagattat

SEQ ID NO: 6931 - DNA, 120 bp, synthetic construct
  source 1..120: mol_type = other DNA
gtttatttgaaagataggtctgaaacaagagtcttttgatgatcttcataacgctctttcctctcaagctgttgttcttcatgcccaactcctggtaaatgtgggtcacttccctatctt

SEQ ID NO: 6932 - DNA, 120 bp, synthetic construct
  source 1..120: mol_type = other DNA
caaatacctagaaaataagtgaattatactgtaataaatgctccaaagtctacttcccctccttctgtggggaggttttcaataaactggagtgacagagtgagggaactgacactgtat

SEQ ID NO: 6933 - DNA, 120 bp, synthetic construct
  source 1..120: mol_type = other DNA
gaccatctgatatgccttaactgaaaacaattgccaaagcatgtgactggcactgccttcatttttcataattttattagtgcccccctgtttccttcctagggttcatatgtacacaaa

SEQ ID NO: 6934 - DNA, 120 bp, synthetic construct
  source 1..120: mol_type = other DNA
agaggtggtccagaagggaagagtggtgatgtcagaacatgtttgcattttcagctgtttgcctcacacctaatgacacctacacgctttattgttttgtcttttggaaataaatataca

SEQ ID NO: 6935 - DNA, 120 bp, synthetic construct
  source 1..120: mol_type = other DNA
ttgccttccctctgagcacagtctttatcaaagtgttctatgtcactgtcaacagagcgtttcccctcctgaatgactctcacattgaaatgtgaacaagcacatttaaattttaaagcc

SEQ ID NO: 6936 - DNA, 120 bp, synthetic construct
  source 1..120: mol_type = other DNA
aaaaatacagatcttaataatgaagataggttctctttcttcccggtcaatcatggtgcacatgcagaaacatggtacaagaggcagtgtgtttctatctgcatatggcattctgggtat

SEQ ID NO: 6937 - DNA, 120 bp, synthetic construct
  source 1..120: mol_type = other DNA
gcaacatgagtactggtaaggaaaacagaccttgtgttagcatgtatttgatttctgggaacacatgaaaataatattttgaggaaccaactcatttaggagtgttgtcagatcagccag

SEQ ID NO: 6938 - DNA, 120 bp, synthetic construct
  source 1..120: mol_type = other DNA
tggtgttactggccaaaagtggcacaagcttgtaacttatgttaccccagcacctttaaattctgatgtactctagcatcaaggtttctttgttagggaattagaaaagaaccagccttg

SEQ ID NO: 6939 - DNA, 120 bp, synthetic construct
  source 1..120: mol_type = other DNA
aaactgtgtcagaaaagtaacaagatgagtctccaaagaagatgccaagcaagtgtttgattaagtcaaagtgagcccaggagatctccccaccttcattgtggatatcattgtaattta

SEQ ID NO: 6940 - DNA, 120 bp, synthetic construct
  source 1..120: mol_type = other DNA
aaaagccaggaagaacaaacaggagacatttccaacactggagactgtgttcactaaactccagctcctttcatattttgatcaacatcaagtgacatctcaggtagctatttaaagctg

SEQ ID NO: 6941 - DNA, 120 bp, synthetic construct
  source 1..120: mol_type = other DNA
tgaacatcaacggactaattgacttcgcaatacaggtgtcaaagagaccatgtttctcttacttttaggaaagcaaatccaccaggcattgtgcaatttaaagtgagccaattagctggg

SEQ ID NO: 6942 - DNA, 120 bp, synthetic construct
  source 1..120: mol_type = other DNA
ttctcaggcgctatcacagttgtctaatcttgaatcctgatcagacagcccaggtgtttgaagggttggtatatagcatgtcattgttgtttttccaatctcagaatgtataactagtga

SEQ ID NO: 6943 - DNA, 120 bp, synthetic construct
  source 1..120: mol_type = other DNA
aataccacccccattaaagactgaggctaaggcaccaaattagtgtaaatgagctctcaaaaacttacataagctgctttttatccactctccagggctttttatttaaacacagaaaga

SEQ ID NO: 6944 - DNA, 120 bp, synthetic construct
  source 1..120: mol_type = other DNA
acaggttgaatcattacttttcttcttaattgtgtgacacttttgttctaattggcagcttttacctgctgctaggtagtcccatctgttgatgtcatttcacagggtttgggatactac

SEQ ID NO: 6945 - DNA, 120 bp, synthetic construct
  source 1..120: mol_type = other DNA
ctctacaacagttttccttttgtgtctcagtcccagcaacttaatcggtggattcctccatacgtaccttctttatgaaggaatttctttccttgcttttgtttcttgtcatcagtgaca

SEQ ID NO: 6946 - DNA, 120 bp, synthetic construct
  source 1..120: mol_type = other DNA
gatatctaccttttctgagctgactttttgcattacttggattagctttaatatcctttgggcattacagtgtttcattttttatttcctggtgactcatagaaggttctatagccccat

SEQ ID NO: 6947 - DNA, 120 bp, synthetic construct
  source 1..120: mol_type = other DNA
aacatccactaaagtgatccttttaatatacgaatgattcacaggctttcagtgattttccacccactcagaataaaattcaccatccctacctagccttcaagatctgcagggtcccat

SEQ ID NO: 6948 - DNA, 120 bp, synthetic construct
  source 1..120: mol_type = other DNA
gtgtgccaagcactgtgctgggttatttccatcaagagctttatttctcacatcaacctcaagaaactgaaaatgtcatgactctgaattgcaaacttgtatccttcaatgacaaccaac

SEQ ID NO: 6949 - DNA, 120 bp, synthetic construct
  source 1..120: mol_type = other DNA
catcaaatctttctgccagtctcattcacagagcaggtttggaggagataggttctaattcctgttatacttctagtagtctatatctgattcagacgtaactcactgaaacatgagctg

SEQ ID NO: 6950 - DNA, 120 bp, synthetic construct
  source 1..120: mol_type = other DNA
gtgagatgggttaccctggaattcatgattaaccaaagagttgttgccttggtgcttctttgaaattgatgtcgttagtaagtgtctggactcacatttggctatcatttgctttttcta

SEQ ID NO: 6951 - DNA, 120 bp, synthetic construct
  source 1..120: mol_type = other DNA
tgtagcagaggggccaagaatttctttgtttcctgaaatttccatttagttgagatttcttccatatggatggtctcttcagagctgttttttctttttaccaactgccctggattcctc

SEQ ID NO: 6952 - DNA, 120 bp, synthetic construct
  source 1..120: mol_type = other DNA
agtgaggcttgtttttcaactagggggagcctcctggtttttccctgccttctaattgtctgactcttaaatggtatatcttgttgcagtctgccaaaatgttttaatgatgttacatct

SEQ ID NO: 6953 - DNA, 120 bp, synthetic construct
  source 1..120: mol_type = other DNA
ctgcagaaaaatctgattaccttttcattggtagctaaagtttctaaaatgaccaaataggctgtccctttctgtaattgccttcttaattttttgggcatgccctgggggtgatgaagg

SEQ ID NO: 6954 - DNA, 120 bp, synthetic construct
  source 1..120: mol_type = other DNA
aggataagtgaggaatactggccatgtttcttagtgaatccatgaagcatcaattaaagcaagctaatggcaattaagcacccacagtctaacaatgaaaggctgactgcctgtaaataa

SEQ ID NO: 6955 - DNA, 120 bp, synthetic construct
  source 1..120: mol_type = other DNA
gaatgattaggaagtcttcaagtcagactgcctaattccaactttgggtaccttcttttggtcttgactcttatgttcagaagtagctccccttcattagaacagaaattactgagtgga

SEQ ID NO: 6956 - DNA, 120 bp, synthetic construct
  source 1..120: mol_type = other DNA
ttcttctcttttcttatttgcagaagctctaatttatccaccctaccatgccctaaccaactctcaattcctatccaccaggatatattttgagttagggagatgggaccattatatcaa

SEQ ID NO: 6957 - DNA, 120 bp, synthetic construct
  source 1..120: mol_type = other DNA
tattcaatgaatgccctacttttcagggcttccttagtatgcattgcccttttccattcccagggaaataaatctctcttgtcaagaagttgatagtaaggtgggctaaggcaaaacttt

SEQ ID NO: 6958 - DNA, 120 bp, synthetic construct
  source 1..120: mol_type = other DNA
tgtagattagcttcagattatgcatccctggccaagatactacagaaataatcttgagttctttcaggtaatcatgtctgaaggcatgtgatgtccatttgcacctcaagggtgatgtta

SEQ ID NO: 6959 - DNA, 120 bp, synthetic construct
  source 1..120: mol_type = other DNA
gaggtcctactgataccttcaattccaatccaaccccacaaagttgttctgtgttttcccctaattcatattagtatcaccttcttccctagtaagaatgctgattcccaaaaacgtcaa

SEQ ID NO: 6960 - DNA, 120 bp, synthetic construct
  source 1..120: mol_type = other DNA
aggtaattttagtgggcaaccagcattgagccactggtatggtggttaaaaaacagacttcacccgaaatagatctgggttcaaattgggctctgttactgttgatgatttcttacttta

SEQ ID NO: 6961 - DNA, 120 bp, synthetic construct
  source 1..120: mol_type = other DNA
tcctcatggcattaaagaatgtaccgagggggacaatctgcaaagacagcacattaagcgtattcttcaggtcagtcgtatacagattgtgtttctgtcatttgataaattcttcgtaat

SEQ ID NO: 6962 - DNA, 120 bp, synthetic construct
  source 1..120: mol_type = other DNA
cagtctgcagacctaaataattcttctaattctggcatgagcctcttcaacccaaacagtattggaagtgctgatacaagtagcacgagacagaatggaataaagacattcctaaggtat

SEQ ID NO: 6963 - DNA, 120 bp, synthetic construct
  source 1..120: mol_type = other DNA
tggaagatgggcgtctgtgtgagagtttaaagaataattgagaaagtctcacttcctgtaaacctgtgtggtcactgtacccacagtccactgaaatttagtttttaaatggaactggga

SEQ ID NO: 6964 - DNA, 120 bp, synthetic construct
  source 1..120: mol_type = other DNA
gaagcataattctaattttcaaatcatatttgctgataggtgagtgtatgtgcattgcctaacttcccataggcaggacagatggtattgaagagacttgaaagatcgctcttcccacat

SEQ ID NO: 6965 - DNA, 120 bp, synthetic construct
  source 1..120: mol_type = other DNA
cctgccttaagggacaagatgaacaaagggaaggcctcctaacatctctccagaatcaagttaaccaggtaaagtatagtataatattaagacaggcaaatatctttctaacggcattca

SEQ ID NO: 6966 - DNA, 120 bp, synthetic construct
  source 1..120: mol_type = other DNA
ctatgacaccatgtctttccctcgaatggtactagatggacatggacaaggacacttaatcttatttgatcctcttgtcatttctcaccttttgggtaggagagatctagatatagcaat

SEQ ID NO: 6967 - DNA, 120 bp, synthetic construct
  source 1..120: mol_type = other DNA
gcccactttataaactgataaagccacttggctgatgtctgcaatgccatatttttcaaagtaccgtgcgttctctttatcaaggaagacacatacataagatagcagaccttctcttct

SEQ ID NO: 6968 - DNA, 120 bp, synthetic construct
  source 1..120: mol_type = other DNA
tgattataaagacaaatcccacagagaagttttatagaaatttaaaatgtctcacatattgtgcattccttgagttttcttttcccatcaggcaggcccaagtgcaggcccctctggagg

SEQ ID NO: 6969 - DNA, 120 bp, synthetic construct
  source 1..120: mol_type = other DNA
cctctgacctatcaaatgcatcccctgggggatctgaagagaacaagcgtgcatacatgaatttagtaaagaaactgaaagtaagtttgagatcagcctgtattatgagctcaagttgtt

SEQ ID NO: 6970 - DNA, 120 bp, synthetic construct
  source 1..120: mol_type = other DNA
gcatggagcccccttccccagcgaatttatttttcatggtcactttctatttttggcagtgagtgatacatgttatccactattggcagcaattggggggaaaaaaagttcattttaaaa

SEQ ID NO: 6971 - DNA, 120 bp, synthetic construct
  source 1..120: mol_type = other DNA
agcttctattttttttaaagagaaaaataacgattaaaacaagggcaggtttaaataatcgtctcctgagctgcacttcagtatctcaggtaacagctggagctgcctggtgggagcaca

SEQ ID NO: 6972 - DNA, 120 bp, synthetic construct
  source 1..120: mol_type = other DNA
acaaccctccttctcttcatagagatgctgtgaggagtagacatactgtctgtagggtctctcgcaggcatttaaagggtctcaataaacaggactttatattaataaaaatagcatcat

SEQ ID NO: 6973 - DNA, 120 bp, synthetic construct
  source 1..120: mol_type = other DNA
acattttgaatgaactctcccaaagatgataacaactaaggcatttttttaagtgaagtccaaacaaaacacgtctgcagactggatcgtgatcacagttggggcttctgcactagaatg

SEQ ID NO: 6974 - DNA, 120 bp, synthetic construct
  source 1..120: mol_type = other DNA
tctgactccaactttgagtaaagtgaggagaggagtgaggaagtagaagaaacgcatttgctgctcaccacatttgccagccccctgtaaggttaggcaggcccgtggatgagttctggt

SEQ ID NO: 6975 - DNA, 120 bp, synthetic construct
  source 1..120: mol_type = other DNA
tcctgggaacacggcaaatgatctgacctgcctagactcggttttagatggaccagcagggttgtcatgacaattcagtgagataaaaataacaacaaattagctaatttattggaacac

SEQ ID NO: 6976 - DNA, 120 bp, synthetic construct
  source 1..120: mol_type = other DNA
cacagcaaggtgattttaaggaatgcatatgagctgtattatgttcataattgactccattttcttgaggaaactgaggctaaaggtttatgtaacgtgcccactcacttagcacaatgc

SEQ ID NO: 6977 - DNA, 120 bp, synthetic construct
  source 1..120: mol_type = other DNA
ttttctgaccccattcccagaacaagctcacaccaagaaaaatgtatgaggatgttcatgacagtcatgtttataagagggaaaaactggaaaccatatacaggtcaattgataggggat

SEQ ID NO: 6978 - DNA, 120 bp, synthetic construct
  source 1..120: mol_type = other DNA
aatggatggatagatgagcatgtagtttagggtctgacacacagtaaacacccaatctgttagcaattgtgaaagtttacttcttctcaaagtctggggcaaggcaaaagtgttgagaaa

SEQ ID NO: 6979 - DNA, 120 bp, synthetic construct
  source 1..120: mol_type = other DNA
tcccatttaatcttcctatcaatctcatgaggcaggtgctattatgaggtccatttcacaggtgaggaagcaaacacagagaggtgaagcaatctgggcaatgtcacatagcaaacaaag

SEQ ID NO: 6980 - DNA, 120 bp, synthetic construct
  source 1..120: mol_type = other DNA
gacgacattgttaaagtgcatggatccacctgtgcctgaagccaatcctctgggctttttagtgacatgtctcaaagtaccttttcaccttagtcaattgaagttaggttttctgtcact

SEQ ID NO: 6981 - DNA, 120 bp, synthetic construct
  source 1..120: mol_type = other DNA
ttaggaaaacgagtggaatttcttgcttcaaggcttcagtcttagctgaacattttcatacacattttagcctcagctctttggtatgtggctaaaatgtgtatatggcaccctttagtg

SEQ ID NO: 6982 - DNA, 120 bp, synthetic construct
  source 1..120: mol_type = other DNA
ggaagacaagaggataaggaggaaggaggctgactttccttgcaaataccttttaaactgttcaaaattttttaatggacacactaattttaagtgaaacagaagccacccaggctggag

SEQ ID NO: 6983 - DNA, 120 bp, synthetic construct
  source 1..120: mol_type = other DNA
ccatcacttaaatagccaggcaaatgcggatgataaataattcaacaccagcttagctcagcgccaaggccattttatctggcccagatggttagatgggggccaccgctcattaattac

SEQ ID NO: 6984 - DNA, 120 bp, synthetic construct
  source 1..120: mol_type = other DNA
gcagaagaagggagacctgagggatgggggtcacagattgtgtttcttttaatttttatgatttagaagattccaacggaataaaagaatatcccgagtgtgatgatgtgttagtgtagg

SEQ ID NO: 6985 - DNA, 120 bp, synthetic construct
  source 1..120: mol_type = other DNA
ggttctggattcaggaagctgttgtgaggatcctatgagatggtggttgcaaagtgctcaacaggatgcttggcccagggtaagtgctcagtatcttttgagattattattcctgactca

SEQ ID NO: 6986 - DNA, 120 bp, synthetic construct
  source 1..120: mol_type = other DNA
cctcacttccttcagtctctgctcagatgtcacctttcagtgaggccttcctgggcctgccttcctgctgcatctcttctccatagaacacattccctctaatacttttttttttttttg

SEQ ID NO: 6987 - DNA, 120 bp, synthetic construct
  source 1..120: mol_type = other DNA
atatttgttgaagatgtttcttgagcacttgttatctgcaaggcacagttacaaaattgcacatgtattcctgcctcctttcatcttcacaaccacgtcttgaaacgggtgctaccatct

SEQ ID NO: 6988 - DNA, 120 bp, synthetic construct
  source 1..120: mol_type = other DNA
agccctgtttcatactctacatatcatcatctaaaatcaccttgtatatgtttccttgactctctgccccctgtcctcctgaccccccaaatggtaatcgacacaacacagaatctttga

SEQ ID NO: 6989 - DNA, 120 bp, synthetic construct
  source 1..120: mol_type = other DNA
gacaactggcaaaactggaatacagattgtttattagataatgatcatgtatttgggctcattatcctgaaattggttattgtactgtggtcatgcaggagatgttcttgcttacactca

SEQ ID NO: 6990 - DNA, 120 bp, synthetic construct
  source 1..120: mol_type = other DNA
aaaaaaaaagaaaagaataccgaatgaatgtttctgttcgtgatgctatttgacagtaaaggaagtcagggaactggtttgggcagtgggtatgtgtgcacacacccacactcacatcag

SEQ ID NO: 6991 - DNA, 120 bp, synthetic construct
  source 1..120: mol_type = other DNA
gttttttaaggttagcatccaagtaaaaagtttttaatcactgtgcagaccacagaagcatctctgaaggtcaactttggcccacagatcactagcgtgcatcaccattaaacagacaat

SEQ ID NO: 6992 - DNA, 120 bp, synthetic construct
  source 1..120: mol_type = other DNA
aatgtaaagcaataagcttaagtgttcaactgaaatacattatcttcctatgtttctccacttttcaggctctctgaagaattacctgggagctcttaaatctctggatgcccaggtgcc

SEQ ID NO: 6993 - DNA, 120 bp, synthetic construct
  source 1..120: mol_type = other DNA
catagcagcattattcacagtagccaaaaggcagaaacaacccaaatgtcggttgataggtgaatggataaatagaatgcagtatatacacacaatgtattcactcttaaaaaggaatga

SEQ ID NO: 6994 - DNA, 120 bp, synthetic construct
  source 1..120: mol_type = other DNA
tattttatgttatttattattttaccacaatttttttaaaaggcatatgaaggtcatttggcaaaaatgagtcaaagatagtgttgtataacaaagaatttgcattctgggcgggtgcag

SEQ ID NO: 6995 - DNA, 120 bp, synthetic construct
  source 1..120: mol_type = other DNA
cacttgtgtgaaggaactctagaaggatccatttgaaactaataaaactaatcaattatgagcagtgggaattggtggaaggggatgtgacaagaaaaggaaggagacttaccactgtta

SEQ ID NO: 6996 - DNA, 120 bp, synthetic construct
  source 1..120: mol_type = other DNA
taaaaatacaaaattagctgggtgtggtggtgcatgcctgtaatcccagctactcaggaggctgaggcaggagaatcgcttgaatctggggggcggaggttgtggtgagccaagattgca

SEQ ID NO: 6997 - DNA, 120 bp, synthetic construct
  source 1..120: mol_type = other DNA
agaaaatctggcaaaccccccaaaaataatttccagtgaaacatcatatactgtagagattcaaggaattcagtgcatatgggagtgaggaagagaagattctggaaaactgagcttggt

SEQ ID NO: 6998 - DNA, 120 bp, synthetic construct
  source 1..120: mol_type = other DNA
cagggagttatggagcatttgaaatgcggctggctcgaatgcagccacatttaatatagggtaggggagacactggattccagagtcagcatgagaaacaaaatgtaaaatatcttatca

SEQ ID NO: 6999 - DNA, 120 bp, synthetic construct
  source 1..120: mol_type = other DNA
taggatggtcaggaggattcagaaagatcacacacagaacacacttggtatcggtagaagtttgtaaaatgctacttgctacattctctccattattacgaggtatttcttattggtgtg

SEQ ID NO: 7000 - DNA, 120 bp, synthetic construct
  source 1..120: mol_type = other DNA
atagtgatatagtataccctctgcctgcagcttgctcttttttgtaacagtagatttcattcactaccagtatgtcccactctgttttagatgcatagatggcctttagatgaatgcata

SEQ ID NO: 7001 - DNA, 120 bp, synthetic construct
  source 1..120: mol_type = other DNA
cagagatgtttcatcacagtagtcagtgatatgccacatagagccagatgtccttttttccatcagattggcaattatttaaaggctgataactgcatgttggcaaggttgtggtaacat

SEQ ID NO: 7002 - DNA, 120 bp, synthetic construct
  source 1..120: mol_type = other DNA
tttctttgtaaacacagagacactgtagatgtgcatatttgtctctagttgtgagaacatacaaaataccatgaagggataataccaccatgctaacattggcttcacaggaagctgggc

SEQ ID NO: 7003 - DNA, 120 bp, synthetic construct
  source 1..120: mol_type = other DNA
cggccacagtgctttttcttgttacctcagccaattctaacagctgccctctaggaagatcctgctgttccccccattttgcagatgagatcgctgaggcacagagaaaacacacagatg

SEQ ID NO: 7004 - DNA, 120 bp, synthetic construct
  source 1..120: mol_type = other DNA
gctaaaagaaatgcacgtgtgcactgaaagatacgtacaagaatgttcacaacaacctcttcctaacagctccaaatgggggactactcaaatgtctatcaaccaggaatggataaacaa

SEQ ID NO: 7005 - DNA, 120 bp, synthetic construct
  source 1..120: mol_type = other DNA
tgtagagggaagtggtgggctgaggctggggagaaagtggagcgctcttttattcttccctgtaaattattctatatggcttgaattttttataatcagcacgaactacttgtaaaaact

SEQ ID NO: 7006 - DNA, 120 bp, synthetic construct
  source 1..120: mol_type = other DNA
actcacaagagcttcattcatacacccagtgagcaactactaatcctactgtgcgccaaagaccattctgggcactgaacagtcggcagtgaaaaaaacaaaaatccctgtcctcaagga

SEQ ID NO: 7007 - DNA, 120 bp, synthetic construct
  source 1..120: mol_type = other DNA
tgtaaaggtgcagcccacacactggattcagtccacaaatgtgttttatcaagggagttcctaaaaacaaactaaagcttccttcaaacatttggggaaactcacacaaaatccggattt

SEQ ID NO: 7008 - DNA, 120 bp, synthetic construct
  source 1..120: mol_type = other DNA
acaaaaagaaaaagtaaacccagaggaccacaaggttttgctctgtggaagcgaagccggcagctccatatcaaaagagcacggctgaagacaggataatcccatatgtaaatacacaca

SEQ ID NO: 7009 - DNA, 120 bp, synthetic construct
  source 1..120: mol_type = other DNA
ctacacatatgcacacacatatcataaatatacccacatgcccatatgtgtcaacgaatgactgccctttatcctagaactatgttgctctaatttcttggaggggttgaaatgtccttt

SEQ ID NO: 7010 - DNA, 120 bp, synthetic construct
  source 1..120: mol_type = other DNA
gaacgttcggttgtgcagtttttaacatacatttacaagaccagataaaaggttaaggtcccaagttgatctcccaaacattttgttttctgttctgtgaaatcccaaagtctggaagcc

SEQ ID NO: 7011 - DNA, 120 bp, synthetic construct
  source 1..120: mol_type = other DNA
gaggtcctgcggaagagtagcttaaataagaggatattattatgactgtcatcgtcaacaatagttcccatctgttatactgagcctaatctcatttcgtcttcagacaaacctgggaat

SEQ ID NO: 7012 - DNA, 120 bp, synthetic construct
  source 1..120: mol_type = other DNA
tgagccatgactgaggatatgattagaagccaagaaaggggtatcttgcatctaagtctaaggcctctctgctccttgtgtaggatctggaccaaaaaggatatccctacagcaagtgaa

SEQ ID NO: 7013 - DNA, 120 bp, synthetic construct
  source 1..120: mol_type = other DNA
ctgtaaaataaggataaaaatgcccacctctttaggctaatgcacagatatgaaagtgagcctatcagacacctggcctataatagctgccttcaaatggtggttggcaccgttctgcac

SEQ ID NO: 7014 - DNA, 120 bp, synthetic construct
  source 1..120: mol_type = other DNA
ttttttgttttgtttctgtttgtgttctcaagacaaaatgtctttaccgaacatttgctttggaaccaagaataacttgggccacatgagtagaaatgagtcgcccaccctggccctccc

SEQ ID NO: 7015 - DNA, 120 bp, synthetic construct
  source 1..120: mol_type = other DNA
taaatggaaggatagatcaatgaatctatgttggatggaaagatggatggaagggcagctagaggttggttggaaaccaaatgtaccaataaatgttgggtacatggatgagagaatgct

SEQ ID NO: 7016 - DNA, 120 bp, synthetic construct
  source 1..120: mol_type = other DNA
acacatgaagggatagaagatggataaatgaattgacagatgtcgggtgaatctatggaaaaactgatgggtgagtggatagacggaggttgacgaatgaatgctgagtagatataagga

SEQ ID NO: 7017 - DNA, 120 bp, synthetic construct
  source 1..120: mol_type = other DNA
tggtcaaaccagtagggctgggagctccctgctgcagagaatcccgaatctctgaaaatttgagatctaagagagctacaatttgagagctaagttttattttgttgtacaactcctttt

SEQ ID NO: 7018 - DNA, 120 bp, synthetic construct
  source 1..120: mol_type = other DNA
tcagcagtgtttatgtatgtgtgtgtgtttatgtgtgtgtgtatgcgtgtgtatgtgtgtgtatgcatgtgtatgtgtttgtgtgtgtgtgtgtgtgtgtgtgtgtgtgtgtgtgtgtat

SEQ ID NO: 7019 - DNA, 120 bp, synthetic construct
  source 1..120: mol_type = other DNA
agctttcctaggcaaataaaaacataaaacaacttagacatattaagaaaagccaggagctttataacaggagaaaaaaaggggtcttatgaatcttatcagatctactgctgcctgtct

SEQ ID NO: 7020 - DNA, 120 bp, synthetic construct
  source 1..120: mol_type = other DNA
aggttaaaagaaaaataattgtatatggaaagaatcccgtaaaaattttttgtcctaaaataaaatgattgatcatttacgaaagagagatgtttaggataaaacaggaagcatgttgta

SEQ ID NO: 7021 - DNA, 120 bp, synthetic construct
  source 1..120: mol_type = other DNA
ttcagagtttctctattaattaaacattaacatcaaaggcacactgatgcaagaccagcatctgggctcctgtgtcagattaacaaggttttcttgaagcattatcccaccctttaaaaa

SEQ ID NO: 7022 - DNA, 120 bp, synthetic construct
  source 1..120: mol_type = other DNA
tcttaaacatgggcttctgacaaccttagagattgtgccattggaatagggagaaaaacttccaggactgtcatggagaactgatgtattcatgaggactgctaatcccatcttgagcag

SEQ ID NO: 7023 - DNA, 120 bp, synthetic construct
  source 1..120: mol_type = other DNA
gctgggtgtgaggcttttaaaaaggtctagactcagattccttatggaaaagcttccagcaaagccaattttaaaaagaagagagagctcatatggcaaatgatcagtcttgctgcattt

SEQ ID NO: 7024 - DNA, 120 bp, synthetic construct
  source 1..120: mol_type = other DNA
tgtaaagtgctgatttactgtgcatgagagaaatacatcattgactatcgccctacccgttccttttctcttgtgacatggggattaccataccttccctctttctcttacagcccacct

SEQ ID NO: 7025 - DNA, 120 bp, synthetic construct
  source 1..120: mol_type = other DNA
aacgtcaagcatagacttactacaagacccagcaatgtaccctaaagaattgaaaacgttggatcttatacaaatgtatacactattattcgtaagcagtgtcagaggtgttcaaaccag

SEQ ID NO: 7026 - DNA, 120 bp, synthetic construct
  source 1..120: mol_type = other DNA
tactgattcatgctacgatgtgggtgaaccttaaaaacattaagcccagtgaaagaagccagacacaaaaggccacatattgtattaattcatttatatgaactgtccagaattgggaaa

SEQ ID NO: 7027 - DNA, 120 bp, synthetic construct
  source 1..120: mol_type = other DNA
actatgcccagcccaaaagggtgaactaaatgggatatgaattatattccattaaagaaaaaagaaaacagggtggtgtgagacagtgaggggggctggtttacaaaaggtggtcaagga

SEQ ID NO: 7028 - DNA, 120 bp, synthetic construct
  source 1..120: mol_type = other DNA
gtaagattcctgggcaccatttacctagtgccaactacacatcaggagctatacttggcattttccaaacgtttccttgtttggaaataatggctaacatttaatgaacgctgatggtgt

SEQ ID NO: 7029 - DNA, 120 bp, synthetic construct
  source 1..120: mol_type = other DNA
cccctgacgtatcgcatcttcactagatggaagagccatgaagggagggcgtgttgttcactccagcactcagaacagtggctggtctgaatgaatcatgtatgcagtcggtgctcaatg

SEQ ID NO: 7030 - DNA, 120 bp, synthetic construct
  source 1..120: mol_type = other DNA
cgcactgctaccactgtgcataaaaagcacgtggccttgccctagtttttgttttctggtttttgaaatagacacaaattcacagaattatttctcaacacaggaaaaaacagcagagga

SEQ ID NO: 7031 - DNA, 120 bp, synthetic construct
  source 1..120: mol_type = other DNA
gggaaagtcacttcatctttttaaacctcagctgtatgataagggtgatggaaattacctcaaggcttggtcaggataaagaaatgagacaagggagctggagagccttgcttattttaa

SEQ ID NO: 7032 - DNA, 120 bp, synthetic construct
  source 1..120: mol_type = other DNA
gtcacatggttctaagacttttgagtgttcagattaccagtataatgtgtgggaagactgagaattcattcttcctgtgaattaaaaattcttgcaaagccaggcgtggtggttcacacc

SEQ ID NO: 7033 - DNA, 120 bp, synthetic construct
  source 1..120: mol_type = other DNA
ttatgtaagagtaatttttaaaacatctgggagactgaggaggtatgaaaactaaaggcaatgtggtaacttggggccggatcctggaacaaaagaggacagtaatgggaaactggataa

SEQ ID NO: 7034 - DNA, 120 bp, synthetic construct
  source 1..120: mol_type = other DNA
aaaaatattttatgaaaaggagagctacagctatctccttgatttgaggctgtctttactttttctcctaaatcacagatgctcaatggagctggaaaacctttgggaccaggaggctgt

SEQ ID NO: 7035 - DNA, 120 bp, synthetic construct
  source 1..120: mol_type = other DNA
aaattgtggctgaacaaattaacgaagcatccacagatccctcaaaacattttaaaaggtcagtcttatggcacattcaggctaatgagacaatattctttgtgggctagcacataggcc

SEQ ID NO: 7036 - DNA, 120 bp, synthetic construct
  source 1..120: mol_type = other DNA
gactgtgtctcttagcaaaatggctaaaagaagaaaagaaaaggaacagcatgcaggtagccaggcttgattccaatgcacctactgaattggcttcaagactgagataaaattaatgtg

SEQ ID NO: 7037 - DNA, 120 bp, synthetic construct
  source 1..120: mol_type = other DNA
acttaacagcaacagcaaaatctttagagtagtgacataaaagtcttcacaagtatgactcctttctccgcaacaggagtactgacttctgttacagaagatgttaagtaacataaggag

SEQ ID NO: 7038 - DNA, 120 bp, synthetic construct
  source 1..120: mol_type = other DNA
aaccaatgtcaaacttcacaaaataaaaaacagtttgattcttttgctcaatttgctgccaacttctctgtttccatttgacccctgattcttttaagaagtttaggggccaggcgcggt

SEQ ID NO: 7039 - DNA, 120 bp, synthetic construct
  source 1..120: mol_type = other DNA
tccatgttccagcaatatagagttgttgtagataaactgttgatagttgtatttctggtcatgaatttgaaaggtgtcaggcagaaggggatgccagtgatagagggtgttaaattcagc

SEQ ID NO: 7040 - DNA, 120 bp, synthetic construct
  source 1..120: mol_type = other DNA
gggtataagcggtaataactaagtcttaatagtcaaaggaagcatacctgatatttcatttttccatccttgaaaaggcgcagtttacgctgtctagccagagtttcaccgtaaatatga

SEQ ID NO: 7041 - DNA, 120 bp, synthetic construct
  source 1..120: mol_type = other DNA
tgctgggcaaagaatgcaaacatcatgtttgagccctggggatcagggatgaactttcttcttagaagcaatttttccacaatctcatttgaatcaggaagctgctttttacctgaaaaa

SEQ ID NO: 7042 - DNA, 120 bp, synthetic construct
  source 1..120: mol_type = other DNA
acatatactctgcacattataatctggcaatattgatttttcaggtagccatctgctcactatccaagaggcctatgaaaggaatggctgagtatggcacccactttagaatcatggaaa

SEQ ID NO: 7043 - DNA, 120 bp, synthetic construct
  source 1..120: mol_type = other DNA
gcacttatactggtcaaatcccacactcatacatacacctcggttttgacatgggtgggaacagcaaggatttgctgcaattaaaggacagcaaataaatcattctctagtgtcttaatc

SEQ ID NO: 7044 - DNA, 120 bp, synthetic construct
  source 1..120: mol_type = other DNA
agaaccttcctttttataagactgaaaaccaagcccatgtgacgaaatgactgtttctttccgccttttcgtaccccccacaaatttttccctcctctccccttaaaaaaattgcgtaag

SEQ ID NO: 7045 - DNA, 120 bp, synthetic construct
  source 1..120: mol_type = other DNA
ctttgagtgactgtcactctgtcttttagtctccttcacctttctcactacagagaattagtaggattggggactccagaatgggaaagggatcttcggttgccctctcttctgacttta

SEQ ID NO: 7046 - DNA, 120 bp, synthetic construct
  source 1..120: mol_type = other DNA
tgcctcctgagacatctaattatatccttgctgccctgtcttctgaggtagggtcctatctttatctccctgacagatttgagggaaaccaaggcccgaatggtagaatcactcacccaa

SEQ ID NO: 7047 - DNA, 120 bp, synthetic construct
  source 1..120: mol_type = other DNA
gtcttgaactcctgacctcagatgatccacccatcttggcctcccaaggtgctgggattacaggtgtgagccaccacgcccggcctttttttttctttttgagacagagtctcaatctgt

SEQ ID NO: 7048 - DNA, 120 bp, synthetic construct
  source 1..120: mol_type = other DNA
taattcaggaaaagtttgagaatcaatgtggtaatgattgggctctctgtcgctgctttgcactctggctttgccatttgcctgcttcctaatttggggcaagtgatttttatttttctc

SEQ ID NO: 7049 - DNA, 120 bp, synthetic construct
  source 1..120: mol_type = other DNA
ttggagaggctgtcacttcactccctcactgatctcatccccatcctaaaagccactctcttacatcagcctgggttattttttctataacacctatcactgacattaacattacatatt

SEQ ID NO: 7050 - DNA, 120 bp, synthetic construct
  source 1..120: mol_type = other DNA
ggcagatgctcaaccaaagtctgttaaatgagtgtaaggcccagagcataaggcctgggagccagtaaagtgcctaataaaaacagcctataccattactatttttttttttgtttgttt

SEQ ID NO: 7051 - DNA, 120 bp, synthetic construct
  source 1..120: mol_type = other DNA
tattaaaacaacacgcaaaagagagaatttagagaaagatgagcttaaaaagcaatttaacttgagcaagtttccaccttccagtggatcactttgcagaccccacttgggaggcctctg

SEQ ID NO: 7052 - DNA, 120 bp, synthetic construct
  source 1..120: mol_type = other DNA
ttatttttaaaagtttttcaggtaacaagactgaattattatggggtgttttagggggaaggaggccctcggcgggggcgggggaggatgggacagggcctgagatgcggagggcatctg

SEQ ID NO: 7053 - DNA, 120 bp, synthetic construct
  source 1..120: mol_type = other DNA
acgggttagtggggagggttagggttagggaagtttctatggagtctgggtgggtctgaggtgtttgagggaggaggcacagaagaggtgttttcgtgatgttggtctagattcagtgtg

SEQ ID NO: 7054 - DNA, 120 bp, synthetic construct
  source 1..120: mol_type = other DNA
aggaaactagaagacgggttcattctcctgagtgatttccagccaaggtgaaggcagcagagaggacagagtgggctttggggaatataaaatgctccatccataggcatctcagagata

SEQ ID NO: 7055 - DNA, 120 bp, synthetic construct
  source 1..120: mol_type = other DNA
ggtcctgactcccaatttcccatttcctgacccctgacatccaattttctgatttctgacctcccattgcccgacttgatcatttcctgatctgtgatctctgatgactctgtctcccat

SEQ ID NO: 7056 - DNA, 120 bp, synthetic construct
  source 1..120: mol_type = other DNA
aaaaaaaaaaaattaaactccttagacaataagcatagactatgatctcagcccctcaaacccagacccccaaattcaaacctcagatccccaaaccaagactccaatcttcagccctcc

SEQ ID NO: 7057 - DNA, 120 bp, synthetic construct
  source 1..120: mol_type = other DNA
cctcaaccctagaactcagactccaacaccagtgaacattagacctccacctttcaccacacacacactctgaccccaacctcaaaagtccaaactcagaaccttaaatgacagactcac

SEQ ID NO: 7058 - DNA, 120 bp, synthetic construct
  source 1..120: mol_type = other DNA
cagaaaaggtcttgagggaagatctgataaagagactgaagggtctcgagggaaaatcagagcagcctgagagagagatgaaaatctcggccaggcgtggtgacttcatgcctgtaatcc

SEQ ID NO: 7059 - DNA, 120 bp, synthetic construct
  source 1..120: mol_type = other DNA
aaaaataaaaaatgaagtctctctggagtcctgtgggaaaaggaggtttggggggtttttgagggagagattgggggccctgagtaaaatgatgggggaatttaggggtctggaaaaacg

SEQ ID NO: 7060 - DNA, 120 bp, synthetic construct
  source 1..120: mol_type = other DNA
ggggtggtgcttgagaccttgggagtttgaggatgagactgagagaaagatagagactgggagagaaactgagactgagagaaacagcaaaaaagacaaagggatatatctacatggaga

SEQ ID NO: 7061 - DNA, 120 bp, synthetic construct
  source 1..120: mol_type = other DNA
tgattttttgccccaagcaactggaaggatggaagtgctgaaacagcctcattgtctggagtatcacccaaggtttgtggtctcacagccacagagaacaaggacgcagacacacaaaga

SEQ ID NO: 7062 - DNA, 120 bp, synthetic construct
  source 1..120: mol_type = other DNA
aataatttttttctacctcttgtatcagtgccatcaaccaagttaggggacagtcagtgttggctcagaaggacagggatcttaggctttactgccagtgcctagaacagagccacttac

SEQ ID NO: 7063 - DNA, 120 bp, synthetic construct
  source 1..120: mol_type = other DNA
tgagcaacctgccctccctgctggggtgactcctgtgctgtcccatgctccgggcatccatacacttggcctctttcatctctacctctgttgcccacacccttgtctaacatatacatg

SEQ ID NO: 7064 - DNA, 120 bp, synthetic construct
  source 1..120: mol_type = other DNA
ggcggggccacggcgctgggcggggcagggcctgagggacctggggaagtagggtctgagaagggggcggggcaggagaaggagccggacaggaaccccagccagtgagaacacgatggg

SEQ ID NO: 7065 - DNA, 120 bp, synthetic construct
  source 1..120: mol_type = other DNA
ggcagagccggtcagtgtgatgccactttggttgtgctctccactttgaggcactgctcctctcactactgatctaggccccaggatgcagatacaacaattgttttgttttgtcttgtt

SEQ ID NO: 7066 - DNA, 120 bp, synthetic construct
  source 1..120: mol_type = other DNA
aggatggagagaaaagtgcaggaaggggaagtataaactcagtcctggtgttaataaggactgaattatcatagactgaatctcatattggggatagagtcagagaggacaagaatagat

SEQ ID NO: 7067 - DNA, 120 bp, synthetic construct
  source 1..120: mol_type = other DNA
tgtacgccactcccactggctttcatctccacacaggggtctcaaacaatgactcttaagttgattctgggccacagatgtgcttggttagatctctgaaatgttttttttttttttttt

SEQ ID NO: 7068 - DNA, 120 bp, synthetic construct
  source 1..120: mol_type = other DNA
taaaatttcatcttgattcctgtgtctctcactggtcgtttcagtctgccttctgacctcttacctcactactccagtatctccttccttacattgctgataccttatcccaactcatgt

SEQ ID NO: 7069 - DNA, 120 bp, synthetic construct
  source 1..120: mol_type = other DNA
agcatttctaagtctctgaccatacaccttggggttctcaggatcctgactccctgaaaaggtcaacttttgaccttttagtcctcatttcccaagaccctaaccccagagcttctagat

SEQ ID NO: 7070 - DNA, 120 bp, synthetic construct
  source 1..120: mol_type = other DNA
ccttcatttcagagctacgggagcatccaagggagcactttccattagggtttccaggatgcaatctccacaggagcctccaatatctgtcccttttctcttgttatcattggttctgtg

SEQ ID NO: 7071 - DNA, 120 bp, synthetic construct
  source 1..120: mol_type = other DNA
tgatccagtcctttcccaatcaccccaagctctccgaatgtccattcagtggtgtttatgtttatttcataattgtaacagatgctcagtgacttctcaaatgaccttcttattggtctc

SEQ ID NO: 7072 - DNA, 120 bp, synthetic construct
  source 1..120: mol_type = other DNA
ttttaatatttacaaatttagacaattttttaaaaggagtgagagaggtggggagctgccctagaagctgggaacctcgttgtttaacagatggagaaactgagcacagagaggcaaagg

SEQ ID NO: 7073 - DNA, 120 bp, synthetic construct
  source 1..120: mol_type = other DNA
tttgttcctccgtgaggaaaaggggataacaccctgatatctgatagcattgttcattgttgtgaaggtaagatgaatggatataggcaagatgcttagtccagtcctgattaaacagta

SEQ ID NO: 7074 - DNA, 120 bp, synthetic construct
  source 1..120: mol_type = other DNA
agatgtgagccactacggctggccctggataattccttaattctgagaatgctaagccctcacccatctgagtgtcaaccctggagtcaaggcgagggatggggagcagggctgctggat

SEQ ID NO: 7075 - DNA, 120 bp, synthetic construct
  source 1..120: mol_type = other DNA
gcagaaagagagagaaagaaaaggtggggatggaaagagagagagatgcagaaagagacagggagacaggagaaagtggcagacaggaaaagacagacatagttagttatacagacaagg

SEQ ID NO: 7076 - DNA, 120 bp, synthetic construct
  source 1..120: mol_type = other DNA
tggtaagaggtgagaatctggaggtcgttggagtcgtctaagtaagggatcctgaaattataggtgagcagttacacgtcctgagttcagaggtcaaggactccagacccaggagtttgg

SEQ ID NO: 7077 - DNA, 120 bp, synthetic construct
  source 1..120: mol_type = other DNA
cattgatgtcaaagcccttgctagggtcccaggatcctagggtcagaagccagggatctcaaaacttattctaaaatttcatagaactgcaacattatatcaaaggtcagaaacgccgaa

SEQ ID NO: 7078 - DNA, 120 bp, synthetic construct
  source 1..120: mol_type = other DNA
cccttcattctaatcaaccctgatcttgacccttaaccccagaccataactctgaccagttcactgagctggctttttccttctgtgtctctgccagtatccctgttttctgagaattct

SEQ ID NO: 7079 - DNA, 120 bp, synthetic construct
  source 1..120: mol_type = other DNA
cagccaactgtccatccatccatccaataaccatctgcccatccaacaaccatttatacaaccatccttcccttcttccctctatctgtcatccatttatttatgcttgcccctacttac

SEQ ID NO: 7080 - DNA, 120 bp, synthetic construct
  source 1..120: mol_type = other DNA
tggtctgcataatgctagccatggcaacagcagagaacccaggcagaagggatgagacacagagattagtggggagaaaaattcctgtgatcatggatgcaaatgtgaggaaagatggag

SEQ ID NO: 7081 - DNA, 120 bp, synthetic construct
  source 1..120: mol_type = other DNA
agatgtggtggcacatgcctgtaattccagctacttagggggctgaggcaggagactcgcttgaacacgggagatggaggttgcagtgagccaagattgcgcccttgcactccagcctgg

SEQ ID NO: 7082 - DNA, 120 bp, synthetic construct
  source 1..120: mol_type = other DNA
gggattccattcacagaaagttcaagaacaggcagagcggatctgtggtgtgctcagttgggaaattggttactatgaaagaataactcagagacattgttagttactttgaatgcaaat

SEQ ID NO: 7083 - DNA, 120 bp, synthetic construct
  source 1..120: mol_type = other DNA
aaaaaaaaaaaaaagattctgagaacaaagaatcttgtatgcacagttttagggcaaattcattggctggcaaggagtacctaggttcatcttggcaactggtccttggagaggtcaacg

SEQ ID NO: 7084 - DNA, 120 bp, synthetic construct
  source 1..120: mol_type = other DNA
tcaaaaaaaaaaaaaaaagcattgaagttgagctgcctggttactggttacagaatgacagagtagattgttagatggatgtagggaggttttggaagttaccccaagtgattccagtgt

SEQ ID NO: 7085 - DNA, 120 bp, synthetic construct
  source 1..120: mol_type = other DNA
accgagagattctatcatgtctccaatgaaccccattattttcctgggatgccctaatgtccccaagaatatataattgggtaccctagtatctatatggagaactctattatccttgag

SEQ ID NO: 7086 - DNA, 120 bp, synthetic construct
  source 1..120: mol_type = other DNA
cttgcagtgtacaaaacagtgccgcacaatgaagaattgtccttttccaagtgcatttagcacctatacgagaaatgcatgtgggaaatgctgacttagggggacccccatataacccag

SEQ ID NO: 7087 - DNA, 120 bp, synthetic construct
  source 1..120: mol_type = other DNA
ctggggatccccaaagccatgatataagccaatatagactagggaccccaacatttgggctcactcatataaacacaataccctcaatgtaatacctactctaatatattactgggaaca

SEQ ID NO: 7088 - DNA, 120 bp, synthetic construct
  source 1..120: mol_type = other DNA
tttcaccactctatgccttctctcctatggaggtgctatggttttccatcagtagaatgggggtaaaaattatacctacctgatatggaggatgaagtgagttaatctgtgtagacctta

SEQ ID NO: 7089 - DNA, 120 bp, synthetic construct
  source 1..120: mol_type = other DNA
ccctggtatttttcttctcctcctcctcctctttatgcatttctcctattccattttctccttttccttctcatcctgtttcatctcacccttctccttctctgtcatctcattctctct

SEQ ID NO: 7090 - DNA, 120 bp, synthetic construct
  source 1..120: mol_type = other DNA
ttgaaggagctatgtagataacaccctgtacccaccacctggaatctactatcaatgttgtagatattggctttatcacatattcacctacctgtccattaatctaaggtgggtttgtac

SEQ ID NO: 7091 - DNA, 120 bp, synthetic construct
  source 1..120: mol_type = other DNA
cctggctaaagctttatgttaaatggagaattaaaaacgtatacaagaatggaatagtataatgaactgccatgcccctgtcacacagcttcaactgtcacccactcacagccaatcttg

SEQ ID NO: 7092 - DNA, 120 bp, synthetic construct
  source 1..120: mol_type = other DNA
agtgctgggattacagtgtgaggcagcatgctcaaccttatttatttaattatttattttaatttattaagacagagtcttgctctgtcacccaggctggtgcgcagtggtgccaaccgt

SEQ ID NO: 7093 - DNA, 120 bp, synthetic construct
  source 1..120: mol_type = other DNA
taaataaacaaaattaaataaacccagagtctcagaccccttcccatgcctgccaaatcagaatctgtattttgacaggatcccaggggcttcctgtgtatattaaatctggagagggct

SEQ ID NO: 7094 - DNA, 120 bp, synthetic construct
  source 1..120: mol_type = other DNA
tctctgggttttgaatgagtatgcttgggagagaaatgcgaagggcattcccagtgcggggtgtgatgtgtgcagagacagatgacaggttgctctgggaaagttggaggaggttggcct

SEQ ID NO: 7095 - DNA, 120 bp, synthetic construct
  source 1..120: mol_type = other DNA
atgcagggaggctttaagaagaatcccgtggatatttcaaacccaccccaggggacccagacacacctagggccacagatgcgttcacatggatggcagggttactcttaagaactctga

SEQ ID NO: 7096 - DNA, 120 bp, synthetic construct
  source 1..120: mol_type = other DNA
aaatgctaagcactttactatgtgctaggtgtggttttaggtgctgggaatataacaaacaaaagcagaaacaaaacaggcagaaatgtcctgcccttggaatttacattctaatggcac

SEQ ID NO: 7097 - DNA, 120 bp, synthetic construct
  source 1..120: mol_type = other DNA
ttcttctcccacattcccaaaactccagagatacatgcatcaatcctcctctatttatgcatccaaccacccattcattccctcctctatacatccatccacctttctttttattattat

SEQ ID NO: 7098 - DNA, 120 bp, synthetic construct
  source 1..120: mol_type = other DNA
catcttttcattcattcatacagcagtccatctaccattccatctgttcatctatccacctacccatttatgtattaatctatctttccttccgtaggtccaataatcatctcctcccac

SEQ ID NO: 7099 - DNA, 120 bp, synthetic construct
  source 1..120: mol_type = other DNA
aacttttcatacacaaacctatccagccatgtggccaaccatccccccaccctcatggctattcactaatttatctatttatccacatattcatttacttcctcatgcatctatcaaccc

SEQ ID NO: 7100 - DNA, 120 bp, synthetic construct
  source 1..120: mol_type = other DNA
cacagtgaagaaccgagactttgtcctgtaggtgatgggcatctttggcgatgaggatgtgaaacagatcttgaagatgattgagcctgaggtcttcactgaggaagaagaggaggagga

SEQ ID NO: 7101 - DNA, 120 bp, synthetic construct
  source 1..120: mol_type = other DNA
tgacccctgacgctggccacttttactgtctaaaccccaacctcaacatctcctgactctgatcactgaggaccctcaacctctaaacccgtgcttgacccctgaccctagtgatacatt

SEQ ID NO: 7102 - DNA, 120 bp, synthetic construct
  source 1..120: mol_type = other DNA
acagttagacaatgcgtgtttatatgggtatttgggtggatggctataagccagataaatgaatgggtatgtgaattgatggatagaagaagtgggtaaaaaatggctggctggatagat

SEQ ID NO: 7103 - DNA, 120 bp, synthetic construct
  source 1..120: mol_type = other DNA
tttaattcttcagacatggtttcctttagttctttgaacatatttgcaaaattgatttaaaagataaatgtttgatagaatgaataaatgaacaaatacatgaacatacaaagaaataaa

SEQ ID NO: 7104 - DNA, 120 bp, synthetic construct
  source 1..120: mol_type = other DNA
atgagaggattaccatgctgagggattagacaagcagctatcattaatgttgggccaatgtgttattttgcaaactgtatattagccacatctaacaaggacagatttcctgacgttggt

SEQ ID NO: 7105 - DNA, 120 bp, synthetic construct
  source 1..120: mol_type = other DNA
ctggtatcttgcagttgtacagtttattattcctattgaaatttttaggaagcccttgtgggctggatattagggtgaacagaacagagagattcttgggcgaatagaaaaaagtttgcc

SEQ ID NO: 7106 - DNA, 120 bp, synthetic construct
  source 1..120: mol_type = other DNA
ggagagccaagcctactctgaagggttgtgctgtggcttcagtgagctcatgcgaataataataattatggtagcagtattgagcactcattgtcaaataaatctcattcacacagtaaa

SEQ ID NO: 7107 - DNA, 120 bp, synthetic construct
  source 1..120: mol_type = other DNA
aacatggcaaagatctctgccctagaggagcctgccttgggtgcacgcctcagtctccttatgagggaaacagggacccttcctcccacagtggctgtaggaattttttttttttatttt

SEQ ID NO: 7108 - DNA, 120 bp, synthetic construct
  source 1..120: mol_type = other DNA
tttccaccagctcactcattcaacaaacactccctctcaactgtggttctggccctgtaatgagtaatgctggggacacaatagtgaccccaatagtgacagcccagagtggtcagagct

SEQ ID NO: 7109 - DNA, 120 bp, synthetic construct
  source 1..120: mol_type = other DNA
gttagctgctgttatattatcattcaacaaatatgtagtgttagcttaccatatgcaaagcagtagcaatatgacagtcaaaaatccctgtctggccaggcaaagtggcttacatctata

SEQ ID NO: 7110 - DNA, 120 bp, synthetic construct
  source 1..120: mol_type = other DNA
atggagttgctgtagtttacaggcctctgacaggaccagggctaatgggccgagggatcagagctgaaccggactgaggagccgcagggcagggcagggcagggcagagggctgagcccc

SEQ ID NO: 7111 - DNA, 120 bp, synthetic construct
  source 1..120: mol_type = other DNA
tgcagctttggtgaggaaccgcctgaagaaaaccgggtgcacctgggacacgccatcatgtccttctatgccgccttgatcgacctgctcggacgctgtgcaccagagatgcatgtgaga

SEQ ID NO: 7112 - DNA, 120 bp, synthetic construct
  source 1..120: mol_type = other DNA
agcagcagcagctgcttttgtttttcttgggattgtggacatatcataatccccaataccatcatcaagatagaaaatgaaaacgaagaaacactgaattccgatgaagggtgagtagga

SEQ ID NO: 7113 - DNA, 120 bp, synthetic construct
  source 1..120: mol_type = other DNA
agaatgtattacaggaagaaagatgagggttagagaggagataagcgtgcagaccattgatatttacagaagagccaaatctgtaatggggttcattaatctcatcgaccagttgtgtgt

SEQ ID NO: 7114 - DNA, 120 bp, synthetic construct
  source 1..120: mol_type = other DNA
cagcgtccccgtagaaatctcttagcatccttatttgcatactaggattcccagaacattcactttgcttcattgatgcctctagcgttccctaattagcatttaatttgcttaacagtg

SEQ ID NO: 7115 - DNA, 120 bp, synthetic construct
  source 1..120: mol_type = other DNA
aagcacagattgctgcatccatatgcccatttactcactacatacccatggattaatattagcacgcttatttgtgtaaagcaataccagacacaaccagctctagtttaatgcccattt

SEQ ID NO: 7116 - DNA, 120 bp, synthetic construct
  source 1..120: mol_type = other DNA
tgatttgagcatacaattgggactgacatttgggtttcaaggagagggaccataattcaggtttggggttcagggaggagggctgatgattgcagtgtgtgagtttgaggtcctgggggt

SEQ ID NO: 7117 - DNA, 120 bp, synthetic construct
  source 1..120: mol_type = other DNA
agagtgggtttgattccttggctgtagtaagacttctcggagactcaagtgtctaatgggataaggagattgggtttgggaggctctgttacagagcaggtaagagacttgagttggaat

SEQ ID NO: 7118 - DNA, 120 bp, synthetic construct
  source 1..120: mol_type = other DNA
tgaaactcggtttctccatctgtagatgggaataataacagcgtttaccaccatggggtaatgagatgagcaccagcaagcaatgtttccgttattcgtatcttctttatcaccataatt

SEQ ID NO: 7119 - DNA, 120 bp, synthetic construct
  source 1..120: mol_type = other DNA
gtacagcagtgaagatgacaaatgacccctgctctcctgcaactactcctatgttggattcaggcaattagcatcataaataactaaatcgtttagtgttagaaggtgatcagtgttatg

SEQ ID NO: 7120 - DNA, 120 bp, synthetic construct
  source 1..120: mol_type = other DNA
agaactgggcagatttctggatctattttgaaggctgaggctgctggggtgccccccagtgcctcttacaggccactaagaattacagctaggccctacaatcccctccagtttccctta

SEQ ID NO: 7121 - DNA, 120 bp, synthetic construct
  source 1..120: mol_type = other DNA
catttattgcagattaactcagtgccatgtattcaagtttagaatgaaaagcacttatggtgggtgaggaagggcatgttccatgaccttaacccattccagtttgttttccccattgtc

SEQ ID NO: 7122 - DNA, 120 bp, synthetic construct
  source 1..120: mol_type = other DNA
atcctgctccctttgatcaaccagtacttcaccaaccactgcctctatttcttgtccactccggctaaagtgctgggcagcggtggccacgcctctaacaaggagaaggaaatgatcacc

SEQ ID NO: 7123 - DNA, 120 bp, synthetic construct
  source 1..120: mol_type = other DNA
agtctctctctttggtaagtggctccacaccttcggtcttcctccctaatctttctcttccccaccctgaagaaatagctcccaggttctgccttaatttgaacaacctttgttgttttc

SEQ ID NO: 7124 - DNA, 120 bp, synthetic construct
  source 1..120: mol_type = other DNA
tgggtgtttgaatgtgtggatttcttgctgtaagcaaagcatgcagtcagtaccttggcaggtggcaaatgagttaatgaggacgcgagctcagcagctctaacaaaagaccctaagtgg

SEQ ID NO: 7125 - DNA, 120 bp, synthetic construct
  source 1..120: mol_type = other DNA
ggtaacctcatcccttaatgttcatcagctggctttcctagaataggaaccttctcttgtgtaaccacggtatcattatcatacctaacctaaccatatttaaatttccctcattaccca

SEQ ID NO: 7126 - DNA, 120 bp, synthetic construct
  source 1..120: mol_type = other DNA
aaaaagatagcctaaaattgcagcaatattgcagttctgtttgcatttttctggaggaagtacccctcactttcattatagagggccatgagtcctctccacggaagaaacaacatctag

SEQ ID NO: 7127 - DNA, 120 bp, synthetic construct
  source 1..120: mol_type = other DNA
tgtcttaaaaaacaaaacaagtggcacacatggatgaatggcagctctgtcccaaagggttctgggaggagccgtttctatggagatggggctgggacccaggaccccaaagagggggac

SEQ ID NO: 7128 - DNA, 120 bp, synthetic construct
  source 1..120: mol_type = other DNA
tagcaaaaccccatccatggaatttggagctatggaatttattttagtgatggtgacatttgagggcatcatcaagcttggagacatagggtgaggggtatttgagcataagaggattga

SEQ ID NO: 7129 - DNA, 120 bp, synthetic construct
  source 1..120: mol_type = other DNA
gctcccttggcagatggtctgaaagggagacccatggtcccctcggagttgggaggagtcagagtgtaggttttttcagcatcaaaagaccaggggtcagctgggcaccgtggctcacag

SEQ ID NO: 7130 - DNA, 120 bp, synthetic construct
  source 1..120: mol_type = other DNA
tcaaaaaaaaaaaaaaagttaggtaacaggtgaggcgtctgttgttgggggtcagaggtcagggatttgtgccaggctggggtcacaggatagggactgggtcttaggttcaggttaggg

SEQ ID NO: 7131 - DNA, 120 bp, synthetic construct
  source 1..120: mol_type = other DNA
agctgtgagccaatgcagctggccagtgtgattttttttaaatcattctcctaatgctggacatttagattgtgtcgatttctttgtcactatgcacaacaccgtaaggaatagtttgct

SEQ ID NO: 7132 - DNA, 120 bp, synthetic construct
  source 1..120: mol_type = other DNA
aaattgtggtttattcatacaacagaagactccacggcagtgggagtgaacaagttgtttctatgcacaatgtgattggctttcacaaatgttaggtggaatgaaagaagccagaaaacc

SEQ ID NO: 7133 - DNA, 120 bp, synthetic construct
  source 1..120: mol_type = other DNA
tgaaagaaaaaattttaaaaagtttttagcctagaagttagaatatggatgatttttcaggaggaggaagggggagtggctgggaggggccatgatagtacttccagggaccagaaatgt

SEQ ID NO: 7134 - DNA, 120 bp, synthetic construct
  source 1..120: mol_type = other DNA
acagagaaaaaaaatttttttaatgttcatctgcatggccagatgaccctagaaaccccatccctctgactggatgtctcctggtccccatctcctcctccaagatctctctctgggcag

SEQ ID NO: 7135 - DNA, 120 bp, synthetic construct
  source 1..120: mol_type = other DNA
cctctccattttcctcttctccaagcctctctctcctcccatttccctcctcctcctcctccccattttccccctcttccatttctttcttcctctccccattaccccatttcctgcttt

SEQ ID NO: 7136 - DNA, 120 bp, synthetic construct
  source 1..120: mol_type = other DNA
tgtctccttgtctttttcagtctctcagtgtctttttcttgcaacttctcttgtcgcttgaactctttgtggacctgcatctttgtttcattcttgagaacttggttttgggatgtgaag

SEQ ID NO: 7137 - DNA, 120 bp, synthetic construct
  source 1..120: mol_type = other DNA
cataactccccaggatccatgaaccccaagcccgggactgtacccaaacctctgaggtctcaactgtcctggagaccaaaatacccgggctgtagaacctcttaagcttgctgggatatc

SEQ ID NO: 7138 - DNA, 120 bp, synthetic construct
  source 1..120: mol_type = other DNA
aaccttcaccttcagggaaaggtatgcctccttcctctgcaagcaaaagaagcaagtcagaaagtaaccacaatattagtgaaggtttgagcatttaccaaagaccaggcattgaagaaa

SEQ ID NO: 7139 - DNA, 120 bp, synthetic construct
  source 1..120: mol_type = other DNA
aggatggaaacttaggtctggaggcggagtcaggaccctgactctgttggtggagacaaggttttccttctgccgtgtgagtcttaacctgaatatggacttcgacacagctgggcagtt

SEQ ID NO: 7140 - DNA, 120 bp, synthetic construct
  source 1..120: mol_type = other DNA
ccacatcaaggggtatagaaatgccagctcctggcttgagtagaaccaaagtagggcgcaggatgtgggaaaagagaaaaaaaaatccagaccaacagggacatgggggcagtgacagga

SEQ ID NO: 7141 - DNA, 120 bp, synthetic construct
  source 1..120: mol_type = other DNA
agcggggatatctatatcctctcacttaaccgccacactgtgagacggattattgcatctcctttgtgtggataagggaatgaaggcacagggatttatttttcattttgtttatttatt

SEQ ID NO: 7142 - DNA, 120 bp, synthetic construct
  source 1..120: mol_type = other DNA
agccttctttggtctctttatctctctggtgagcttccacacagatctcattggccagaaattctgacataaggccatctcgggctgcaaggtgatgaagaatttgagcatcccattttg

SEQ ID NO: 7143 - DNA, 120 bp, synthetic construct
  source 1..120: mol_type = other DNA
gaacaaaataaacaaacaaaacaactcccagaatggattttactggacagcatggacaacatgaccatttcttacctgtcatcatggccacacagataaaagtcctcatcggccatgcat

SEQ ID NO: 7144 - DNA, 120 bp, synthetic construct
  source 1..120: mol_type = other DNA
tgagcagaaggataaaaggagcctgccagttgaagaaaaagagaaaaatgttctacgtagggagaatagtatatgccaaggccaggcagcaagaaagagctagtaaacatgcaattcacc

SEQ ID NO: 7145 - DNA, 120 bp, synthetic construct
  source 1..120: mol_type = other DNA
atctagcagtagatccaacagctactataattgagaagtagtgatgaacataactgatatttaaagacatctttgagccattgtgagtgagtctctcttcctggaccaaaagagcagaat

SEQ ID NO: 7146 - DNA, 120 bp, synthetic construct
  source 1..120: mol_type = other DNA
tccccttgtatacctgccttgcaatttctcactcatccttcaatcacgatcacccctgcatgcacaccttggcacactcttaaatccccttctctcacatcccttgggatggctgttttc

SEQ ID NO: 7147 - DNA, 120 bp, synthetic construct
  source 1..120: mol_type = other DNA
acaataagggaggcaaaatgtcatagacttgaagaatgagttgcattatgaattccagacagtggaaccaaaaacttgagaatttaaggggaacttggcagtgggagatttaggagctct

SEQ ID NO: 7148 - DNA, 120 bp, synthetic construct
  source 1..120: mol_type = other DNA
atcagccactgagaatacatgggcctgtgaacaagtctcttaccttccctaagcttcactttccccatgtgtgaagcagaagctagagaacatggtaaagatctctttccagctggatat

SEQ ID NO: 7149 - DNA, 120 bp, synthetic construct
  source 1..120: mol_type = other DNA
tgtcccctcccttccacctaggagagaaggtcatggcggatgatgaattcacacaagacctgttccgattcctacaattgctctgtgaggggcacaataatggtgaggaggaggggtgtg

SEQ ID NO: 7150 - DNA, 120 bp, synthetic construct
  source 1..120: mol_type = other DNA
tacccaatgccatttcctataacaaacatgtacagtctcaagattgtggttataacctttagcaggtgattaggaaaccacagactacccggaaatcaactttcgtgacaagaattggag

SEQ ID NO: 7151 - DNA, 120 bp, synthetic construct
  source 1..120: mol_type = other DNA
gcatgtcttgaggagtcagtgctattcaaagcagacaaaaggtttgtctctcacttatttgcacatgtctataacaggtgttgtcagttgccagaattttttttacaggagctgtgtatc

SEQ ID NO: 7152 - DNA, 120 bp, synthetic construct
  source 1..120: mol_type = other DNA
taataaacccccaactacccatcactcagctttaacagtttgctttcacagaacaatgttttttaaatagtgggaaccaacccatcagacagacgttcatgaatcagtttcacgcagagg

SEQ ID NO: 7153 - DNA, 120 bp, synthetic construct
  source 1..120: mol_type = other DNA
cccaaggccggggactgttttttttttttttactactgtatccccagagcctagaatactgcatgacacatagtaagaacgcaacaaatttgttgtagcaaagaggatgtgacaatctta

SEQ ID NO: 7154 - DNA, 120 bp, synthetic construct
  source 1..120: mol_type = other DNA
ttacaggcgtgagccacccggccagtatttttagacaaatgaataaatgatcatccatctttctctgtcacatagtaagtacttgatagttattaaataaattgatgatgatatgctttc

SEQ ID NO: 7155 - DNA, 120 bp, synthetic construct
  source 1..120: mol_type = other DNA
agcgacttctactggtactactcgggcaaggatgtcattgaagagcagggcaagaggaacttctccaaagccatgtcggtggctaagcaggtgttcaacagcctcactgagtacatccag

SEQ ID NO: 7156 - DNA, 120 bp, synthetic construct
  source 1..120: mol_type = other DNA
gggctaattcatccgccaccatctagtctaggttgcaaaagctagaaatccagtgcaaagtggtggcttaagaaaaataaagaatttatcagttcatattacagatccagggcttagagt

SEQ ID NO: 7157 - DNA, 120 bp, synthetic construct
  source 1..120: mol_type = other DNA
aagaaagaaattaccactttgtgagccaaaagtgatcacatgttggcaattttatgtgactcaacctaacataaataggggccatgaggcaaaactttgtattggaggtttctatgggcc

SEQ ID NO: 7158 - DNA, 120 bp, synthetic construct
  source 1..120: mol_type = other DNA
ggaacagtaaagaggttcagagaagcctgagaatggccccctgagacccgggagaccctaatcctcaaccccatctgacatcgtgtcaggatccatgggttgatgaagaagccataatag

SEQ ID NO: 7159 - DNA, 120 bp, synthetic construct
  source 1..120: mol_type = other DNA
ctctgagttcaaatccattctccccactttactggctatgtaactttgagtgcatgactttctctatgtctcagtttctcttcctaaaagtagagtcacacacttccctttttgtgtgat

SEQ ID NO: 7160 - DNA, 120 bp, synthetic construct
  source 1..120: mol_type = other DNA
cataacattatcattattgtgaataggcatcagttattccatcaataaacattggctggctttcttctctgtgtagggcctgtagtgacactattgacgcatcaatgaccaagatagaca

SEQ ID NO: 7161 - DNA, 120 bp, synthetic construct
  source 1..120: mol_type = other DNA
acctcgcctagccaatttccctttactttgaaacacttcagcgtgtatctcctgagaacaaattcattctcctacctaagcacaggacaattatgctaatcaggaaattaacattggcac

SEQ ID NO: 7162 - DNA, 120 bp, synthetic construct
  source 1..120: mol_type = other DNA
ttactgttgttaacttggatggcttggttaactcggtgttcaccaggggctccacaatgaagttactgttattccctttggaatcaataagtgtctcatgaggatatactttgaggctat

SEQ ID NO: 7163 - DNA, 120 bp, synthetic construct
  source 1..120: mol_type = other DNA
cctccaccttcatgaagagctcatagttaccatattctcactctgtgccctgcgtataaatgaatttgctcatttagtccttacagcaaccctacatggtaaaacatttttgttttgttt

SEQ ID NO: 7164 - DNA, 120 bp, synthetic construct
  source 1..120: mol_type = other DNA
agaagcaaaaagcatttgcaggagctaaagtacacatgattcacaattgaaaatgagtaatgatctctcctgactggggctgcacagatcacagggtttaatgtcacctacctgacattt

SEQ ID NO: 7165 - DNA, 120 bp, synthetic construct
  source 1..120: mol_type = other DNA
gtctcaaaaaaacatttatcaaaatacagcaaggcgtgaagtgagaagtcttactcctgctcttttccaatccactcttccccacatctaccatggtaaagccctttcgttagtttcttt

SEQ ID NO: 7166 - DNA, 120 bp, synthetic construct
  source 1..120: mol_type = other DNA
tcccaagttcttcatggttgccagagttcttgacagtttacaaatcacatcttcattgatgaagtactttgtagatttcaaaacatctactatagcttggaaggccctttctggtgtttg

SEQ ID NO: 7167 - DNA, 120 bp, synthetic construct
  source 1..120: mol_type = other DNA
aacaagggccacccattgcaattggctgatactttttaaaatcatctttcatctcttgcttcccctctattatcttttctttttccttgcaatttatctcctggagatccagtcctgcag

SEQ ID NO: 7168 - DNA, 120 bp, synthetic construct
  source 1..120: mol_type = other DNA
gcctggccataatcaatctaaaaaatgattagctcgacatttttcattcttttttcacactaagtctatcagtggatagtgctgtcctagttgtagagcttcccatagtctggacctgac

SEQ ID NO: 7169 - DNA, 120 bp, synthetic construct
  source 1..120: mol_type = other DNA
acagcgaagctgagagttgaaagataccatatgactcagcgaggctgtggtgtcccaggcaaaggggacagtaaatggaaaggctgaaaaatgggaacaagagggacagagagcagcctg

SEQ ID NO: 7170 - DNA, 120 bp, synthetic construct
  source 1..120: mol_type = other DNA
gtgacagagcaagactctgtctcaaaaaataaaaataattttttaaaaaaatagtccaggtgtggtggctcacacctgtaatcctagcactttgggaggcccaggcaggcagatcacctg

SEQ ID NO: 7171 - DNA, 120 bp, synthetic construct
  source 1..120: mol_type = other DNA
ttcataccccagagcaacatttctcacactgcatgttgctacccgtctggaggtaatgaaattaatttagcaatgcgtaactcgtgaccagcatctttagaaataaaatagaacactgca

SEQ ID NO: 7172 - DNA, 120 bp, synthetic construct
  source 1..120: mol_type = other DNA
aaaaaaaagagagagaattgaggctctccaggtcaccccactgacctccctgcccgcccccaggccatggacagccagaagcagttcagcggtccagaaatccagttcctgctttcgtgc

SEQ ID NO: 7173 - DNA, 120 bp, synthetic construct
  source 1..120: mol_type = other DNA
ctgaagtcctagcatatgtgtaccccaacttattctgggcccacacgtgggtgcacacctcttgcacacacaccctgaggatgccaatgagccctctcagaaccctggcatgcttcattt

SEQ ID NO: 7174 - DNA, 120 bp, synthetic construct
  source 1..120: mol_type = other DNA
ccactcattctttgcacgtgctgggggagctctgccctcctctcttcctctgaccctgcgtgctccccatacaaacactctttgccttagtgctattcctccaaacacccgcttccttct

SEQ ID NO: 7175 - DNA, 120 bp, synthetic construct
  source 1..120: mol_type = other DNA
tgagttttatggaaactgcttgtatggggcctggccttattgaagcatttacaggagtacccacagtgagtgctctctataaagctctctctataggtttgctattgataatcaaaacaa

SEQ ID NO: 7176 - DNA, 120 bp, synthetic construct
  source 1..120: mol_type = other DNA
cctcgcttcaggtgaaggagtccaagcgccagttcatcttcgacgtggtgaacgagggcggcgaggctgagaagatggagctcttcgtgagtttctgcgaggacaccatcttcgagatgc

SEQ ID NO: 7177 - DNA, 120 bp, synthetic construct
  source 1..120: mol_type = other DNA
cggacagagtgcagggccggacagagtgcagggcccggagaggtagagaaaatgatacctgcagagccagagagagtaagaaacccagagaccaaattagagggcaggaaagaccaaaac

SEQ ID NO: 7178 - DNA, 120 bp, synthetic construct
  source 1..120: mol_type = other DNA
tgagcctcagtttcccctctgtaaaacgggaatcataatctgcctctttctggtggagggaagtgtaaaacttagattacccaggggaaataagagagaaaggagatgagaggagcaggc

SEQ ID NO: 7179 - DNA, 120 bp, synthetic construct
  source 1..120: mol_type = other DNA
agccccataagggcaagtcctgattatctcatcatcccatgtacccagtaccatccaaacctgggccaggcacagggcgggcccttggtgaatggttttgaatgaatgaactcatgcatt

SEQ ID NO: 7180 - DNA, 120 bp, synthetic construct
  source 1..120: mol_type = other DNA
agggaatcatgtggaacgaaggtggttccgtcagaatttgtgggaagaatgagggatggagggaaaggtggagagaaagagggagagatggaagatgttcctggccgtgcgagggggctc

SEQ ID NO: 7181 - DNA, 120 bp, synthetic construct
  source 1..120: mol_type = other DNA
catctgtaaagtgcgcataacagtagtgcccacttcacaggggtgtactgagaattaaacaagctcatgcaaataaagttcttagcccagatgttggtataagcaagcactcaacaaata

SEQ ID NO: 7182 - DNA, 120 bp, synthetic construct
  source 1..120: mol_type = other DNA
aattaataaataaataggaggttgtaggaaagatattgagagcccaggtactttgattgcaggtaaatgatgggatgaattctccagggaagaggctgatctgtgagcgctttctctctt

SEQ ID NO: 7183 - DNA, 120 bp, synthetic construct
  source 1..120: mol_type = other DNA
tgtttagctgctactaattttcatgttagtgttaatattagtgggcagtctctttagggctccactatcaagatgaaccaactctgtcttcagttctgtgccactcagttcaataggcta

SEQ ID NO: 7184 - DNA, 120 bp, synthetic construct
  source 1..120: mol_type = other DNA
acgacattcagattgggaacggacacggcttatagctgaggaaccaggttctggaccactgtcttgatactttgctattgaactagagttctttgggcttaaaactttcatacatgctat

SEQ ID NO: 7185 - DNA, 120 bp, synthetic construct
  source 1..120: mol_type = other DNA
gacaaaaaaaaaaaaacctagggtttcagtccctgcaggccctgcctcattctccccaagtcttactctttctttccataaaagaggcacatttcccatgcattacagcatctgtgtggg

SEQ ID NO: 7186 - DNA, 120 bp, synthetic construct
  source 1..120: mol_type = other DNA
aacaagtaggaattggaagtgcaatgaatcaaagcacttcaaataattgcaaatccgtgaattcataatcaatcatcgctccaccctctcaaaaaacaaaactcgtggctgggcacagtg

SEQ ID NO: 7187 - DNA, 120 bp, synthetic construct
  source 1..120: mol_type = other DNA
aaaaaaaggaaaaagaaaaacagtggagtttcagccaaccctgtcgtggctgacagctctgatccctctggccctaacatcttatactcacgctttctctctctctctctgcaggtcttt

SEQ ID NO: 7188 - DNA, 120 bp, synthetic construct
  source 1..120: mol_type = other DNA
aggcaggagaatcacttgaacccgggcggcagaggctgcagtgagccgagatcgcgccattgcattccagcctgggtgacagagcgagactccgtctcaaaaaaagagagaaatactagt

SEQ ID NO: 7189 - DNA, 120 bp, synthetic construct
  source 1..120: mol_type = other DNA
acctgggatcccgtgttaaacaaaacagtgattctgaccttcaagttggaaagatagatgatgaacccaagtacagtatgtcagtggtgataaatgctgtagaaaaaaacaaagtgggct

SEQ ID NO: 7190 - DNA, 120 bp, synthetic construct
  source 1..120: mol_type = other DNA
caggagaatggcttgaatccaggaggtggaggctgcagtgagccaagatcgcaccactgcactccagcctgggcgacagaatgagaatccatctcaacaacaacaacaacaaaaacacaa

SEQ ID NO: 7191 - DNA, 120 bp, synthetic construct
  source 1..120: mol_type = other DNA
tatatggtgatgtccctcttgggacactacaacaacttcttctttgctgcccatctcctggacatcgccatgggggtcaagacgctgcgcaccatcctgtcctctgtcacccacaatggg

SEQ ID NO: 7192 - DNA, 120 bp, synthetic construct
  source 1..120: mol_type = other DNA
caacaagagcgaggatgaggatgaacctgacatgaagtgtgatgacatgatgacggtgagcccctcccctagcactctgggacccttccttctcgcatctgttgaaggagttaataatgg

SEQ ID NO: 7193 - DNA, 120 bp, synthetic construct
  source 1..120: mol_type = other DNA
tactcaacctcctccctatgccctgggggcctcacctgtaaaatgagtgtgtaatagtagttgcttttaggactaataggtgctccctggctatcgaagacttaaaagacttagaccatt

SEQ ID NO: 7194 - DNA, 120 bp, synthetic construct
  source 1..120: mol_type = other DNA
agtttcacccaaggtatacccagcgttcaatgcacatttatattttctcttctattctaataatggtgatcataacccaaattgatgcgaacttactagagacacaggccacaatccaca

SEQ ID NO: 7195 - DNA, 120 bp, synthetic construct
  source 1..120: mol_type = other DNA
aaaaaaaaaaaacatatgtaaagttgttcccaaatgccaggtagaccatgctccctccccacccccactcagacccttcttgtggctccccagcccactgtagataaagtcgaatcaccc

SEQ ID NO: 7196 - DNA, 120 bp, synthetic construct
  source 1..120: mol_type = other DNA
ctgtctcagtcgttaccatgtcttcagccctgcctatcccggggccttggctggtactcagtgaatgtcgaatgaatgagtgaccagtgtgctcccctccctcagtgttacctgtttcac

SEQ ID NO: 7197 - DNA, 120 bp, synthetic construct
  source 1..120: mol_type = other DNA
taaaggcctaatactatcttcttaggaagcgagattaggggtgagattagggaaatgggggatggagggcaagccctggaggtaggtagctggagaggggggagtctgaaccaggtcaga

SEQ ID NO: 7198 - DNA, 120 bp, synthetic construct
  source 1..120: mol_type = other DNA
ctctactataaatgaaaaataaaataaggtaagggtggttctgacttgtctcctgtggtcctctcaccctcaggtttttcctgatgtatttgataaacaaggatgagacagaacacacgg

SEQ ID NO: 7199 - DNA, 120 bp, synthetic construct
  source 1..120: mol_type = other DNA
tgtctccaccactacaggcctgtggaaggaagagataagtcagttcatttattcattcatatgttcattgattcattaattcacaaagtagttaatagagactgtgccagccccatgctg

SEQ ID NO: 7200 - DNA, 120 bp, synthetic construct
  source 1..120: mol_type = other DNA
aacccacagaataaaaatccatgagaccatgctggtataaagaaagaagaatggagaagacacagctcttctttagagtagaatgccaactaacacacgcagaaggaaacatagaatcag

SEQ ID NO: 7201 - DNA, 120 bp, synthetic construct
  source 1..120: mol_type = other DNA
cctcggcctcccaaagtgctgggattacaggcgtgagccaccgcgcccgaccggtgggatacttcttattacaaagaaaaacagaggctgggtgcggtgacccctgcctataagcccagc

SEQ ID NO: 7202 - DNA, 120 bp, synthetic construct
  source 1..120: mol_type = other DNA
tggccaactggtgaaattgagtaggggtatgaattagaaggttgtgatgtttcagtgttgttttcttgattttgacagctgtgctgtggtttgtaacattatgtccttgctttgattcag

SEQ ID NO: 7203 - DNA, 120 bp, synthetic construct
  source 1..120: mol_type = other DNA
tgggagtgtgagttttaaattatgtcaaaatagttaaaatagttatttttaatagttaaaaatttttaataagataaaaatctaaaataaaaatgcagccagggctgggcacggtggctc

SEQ ID NO: 7204 - DNA, 120 bp, synthetic construct
  source 1..120: mol_type = other DNA
atgcctataatcccagcactttgggaggccgaggcaggtggatcaccgaggtcaggagttcgagaccagcctggccaacatggtgaaatgccatctctactaaaaaatatagtattagcc

SEQ ID NO: 7205 - DNA, 120 bp, synthetic construct
  source 1..120: mol_type = other DNA
ggtagggtctctcagctcctgtagcagctagggaaaaaaagtgtgtgtctcagtgcctggaagatacctccactgtcactacgaacatggctcccttaaagacagcaaggagctgggcac

SEQ ID NO: 7206 - DNA, 120 bp, synthetic construct
  source 1..120: mol_type = other DNA
cctgtaatcctagcactttgtgaggccaaggaaggcagattggctgagctcaggagtttgagactagcctgggcaacatggtgaaaccctgtctctactaaaaatacaaaaaaattagct

SEQ ID NO: 7207 - DNA, 120 bp, synthetic construct
  source 1..120: mol_type = other DNA
aaagcatggagatctacaaaaataggatttccacttggagaaatgtcgctgggacagttaaaccgtgtcccacactggactcaaagggaacacaggagaagagaactagatctgtcaggg

SEQ ID NO: 7208 - DNA, 120 bp, synthetic construct
  source 1..120: mol_type = other DNA
ttgttaatactcttacaggaggggaagaaaaggcaactatcagtgcctagggccagccctgggacccaggccactctcctctggaagccttttatttttgtaggactgacaatatgacct

SEQ ID NO: 7209 - DNA, 120 bp, synthetic construct
  source 1..120: mol_type = other DNA
gagatcttggatgggttggctgccatgaacttctcctccatctggatcttcagggcgtccatctccccagactcccccaggacccttttggtgaaggcaaagagaatgtccatgcaatgg

SEQ ID NO: 7210 - DNA, 120 bp, synthetic construct
  source 1..120: mol_type = other DNA
tcctgtctgtttgagtctccatgtctgcatctgtgacccagaaaaatgggtcctttgcagggttccttctcagccccctcattccttaatcttcagtgtgtacctacacaatagagctgt

SEQ ID NO: 7211 - DNA, 120 bp, synthetic construct
  source 1..120: mol_type = other DNA
aggggcatggatataaatcatggaataaagagtgaaataaacttgtcttatatggcccaagtgccctttccagactccttatataataatgtcactgactgacatgggtccagtgtttac

SEQ ID NO: 7212 - DNA, 120 bp, synthetic construct
  source 1..120: mol_type = other DNA
agtttggtggtccctcaaaactttagataagtggttttcaggggtgagggagaggggaaatgaatggggattgactattaaatgggtagagtttcctttggggaaaggaatatattctaa

SEQ ID NO: 7213 - DNA, 120 bp, synthetic construct
  source 1..120: mol_type = other DNA
aagatgttgattttctcaggactttggtcatctgtctccaccatcatggtcaccatattcaagcagatcagaaacatgatggtgacgtcaaaggcctgcttggtcacaatgtcgaatatg

SEQ ID NO: 7214 - DNA, 120 bp, synthetic construct
  source 1..120: mol_type = other DNA
gagatttgctcaggtacagagggttcctgtgggtggggagtgtcctgggatgctacatccttatcataccttcctccctatctctacgaggctgggacctctcttcatgatcagacatct

SEQ ID NO: 7215 - DNA, 120 bp, synthetic construct
  source 1..120: mol_type = other DNA
gtcaatgatgacaccaataaagaggttcagggtgaagaaagacccaaagatgatgaaaatgacaaaatagatgtacatgtagaggttgtattcccactgaggctgctcttcatactgcaa

SEQ ID NO: 7216 - DNA, 120 bp, synthetic construct
  source 1..120: mol_type = other DNA
gaagaatctcaaccttcccttgtacttaagggggttcttttgtcaatggtgtgttggtaaatggttaacagctgacgtcccagaagaaaagaaaaaaccctgattgttggtttgccaatt

SEQ ID NO: 7217 - DNA, 120 bp, synthetic construct
  source 1..120: mol_type = other DNA
tctgggctgctatgcagaaagagcccaagagacacgcttggtgtgagactgactccccagtgaagtctcatttgtgtttttggccaaatccagtcctgccccgagccttttttttttttt

SEQ ID NO: 7218 - DNA, 120 bp, synthetic construct
  source 1..120: mol_type = other DNA
cattggtcaaggctaatggtaggttaattttatggaatgtgtgataatcactgaagccaccatactcacaaaatcagtggaaaccctagaaggattgtgcgtgcttaaacattgcacatc

SEQ ID NO: 7219 - DNA, 120 bp, synthetic construct
  source 1..120: mol_type = other DNA
acttgatgggaaaggacctctcaaaacatgtccccaagactgggtttcctaacaatcccatgagtccttacatttttggagctaaattctggtttattttaggttgttgctattgggatg

SEQ ID NO: 7220 - DNA, 120 bp, synthetic construct
  source 1..120: mol_type = other DNA
atggtgcctgctgggtcagtgagagacaaacaaacatgtcttctgaagccacacagaactggtatgttttgttaaaaaaaatatcccacgcaagtaaacacaaacacacacatgtgtatt

SEQ ID NO: 7221 - DNA, 120 bp, synthetic construct
  source 1..120: mol_type = other DNA
ggcttctgggcctttactgagaggctgctatgtgtacttcacatacatgctctgtaataaccctactaaccctgcgatgttgcgatgcgccacctctattctacagatgggaaaactgaa

SEQ ID NO: 7222 - DNA, 120 bp, synthetic construct
  source 1..120: mol_type = other DNA
cttggcgtcctccctgcctcctctctgtctctgacaccctgtgtctaacccatcaggatttcctgttggctctgccttcaaaatacatctgaagtccaagtgtttctcaccacttctact

SEQ ID NO: 7223 - DNA, 120 bp, synthetic construct
  source 1..120: mol_type = other DNA
caccttcctccatgtggggaagagtttttattttgttccctaagatccccagcaccataacagtacttgcacacagtagagacccaactgcatttattgaaaaataatgcagaattcatc

SEQ ID NO: 7224 - DNA, 120 bp, synthetic construct
  source 1..120: mol_type = other DNA
aaagcccttttcagtctgcagatcctgacccctactctgttttgttcgatcccctagagaggtccctccacctgcaccctttgccttcgcttcctttgtcctcagtgagtgcaaacccag

SEQ ID NO: 7225 - DNA, 120 bp, synthetic construct
  source 1..120: mol_type = other DNA
accaggcattggtgaagtacttcttgaagccgtaggccacccacttgagcagcatctccagcacgaagacatatgtgaacatcttgtcggcatactcaagcagaaccttgatggtcttcc

SEQ ID NO: 7226 - DNA, 120 bp, synthetic construct
  source 1..120: mol_type = other DNA
catttgtagatgtggtgtttaggaacaacaggtgtagataaagtcaaatgtcctgcaattctcaggctctaggagtcaaagttttccaaatcctaggagttgtaagtctttctccacctc

SEQ ID NO: 7227 - DNA, 120 bp, synthetic construct
  source 1..120: mol_type = other DNA
ggcaggaagggggctcttctctaccaccccaccgacattgctgtcatttctcctttttcacttttcccagcctaatgaaagaaacttgtattttgttacattttcatttattttattagg

SEQ ID NO: 7228 - DNA, 120 bp, synthetic construct
  source 1..120: mol_type = other DNA
cttgcagtgcttggcatgtaagaaatatttgagagatgttacttgtgactaaacggtttctcttaggataatacaataatagcaacaattctttgcatatttatttcataactggccata

SEQ ID NO: 7229 - DNA, 120 bp, synthetic construct
  source 1..120: mol_type = other DNA
tcatgcactagagtactttaaatagcattggaattattttcttccttgagaatgtgaaagatctgtttttggggatgtgagaaattagattagctagtggttatcaatttggttgcctta

SEQ ID NO: 7230 - DNA, 120 bp, synthetic construct
  source 1..120: mol_type = other DNA
gatttatagcacactatcatcaccattggtgcatgagtggccttcttttgttaattagttaattaatcaattgaacccccctaaactaccaccaaactattttctgtttgatccaaggtt

SEQ ID NO: 7231 - DNA, 120 bp, synthetic construct
  source 1..120: mol_type = other DNA
gccactgcacccagccaatcgttatatttttattataggttggaccctctttctctcatctcaagcttttaacattgaattcaacaaacaaaaagcaccctgaatttgttgtcataattt

SEQ ID NO: 7232 - DNA, 120 bp, synthetic construct
  source 1..120: mol_type = other DNA
agatttctctttttctcaatatatcattgacgtggttttttaacaacagagcttggctgtctaccctgattagattcaccagatgcttgccaaaactcctcctcacttatgccaagctga

SEQ ID NO: 7233 - DNA, 120 bp, synthetic construct
  source 1..120: mol_type = other DNA
gctgaatacatagagctagatacaaggagggtttttagaagactgactgaacaaatgagaagtcaaggcaaaggactctggaatctgactgcttgggttcaaatgccagatctgtggttc

SEQ ID NO: 7234 - DNA, 120 bp, synthetic construct
  source 1..120: mol_type = other DNA
ctgtgaatgcccacatctaatggcagaaggttggatggttgaagagatgactgagagaaagagctacgatgatgggggtggcgaacagggcaatatggtgagcagggccgtgtgagcgag

SEQ ID NO: 7235 - DNA, 120 bp, synthetic construct
  source 1..120: mol_type = other DNA
ccaagcttattttatccccagctcattttatccccagctatcctccaaatataccaccaatccataaaagctatagatgccaatcaacatggccacatgtcatccctgcctcaaggattt

SEQ ID NO: 7236 - DNA, 120 bp, synthetic construct
  source 1..120: mol_type = other DNA
agctctacttgggacaggatgaggctgactccagctggaaagcctttccgtagcttccttctttgcttcatcctgtttctcttactttctcctgagaacacccctcaacaagtcatttgc

SEQ ID NO: 7237 - DNA, 120 bp, synthetic construct
  source 1..120: mol_type = other DNA
cagcctgtttctccttatataggctcccccatgaactgatttgaagaaaggaagacttataaaattcattcaaaggttagcatccgtgtgagagagccacttctctcccatggcattttg

SEQ ID NO: 7238 - DNA, 120 bp, synthetic construct
  source 1..120: mol_type = other DNA
acaggaccaaaacacagggatggagtatgtggagagggtgaacacatggaggtagtgggttagtcctgcatcagagtttgggaccagaatttccagaatttcccattggccctgggccct

SEQ ID NO: 7239 - DNA, 120 bp, synthetic construct
  source 1..120: mol_type = other DNA
ctgcctgctttgtgcagactctggtcccaagtgttaaaaataacaggttgcgagataagatagtgctgtccctgacacctcagtcttagggatgcttatttttaaatctcagaatgagcc

SEQ ID NO: 7240 - DNA, 120 bp, synthetic construct
  source 1..120: mol_type = other DNA
cattttattgaatgtggaaggtttggctataaaagaaaatacaaatttgaatccctctttccaagggcccagacacagtctgaattgaggatgtcgtgtcctggctcaggttcaatggga

SEQ ID NO: 7241 - DNA, 120 bp, synthetic construct
  source 1..120: mol_type = other DNA
ctaaaacacacctctaccagggaccccatacctatcagcaagctgggaatgagaattctgataaaagcggcctcagaaacatgcctttggcttaaaagtaatacatattcatgtggaata

SEQ ID NO: 7242 - DNA, 120 bp, synthetic construct
  source 1..120: mol_type = other DNA
gcctggataaggcacatgggagaagagagcagacaggtttggggaaaggctctggaatctatagcccatagtacttgccccacagcagcctgaaaaagtgaatgtaaaacctctctgtga

SEQ ID NO: 7243 - DNA, 120 bp, synthetic construct
  source 1..120: mol_type = other DNA
ggtgaatgatgtcagggctggcgctagacctcatttgcctctgtattcccaacagcatgtggcacaatgttttccatgcaataagggcttagaaaatgtttaagataaattgaaaaaaca

SEQ ID NO: 7244 - DNA, 120 bp, synthetic construct
  source 1..120: mol_type = other DNA
tggagtggtgaacagatagattggtgtgttcattggtgggtgggtgattgataagtggatgatcaatagatagatggctgtatgagcatataggtgcaagaataaatgggtacattgaat

SEQ ID NO: 7245 - DNA, 120 bp, synthetic construct
  source 1..120: mol_type = other DNA
ttaacacttactgaatgtctacgtgccaggccttgtgcttagaatggatgaactcaatcagaactcccaataaccacatgaggttggcaccgctattacctcatttgacagaagaagctg

SEQ ID NO: 7246 - DNA, 120 bp, synthetic construct
  source 1..120: mol_type = other DNA
tcatctgtgaaatggaaatgtagtaataccagccccactcctggatcctgtgagggctaaagggttcactgtggaccacaaagggctttgcaaatcatcctgatggccaccacaattgct

SEQ ID NO: 7247 - DNA, 120 bp, synthetic construct
  source 1..120: mol_type = other DNA
gaggttaagtaacttgtctggggtcatgtagctattaagtttgagaatgaggagaggaaactagtgctgctcttcagaatttagggaaacttcctctctcttctaggaacattcctgagt

SEQ ID NO: 7248 - DNA, 120 bp, synthetic construct
  source 1..120: mol_type = other DNA
atctaacaactatttgtttattgagcctcttctgtttagaagataagctgtgtgatggcagggacctttccctactgtacctggaatggtaaccagcccataggtcgtcctctagtatct

SEQ ID NO: 7249 - DNA, 120 bp, synthetic construct
  source 1..120: mol_type = other DNA
tttaaaaaaaaaaaaaaaacccaacaacttcccaggtgactctaatgtgcagctaagcttgagaagtacatacattttggtaacagacctcttccttccacaggctcatgccaggctttc

SEQ ID NO: 7250 - DNA, 120 bp, synthetic construct
  source 1..120: mol_type = other DNA
tcaatgaacgtttttagagattctgacacatagtgctaaatgatcctaggagaaaggttttaaccaagtccacaagctgcatgtgagtaactgcttccctttaactatgctaacactggg

SEQ ID NO: 7251 - DNA, 120 bp, synthetic construct
  source 1..120: mol_type = other DNA
agtttatatctgtgatttaccaaatattgttcaattgctccccaaaatggttgtaccaaatccacactcttacaagctgtgagttcccactgttccacaaccctgtcaacacacagaagt

SEQ ID NO: 7252 - DNA, 120 bp, synthetic construct
  source 1..120: mol_type = other DNA
agccactgcgtccagccttctcctactgatttataatgccacctctgttatttatcaagtcaccaaatatggattgttctatttctgtggtctcaattctgtagcacaatctgtttttcc

SEQ ID NO: 7253 - DNA, 120 bp, synthetic construct
  source 1..120: mol_type = other DNA
ttttatcatctctatcaagcagttctactatgtgacatttttaaggggatagcctgattgtgtctgcgtgtgtgtatgtctgctgactcttcctcatggtggaatatttccttctgtgtt

SEQ ID NO: 7254 - DNA, 120 bp, synthetic construct
  source 1..120: mol_type = other DNA
tttctggttcaccatttttctgaatgtatagtcatatccttacggggctactcagtttcaacccctactcacactgtcccaaggttgaatgtcttgtctctacatgctcattaaaatcca

SEQ ID NO: 7255 - DNA, 120 bp, synthetic construct
  source 1..120: mol_type = other DNA
gtgccatgagacttctacccactgagatgtagctttgccttctgtttgcacatagaaggaaagaaaagtaaaattacagcaagttgactcaaattggtgaaaaaatctgaataggccctg

SEQ ID NO: 7256 - DNA, 120 bp, synthetic construct
  source 1..120: mol_type = other DNA
aacaaatatttattgggccaattactgagtaaactgcttgagatcagctagttagtaagagctgagtcagaattcaaatctggctctgcctgatttacttactacacccagctatccatc

SEQ ID NO: 7257 - DNA, 120 bp, synthetic construct
  source 1..120: mol_type = other DNA
ctccttaatctggaaatatgagagaagaggtccatagggacaggaaacaaagatggaggtggggaaaatggggacaggagagattatcaggacaaacgtacaactgcttaagacaacagt

SEQ ID NO: 7258 - DNA, 120 bp, synthetic construct
  source 1..120: mol_type = other DNA
gagcctgatgctgccatacacattagtacatgcaaaaatgatctgggagtcttaactgaccacaagtttcctagcgtcaagagcataaagaagctgaaaaaaaaatctaacatgctctaa

SEQ ID NO: 7259 - DNA, 120 bp, synthetic construct
  source 1..120: mol_type = other DNA
caatggtactaccctaggtccaacgcaaccatgaatttggccagcttaactcacaagcaagttttaaattctcccaacttctcccctccttctttgccatctatgatagtttggttatca

SEQ ID NO: 7260 - DNA, 120 bp, synthetic construct
  source 1..120: mol_type = other DNA
aattttaatgttaccttcttgggaaggcctttcctgagtattctaatagccctcatcctcatccctccccttagcagctttctatcacatgacttattgctacctgaaaatattgatcag

SEQ ID NO: 7261 - DNA, 120 bp, synthetic construct
  source 1..120: mol_type = other DNA
aatgggtgaagtcagaattcctggtaatgaagtgcttgaacttggattcctcccgacatgtgcagtacaatgagatgattttctccttaatgagattaggaaattctattagcgctccca

SEQ ID NO: 7262 - DNA, 120 bp, synthetic construct
  source 1..120: mol_type = other DNA
acatttgctgttccttgtgtctggaacaggcttccccagatgatggtaatgaaggctttactagttgtgacatagttaactatcatccctctttatcaccattacacacaatatagacat

SEQ ID NO: 7263 - DNA, 120 bp, synthetic construct
  source 1..120: mol_type = other DNA
atttggaagaggggatgtggggttagagataatcctgtatcttctgggatgtctactcccctcaaatctatgtctctggagctgggagcctgaaacttaactgggcttggagttagagct

SEQ ID NO: 7264 - DNA, 120 bp, synthetic construct
  source 1..120: mol_type = other DNA
ttttccctatcagtaagtggacttgcacacctaccccaaaatgaggacatcatggagataaactcagacagacccagaatgttttgggaaagatcaagatccaggaaggaagataggagt

SEQ ID NO: 7265 - DNA, 120 bp, synthetic construct
  source 1..120: mol_type = other DNA
gagaatattccatcctacagggagaaagagtgtcccactcacagagcagagagcatcctatacaaagggactggtacttcatcaccagcaaaaagaaagtttctttgctgctgatccctt

SEQ ID NO: 7266 - DNA, 120 bp, synthetic construct
  source 1..120: mol_type = other DNA
atcttcctctttactcttcttatatgtactctgctaggcctaaatcaagctcccttctgcccatacgtcacaccatccccagctactatcaagttgcctctcctcacagagaggaagcac

SEQ ID NO: 7267 - DNA, 120 bp, synthetic construct
  source 1..120: mol_type = other DNA
tcagagctgttcccacacagtaacacatcagaggtgccgttcttgagcaggtaattttctgtaagagaaacatcatgctggtgaggggcactctggcccaaaagtttccgccttgcatcc

SEQ ID NO: 7268 - DNA, 120 bp, synthetic construct
  source 1..120: mol_type = other DNA
ttgggtgtacatggaagttttagaactgctgttatgaggccactgctgaactactcattgagtgtctatgttttgttttccaaagtggactgctggtgtatgtaagaggccctaacttca

SEQ ID NO: 7269 - DNA, 120 bp, synthetic construct
  source 1..120: mol_type = other DNA
gccaaatatatggcatgggtgtggaaagtgctgctttcttgagacaacacatactcagagcatgaccccctttggctagtctgaaggtgtgctaggcctaccccttttaatgtagtccat

SEQ ID NO: 7270 - DNA, 120 bp, synthetic construct
  source 1..120: mol_type = other DNA
acctggtctgtggacatagtggccaagggtaactcacccctttgaacatttctcatactgatgatagatttcacttctggcaagaatggttgcaacgaaactgcaggattctttctgaaa

SEQ ID NO: 7271 - DNA, 120 bp, synthetic construct
  source 1..120: mol_type = other DNA
ttatgaacatactatagtgggtttagaggccagaaagctcaatgtgaacatagcataactgggggctgctctggcaagataactagccctaccagggggagtccagattccttattggag

SEQ ID NO: 7272 - DNA, 120 bp, synthetic construct
  source 1..120: mol_type = other DNA
ttcctctttcactccgggtgtgtgtgggggttcccacaaacacacttcttttggtttcctcatcagaatctgacatttcaggctgaagcaattcatgtaaaacttttagctattcaaata

SEQ ID NO: 7273 - DNA, 120 bp, synthetic construct
  source 1..120: mol_type = other DNA
tgggcatcttacctgggataactgaaatagtttttagagctctcaggactctgaaagttcgaagagccgacaaattgcctagttttatattttctgatacatacctgcagaatcaaacca

SEQ ID NO: 7274 - DNA, 120 bp, synthetic construct
  source 1..120: mol_type = other DNA
tgacttgtgacatttaatcaaaggctttgcatccagggtgtgtgacatttaaccgaaggtgtctggtatttaacaaaggacattggacttgggatgtctgatgtttaaccaagtgggtct

SEQ ID NO: 7275 - DNA, 120 bp, synthetic construct
  source 1..120: mol_type = other DNA
tgtctgtctgggagagcaatcatgagttagaggaagtcttaaaagaggacttacagggtaagggtgtggaatgtctggggccatgttggtgacttggtgtgctactgcctcttttattct

SEQ ID NO: 7276 - DNA, 120 bp, synthetic construct
  source 1..120: mol_type = other DNA
actgaatggaatgtttcccttcactcaaatctcctttgatcatcctagagtcccttgttactgaaccattgcatctctaagagaatgcatttcaaagccagaatccctgtcaatcaaagc

SEQ ID NO: 7277 - DNA, 120 bp, synthetic construct
  source 1..120: mol_type = other DNA
aaatagaagcaatcagaagagaaattcctttcatttcattatcaactcttatcaatctacctccatctccacctgaaattcagccttccccactcttcaggtcgatgctcccccttggca

SEQ ID NO: 7278 - DNA, 120 bp, synthetic construct
  source 1..120: mol_type = other DNA
aatccatactgggtttggggcaagtaagtggtattgtctctcagagccagttttcccacttgtaaaatggagggctagagttggcttacaaatagtgtacctagagacagagattctgat

SEQ ID NO: 7279 - DNA, 120 bp, synthetic construct
  source 1..120: mol_type = other DNA
aatttcattcttaatcatcttggaatccaggtcaccattcgcagtgggccaggggttgaaatattggtttctcttggtggaaagggcagaggatactaaaccagaatcttaacgatgtcc

SEQ ID NO: 7280 - DNA, 120 bp, synthetic construct
  source 1..120: mol_type = other DNA
ttgctctaaacatctggctaacgaatccatcgtccaatttgtttattccatattatcgtgtaactgccatgtgtccatctgaactctctgtattctctctcggttgtcttggtggaagaa

SEQ ID NO: 7281 - DNA, 120 bp, synthetic construct
  source 1..120: mol_type = other DNA
aaatgctcaataaattattattatttcagaactttctccaatgtcatcattcctctttaggcaggacagggagaaactttctactttgccactctggagagcttcctccctagaaggcac

SEQ ID NO: 7282 - DNA, 120 bp, synthetic construct
  source 1..120: mol_type = other DNA
aagtaccagagctgtgcttcaggtctacttgtgggctcttggccttgaactgaactgcccaggacttctctgagcctgactctggctacaattcctagctgctgcttcaggctagacaaa

SEQ ID NO: 7283 - DNA, 120 bp, synthetic construct
  source 1..120: mol_type = other DNA
tcctaaaatatgcaagcaatgatgctaagagtgaatattcattgagcccttcctaggtaccagaatttgctctccgtgtccatcagcgaattcagttttcccaacaaccatatgtgatgg

SEQ ID NO: 7284 - DNA, 120 bp, synthetic construct
  source 1..120: mol_type = other DNA
ttctagattatccaggtagactcagtataatcacaggggtccttttaagcaaaagagaggcagagtgttgtgacatgaaattcaaccggtcattcctggcttgatgatgacagggaacca

SEQ ID NO: 7285 - DNA, 120 bp, synthetic construct
  source 1..120: mol_type = other DNA
tagcaagctcttgtctctctgccacttcactgctcaaaatccttgcctggttcccatggccttgaggacagcacttgcacaattgtcaatccttcttctgcacgtatgagatctcttcct

SEQ ID NO: 7286 - DNA, 120 bp, synthetic construct
  source 1..120: mol_type = other DNA
gtctttgccccacttaccattcccaaagggcgttgcacagaactttgcacatgtggaacttagatgtttgaatgagcataaaaatttaagcacagcaaaagttcaccattcaaaacatga

SEQ ID NO: 7287 - DNA, 120 bp, synthetic construct
  source 1..120: mol_type = other DNA
gctaagaattttgcatttttacaaacttcccaggtgagactgagatggccctcagattagcatttggaagcaactgccctagggtggcatgcacatgggaccttgctacacataggttct

SEQ ID NO: 7288 - DNA, 120 bp, synthetic construct
  source 1..120: mol_type = other DNA
gcctcagtcctggttatttagtccctcactaggtatctgtaatcctgatgcctcctgccttggccagaggttagtgagtgaagtctttgtcttggcctcaaaaaagtccattcagagaag

SEQ ID NO: 7289 - DNA, 120 bp, synthetic construct
  source 1..120: mol_type = other DNA
cagacgtcatttcttctgggatcctcagtagcttagcttctagaatgttctgaagaatcagaagagggtttctcaaactttcatgtgcccaagaatcccctggggatcaaatgaaaatgc

SEQ ID NO: 7290 - DNA, 120 bp, synthetic construct
  source 1..120: mol_type = other DNA
catgggcaaggcagtgagtccactattctgccgaatgagctggtgggacaaggttctacccaatctggtctggggagacaagctgaccagatagattaggaccaaaagttctgttgtggt

SEQ ID NO: 7291 - DNA, 120 bp, synthetic construct
  source 1..120: mol_type = other DNA
ttcacatgcacaaccactcacgtatccaatgcatgcatgcacacccaaagacacggcccaggctcatccccaggctcttggtcttaaaccacagtcacacactcttgtagtcacattttc

SEQ ID NO: 7292 - DNA, 120 bp, synthetic construct
  source 1..120: mol_type = other DNA
atctcaggctgcataattcctgtttttattccagaattccaaaattaaggtgattggaatatagatcaccagtgactcatttccccagagcctcatgagccaccctaaatagagccccat

SEQ ID NO: 7293 - DNA, 120 bp, synthetic construct
  source 1..120: mol_type = other DNA
ccaaataaaattctagcaataaattgaatcatactgcaaaaagaaaaatgggaagagctgatggagtatctctggctcctcacactgctccttgctcccctcctcccaaatgtgaacaaa

SEQ ID NO: 7294 - DNA, 120 bp, synthetic construct
  source 1..120: mol_type = other DNA
aaaaaaaaaaacagtctggatgacagcagcttcttacagggcaaccctctccactgtgagcaatcagttccataaattgggaagccacctcttttgcttggacttaatttctaaaaacag

SEQ ID NO: 7295 - DNA, 120 bp, synthetic construct
  source 1..120: mol_type = other DNA
agttggtttcctttttaatcctatgtgttttattttgtctcaaaatatgtgcttctgagatgggcttcgctcaactggtagagaaaggttaagaccctggcttggtccttgctcaggtgc

SEQ ID NO: 7296 - DNA, 120 bp, synthetic construct
  source 1..120: mol_type = other DNA
ttggaccatggcagtgcctccctctttccttctatcccacacatgcagccccctgctcctagatttagacattctccaaaattctgtgtgccctgagtgatgccagagtcacctcctgct

SEQ ID NO: 7297 - DNA, 120 bp, synthetic construct
  source 1..120: mol_type = other DNA
attttggtctccttggaatcggagcctctggaacacagcatgcaaataatattctttgccatgtaaatttatgcaaagcattgtgtggaagtggttcccaggcttcctagaaaatccctg

SEQ ID NO: 7298 - DNA, 120 bp, synthetic construct
  source 1..120: mol_type = other DNA
tgtgtacatggtcctaaaaatgactacacagaatacttttcttcccaaagtgatggatcccaaatcaacaagagataatgaggggatgaggaagagtcatcagtaaagagagtctgtggt

SEQ ID NO: 7299 - DNA, 120 bp, synthetic construct
  source 1..120: mol_type = other DNA
tcactgcatgtggctaccaagtgcttggaatgtggctactgtggactgagttgtgctattgtaaagtcacatccattttgcaggcttagtacaataaggaatgttgactatttcgttaat

SEQ ID NO: 7300 - DNA, 120 bp, synthetic construct
  source 1..120: mol_type = other DNA
ctcatttacatacatttacatctcatttattccaacacccaggctgaagccgaggctaattcagctgacaggaaaaccccacccgctttagctctgctgctctgctgaagtgattcccca

SEQ ID NO: 7301 - DNA, 120 bp, synthetic construct
  source 1..120: mol_type = other DNA
cccacctctagggtctcttagtgtccagagggaaataagccaatcaaccaatacactaaatttatgccacaaaagtgtccatgatgtattatagccaaatgtgcaacccttttttcttaa

SEQ ID NO: 7302 - DNA, 120 bp, synthetic construct
  source 1..120: mol_type = other DNA
cctgaaacagaagctcagcaattagacatctaataggcacctaggctccgcaagcaagtgggggctttccttgggtttccagttttgctggcaactagctgtcgctttatttaactggca

SEQ ID NO: 7303 - DNA, 120 bp, synthetic construct
  source 1..120: mol_type = other DNA
attttcactgtccttttctgcccctccagaatagtaaacagagtgaggaatggacaagagaggttgagaaactgttctatcagactctggcttcgcaaatcacaactaaattttatgttg

SEQ ID NO: 7304 - DNA, 120 bp, synthetic construct
  source 1..120: mol_type = other DNA
ctgtatggattggtttaatggtatctccctacttgtatgtaaacttcataagaacaattgttatagcttgtacaccttctagaaccttccatggcccaaaggcatgaactctgcctcaga

SEQ ID NO: 7305 - DNA, 120 bp, synthetic construct
  source 1..120: mol_type = other DNA
ggctcgatctaatggacacttctttttaaattattcattctttttctatctatccatgaacttctgagaatgcaccttaagtctctcagcagaaagaaacagggcactttccctcccccc

SEQ ID NO: 7306 - DNA, 120 bp, synthetic construct
  source 1..120: mol_type = other DNA
atgcaaggattcagtgagattaaccgtataaagcgcttagtgccatgcctggcctgcagaaagcactcagtgaatgttagctatttttagtaacattactgaggataaattcccaattcc

SEQ ID NO: 7307 - DNA, 120 bp, synthetic construct
  source 1..120: mol_type = other DNA
ttccccacttgtatgatatggtagtgatgacatgattaaaagtttaatgaggctcttttcagcacagagctggacactgtaacatagaatctgtgttccacaccctggctgtcacctgac

SEQ ID NO: 7308 - DNA, 120 bp, synthetic construct
  source 1..120: mol_type = other DNA
cagagaactctctccaatctcaccgcaaagagatctccaccccttcgagaagcacagagatcagacagaggagatgcggcccctttagggcgtcaaagggcaccgagatctctacatggt

SEQ ID NO: 7309 - DNA, 120 bp, synthetic construct
  source 1..120: mol_type = other DNA
tgcatattctgtttccctgggggaaaaaagcaattcgaatgtccagggaaacttggcaagcattcttgtctgaagaactgtgtgtgattgttctttctttaccaatataaaaactctgcc

SEQ ID NO: 7310 - DNA, 120 bp, synthetic construct
  source 1..120: mol_type = other DNA
tgttcctaggaagtaaatatcaccattcttctgccccagagccctaggcttttcatttagtagttgtgggaagatgagcaggtccaaggaatatttgagcaagtccatgtaaaataaata

SEQ ID NO: 7311 - DNA, 120 bp, synthetic construct
  source 1..120: mol_type = other DNA
attatctcagttacatttttcatacctgttcctcaggtatgagctaacagctcttggctaagggctcatacctgaggaacaggtatgaagaatggaattcagataagaggtcttatcatc

SEQ ID NO: 7312 - DNA, 120 bp, synthetic construct
  source 1..120: mol_type = other DNA
tacaagtttcacaggttgtgcagaaggctatcacttctagcctcttgcttctgagtaagaacatacctatgtcatgcgtgaaaaataagaatctctgtacatctgtgtagtgtgggaaat

SEQ ID NO: 7313 - DNA, 120 bp, synthetic construct
  source 1..120: mol_type = other DNA
acagtttcttgacttgggagaggaatggtgggtgagtagctgagatctacatttgctacatatgtagtagtagtcaccaagtttatctagataggagattggcactacttgcagaataaa

SEQ ID NO: 7314 - DNA, 120 bp, synthetic construct
  source 1..120: mol_type = other DNA
ccctggccttctctacagtatatttttctcactctcgtcctcttatatcttttcttacttatctggcttctcttttgcctcttgtttacttcactctttcctgagtgtaagcattttccc

SEQ ID NO: 7315 - DNA, 120 bp, synthetic construct
  source 1..120: mol_type = other DNA
atatttctgtaatcatatccaatgacatctctttttcatgtctgtttgcattgtttctgcttcatggaaaccccttcttccccaccctttcatgtccaaaccccgtaaggctcactcaaa

SEQ ID NO: 7316 - DNA, 120 bp, synthetic construct
  source 1..120: mol_type = other DNA
gaacctgtagcctattttcttcatttgctagaggaaaatggatagatttttgtttcaaaccgttaagttcttccccacctctcatatgtttctctgcctgagtatgtgtttgtgtgtgtg

SEQ ID NO: 7317 - DNA, 120 bp, synthetic construct
  source 1..120: mol_type = other DNA
atagtgctgcagtaaacatatgtatgcatgtgtctttatagtagcatgatttataatcctttgggtatatacccagtaatgggatggctgggtcaaatggcatttctagttctagatccc

SEQ ID NO: 7318 - DNA, 120 bp, synthetic construct
  source 1..120: mol_type = other DNA
ctttgttcttttggcttaggattgtcttggcaatgtgggctatttttgcgtccatatgaactttaaagtagttttttgcaattctctgaagaaagtcattggtagcttgatggggatagc

SEQ ID NO: 7319 - DNA, 120 bp, synthetic construct
  source 1..120: mol_type = other DNA
gggatactggtctaaaattctctttctttgttgtctctgccaggctttcatatcaggatgatgctggcctcatcaaatgagttaggcaggattctctctttttctattgattggaatagt

SEQ ID NO: 7320 - DNA, 120 bp, synthetic construct
  source 1..120: mol_type = other DNA
aataagtgtgatgtggtactgagaagaatgtatattctattgatttggggtggagagttctgtagatgtttattaggtccacttggtgcagagctgagttcatgtcctgtatatccttgt

SEQ ID NO: 7321 - DNA, 120 bp, synthetic construct
  source 1..120: mol_type = other DNA
tgcccttaacattttttccttcatttcaactttggtgaatctgacaattatgtgtcttggggttgcccttctcgaggagtatctttgtggtgttctctgaatttgaatgttggcctgcct

SEQ ID NO: 7322 - DNA, 120 bp, synthetic construct
  source 1..120: mol_type = other DNA
gaagtgtcagttggtccccactgagaggtgtctcccggttaggctacacaggcttcagggacccacttgaggaggcagtctgtccgttctcagagctcaaaaaccctactgggagaacga

SEQ ID NO: 7323 - DNA, 120 bp, synthetic construct
  source 1..120: mol_type = other DNA
tcttcatgcaagctctcttcctctgccatcactacacactctcagcctctgtatatacctcttcttagttcctaagtgcctattaaaaatggctctggctttttatattcatatggtgaa

SEQ ID NO: 7324 - DNA, 120 bp, synthetic construct
  source 1..120: mol_type = other DNA
acccctgatttagtccatcaattggataccgatcttactacccagactatatcactccagctcaaactcctttttttttcctctatgatgatctaacatagatcatctgtttggggttca

SEQ ID NO: 7325 - DNA, 120 bp, synthetic construct
  source 1..120: mol_type = other DNA
cttctactttctatttgctgttcaagttctttgagaaaacaatacaacaggatgttccttccaactgcatgatttttgtcactggacagtctattctaagtccctggctcctttcttacc

SEQ ID NO: 7326 - DNA, 120 bp, synthetic construct
  source 1..120: mol_type = other DNA
ttggccatgtgatcaagtccttgggtgccttaccaatactgggaggacaagtggtacacacgtgagtaaaatcatggaatcaactaaactacttttctcagacatttgttacaaattatt

SEQ ID NO: 7327 - DNA, 120 bp, synthetic construct
  source 1..120: mol_type = other DNA
aatggaactaccagggatgaaatcttcccacataatgcatactttcttgcagaggccgaaggatcataaatagggtaattgaccatgaatacctcctaggaataaaggcaaatggaaagt

SEQ ID NO: 7328 - DNA, 120 bp, synthetic construct
  source 1..120: mol_type = other DNA
gggcatttatgagaaagcagtgacaaataggcaaggaaatagtctatttctagatctgtcaacatttctggcttcctcagttttgcttccagttttcagttttgtctgtcttcatgtatc

SEQ ID NO: 7329 - DNA, 120 bp, synthetic construct
  source 1..120: mol_type = other DNA
atgtcggatgctgtgctaggtattggtgattacagaaatgagtaagataaaatttctgctctaaagaaactcacaacatactgaaaaaacagacacttacgggaggcagaggcaggagaa

SEQ ID NO: 7330 - DNA, 120 bp, synthetic construct
  source 1..120: mol_type = other DNA
aaagcatcatgtaggcactttacacaagctgtttcattcaatcctcacaccaggcctattgggtaactgttattgtaagggtttcccctcaattttggaggtaaattctgaatgaagtca

SEQ ID NO: 7331 - DNA, 120 bp, synthetic construct
  source 1..120: mol_type = other DNA
gctcagtgtattttctaccagggagttgatgggagggcactgatagtagtactcagaattcccaatgccaaggaaatttattataggtgagctgtgataatatattctttacttccttct

SEQ ID NO: 7332 - DNA, 120 bp, synthetic construct
  source 1..120: mol_type = other DNA
aagtttgcctaaaggaatgacatttaaggtgagacctaagggccaaacagcaattaatcaataaagaaattataagtgatgcagaaagaggacacagtagctgtaagacaagaggctgag

SEQ ID NO: 7333 - DNA, 120 bp, synthetic construct
  source 1..120: mol_type = other DNA
gagattaagataagggtgacagatgtctattaaatacaacaacaaggaggtcactgatacgattagatcagttatggtaaatggtggaggctgaagactgattggaggagactgagaagt

SEQ ID NO: 7334 - DNA, 120 bp, synthetic construct
  source 1..120: mol_type = other DNA
taaagacagtataatcagtatgaaaacacatatgagcaaattagctgcggataggaggaggaatatcaccttcacctacctggagggaggacaggatgagtgtggatacaagaattaata

SEQ ID NO: 7335 - DNA, 120 bp, synthetic construct
  source 1..120: mol_type = other DNA
aaaagtaaagtgatttgtgcattctgatgtgtaaggatactggaaaatgctacttgtcactgagaaaatcatctttagcagaggatctactagaggggcatcacgctgaagctgggaaat

SEQ ID NO: 7336 - DNA, 120 bp, synthetic construct
  source 1..120: mol_type = other DNA
gactagggaatgagaaactagttggtggccattttaataatccaaagtacaagttgtgaagtcctgaacaagagtggtagcagtagtaaagtgaaagagggggcaaataggcaatacgtt

SEQ ID NO: 7337 - DNA, 120 bp, synthetic construct
  source 1..120: mol_type = other DNA
aggtataataagttggaaaaggcagaggatgtttttctctttgtctctcccatgatgtctactctctgccctagtttgctatttccaatcgtttcaagaaccgttctggagacattccaa

SEQ ID NO: 7338 - DNA, 120 bp, synthetic construct
  source 1..120: mol_type = other DNA
gagtggcactactacgcaattggtctatctcttcaacaaggatcacagcaggggacctgtgggaaatggaatattttgtatgtatggatatggaaagaatgagaaggttatacgtattat

SEQ ID NO: 7339 - DNA, 120 bp, synthetic construct
  source 1..120: mol_type = other DNA
tcagagtgaaacttgtcccttgggatatttgaaagctaaaatgctatgcaagggaaatagggtcttgggtgtaaatggactgaggaatgtggagtcattctgtacttacaatgacaaaag

SEQ ID NO: 7340 - DNA, 120 bp, synthetic construct
  source 1..120: mol_type = other DNA
atatataaaatacaactactacacaggtaaaataagtgtcctaagaagggaagatcaagtgccaaggagaggtagaaaagaaaaagtccctcccctgccaaagccaacagatttctgcag

SEQ ID NO: 7341 - DNA, 120 bp, synthetic construct
  source 1..120: mol_type = other DNA
aaggacactgcctagtgcagctgtgagaagggggccaccatcctccagaccccagaatgatagacccactggcagcttgcaccctgggcctggaaaaccacgggcactcaacaacctgtg

SEQ ID NO: 7342 - DNA, 120 bp, synthetic construct
  source 1..120: mol_type = other DNA
gtttggatttcatcctttagagtctaaagtttagatataattgtttctcctttccaccacagatcacttaggaaaatggctgttggtatgatcctagcatgcctggcatttgcagttgcg

SEQ ID NO: 7343 - DNA, 120 bp, synthetic construct
  source 1..120: mol_type = other DNA
aattccaagaaataaaatggctaggttaaagaaaggaattactaggttgaaagtgtctgatgaggtcacctaccctgagatgctacatcgtgatgtccaatatgcagtagaaggtgtacg

SEQ ID NO: 7344 - DNA, 120 bp, synthetic construct
  source 1..120: mol_type = other DNA
tatgccccctgtactctggggcataaatcctttctgctgaattttatctatttatcttgctctcaggaaaataactgagtacttttctctctgtgatcgccagagagaaatttggaagtg

SEQ ID NO: 7345 - DNA, 120 bp, synthetic construct
  source 1..120: mol_type = other DNA
aaaaagaaacttagggacagctaagactatggattactttttacgtgtgggttcattcgtctagttaacaatatacattaggtaccttttatgtgccagccactatcctaggcacctggg

SEQ ID NO: 7346 - DNA, 120 bp, synthetic construct
  source 1..120: mol_type = other DNA
gcagtgcactgtagaacagaagataagaacttttctctgaatttgggtcttctagactttggtgcagcatatctgtttgttattactaatgtaagtagctcacagccacctctttaccct

SEQ ID NO: 7347 - DNA, 120 bp, synthetic construct
  source 1..120: mol_type = other DNA
atctgctagcatgtcacagtctgaaatactgaaactgataataatgtcaatccctacacaaagtttggggatcagttaactgtgatctgtcaaaaacaattgtcctagcagtcagggcag

SEQ ID NO: 7348 - DNA, 120 bp, synthetic construct
  source 1..120: mol_type = other DNA
tagattctggatattagccctttgtcagatgagtaggttgcgaaaattttctcccattttttaggttgcctattcactctgatggtagtttcttttgctgtgcagaagctctttagttta

SEQ ID NO: 7349 - DNA, 120 bp, synthetic construct
  source 1..120: mol_type = other DNA
tatcagcttaaggagatttggggctgagacaatggggttttctagatatacaatcatgtcgtctgcaaatagggacaatttgacttcctcttttcctaattgaataccctttatttcctt

SEQ ID NO: 7350 - DNA, 120 bp, synthetic construct
  source 1..120: mol_type = other DNA
ctatttgattcttctctctttttttctttattagtcttgctagcagtctatcaattttgttgatcctttcaaaaaaccagctcctggattcattaattttttgaagggttttttgtgtct

SEQ ID NO: 7351 - DNA, 120 bp, synthetic construct
  source 1..120: mol_type = other DNA
acccttttattttgagcctatgtgtgtctctgcacgtgagatgggtttcctgaatacagcacactgatgggtcttgactctttatccaatttgccagtctgtgtcttttaattggagcat

SEQ ID NO: 7352 - DNA, 120 bp, synthetic construct
  source 1..120: mol_type = other DNA
aagcacttctctgtattggttattttagttatacattcctctaaatttttttcaaagttttcaatttctttgcctttggtttgaatgtcctctcatagctcagagtaatttgattgcctg

SEQ ID NO: 7353 - DNA, 120 bp, synthetic construct
  source 1..120: mol_type = other DNA
cctcctggccaaaagcagcaacactttaacccttgttgcaaaagaatctgttcttctaatcttgttcattttcttcaatttccactacttcttttctaccaggctgataaccatagcagg

SEQ ID NO: 7354 - DNA, 120 bp, synthetic construct
  source 1..120: mol_type = other DNA
accctgaacatatatgacctgaacatcttaactccccaggtcatgacagtacagcatgggagtctatgattttggggttctaggaaagagattaaagattaaaatgaagagctgcagagt

SEQ ID NO: 7355 - DNA, 120 bp, synthetic construct
  source 1..120: mol_type = other DNA
gtgctgtgacatgaaatgggttagatatacagactttaccaggaaaatagacatatgtaagtggcaataatgactacaatatacctatgtgaggagaggccagtgaacccagtctttgtc

SEQ ID NO: 7356 - DNA, 120 bp, synthetic construct
  source 1..120: mol_type = other DNA
atccaaaccctcctttctcagtatggatagatcatggaaaccagattagagatagtaagcattagtaaacattgttctggagaacaggaacaggtgtaagttgtagaaatcctgaagagc

SEQ ID NO: 7357 - DNA, 120 bp, synthetic construct
  source 1..120: mol_type = other DNA
atataagagcggcagccagaccaaccagtttttccagatatcttgatgtgaacctgaccctactcctttagaagacagcctgttcatttttaaatagctttaacccaaactgttctatga

SEQ ID NO: 7358 - DNA, 120 bp, synthetic construct
  source 1..120: mol_type = other DNA
tctgactggaagaactagcacctgcctttcttcaaacaatgcacttctgttaatgcagtgtaaggtaacatgagttgtttttggaaactacatcataatgtgggcttacattctagcact

SEQ ID NO: 7359 - DNA, 120 bp, synthetic construct
  source 1..120: mol_type = other DNA
ccccagcaggcagccgcccagaaaagccctcggggagggtcctggggagaagcctggatctttggagtgtgggccaccggctctcccactttcagagggagcagtgagccctccggggtg

SEQ ID NO: 7360 - DNA, 120 bp, synthetic construct
  source 1..120: mol_type = other DNA
tggacggccgccgcacccactgtcctcccccaagaaccggccctgcctgagcgcagctcttgtcctggatgtggctggcagtaccccacgaggggccagtacccaggaggaagccctgga

SEQ ID NO: 7361 - DNA, 120 bp, synthetic construct
  source 1..120: mol_type = other DNA
ggtgcacatatacacatgtattcatgcatatacgagcctgtccacgtgcacacccatacaggtatatacatacactcatacatgtgcacgtatccacatgtgtatccacatacatgacta

SEQ ID NO: 7362 - DNA, 120 bp, synthetic construct
  source 1..120: mol_type = other DNA
atttcagaacatcgccctcagcagccgcctctccccgttccttgcaggtgtttgctgagtccagccgccccgggcctccaggattgccaggtgagggtcctgggctcacagctggggaca

SEQ ID NO: 7363 - DNA, 120 bp, synthetic construct
  source 1..120: mol_type = other DNA
aaaggacaagaattcccccctgagccccacctccattgagggtggcagggctgcttggatgtcctgccaagaccactgagaacagctggataaaatgtgagaaaaccactgtttgaggat

SEQ ID NO: 7364 - DNA, 120 bp, synthetic construct
  source 1..120: mol_type = other DNA
gagcattcccctcattcgaaggatcaacaattagagtgacgagatttctcaacaaaacgggagaagccagaagaccataaatggtttccaaaatatccaagaaagtcaattgccagtgta

SEQ ID NO: 7365 - DNA, 120 bp, synthetic construct
  source 1..120: mol_type = other DNA
atgaatagaaactagggaataaacagtagatttaggtcccgatacatctacaggtgctgtaagtatgacgagggtagatacatccattgaaggacagacattgtcaatgggatatggcta

SEQ ID NO: 7366 - DNA, 120 bp, synthetic construct
  source 1..120: mol_type = other DNA
taatgagatagcctcaagatatgacaagtgaaaaattggcaaagtgaaaaagaaaaacacaaatcaatcattatagggggactttcagcccagggagatctgaacatcaggtctgacagg

SEQ ID NO: 7367 - DNA, 120 bp, synthetic construct
  source 1..120: mol_type = other DNA
gtcacaggagaaggtttgcccagggccgtctaaggtcccacctggaaggagaaggggttttgtcatctccgttgacaaaattacagctttaagtagtacctgtttctacacatcagccta

SEQ ID NO: 7368 - DNA, 120 bp, synthetic construct
  source 1..120: mol_type = other DNA
aactctcaggatgagtaagtcaatgtaccgaagtcaccagatggaagggcagtctagaaaaaccaccaccgagtcctaagcaattaaaaatgaagttttaaaaaggcaccattgtgaata

SEQ ID NO: 7369 - DNA, 120 bp, synthetic construct
  source 1..120: mol_type = other DNA
aaataaaaataaaaaggcaccattaacaaaaacatcagaaagtatcggttaactaggaagaacctaattaaatacgcgatctctaccgcgaaatggctagaagggcctcaggcaaaccca

SEQ ID NO: 7370 - DNA, 120 bp, synthetic construct
  source 1..120: mol_type = other DNA
ggggtttctcaggctatggcgtgggcagggaggggaccggtgactcagaggctgcgctcgccaagggggtcttggcagctgcagccccacaagcttgcccgcccccagtccagggcacga

SEQ ID NO: 7371 - DNA, 120 bp, synthetic construct
  source 1..120: mol_type = other DNA
acagggatgggagcaggtggcagccagcgcttcttaaactttcaaacttttggtaaagtttagtaaaatacttttgtgagcagttttgggtttaaagaaaagtgagctcaagcttctgaa

SEQ ID NO: 7372 - DNA, 120 bp, synthetic construct
  source 1..120: mol_type = other DNA
agatgctgagctggtgcccactgtgtgccaggtgtgcttgtaggcacccggatgcagccccatcctaactttcaggggctttggtcctgacaggaggaggcaggggatggcatcctagca

SEQ ID NO: 7373 - DNA, 120 bp, synthetic construct
  source 1..120: mol_type = other DNA
caaggtcaaaatccttggggccaaaatccacatcttgtgtctttgccttccctcacccaaagtgccagacacaagaatggatatctctaagagtggtgggtgactgggtgggtgaatcaa

SEQ ID NO: 7374 - DNA, 120 bp, synthetic construct
  source 1..120: mol_type = other DNA
tcactcatttgctgattcattctttcattcagccagtcaatagtcatggcccctcctgtgtgccgggtggccatggatattgccctgggtaacacacagcctggccctgtggagcagaca

SEQ ID NO: 7375 - DNA, 120 bp, synthetic construct
  source 1..120: mol_type = other DNA
gtgcctgtccacacaggtgcggggccggggtggtgcgcccggggcctgggtgcagggggcagcgtgggacacagcccgtgacgcgcccctctccccgcagctccacctggttgcgctcaa

SEQ ID NO: 7376 - DNA, 120 bp, synthetic construct
  source 1..120: mol_type = other DNA
gcgggcgggctcctatctgcagtttccccccgagtttttggacaaatcttatacatgctcattactttaaaattacaaaatccaaaagagcattgagaaaaatgagaactgctctgagaa

SEQ ID NO: 7377 - DNA, 120 bp, synthetic construct
  source 1..120: mol_type = other DNA
aatttccagggtatctagaagaacgcttcgtcccaaatgtcgctgtgccctccccacgtgagcgccgcgattcttccaacactcatgcatttaggggtgtctcggggtgccacacagcgt

SEQ ID NO: 7378 - DNA, 120 bp, synthetic construct
  source 1..120: mol_type = other DNA
tccaacaccaagcacagcagcctggggctggcctcccaaatgagccatgagatgatacatccaaagcagacagctccaccctggccgagtccaagctgggagattcaagggacccatgag

SEQ ID NO: 7379 - DNA, 120 bp, synthetic construct
  source 1..120: mol_type = other DNA
aattgtgtgtgatgtgaagccaattcagacaggcaaataaaagtgaccttttacactgactcttggtttgcaagcagccttcactgtcacaggaaggacacaattctccaaaaggagttc

SEQ ID NO: 7380 - DNA, 120 bp, synthetic construct
  source 1..120: mol_type = other DNA
caacctgagatggcttttccacagagacagagaagccacatgcagttcttcattctacgtcagttaaaaaaaaaaaaagcatctttcaaaaaagcaagagcaccaaggatgaccagcaat

SEQ ID NO: 7381 - DNA, 120 bp, synthetic construct
  source 1..120: mol_type = other DNA
agtcactggttcacattctgaacaccgtcgcttggaagacactgcaaacccagcttgctgacaccaggaggatggacagccagctggggacaagtctcatctgcagcctcagggcctgag

SEQ ID NO: 7382 - DNA, 120 bp, synthetic construct
  source 1..120: mol_type = other DNA
ttcttttcacctcagatattttgaaactgaagaaggcagcaggctggaaaagacaacagatgcagaaaaaagagcccatggaagcagctctctctggcctaagacccagggaagggtcag

SEQ ID NO: 7383 - DNA, 120 bp, synthetic construct
  source 1..120: mol_type = other DNA
cctgcaggagttgcgtcagccacaacaggatgctgaaattacatcatacccaaaatgcttgcatctcactaaaaaatcccttggcacactaaaccacaaagatctcaaactgaaaaacaa

SEQ ID NO: 7384 - DNA, 120 bp, synthetic construct
  source 1..120: mol_type = other DNA
gcaagcaatttgaataacagtaattgctcatcaaaaatcctgaaagctatgaggaaggggcaccacatttctcacaggctaaaaaaaaagaacactgtctacccagcatcctatatccag

SEQ ID NO: 7385 - DNA, 120 bp, synthetic construct
  source 1..120: mol_type = other DNA
tacttaggagacttcaataccccctctcaataataaaactagacagaaaatccacaagaactgagaggaaatcaataccatcagccaacaggatctgatcagcatttacagaacactcca

SEQ ID NO: 7386 - DNA, 120 bp, synthetic construct
  source 1..120: mol_type = other DNA
ggcagcccaaacagactaatgcagataacaaatttcaaaatatggtttgatttacttaagaaaaagcataaactaaaaacatgtatagtactcatatgctgaaaactacaaaatgctgaa

SEQ ID NO: 7387 - DNA, 120 bp, synthetic construct
  source 1..120: mol_type = other DNA
aatttagggctaggcaaagagtttccataaaaggaaaaactgttaaatcagagctcatgggagttaaaaaacacttgttctgtaaaagaccacattaagtagatgaaacaaccagctaca

SEQ ID NO: 7388 - DNA, 120 bp, synthetic construct
  source 1..120: mol_type = other DNA
gctggttgtgatgtgctacagaactgtaagacgtgaccactgtgaaaactgggtacggggtacatggatctccctgtattatttattaaacagcatgtgaatataagattacccaaatat

SEQ ID NO: 7389 - DNA, 120 bp, synthetic construct
  source 1..120: mol_type = other DNA
atgcattcaacagaagccttctgggccccctttctgcagacctgagaccagcccggccaccaggaggctgtgtccacccaggccgggcctggacacattcacccgtgggccttggagact

SEQ ID NO: 7390 - DNA, 120 bp, synthetic construct
  source 1..120: mol_type = other DNA
taatgacactcttgggctgaagaatgcatttcgatgagtgagcaacagccatcctcacctaacaggcatttgtgagccgaaggggatgcctgctattgcccgggccttaccctgagctct

SEQ ID NO: 7391 - DNA, 120 bp, synthetic construct
  source 1..120: mol_type = other DNA
gacaatgaaagtgatgatggtcttgacgatggtggcaaagaacgtgttgaccccgaagaccagggcacagagctctttagacagagaagatgcaatctgaaagctgaacgggaagagcgg

SEQ ID NO: 7392 - DNA, 120 bp, synthetic construct
  source 1..120: mol_type = other DNA
cagaccaggtcacgggcgtctcaaaacattcagaaaatcatcatcaagagaacctctgggcacagacagaaaagtctagaatgaaagtctttcacggttaaatgtttgataaattagaag

SEQ ID NO: 7393 - DNA, 120 bp, synthetic construct
  source 1..120: mol_type = other DNA
caccacattcctgacatggagaggtgacacgccaggcttctggtgctctgcaaagaaactagtcttccgatgcagttccaattaaaatctgcaaagtgcttaaaaaaaaaaaaaaaaaag

SEQ ID NO: 7394 - DNA, 120 bp, synthetic construct
  source 1..120: mol_type = other DNA
cctgagggtcattattagaatttggaaacaaaaatgtaggtagaagggcattcatctcagtgttttcctcgtgtaagaaaaatggaaatggtgactttacccatagactggggatgggtt

SEQ ID NO: 7395 - DNA, 120 bp, synthetic construct
  source 1..120: mol_type = other DNA
tgtgtgtgtccgtgtgtagtgtgtgtccatgggtaagcatgtagtgtgttcatgtgagtgtggtgggtgtccgtgtgtgtggtgtgtgtccatgtgtaagtatgtgatgcattcatgtga

SEQ ID NO: 7396 - DNA, 120 bp, synthetic construct
  source 1..120: mol_type = other DNA
cgcgatgagcagcttggaccagcgcgcccagcggatcttcacgaagcccgcggcgaaggacgtgatggcgcctgagaggggagggatggggcgttgcagcggccctggggggccacgggg

SEQ ID NO: 7397 - DNA, 120 bp, synthetic construct
  source 1..120: mol_type = other DNA
cgagagagaagatgtaggaggaataggcgatgcgcgcggccatggtgacgctgtagaagagctccatgagctgcatgtgcgccaccgagtggcccagcagcagcagcagccacaccgaca

SEQ ID NO: 7398 - DNA, 120 bp, synthetic construct
  source 1..120: mol_type = other DNA
tggttttatttcattttaaacaatatggaaaacacagctgtaacccatacacattcacaccagcacaagcttcttccatccttcctggagagagacaaaaacagaagacacagaaaggaa

SEQ ID NO: 7399 - DNA, 120 bp, synthetic construct
  source 1..120: mol_type = other DNA
caataggaccctgcagccaggccggcatgctgagaagcttcccaggggctcaggggaaggctgcccagagaccccacctcagggcaccctgaggtcgcaccctggagcctgcaccctcat

SEQ ID NO: 7400 - DNA, 120 bp, synthetic construct
  source 1..120: mol_type = other DNA
agcgtcggccctgctctccacaggtcttggttggggtccaggctgaatgggcagagtgcaggcagctgcgcccaaatctacgtccagacggcctcagggcggcttctctgaacagggagg

SEQ ID NO: 7401 - DNA, 120 bp, synthetic construct
  source 1..120: mol_type = other DNA
cctctgatgatatccaaggcctggtggaatggcttaatttctggaatctactttttaatccgttaatgtacaacatgagagggcaggcagatgggatttaaacatttttgctctagagac

SEQ ID NO: 7402 - DNA, 120 bp, synthetic construct
  source 1..120: mol_type = other DNA
tcatgtgacctgagagacccgtgactgggcataagcctattagaacagtttcaataagaccctttgtcctcatggctgagtaaaatgaaaattccttcaataatctctttaggtaaatag

SEQ ID NO: 7403 - DNA, 120 bp, synthetic construct
  source 1..120: mol_type = other DNA
agtcccccaggccaggctgtcaccacctccagggtctccgaggctgagggaagtctccagccacatggagtgatttaagtgccaatcaaaaccaagttaattaactaattgacttacttt

SEQ ID NO: 7404 - DNA, 120 bp, synthetic construct
  source 1..120: mol_type = other DNA
aaagcctgtccacttatcagaatcatgtctccaggtgccacgtggccctggttttccattaaggcctcggtgtaaagttctccttcaagtaagtcaaaagtgaactgccataaacaagtg

SEQ ID NO: 7405 - DNA, 120 bp, synthetic construct
  source 1..120: mol_type = other DNA
caggccacttaggcaaagccatcagcatcatctggggtcccgtcttgacacctctacacactcatgtctgtgacaaaggaacataggtgatggcagggaagcccttaagaggcagaggct

SEQ ID NO: 7406 - DNA, 120 bp, synthetic construct
  source 1..120: mol_type = other DNA
acacaagcaaacgccacctatcattccgtgtttaaaccagctcctactctggaaggctaaccaagaatgttcgttatgttttttagaacgcctgctagtttaaaaagaagaagaagaaag

SEQ ID NO: 7407 - DNA, 120 bp, synthetic construct
  source 1..120: mol_type = other DNA
ggcgccccaggatgacgcggagggcaggctgggggccgggactccccaccccattcgcaggctgcggcggaaagcgagcggcgggaaacccgctgcacagcaacggttctgccaggcgcc

SEQ ID NO: 7408 - DNA, 120 bp, synthetic construct
  source 1..120: mol_type = other DNA
cctgcattcctggccgcaagctggatccgggacgcgggtcgggcccacgcgccctcaggggtggccctgggccgccttcgtggggctccaacagggacacgcacagcctgctcttgggga

SEQ ID NO: 7409 - DNA, 120 bp, synthetic construct
  source 1..120: mol_type = other DNA
ctttccagagtcctgagtgtagcaagccacacgaacaaatctcaaaggaacttaaaaaggatttgttggctggaaatgggggatctggggtagcttgcagaatttaagggaacactacag

SEQ ID NO: 7410 - DNA, 120 bp, synthetic construct
  source 1..120: mol_type = other DNA
cttggaccaaatgctaatacatggacacacatgcacagagacacacagatccatgcagacgtgcagagacgtgcacatgcagatggacacagacatgcgcagacacgcacacacactgat

SEQ ID NO: 7411 - DNA, 120 bp, synthetic construct
  source 1..120: mol_type = other DNA
aaacagcccccctcatacgtacacacacgtacagacaccaccaagacatatgcacagatacagagacgtaaacatacagacatacacatgacacagagatacagagacatacacatgcat

SEQ ID NO: 7412 - DNA, 120 bp, synthetic construct
  source 1..120: mol_type = other DNA
ctaagcgtgacattagaagacaaaatgattgggaaggaagcggcagagtctctgttcacagatgatgcaattgtcagggcagtaaatcctaacaggttatcaaaaatactagaaataagg

SEQ ID NO: 7413 - DNA, 120 bp, synthetic construct
  source 1..120: mol_type = other DNA
tagaaattgaaatgttgattcagaattgagatggaaatgcaaaagacttacaatagccagaacaattgtgactaagaaaagtgacgtcggagagctcagagatatggagaccaagggaag

SEQ ID NO: 7414 - DNA, 120 bp, synthetic construct
  source 1..120: mol_type = other DNA
gttctcatgtaactgctaaaaactggcaacaacccgaatatccattatgggatgaaggataaacacgcagtacatccacataacagggactactcagactaaaaggaaataacaactgag

SEQ ID NO: 7415 - DNA, 120 bp, synthetic construct
  source 1..120: mol_type = other DNA
acactgtggctcttggttgcagatggggtacaggtccagtatgctccagccacgtaggtctccatgtgacctccttcacatcttgtccccacagagaccctcatctctgccccttcttag

SEQ ID NO: 7416 - DNA, 120 bp, synthetic construct
  source 1..120: mol_type = other DNA
ttagtccctttcctgttcttcacagtcccagctacgcctgggttggttgcactctctgttcctcttattttctttcaaggaactaccttttggatctaaaaactcaagttttacttaaga

SEQ ID NO: 7417 - DNA, 120 bp, synthetic construct
  source 1..120: mol_type = other DNA
ctatgcacatcgtgttttatatgaataaaatctaaattgcaaatagtgggatttcaatctctgatagcctcattcatgcattgtctggggtatgtgtcaagtttgccagagtgaagggcc

SEQ ID NO: 7418 - DNA, 120 bp, synthetic construct
  source 1..120: mol_type = other DNA
agtctgacctgacacgggagtctctgggctggtccgcccgtccaccctgtccctgcgtttgtgctgataggaggacactgctcaaaacacacgacggctgtgtgctataatccacggtca

SEQ ID NO: 7419 - DNA, 120 bp, synthetic construct
  source 1..120: mol_type = other DNA
ccacgccccctcccagtcccccacaccccctcccagtcccccacaccccctcccagtcctccacgccccatcccagtcccccgagcccccctcccagtcccccgtgcccccctcccagtc

SEQ ID NO: 7420 - DNA, 120 bp, synthetic construct
  source 1..120: mol_type = other DNA
acatttggacatctccttccgcttggctgtggtgactaaagctgctgtgctatcatttttactattattgttatgacaagttgacaagtgaatctttctcttacggtttcggtttttccc

SEQ ID NO: 7421 - DNA, 120 bp, synthetic construct
  source 1..120: mol_type = other DNA
agcaaggtctactcccgcgaggtgaccacgggacagacgatcctctgaggtttccaggaagacccccgccctaatcctctgaaggtcggaggtcacaggtcaaagccgagaacagaagct

SEQ ID NO: 7422 - DNA, 120 bp, synthetic construct
  source 1..120: mol_type = other DNA
attaaaattgattaaatttgtactaattaaaactaactgaattcttctcaaaacaccgtgcagacgaaaccagtcagtgacacacctgtctgcagccatagcaccaggagacatggggtg

SEQ ID NO: 7423 - DNA, 120 bp, synthetic construct
  source 1..120: mol_type = other DNA
agtgtgatgctcacctttgcctcctgcgtgtctgacggaatcattcctgtttagacatgagctccattcttcggagggcatgaccaggaggccacctatttggggatatttttagagtca

SEQ ID NO: 7424 - DNA, 120 bp, synthetic construct
  source 1..120: mol_type = other DNA
ctacataaatttgggaatgtcagtggcagaaatcacaaaggaaaagatgagtagatgtgcttgcatccaacctaaaaacatctttaagtcaaaaagcaccatgaagaactgccagcccct

SEQ ID NO: 7425 - DNA, 120 bp, synthetic construct
  source 1..120: mol_type = other DNA
tgcgcatcattccctcacacagggtatttttaagagaaattgctagacatggagtttgctgtcaaaatggcccccagtgtgacaagcagatttatttttactgtgacatccatttctgat

SEQ ID NO: 7426 - DNA, 120 bp, synthetic construct
  source 1..120: mol_type = other DNA
tcttgttgagaagacaagagaggcaagaggtctgaacaacacccagctgggggcaaatgccttcagacaagcacaaccaaagtaaaacaggaacgagcaatgaccctaaaagatgtgcta

SEQ ID NO: 7427 - DNA, 120 bp, synthetic construct
  source 1..120: mol_type = other DNA
gtgaaggtgggaacctgcacagcaaagaaagataagacttccaggctgggtgcagtggctcacgcctgtaatcccaacactttgagaggccaaggcgggcagaccacaaggttaggagat

SEQ ID NO: 7428 - DNA, 120 bp, synthetic construct
  source 1..120: mol_type = other DNA
cagaaggctttgccacagtaggggagataaactcgttctaggctaaaaactgttctgaccttgcctgaaacgttcaaagcaagcctcgggagaaacaaactgtttccatgtaacttaatt

SEQ ID NO: 7429 - DNA, 120 bp, synthetic construct
  source 1..120: mol_type = other DNA
taaaaccaactagagggagggaaaacttcacatacagaggaatgaagataaggataaggatggatttctgattggaaacaatgcaagtgagaagaccatggagcaacctctttaaagtgc

SEQ ID NO: 7430 - DNA, 120 bp, synthetic construct
  source 1..120: mol_type = other DNA
gaatccaaagactgaaagatttcatcaacagtagacaaatgtcatatgacatgttaaaggcagtcgtcggacagaaggacaatctgaagctggacaaaggaataaaaagtattggaaatg

SEQ ID NO: 7431 - DNA, 120 bp, synthetic construct
  source 1..120: mol_type = other DNA
acagctagaatgtaaggagaagtacacaaaccaacaattacagtcagagagttcaacacctcatttcaataactgatagaacaaattgatagacaacttagtaaaggcagacaagacttg

SEQ ID NO: 7432 - DNA, 120 bp, synthetic construct
  source 1..120: mol_type = other DNA
atccactttcaaataacgctatgttgctccacatacaagtatcttgtaacagaatattcccagtcctctcccatcccttaccacattgctgtcatttgttttacttacctatatgctata

SEQ ID NO: 7433 - DNA, 120 bp, synthetic construct
  source 1..120: mol_type = other DNA
agtctttaagactaaaggcaaaggaacagtacgtaagcactggactctagctgacaaagttgtctcccagtgaggtgtgaattaacagttctgacactaccataatattgtcttagtctg

SEQ ID NO: 7434 - DNA, 120 bp, synthetic construct
  source 1..120: mol_type = other DNA
acaagatgagactagaacatcttgtactaaaatgtagtaataaaatgccaaaacaaacctcagattgatgggctatgtcaaagggctacaggagttgactggaagagctcctaacgggca

SEQ ID NO: 7435 - DNA, 120 bp, synthetic construct
  source 1..120: mol_type = other DNA
actagaaaaaataataaacagtttagttatggcaaataagcacatgaaagagtgtcattattcatgagggaaacggaaattaaaacccggtaagatggctggggcgcagtggctcacgcc

SEQ ID NO: 7436 - DNA, 120 bp, synthetic construct
  source 1..120: mol_type = other DNA
gaaatatgggttttagagtaaagtctgtggattgttggtgttacagagggaccacagcactgtctttagcattcaccccggaagtgtgtgggttttttctggagtttaaaatgattaatt

SEQ ID NO: 7437 - DNA, 120 bp, synthetic construct
  source 1..120: mol_type = other DNA
tgcattgtgactcatgaaatcgctcttcgctcaaaggtctgttaacagactttgttttgggtcagattcggttctacaaactgctacctgtgaccctgacagcatgatttactctctctg

SEQ ID NO: 7438 - DNA, 120 bp, synthetic construct
  source 1..120: mol_type = other DNA
gcacggcatggcagagatttgtagataaatgttactggaaccctgatcacattgtacctgaagcctgctctcctctggactttctagttatgagtcaatattaatcaacaaattcatgtt

SEQ ID NO: 7439 - DNA, 120 bp, synthetic construct
  source 1..120: mol_type = other DNA
atcgtcactgaggtaaaaaagcctctgtaacatgggagttcctgggacagggagaaatataaagcaaatcctatgaagttcagttccatatcaggaaagaggtagggggctatgtttatt

SEQ ID NO: 7440 - DNA, 120 bp, synthetic construct
  source 1..120: mol_type = other DNA
agcattttgctttgagaatcctttagtaaaaagtgtcaccacatttttttcccatcatgagcccttttgaaactattgcacggtaacaagtgtggatgcttggtgggttggagaagctgt

SEQ ID NO: 7441 - DNA, 120 bp, synthetic construct
  source 1..120: mol_type = other DNA
aggatgcccagttaaactcgaacatttgaacttcagataatccaactggataggatacttacttcccagatactgcatgatatttggtactgataactgagactggaaatgcaaatattg

SEQ ID NO: 7442 - DNA, 120 bp, synthetic construct
  source 1..120: mol_type = other DNA
cttagttattcatttctgcagaactaatttttaacctagcattgccttggacattggaacttgctttaggagggaaggtgagctaatctgttcgaacgccaagtttaactcccactgcaa

SEQ ID NO: 7443 - DNA, 120 bp, synthetic construct
  source 1..120: mol_type = other DNA
attttcctggcttttgactctcccaacaagaggatctcttctggtgctaagatcatgaggtccactcggggggtatgtgggcattttcctggcttttgactctcccaacaagaggatctc

SEQ ID NO: 7444 - DNA, 120 bp, synthetic construct
  source 1..120: mol_type = other DNA
tctcaggccaagggagacagaggtagttacattagtgtttctcaaacttggctgatcctcaggatcacctggattcctattcgggacccactgaggcagaatacacagggaatctgtggt

SEQ ID NO: 7445 - DNA, 120 bp, synthetic construct
  source 1..120: mol_type = other DNA
cagaaggcagttactaggagaggcttgtgtttgtttctgaaactcaggtggtaacacagagtttaacctatatttcagggaaaaaaaaaagtgctcatgtcaaggaactagtcagtccat

SEQ ID NO: 7446 - DNA, 120 bp, synthetic construct
  source 1..120: mol_type = other DNA
ctcccctggcttttggtgcatgggagcctctgatgtcctcctaacctttggtcccacccacatgtgaccataaggcacagtctatctcaagaaacttaacaactaatagcttactattga

SEQ ID NO: 7447 - DNA, 120 bp, synthetic construct
  source 1..120: mol_type = other DNA
gctgagtgattcatcagaaactttgaatttgtcttatgaaaatgtagtaggagaaaactctgtgaaacagcccagggataccgagtttgatgaactgcatttgctttgctgaagagagga

SEQ ID NO: 7448 - DNA, 120 bp, synthetic construct
  source 1..120: mol_type = other DNA
gttggagaaaacccgaaggcaggagagtggagttgtgtgaacaactctttaaaagagtgtggggagggtccaggatgaggaggctgataggggagggagtcagggatgcaggaagaagac

SEQ ID NO: 7449 - DNA, 120 bp, synthetic construct
  source 1..120: mol_type = other DNA
actagggcaggacatgggctagaatggcctcctctctttttgtgtctgagacacttaaattatcacttagattactgacctattaatcaactaatctatttggggaacaaaaagacccca

SEQ ID NO: 7450 - DNA, 120 bp, synthetic construct
  source 1..120: mol_type = other DNA
agccacacttttactcatttgtgggggagaaaaaagaaatagcctgtcttttcatctttgaaaacaaggtgctatcacttggcattctgagaactcattcactagggccaagaggatcca

SEQ ID NO: 7451 - DNA, 120 bp, synthetic construct
  source 1..120: mol_type = other DNA
gggtttcccacacgcatgatgcatagggatgaggggagcctggggcttcccacatgcatgatgcatagggatgagcagagcccggggtttcccacatgcatgatgcatagggatgagcag

SEQ ID NO: 7452 - DNA, 120 bp, synthetic construct
  source 1..120: mol_type = other DNA
cttccccctcttctcttcctctctgctgtcatctctgctcttctcccacttcttcatttttatagtactattggtattattattaagacactgaaatacctctcatctagccatagagca

SEQ ID NO: 7453 - DNA, 120 bp, synthetic construct
  source 1..120: mol_type = other DNA
ggctgttatcacaaaaaagaaacactgaagcaataaagataatggaccacatcgctcaaaagaatgggaagttgcctcctgctgatttaaaggtgaaatctaggaaggggtatctcacat

SEQ ID NO: 7454 - DNA, 120 bp, synthetic construct
  source 1..120: mol_type = other DNA
atgtgaggttttattggaacaaagagtttgtagtaagtcagtgcctggcatattgcagaccctaaatcaatatttgctgaaagttgaatgagtaaacactgtgccccagaatctgtccag

SEQ ID NO: 7455 - DNA, 120 bp, synthetic construct
  source 1..120: mol_type = other DNA
gtaatgggagaagtgatagtacctatctcacagatgtgttgggaggattaaggagattatatgtgtaaatgacatagaagagggtacagcatccatgcaggaaatgttcaatgtcaatgt

SEQ ID NO: 7456 - DNA, 120 bp, synthetic construct
  source 1..120: mol_type = other DNA
tctatcatgaaaaaaatgtatcattggggcccttctaggacactctttctcatttttactcccctcttctcatattgctctagggcattctaaacccagtgattcatgctctttctccat

SEQ ID NO: 7457 - DNA, 120 bp, synthetic construct
  source 1..120: mol_type = other DNA
ttgagttttaacatacatacaatcagcaaactataagtgcatgactccatgagtttttaaaaatgtgtacacccgggcagcatgatccacgtaaagatggggaacctttccaacttctcc

SEQ ID NO: 7458 - DNA, 120 bp, synthetic construct
  source 1..120: mol_type = other DNA
aacacatgggagctccgattactccagatcctcccaacacttgatctggctcatctttttaagagtggccattttggtggatgtatactttagtctgtaattcttacaatcaaagataaa

SEQ ID NO: 7459 - DNA, 120 bp, synthetic construct
  source 1..120: mol_type = other DNA
tagtccttatcacattttaggacagtcattcattcaacccgcaggaaatatctccaggccttctatatggctggcaggtatctaggtcctaggatttcaaccatgagcgaagcagagaga

SEQ ID NO: 7460 - DNA, 120 bp, synthetic construct
  source 1..120: mol_type = other DNA
agcccaggaaaccaagctgagattcaaaaagcccattctttcccctgttcaatggagtcttcttgaatatgtcatcgtcaactccccaaatctcttgagactcagtttacttatctaaaa

SEQ ID NO: 7461 - DNA, 120 bp, synthetic construct
  source 1..120: mol_type = other DNA
tacgcgagtatttccatacatgtgattcccttaaatttgttcttgggtatgatcatccccatattacatatgaggaagctgtgatttagaaagggaaagaagcgttgtaggggtcagaca

SEQ ID NO: 7462 - DNA, 120 bp, synthetic construct
  source 1..120: mol_type = other DNA
atatttccatcacccccaaaaggttcttcatgtctctttgcagttaatacccttttcttctcacctccagaccatgcagttttagcttttccagaatgagctgtaaatgtaataataggg

SEQ ID NO: 7463 - DNA, 120 bp, synthetic construct
  source 1..120: mol_type = other DNA
caccacacctggtctggtgtcagctttctaaaagtcattttggtaggtaatggtattattgtgacttgacttttcctaattactgataatgttgagtatctttgtctgtacttaattgcc

SEQ ID NO: 7464 - DNA, 120 bp, synthetic construct
  source 1..120: mol_type = other DNA
cagtttcagagttggactgctctgctcctcttcactttgtgcagcacgtgttgtaagaacattcatttggcattaatacccactgccttgttttgaaaatgatctttccatttttatctc

SEQ ID NO: 7465 - DNA, 120 bp, synthetic construct
  source 1..120: mol_type = other DNA
cccagaacatggcctggctgcttccccacaaacccttctagaaatggctgatagaggaagaaataacagtatgaaaagatgagtaataaacaaaaaagtaattcattcaggaggtacaca

SEQ ID NO: 7466 - DNA, 120 bp, synthetic construct
  source 1..120: mol_type = other DNA
agagtcaccaagtagccaggctgaaagtttgtcacctatataagaagaacaaattgttatcatttgatgaagacagtcaatgcctgcagtgacctcaagaaaataaagtgcaatccagtg

SEQ ID NO: 7467 - DNA, 120 bp, synthetic construct
  source 1..120: mol_type = other DNA
acagataaccaacacatactgaaaataaaagacaccagaagcaataaaaagccctggtgtgaataggtgatagaatatgaatagatgacagcattgatatgacagaactgacatggtaga

SEQ ID NO: 7468 - DNA, 120 bp, synthetic construct
  source 1..120: mol_type = other DNA
tcaaactgacctagaaatggcacagatggtagaattagtggacatgaacattagaacagttatgatacctatattctctatgtttaaggtcctagagtaaagattgagcatgttaagtag

SEQ ID NO: 7469 - DNA, 120 bp, synthetic construct
  source 1..120: mol_type = other DNA
gcactgaaaatgataactacgtgagtaaatggaaattttttttttctggttattttctttaaaagacaatgaactgtttaaagcaggcattggcaaacttttccagtacagagctggata

SEQ ID NO: 7470 - DNA, 120 bp, synthetic construct
  source 1..120: mol_type = other DNA
tgggctgtagtttgccaatcaaaacaataatcacaatgtgttgtgcaaaggctgggagggaagaaacacaagtatactattgtaaggttcacatataatctatgaatgttacaatattac

SEQ ID NO: 7471 - DNA, 120 bp, synthetic construct
  source 1..120: mol_type = other DNA
ggtgatgacaggtcatggacctagaacaggagtgaggtaaaattgaagtttagagcagggagcatgtgttctttttatctttgtaaggcttgtagcaattcttcaggtattatacaccta

SEQ ID NO: 7472 - DNA, 120 bp, synthetic construct
  source 1..120: mol_type = other DNA
catcctctggctctggactccaatcattcatactataggacagaatctgagagaccttttgacagtctcctgataaatctgatcaccaattcttacacatttaacacacaattgctagag

SEQ ID NO: 7473 - DNA, 120 bp, synthetic construct
  source 1..120: mol_type = other DNA
tctgacacgccctccaaaaggggcctaatatcactccacattctccatttcctctatcttaaaagtttaggagagctttacagatatttgtatgtctttttattactcccagaactgcta

SEQ ID NO: 7474 - DNA, 120 bp, synthetic construct
  source 1..120: mol_type = other DNA
cttggccttcttggtttttggtttagaatgtgaatgatgcaactcaggaatctgttttaataatctctgccaacaatgcacatgcagataggcactctgtacacttcacttggggaaatt

SEQ ID NO: 7475 - DNA, 120 bp, synthetic construct
  source 1..120: mol_type = other DNA
ctagttgtacaaaaacaggctataagctcgaatggggccacaggctgtagtttgctatgcccttttcttctttgctgtttgccatccttactttctctttgtcttgacacttattcattt

SEQ ID NO: 7476 - DNA, 120 bp, synthetic construct
  source 1..120: mol_type = other DNA
gctgaaaacaaatggtagtgtgggatataagtcagccaatgatcatcatttcgctgctatttgggcaaaaccctgtgctctctcgctcattctgacttaaaatctagcagaaaatatgat

SEQ ID NO: 7477 - DNA, 120 bp, synthetic construct
  source 1..120: mol_type = other DNA
tgatagttcactagggaaatttatttttacatgagaacatgatacgaaaggacttagtaaaatcagtcaaatggggaactctacacgtgctatgactttgaagccttccctggtcccctc

SEQ ID NO: 7478 - DNA, 120 bp, synthetic construct
  source 1..120: mol_type = other DNA
ctactggccaacaagccatggagttatgccttgggcagaaacagccacagaactgttcatcactttcaaagataaaaaaaattaaaatggtatcttaaaacgttttagtttaggctgggc

SEQ ID NO: 7479 - DNA, 120 bp, synthetic construct
  source 1..120: mol_type = other DNA
tggggttttttaaaacaaaatttgagggaattctttgatgctgatttactgattagagttagccaaaaagtctactgaaatgataaaaaccctctggccacgggaggctgaacggggaag

SEQ ID NO: 7480 - DNA, 120 bp, synthetic construct
  source 1..120: mol_type = other DNA
ggagcatgtcttctgccagtgagagccactgtgtaaaggatgcagagacttgaattaatgatcagttaaaagaaaaccgtgcgctgggtaatttttaaaattcaacaaggcaaatgtagt

SEQ ID NO: 7481 - DNA, 120 bp, synthetic construct
  source 1..120: mol_type = other DNA
tgctcaaaggcttgaaatttcccaagcaaaagctgaaagaaatacaagtggtacagagatattgtctgggcgttgcattttatcaggaaaaaagagtgggtggaatctgctaaccagtat

SEQ ID NO: 7482 - DNA, 120 bp, synthetic construct
  source 1..120: mol_type = other DNA
aatgaatatgacgagtaaaaagataaagcacaaagaaagcagacacagtagatgccatgtgcatctgcagaggggtgaagtttgaaattaactcccatttgttttgctcctgtgcttgag

SEQ ID NO: 7483 - DNA, 120 bp, synthetic construct
  source 1..120: mol_type = other DNA
ctccctgattttcgcaatacccatactcttaaccacttctttctactgcctcagaaaatgattgcaagtaaaaatgtaaagtaactgccctaaagacagttcagtgtttccctccatccc

SEQ ID NO: 7484 - DNA, 120 bp, synthetic construct
  source 1..120: mol_type = other DNA
gaaaatacttcttgaatggcagcagccttcaagacaagagtcagccaacatcatagttaggtcaaaaggttgatgctcagagtctaaatggtttttgtatatgggccattgtaaaacaca

SEQ ID NO: 7485 - DNA, 120 bp, synthetic construct
  source 1..120: mol_type = other DNA
atcaagctaaatgccccacagtgctgtggtgagttatttctgtgcatggcaagatagtctcaagtaacagataaagttaggttatctctcacatatttgacttccagctggttaattccc

SEQ ID NO: 7486 - DNA, 120 bp, synthetic construct
  source 1..120: mol_type = other DNA
ccagaatcccaaacatgcatttctagtaggttctcatgtctttggggactgactctgctgtgtttcttctaggcttctaaagacttaactaaatagaagatggccattaatgtccttcct

SEQ ID NO: 7487 - DNA, 120 bp, synthetic construct
  source 1..120: mol_type = other DNA
ccaccgcgcctggccaaatgcttgcttttttgtagtttctgaggttagcagaaagcttggtatgttgtttaatcttactgatatagttaggttgcaacatatgcaatgagagttgctttc

SEQ ID NO: 7488 - DNA, 120 bp, synthetic construct
  source 1..120: mol_type = other DNA
aggaagaaactgcatcaactaacgagcaaaataaccagctaacatcatcatgacgggatcaaatgcacacataacaatattaaccttaaatgtaaatgggctaaatgctccaattaaaag

SEQ ID NO: 7489 - DNA, 120 bp, synthetic construct
  source 1..120: mol_type = other DNA
ctaacatcacaattaaaagaactagagaaccaagagcaaacacattcaaaagctagcagaaggcaagaaataactaagatcagagcagaactgaaggaaatacagacacaaaaaaccctt

SEQ ID NO: 7490 - DNA, 120 bp, synthetic construct
  source 1..120: mol_type = other DNA
gaagcattccctttgaaaactggcacaagacagggatgccctctctcaccactcctattcaacatagtgttggaagttctggccagggcaatcaggcaggcgaaggaaataaagggcatt

SEQ ID NO: 7491 - DNA, 120 bp, synthetic construct
  source 1..120: mol_type = other DNA
caataccattcaggacataggcatgggcaaggacttcatgtctaaaacaccaaaagcaatggtaacaaaagtcaaaattgaccaatgggatctaattaaactaaagagcttctgcacagc

SEQ ID NO: 7492 - DNA, 120 bp, synthetic construct
  source 1..120: mol_type = other DNA
ttctggcatagataaatgatatacaggaagactttcgcttctgacagcatggaatagagaattagaaaaaggaccgccaaatttactcaaagtaagaaaaatggagaaaaagagcagaaa

SEQ ID NO: 7493 - DNA, 120 bp, synthetic construct
  source 1..120: mol_type = other DNA
gaagcctagatcatactacagcaataaaataaaatgaatgagtggttaaatgcttcaccacaagaaaacatcagctagatggctttgaaggcaagccccactaaactttcaggcagcaga

SEQ ID NO: 7494 - DNA, 120 bp, synthetic construct
  source 1..120: mol_type = other DNA
ttccatttaaaattagggctaatggaacgatggtacactcaataaggcttcaacactgtgctgaagtcctagctagtgtagttggagaaatactggaaaagaagaagcaatactatcatt

SEQ ID NO: 7495 - DNA, 120 bp, synthetic construct
  source 1..120: mol_type = other DNA
tgggtaaagaagagacagttttcttgccatacacaacagttaaatcctgacaaattaacaacttgagtgtgaaaagcaaatctttgagacttttagaggcttatgcatgttcaggctctg

SEQ ID NO: 7496 - DNA, 120 bp, synthetic construct
  source 1..120: mol_type = other DNA
gattctagtcctgcacattagggaaactaatctctgtgacctccacttccagcaagagaaacagtctggcagtccccccaaggcaaacttgcccttgagccagtcaaacttctatgtgcc

SEQ ID NO: 7497 - DNA, 120 bp, synthetic construct
  source 1..120: mol_type = other DNA
gcagacaaaaaataataaaaagtaaaaaggaatgaagaaaatccataggatttatgggacaccagtaggtaaacagatgttcaccttagagtgttccagaagaagagattggaaaaggta

SEQ ID NO: 7498 - DNA, 120 bp, synthetic construct
  source 1..120: mol_type = other DNA
gtagagccaataaacaaaggagaaagaaaaaaagggattaaaaccttatcactacagaaaactgctcaaccacaaaaataagcaaaaagggaagaaggaacaaaaggtgtacaaacaacc

SEQ ID NO: 7499 - DNA, 120 bp, synthetic construct
  source 1..120: mol_type = other DNA
ttttttaaagttaaacaagattgataaatcattatctgaactaaggaaaaaagagagaaaacccaactaaataaaattagaaacaagaaaggggaatacaaaagatcattagagactact

SEQ ID NO: 7500 - DNA, 120 bp, synthetic construct
  source 1..120: mol_type = other DNA
gtgattctcatgtctcagtgtcccgagtagctgggattacaggggtgcaccaccacacctggctaatttttttttatttttagtagagacagggttttgctatgttggtcaggctggtct

SEQ ID NO: 7501 - DNA, 120 bp, synthetic construct
  source 1..120: mol_type = other DNA
gatagaaataattaatatcattaacatgatcatatgacccaaagccacctaaagatccaataaaatccccaccaaattaccaatgaaattcttacagaaagaaaaaaaaaactatcttaa

SEQ ID NO: 7502 - DNA, 120 bp, synthetic construct
  source 1..120: mol_type = other DNA
gagggaattcttatacactgttggtgggaatgtaaactagtatagctactatggagaacagttggaaatatttcacaaaactgcagataaaactacaatatgattcagcaatcccacaac

SEQ ID NO: 7503 - DNA, 120 bp, synthetic construct
  source 1..120: mol_type = other DNA
gtgtgtgctgtatagaaatttgtatacaagccctgggacatcacaagaatgtttagaattgcattgtttgtaaagcccccaagctgaaaacaacttgaatttcaatcagtaggagagtgg

SEQ ID NO: 7504 - DNA, 120 bp, synthetic construct
  source 1..120: mol_type = other DNA
agtttacattaaaataaagctgatcagtggtttcctgaggggcacaatggggaggtgtgagtgggattatcaaggggcattcagaagcttttggggatgatggatataaattcattatct

SEQ ID NO: 7505 - DNA, 120 bp, synthetic construct
  source 1..120: mol_type = other DNA
atactggtgatctcaggacctgtagacctccagatgtttgctcctatactaaatgtcccaaagctgcagagcatttagggttagtttccagtttgtttgttttctgttagattattatgg

SEQ ID NO: 7506 - DNA, 120 bp, synthetic construct
  source 1..120: mol_type = other DNA
ggaatttttcagaattcttcttatcaagatctaaataggcattttaaacgtctgcagcaatattccagtgagaaatggtgttcacgggaaaccctcaggacagctaaatggcaatgtctg

SEQ ID NO: 7507 - DNA, 120 bp, synthetic construct
  source 1..120: mol_type = other DNA
aaagaggctcgtgtgagggaaataaaaacaattgtatgttttgtttaaaatatcagcattgagcttaggagaagctcacaaaaccagattctacttagtcatctggcaggaccacccctc

SEQ ID NO: 7508 - DNA, 120 bp, synthetic construct
  source 1..120: mol_type = other DNA
ttctttccaaattgccccctggctacttgcctgcatacaaaaaaatgatgtttaattccaggcacatagaaaaagaaatgcaggttttagaatgtcaaaggcactgccttctctgttcat

SEQ ID NO: 7509 - DNA, 120 bp, synthetic construct
  source 1..120: mol_type = other DNA
tatgttttaaagtgacttgaacatatgacatgaacatgcacatgaaagcataaaaatgcaagaacttcaggaaaatctaaaatgtctccttgcccactgcccagtcccagatgccctctt

SEQ ID NO: 7510 - DNA, 120 bp, synthetic construct
  source 1..120: mol_type = other DNA
tgtatgatggtgcatgtgtgttactcacctagcttcacttaacttagtcttgttttgtgtagccaaatggatcaatcttttgctttaagtctcctggattttgttcttacctgagaagct

SEQ ID NO: 7511 - DNA, 120 bp, synthetic construct
  source 1..120: mol_type = other DNA
tcagatgagatgattacaagtgttcaagcaagggaagttcgtttttctcaaaaggaaaagaaaggttgcatcttttggcaaaagagattcagggggtttggggtgtattagtctgttctc

SEQ ID NO: 7512 - DNA, 120 bp, synthetic construct
  source 1..120: mol_type = other DNA
gcccacccctgtagcaacttctacctggacatcaaggcatttccatacaccctctgaaatcgaggtggaggttcccaaacctcaattcttgacttctgggcacctgcaggctcaacacca

SEQ ID NO: 7513 - DNA, 120 bp, synthetic construct
  source 1..120: mol_type = other DNA
atctaaggggccaggggagtcatgccctacatatcataaactcatcagataaattttgtttaaccctatatattgtgacttactttccaacctgactttggcataacattacaagacaag

SEQ ID NO: 7514 - DNA, 120 bp, synthetic construct
  source 1..120: mol_type = other DNA
aaaagcattcctatttctccacatcctcttcagcatctgttgtttcctgactttttaatgattgccattctaacttgtgtgagatggtatctcattgtggttttgatttgcatttctctg

SEQ ID NO: 7515 - DNA, 120 bp, synthetic construct
  source 1..120: mol_type = other DNA
ccatgagcatggaatgttcttccattgtttgtgtcctcttttatttccttgagccgtggtttgtatctctccttgaagaggtccttcgcatcccttgtaagttgtatttctaagtatttt

SEQ ID NO: 7516 - DNA, 120 bp, synthetic construct
  source 1..120: mol_type = other DNA
gtctggtcctggactttttttggttggtaggctattaattattgcctcaatttcagagcctgttattgttctattcagagattccacttctttctggtttagtcttgtgagggtgtatgt

SEQ ID NO: 7517 - DNA, 120 bp, synthetic construct
  source 1..120: mol_type = other DNA
ttattattgtgtgggagtctaagtctctaagtagttctccaaggacttgctttatgaatctggttgctcctgtattgggtgcatatatatttaggatagttagctcttctttttgaatgg

SEQ ID NO: 7518 - DNA, 120 bp, synthetic construct
  source 1..120: mol_type = other DNA
gttttattctccctgtcactttcaggtacaccaatccatcatagatttggtcttttcacatagtcccatatttgttggtggctttgttcatttctttttactgttttttctctaaacttc

SEQ ID NO: 7519 - DNA, 120 bp, synthetic construct
  source 1..120: mol_type = other DNA
tcagctatgccctgcccccagaggtggagtctatagaggcagcaagcctcgcagcactgcagtaggctctgccccatttgagctttctggcagctttgtttacctactcaagcttcagca

SEQ ID NO: 7520 - DNA, 120 bp, synthetic construct
  source 1..120: mol_type = other DNA
ctaactatatcatgggggttcaagatcttcagattcatttgggttcagtcagtgtctccattccagttctgagattccctccttcctacccattttgtaacttttgtttaagagacctga

SEQ ID NO: 7521 - DNA, 120 bp, synthetic construct
  source 1..120: mol_type = other DNA
ctccatgtgggaggtctctcagaacaaaagaaaagaagagaaaccaatgcgtgacgtatttgaatacattgaggggagagctattattctgtcagatagtttggaggaaaattaatgatg

SEQ ID NO: 7522 - DNA, 120 bp, synthetic construct
  source 1..120: mol_type = other DNA
ggatttctacttttggtcttgctgccatcaaagctaggtcatgacagcagcaacggtctctcttcttagttcaatggaatgtctagtttctgaacttggaggtaaatcatcttttcttta

SEQ ID NO: 7523 - DNA, 120 bp, synthetic construct
  source 1..120: mol_type = other DNA
aacaatagtaatagcaacagcaacagtaacagtagcagcaacagatatggcaacagtaataccatcagcagcaacagcaatagcaacaataggatcctcagtagtaacagcaatagcaac

SEQ ID NO: 7524 - DNA, 120 bp, synthetic construct
  source 1..120: mol_type = other DNA
tctagctgccaggattgaaactttggctttgtcactgattggctgtgtggttttgagcaagtcctttactttctctggcctgttttttttttttttccagttgtcagtggggttaataat

SEQ ID NO: 7525 - DNA, 120 bp, synthetic construct
  source 1..120: mol_type = other DNA
tttatcacgaggttgaagcaattcagtcacatcttcgggctctacttctaattctagttcttttgctatttctattgtatctgcagacactttttatgctgaagtcttgagctcttcaaa

SEQ ID NO: 7526 - DNA, 120 bp, synthetic construct
  source 1..120: mol_type = other DNA
cctgtctcagccttcatataatggaaaagagttagggctttgttctgggttaggctttggcttaagggaatgttgtgaccggtttgatcttctatccagaccactcaagctttctccata

SEQ ID NO: 7527 - DNA, 120 bp, synthetic construct
  source 1..120: mol_type = other DNA
gacaggtttagtgcccttaggaaccataacaatttaatcaggaaccaatcgacacttaattagtgtcaggcatattttcttctttaatccagtgagtaggtactgttgtccccatttaca

SEQ ID NO: 7528 - DNA, 120 bp, synthetic construct
  source 1..120: mol_type = other DNA
actgtttgaatgggttcatatggtccaaaattcaaaattacaaaaaggtaagcattgaagtctcccttctacctgtatctcacagtcactcaattccatagacaaccagtgttacggttc

SEQ ID NO: 7529 - DNA, 120 bp, synthetic construct
  source 1..120: mol_type = other DNA
atagaggcatctaattcctaccagcaacacgggagactacatttctccccattcttccccaacatagtgtgttaccaagtaattttagttttgacaatccaagtagttattagtgcagtg

SEQ ID NO: 7530 - DNA, 120 bp, synthetic construct
  source 1..120: mol_type = other DNA
aataatagaatacagaaaataggatgtgggttctttactagttttgaggtctcaaaacactgcatgccagtctctatttttacaccctcagaaaatggctgaattagaagctgcagggca

SEQ ID NO: 7531 - DNA, 120 bp, synthetic construct
  source 1..120: mol_type = other DNA
gttatgcttaaaaactttgctccccaaatgctcaggagactgatttgagtaataataaaactccagtctcccacacagccggctctgtgtgaattactcattctctattgcaattcccct

SEQ ID NO: 7532 - DNA, 120 bp, synthetic construct
  source 1..120: mol_type = other DNA
gagccttggtttccataaccacttatcttaactcaggcactcttttctattgattccggaccttcagataataacttaactctttcaagcaattgccaatcagaaaatctttgaatccac

SEQ ID NO: 7533 - DNA, 120 bp, synthetic construct
  source 1..120: mol_type = other DNA
aaacagactgcagcactgattaattaactttgggtaagtgctggcgtacccaggtaaaggacgtgattgggttagaggcccaatttaggggagttagagtctcttctaagacagagaggg

SEQ ID NO: 7534 - DNA, 120 bp, synthetic construct
  source 1..120: mol_type = other DNA
tggcaccacacttcaatctctcccttctcttaatttcagttcctttccttttctcgtagagacagagatgatgcattttatctgtggacctgaagctccagcaccagtcacggacttggg

SEQ ID NO: 7535 - DNA, 120 bp, synthetic construct
  source 1..120: mol_type = other DNA
ccacctgcccagcaatttcctcttaaaaaggtggctggagctaaaggcgtagtcaaggttaatgttcctttttctttatctgacctctcccaaatcagttagcatttaggctctttttca

SEQ ID NO: 7536 - DNA, 120 bp, synthetic construct
  source 1..120: mol_type = other DNA
agatattttaaccaaattatctgcttccctgactattcctggactacagccacatctcattgccgtccttcttcccaacccaaagcctcctttgcgtcttcctcttgtatcccccaacct

SEQ ID NO: 7537 - DNA, 120 bp, synthetic construct
  source 1..120: mol_type = other DNA
atttccttctttcctgttcctcaccctgatcacacttggtttatcaatggcagttccaccaggcttaatcgccacacaccagcaaaggcaggctatgctatagtatcttccacatctatc

SEQ ID NO: 7538 - DNA, 120 bp, synthetic construct
  source 1..120: mol_type = other DNA
gccaccatggtcatttcttcccttctgtcagacataattcctcgttttggccttcccacctctatacagtctgataacggaccagcctttattagtcaaatcacccaagcagtttctcag

SEQ ID NO: 7539 - DNA, 120 bp, synthetic construct
  source 1..120: mol_type = other DNA
cacccaggtgaaataaacagccttgttactcacacaaagcctgtttggtgggctcttcacacggacacgagtgaaagttatttcttcctaagagggacgcttgagagcggataggactgc

SEQ ID NO: 7540 - DNA, 120 bp, synthetic construct
  source 1..120: mol_type = other DNA
atgctcttggccacctagaagttatgaaaatgtccccattccccactgacagataagattcctataggaaatgggctgatttcctctttttgggttagaggatatggtataaaaatgaga

SEQ ID NO: 7541 - DNA, 120 bp, synthetic construct
  source 1..120: mol_type = other DNA
tcagggagaggtgaaatgttcatgtatatcaaacaaagcaggagttaactgcatggactgaataaaagaccgaagtattcttttttaattttttgcttaaaacgttgctgatcctttgtt

SEQ ID NO: 7542 - DNA, 120 bp, synthetic construct
  source 1..120: mol_type = other DNA
gaatcaggtagtgaccccatatcagcatggtttcaacaattgccaggttcatggaaagccttctaatttagtttgcttgggataattttgcttatttttctttactgttgtggaacatat

SEQ ID NO: 7543 - DNA, 120 bp, synthetic construct
  source 1..120: mol_type = other DNA
ctctcaaaatgtctccaagcctcccaagattcacttggttattgtattgtaagtaatgcaaacaagaaacacattcagctggcatctgaatctctgaagtgagtgaatcatgatgaatac

SEQ ID NO: 7544 - DNA, 120 bp, synthetic construct
  source 1..120: mol_type = other DNA
tcaggacctctttccagtaacgaagtaaccatctgctatccagaaatgtcctgctgacccattagtcacccactgtccacctaagggagtggccaagattgagtggtctctaacttcctc

SEQ ID NO: 7545 - DNA, 120 bp, synthetic construct
  source 1..120: mol_type = other DNA
tatttatacatttccttaaagtagggaggcaggtagggagaggggcaggtaggccgtagaggaatgtttccatccttgtgagactttaactagtgcccagttaaatttacattttacata

SEQ ID NO: 7546 - DNA, 120 bp, synthetic construct
  source 1..120: mol_type = other DNA
gcacatccaggaagaacgcaagccacagacacatcattactactatgagtagtaattagtagttactaataggcatgacacctgttttgaatgaagtagaagagaagtgaaggtctctag

SEQ ID NO: 7547 - DNA, 120 bp, synthetic construct
  source 1..120: mol_type = other DNA
aggcagactatctcataggccattgtgatccccattcttcccaagcatgagataataatttttagccattgtagatctaagagggaaaagaacagtacttatccgtacacagatgattcc

SEQ ID NO: 7548 - DNA, 120 bp, synthetic construct
  source 1..120: mol_type = other DNA
acatcacatcaaggaaaaattgggtacaatttttcctaaagggaggctggccatatgaatttgctcagaagggtcccagatactgccctccaatttgtctttccaaattgatttggatga

SEQ ID NO: 7549 - DNA, 120 bp, synthetic construct
  source 1..120: mol_type = other DNA
tcaaattttaggaaaccagaagaccaagtgagtacggcctcccttcttggtgacttctctcctggcctgttacgaacaacatttggacaatgtttctagtttattaactaaacatagtca

SEQ ID NO: 7550 - DNA, 120 bp, synthetic construct
  source 1..120: mol_type = other DNA
gggctatgcatttgaatcacctggagaattaaaaaactattggtttccaagccctaccctagaacaattaaatcagtatttctgggggttttggctttggtattttgtaagctcccaggt

SEQ ID NO: 7551 - DNA, 120 bp, synthetic construct
  source 1..120: mol_type = other DNA
cttctcttttctacccgctgtggaatgaaaatgtttgaggtcaacgtggtgagatctactaaaggcaaacaataaacacaggtaacgaacacctctgtaactggattctatttaagaagg

SEQ ID NO: 7552 - DNA, 120 bp, synthetic construct
  source 1..120: mol_type = other DNA
ggagggcaactcttactgaatcctccttaccccatcccccatttttttataatcagatttctctgaggatgttaatacagttggatctccaaagaaaataacactcgtgtagggggatat

SEQ ID NO: 7553 - DNA, 120 bp, synthetic construct
  source 1..120: mol_type = other DNA
gtaaaacacagagttttattggcttttggataagaaacaggcttctgggaaagagttgagatgtttaattcttaggcaagacagccatgggaagaacaagtgggtaaatccaggagaaac

SEQ ID NO: 7554 - DNA, 120 bp, synthetic construct
  source 1..120: mol_type = other DNA
aaaatccccactgttctccgatatctccgcccaacaaattctgtaactgcagagagaatttgaatggttaatgcaattcaatacaataatgagttggctgtccagctatcaggaaactag

SEQ ID NO: 7555 - DNA, 120 bp, synthetic construct
  source 1..120: mol_type = other DNA
ggaatgctgaatgagttgatatgcttttaggaattcttttgatacagaaataaaaaaatctctcaatattgtcttgaagctgggtcccttttcttgcatgccgccccccacctgactcta

SEQ ID NO: 7556 - DNA, 120 bp, synthetic construct
  source 1..120: mol_type = other DNA
ttccacacatcagatttgggagacttaggtttattcagtttagggatttggaaagttgtcccagtatatggaatagaggaaaacaattggcaacctgggtttcatcatgaccttcctact

SEQ ID NO: 7557 - DNA, 120 bp, synthetic construct
  source 1..120: mol_type = other DNA
tcctacccaaaccccttcctttaccctcaaagagtatataatctataaacattgactcaaatggtacttcttcaactttcaaaactgcttcaggcacacagtagaacaccacagtagtgc

SEQ ID NO: 7558 - DNA, 120 bp, synthetic construct
  source 1..120: mol_type = other DNA
aaaggctctcgtgatcctaaatgaaatataacaaatgaggatgcccagtaaagtgactagcacacagtaatcagtggtgaacgtgttttggaagatcccatatagttgggtaagtatgac

SEQ ID NO: 7559 - DNA, 120 bp, synthetic construct
  source 1..120: mol_type = other DNA
ccctgggattggtgaggaattgcttttttgtctcaggtgacactcaaaatcattgatgaggaagttatgggttatacttgggtccactcttagtcttatttacaatcttttcataatgcc

SEQ ID NO: 7560 - DNA, 120 bp, synthetic construct
  source 1..120: mol_type = other DNA
agttgggccccaggcccctgtgaagtgcatatgccttgggggtgtgatatattaagccatcattattcatccttaacacatttgcaagttttaattcagcctaaaataatataatcagag

SEQ ID NO: 7561 - DNA, 120 bp, synthetic construct
  source 1..120: mol_type = other DNA
tcatctgttactctcccttccgacttgaagcttctgcatagcccccatggaagatttgctgtgtaatgttgaaatatctgtctatgaccccagagaatttgaaaataaagacattggtca

SEQ ID NO: 7562 - DNA, 120 bp, synthetic construct
  source 1..120: mol_type = other DNA
aaatttattttttcctttctaatttcaatgcacatgcagataggtgtgtggacgtgatacaatgcaggcaccaggaggttgggccatttagcatctccctgctgtctgtttaataaaagg

SEQ ID NO: 7563 - DNA, 120 bp, synthetic construct
  source 1..120: mol_type = other DNA
ggacgttttaactaatccagttattctccagacaaattagaagctgcatgttctcatttggaaactaggattttgtaagatacatgcaggccaaagagatgtccaggcagggtttataag

SEQ ID NO: 7564 - DNA, 120 bp, synthetic construct
  source 1..120: mol_type = other DNA
tgcttgttttgatgttgtccagattttataactctgcttttaaaaagtgtttgctccaatctggtattcctgcgtttcaaccctgaagtgtccttccccttaacccatctggagggaaag

SEQ ID NO: 7565 - DNA, 120 bp, synthetic construct
  source 1..120: mol_type = other DNA
ctttctgctctcacacatcaggggcatctctttaggatgatgttgttgcatctaaatgcaagacaaacaggaaatttgtctttcctggtggacaaaaggattcttaatacatcgtgatcc

SEQ ID NO: 7566 - DNA, 120 bp, synthetic construct
  source 1..120: mol_type = other DNA
cctacggtttgagtccaggtatcttgggaaattgtcacttcttttatgggggtgcttacatattcagaagcatgactggagtgtaatctgatcatttaatccatataacctggtaatata

SEQ ID NO: 7567 - DNA, 120 bp, synthetic construct
  source 1..120: mol_type = other DNA
tgttgttggactttacagattgctggaaatatcttcctcatagcacaacaggattcatcttccagaactttccacacatttggacactattctcccttttggggtcaggtagattaagtt

SEQ ID NO: 7568 - DNA, 120 bp, synthetic construct
  source 1..120: mol_type = other DNA
attcatttttaaaggctgtattattactctatgtaaaattaagtgcaaagtatttggtttggccctgggcttccaagttagtggtggggtttaggacatgccgccccaaaattcagaacc

SEQ ID NO: 7569 - DNA, 120 bp, synthetic construct
  source 1..120: mol_type = other DNA
ctttcgttttttaaaagtttgggttagcaaccaatttcctccttgaccaggtgattttttccttagactgtttatccagagcattaaggaaaacagagcataccaccctcccaccatagc

SEQ ID NO: 7570 - DNA, 120 bp, synthetic construct
  source 1..120: mol_type = other DNA
ttgatctgcaatagatattaagtttactcaatgaaatgctgatgagaaatttcgtattggaggggtcaggctgacaccatcactagaagtgggaaaacttgactttatgggctgcgtgtt

SEQ ID NO: 7571 - DNA, 120 bp, synthetic construct
  source 1..120: mol_type = other DNA
atgcaaactagggtaaaatgttcaattccttggttattgttctatgtaacagctaaaatgaaactaaaaggcagtgctggctcagaccttgatgctagaccaagctcagatttcagtggg

SEQ ID NO: 7572 - DNA, 120 bp, synthetic construct
  source 1..120: mol_type = other DNA
tgagcacctcccagcgacaactactgggactctagactggagaattctcatttaaagggtatttactaacttggtctcagacattagtggaaactactcttatgactgaaggacataaaa

SEQ ID NO: 7573 - DNA, 120 bp, synthetic construct
  source 1..120: mol_type = other DNA
acatttctttagaccaaggaacacactttacagcctgtaatatccaacaatgggcagagctagtctcctccgggtaatagtttgatagaaaagtagaacaggcaattcaaacattagttg

SEQ ID NO: 7574 - DNA, 120 bp, synthetic construct
  source 1..120: mol_type = other DNA
ctgagggtaaaggagtgaataaaacgctcctgtaatgagggaagtctcatattatattaacactgaaaatgctccagagcaagagatatcattgcctcttagctcaattatcccagatgc

SEQ ID NO: 7575 - DNA, 120 bp, synthetic construct
  source 1..120: mol_type = other DNA
caaaggacttcatctccctgggtccttccttctacacaggattttctttttaaggcttttaagcacaatcaccatggaaaaaaaggacagaaggttactgttgggttcccccaaaatata

SEQ ID NO: 7576 - DNA, 120 bp, synthetic construct
  source 1..120: mol_type = other DNA
tctccaggccctcatagtctcactcctgtattcctagggacaaagcatgctatagtctgaattttggtgtcccttgccaaattcatatgttggaaactgatgcccaatgtgatagtatta

SEQ ID NO: 7577 - DNA, 120 bp, synthetic construct
  source 1..120: mol_type = other DNA
ggattttaaagttatacaaatgattctctagtccctaaattagggatataaaagtccgtaggcagctttggggctgaaaggggttctgtaagcatcttgctgtataatggagcaagtcct

SEQ ID NO: 7578 - DNA, 120 bp, synthetic construct
  source 1..120: mol_type = other DNA
gaaaacagacccacttaaaatatttttcacattcccttatttttctgttcctgggagtgagttacccccaactcttagctttatttggggaagtcagtttcagcttctcatcacatacag

SEQ ID NO: 7579 - DNA, 120 bp, synthetic construct
  source 1..120: mol_type = other DNA
ttctcatagtatgaggctttcgtgacttgcgtgtttcctttcggcaccaaaggtatcatctgatgaatcatttattcagcaaacatcatgcaaacagttattaaggtcacttcccaaaag

SEQ ID NO: 7580 - DNA, 120 bp, synthetic construct
  source 1..120: mol_type = other DNA
cattgagttgattctgagtgaccaaaatgttccttccaaactcacactctttttcaacaagtgtctgtttctctttccgtctgcttgtgaaaaaacaaatcctttgagccagtcccagag

SEQ ID NO: 7581 - DNA, 120 bp, synthetic construct
  source 1..120: mol_type = other DNA
acaaaatcaagctgatgaattaaagaaatatggcctggtcaggatgcctggaggcctcagagttctgatctttcttctgagttactacatcttctgaactgctcccaggatggtgtttgt

SEQ ID NO: 7582 - DNA, 120 bp, synthetic construct
  source 1..120: mol_type = other DNA
aatggggctagtgcaagtgggaaactgcatttgcagttttatgtcattctaactggtttaaagtttatgcagccacatgtggttagcgactaaggcactggacaacacagttagaaaagt

SEQ ID NO: 7583 - DNA, 120 bp, synthetic construct
  source 1..120: mol_type = other DNA
tgatcacactagactccttatttctttgatgtcttcttaactggatgaaggcagccaagggtgggagtagagggaagagttaattggcaaacataaaaaacaggtgtctcaaagtcacat

SEQ ID NO: 7584 - DNA, 120 bp, synthetic construct
  source 1..120: mol_type = other DNA
tcttctgttgagaagtgtctgttcatgtccttcacccacttcttgatggggtcgtttgtcttttgtaaatttgtttgagttcattgtagattttgggtattagccttttgtcagatgagt

SEQ ID NO: 7585 - DNA, 120 bp, synthetic construct
  source 1..120: mol_type = other DNA
ctctgtttgtctgttattggtgtataagaatgcttgtgatttttatacattgattttgtattctgagactttgctgaagttgcttatcaacttgaggaaattttgggctgagatgatggg

SEQ ID NO: 7586 - DNA, 120 bp, synthetic construct
  source 1..120: mol_type = other DNA
gaggtgtttatagtattctctgatggtagtttgtatttctgtgggatcggtggttatatcctctttatcattttttattgcatctatttgattcttctctgttttcttctttattagtct

SEQ ID NO: 7587 - DNA, 120 bp, synthetic construct
  source 1..120: mol_type = other DNA
tggtataaagtctgttttatcagagactaggattgcaacccctgcctttttttgttttccatttgcttggtagatcttcctccatccctttattttgagcctatgtgtgtctctgcatgt

SEQ ID NO: 7588 - DNA, 120 bp, synthetic construct
  source 1..120: mol_type = other DNA
tgatcctatcagctactgaggcttctgcatttgtcatgtggctctcttgccttggttttcagctccatcaagtcctttaagaacttctctgcattggttattctagttatccatttgtct

SEQ ID NO: 7589 - DNA, 120 bp, synthetic construct
  source 1..120: mol_type = other DNA
actctgtgggcataggaccctccaagccaggtgcaggatataatctcctggtgtgctgttttttaagccggttggaaaagcacagtattagggtgggagtgacccaattttccaggtgcc

SEQ ID NO: 7590 - DNA, 120 bp, synthetic construct
  source 1..120: mol_type = other DNA
gagagagatgtgaaatagtatttttctggggaagtaggggaaatacaaagaaaagtaatgacttcaggtatattctccactggtacagcaggatgggagatattatcaacaggtggtaag

SEQ ID NO: 7591 - DNA, 120 bp, synthetic construct
  source 1..120: mol_type = other DNA
ctattcactaaaattcctttgtaacaccaaaatcaatactgctggactttcatgggcattcacatgcatgtgcaaagtggtgaaaaatttgagctgccatgttcccaactaaggttgaac

SEQ ID NO: 7592 - DNA, 120 bp, synthetic construct
  source 1..120: mol_type = other DNA
atgatggtggtaaggtcaagcaataccagagttgctctgagaagtacttggagtacactttgctctttttaacaaatccaaattctgtttgctttttgagcctgattccagtggtgtctc

SEQ ID NO: 7593 - DNA, 120 bp, synthetic construct
  source 1..120: mol_type = other DNA
ttgtgtctgtctttcctacttttgtttccagcattgacctagcagagtggtaacgacatagtagaccctgagtgaatgttagtgaatggttgattgattgatgatgatcttgtggctttt

SEQ ID NO: 7594 - DNA, 120 bp, synthetic construct
  source 1..120: mol_type = other DNA
taaatactgagtgttacagtaatttcactgacatgtgcatagcaaaatggcagcaaactgcctgaagcaataaaatttccagagtgatcccttatagcatatctggagaagctgggagtt

SEQ ID NO: 7595 - DNA, 120 bp, synthetic construct
  source 1..120: mol_type = other DNA
tgaaaaaacctagatatagacagggcaaatgtcttctcctaggtctcaaagttggtaattggtacactgaaggtctgaactcaggcaatctgattccaaatcctatgctctcaactgtat

SEQ ID NO: 7596 - DNA, 120 bp, synthetic construct
  source 1..120: mol_type = other DNA
caagatggtcatccacaagacacataatcatcagattctccaaggtaaacaagaaagaaaaaaaccttaaaggcagctagagagaaggggcaggtcacttacaaaaggagccccatcagt

SEQ ID NO: 7597 - DNA, 120 bp, synthetic construct
  source 1..120: mol_type = other DNA
cagtttaaggacttacttgtaatatctttgtgtggtcttggtattaggttaatgttggcctcaataaatgagataggaagtatttttttctgcttctaacctctgaaaaaaactgtagag

SEQ ID NO: 7598 - DNA, 120 bp, synthetic construct
  source 1..120: mol_type = other DNA
cttttcatgtatattggatctgtagttatgtccccgcctttatttctgttattagtaatttgtgccttccctcatcttcttaggtaacctggctgggtcaattttattaatctttctaaa

SEQ ID NO: 7599 - DNA, 120 bp, synthetic construct
  source 1..120: mol_type = other DNA
atggtttccagcttcatccatgtccctgcaaaggacataaactcattctttcttttggctgcatagtattccatggtgtatatgtgccacattttatttatccattcaattattgatggg

SEQ ID NO: 7600 - DNA, 120 bp, synthetic construct
  source 1..120: mol_type = other DNA
ctatatatctgttttggtaaaagtaccatgctgtgttggttactggaggcttgtagtatcatttaaagtcaggaagcatgatgcctccagctttgttctttttgcttaggattgtcttgg

SEQ ID NO: 7601 - DNA, 120 bp, synthetic construct
  source 1..120: mol_type = other DNA
gcagggtagggtgtcacctaacctgggaagtgcaagttgtcaggaaacttcctcccctagccaagggaagccacgagggactgtgccctgaggaaaagtgcattctggtccagatactat

SEQ ID NO: 7602 - DNA, 120 bp, synthetic construct
  source 1..120: mol_type = other DNA
ggttcttgttacttgatctactgtgtcaatttcaatcttttaattaatacatttagatcatttgcgttaaaagtgattactgatatatagtcatgtgtcatttaacaacaggaatgcatt

SEQ ID NO: 7603 - DNA, 120 bp, synthetic construct
  source 1..120: mol_type = other DNA
gaccatcattgtatatgctctccaacattgacttaaatgtcattatgacatgtgtgactgtagttagattagtatctaccatagcggttgggttgcctgggtgtttgcaagataaattta

SEQ ID NO: 7604 - DNA, 120 bp, synthetic construct
  source 1..120: mol_type = other DNA
cttcggtcagttaggctctaataacacaccatcttatgaggctctgataaactagttctgcctaagggcaagcactaaaagtcctattaaaaacagagggctctagtctatttcaaaaat

SEQ ID NO: 7605 - DNA, 120 bp, synthetic construct
  source 1..120: mol_type = other DNA
gccagtaatatttgtcataattgcattgtggaagctatgacaactaatttttgaaattagttgagacttctctatgtcctagtacatcattgatgtttgtaagtctccctgatgtactta

SEQ ID NO: 7606 - DNA, 120 bp, synthetic construct
  source 1..120: mol_type = other DNA
tccaaaattgtttccagtacgtgtttggttgcagtatttttgaggccttatatgcttgagcatatatctctttatagctgagaggctgtttatctcaatgtaaaattatgggttcaatgc

SEQ ID NO: 7607 - DNA, 120 bp, synthetic construct
  source 1..120: mol_type = other DNA
gccctgaagtcacatttacttagttatgatagtttcttttttatagtaattgcacaggggaagagctaaaggatagaactctgtcattgtgaaccctgaaagctcagaaaaaggggaggg

SEQ ID NO: 7608 - DNA, 120 bp, synthetic construct
  source 1..120: mol_type = other DNA
tcatattttaagttcatctgaaatgtattttacagaggtaagaacaagcaacttggtgctcaactctcttcctgctcttcgcctagtgctaaaataatttgtgtaaatgaactgtgaatg

SEQ ID NO: 7609 - DNA, 120 bp, synthetic construct
  source 1..120: mol_type = other DNA
tggcccagatctgactttaaagtaccttcacttttattgtatcacatacgatctcagtccacagatgggttcctgatttagccaagaatatagtaaagtgagtgtaaagtagaagaaaaa

SEQ ID NO: 7610 - DNA, 120 bp, synthetic construct
  source 1..120: mol_type = other DNA
caaaaaataattaattcaataaatttttgaaacaaatccatagaataaaaacatagtttttcaaaatgtatttttcaaaggtaaaaatttctcacattaggctaggtgcgtggctcatgc

SEQ ID NO: 7611 - DNA, 120 bp, synthetic construct
  source 1..120: mol_type = other DNA
gataaaagtaaattgagaaaattcctatttggcattatttgctgtgagtttaccaagataatgtttttctccattttaaaaacaatggtctatggtcaaaaagtaagtcaaactatccct

SEQ ID NO: 7612 - DNA, 120 bp, synthetic construct
  source 1..120: mol_type = other DNA
gcagactaaagacttaaatctaaaacctcaaactacaaaaaccctggaagacaacctaggcaatatcatcctggacataggaatggcaaagatttcatgacaaatgacaccgaaagcaat

SEQ ID NO: 7613 - DNA, 120 bp, synthetic construct
  source 1..120: mol_type = other DNA
tggagggtggagggtgggaagagagagagaagcagaagaaataactattgagtactaggcttaatacctgagtgatgaaataatctgtaccacaaacccccgtgacacgtgtttacctgt

SEQ ID NO: 7614 - DNA, 120 bp, synthetic construct
  source 1..120: mol_type = other DNA
ggcattaagctgggctttaaaattcatgcagaattcccgttgcttcaaatggagagaagcagcagtgtaccacagataaatgaagtgagacgtaataagggtttggctcaagataataag

SEQ ID NO: 7615 - DNA, 120 bp, synthetic construct
  source 1..120: mol_type = other DNA
gatcagggtgccagtatggttagcttctggtgacagttctcttcttgctttcctgacatggctaaaagagaaagagaatggaagtgagttctcttcttaaaagggtacaaatctcattca

SEQ ID NO: 7616 - DNA, 120 bp, synthetic construct
  source 1..120: mol_type = other DNA
ccacctcctgttggttctcctcttaaacttctccttgtgtgtctgtaagcttgttatacacttttcatctctactcttttttattttctgaagtcagctttctaacagatctctttttcc

SEQ ID NO: 7617 - DNA, 120 bp, synthetic construct
  source 1..120: mol_type = other DNA
agaggtatttagggagccacacatatgtccaaggcaagacatatgctcataaaacgtctgagaagattgtatccttttacctaatgctaatccccaagcttagaacaaggcaagtgaaag

SEQ ID NO: 7618 - DNA, 120 bp, synthetic construct
  source 1..120: mol_type = other DNA
aacccaatgataaaatgaggatgatatctgaacagatgcctcactgaagaagatatagagacaacaaatgagcatgtggaaaaatgctccacatcccgtcattagggaattgtaaattaa

SEQ ID NO: 7619 - DNA, 120 bp, synthetic construct
  source 1..120: mol_type = other DNA
tagtatctgcagccactctggcactttaaacatatccagtaggagaggttaattctctcagcaggagaccactcacattacttttttctccctataaaataatgcatcgttttgtcatgc

SEQ ID NO: 7620 - DNA, 120 bp, synthetic construct
  source 1..120: mol_type = other DNA
ggttgcttctacatcttggccgttgttaataatgctgcatgaatatgcatgtacaaatatctctgctagatcctgttttgaattactttgactatatacccagaagaataattaatggct

SEQ ID NO: 7621 - DNA, 120 bp, synthetic construct
  source 1..120: mol_type = other DNA
tgttgccctgctggatggagtcccataatttctttaggctcttcttttctttttgctcctgtgactctaattttagaagttctgtctttgattttcctgattttttcttctgcctagcca

SEQ ID NO: 7622 - DNA, 120 bp, synthetic construct
  source 1..120: mol_type = other DNA
tgtaattggttctgaagttctcacagaggcatttagtacatatgttgttaatattgtgtcttgctgttgaggttccagggctgttctgctctcttgctgatgtcactctcttccacattt

SEQ ID NO: 7623 - DNA, 120 bp, synthetic construct
  source 1..120: mol_type = other DNA
aagttacataggaaaacagaggggcagcatgatctatttctgatttgtaaaggacttctttagctactttgttgagaagagactgttaggcagatgtgcacagaagtagaaacatggctc

SEQ ID NO: 7624 - DNA, 120 bp, synthetic construct
  source 1..120: mol_type = other DNA
ccatgtgcctattgacattatatagtccttcgattaaccattttccccctttccttctgatttttcttagatgttcttggcagctctgtcactcagctttattgctaagacactaggtgc

SEQ ID NO: 7625 - DNA, 120 bp, synthetic construct
  source 1..120: mol_type = other DNA
ctcaagatgaagaaactttgggagaggactgttattcttaaggagaaaggaatcttttcagagcaacctacgttagacctctattgtttcactgagcacacaaaaatctttcctttgaaa

SEQ ID NO: 7626 - DNA, 120 bp, synthetic construct
  source 1..120: mol_type = other DNA
tcaatgagtggtctaatgtaggtgaattcaccttctcaattaaatcacattgtctttgagggaaggcactatgtcttggactctatttgcatccattctggggttttcaattctagacgc

SEQ ID NO: 7627 - DNA, 120 bp, synthetic construct
  source 1..120: mol_type = other DNA
gaaagaagagaggatattaggagacaatgagcagtttctgttagagacaccaattacttactcattgccaaatccagcaatgacatcatttgctcaccatattaaatccattcacccacc

SEQ ID NO: 7628 - DNA, 120 bp, synthetic construct
  source 1..120: mol_type = other DNA
tcttgaccaagatataaccactcctaggataatagcaaggtgataacccacttagcctggggtgtattgaattatctttcttgctggacacttccatttcacttttacccatcacatctc

SEQ ID NO: 7629 - DNA, 120 bp, synthetic construct
  source 1..120: mol_type = other DNA
ggtaagaatatctgacattttctatatttggattgaacagggccaactgcagaacttaagtgtgcatgaatttgagaacacacaggcagccctgtaacaaattccttaatataccaaggg

SEQ ID NO: 7630 - DNA, 120 bp, synthetic construct
  source 1..120: mol_type = other DNA
atctacataggttgtttaaaggaatctgggtcatacatgtggatatatgtgttcatgggtaatatgcttcgtggaataggggagactcccatagtaccattggggctttcttacattgat

SEQ ID NO: 7631 - DNA, 120 bp, synthetic construct
  source 1..120: mol_type = other DNA
agagacttcactgtgtattttatggtcattttccctggtcctagcagagggcttggcgtatggcaatgttcagtaagtacttgttgaacaaaggaataaagcagaggacacataaataaa

SEQ ID NO: 7632 - DNA, 120 bp, synthetic construct
  source 1..120: mol_type = other DNA
atatgattttccacctcattaggccttcaatagatcattccaaagagatcaaaggattcatttccaagatgggatagacatcacagtgggccagcaacagccaaaaacttgaaagtgttt

SEQ ID NO: 7633 - DNA, 120 bp, synthetic construct
  source 1..120: mol_type = other DNA
gcacttgtgttcctcagctctggcctattcttttaatgcacaaatttaggccctgcattggcaaggacttctgattggtttccaagaaaatccaaacaccaaaatttttgtgtagaattt

SEQ ID NO: 7634 - DNA, 120 bp, synthetic construct
  source 1..120: mol_type = other DNA
ctgaaagtcaatagagaggtgacacagacactgaggctgaagagagagaaagctggaaacccagtgcagggttgttgaacaccagagatagtttccagccctgagtggctcctagctaag

SEQ ID NO: 7635 - DNA, 120 bp, synthetic construct
  source 1..120: mol_type = other DNA
aattcaaaaagtaagaatgtaccttaaccttcaaatgggtgcatttgagctctccagcgatggttcttaaccacattggaatgactaaaatgacagacaggcaattcggaatctggatgg

SEQ ID NO: 7636 - DNA, 120 bp, synthetic construct
  source 1..120: mol_type = other DNA
agtccacatgaaagaaataaatattttaagatttttttggggggcagctagagagatggatcaagtcactgtcaaggggaaccccatcaatcttgcagaacacctttgagcaaaaaccat

SEQ ID NO: 7637 - DNA, 120 bp, synthetic construct
  source 1..120: mol_type = other DNA
caactcactgacagtgttagatatcgaagcagaaaattaaaatgtaaattttggacttaaactcaactctcaaccaactggatccaaaaacatcctacagaatactccacccagcactat

SEQ ID NO: 7638 - DNA, 120 bp, synthetic construct
  source 1..120: mol_type = other DNA
acgttactgctgtaataatttcatagcacctcctgtaattgtagtaataaggttgtgttgaaagcacctgcttaaaacaccatgtgacactaattatctccacatgaacagttcctctct

SEQ ID NO: 7639 - DNA, 120 bp, synthetic construct
  source 1..120: mol_type = other DNA
taagggactgcctttacagttcttttcatatcagtcgatgcccctggtcacctagaaagcccataagttcaacatcaaaggcattgtagtgatctatttcttccaccacaacatctctaa

SEQ ID NO: 7640 - DNA, 120 bp, synthetic construct
  source 1..120: mol_type = other DNA
atttttagagaaatgacaaaaccacaaagtcaaatagaaattatggcgtatttatgaaatagttactgaatgtacttgcctcttttgccttccctctacctcctccacctcttccacctc

SEQ ID NO: 7641 - DNA, 120 bp, synthetic construct
  source 1..120: mol_type = other DNA
ctaccagcagtgtaccgtgttcaaatatctccacattcttgcaaacactttctttcttaaatgatagccattctacaggtgtaaggtgtaggaaaagagtggagttgtgcttttgatttg

SEQ ID NO: 7642 - DNA, 120 bp, synthetic construct
  source 1..120: mol_type = other DNA
aagtataggggaatttatctaaataggcttgtctacccatgttgtccagaaactgacctttgaccatccgtacacgtgactgttcccagtaagggggaacaataatgttaattacacaca

SEQ ID NO: 7643 - DNA, 120 bp, synthetic construct
  source 1..120: mol_type = other DNA
aatagaagtgatgagaatggccattcttcctttgttcctgaaagctttctgtttttcactcttgaatttaatgctagctgtgagctttttaaatatgcacttcattttgttgaggcaatt

SEQ ID NO: 7644 - DNA, 120 bp, synthetic construct
  source 1..120: mol_type = other DNA
gatgttctcttctcttcaatttttggcaagagattggaatggattgccattaatattttctttagctatttagtaacacgcaccagtaaagccatctggtcctaagttttttgttgagaa

SEQ ID NO: 7645 - DNA, 120 bp, synthetic construct
  source 1..120: mol_type = other DNA
cgttcaattggtctataatgttgttgaagtcctctgtttcctcattgattttctctctagtcattctatttataattgaaagtgagatattatgaagtcagcctactatggagggctaac

SEQ ID NO: 7646 - DNA, 120 bp, synthetic construct
  source 1..120: mol_type = other DNA
ttctgtttttattattttaattatttattattattattattaattttgtttttttgggggggttgttttgttttgctaaggcataacaagagtgacttttgctctagctcccaataactg

SEQ ID NO: 7647 - DNA, 120 bp, synthetic construct
  source 1..120: mol_type = other DNA
catgagcacttttagacagtggacagagaagcccgtcacttggtcaactcccagaaaattttgaatatttcacatgctatccaattttttccttcccaaggagaatttgaaaactgaggt

SEQ ID NO: 7648 - DNA, 120 bp, synthetic construct
  source 1..120: mol_type = other DNA
aactcttcagggttacttttaaactcatattttcactgtattttcttatcctctgtgctgtcaggagagttggaaatgcttatttcaggcatggtgggaagcccctttattgactcagta

SEQ ID NO: 7649 - DNA, 120 bp, synthetic construct
  source 1..120: mol_type = other DNA
cctagtgggtgatgctgagaaatatatagacaatagcaatatagtgccttaagtattatggtgaaattaaacttaactattatcaggtgtagagatggattaaggagaaggaagtcggga

SEQ ID NO: 7650 - DNA, 120 bp, synthetic construct
  source 1..120: mol_type = other DNA
ccaagagcagtggtgttctggtactctttatattggctcatagcagaggactgttaagtttcagctacattggtaggttgaaattgttcatggcaagagaattaccatgatttattacca

SEQ ID NO: 7651 - DNA, 120 bp, synthetic construct
  source 1..120: mol_type = other DNA
ccttctacttttaagtcctattacagctagttgacctggtgatcacagatccaaatgacataatttctaccatgaacagaagttagaagtttgttaccacagctgtttgtagggataggt

SEQ ID NO: 7652 - DNA, 120 bp, synthetic construct
  source 1..120: mol_type = other DNA
agcatccttactaatcccctgtatgttatgtttgtgcttttgacgttgttacaagtaagcagctatattggtgcttttacttatgtcttcaaatacgtagagcaacagtatggtcagcct

SEQ ID NO: 7653 - DNA, 120 bp, synthetic construct
  source 1..120: mol_type = other DNA
ttatgttgttaagctctgggcagatttagtgtgagttactgagggttagaactctatctgagagaggcaaaaggctttagatgaagttccataggcagaaagatggtgttttgttgttgt

SEQ ID NO: 7654 - DNA, 120 bp, synthetic construct
  source 1..120: mol_type = other DNA
tgaacaccgttggaattgccaaattctcatgttttactgctgtgatgtcattgtccttttacctattatattttttcatactctgtgaaaacaaatcagttgccggactaaccatgacct

SEQ ID NO: 7655 - DNA, 120 bp, synthetic construct
  source 1..120: mol_type = other DNA
acagtctccacctcaaatcaagggcaagaatcctatgcagttttctgataatttcctgaatatagccaacaatttaagcttaggaaggttcacattcaagcaacaagcagagatgctcag

SEQ ID NO: 7656 - DNA, 120 bp, synthetic construct
  source 1..120: mol_type = other DNA
attcaggctgcaaagttctaggtagcttattaatacacagaaattaatttttcaagattctaaaggctggaacatgtaagaccaaggtgatggcacttttggtgtctaggaagggcccat

SEQ ID NO: 7657 - DNA, 120 bp, synthetic construct
  source 1..120: mol_type = other DNA
acctagttaaatagcattcgtagactcacaagactttacagtgagctgaaaggaatgtcagtctaatgtcatcaccttactgaagagaaactcagtctcagaaaaaagatgtaacttatc

SEQ ID NO: 7658 - DNA, 120 bp, synthetic construct
  source 1..120: mol_type = other DNA
agtatcctgctcacctaatgtcaatatgtcccatagaaatgtcatttattccgtcctgcaaaacctttctttccatgtgaactacagtttttctctaatctcctgggtagctacctgtca

SEQ ID NO: 7659 - DNA, 120 bp, synthetic construct
  source 1..120: mol_type = other DNA
gaaaggccacaactttaataaacttgcacaaatatggcccaaagactacttaaaagcccacatcttagtcatggcaacaatgaatcttttgtgcagttgtttccttttcctttgctgttt

SEQ ID NO: 7660 - DNA, 120 bp, synthetic construct
  source 1..120: mol_type = other DNA
ccagtttcatttctctgcatagttagccagttattccagcaccatttactgaataatgagtactttccccattgcattctttttgctaacttcattgaagatcagatggttttaggtgtg

SEQ ID NO: 7661 - DNA, 120 bp, synthetic construct
  source 1..120: mol_type = other DNA
tcttgcaacagtttactgagaatgatgttttccagtttcatccatgtccctacaaaggacatgaactcatcattttttatggctgcatagtattccatggtgtatatgtgccacattttc

SEQ ID NO: 7662 - DNA, 120 bp, synthetic construct
  source 1..120: mol_type = other DNA
tcctttccccattgcttgtttttctcaggtttgtcaaagatcagatagttgtagatatgcggcattatttctgagggctctgttctgttccattgatctatatctctgttttggtaccag

SEQ ID NO: 7663 - DNA, 120 bp, synthetic construct
  source 1..120: mol_type = other DNA
ataatcatgtggtttttgtctttggctctgtttatatgctggattacatttattgatttgtgtatattgaaccagccttgcatcccagggatgaagcccacttgatcatggtggataagc

SEQ ID NO: 7664 - DNA, 120 bp, synthetic construct
  source 1..120: mol_type = other DNA
tttcgttatgtacccagtagtcattcaggagcaggttgttcagtttccatgtagttgagcggttttgagtgagattcttaatcctgagttctagtttgattgcactgtggtctgagagat

SEQ ID NO: 7665 - DNA, 120 bp, synthetic construct
  source 1..120: mol_type = other DNA
tttctccttcgcttatgaagcttagtttggctggatatgaaattctgggttgaaaattcttgtctttaagaatgttgaatattggcccccactctcttctggcttatagggtttctgccg

SEQ ID NO: 7666 - DNA, 120 bp, synthetic construct
  source 1..120: mol_type = other DNA
tctgttggaataccctgccgtgtgaggtgtcagtgtgcccctgctggggcgtgcctcccagttaggctgctcaggggtcaggggtcagggacccacttgaggaggcagtgtgcccgttct

SEQ ID NO: 7667 - DNA, 120 bp, synthetic construct
  source 1..120: mol_type = other DNA
gaagttggctgtggttttatcatagatggctcttattattttgagctatgttccttcaatgcccagtttgttgaagaactttatcataaaaggatggtggattttattgaaagctttttc

SEQ ID NO: 7668 - DNA, 120 bp, synthetic construct
  source 1..120: mol_type = other DNA
tccctctttgcacactagcgaaggcctgaaagtgatagaatattagaaccctaaaaagaattgtgtctaccacaagacataatcttcattatactggcaatgactatgccatttggggac

SEQ ID NO: 7669 - DNA, 120 bp, synthetic construct
  source 1..120: mol_type = other DNA
tactcagcccatttgggtgaatgcccaagagatgatgcttgtacaaggaaattttacttttttgttgcaatacaagtcttgaatttatttttctctgcacttggaggcacctcacatgtc

SEQ ID NO: 7670 - DNA, 120 bp, synthetic construct
  source 1..120: mol_type = other DNA
gagaggttgtgacacatgataagattggagagttaggaagggtgcaggtaatgcatgccctactggccaagttgattcaatcacctaaaacttgtaacatgtaaataattgcttttagat

SEQ ID NO: 7671 - DNA, 120 bp, synthetic construct
  source 1..120: mol_type = other DNA
gagatactagttcagatatggtgctttggaagtcctttgagtaaagacctgaatgaagagatagaaaataaaggtacaagccatgctaaatggagacataggaggaacaatccaggcaag

SEQ ID NO: 7672 - DNA, 120 bp, synthetic construct
  source 1..120: mol_type = other DNA
ctatctctataaagctgagcagcctgttcaatatctagcaatgtcatatatgcaatccaacaggagaaaccttgatgccagagccataaattttagagtcagcaacgtacagatggtatt

SEQ ID NO: 7673 - DNA, 120 bp, synthetic construct
  source 1..120: mol_type = other DNA
ctataagaaatacaaaaaaactcatcaagaaaaaaattattaaaaatagggtaaatgatacgaccagcatgtttcaaaagacaaacagtcaacaaacaacaaacatatgacaaaatgctc

SEQ ID NO: 7674 - DNA, 120 bp, synthetic construct
  source 1..120: mol_type = other DNA
aagactcatgctctttcacacttattataacactgactagaccacaaaaaatcagtatcttcagaggcataataaagtctgttctaaccacttcctcataggattttcataagtaccata

SEQ ID NO: 7675 - DNA, 120 bp, synthetic construct
  source 1..120: mol_type = other DNA
aggtttctaccttcagtttcaatggagatacctctctgctagaacctgggtgacaaaagcttaaagtaacatctgggttgttagtactccttctcatatgtagaaatgagactatgagaa

SEQ ID NO: 7676 - DNA, 120 bp, synthetic construct
  source 1..120: mol_type = other DNA
agcccagaaaaaagtacaacctgccaaaagctaagcactctctgaagctcagcctatacttatctggggagggagttctgatgaagcactcacttttaaattctcttaaaataatgttaa

SEQ ID NO: 7677 - DNA, 120 bp, synthetic construct
  source 1..120: mol_type = other DNA
tgactagctggggctctggtcatatgtcaattaagaaaaaacgggaaaatatgtttctatattactctattcgtggggagagatattccgtaagtgacatgaagataactgcatgggcat

SEQ ID NO: 7678 - DNA, 120 bp, synthetic construct
  source 1..120: mol_type = other DNA
aattaaagaagcttctgactgtattattctaactgtatgaccttttgtaaaagggccaaactatgaagacaatgaaacatcagtggttgctaggagctcagtggggagaagataaggatg

SEQ ID NO: 7679 - DNA, 120 bp, synthetic construct
  source 1..120: mol_type = other DNA
catgaagaatgtgtatggagcatgctatcatttatatgaaagtggaggtttattagttcaggatacatctctggagtaaagacctaggatcaaatttaccaaacagactctcttccattt

SEQ ID NO: 7680 - DNA, 120 bp, synthetic construct
  source 1..120: mol_type = other DNA
cttgataagtaagctgttgtctgttttcttgttcctttaaggtaacctcactcctctgtggattctttaaatatcttgtcttaatccctggaatctgtaattacactatgttcaggttgc

SEQ ID NO: 7681 - DNA, 120 bp, synthetic construct
  source 1..120: mol_type = other DNA
agatttcccacataccacctgccccacacatgcatagcctatcctaccatcaatgtctcccaacaaagggtgatacagttgttacaaatgatgaaacaacattaacacatctttatctcc

SEQ ID NO: 7682 - DNA, 120 bp, synthetic construct
  source 1..120: mol_type = other DNA
agtatgaagttagatgtagggttttggcagatatttttgatcaagttgaggaggttctcccctattccaagtttaatgggagtttttattataaatgagtgtttgattttgcaaattcac

SEQ ID NO: 7683 - DNA, 120 bp, synthetic construct
  source 1..120: mol_type = other DNA
ttttcccaaaaatggtacctcctatttttcccaaggactcctcgtctgttagaaatgaacttagttcctttcatgtggtcatcaagaggggcaaaaagacagactgaggaaataattcac

SEQ ID NO: 7684 - DNA, 120 bp, synthetic construct
  source 1..120: mol_type = other DNA
agaatatcaaatcagaaagcattcattccctgggccaagaattgagtcccaggccaccattgtgaaaagacaaactcttagcttctgagctatagcattggatagtcttcattacctttc

SEQ ID NO: 7685 - DNA, 120 bp, synthetic construct
  source 1..120: mol_type = other DNA
taaccaagaattccgagtcttcctcccaaacgaaccttctattctccacctgagaattctccctaaaatcttcttgattgaagagaaatctcctgaaccaagacttcctactaattagag

SEQ ID NO: 7686 - DNA, 120 bp, synthetic construct
  source 1..120: mol_type = other DNA
tcctgggagggggccacaggatgagataggccagtttatcaatctgggtggtgtgagctcatctgtgaagttcaggatctgcaaaatatatcaagtattgatcttaggttttacaatagt

SEQ ID NO: 7687 - DNA, 120 bp, synthetic construct
  source 1..120: mol_type = other DNA
gccttgatgatgtgcctgcctagtgctgtcagtctggtgtcgaagcttattactcattgtattactttctatctctttgcttaggtctggtagtatttattttataaatatgattgcttc

SEQ ID NO: 7688 - DNA, 120 bp, synthetic construct
  source 1..120: mol_type = other DNA
tctcatactatagtatgttttgtatagtatctcatacactgttgcacccacaacagtgtacagtggagagagtgggaaattaccctctatccagattcattcctgagtgttggtactgcc

SEQ ID NO: 7689 - DNA, 120 bp, synthetic construct
  source 1..120: mol_type = other DNA
cctttctttatgtatatcaagtttctgacctatatgagtctctctaaaaagcttctcttaacatttcttacaaggaagatgtactggaaaaacatttcttcaattgttgtttgtctgaga

SEQ ID NO: 7690 - DNA, 120 bp, synthetic construct
  source 1..120: mol_type = other DNA
ctggcaatttttttcattacagttaagcataatgcattaggtaaaaggaactgctttgataagcctttattaatatggtgtaaggtgctggagaaggggtagcattctacaggcctacat

SEQ ID NO: 7691 - DNA, 120 bp, synthetic construct
  source 1..120: mol_type = other DNA
tggggcagatagtgaaacacattgttaaggggagaaaaaaagccacttctgcttctgtgtttccaaacagcattgcattgattcagtaagatgttatttttgaggagttcctggtccttt

SEQ ID NO: 7692 - DNA, 120 bp, synthetic construct
  source 1..120: mol_type = other DNA
aaagccatcttttggcggcataagaatgacttaaggctttcgagatgttatgtatgaaagtaactaaaagacttgggcacttgggctgaaataacccatatggagtgcaacagttaagag

SEQ ID NO: 7693 - DNA, 120 bp, synthetic construct
  source 1..120: mol_type = other DNA
ccctgtgtaagatcagctccctgtgtttctcaaaaacagactatatcataaaccatagcatcctgtgcttacactagtgatacattcagccttttgtttctgatattgagtggtgatctg

SEQ ID NO: 7694 - DNA, 120 bp, synthetic construct
  source 1..120: mol_type = other DNA
gaagaaatggcatttcaataaatattattctagtaatggaatcattgtctcatgactgcaaaatgactaagtatttttactacatgtgataattgaagtcaggttttgagctcaatgttt

SEQ ID NO: 7695 - DNA, 120 bp, synthetic construct
  source 1..120: mol_type = other DNA
taaaaatgagatcaattttaagacagtgttttccggatgtaagtgtgcctcatgtgagtttagtgtgaggaggctcctcagataacaaacctaactcaagtgggactttgatactgccag

SEQ ID NO: 7696 - DNA, 120 bp, synthetic construct
  source 1..120: mol_type = other DNA
aaaaataataataataaatcgtgtactctgctgagctctctaggtcccccgtctctctgtgtgggggcctctcaggcttttgtgacaggaggggcaaatgccttctcttggagaactcac

SEQ ID NO: 7697 - DNA, 120 bp, synthetic construct
  source 1..120: mol_type = other DNA
ccacatccacattgctgctctttgacctccactgattccatgagcagtttgtctttgattttcttggaactacgtctacattcttttctagaacaaaagcattcgtgatgtgtaaagaaa

SEQ ID NO: 7698 - DNA, 120 bp, synthetic construct
  source 1..120: mol_type = other DNA
tatgattgattgtgaagcctagctcccagattttgaagtggtgactggaaaatgctttgtctaaaatgaacatgggacaaatgaccctcctgtgtgagagctccctaataaagaatctca

SEQ ID NO: 7699 - DNA, 120 bp, synthetic construct
  source 1..120: mol_type = other DNA
gttagggttcttattttattttgaattatatactacatctaagtaatacagccctgtgcttagggccaaaagacattttcccagggcacagaacttgcccaagcagatctttcctgttgg

SEQ ID NO: 7700 - DNA, 120 bp, synthetic construct
  source 1..120: mol_type = other DNA
atgttgggaggagacttgcccctggaatttgccaataatgagaaaaacatcattaacagccctcatgggttccagaactttacaaccaatggggcaacttttaactaccttattccatct

SEQ ID NO: 7701 - DNA, 120 bp, synthetic construct
  source 1..120: mol_type = other DNA
ctgttgttttctctctacccttcaatacatcattgtccttttagcaacatcctccaatcccacagttcttaaggtttttacttctgccacacctctaaaacactagagatgatgcacaag

SEQ ID NO: 7702 - DNA, 120 bp, synthetic construct
  source 1..120: mol_type = other DNA
cctgaatattatgtataaatcaaacaaaagaagactatgaaagggagaaagaagaaggcagaatggcttaggaccttgggacacaaagaacagcatggtactgggttccaggaattttcc

SEQ ID NO: 7703 - DNA, 120 bp, synthetic construct
  source 1..120: mol_type = other DNA
gctaaagacttcccgagttgggtaaagaacataaacctacagctttaagaaactaagtgaaccccaaatagagaaccccaaggaaatacaccctaacatacatcatagtcaaacttcaga

SEQ ID NO: 7704 - DNA, 120 bp, synthetic construct
  source 1..120: mol_type = other DNA
tgcagctctccagagagatgctttgaaaacaagacgggatagagcacatggcccctcatgtctcttgcctgagtgactacattccttaaaagacaaatgactgcagtagtctgttttcat

SEQ ID NO: 7705 - DNA, 120 bp, synthetic construct
  source 1..120: mol_type = other DNA
gaatgcttagaaaatgttcaggtaactcacagggagacaggataaagaacacaaagaattgaaaaaaagaataaacagaaagcaaaacataaaatggcagacttaaggcctaccatatca

SEQ ID NO: 7706 - DNA, 120 bp, synthetic construct
  source 1..120: mol_type = other DNA
actagacagaaaatgagtacaaatatagaactccacatcaccgaaagggtcaactgtgacatttacagaatgctccactcaacaagaaaagagtacacatttttttcaggccaggtgtgg

SEQ ID NO: 7707 - DNA, 120 bp, synthetic construct
  source 1..120: mol_type = other DNA
caccactgtattccagcctgggcttgaaagatattttcactgggctagaattctggcagttattattttttcagcattttataattatttctggaagaaataattccaaaggctctggct

SEQ ID NO: 7708 - DNA, 120 bp, synthetic construct
  source 1..120: mol_type = other DNA
cataataagaatagttttgtatgtgactgtttattccaatactcatttatgtttttctgcctagtctcactctggtgcttttatttatttccttgtgggcctggtggatcctttgagccc

SEQ ID NO: 7709 - DNA, 120 bp, synthetic construct
  source 1..120: mol_type = other DNA
ttctgtcccctcccacttccccatcccatgaggcaaacaagtaaaaatctgaattttcaaggttagaaatgtttgttactttgtctcacaaaattccctcagagaaaattccgcttcttt

SEQ ID NO: 7710 - DNA, 120 bp, synthetic construct
  source 1..120: mol_type = other DNA
ggttgacactaagtaaaagtaatcttgggggttctccactgtagaccaagaacagctctgaaaaatcagcattattcctgatagtccaactgtcccctctaccaaattatacttctagat

SEQ ID NO: 7711 - DNA, 120 bp, synthetic construct
  source 1..120: mol_type = other DNA
gtgggtccctgacccccgagtagcctaactgggaggcacccggcagactgacacctcatacggccgggtactcctctgagacaaaacttccagaggaacaatcaggcagcaacatttgct

SEQ ID NO: 7712 - DNA, 120 bp, synthetic construct
  source 1..120: mol_type = other DNA
attaaggaaaaaatgttaagggcagccagagagaaaggttgggttacccacaaagggaagcccatcagactaatagtggctctcttggcagaaaccctacaagccagaagagagtggggg

SEQ ID NO: 7713 - DNA, 120 bp, synthetic construct
  source 1..120: mol_type = other DNA
caccccaagtcaacagaatatacattcttttcagcaccacaccacacttattccaaaattgaccacatagttggaagtaaagcactcctcagcaaatgtaaaagaacagaaattataaca

SEQ ID NO: 7714 - DNA, 120 bp, synthetic construct
  source 1..120: mol_type = other DNA
caaaggcgggcagagactcaacaaaaaaagagaattctagaccaatatccctgatgaacatcgatgcaaaaatcctcaataaaatactggcaaaccgaatccagcagcacatcaaaaagc

SEQ ID NO: 7715 - DNA, 120 bp, synthetic construct
  source 1..120: mol_type = other DNA
aaagagcccacatcgccaagtcaatcctaagccaaaagaacaaagctggaggcatcacgctacctgactttaaactatactacaaggctacagtaaccaaaacagcatggtactggtacc

SEQ ID NO: 7716 - DNA, 120 bp, synthetic construct
  source 1..120: mol_type = other DNA
aatcatgctgctacaaagacacatgcacatgtatgtttattgcggcactattcacaatagcgaagacttcgaaccaacccaaatgtccaaaaatgatagactggattaagaaaatgtggc

SEQ ID NO: 7717 - DNA, 120 bp, synthetic construct
  source 1..120: mol_type = other DNA
gagaagttatgctaagcatattcagattagtcttcccaagcagactttaagtcatcctaaatgtcccaggatacagtggccaataggacaagaaaaggtcaaaagcattccatgaactga

SEQ ID NO: 7718 - DNA, 120 bp, synthetic construct
  source 1..120: mol_type = other DNA
ctgtcattctcatgaggcataagctcccttgtacaggatcttattgtgcatggaccatataaaattacaaccaagaacacatatgtaattgaaaaggaaaatttggctgggctcggtggc

SEQ ID NO: 7719 - DNA, 120 bp, synthetic construct
  source 1..120: mol_type = other DNA
ggaaggaaatgaagagactggttatttggtctgtcctaccatgggcatcaaactattaagagtgacagtcagatgtttccacttaatgcagaaatctgtttatgataccggggttaattc

SEQ ID NO: 7720 - DNA, 120 bp, synthetic construct
  source 1..120: mol_type = other DNA
attaatggggtttgtgaaaaattatccacttattcagtgtccggctaagtgctgaggctttcttgcagatttacttccctacaatatgcaccacaaagtgccagcttcctgctgtgtgct

SEQ ID NO: 7721 - DNA, 120 bp, synthetic construct
  source 1..120: mol_type = other DNA
caccagatgcttttttctctctgggtctgactcctacactcaactatagatgcctccagggaaacaatttttgtctggttcatttctgtctctagcacccaatatgaatttttatgaatg

SEQ ID NO: 7722 - DNA, 120 bp, synthetic construct
  source 1..120: mol_type = other DNA
attagattgctataattcatttaaaaatatttattgagttgttcttctgagctaggtgctgtcattggtatcctgggagctgaattagttggatctagggatctagggcccccagaacac

SEQ ID NO: 7723 - DNA, 120 bp, synthetic construct
  source 1..120: mol_type = other DNA
gctgagaggtttatcaggaagaagtacacaggcttgtgaaggctggcctctgccatcacaaccaccaggatctggtcattacccaccaggataagcggatagattaagaagaaaatcaag

SEQ ID NO: 7724 - DNA, 120 bp, synthetic construct
  source 1..120: mol_type = other DNA
aaagaacaactccataatgcaaaaacaggcttgataattagtgaagtccatgtaactagaggttgcaaggctgaggtctttttctggaatgctacagagatgtagtacttggatagcagc

SEQ ID NO: 7725 - DNA, 120 bp, synthetic construct
  source 1..120: mol_type = other DNA
ccgctctattctcatctcactctatctgggtcggaatgttatgtctgaatcagtgccctttgtttcagtctctccatttccattcacatgagaattccttttctgtgatatctttctctt

SEQ ID NO: 7726 - DNA, 120 bp, synthetic construct
  source 1..120: mol_type = other DNA
aaaataacttaaaaatacatttttttaaagctgataggggagctgatcttggtcaaggctacacagagagctattggcagagccacaccagaaaccagatgcctgctccctgttcagggc

SEQ ID NO: 7727 - DNA, 120 bp, synthetic construct
  source 1..120: mol_type = other DNA
agcaatccaaacacaagtcaggataggaagtctcagatttcctaaccctcactccagcctctgcaccaatgacacaaatgaaaaagttagtgaaaattttccgtgtaaatgtaaaaggct

SEQ ID NO: 7728 - DNA, 120 bp, synthetic construct
  source 1..120: mol_type = other DNA
ggaaacaaagcgacttgcatcatggaagacatctcttaaatgggtcataaatttcaagcagatgaatagagtgcaggccacaaaggagggggtaaacaaagtcatgaagtgtagaaaaag

SEQ ID NO: 7729 - DNA, 120 bp, synthetic construct
  source 1..120: mol_type = other DNA
gcccaggcaacagagtaaggaaaaaaaaaatttggagaatcttcaagaggtagaatagtcagaatttgacaactgattatggaaaggtccaagatgatgcccagtattctggtttgggtg

SEQ ID NO: 7730 - DNA, 120 bp, synthetic construct
  source 1..120: mol_type = other DNA
tgaccttttaaattttaatttatttattcactcatgcattcattttttttttttttttagatacagggtctcactctgttgcactggctggagcgcagtagcaccatcatagctcactgc

SEQ ID NO: 7731 - DNA, 120 bp, synthetic construct
  source 1..120: mol_type = other DNA
gtatagtggttaaatgctccgatcttggtgccagactaatttggattcaagcctggcatttagctctctgagaatctgttttctcttctgcaaaatggaggattgataatcaggtatttc

SEQ ID NO: 7732 - DNA, 120 bp, synthetic construct
  source 1..120: mol_type = other DNA
tgacttcacttctctctgcctctgtttcctctttgggaatgggggtaataataatggcaacattggctcgagtgaggtttagtgagctactctatgtgagagctctttgcaaatcatcag

SEQ ID NO: 7733 - DNA, 120 bp, synthetic construct
  source 1..120: mol_type = other DNA
ctaaaaaaaagattagtgtttggaaagatggctccagtagaatgtggaggatggattagaactagggagacgggagtcacagatgattaaggaggctgtgcaagggttctacaggaacaa

SEQ ID NO: 7734 - DNA, 120 bp, synthetic construct
  source 1..120: mol_type = other DNA
aaaaaaaagacatgcatttaaatgaggacagtgccacttggaaggtgagatgattttagacgcgcatgccaggaacagttggagtgagtgaatcttggaagtgtgtgcacagaatgtggg

SEQ ID NO: 7735 - DNA, 120 bp, synthetic construct
  source 1..120: mol_type = other DNA
caaaaaaaaaaaaaaaaaccgcaaactaagaattaaataacacagctactaaggggggaagccagcagtcacacccgagaagtcctaccccagcgccttccttgctctaaacactcctgt

SEQ ID NO: 7736 - DNA, 120 bp, synthetic construct
  source 1..120: mol_type = other DNA
acacattaataactgtaatcccacacttgacactttaggaaaacagtggcacagccattagctcatgtgggccatgagcagaatgagactccaaaagacaggggcagagcagaatgagac

SEQ ID NO: 7737 - DNA, 120 bp, synthetic construct
  source 1..120: mol_type = other DNA
tgctgtattaataatggctcatatctgctcagctctcagaattttggaagcactaatctatccatcagctcatccaagccatatgacagctctgggaaggtgttttgcagacaatggcac

SEQ ID NO: 7738 - DNA, 120 bp, synthetic construct
  source 1..120: mol_type = other DNA
atttcacagatgaagaaacagcctcagagagctttgtactgggtcagggttgaactgacacccaagctcatgctctttctggggcccagagctgtcactttcagggaaggatgcagtttc

SEQ ID NO: 7739 - DNA, 120 bp, synthetic construct
  source 1..120: mol_type = other DNA
tgaagcctgcttatctagggagagataaacagtgactcccccgtgatctccacactctcctggccccagtctaccaatctgaaaaaaggaaaggttgaattaaatgagctccatattcct

SEQ ID NO: 7740 - DNA, 120 bp, synthetic construct
  source 1..120: mol_type = other DNA
taaaaaaggcatcaagttttgtaaactgtgggaatccacagatggtgttgtgatccacacgcatcgtggcgctctgtaaaatgcaccttcatataatacttgaacaaagcacagcaaaca

SEQ ID NO: 7741 - DNA, 120 bp, synthetic construct
  source 1..120: mol_type = other DNA
tcaaacccatgagggtctggtctttctattaatccaagccagttcttgacctttctcagtggaatggtcatgtactcacatttctggtttctcaaagactcatttattcatgtaacaagt

SEQ ID NO: 7742 - DNA, 120 bp, synthetic construct
  source 1..120: mol_type = other DNA
agacagaaggagcaagtgacccagggagacaaacacttggagatacttggggctgagtttgagcaagactccctaacctgtgtctggacaagtctgatgtcctgtgtggcccaagaagaa

SEQ ID NO: 7743 - DNA, 120 bp, synthetic construct
  source 1..120: mol_type = other DNA
aggagacaaagatagagacagacagagcagagaaaaagagaaaagtgtagtcagacagtgcagacaggcaggctcaaacgaagaggcacacaggaggtcggagaacacaatatcaacagg

SEQ ID NO: 7744 - DNA, 120 bp, synthetic construct
  source 1..120: mol_type = other DNA
ttctggtgacatttgccctgttttccaactcttccaaatgccaactcctccaggaagccgttccagattcttccagctgggggtaacctctcccatatgctgtttgatgaccttctcttt

SEQ ID NO: 7745 - DNA, 120 bp, synthetic construct
  source 1..120: mol_type = other DNA
tgggagctatagaaagtatctgaggaggaagtggccctgcttcagtggcccagagaatctgtgtcctgggaacattcattataaccccaatcatgtgtacagtacttttttttttttttt

SEQ ID NO: 7746 - DNA, 120 bp, synthetic construct
  source 1..120: mol_type = other DNA
tgaagacggtcatttgggtcactttgtgtttggagcactacagcttcatgatccgagtgagatgggataacatggaccccttaaggggtcaatttaagcagagagagagattagctggga

SEQ ID NO: 7747 - DNA, 120 bp, synthetic construct
  source 1..120: mol_type = other DNA
gctaaccattgttgaggaccacagtataccaggcataggacattttcctttaatcctaataaaaacactgggagatagacactgctcactcacttacagagaagaaaacaggcttagaga

SEQ ID NO: 7748 - DNA, 120 bp, synthetic construct
  source 1..120: mol_type = other DNA
tcccttgaagggctgatccatctttcaggaagtttctctaaagaacaatcaaaccatttgctttggacggacagtctaggaagaggaaaaatattgctaatgaagacagtgaaatagcaa

SEQ ID NO: 7749 - DNA, 120 bp, synthetic construct
  source 1..120: mol_type = other DNA
tgcttgaatatttatcaggaaaagagagcaagggccacctatatgccaggccagctgccccaaaggccttacctctttgaggtcgtatagaggagaagagatttcttgtcctcactcttt

SEQ ID NO: 7750 - DNA, 120 bp, synthetic construct
  source 1..120: mol_type = other DNA
aaggctgactctacccatgaagggcagccccttgaagggtgagtctctgactgaccagatacctgggaaacgaagtttgtggctgacagactttcaggaacttgtctgactgtcttatga

SEQ ID NO: 7751 - DNA, 120 bp, synthetic construct
  source 1..120: mol_type = other DNA
agagaaaagcactgtgcttcttccccctgtcaaacttgtacaaggagcattgagtgatgttgagtttaacacttacctgggcttgagtcctgggaccaatgctaaccagcaaagctagtt

SEQ ID NO: 7752 - DNA, 120 bp, synthetic construct
  source 1..120: mol_type = other DNA
gaaatgttcagaatataggcagattcatagagacaaatagtagatgagtgtttgtcagggaagagggaggaatggagggtgactacagatgggtacgggacttcttatgagtgaatgaaa

SEQ ID NO: 7753 - DNA, 120 bp, synthetic construct
  source 1..120: mol_type = other DNA
ttcctctcattgcagtgagtgagatactgatggttaccatagttaccatgtgaggaaagccaacatgcataagggaggccaagggtccaagacagctctgtgtcctcagttatcacccca

SEQ ID NO: 7754 - DNA, 120 bp, synthetic construct
  source 1..120: mol_type = other DNA
aggaaactgagactcagaacagagtgaatatattaagctctgtcataaatactctattttttaatcctttgaagtttttcttctcttaggaattctcttagagtttcaggaggagactcc

SEQ ID NO: 7755 - DNA, 120 bp, synthetic construct
  source 1..120: mol_type = other DNA
agtgtacccaggatagcttttctagtttttagtcctgtgtgagaagctgtgagttacaccagtaaccatctctctctgccccctacctcctctggcctttcttccctttctctctttctc

SEQ ID NO: 7756 - DNA, 120 bp, synthetic construct
  source 1..120: mol_type = other DNA
agtccttcccccgccagatgtttttaccctgaaggaagttgtctttctcccctgtccccagggcagagtcccatgaaattctccccccttggtaatgtgtcatatttctcacaacccaag

SEQ ID NO: 7757 - DNA, 120 bp, synthetic construct
  source 1..120: mol_type = other DNA
gcatgcagtagaccctccggaattgcgtgtgtaataataatagtgtcatacactacttactatgcaccagacactgctctaagcacttaatgtgtagtcacgcatttaatcctcataaaa

SEQ ID NO: 7758 - DNA, 120 bp, synthetic construct
  source 1..120: mol_type = other DNA
agcgcgtgcatgaagaatgcagagtcgttctctaggcctgcgtggaaacttgtcaagagaactgcttggaataccagaaaataatacttcctcacatttctttgtacagaattttcactt

SEQ ID NO: 7759 - DNA, 120 bp, synthetic construct
  source 1..120: mol_type = other DNA
taataattgttgcatctaacgtctagtaggccccatgcccaggcacactcaccacccaccactcttaatgttcacgactccaggaggcagggattatcattacttcctcacaagtgagga

SEQ ID NO: 7760 - DNA, 120 bp, synthetic construct
  source 1..120: mol_type = other DNA
gagagcactcacccttgaggtttgttgtggggctcaaattatttttatacacagcacttagaacagtaccttcccccggggtaagcgctatttaagtcttagctattgttataatatttt

SEQ ID NO: 7761 - DNA, 120 bp, synthetic construct
  source 1..120: mol_type = other DNA
atctgtgagataatctctgtcctgtctgtctcctaaagctgtgatcagagtccagcgagatggtggagataaactgtaaagtgccatcaaattaggaaccatggttgccgtcactactat

SEQ ID NO: 7762 - DNA, 120 bp, synthetic construct
  source 1..120: mol_type = other DNA
ataagagagaagcggacgggttggagaggtgcatgtgtgagctctcaccagcctgacatggaggcaggggagataacaagtaaggagagaatcaagtctaatcagcgcaaaagccaaacc

SEQ ID NO: 7763 - DNA, 120 bp, synthetic construct
  source 1..120: mol_type = other DNA
cactctgtggtcattctaagtgggtcttcagtaaggccaggtattttttgacaaacatccctggggatattaatcatcatgaaggtctgagaaacacaacagtaatcctaaacattcatt

SEQ ID NO: 7764 - DNA, 120 bp, synthetic construct
  source 1..120: mol_type = other DNA
tactaaccactacaatatggcctctgtgctcatcacttaaagtttttgtaaattctgaatgtgccataggaatgttaagaattgggagggtgggtaggatcatctgggaagacttccctg

SEQ ID NO: 7765 - DNA, 120 bp, synthetic construct
  source 1..120: mol_type = other DNA
ccaggcaggatagccattctgggccagggacttccaagtttttcagatacccacaaaaacacgaggcctgaaaaacaacaaattggcttcaaattaaaaagaaaatgacaaaatagaaac

SEQ ID NO: 7766 - DNA, 120 bp, synthetic construct
  source 1..120: mol_type = other DNA
ctgattctgcctagttcaggccaaagtttcgagaagatgaaattcctagaacttaaaggtggagtgatgtttataaaggaaagagagagagcctatattgctggttacagatgatctcca

SEQ ID NO: 7767 - DNA, 120 bp, synthetic construct
  source 1..120: mol_type = other DNA
ctatctgtctaatgggcagcagatcagacaaggtctgtcggctctgacaggttcaaggccatctcctctaaatgactcactgtctctggagaaatatgtgagcattttcacaggggaaaa

SEQ ID NO: 7768 - DNA, 120 bp, synthetic construct
  source 1..120: mol_type = other DNA
tgtttttatacctgtctaaagactaaatctaaagaataagatttcagttgggaaaagggttctgttcctaaaaaccagctgagctagtccaatactgccatttgtcagaggaggctgagg

SEQ ID NO: 7769 - DNA, 120 bp, synthetic construct
  source 1..120: mol_type = other DNA
aaaacaaaaaacaaaactccaaacgcaagttctgtttagaccaatcattctcagggtatgcttaagaagctagtactgtcaggtgcgtctaccatgcaatatggtggccccaccatacca

SEQ ID NO: 7770 - DNA, 120 bp, synthetic construct
  source 1..120: mol_type = other DNA
gttttcacaatgacaggatttccttcttttttaaagccaaatagtattccattgtgtatacatactacattttctttatccattcatccattgatggactctttggttgaatccgtatct

SEQ ID NO: 7771 - DNA, 120 bp, synthetic construct
  source 1..120: mol_type = other DNA
aatggggtatccaacacctcaagaaacaagaaagaatttatcatttcttatttctttaatttatttttcaatgtataaccaatcaatagaatgcatcatttctttgtgtttcaaatgttc

SEQ ID NO: 7772 - DNA, 120 bp, synthetic construct
  source 1..120: mol_type = other DNA
gagcgaaaggttctcagaatgagagagaaaaacataaatgcatggacccataaagattaattcagttgataccattgagccatttatttggttctgaggtttctggtagcccaaagggaa

SEQ ID NO: 7773 - DNA, 120 bp, synthetic construct
  source 1..120: mol_type = other DNA
cgttattactcagctgtcctcaaaacagatgagggggcaagcggcagaaatctgtggagaacacagggtcaggagctaaggacagatagggctcccaatagccacagaatatagcccaaa

SEQ ID NO: 7774 - DNA, 120 bp, synthetic construct
  source 1..120: mol_type = other DNA
ccagatcactctcccagagctcagacgggactcagaaaggagcaaggattcactgattctctttaaggcagcatgtccaaaagaaatgttatatgaaccacatatgtaattctaattttt

SEQ ID NO: 7775 - DNA, 120 bp, synthetic construct
  source 1..120: mol_type = other DNA
gttagaaccatctcttgcgctcctcttgcaattgatatttactagataaccactatttcgccccaggctcttgctaggcacaagagtttgaacagaaaacaagataaacatgaatcctgc

SEQ ID NO: 7776 - DNA, 120 bp, synthetic construct
  source 1..120: mol_type = other DNA
aacatcccctgaggacaggaaacctagagcctgctccctgctggaatgaaagaagaaagaagaaagggaaaaaaagtccaagggaacacacacatgaattaatatttgaatgaatcgtcc

SEQ ID NO: 7777 - DNA, 120 bp, synthetic construct
  source 1..120: mol_type = other DNA
aatgcttctgttctccagacatggggctatcaggacactcctaagtctgggtctctttagtaaacatgatcaatctgttcccttaaccataaacatctagaggctaagaatgcctgactt

SEQ ID NO: 7778 - DNA, 120 bp, synthetic construct
  source 1..120: mol_type = other DNA
ggctctggagccaagccgtctggattcaaatcctagctggaccacttattatctgtgtgaaataagttgaaataagttattttctctctgtgtctcagttttatcacctgacaaaaaggg

SEQ ID NO: 7779 - DNA, 120 bp, synthetic construct
  source 1..120: mol_type = other DNA
gtggtcatgacaactaacccatgtggatactggtgatgacaaagtttaaccacaagaattttattcatcctttcaaaaccacttgttgggtacctatagggccaagaacaaatggaacac

SEQ ID NO: 7780 - DNA, 120 bp, synthetic construct
  source 1..120: mol_type = other DNA
atctatatagccaggagtagactcaatgatctaacgtcttgaggctatgatcctgagactacgaactcagtctatcagtaaccagagtacacattatgaccaggccattctttctcaaga

SEQ ID NO: 7781 - DNA, 120 bp, synthetic construct
  source 1..120: mol_type = other DNA
aaaaaaaaaaaaaaaagacttgatgttgggatatcagtaatctagcccccagttttttcagcattcccagggaaagagagggcttggactccatgcatggtgctgggcctagacgcagcg

SEQ ID NO: 7782 - DNA, 120 bp, synthetic construct
  source 1..120: mol_type = other DNA
ttgaactagaggaggttcctgggggagacattgcccttgagttaagggaagcccctacctaattggaagaagcatagtccctagactgagggagaacctgttctatttgacagaggatac

SEQ ID NO: 7783 - DNA, 120 bp, synthetic construct
  source 1..120: mol_type = other DNA
tctttgattctgccccagacatattgacatttgatcacatattagtccatatatccattcattccttccttcattccatgaattcaggtgcctcctatatcccaggctctggagatttag

SEQ ID NO: 7784 - DNA, 120 bp, synthetic construct
  source 1..120: mol_type = other DNA
agaaaaaaaaagggactagagtaaatggaatggagtcaagtgggataaaattgattgcaatagaattaagtggaatggggcgggttagaagaaatggaactgcttgaactgagcagggca

SEQ ID NO: 7785 - DNA, 120 bp, synthetic construct
  source 1..120: mol_type = other DNA
agaggggactcaggcactgggaaaagattggacagcagacctctgataattttgggttttagagcttgggagctaaaattctgatattccacgactctaaaattacagaattctttttcc

SEQ ID NO: 7786 - DNA, 120 bp, synthetic construct
  source 1..120: mol_type = other DNA
tctcatgtcacctctgttctcgtctaaattcttgcgatttattcactaagctctgggttctaattcactgaagagaccatttgggaccaactgagctaggcaagaagaactttccatatt

SEQ ID NO: 7787 - DNA, 120 bp, synthetic construct
  source 1..120: mol_type = other DNA
ctctgattttctgagaaatgaagcaatcattgattttcggagaaaggaagctgattgagggaaagatactcctcatctgacactaacttctgggaggaatttatcttgtataccctgtag

SEQ ID NO: 7788 - DNA, 120 bp, synthetic construct
  source 1..120: mol_type = other DNA
gtgaatcattctggcttccagatctctgtgcaggggagatgcaaaaggaaagaactcacaggaattccagaggtgctgataggtaaaacaactggtccctacaagcacatacaaagatga

SEQ ID NO: 7789 - DNA, 120 bp, synthetic construct
  source 1..120: mol_type = other DNA
tggcaggtggagcagtgaactcctgtggatatgggaaccgattcaaatccttcttaggcctctaactgactctgttaccttaggcaaattatttaactagtgcctcagtttcttggtctg

SEQ ID NO: 7790 - DNA, 120 bp, synthetic construct
  source 1..120: mol_type = other DNA
aatgagactctgaggcagcagaaagattgaagtcattcataagaaaaacttcctgccatggaattagatgaatgtgaagggtcaggaaaaacccaagtgaagggtgaggaaaaacccaag

SEQ ID NO: 7791 - DNA, 120 bp, synthetic construct
  source 1..120: mol_type = other DNA
tttcttacagttggtgtgtagaatgtgggggaatgatgctctcctggctccctccctcttcttctctactttctctctgcttccctctccctgcccaccacctcagcccaggctcaactt

SEQ ID NO: 7792 - DNA, 120 bp, synthetic construct
  source 1..120: mol_type = other DNA
gtcctaagaatgcctgctggccctgacaaattgtcacctgagttcaaagtcagggtctcctggggtgagggctgggataagaggactgagtgagaaaaaaatagtttttccttttttttt

SEQ ID NO: 7793 - DNA, 120 bp, synthetic construct
  source 1..120: mol_type = other DNA
ccttctcctgggattattttattcactatctactttctaggaaattagaagggaaatggagcctcttgcaaataccagaagacatgtagatctagaacacaagctggcctgggagagaaa

SEQ ID NO: 7794 - DNA, 120 bp, synthetic construct
  source 1..120: mol_type = other DNA
cctcatgttgcccatgtctctgcttgttagaggagtgaagaaagaagacaagactttggctgtgggcatccagttcatgttcctgaggattttgggtaaagatcttgcttgggaccattg

SEQ ID NO: 7795 - DNA, 120 bp, synthetic construct
  source 1..120: mol_type = other DNA
ctgtccacagggggcttcctagaaaaggaaaagtcaaacaagggctttgatagttaaacaggggagagggaatccgtttgttcttgtggcaggtggcgcaatataaaattgcacttgtca

SEQ ID NO: 7796 - DNA, 120 bp, synthetic construct
  source 1..120: mol_type = other DNA
tgtgttccattctggctcctccactaaattgctgtgtgacttcaggcaagacattgatcctctctcagcctttgcttgctagtctgaaccaaagagttgtttgggcatttgctgtgttgg

SEQ ID NO: 7797 - DNA, 120 bp, synthetic construct
  source 1..120: mol_type = other DNA
ttctgagcagctcccagtgccagggctttgagactttcccacatgataaaagaaaagggaggtacagaagttccaattccctttttattttgctggttggtatctgtaaatgtttaataa

SEQ ID NO: 7798 - DNA, 120 bp, synthetic construct
  source 1..120: mol_type = other DNA
ttcatattttattcttgagccgcttggtcaggtttgattcgcacactccctctgcagtgactccaggagcccctctcacagctcagagcggaagctgaggctgcagcctgccatcttctc

SEQ ID NO: 7799 - DNA, 120 bp, synthetic construct
  source 1..120: mol_type = other DNA
ttttgaatctcccttttcgggttctgagcagcagagggcccctcagtggaggctcggattactgattcaggaaaagtaaaaggggtccccttctctaacctcagaggcgatctggccact

SEQ ID NO: 7800 - DNA, 120 bp, synthetic construct
  source 1..120: mol_type = other DNA
ttcccagaagaacaggaccaaagctgggctgagccagggcctccttccctggattcacatgccccacacctggacctttgctttttctttttattgtgggatttattttattttatttta

SEQ ID NO: 7801 - DNA, 120 bp, synthetic construct
  source 1..120: mol_type = other DNA
tcacacacctgagggaatccctggggctttgaactcaaggaagggcacccgcatgaagatgggagctcggtgacacttctccaggtcaccaccctggtagatcatgtccagaatctggct

SEQ ID NO: 7802 - DNA, 120 bp, synthetic construct
  source 1..120: mol_type = other DNA
cacagtccatctgggctccaggacaaacacggcccattgaggaactgagctgctactaggggccagagctgctgtgggaatgaacaaaactctgatgactcagcaaaagcacaggcctag

SEQ ID NO: 7803 - DNA, 120 bp, synthetic construct
  source 1..120: mol_type = other DNA
gctggagacaagcttaaagtgatctccaaagccacgactgagtttgctgtgtagaaaacagaagaatgaaaggggaaaggcccaatggtgggtttgtttttgtaggttttttttttctgt

SEQ ID NO: 7804 - DNA, 120 bp, synthetic construct
  source 1..120: mol_type = other DNA
taagtccctgaaaaataggatgaggaccaagctggctacgaccaaccagacacaacatggcgctgtatttgatgtaggtttcacctaggatctcattgtatgatcagtaacatatgaaac

SEQ ID NO: 7805 - DNA, 120 bp, synthetic construct
  source 1..120: mol_type = other DNA
acaaaacaaaacaaaaaaaagcgtggaaacgggctgaggtcgatgtcccaccggtctttgatgacctcccctaggccaccagtatctggaggggattagggacactgagctccagcaggg

SEQ ID NO: 7806 - DNA, 120 bp, synthetic construct
  source 1..120: mol_type = other DNA
gttggggtgggagagactaacgagagtcataaagcacctagccggtgagatagtaagtattcaggtaaagaagcagacggggaagtacacaagaggtgcaattttattttatatttttag

SEQ ID NO: 7807 - DNA, 120 bp, synthetic construct
  source 1..120: mol_type = other DNA
ccagaaatactatcatccccatcttagagacggggacagggccgcaaaagtgtcagggcgtttcctggctcctcaacaaacagctggatccgaagtggtctgggggatgagccgccctgc

SEQ ID NO: 7808 - DNA, 120 bp, synthetic construct
  source 1..120: mol_type = other DNA
gacacatattacataaatgatcaactacctaaggatatctcatttgtatttaagattctttgggcacaactgcaagcggaaaggactctatcccatggacacagggtgtttctccccacc

SEQ ID NO: 7809 - DNA, 120 bp, synthetic construct
  source 1..120: mol_type = other DNA
cgtgcatgcgtgcacacacacacgtaactcgttttttataatacacaaccatcctattaacatgagctaaacaatctaaaccatttagttgttgggtagtacagagttatagaggactgt

SEQ ID NO: 7810 - DNA, 120 bp, synthetic construct
  source 1..120: mol_type = other DNA
tccccaacttttatgtcgttcttcaaaagcatcaaccttctcaagacaacgtatattgcatattttacctgaaacaagaaagagtaacatgttaaaatactatgaagaatgacatcaggg

SEQ ID NO: 7811 - DNA, 120 bp, synthetic construct
  source 1..120: mol_type = other DNA
tataccatctctctagaaaagttcaaatacctttaacatagagcatatagcatatatacagagcatatttacagagattagttccttttctaagataaaacaactttcaataaaatggtc

SEQ ID NO: 7812 - DNA, 120 bp, synthetic construct
  source 1..120: mol_type = other DNA
ctccacctccagacagggcctgctgtattttcttcccaaaggttctttgttagggcttctgttcattaatggaatttaaatcagattagcagagctaacttctgcctctattaatttcta

SEQ ID NO: 7813 - DNA, 120 bp, synthetic construct
  source 1..120: mol_type = other DNA
agaaagaacacacaggagatactgaaacttctttcccaggagggaaaacattgtatctgcatagctacaaagaacacaagaaggtatttgttacatttctctacacaggcaaaggctgga

SEQ ID NO: 7814 - DNA, 120 bp, synthetic construct
  source 1..120: mol_type = other DNA
agacgatgagttgaccaatcagatgactgacttggaaactgaattaagagaccaaagaggaattgctaattagctgtggtcctactgaaagttggagcttttgtattgtatggtggttgg

SEQ ID NO: 7815 - DNA, 120 bp, synthetic construct
  source 1..120: mol_type = other DNA
gagtcacagcagaaaatacatcagtacttgacaatgtacaatctaaggagaagacacccagtcctaacgaaagcaccaatataatgtgctaacatggtaagtactgagtaccagcatgta

SEQ ID NO: 7816 - DNA, 120 bp, synthetic construct
  source 1..120: mol_type = other DNA
acttttaggcatgcaaggaggatgggagttctggaaaagagataaaggaggagcagtgagaaaaagagggaaacaggagcatgaaaattaagatgcggcatggtctaatttaaaaagatt

SEQ ID NO: 7817 - DNA, 120 bp, synthetic construct
  source 1..120: mol_type = other DNA
ccactgcgcccagcctcctttttggccaagtgatgagtctgctccatacaactaagtaattcaatatttccatgctatatccaagtaagcacataaatgacattattttaattgaaagag

SEQ ID NO: 7818 - DNA, 120 bp, synthetic construct
  source 1..120: mol_type = other DNA
ttgtgttagtattacagaaatattcccattttgcaggagtaaaccaaagcttagagaagttgaatacttggaccaaggccacacagcttgaaagtgattgagccacaagccttatagcct

SEQ ID NO: 7819 - DNA, 120 bp, synthetic construct
  source 1..120: mol_type = other DNA
catgcctgcactgcctggcaagcattcaaattttttaaagtgcagatgtagtattcaacctacctgggaagatcaaaaatactgcaacagtacaatgaaatgttccccgaagaactctgt

SEQ ID NO: 7820 - DNA, 120 bp, synthetic construct
  source 1..120: mol_type = other DNA
aacaacaacaaaaatcaagagaataaaacaaaaaaagaggtgacttttgaaagggtgacactctagggtgtggactgggggcacactccaagagggggcaatataacatagactttagga

SEQ ID NO: 7821 - DNA, 120 bp, synthetic construct
  source 1..120: mol_type = other DNA
gccaccatgcccagctgagcaattaatttcaatatttagaaaagagtactttgtgagacactgaatatacagatggacaatagatcctatatgacaatacaactctgaccccacaactga

SEQ ID NO: 7822 - DNA, 120 bp, synthetic construct
  source 1..120: mol_type = other DNA
attttgagcccaaacctcactccatgcttcagacataaaaccttcaccactccacaggtcccttaaactcatcatctctagaaaaagattcattctttctgcccttctcatttattcttg

SEQ ID NO: 7823 - DNA, 120 bp, synthetic construct
  source 1..120: mol_type = other DNA
cccttgcttcttatactatatagtatctacagtgaatctgcgtgctaaataggaaccatcggacacatgaatggtatcctcataatactcacactgagaaaaacttttgtggggatatgg

SEQ ID NO: 7824 - DNA, 120 bp, synthetic construct
  source 1..120: mol_type = other DNA
gaactcaggtgatccacctgcctcagcctcccaaagtgctgggattacaggcgtgagccaccacacccgggcttttcctggtaattttgaggaaaagaggaaaattttttcctcaaaaaa

SEQ ID NO: 7825 - DNA, 120 bp, synthetic construct
  source 1..120: mol_type = other DNA
agataaatactacaatatggcactttacggtgaaaaagacctaatgctcactaaggtagctgggggatgttggtgcattccatctattcatacctggtttagttcaactgggtgcagttt

SEQ ID NO: 7826 - DNA, 120 bp, synthetic construct
  source 1..120: mol_type = other DNA
ttcatgaccacacttgaatcttaaagtcatagcagccctctaacaaaggctctcagctacagttgattggttgctggctgcaaaaattctatcatctctacttgaaaatcaactcccaaa

SEQ ID NO: 7827 - DNA, 120 bp, synthetic construct
  source 1..120: mol_type = other DNA
accacatacaaggatccaggaaatgtaaaagggaaggctgttttttctccccccattggctccaaactgattttttaatttcaaaactcaatccagaaagacttcatacctgtttctgtt

SEQ ID NO: 7828 - DNA, 120 bp, synthetic construct
  source 1..120: mol_type = other DNA
cctattggaaagcaaagtcagacaccactgattttcagtatgaagaattgtaagcataaacattgcttgagcacctgttgtaggtataaatattcagggccaatacataggtgccgtagg

SEQ ID NO: 7829 - DNA, 120 bp, synthetic construct
  source 1..120: mol_type = other DNA
agtgtgagtcactgcaccttgccatttcaacatccaataagaagtgataacaaaaaattactttcagtgcgtctggtggtagaataataccccttaatacacattacaagagatcattaa

SEQ ID NO: 7830 - DNA, 120 bp, synthetic construct
  source 1..120: mol_type = other DNA
tgaccacgcttatattggtgaagcctaacctccagagcttcctgaaagagcacaaggaagaaaaagaatgtttttccattttgcatgtataaaacacggttagactattcctcatccttg

SEQ ID NO: 7831 - DNA, 120 bp, synthetic construct
  source 1..120: mol_type = other DNA
ggctaatgtctttaatttccttgtggtagtcagactttccatagatggatctcccaattcctgtcttaaggattctgtcgttggagccactgtcatatactcatataagaaaagaagaga

SEQ ID NO: 7832 - DNA, 120 bp, synthetic construct
  source 1..120: mol_type = other DNA
ctgctcaatggcttttctcattgctggtttagaattcagcttccttgaagttgcaaaatcctttcccacttgtccatttgcctttccaaaattttactaattttgtctctcctgtcctgg

SEQ ID NO: 7833 - DNA, 120 bp, synthetic construct
  source 1..120: mol_type = other DNA
cttttgttgccaaatttggcctcagtatgcttaggatatagggaggaggcatttctctcattacctgggaacatgaattcacttcttagcaaatatttgttgacaaatggcttctgcaag

SEQ ID NO: 7834 - DNA, 120 bp, synthetic construct
  source 1..120: mol_type = other DNA
ccccagtttcccacatcaccagggatcactcactatttggcagtacttattttttcccaaaaatcactaatacaccaggctggggaaaaaaccgagagtccgtttctataaaaaaaaatt

SEQ ID NO: 7835 - DNA, 120 bp, synthetic construct
  source 1..120: mol_type = other DNA
aggcggcgggaagaggagagcactgaagctggcgcgggaacttggtttcctggtggcctcccatccaatccccacgaaccagctttcctcttaaaccttgaaaagagaaattcgggagtt

SEQ ID NO: 7836 - DNA, 120 bp, synthetic construct
  source 1..120: mol_type = other DNA
tggagaaaataatgcttagtaggcaattctgataaaagcaggtgcttgcaaaaatctctctgttgtctgaatataaactgtaccacaagcgagtgcggatgaacgaggactgcatttaaa

SEQ ID NO: 7837 - DNA, 120 bp, synthetic construct
  source 1..120: mol_type = other DNA
atgtcaaaaacaaaaaaagacaccaccaaaggtcaaagcatatcattcctcaccctcaagcccttagtggctccatttcactcagtaagagccacggtccttatggtgtccgtttttcag

SEQ ID NO: 7838 - DNA, 120 bp, synthetic construct
  source 1..120: mol_type = other DNA
cgggacaaactcaacaatagaaagggaggaagcaagatactcagaaataaaatgcattcccctgtttcaacttaatgcttcaattcaggattctaaggaatccttgccaggaatgtcaga

SEQ ID NO: 7839 - DNA, 120 bp, synthetic construct
  source 1..120: mol_type = other DNA
taaggtctgggggatgagtcaatgtcacaggagctgatgtatagctttgaccttgtgaggggtggtgccaggttaagccacaattaagcctcatgaaggccgtttcacactctttttttt

SEQ ID NO: 7840 - DNA, 120 bp, synthetic construct
  source 1..120: mol_type = other DNA
ctagatccctgaggaatcgccacactgacttccacaatggttgaactagtttacagtcccaccaacagtataaaagtgttcctatttctccacatcctctccagcacctgttgtttcctg

SEQ ID NO: 7841 - DNA, 120 bp, synthetic construct
  source 1..120: mol_type = other DNA
ggtagcttgatggggatggcattgaatctataaattaccttgggcagtatggccattttcacgatattgattcttcctacccatgagcatggaatggtcttccatttctttgtatcctct

SEQ ID NO: 7842 - DNA, 120 bp, synthetic construct
  source 1..120: mol_type = other DNA
tttttctattgattggaatagtttcagaaggaatggtaccagttcctctttgtacctctggtagaattcggctgtgaatccatctggtcctggactctttttggttggtaagctattgat

SEQ ID NO: 7843 - DNA, 120 bp, synthetic construct
  source 1..120: mol_type = other DNA
atactgtgtcatcggcagatagctgcatggttggtgttcgtgctggggaatgggaagttcatcggtgggacaagggacaaaatgcccccattgctttgttgtggctttaatctccctttc

SEQ ID NO: 7844 - DNA, 120 bp, synthetic construct
  source 1..120: mol_type = other DNA
atgagatctgttaaatgttagcaacttcaggaagtttaaaaatgctgtgtggacctagaataggcaagttcttaaaggcagaaagtggaatgctagtttccagggactggggaacaggga

SEQ ID NO: 7845 - DNA, 120 bp, synthetic construct
  source 1..120: mol_type = other DNA
ccagtttcccccagtgataatatcttgggtaacatcctgtatacattcacattggtgcattcctcagagttgtcagattttgctagttttacgtgcacttgtgtatgtgtgtatttgcaa

SEQ ID NO: 7846 - DNA, 120 bp, synthetic construct
  source 1..120: mol_type = other DNA
tgattaatgtatgtacctgtcctctctttttgacaattctacagattattcaggacagggagttgaccaactgcaaagagtgattgacaccatcaaaaccaaccctgacgacagaagaat

SEQ ID NO: 7847 - DNA, 120 bp, synthetic construct
  source 1..120: mol_type = other DNA
atgttaacattttaaatggaagcagatgaagttccagctcgctgccacctcactaacatttttaacaattatattgtaaaattcaactctaccagggtgtagagccaggtgtggtggctc

SEQ ID NO: 7848 - DNA, 120 bp, synthetic construct
  source 1..120: mol_type = other DNA
gatatgtgtaagtaagaaatgaaccagcttttactttgaaaccttcctcttctggaaggttttctggccctgtggtatacgcactaacagatctatacaggttgtttgtgatacagcttc

SEQ ID NO: 7849 - DNA, 120 bp, synthetic construct
  source 1..120: mol_type = other DNA
ggcaataaaaatgtaagttcatctgcttcatgagccttaaggaaaaaaactcagaaccagacactttttagccccttccaggttagatccaggttttaaaagttactcctttgagggagt

SEQ ID NO: 7850 - DNA, 120 bp, synthetic construct
  source 1..120: mol_type = other DNA
ggggttgggctggatgccgaggtaaaagttctttttgctctaaaagaaaaaggaactaggtcaaaaatctgtccgtgacctatcagttattaatttttaaggatgttgccactggcaaat

SEQ ID NO: 7851 - DNA, 120 bp, synthetic construct
  source 1..120: mol_type = other DNA
atgtttttgagaatgattctttcctgcagcgtgtgatcaaaacatacaagaaaataaaaaaggactctgctatgcttttgtctggctgttcccacttactgcacaacaaggagctcatgg

SEQ ID NO: 7852 - DNA, 120 bp, synthetic construct
  source 1..120: mol_type = other DNA
aagctaaatcctgcagtccgttctcttctaatgagtgaatcaccagacagtcaggttctgacatgatacagaaaggttgtaggtttcattctcaagctattaggtttatttttcccctac

SEQ ID NO: 7853 - DNA, 120 bp, synthetic construct
  source 1..120: mol_type = other DNA
tcatggtacttgtgtaccacagtgtattctgctggagatctagtctagttccccacagaggaacattacaatttgtattccaggagttttgttgttgtgacctcaaacacttcctttaaa

SEQ ID NO: 7854 - DNA, 120 bp, synthetic construct
  source 1..120: mol_type = other DNA
ttttattgcacaaagaagtccatagagaaagcacaacctggcattggcgtgtctttggtgtgtctgaaggaaaagagatagtggaacaacattgggagaaaaggaatgaaactcaagaat

SEQ ID NO: 7855 - DNA, 120 bp, synthetic construct
  source 1..120: mol_type = other DNA
tgacaacttctctgcagtttgccctgcgtgaatctccagatgaacttttgtgccatttaaactttcgtgatctcctgctatttaacttcgaatgtttatggacctgtgggttcaattttg

SEQ ID NO: 7856 - DNA, 120 bp, synthetic construct
  source 1..120: mol_type = other DNA
actgaacatcacatgtcctagggaacccctcagtttgggcaagccctgccacatcacacaatcatattagtgccctcagtattctttgcaaacataaaaccatagactcagtaatcccat

SEQ ID NO: 7857 - DNA, 120 bp, synthetic construct
  source 1..120: mol_type = other DNA
accgctcagtggcccgggctcggtggcccgggctcggtggcctgggctctcctccgactgcctcagccaaactccgcgttgttctgctggtcagtggcctgccggtgcctgttggtgagt

SEQ ID NO: 7858 - DNA, 120 bp, synthetic construct
  source 1..120: mol_type = other DNA
tcatatctattttcacaggagcgctaatcccagacttccagcttccagattaattctcttaattggaaccttagatttggcttttccctgccacttcccaactattaatccaaaggtttt

SEQ ID NO: 7859 - DNA, 120 bp, synthetic construct
  source 1..120: mol_type = other DNA
ccaacatatcctacattgctttttatctagtggggtatctcaacccacattttcttctgcaaatttctgcaagggcatgtgagtaacactgagtctttggagtgttttcagaacctagat

SEQ ID NO: 7860 - DNA, 120 bp, synthetic construct
  source 1..120: mol_type = other DNA
gctcaaatgtggccctgaaaacgattcaaagggcaaatgatttctggattaaagttagtatattactgtcaagctcactggtaataggcttattagaaccttatgggaagaagtggtggc

SEQ ID NO: 7861 - DNA, 120 bp, synthetic construct
  source 1..120: mol_type = other DNA
ccacctcaatgtcaggatgtcctgctcacatatcaataccattaaaacctgacttctttccctgcactgttgaagctccttcttgaggctcacattatggatataattttgattctttct

SEQ ID NO: 7862 - DNA, 120 bp, synthetic construct
  source 1..120: mol_type = other DNA
taaaaggaagatgatatttaacatgattcatggccaagtactaatattacattataataatgtttccaaataacattatagatatgtttaaagacagtgtattaggctgttcttgcattg

SEQ ID NO: 7863 - DNA, 120 bp, synthetic construct
  source 1..120: mol_type = other DNA
acaataatagaaacaggtttcctttcccaagtttggaaaatctggtagtcttcttaagcagccatgagcataaagagaggattgttcataccacaggtgttccaggcataacgaaactgt

SEQ ID NO: 7864 - DNA, 120 bp, synthetic construct
  source 1..120: mol_type = other DNA
tgcaaatggcagttttaatcttatcttttggcttctgcagatggttgcaattgatccttaaccaataatggtcagtcctcatctctgtcgtgcttcataggtgccaccttgtgtgtttaa

SEQ ID NO: 7865 - DNA, 120 bp, synthetic construct
  source 1..120: mol_type = other DNA
ggttctttgaaacagaacatcttctgaagagatattctagaagtatggcaattatgaacaatgtatctttggcccttcataggtgttgtgtggagctactgcataatgaggccctgatca

SEQ ID NO: 7866 - DNA, 120 bp, synthetic construct
  source 1..120: mol_type = other DNA
ttcagaactgatccatcctggggtttttgcttgcctgattttcagctgaacggtgatgcaacagtaaattagaattgtggacatgataatttttagtggtcccatcttgcgaaagataca

SEQ ID NO: 7867 - DNA, 120 bp, synthetic construct
  source 1..120: mol_type = other DNA
ggctcttttcttgtggtttttcactatgaatatattctttagactgaactgcactggctcaaatcttcactctcatttttctagctatgtgacctaggacaggtaccctaagcattgtgg

SEQ ID NO: 7868 - DNA, 120 bp, synthetic construct
  source 1..120: mol_type = other DNA
ttaagactcctgcaggacaagatgtgtcacctggagacctttgccatgttcgtgccaatttactgagtgcatgaaagatcatttacaccaaaatctttatcatgtattatctgtgacaga

SEQ ID NO: 7869 - DNA, 120 bp, synthetic construct
  source 1..120: mol_type = other DNA
ccaccatttgctttagtttcagtgcccaaaccatagaagggtccatgtggtaaaaaaagtcaaaactgacttttttttttttttttgagttggagtcctgctgtcacccaggctggagtg

SEQ ID NO: 7870 - DNA, 120 bp, synthetic construct
  source 1..120: mol_type = other DNA
cggggcggctggccgggtgggggggctgacccccccatctccctcccggacggggtggctggccgggctgaggggctcctcacttcccagtaggggcggccgggcagaggcgcccctcac

SEQ ID NO: 7871 - DNA, 120 bp, synthetic construct
  source 1..120: mol_type = other DNA
gcagaggcagaggcagaggcgcctggtcaacaatcttaagtccaataagaatgtttcttatgaagacactacttaaaaaattcttaataggttaccttgatggtctaatacagaattgtc

SEQ ID NO: 7872 - DNA, 120 bp, synthetic construct
  source 1..120: mol_type = other DNA
tttccactgaatgtaagctcatttctttaacagaaatttcctttttccttattaattttggaatttcatggtacttttccacttttagggagatgcagtgcagcgtcttcaagtctccca

SEQ ID NO: 7873 - DNA, 120 bp, synthetic construct
  source 1..120: mol_type = other DNA
aatctttaccccaagatgtgaagattagtttctgtgttctcttacaaacattaaagaattccagtttgtgtgtttaggtctgtgagattggcagaggggaacaagaccacacaggtcagt

SEQ ID NO: 7874 - DNA, 120 bp, synthetic construct
  source 1..120: mol_type = other DNA
ctttagatagcagcacctcttcttccatggtgtatatggagaatcctcaacaaagtcttcccaagaatctgatcatcacatcttgagctcagcctccctgcagctttttctatattgaca

SEQ ID NO: 7875 - DNA, 120 bp, synthetic construct
  source 1..120: mol_type = other DNA
ggcccacagtgaaaaacagtgatagattaatggttaataattaactagaggagggcactctgtcttccaattacacgttgatttgctaagtggctcagtgacaaggtaattaagatgaag

SEQ ID NO: 7876 - DNA, 120 bp, synthetic construct
  source 1..120: mol_type = other DNA
ttcatttctgcttctccttgtcataatagccttcagtgagataaactgttaaggggtctctagtagcgtatttcaggttttaaatggtcactgagaggaagaggaagtagacacgaatgt

SEQ ID NO: 7877 - DNA, 120 bp, synthetic construct
  source 1..120: mol_type = other DNA
tcagaggcagctttcattaatccagaatatttgggtttcgttgaaatggtactctgggacctgaatattgtttcttattccttgctgtgccatgtacatcgtgagagaatcagccttttt

SEQ ID NO: 7878 - DNA, 120 bp, synthetic construct
  source 1..120: mol_type = other DNA
ataaatgtcttcttttgagaagtgtctgttcatatcctttgcccactttttgatgaggttgtttgtttgttttttttcttgtaaatttgtttgagttctttgtagattctggatattagc

SEQ ID NO: 7879 - DNA, 120 bp, synthetic construct
  source 1..120: mol_type = other DNA
ttgtagcaattgtgaatgggagttcactcatggtttggctctgtttgtctgttattggtgtataggaatgcttgtgatttttgcacattgattttgtatcctgggactttgctgaagttg

SEQ ID NO: 7880 - DNA, 120 bp, synthetic construct
  source 1..120: mol_type = other DNA
tgtaacaaacctgcacattgtgcacatgcaccctaaaacttaaagtataataataataataataataaaaagaatttggctgtgaatccatctggtcctggactttttttggttggtagg

SEQ ID NO: 7881 - DNA, 120 bp, synthetic construct
  source 1..120: mol_type = other DNA
agttcaggtcctggatatccttgttaacctttggtcttgttgaactgtctaatatcgacagtgggatgttaaagtctctcattattattgtgtgggagtctaagtctctgtgtaggtctc

SEQ ID NO: 7882 - DNA, 120 bp, synthetic construct
  source 1..120: mol_type = other DNA
aatttgaatgttggcctgccttgctaggtttgggaagttctcctggataatatcctgaagagtgttttccaacttgtttccattctccgcatcactttcaggtacaccagtcaaacgtag

SEQ ID NO: 7883 - DNA, 120 bp, synthetic construct
  source 1..120: mol_type = other DNA
agctcaaatgccatactaggagaacgagtgctctcttcagagctgtcagacagggatgtttaagtctgctgttccccacatgttcagaagttgtctgctgccttttgttcagatatgccc

SEQ ID NO: 7884 - DNA, 120 bp, synthetic construct
  source 1..120: mol_type = other DNA
tcactcttgctatgccccttaagaattccacattaacaaagctaattttcgagtgtggtaaagaacaggctagtgtatttagtagtgagtccattgactgtttcccaacatgaggtcaca

SEQ ID NO: 7885 - DNA, 120 bp, synthetic construct
  source 1..120: mol_type = other DNA
gccatggctaaaaggggccaaggtagagctcaggccattgcttcagagggtgcaaacctcaagccttggcagcatcgatgtggtgttgggcctgcgggtacacagaagataagaatttag

SEQ ID NO: 7886 - DNA, 120 bp, synthetic construct
  source 1..120: mol_type = other DNA
tgagaaagttgatgagaaagtggaattagaaattcctagaaaggtaagttgttgtgtgaattatttcccaaaatggggaagtctctctacctgtttggagacagaaagtggaatcagagg

SEQ ID NO: 7887 - DNA, 120 bp, synthetic construct
  source 1..120: mol_type = other DNA
ttatgacagcactaatccaggatatatcaaaactgaacttgtgtttgctttcaactgttaaaactagccagagttgttacagacccactacctctgagtgacactggtatgccactcttt

SEQ ID NO: 7888 - DNA, 120 bp, synthetic construct
  source 1..120: mol_type = other DNA
tggggcataacctgtgccaacagaaaggtactttcttgttgtgtttatggtgcctcacccaaaaaatattacagatacacttggctttcatcaacctaatttgatatgtcccaagcatag

SEQ ID NO: 7889 - DNA, 120 bp, synthetic construct
  source 1..120: mol_type = other DNA
gattgaaagacaaacagaggtcctatccgtgtagtcccaacgataagaacaggtgttggcatgaagtgtttataaattcttgggtacagctgttctgaaagtaaagttcactttcaatcc

SEQ ID NO: 7890 - DNA, 120 bp, synthetic construct
  source 1..120: mol_type = other DNA
accagccatggtctccaaaaaggatgggaaaaagaggttggggaaaagagagggccttgactttggctgcctgaagaactgtttttcttaaagtaggctttatatcagtctttttcctcg

SEQ ID NO: 7891 - DNA, 120 bp, synthetic construct
  source 1..120: mol_type = other DNA
tgaatctgcagatgtgaagcccaagtatatggagggtcaaatgtgcatgttattcacttttcttgactgctaaaacaaccagggagatcctctcagacaaaaggaaatacagcactattt

SEQ ID NO: 7892 - DNA, 120 bp, synthetic construct
  source 1..120: mol_type = other DNA
ttctatacagaaacatgtccagagtgcttactgtctgcaaaactgtggactggcacctgagtgatagcatgattccaaagccaaaatcttgcctgtaaggaatatatgtataggatatag

SEQ ID NO: 7893 - DNA, 120 bp, synthetic construct
  source 1..120: mol_type = other DNA
atcggtctttcccgaagtgggacccataatgaaagacaatgattggttaatcggtaataattaactaggaggagagcactctatcttccaattacatgatgatttgctaagtggctcagt

SEQ ID NO: 7894 - DNA, 120 bp, synthetic construct
  source 1..120: mol_type = other DNA
ggcatcaactgtgccaacaggaagccactatctcaggtcggtgttcgtgccttcatccaatcaatgttccaggcaaaacagtttttaaaaattgtatttacttacaattgcttccatatc

SEQ ID NO: 7895 - DNA, 120 bp, synthetic construct
  source 1..120: mol_type = other DNA
gaagctgaacatatcaccaaacccaccctatcccactccaagtttctatagtgggatctacttctttaccaacaatttcaaaggcagctttctttaatccagaatatttggggttcattg

SEQ ID NO: 7896 - DNA, 120 bp, synthetic construct
  source 1..120: mol_type = other DNA
tctttcctttatgaattaccgagtcttgggtatgtctttatagcagtgtgagaatggactaatatattaaattggtgccatggagagtggagtactgctataaagatacttgaaaatgtg

SEQ ID NO: 7897 - DNA, 120 bp, synthetic construct
  source 1..120: mol_type = other DNA
aaatgtgaggttggagcccccacacagagtctccactggggcactgcctagtggagttgtgagaaggcggccaccatcctccagaatcccaaatagtagatccaatagcttgcactgtgt

SEQ ID NO: 7898 - DNA, 120 bp, synthetic construct
  source 1..120: mol_type = other DNA
tgcatttattgagaaagttgatgagaaagtggaattagaaattcctagaaaggtaagctgttgtgtgaatgatttcccgagatggggaagtctctctacctgtttggagacagaaagtag

SEQ ID NO: 7899 - DNA, 120 bp, synthetic construct
  source 1..120: mol_type = other DNA
tgacactggtatgccactctttgctgaccactgaacaatgggatttatgtaaccaattgtgtagatacaaacccactcattctatcctacccagagtggtgatttacaacacaaaaaact

SEQ ID NO: 7900 - DNA, 120 bp, synthetic construct
  source 1..120: mol_type = other DNA
aaggtctgtcctcagccttcagaaggaacatgcttcttacaccgatttcagctcagtgatatgggattcaaatgtatgacctccaaaatattaagagaataacgtgtgttgttttaagcc

SEQ ID NO: 7901 - DNA, 120 bp, synthetic construct
  source 1..120: mol_type = other DNA
gctctatgccgtttattatgaaggactttaactcaactctccatcttcctccacttccaccctttcttggccattctcaatgattctcttggtggtgatttttttaccatcaactatttc

SEQ ID NO: 7902 - DNA, 120 bp, synthetic construct
  source 1..120: mol_type = other DNA
tgcggttctccaacgttccagccccggtgcccatttgcttttgttcatctggattatgcctatcatatgtactgcattagagattaaaacagaattaaaaagacatattcattgggcaat

SEQ ID NO: 7903 - DNA, 120 bp, synthetic construct
  source 1..120: mol_type = other DNA
gtgtaatgaggatgtgttatctcaccagaacaaacttctgagtttatataacctctagttacataacctgaaacccggacttggcacttggtaagcacgcaatgaacagtcatagtaagc

SEQ ID NO: 7904 - DNA, 120 bp, synthetic construct
  source 1..120: mol_type = other DNA
gttgctcctttagtaataagcctgtcattctgatttgatgaaaggagatgaaaggagctggtagtgtgtctgatggtggcctactaacttatgtcttcagcttaaaaagaaagtagcttc

SEQ ID NO: 7905 - DNA, 120 bp, synthetic construct
  source 1..120: mol_type = other DNA
tccatggtcaataaatacaaatttgagttgtttttgctcatctttcccttttgacttcaaatcagtcatcagaatttccccaaatgcctttcccctggatcttgggccagtggaatgagt

SEQ ID NO: 7906 - DNA, 120 bp, synthetic construct
  source 1..120: mol_type = other DNA
ttccatggcgaaagcgggggtacagttgtgttcttttctttctaaaaggctttctaaaaagccttctgtttaatttctggaaaagaagcctaacttgttcactacatagtcgtccttctt

SEQ ID NO: 7907 - DNA, 120 bp, synthetic construct
  source 1..120: mol_type = other DNA
tcatgcccaatatggtttttgttggtggaatcaactgccttcaccaaaatccactatcccaggtgtgtattggagtgggacttttacatgcgtatattctttcagatgtattactttgga

SEQ ID NO: 7908 - DNA, 120 bp, synthetic construct
  source 1..120: mol_type = other DNA
caagctattaggtttatttttcccctacagagtttgaagtatgcaaaaagtagcattcacatcctcatcgaaatctcagcagaggatagaaaagaacaggagaggctccttcagatggag

SEQ ID NO: 7909 - DNA, 120 bp, synthetic construct
  source 1..120: mol_type = other DNA
cgtgaggatgtttgtaggagaggcaccgaactttatcagctgcctttctggcatttattgatataaccataaaagtctaagtggtgaactgtgttgactacatatttgttgttgccttgt

SEQ ID NO: 7910 - DNA, 120 bp, synthetic construct
  source 1..120: mol_type = other DNA
aaacttttattgcacaaagaagtccatagagaaagcacaacctggcattggcgtgtctttggtgtgtctgaaggaaaagagatagtggaacaacattgggagaaaaggaatgaaactcaa

SEQ ID NO: 7911 - DNA, 120 bp, synthetic construct
  source 1..120: mol_type = other DNA
cagatgagcttcagtgtaagagtgggtttcatgaagagcaaaggtcctaggaaatttaagtaagccatttaccaacgctcagaagaaagaacttgaagagcacttggaaatgagctgtgt

SEQ ID NO: 7912 - DNA, 120 bp, synthetic construct
  source 1..120: mol_type = other DNA
taaataaacccataaagccatttgagagattcttgggggattcattggaccactgaaaatctacagtgagaaaagaattgccatgttgatgaaacaggaaaactttccttgtccccctca

SEQ ID NO: 7913 - DNA, 120 bp, synthetic construct
  source 1..120: mol_type = other DNA
gtacctgtgcttttcttttggaaaactagcacattacctggattttgcatctcaaggataattctgtaagcaggaacccttcctcctttagaaggaagtaaaggagaggaaaatgctgta

SEQ ID NO: 7914 - DNA, 120 bp, synthetic construct
  source 1..120: mol_type = other DNA
actctgttaaagactgttccttcagaggacccctgttttctagttagtatagcagatttgttttctaatcatattatgttctttctttacgttctgctctttttgcccctcccaggtcct

SEQ ID NO: 7915 - DNA, 120 bp, synthetic construct
  source 1..120: mol_type = other DNA
atctgatccataagtttcctgcacagaaagaaatactccattataagaagcatagtatctttaagagaaaaacaactcaaatgcttagaagtacagctttttgcagcactggaacctgtg

SEQ ID NO: 7916 - DNA, 120 bp, synthetic construct
  source 1..120: mol_type = other DNA
ggccacctcaatgtcaggatgtcctgctcacatatcaataccattaaaacctgacttctttccctgcactgttgaagctccttcttgaggctcacattatggatataattttgattcttt

SEQ ID NO: 7917 - DNA, 120 bp, synthetic construct; identical to SEQ ID NO: 7862
  source 1..120: mol_type = other DNA

SEQ ID NO: 7918 - DNA, 120 bp, synthetic construct
  source 1..120: mol_type = other DNA
ggctgcacagaccctgcctcatgctaaatctagcacccagatagtttaatgtttcaatgactgaattacaaatatatcatcaccttggatttggcacttacaaatggctgttaatttggc

SEQ ID NO: 7919 - DNA, 120 bp, synthetic construct
  source 1..120: mol_type = other DNA
tctcttaaataaaaataatagactcgctagtcagtaaagatatttgaatatgtatcgtgccccctctggtgtctttgatcaggatgacatgtgccatttttcagaggacgtgcagacagg

SEQ ID NO: 7920 - DNA, 120 bp, synthetic construct
  source 1..120: mol_type = other DNA
tccatttaaaaccctccatgctgaaataaaggaggagtcccatctttcagtcattccacttcaggcttttgatataactaatctcttttcttcttctttccttttttggcaagctttcgg

SEQ ID NO: 7921 - DNA, 120 bp, synthetic construct
  source 1..120: mol_type = other DNA
actgtgcccagcccattttgacgtatttaaagaagaattgtgacacaactggtgaaatgcctcctaactagtttctcagcttctactctaatcttttgtcttctaccatattttccttct

SEQ ID NO: 7922 - DNA, 120 bp, synthetic construct
  source 1..120: mol_type = other DNA
cccaaagtgaagacaccaatttatcacaaactgcatagaagaactctctcctcctgggccattttagtcactatttttatcctcaaagtaagtattaacctgatttctgatatcatagat

SEQ ID NO: 7923 - DNA, 120 bp, synthetic construct
  source 1..120: mol_type = other DNA
cttcaaatgttttatctccttaaataaaatatttcaaagatcactattttgtcttttctttttggtctgcttaaatttaatgtgagtactggtaggttcacttttttgtttttttgcttt

SEQ ID NO: 7924 - DNA, 120 bp, synthetic construct
  source 1..120: mol_type = other DNA
attgtggttttgatttgcatttctctaatgatcagtgatattgagcttttttcataagtgtgttggctgcataaatgtctttttttaagaagtgtctgtttatatcttttgcccactttt

SEQ ID NO: 7925 - DNA, 120 bp, synthetic construct
  source 1..120: mol_type = other DNA
tttgcttaggattgccttggttatatgggctcttttttgtttccatatgaaatttaaagtagtttttttctaattctgtgaggaatgtcaatggtagtttgatgggaatagctttgaata

SEQ ID NO: 7926 - DNA, 120 bp, synthetic construct
  source 1..120: mol_type = other DNA
attcccttagctggtaccacctaacctcataataatattggtaggagtaatagactctgaattgatggtagctggtctaggcacagcatttttcatagtatttcctttggattatggaaa

SEQ ID NO: 7927 - DNA, 120 bp, synthetic construct
  source 1..120: mol_type = other DNA
aaaataatttataaataccacctggtcacaaaactgtaatactcacacagggtcattaatgactgacttcaatgcattgagcaaatctctacttgacatggtcctgatgtccacactgag

SEQ ID NO: 7928 - DNA, 120 bp, synthetic construct
  source 1..120: mol_type = other DNA
actggtaatagaaaagtgtccgctatttttcagtgcctgttgaaataaccctgcagtaggggaaagaacagaggtaaagctgcataaataggagacagacagaaaatccaggatgttatt

SEQ ID NO: 7929 - DNA, 120 bp, synthetic construct
  source 1..120: mol_type = other DNA
ctttgtttctagctgtctcccatttctggaccgaacaaatgttcatcttatatatgttgattgatgtctcatgtatccctaaaatgtataaaaccaaactgtccccccaccaccttggac

SEQ ID NO: 7930 - DNA, 120 bp, synthetic construct
  source 1..120: mol_type = other DNA
ttctttgtggagttccaagagttgtgggcagatttttttctcagtccaaagctctgttttcctatgttgaatgacctgatctctttggctttgagattaccacagattaccttgtactgt

SEQ ID NO: 7931 - DNA, 120 bp, synthetic construct
  source 1..120: mol_type = other DNA
cacctctacttggcagagtttatgtaaaatgaaggtaatacggtctttgtgcacatatacattaagaaccctaggttgtcctgcaagctatagagttcctaagttctctctttttaaaaa

SEQ ID NO: 7932 - DNA, 120 bp, synthetic construct
  source 1..120: mol_type = other DNA
tgcttgtgtaattttttaataaataagacattgatattggtttaatgaaaatagccacatcttgaattaagtaagattatcataacttctaaccctgtggccttaagcaatctagtccac

SEQ ID NO: 7933 - DNA, 120 bp, synthetic construct
  source 1..120: mol_type = other DNA
actcctataattctgatatgacttagtgtgtacgttatcagtaacaattatatgtgttaagttattgtgtgccacagaggtaacaaatttccttgtccattgtgtctttgactgagtctg

SEQ ID NO: 7934 - DNA, 120 bp, synthetic construct
  source 1..120: mol_type = other DNA
tggcgacacgtcttcaaaatagtgtcttcaggttttttttcctccctttccaccatttttcctagtttggagtcactgtaaactaagtcatgctttcatgaagccctacaaattaagcta

SEQ ID NO: 7935 - DNA, 120 bp, synthetic construct
  source 1..120: mol_type = other DNA
ttgctaactatcaagtgctactttcaggaaaaatttcaagtggcagtgtttgacacaaattcagactattatcagtattgctacttttgtaaatgctaacaatgtaggaaaaaggagccc

SEQ ID NO: 7936 - DNA, 120 bp, synthetic construct
  source 1..120: mol_type = other DNA
gttttttttttttttctctaaatctacttggctaggtgggtacctccagagcagtggctagtcagactaggacattctttctctgaatggcaccctgaacagaacactaaatagacctat

SEQ ID NO: 7937 - DNA, 120 bp, synthetic construct
  source 1..120: mol_type = other DNA
aattggaatgatattatatctacatttatttagcttctagctctctaaccctttatatttcacttaaagttagggtttcctagtcttaccccactacccctcactgcccccgacaccccc

SEQ ID NO: 7938 - DNA, 120 bp, synthetic construct
  source 1..120: mol_type = other DNA
ctcaccccctagagtagctccctcacactatatgaagctcctggtgaatatgtgtttgctttgaaatgaatgagaattattctgacttgtgtttcctgatgtgtccctgtttttaaactt

SEQ ID NO: 7939 - DNA, 120 bp, synthetic construct
  source 1..120: mol_type = other DNA
actgtgatcttgttctactcatcattttgttccttagtttccaactatacctgtaccacggctgacagtgtaattaaacattgttttgaaaaaaggattgtaatggcttggtatgcacat

SEQ ID NO: 7940 - DNA, 120 bp, synthetic construct
  source 1..120: mol_type = other DNA
gagcctccacctttacaatacaactttagctttccagcttgttcaactgactgcccaaacttaaacatttacatttaaacaagtacacagagtatctgttctctaggactttgctagaga

SEQ ID NO: 7941 - DNA, 120 bp, synthetic construct
  source 1..120: mol_type = other DNA
cctggcctctggttttctttttgggtgtttatcaacccctcatcgtttcacctatctctgcacattattgagtactcactttaattgtcaatgagtttgggatctcttctgcatatttct

SEQ ID NO: 7942 - DNA, 120 bp, synthetic construct
  source 1..120: mol_type = other DNA
caaaatcaacatttggtaagaatgggcgaggaaattcaaaatcccaataggttcgaatgagccacatttcagctttccccattgtctcaaataatgtagtgggtcttcctgatggaaaaa

SEQ ID NO: 7943 - DNA, 120 bp, synthetic construct
  source 1..120: mol_type = other DNA
ccttacccatgaaaacagctttccaggaagtactctagtgtctacagtttattaagctagtcccttgatccttggttctcaaagtaaaccatgagttttttgagctcaacactgaaatct

SEQ ID NO: 7944 - DNA, 120 bp, synthetic construct
  source 1..120: mol_type = other DNA
aatcgaagactgtacagaaagggtatgttaaatagttcagccagtagctcaccacagggattaagggcatctgccagaatgacatcaaactttgactcttgtagtttcatcataagtttc

SEQ ID NO: 7945 - DNA, 120 bp, synthetic construct
  source 1..120: mol_type = other DNA
ttaaaaccctccatgctggaataaaggaggagtcccatcttttggtcattccacttcaggcttttgatataactaatcccttttcttcttctttcctgttttggcaagctttcggaaaca

SEQ ID NO: 7946 - DNA, 120 bp, synthetic construct
  source 1..120: mol_type = other DNA
tcaagatttccatctggtttcttgttacattaagaataaaatccaaatctgtctgtggtctagagaacgctacacagacacctacttgtcctaaccctttccccctgtacactttcttct

SEQ ID NO: 7947 - DNA, 120 bp, synthetic construct
  source 1..120: mol_type = other DNA
tctgtttttgtttagcagttgtttaattgcactggtgtagagtattcagttgattgacaaagaccacagatctcttcatttatgattaatggatatttgtgttgttaacattttttgatc

SEQ ID NO: 7948 - DNA, 120 bp, synthetic construct
  source 1..120: mol_type = other DNA
gttttatctccttaaataaaagttttcaaagatcattattttgtctactttggtctgtttaaatttaatgcgagtactggtaggttcacttttttgttgtgatctttgagatggagtctc

SEQ ID NO: 7949 - DNA, 120 bp, synthetic construct
  source 1..120: mol_type = other DNA
gtagattctggatattggacctttgtcagagggatagattgcaaaaatgttccctcattctgtaggttgcctgtgccctctgatgatggtttattttgctgtgcagaagctctttagttt

SEQ ID NO: 7950 - DNA, 120 bp, synthetic construct
  source 1..120: mol_type = other DNA
tgtgaatgacacagatgaggaatgatttctgcatttccaactgaggtactgggttcatctcccaggggactgtcagacagtgggtgcaggacagtgggtgcagcgcaccacgtgtgagcc

SEQ ID NO: 7951 - DNA, 120 bp, synthetic construct
  source 1..120: mol_type = other DNA
aagagcagaaaaactggaaattataaaatcagaatgcctctcctcctccaaagaaatgcagctcctcaccagcaatggaacaaagctggatggagaatgactttgacgagttcagagaag

SEQ ID NO: 7952 - DNA, 120 bp, synthetic construct
  source 1..120: mol_type = other DNA
gtaccagccactgcaaaaacatgccaaatgataaagaccactgaggctaggaaaaaacggcatcaactatcgagcaaaacaatcagctaacatcataatgacaggatcaaatttacacat

SEQ ID NO: 7953 - DNA, 120 bp, synthetic construct
  source 1..120: mol_type = other DNA
aaatgcccacaagagaaagcaggaaacatctaaaattgacaccctaacgtcacaattaaaagaactagagaagcaagagcaaacacattcaaaagctagcagaaggcaagaaataactaa

SEQ ID NO: 7954 - DNA, 120 bp, synthetic construct
  source 1..120: mol_type = other DNA
aataagagttatctatgacaaacccacagcaaatatcatgttgaatgggcaaaaggtggaagcattccctttgaagactggtacaagacagggatgccctctctcaccactcctattcaa

SEQ ID NO: 7955 - DNA, 120 bp, synthetic construct
  source 1..120: mol_type = other DNA
caaaaattaattgaagatggattaaagacttacatgttagacctaaaaccataaaaactctagaagaaaacctaggcaataccattcaggacataggcatgggcaaggacttcatgacta

SEQ ID NO: 7956 - DNA, 120 bp, synthetic construct
  source 1..120: mol_type = other DNA
gaaggggaatatcacacaccggggcctgcttgggggtagcgggagtggggagggatagcattaggagatacacttaatgttaaatgacgagttaatgggtgcagcacaccaacatggcac

SEQ ID NO: 7957 - DNA, 120 bp, synthetic construct
  source 1..120: mol_type = other DNA
attagagccctcctatccagctggtggtaatgaaaaatgatgcaaatactttgaaaaacagtttagccattcttcataaacaacaatttcccatatgcctcagcaagtccactcctagcc

SEQ ID NO: 7958 - DNA, 120 bp, synthetic construct
  source 1..120: mol_type = other DNA
aatttgtaagtaccacctggtcacaaaattgtaatactcacatagggtcattaatgactgacttcaatgcattgagcaaatctctacttgacatggtcctgatgtccacactgagggctg

SEQ ID NO: 7959 - DNA, 120 bp, synthetic construct
  source 1..120: mol_type = other DNA
aggagtagggtggaggtggtgctgaggaaggacaggttacacatcatcatgaaatgtgttatcactttatgataaagattggtgatttattcccacagaaaatagagtcactggtaatag

SEQ ID NO: 7960 - DNA, 120 bp, synthetic construct
  source 1..120: mol_type = other DNA
aagtctgaggtaagctgaatacccacatttaatatctttacttttataatcaatttggtatataaaaaaatgacatttctaacttaatagctagacacatgagagtgtgagaggaaaata

SEQ ID NO: 7961 - DNA, 120 bp, synthetic construct
  source 1..120: mol_type = other DNA
gagaggattttaccttggcgtgtgtaatggcagacgagttacaaagtagagggtggctgagtacagtttactggaagtagtattgactgttgttatttttttcctcctaggaagttgttg

SEQ ID NO: 7962 - DNA, 120 bp, synthetic construct
  source 1..120: mol_type = other DNA
tctaagaatgatgagaaaagaagaagaatgatcccctgatatcgcctgtttggatttatgacacctctacttggcagagtttatgtaaaatgaaggtaatacggtctttgtgcacatata

SEQ ID NO: 7963 - DNA, 120 bp, synthetic construct
  source 1..120: mol_type = other DNA
aagcccaaaacagaatgatcttcacttgtgtaatttttaataaataagacattaatattggtttaatgcaaatagctacaccttgaattaagtaagattatcataacttctcatcttgtg

SEQ ID NO: 7964 - DNA, 120 bp, synthetic construct
  source 1..120: mol_type = other DNA
tgatttactcttaaaatattatgagttttttttttttaacccaaagtttaacttttcttgcatctcactgtttttggttttctctccccttttaaagggtgtgaaatagtaacactctcc

SEQ ID NO: 7965 - DNA, 120 bp, synthetic construct
  source 1..120: mol_type = other DNA
tttgactgaggctgccctaaaactttttgtcatccacagacaattgttgtctgactttggtcctctttagaaggcgattttatactcagccatgaaattctaacaggtgctcttgaaaaa

SEQ ID NO: 7966 - DNA, 120 bp, synthetic construct
  source 1..120: mol_type = other DNA
gaaaaattatgtttcaaaaataacagtatacctgttgttagattctagtcttgcctaatgtttttcaatttttattactgtctacagtttggactgaattctaatttttcatggctacac

SEQ ID NO: 7967 - DNA, 120 bp, synthetic construct
  source 1..120: mol_type = other DNA
ctactttttgcttaactgatctttcacacttagatgatgcactacctagcattgacagccttgatatatggtcagctatagccagtcattaccatgtctagtaccaaactaaggtactga

SEQ ID NO: 7968 - DNA, 120 bp, synthetic construct
  source 1..120: mol_type = other DNA
ttctctgaatggcaccctgaacagaacgctaaatagacctattccaatgcatgggaagtaaaaacagccagattgcttggtaagacgaagctgcatgatgcatttcaaagttttttcaat

SEQ ID NO: 7969 - DNA, 120 bp, synthetic construct
  source 1..120: mol_type = other DNA
ccccacccccaaaaaacaccttaaaagctgaagtataagaatcattgacgttcatcagtctggtgttggggcttggaatttccgggaaatagttctgagaattccatttataatacagta

SEQ ID NO: 7970 - DNA, 120 bp, synthetic construct
  source 1..120: mol_type = other DNA
cggtctgatatcagttttaattggagattcagtgtatggctattagagttaattcatgaggcatccaggaactcagtgtaattgcagttgcctgtagccacatttaatgtaacttcggtt

SEQ ID NO: 7971 - DNA, 120 bp, synthetic construct
  source 1..120: mol_type = other DNA
ggcaacaattattttgtgtacaaaagaattagagaatcggtttcacaattatttacttagattcaagtctaccttttgcaggttaacaacaacagccagtgccgggcacggaggctcaca

SEQ ID NO: 7972 - DNA, 120 bp, synthetic construct
  source 1..120: mol_type = other DNA
cacctttgcaatacaactttagctttccagcgtgttcaactgactgcccaaacttaaacatttatatttaaacaagcacacagagtatctgttctctaggattttgctaggaaaatcaat

SEQ ID NO: 7973 - DNA, 120 bp, synthetic construct
  source 1..120: mol_type = other DNA
cctggcctctggttttctttttgggtctttctcatcccctcatcgtttcacctatctctgcacattattgagtactcactttaattgtcaatgagtttgggatctcttctgcatatttct

SEQ ID NO: 7974 - DNA, 120 bp, synthetic construct
  source 1..120: mol_type = other DNA
aaggcaaagtgttcagagagctgtaagaagaaatcacatctttaatgtaacatcagtatattcacaatcataaataattattaaaataagtcactaatatggtttgactgtccccaccca

SEQ ID NO: 7975 - DNA, 120 bp, synthetic construct
  source 1..120: mol_type = other DNA
cttaccttacccatgaaaacagctttccaggaagtactctagtgtctacagtttattaagctagtcccttgatccttggttctcaaagtaaaccatgagttttttgagctcaacactgaa

SEQ ID NO: 7976 - DNA, 120 bp, synthetic construct
  source 1..120: mol_type = other DNA
gcagctcaccacagggattaacggcatctgccagaaggacatcaaattttgactcttgtagttttctcataagtttcttgttcaaaactgcatcttcacagagctttatattatagtcag

SEQ ID NO: 7977 - DNA, 120 bp, synthetic construct
  source 1..120: mol_type = other DNA
ttattttataatactgttaagaacagtggcaggtgagaggctcctgcctgttcggtgcccttgacatagagagaagaagtaattatacaactcaaacgccattttttaatatcgtggtgc

SEQ ID NO: 7978 - DNA, 120 bp, synthetic construct
  source 1..120: mol_type = other DNA
tggctggagacatgaacccttgaagatcaagaggccatccagatactacatagcagtcacgttagattgggacacttactctttacagagaactataaaaccactgtcccatcctcactt

SEQ ID NO: 7979 - DNA, 120 bp, synthetic construct
  source 1..120: mol_type = other DNA
gccatcttgtgcctaagtggcgggtccatagtattgtatgatttttttcagggggctatttatcatcttttcctatggctatgcttcatttttttgttcccaggaagcatagactgggaa

SEQ ID NO: 7980 - DNA, 120 bp, synthetic construct
  source 1..120: mol_type = other DNA
aaaggttgtagctcctattcatgcaagaggggctgagttttcctttttggagtcaaacacgatcttttttattttccttttaagtagtctgaatgacacgagaccagtattgacacatct

SEQ ID NO: 7981 - DNA, 120 bp, synthetic construct
  source 1..120: mol_type = other DNA
cccagtctactgatgtacagttatgtttaactgggctctctgataataggagtaagatagtgagcttagggtgttgcaaacttcaatggttatgtggggattttcacaatgcaagctttg

SEQ ID NO: 7982 - DNA, 120 bp, synthetic construct
  source 1..120: mol_type = other DNA
ggctgactggcagggacttcaggatatagcagagagagcttggcatgacttattactccaggctgtagaatcctggaaaagagctaccatcaggcccacacctggtgaactggaggacca

SEQ ID NO: 7983 - DNA, 120 bp, synthetic construct
  source 1..120: mol_type = other DNA
caagttaatttatttcaggacaagaatttaccatataacactctttttacataaattttacctcctccccccccttttttttttgaagataaccattccttttttttaaaaagtgaactt

SEQ ID NO: 7984 - DNA, 120 bp, synthetic construct
  source 1..120: mol_type = other DNA
aacaaaggtgccaacacaggcacaccgtgggtgaccaggccatgcttctactcaggtggagtgggacaagttcaaaagactagtcttaccaagttccagatgtccagactccaagtgcca

SEQ ID NO: 7985 - DNA, 120 bp, synthetic construct
  source 1..120: mol_type = other DNA
gttctggttttgacttgacttgaattgctggatactttggtttcggtttttggcctggcttgaatttctgggtatgctgattttggttttgattttggtttggtataaactgcaaaagtg

SEQ ID NO: 7986 - DNA, 120 bp, synthetic construct
  source 1..120: mol_type = other DNA
acagtgtaacacatattatggtaaattctaatcttgtggccttagacagtctagtccaaagacatcaaaaaagtttgcttaaaaaaaaagaaatggttatcttcaaaaaaaaaaaaaaaa

SEQ ID NO: 7987 - DNA, 120 bp, synthetic construct
  source 1..120: mol_type = other DNA
gagcagatgtgtggtggtattgtggtggacctttactaggtactctgctgaataagtagagtggcacttgtgctttagtccatttggctatccctttcatcctggcatttcatcaaccag

SEQ ID NO: 7988 - DNA, 120 bp, synthetic construct
  source 1..120: mol_type = other DNA
acaataacactcagtacaaagtatgtaatccaggaagtgaccagcctgatgcgtgttatgactcactgtaagcctcccatgattaaggactgatccttttctaagtgacagaagtaaagt

SEQ ID NO: 7989 - DNA, 120 bp, synthetic construct
  source 1..120: mol_type = other DNA
tctctaggttctaaaagtctcaattattagacagtattgcatatctaaagaaagaaaaggattcgctcatcctgtaaggcagcttagctgtcttagacaaaagctctataatagtaccac

SEQ ID NO: 7990 - DNA, 120 bp, synthetic construct
  source 1..120: mol_type = other DNA
actatcaatctgttgcacaaaaagacataagtaacaaaaataagagtgagaactcccgctaataaaaagtgagagtctcaaaaggggggaatgaaggaagagaaagaccctctcatatta

SEQ ID NO: 7991 - DNA, 120 bp, synthetic construct
  source 1..120: mol_type = other DNA
tggtctaaaatgaaaggaaaggtgaatgtgctgtgttgtaactggcaggaaatgggaggaaaatcctcaaaacccaccccattggaattcatgttaaagaactttaagaaaggctttgtg

SEQ ID NO: 7992 - DNA, 120 bp, synthetic construct
  source 1..120: mol_type = other DNA
aaaattgcagaaaatggaaggttttgcaggcatgaatgctattcagtttattgaagtggccacaagttgtacattaacggagatcaggaggcaaagacagaggctaatcaaaggcttaag

SEQ ID NO: 7993 - DNA, 120 bp, synthetic construct
  source 1..120: mol_type = other DNA
ggacatattccagcaagtgccacttgatttacagtcctagatttaaaggatacatttttccgtctctggcttgcaccaattaatgagcctatttttgcttttcaatggggtaaatcacag

SEQ ID NO: 7994 - DNA, 120 bp, synthetic construct
  source 1..120: mol_type = other DNA
aatccagctactgcactcagttataactttgatggaccaaagggggcaccattggttttcgaatccgagaataactcaataccaagggctcctatgtgataatccctgtgtaactttaga

SEQ ID NO: 7995 - DNA, 120 bp, synthetic construct
  source 1..120: mol_type = other DNA
caaaacagttccaaggaactcacatgagaaaaacggtgctagagacatgattagggtgtcatttctatgtgcaatggctcaccgctattacttgagccatttgtaaacagcgtttaactt

SEQ ID NO: 7996 - DNA, 120 bp, synthetic construct
  source 1..120: mol_type = other DNA
tgcacggccgaagcttgaagaatcgtcatcagatgaataaatgtggccagaaatcttaggcccagtaatcttctttgtattattcattatattgctcttgtgctattgtttaaccaaccc

SEQ ID NO: 7997 - DNA, 120 bp, synthetic construct
  source 1..120: mol_type = other DNA
ttggttttcatcctttggtggttttaaaacagtaggggtagtgttggctatattaaaaggttgcttaatgttcccttgcctcttaggcctcctcatcagaaacatccaatcaatcacaga

SEQ ID NO: 7998 - DNA, 120 bp, synthetic construct
  source 1..120: mol_type = other DNA
aagatatcctcctgtatacaccccaaggtctctctctggtactcctgattcctgcaaaaagatgtcaatttataaacaatatacaggacagatgataaaacagcacaaagagtgttgctg

SEQ ID NO: 7999 - DNA, 120 bp, synthetic construct
  source 1..120: mol_type = other DNA
tgcccttaaggtagacagaatctgtcaaggctttagagtgtaccatcaaagagttaacagccaacagaacaaaatttagcatcatcacaattttggaagtttttcaacagccctatgatt

SEQ ID NO: 8000 - DNA, 120 bp, synthetic construct
  source 1..120: mol_type = other DNA
ttacacctacccttcctcctaatgtatagatgttgcaaatgcaactgaaaaatgacagctcattttcatgatgatctcctgcattttctatgggagtaaatcctcggtctttatcatgga

SEQ ID NO: 8001 - DNA, 120 bp, synthetic construct
  source 1..120: mol_type = other DNA
ctttctcacatgaaggccaagggagcagcagtgactctgaatatgaacacagtgctgagtacatatattttttgtaacacttaaaggccatgatcaatacaccattgtgttgcaatgtgt

SEQ ID NO: 8002 - DNA, 120 bp, synthetic construct
  source 1..120: mol_type = other DNA
tgccctcttctgaaaaacacagttctccaactgtgtttttttaaataacaaggggagaagttacctccattgctattgctacagtgccatactttagcactttttggttttgacttggta

SEQ ID NO: 8003 - DNA, 120 bp, synthetic construct
  source 1..120: mol_type = other DNA
caacagtctcacctggttccagtactgctctatggatgtgctggactgcatggcaattgttactctctttgtcataatatgttgcttgattatcaaaagttgttaaggcgagaaagaaag

SEQ ID NO: 8004 - DNA, 120 bp, synthetic construct
  source 1..120: mol_type = other DNA
aaatgattattagacaaggtgagttagacagggtaattttgcaatttggcaggatcacattttattgagcaaagcctcagcatgaaggctagggtcaccttctaggacaaatccatgaca

SEQ ID NO: 8005 - DNA, 120 bp, synthetic construct
  source 1..120: mol_type = other DNA
ctttggactcagaacaaggtttgaaaagcaaataacagagaagaagggaacaaacttaagagctgttcttccatctgacaagagatgtgtctaaaacagttgaatgaaagagaggcataa

SEQ ID NO: 8006 - DNA, 120 bp, synthetic construct
  source 1..120: mol_type = other DNA
taaaacccaataataattgtaaaaattactgaataacagtaaagagcagggtcttgggggggttgtgtcttctggcatctaccacctcacaaccactccagtgttctttattgatgaagc

SEQ ID NO: 8007 - DNA, 120 bp, synthetic construct
  source 1..120: mol_type = other DNA
atcctcggtcaaataaggtgaactttgcagttggattaatccaccataatgaggacatgcaggttgcaagagttaagtcagaatgaaatacacttgagacaaacacattgaataggtcat

SEQ ID NO: 8008 - DNA, 120 bp, synthetic construct
  source 1..120: mol_type = other DNA
attgtttcccctatttatgatccttgggtgaaaatcttccaactgcgtgtcactggttatttcctcatatggttttcttgaggaaatcttcaacatgtgttgatttctgcaacatccctc

SEQ ID NO: 8009 - DNA, 120 bp, synthetic construct
  source 1..120: mol_type = other DNA
aaatactgtgtatgaaccacctgactgaggctacccaacactcaggctatgggagttgtaataaaacgcttgctgtttttcaaaatccccacaattgagggtagtttgttataaagtgat

SEQ ID NO: 8010 - DNA, 120 bp, synthetic construct
  source 1..120: mol_type = other DNA
ttgtttgattttttctggtaaatttgtttaagtcctttgtagattctggatattagccctttgtcagatggacagattaaaaaaatttttcccattctgtaggttgcctcttcactctga

SEQ ID NO: 8011 - DNA, 120 bp, synthetic construct
  source 1..120: mol_type = other DNA
acattgacttcgtatcctgagactttgcagaagttgcttatcagcttaaggagatttggggctgagacagtggggtttttcttaacatataatcatgtcatctgcagagacaatttgact

SEQ ID NO: 8012 - DNA, 120 bp, synthetic construct
  source 1..120: mol_type = other DNA
gaataagatgaattcagttgactatctttgattctagtccactcctgggtttagaggagccccttctgattactttctccatgactgtgtgtattttgttaaatgttctggccatgggtc

SEQ ID NO: 8013 - DNA, 120 bp, synthetic construct
  source 1..120: mol_type = other DNA
acgttgcattcattcttaacatttgtaaaccaccatattttctagaaattggtgactatattctaaaatcattgtagtcacgaaatcatatgaatacctgcttggcctctccggataggg

SEQ ID NO: 8014 - DNA, 120 bp, synthetic construct
  source 1..120: mol_type = other DNA
atttgcttgtggttctcttcttagcaaaatgagacgattaaaattgatcagggttttaaatagtattcctttgactcgctaagcacctattgaaaagtctcagctgaagcatagcttcat

SEQ ID NO: 8015 - DNA, 120 bp, synthetic construct
  source 1..120: mol_type = other DNA
atacttgtgggaataatttccaaacatcaggacttctctccttctgtgatttgtttcctttagccactctgtctagattctaccaaagctttcatctcaccgtattatgtgatctgtcac

SEQ ID NO: 8016 - DNA, 120 bp, synthetic construct
  source 1..120: mol_type = other DNA
cagagcaagaccctacctctttttaatctatgaaggctgaaatacatgagggagccaaagagaaaaatgtggaaagctagcagacattggctcatgaggctgagaaaaaaataaatctat

SEQ ID NO: 8017 - DNA, 120 bp, synthetic construct
  source 1..120: mol_type = other DNA
gccttttttaaacatttagatattggaatacggaaacacaactgatttttgggtgatgatttagtatcttctgcctttactggatttgttgatcaattttaagagcttttgatggagtct

SEQ ID NO: 8018 - DNA, 120 bp, synthetic construct
  source 1..120: mol_type = other DNA
gttcatcaggattattggtctataaattttctctctctctagctccttctttctggttttactatcaaggtaatcatactcttgacaaatcatttttaaagcatttacttctctttaatg

SEQ ID NO: 8019 - DNA, 120 bp, synthetic construct
  source 1..120: mol_type = other DNA
cttcagtcttgttactcattatttccctgttcatgtttctatttatttttaattcaatcctggttggtggtatgtgtccaaaaactttccttatcctttagattttttaatttgttggca

SEQ ID NO: 8020 - DNA, 120 bp, synthetic construct
  source 1..120: mol_type = other DNA
cctagagtgcagtttaactctgaggttttttcattgattttctgtctgaattatatttttattattgtaagtaaagtgctgcactcttctactattatcatatcacagtcaatctctctc

SEQ ID NO: 8021 - DNA, 120 bp, synthetic construct
  source 1..120: mol_type = other DNA
ggtctgatgtttatgaatgccttatcttttgtttcggaaaatgttatcactctttcaggtttgaagaattgcttcggtaggctcagtatttttgcatggcagatttttttcagcacttta

SEQ ID NO: 8022 - DNA, 120 bp, synthetic construct
  source 1..120: mol_type = other DNA
aatgttatacttgtttgcaggtcatagaaaagctccgtatgagtatctgggaattataaaaatacctgccaaagattcaggccttcctttggattttggcccctgcagtgttatggaact

SEQ ID NO: 8023 - DNA, 120 bp, synthetic construct
  source 1..120: mol_type = other DNA
gcatctttatgatgcagaaattattttctttgtaggaaatgaaagcatttgtccagatctctggcaaagatggcactgtggtgttttctctggggccagttgtgcaaaaccttatagaag

SEQ ID NO: 8024 - DNA, 120 bp, synthetic construct
  source 1..120: mol_type = other DNA
agcaaaggagacatgaaaaaaagcagaaagtaaagacaactaactatccaaaaacaaacagcaaagtctaaagcaaagtttttctatgaggagaaaagcatggaaaagactcatccccat

SEQ ID NO: 8025 - DNA, 120 bp, synthetic construct
  source 1..120: mol_type = other DNA
aatatttaatttttaacatctgtgtatatttatttcaattcggagccctgtaaactcttaatctctgtgagcagtgcgtctgggagctaccatcacagtttctgagaagtgggcttcaag

SEQ ID NO: 8026 - DNA, 120 bp, synthetic construct
  source 1..120: mol_type = other DNA
cacttaggatgcaacagggagtgatgcttcaggaaacttctagctccaccttcctatgtacctgtgcacatcgtaggacagagtgacctttctggaaaaagtaaaatataaaatataaaa

SEQ ID NO: 8027 - DNA, 120 bp, synthetic construct
  source 1..120: mol_type = other DNA
tccacatacctttgtgtgtcagactgaagacctggttaagtgggttcatgaggggatcttgtgacctgagggttacaaaaatctgtgaaagaagcatgttatttggggtagcacattcac

SEQ ID NO: 8028 - DNA, 120 bp, synthetic construct
  source 1..120: mol_type = other DNA
tgatcatctgagtcttcagtcagtgcaacttttgttgatgaagattctcatatcaatgttgatggttgctaactcattttggtggtggccgctagtacttagcatggctgtggcaatttc

SEQ ID NO: 8029 - DNA, 120 bp, synthetic construct
  source 1..120: mol_type = other DNA
ctggaaaatttgggtaattgattagtcagggtaatagggtaaagtcatcagaacaagaaactacattatttgctgagtcagttccttgtggggtcctctagatcagctggcatcagtgaa

SEQ ID NO: 8030 - DNA, 120 bp, synthetic construct
  source 1..120: mol_type = other DNA
gaaaggaacagcaactggaaaacaagcattgcattgcaccaggatgtctgtgaaatggacttcagtaattttgctaatacaactgagcttttgctttagctctgggaattgtggaaaggt

SEQ ID NO: 8031 - DNA, 120 bp, synthetic construct
  source 1..120: mol_type = other DNA
ctgtggccatcactcacacagaacaccccaggaaatcataaacctatacattagtgcatctaagactttaagcaattacacatctgttttactatacattgttttacatcttaaaaacag

SEQ ID NO: 8032 - DNA, 120 bp, synthetic construct
  source 1..120: mol_type = other DNA
tgtgtcatccaccttttttttttctattcctgtcaggaagacccactacattatctgagacaatggggaaagctgacgtatggcttattcgaaactcctggaattttcagtttccatatc

SEQ ID NO: 8033 - DNA, 120 bp, synthetic construct
  source 1..120: mol_type = other DNA
gattctctttttaaaggagagctttcaagatattcaatggattaaattgcaggagggccagactgtaaagagccaaccattcaggaaattttgcaggattcaggtagcagatgatggaaa

SEQ ID NO: 8034 - DNA, 120 bp, synthetic construct
  source 1..120: mol_type = other DNA
tccccacccatactaagggaaaaactgatagtgtcagtaggagggggaagagaataggaggtgtagaaggacaagaaaagggatgactagtactaaaatagtgataattactactactag

SEQ ID NO: 8035 - DNA, 120 bp, synthetic construct
  source 1..120: mol_type = other DNA
atatcagtgatgaatctgtaaagaggctcgattccttcaacactgggtggataaataaggctctgggcatcaagctagtgagatgaaacactgaacaccagttacattaaatatggctac

SEQ ID NO: 8036 - DNA, 120 bp, synthetic construct
  source 1..120: mol_type = other DNA
attttctctctttagtaatttgcaccaattcttttggtagtgcccgctgtgctaatactcttttgtgatgaagcaaattctttcttcacaggaaatggaagactttgtacagagctctgg

SEQ ID NO: 8037 - DNA, 120 bp, synthetic construct
  source 1..120: mol_type = other DNA
aatttttgataattagcttcaaaacagttttcctaatctcagcagtatccaatgagtgaagaacacttgactgactcttgggtcacctctattacttattgtactctggaagctcttggt

SEQ ID NO: 8038 - DNA, 120 bp, synthetic construct
  source 1..120: mol_type = other DNA
ttctgcccctgtcatttgacccttttgtttaagaattccttagggcactgtacacactacaggtgttatcagaaaaagttacattttaatgggtaacttcactaccacaataacaatagc

SEQ ID NO: 8039 - DNA, 120 bp, synthetic construct
  source 1..120: mol_type = other DNA
cagattaacaactcctcccaatggaggaagcagaaggaaatatagaagggagtcaaacagaaggaggccaggcacagaaacaacttcagataccccctctataaaatatagtagaaatat

SEQ ID NO: 8040 - DNA, 120 bp, synthetic construct
  source 1..120: mol_type = other DNA
aaaatacataattttgttcttttttatgactgcataatattctgtagtgtatatgtaccatattttctctattcagcccataatcaatgggcatttaggttgattccatgtcgttgctat

SEQ ID NO: 8041 - DNA, 120 bp, synthetic construct
  source 1..120: mol_type = other DNA
gggggaatctttatttcaggtgttattatatctcacaaaatttttcaataacttcctgggctgtctctctgtctcctatttctacaactttacacctgtttttttcctctcccgcagggt

SEQ ID NO: 8042 - DNA, 120 bp, synthetic construct
  source 1..120: mol_type = other DNA
tcacatgaaggccaggggagcagctgttagagtggacttcaacacaatgtcgagtacagacttgctgaatgcattgaagagagtaattaatgatccttcgtgagtagaacaatatttttc

SEQ ID NO: 8043 - DNA, 120 bp, synthetic construct
  source 1..120: mol_type = other DNA
tgttattccctgactttttgttacagccttcttagtgggtgtaaaatgatctctcatcctggtcttggattgcattttcattacggctaaaggtgttgagaatcttcatacgtgcctact

SEQ ID NO: 8044 - DNA, 120 bp, synthetic construct
  source 1..120: mol_type = other DNA
atgctattcgaagtcaggctaatccttagttggtggacaaaagtggtgactaaatggttcagaaaaagagagttattctaggcaggttgtgatatcctataccacaatctgaacagtagg

SEQ ID NO: 8045 - DNA, 120 bp, synthetic construct
  source 1..120: mol_type = other DNA
cagggtgggaaagagtaggagacaaaagagtaatgtagaagcaaagtgactagctatgaggcacgtcactcaccatgacacaattactttttcggaacttagagatgataattctcatat

SEQ ID NO: 8046 - DNA, 120 bp, synthetic construct
  source 1..120: mol_type = other DNA
agtaccactctttggatgtgattgggttcctgctggtctgtgtggcaactgtgatatttatcgtcacaaaatgttgtctgttttgtttctggaagtttgctagaaaagcaaagaagggaa

SEQ ID NO: 8047 - DNA, 120 bp, synthetic construct
  source 1..120: mol_type = other DNA
tacaaatgtctatttcacactctcattctaaagtagaatcgatgatgaccttttctccccgttcagccccataaaaactcattttcccctcttttcttttcctcccagctcctagacttc

SEQ ID NO: 8048 - DNA, 120 bp, synthetic construct
  source 1..120: mol_type = other DNA
aagggtctctccctagacccttgtaaaataacaacagcaataataattaatgtacagaagtttcacaatgtaagttctccccccataaatatctccaaatcagtggtacctgctaccctg

SEQ ID NO: 8049 - DNA, 120 bp, synthetic construct
  source 1..120: mol_type = other DNA
gagcttggtgacagggacagctgtcatattcttctgtgaggctgtttttgtctgtttttcctccttgggtctctcagcaggtgggttcgtgcctggtgctccagtgatgggaagaaaacc

SEQ ID NO: 8050 - DNA, 120 bp, synthetic construct
  source 1..120: mol_type = other DNA
tcccgatgcgccatgctctctggccaccagccttcacatctgtgctccctctgcttggaactctgctctgctatctttgccagactcttactgatcctttggataacagcttaaaaggtc

SEQ ID NO: 8051 - DNA, 120 bp, synthetic construct
  source 1..120: mol_type = other DNA
attgcctccaaaatcaatcaggtaaactatataggcagaaccatctctcaggctccaaagttttgtaccctgcccgcaagaaacctcaaataacaggaatgttgagcccagttcacgcaa

SEQ ID NO: 8052 - DNA, 120 bp, synthetic construct
  source 1..120: mol_type = other DNA
ggaagggacaagagtgttccttgagagagaacagttcaacactgtgatcatgtgccaaggccagaagtgaagtagctcagttactaagacaagaaaaactcagagaccaagcagccagag

SEQ ID NO: 8053 - DNA, 120 bp, synthetic construct
  source 1..120: mol_type = other DNA
tggagtgcagtggcgcgatctcggctcactgcaagcttcgcctcccaggttcacgccattctcctgcctcagcctcccgagtagctgggactacaggtgcccgccaccatggccagctaa

SEQ ID NO: 8054 - DNA, 120 bp, synthetic construct
  source 1..120: mol_type = other DNA
catgtttatatataaagatgggaagctgatattaactgatgagagtgttgtatcaatgggtgatagatggtgggaaatgagaaggcttgcatgatcaggatggccagcaaaggatctgta

SEQ ID NO: 8055 - DNA, 120 bp, synthetic construct
  source 1..120: mol_type = other DNA
tcctccttcagatagtctaatgacacaatgtctaacatctcaccatccttgtcacttttctctagatgctcaatccacatttaaaacacaaaaatgaacaccatccccatttttgttttg

SEQ ID NO: 8056 - DNA, 120 bp, synthetic construct
  source 1..120: mol_type = other DNA
caattgtttacatgtctatctctttcatcagacaccaaatccctggatgccagggactgtcttctcaacaacttttgtccctcacagtttatgtaagaaagctatttgttggatggatga

SEQ ID NO: 8057 - DNA, 120 bp, synthetic construct
  source 1..120: mol_type = other DNA
ccttagtgaagggggcagcattggagtaatccgatttaatgagtaactttctttttagggcagctttcccgtgtatgcaatctcagccaccattggaatcactgaacctggaatcactgt

SEQ ID NO: 8058 - DNA, 120 bp, synthetic construct
  source 1..120: mol_type = other DNA
ctgaatctgagcattagtatctaggaagcattttgccccttctgccgtaaatacagctattgctgctacttgaaagacaataacattgcttgagattgatttacttctctttctcaacca

SEQ ID NO: 8059 - DNA, 120 bp, synthetic construct
  source 1..120: mol_type = other DNA
gaaacataggaataaatgaatgaaatttatatgaatgaattgataaaggaggatcccttctccagtagaactccttatacttatatattttggcaaaaatgtatcagtatggttaggaaa

SEQ ID NO: 8060 - DNA, 120 bp, synthetic construct
  source 1..120: mol_type = other DNA
tgcagagtaacgcaagacaggctgcactttctaaatacagatttctgggcctacgccagagattctgatttcgcaggtctagggtagggtctgaatctctattttaaagaagcaatggag

SEQ ID NO: 8061 - DNA, 120 bp, synthetic construct
  source 1..120: mol_type = other DNA
acctacaaaccagaaacaaaaatgtttaaatattgatgccagtatttataaagatgcaggaaattaggcaatgcctatgagggctggggtgctaaaggaggtgcacattactgaaggtac

SEQ ID NO: 8062 - DNA, 120 bp, synthetic construct
  source 1..120: mol_type = other DNA
agctcaagtggaaggtggacctcaataggaccaacacgttcaccttcccactccaaatttcaccttctgaagggcccaggattaaaatatcacgtaaaggaagcaggtcacctccacgga

SEQ ID NO: 8063 - DNA, 120 bp, synthetic construct
  source 1..120: mol_type = other DNA
ttctcaagaacaagttgtgggaccttgggcaaactctctgggcttttgttcttttgtttgtaaaatgagagatttggaccatgtaagttcttccaaggttcctttcttgtaccttcctcc

SEQ ID NO: 8064 - DNA, 120 bp, synthetic construct
  source 1..120: mol_type = other DNA
cagagttagggagacctgtttctgccagccacaccatggtgtctacaggcacgtagctcagcctgactggactttgctaactttccagtgattctgtgatgccattctcctgcccagata

SEQ ID NO: 8065 - DNA, 120 bp, synthetic construct
  source 1..120: mol_type = other DNA
acagttttcaattcattacctatagacggagcccaagaagttcaaggtctctttctctagattacaagttacttaagggcagggtccatgtcttacaattctttcttttctctcccttcc

SEQ ID NO: 8066 - DNA, 120 bp, synthetic construct
  source 1..120: mol_type = other DNA
tcttcttattggtgtctgcctctggatgtgtgcctttctcccccttaagacttacttctgatctcttgggagctagaagttctggtgatcaagtttgatgtaataaaaagaaaatattcg

SEQ ID NO: 8067 - DNA, 120 bp, synthetic construct
  source 1..120: mol_type = other DNA
ggaagaggacataaaatgtttccaaatgaacggcacagacatgatcaggtttgggagaatcttactgatctatagacctgtggaagatatacagagagaaagaagcataatgaggagcta

SEQ ID NO: 8068 - DNA, 120 bp, synthetic construct
  source 1..120: mol_type = other DNA
gcttttagctttcttcctgtggttttacaaatattgagacactcaattgtctctgggatgctatgccttggggacaaaacccagcccagataagaaatgtgcagctctcccagggttctg

SEQ ID NO: 8069 - DNA, 120 bp, synthetic construct
  source 1..120: mol_type = other DNA
tgcctctgtgtcccaacaacagataatttttttcccattaacggagaaatttgctatcctctaagccctgttctgtgacttatcctctgtccctgacacatcttcctgttacctgacctc

SEQ ID NO: 8070 - DNA, 120 bp, synthetic construct
  source 1..120: mol_type = other DNA
catagaacctgggggtccttgaacctcattcttccctctaggtccgagtaacagggagctgtgaaaaaagaatgacatcctggaggaagaccctgacccaggagtagaagggactcttga

SEQ ID NO: 8071 - DNA, 120 bp, synthetic construct
  source 1..120: mol_type = other DNA
gagccatcgcgcacagccacgccccgactcttatacttattttacagtactctgttccccttcccattttaaaaaattaaacaggaaataacaaaagtgcatttccctagaaaaaaccct

SEQ ID NO: 8072 - DNA, 120 bp, synthetic construct
  source 1..120: mol_type = other DNA
aatagctcctgttccagggatagatgtgtacatggaaggaagaaaaggcccaaaccatagctctagacatcccagaacctgcccagaaaaagaaggggccagacaagcaggtggaaatcc

SEQ ID NO: 8073 - DNA, 120 bp, synthetic construct
  source 1..120: mol_type = other DNA
ttagttaggattcttggtaaaacatgactcactgttcacattcactagaacatacatggggttgaggggaatcgcactcatcaattgtcaagcttgctctagcaaatggacagctgggga

SEQ ID NO: 8074 - DNA, 120 bp, synthetic construct
  source 1..120: mol_type = other DNA
aggcttcatccgtcaccacaaatgctcaggcctcagaatgcccgtaattctctaaacttactcaaggaccagaagtttctatttcagaagaaactctcatttccttttttttttttttgt

SEQ ID NO: 8075 - DNA, 120 bp, synthetic construct
  source 1..120: mol_type = other DNA
tagaaataaaaaataaaagagaaagtactgggggtaaaaaaaaagtttggcgcccttgcttctgcttaagagttgtcatatgaagcccgagaacactgaaaaggaagaggacaccattac

SEQ ID NO: 8076 - DNA, 120 bp, synthetic construct
  source 1..120: mol_type = other DNA
gttgtgcacctgaaatatagaccatgtctatctgtcaattataccccagcaaatctaaaggaataaaaagacctacatcaaatgatgtaggggcctacatgtatgtgagaggcagcatca

SEQ ID NO: 8077 - DNA, 120 bp, synthetic construct
  source 1..120: mol_type = other DNA
acgatgagctggcaacagtgacagcttcctggaggaggtagggaactaagaattgggttgaataggtgatttacttttcacttacatatcctcttaaactgttggctttttaaaaagcca

SEQ ID NO: 8078 - DNA, 120 bp, synthetic construct
  source 1..120: mol_type = other DNA
gatactagctatcaccactggaagctttctaggtcagtattttacatactatctccaatgctctcgacaacctttgggtagatattatccctgttttacaagtgacacaaaaaggcacgg

SEQ ID NO: 8079 - DNA, 120 bp, synthetic construct
  source 1..120: mol_type = other DNA
atggactaatacactgatcttcatatatactatggttctcatcaggaatgtaccatctctcaatccaagctagagcagcagtcaaaaacatgctttcccaaagtccaggagcatgaagca

SEQ ID NO: 8080 - DNA, 120 bp, synthetic construct
  source 1..120: mol_type = other DNA
gactccggacgaagccatccatgaccatatgcatccacatgcatatacatatatggatcatccactatatatgtcatttggaatagacctattccaaatgtttttcctcctctggctctt

SEQ ID NO: 8081 - DNA, 120 bp, synthetic construct
  source 1..120: mol_type = other DNA
gcttcctgggatcagagtttcacaaacagatatgagtgaccacagggttctcaagcaactatttggaccagatcaaaatggaaaacttccaaataaaatttggatgaagcaaagaaggag

SEQ ID NO: 8082 - DNA, 120 bp, synthetic construct
  source 1..120: mol_type = other DNA
ttgggggtagagactccataaccaaatgctttggttgcagactgacaagatatgaccttcggtgagaatctccatattgacaactcctagcccaatgccagattataaatgcagattgaa

SEQ ID NO: 8083 - DNA, 120 bp, synthetic construct
  source 1..120: mol_type = other DNA
atacatgcatgccattagttgagttaactaaaacctagatatgtcaaggacatccatttgagcaaggacatcccataaattattgccatggccagcaccccagaccatgcctttctgatg

SEQ ID NO: 8084 - DNA, 120 bp, synthetic construct
  source 1..120: mol_type = other DNA
acagtccttgggtgaagatatgggtacagatcgtgatgacccgacaagaggtgccatttcccttgttccaaggaacagtttggattggatgggaaggcaagctctgaaaccaagttcttg

SEQ ID NO: 8085 - DNA, 120 bp, synthetic construct
  source 1..120: mol_type = other DNA
ttaattgtgttttcagagatggtttttctaaacaggcattatcatctagagatggatttcatacttgaggaaaaggagaagagacagacggaacgaaagcccacagctttgggaaggcct

SEQ ID NO: 8086 - DNA, 120 bp, synthetic construct
  source 1..120: mol_type = other DNA
aatgaggcccagagaggcccaaaccttaagatatgtctagaaaccactactgccaaatgaataaaacaaatactttctaaaaattccccaaagagcttcacaccaagggaaagaagtggt

SEQ ID NO: 8087 - DNA, 120 bp, synthetic construct
  source 1..120: mol_type = other DNA
aaacagagaaatcaaatggggggtaggaaggaatatctgttaaatcagtcaacacatgttcagcatcacatggactcatttggagatgctatgatgcaagcgagtggaacaacatactac

SEQ ID NO: 8088 - DNA, 120 bp, synthetic construct
  source 1..120: mol_type = other DNA
ggaaacacctacctgaaggagcagggggcaggtaagtggagcccaggggtgctcttctgtgaggtctcacagacacttcagacccaaaggcttctgaaatgaagaaggggaaacctttta

SEQ ID NO: 8089 - DNA, 120 bp, synthetic construct
  source 1..120: mol_type = other DNA
acacacaaacacacacttctttccttctctgatgccaacaggaggtgaccctggcaaaggcctttaagtcagaccccagatggggtatgtctagaccccagcttttgtctttctttggag

SEQ ID NO: 8090 - DNA, 120 bp, synthetic construct
  source 1..120: mol_type = other DNA
aaggtgattgtctttggagctggatttgaatctaggtagcttagctctgagtcatttctgcaaccctaagccgtggacacctttcacttccactaagtcaggagcaatgcagagaacaat

SEQ ID NO: 8091 - DNA, 120 bp, synthetic construct
  source 1..120: mol_type = other DNA
actggagtgatctaaactgggctttctaattgttgacattgttccaaagttcctactccttctagaaagaaatggaaagctaagctatttccccacagagtgggagacaattcttcttct

SEQ ID NO: 8092 - DNA, 120 bp, synthetic construct
  source 1..120: mol_type = other DNA
tcatcttaaatttcttctatgatattctagccaaacagttttctagcccatgcttgaataattttcctagtggagaaccacctcccacggcaatccactctctttggatggctctatgct

SEQ ID NO: 8093 - DNA, 120 bp, synthetic construct
  source 1..120: mol_type = other DNA
aagccctaagacacttcacttccatcagtcagaaaattataaaaatagaacactctataatgcttatgttgtgagtgaagttgcaggggagaagcagcagaagatagcctgggttacact

SEQ ID NO: 8094 - DNA, 120 bp, synthetic construct
  source 1..120: mol_type = other DNA
gttggttaacaaataccaaattaaagctggacaggaagaatggattctggttttctgcaacactgcagggtgactctggttaactataatttaccttctattccccaaaagctaggaaag

SEQ ID NO: 8095 - DNA, 120 bp, synthetic construct
  source 1..120: mol_type = other DNA
agtacagttatgctcaaatgaacactggacccatgtggcaggaccaagcaactagaacatgattcaaaaaatcagtgaaagacacatttggacaggaccaagaggcatttcactgccacg

SEQ ID NO: 8096 - DNA, 120 bp, synthetic construct
  source 1..120: mol_type = other DNA
ttattttccttattttccttctgggaccaacgtgatctctgagtcacgtagactcttccgcattgtgtcaaaggtcagtattcaaaccccaggtcctaccagctctgagatatttgggat

SEQ ID NO: 8097 - DNA, 120 bp, synthetic construct
  source 1..120: mol_type = other DNA
ctaaaactctttcaaaacttcttggggtgaggagaaatgagttgttctaatctctctcctaacagtcagagaagctgagctacaaatctggacttttcctccacgtaaaacataaagcct

SEQ ID NO: 8098 - DNA, 120 bp, synthetic construct
  source 1..120: mol_type = other DNA
ggtgccaggaagagacgtaataactggccacactcatgtcaaaggcctgtaggaagtacattccactcttttctctgcttcttcaagttaaacccagtgagtcttgaatatcaggaattt

SEQ ID NO: 8099 - DNA, 120 bp, synthetic construct
  source 1..120: mol_type = other DNA
ttttgtgggagaaaatcaaaagaaagaacaaatgattcaataagggcagatggaagggaggttagtgaacaactcagctgccatatcaccagtgcaatccttacttaattcctcagtctg

SEQ ID NO: 8100 - DNA, 120 bp, synthetic construct
  source 1..120: mol_type = other DNA
tgaaaaataattctgcagctaggctggtcagtagcccaggattgaagtttaacagagatgaaaataattcccccagtgagttattttctgcccagcttttggaacaatagctcagagtga

SEQ ID NO: 8101 - DNA, 120 bp, synthetic construct
  source 1..120: mol_type = other DNA
aatgttttagaaatcaagagtttacatttttgaaaaaaaatctgaatgtccagctttctatgaaaaagtcagataatctggccacaccaggctgaagctcctgccggaagcctgctgggc

SEQ ID NO: 8102 - DNA, 120 bp, synthetic construct
  source 1..120: mol_type = other DNA
ctgcaggaaaggcaatgcacaagtgaggaagagaacatgcactctggacttaagcctgaatttaaattctggttctgatttagtagctcaatgtctttgggcaaggaatttagcctctta

SEQ ID NO: 8103 - DNA, 120 bp, synthetic construct
  source 1..120: mol_type = other DNA
tgattagccagcaaactcatggttcttatacttccatgtccttttctcaaaactgatgcccaaggaaaatatatattcctccccaggtattaattgagcacatagtatgggctcactgct

SEQ ID NO: 8104 - DNA, 120 bp, synthetic construct
  source 1..120: mol_type = other DNA
tacaaatcgtggtgtatttttccaatggaattctacacagcagtgcaaactcatgaactgcagtggtgtgcatcgacatggatgaacctcagaaaactcatattgactcaaagaagagtg

SEQ ID NO: 8105 - DNA, 120 bp, synthetic construct
  source 1..120: mol_type = other DNA
gtaggcaaagtgagaatagctccccattggccaatgggacaatcagcacatagtaggttttcaataaagatgcctgtttgaaagattgtttcctatttgccttccagactattagagtca

SEQ ID NO: 8106 - DNA, 120 bp, synthetic construct
  source 1..120: mol_type = other DNA
tcctcctcacaggctatgacagcttggcatgttgattaacctcacagagactccatttcctcatttgtaaagggaacataactggttcctacctcacaagacctagtgataggtctggga

SEQ ID NO: 8107 - DNA, 120 bp, synthetic construct
  source 1..120: mol_type = other DNA
gcaaactctagtgtctttgggaactgactctgtctcctgcaatgcagcttctccctggctttggcctccactttgcttttcatttccccggaacctgattataggtgacctatgtccttt

SEQ ID NO: 8108 - DNA, 120 bp, synthetic construct
  source 1..120: mol_type = other DNA
aagagatcagttttgaggtcaaataggggaagaatactgagaaaccataaacacaaactatcagggcaccccaaacagcacccgaccttccataatgtttatacaaacaaagtctgatgg

SEQ ID NO: 8109 - DNA, 120 bp, synthetic construct
  source 1..120: mol_type = other DNA
aacactcttagtccatagaattgaggctccaatgttcagataacccatttctacctcagcaaatcaccctcactccctagcctgagttaaagccttctttgccaacaccatgacttctct

SEQ ID NO: 8110 - DNA, 120 bp, synthetic construct
  source 1..120: mol_type = other DNA
aaaaaaaaaaaaaaaattacttaaaagacccaactccaccatcacaggtgaccatacctgggccctgtaagacaataaataaggttacacaccctccactccagcagttctgagcaccat

SEQ ID NO: 8111 - DNA, 120 bp, synthetic construct
  source 1..120: mol_type = other DNA
ttgactgtgtgataggcaccgctctatctgctagaggacaggtgaaaaagatggggttccctcttcttagaactcactgtgcagtgggagaatgtataaataaatagtaattacaacata

SEQ ID NO: 8112 - DNA, 120 bp, synthetic construct
  source 1..120: mol_type = other DNA
gaacactcagaagtcacttttgtggtgcttgactggcctgacatcttgcaaataaaccttatcaaaagatggtggaagatgcgtactaagtattccgtagtaactgagagttagtctttt

SEQ ID NO: 8113 - DNA, 120 bp, synthetic construct
  source 1..120: mol_type = other DNA
gacttctccataaaccaggtaccagaacctctgcagaagacattaatttttcttttccctgaagttaacatttctcatattctcacttatccctgggatgggtagtggtctttattggga

SEQ ID NO: 8114 - DNA, 120 bp, synthetic construct
  source 1..120: mol_type = other DNA
cacccagagaacattctgagagacatgagcgtggagttagaaagacagaagggaccaggccatcttttcagtttgttcccttgttttagagattttttaaaaaacacacgttaagttcag

SEQ ID NO: 8115 - DNA, 120 bp, synthetic construct
  source 1..120: mol_type = other DNA
tccacccaatgtttgcttttgtggcctttactcaactgatatattaccactcacaagtattttccaggtttggggggttcttttagcctcatgatgcctatggcatctcagaaatcttga

SEQ ID NO: 8116 - DNA, 120 bp, synthetic construct
  source 1..120: mol_type = other DNA
ccacttccagctggatttgttctggactgcatgatggtggtggtgtgttgctttgttatcatccatgtgtccaacagccaagaagttgtctctaaatgtttttaatttaaaaaccctatt

SEQ ID NO: 8117 - DNA, 120 bp, synthetic construct
  source 1..120: mol_type = other DNA
agtcaagtttacagtgtagtggtaaagagcttgggcttggactgcttctgattagtcaaatgactttgggcaaattatttgatttctctgaacatcagttttgccatcagcaaaatgggg

SEQ ID NO: 8118 - DNA, 120 bp, synthetic construct
  source 1..120: mol_type = other DNA
agtcaggagcatctgaaatttttagagtaaagcacttaagataatgttttgtgcttcatgccaactgtgttccatatcccggaagaactttggactgatatggtctacactttcggttgt

SEQ ID NO: 8119 - DNA, 120 bp, synthetic construct
  source 1..120: mol_type = other DNA
aaactggcctgggccattctggatggttggagaactaataaatgtccccttaaaattcacaacgacaagctagtgtctatctggatttgcagtccaaatttatatgctatgtgattaaag

SEQ ID NO: 8120 - DNA, 120 bp, synthetic construct
  source 1..120: mol_type = other DNA
cccggccagggttgaatctaaaaactcagtgggtagattaaacagcagattagacatagctgaggaaaaaattagtaagctggaagctagagcagaaaaaattgtctagaatgtagacca

SEQ ID NO: 8121 - DNA, 120 bp, synthetic construct
  source 1..120: mol_type = other DNA
ggcaggtgcaggtattgattaactacagactttattagggtaagaatgaatataaaaatagctaggaaaatcatcacaaatagatgtaggtgccagacatgatggctaacgcctataatc

SEQ ID NO: 8122 - DNA, 120 bp, synthetic construct
  source 1..120: mol_type = other DNA
aaaagaaataatgtcaaacaggataggctagatgatgctgtggtaataacatcaaaacttgagtagcttgattgacacaacggaggtttatacgttgctcaacatgcagacagccctcca

SEQ ID NO: 8123 - DNA, 120 bp, synthetic construct
  source 1..120: mol_type = other DNA
taattttcataacaacccttgaggcaagtacaaatgaggaaactgaagcgcacacacacaaaaaaactaactgaagtcacacagctagaagtagcagagctaggaattggactcaggaaa

SEQ ID NO: 8124 - DNA, 120 bp, synthetic construct
  source 1..120: mol_type = other DNA
atcattccctactcattcagtgtggtgtgcatgttattatttccttttacaagcacagtatggaaaagggtgagaaatgtaactttacagtgaggagaactagcaaacactacctcagcc

SEQ ID NO: 8125 - DNA, 120 bp, synthetic construct
  source 1..120: mol_type = other DNA
aataagatatcatttcacatctcccaagttgaaaggtcagtcaactcaagttttaccagagacgtggggcagttgtaactctcatctggtgggtcagttggacccaccataaagaacagc

SEQ ID NO: 8126 - DNA, 120 bp, synthetic construct
  source 1..120: mol_type = other DNA
gagaaaatgcagggcgcttctgatgtactggtgtgctccctttcttaatctaggtacatgggttttcattgcagtatcgtattcatatttaactgtgtgtgcaatcatagtatacctgtt

SEQ ID NO: 8127 - DNA, 120 bp, synthetic construct
  source 1..120: mol_type = other DNA
tttgcttcaggagctgagttctccctcatagtgaaatgatttcttgttaactttcctagcatgaaatggtcctttacccagatttcttaccctcatactgtcacttccactggtttgaat

SEQ ID NO: 8128 - DNA, 120 bp, synthetic construct
  source 1..120: mol_type = other DNA
gaaaaaaagttatatgatcaaaaacattgggaaatgttattatagagaaagtaaataccttgcggtagcccacgaggtcctgtttgatttcgccccttcctacctctcaggtctcaccaa

SEQ ID NO: 8129 - DNA, 120 bp, synthetic construct
  source 1..120: mol_type = other DNA
tttgacttaaggtctttctcagtccagttgtacctagcattagacccacttgcttctgctgaagttttatttataaacagaaaagttaccaccctcaacaagggcttaaatcaggacaga

SEQ ID NO: 8130 - DNA, 120 bp, synthetic construct
  source 1..120: mol_type = other DNA
acttgccttatctgaaggagtgcgtctagccatgccttattactaaagaaagagaaggattgtattaatgggatcattgcccctactcctcagttgatggcataaaggcaagaaatctaa

SEQ ID NO: 8131 - DNA, 120 bp, synthetic construct
  source 1..120: mol_type = other DNA
agtaacatacagtgcctactctcaaatacctcattaatacatcataagaggtctagtcaagagtcagtaaagctctaggacagctgttgattctgagtgaagagaccaagatggtgtcat

SEQ ID NO: 8132 - DNA, 120 bp, synthetic construct
  source 1..120: mol_type = other DNA
gatgctatttatcattaggctgtggcacttattatacggcactagaaaactaatgcaaacagttttctattcagagggaagagcatgagcatgatgatatggagcactcagagactttag

SEQ ID NO: 8133 - DNA, 120 bp, synthetic construct
  source 1..120: mol_type = other DNA
aggtgggattgaggaacagagaataacccgaggtaagggaaccaagaggttcattggctttgccatgatgttgactttgccatgacctgagccatgtatgaactcaaacaagaccacttt

SEQ ID NO: 8134 - DNA, 120 bp, synthetic construct
  source 1..120: mol_type = other DNA
aaagtggtcttggttgagtccatacatggacacttaaaaattaattttggtgaagagctgcagttagtgctattagggcagatggagcccttcagtgacccaaatcctgctacagacacc

SEQ ID NO: 8135 - DNA, 120 bp, synthetic construct
  source 1..120: mol_type = other DNA
aatgacgatgggcagccatcatcagagcttcctaggtttgatgtccaaagacaaaccaagggctagatgtgacttagagtttattagcatcattgtcagcaagacaaagcactgtgtaca

SEQ ID NO: 8136 - DNA, 120 bp, synthetic construct
  source 1..120: mol_type = other DNA
gttcctaagcacaggttatagtttctgagaaccctctcgttatcaagtaaatctgatcctttctatcatttttcactaacagaaaggctttcaaagaatggaaaccaaccgtggtcccag

SEQ ID NO: 8137 - DNA, 120 bp, synthetic construct
  source 1..120: mol_type = other DNA
aacaaaaatatctgcttttctgacttcaaagaaaagcagagacattcctgccaatgagactcttcaaagcaaattcctccctagccagttatactgaagccagcataggaatctgcatat

SEQ ID NO: 8138 - DNA, 120 bp, synthetic construct
  source 1..120: mol_type = other DNA
ctgggaatggcaatgacatcttcagttcctctggatacttccggcttaaaacctgggcaaactaagagattcactgtgtataatgttattggatataacgtatctgctaaaggatagaga

SEQ ID NO: 8139 - DNA, 120 bp, synthetic construct
  source 1..120: mol_type = other DNA
cgaaagctgagagaattaataaacctgacaaactaaaaaaaaaaaaatgaaaagcaagatttatctaggaaggaaaaagaatgaaagaggggcagaaagagctttaaaggcaagtagagg

SEQ ID NO: 8140 - DNA, 120 bp, synthetic construct
  source 1..120: mol_type = other DNA
aatcaatattatccttataataatattctcatttacttagatgacattcgcttgaacaagaaaggaaggggtagtgttatagctgccagggagggtgttcatcaccaggacacacacgtc

SEQ ID NO: 8141 - DNA, 120 bp, synthetic construct
  source 1..120: mol_type = other DNA
cccagcaacctcagaacaatcctaacaaacgtttgtaaggcactttacgatgtagaggtctttcaaatgcgttatctcccttgagtctcacaacatcctccagaaagtatgtatttaaga

SEQ ID NO: 8142 - DNA, 120 bp, synthetic construct
  source 1..120: mol_type = other DNA
gtaataatatgtggagagatctacttaataataatgtgtggagaggtatctgtatatctgcaaggatttaggccaccctattaaaagtgcacctggcaagcacaagtgcaggactttggc

SEQ ID NO: 8143 - DNA, 120 bp, synthetic construct
  source 1..120: mol_type = other DNA
aacagaatcagtcgtaatgttgatcattagaatctttgtccttaaaagtctttcagttctttcctttccccatattcccaccatggggaattgtcttctacttggactcaagcctcctac

SEQ ID NO: 8144 - DNA, 120 bp, synthetic construct
  source 1..120: mol_type = other DNA
agtttaagagatttccaagcaaaggaacatgagcccagctgcatccccagagttagaaggaatggcttcttgagggttgggggaacaggatgtggttaggatttcttatttatttattta

SEQ ID NO: 8145 - DNA, 120 bp, synthetic construct
  source 1..120: mol_type = other DNA
gcctggaccccctcccaccacaccctcctcactcacctagtccagataaaatataggatacccaattgaatttgaatgtcagatgtacctatactaaaagaaaccattgtttatctgaaa

SEQ ID NO: 8146 - DNA, 120 bp, synthetic construct
  source 1..120: mol_type = other DNA
atgcatgtgcacatatgcacacacacagcacacacgcatgggcacactgaaagcttctggagaaaagatatcatgaaccgaatgctattaaaagacagttctggttgtttgtttgtttgt

SEQ ID NO: 8147 - DNA, 120 bp, synthetic construct
  source 1..120: mol_type = other DNA
tccacgtggcactagctttccagtcactttgaagagaaacctgccaagaggcctgagaaggaatcacagacaaggcaagaaggaatcacagacaaggcaagaaggaaccagaaggacaac

SEQ ID NO: 8148 - DNA, 120 bp, synthetic construct
  source 1..120: mol_type = other DNA
gcgggtcccagctcccctcccacacccctcccgcctgcagggggcagccttgactgccagcctctctcagacctccctctcctgcggccccaaagcgcgggctacacacctgcgtacctg

SEQ ID NO: 8149 - DNA, 120 bp, synthetic construct
  source 1..120: mol_type = other DNA
tcttggaccttccggaaactgagccacatcaggctcacgttgatagcataggtggtgatacaaacaatgcagaaatcatagagcacgaagaacaggatccaggccaggtagacagaacca

SEQ ID NO: 8150 - DNA, 120 bp, synthetic construct
  source 1..120: mol_type = other DNA
ctcaggaggctgaggcaggaaaattgcttgaacccgggaggcagaggttgcagtgagccaagatcgtgccactgcactccagcctggtgacagagcgagactatgtcgcaaaaaaaaaaa

SEQ ID NO: 8151 - DNA, 120 bp, synthetic construct
  source 1..120: mol_type = other DNA
gactagatacaaattttcctgctgagcactaaatgagacaaaagatagctcatgctcagcttctccttaaaaaggaatttcggcatcttttccacaaaactggggtgttggtggggcatg

SEQ ID NO: 8152 - DNA, 120 bp, synthetic construct
  source 1..120: mol_type = other DNA
ggcccttaagtaattcttaaaatggcaaggctggtataacggttcactcggttttgcatcagagactgggagtcgggggcagattatctttgccctggaccccagaatctccagctccct

SEQ ID NO: 8153 - DNA, 120 bp, synthetic construct
  source 1..120: mol_type = other DNA
ccgccttcacgtgcagcgcgtagagcgagagcactaagcccgtcaggcaaagagcgagccgcacccagccagggctcccccaggtgctgcccattatctccaggttccgcccgaggcgcc

SEQ ID NO: 8154 - DNA, 120 bp, synthetic construct
  source 1..120: mol_type = other DNA
aagaaaaaaaaaagtgtgttagtgtggttaacagcatttgcgcttaccctatgccaagtcctgttgtaagaattgcagcatccgggacctagagaccagcggatcaggggatccagcgaa

SEQ ID NO: 8155 - DNA, 80 bp, synthetic construct
  source 1..80: mol_type = other DNA
ttgagagccaccttaatgtggaaatgcaagaatcagcaggatcaagtccaagaagaatgaagccagatggttctgtaaga

SEQ ID NO: 8156 - DNA, 80 bp, synthetic construct
  source 1..80: mol_type = other DNA
tatttaacatctcatacagtcagagttcactggcgctttgttccagcctggacactgaccattgaaaaatagatgccttt

SEQ ID NO: 8157 - DNA, 80 bp, synthetic construct
  source 1..80: mol_type = other DNA
tgaaaacagacctcaaatccagctcacagtaaattcaagaagcctgagcaaaggccaaatacagactcccgaattttttt

SEQ ID NO: 8158 - DNA, 80 bp, synthetic construct
  source 1..80: mol_type = other DNA
tggcaatgcgttgtttctggccaccagagagctgagttcctttgtctcctactttagtgctatatttctgtaaataaggt

SEQ ID NO: 8159 - DNA, 80 bp, synthetic construct
  source 1..80: mol_type = other DNA
tcttacaaggaggtagctaaaccagccacctacagggtgaggtaaatcctagtattaatcacttaggagaagtggatcct

SEQ ID NO: 8160 - DNA, 80 bp, synthetic construct
  source 1..80: mol_type = other DNA
tattagtgtagggagggaaggggggtaagtgttgaaaaactacctattgggttctgtgctcagtacctaggtgacaggat

SEQ ID NO: 8161 - DNA, 80 bp, synthetic construct
  source 1..80: mol_type = other DNA
atgacgatgagagattacatgataccatggtcactttaatggttcaacccttattcagagagagcactctttctggcatg

SEQ ID NO: 8162 - DNA, 80 bp, synthetic construct
  source 1..80: mol_type = other DNA
gctttatttctttgccatcaagcagctgaaaacaagagttcacagatcaacttcaggaccagcacactttgaatgtagca

SEQ ID NO: 8163 - DNA, 80 bp, synthetic construct
  source 1..80: mol_type = other DNA
ctcagctttgagcttttctaatagtagtgactagtgcgtgctgagccatatactctctgtatcccatgtgcctggctggg

SEQ ID NO: 8164 - DNA, 80 bp, synthetic construct
  source 1..80: mol_type = other DNA
tggtgttggtctgaggaaagaccaaggaactctggggaatctatgagaagtgctcaaaaaatcctggcctaaataaaaat

SEQ ID NO: 8165 - DNA, 80 bp, synthetic construct
  source 1..80: mol_type = other DNA
ttgaggccattctaatattcaccgaagctttagaaccaccatttcaggtcaatgtttttcaacatgggattcaaggtcca

SEQ ID NO: 8166 - DNA, 80 bp, synthetic construct
  source 1..80: mol_type = other DNA
tttggaagtctgggagcaaatagcctcctttcactcttccagcccttccaaagattttgtaagcatgtaattccctttat

SEQ ID NO: 8167 - DNA, 80 bp, synthetic construct
  source 1..80: mol_type = other DNA
tcttgctcttaattctattccttcctagtttgtcttctttcctatcccccatcatagtcgtttaaactcactactccctg

SEQ ID NO: 8168 - DNA, 80 bp, synthetic construct
  source 1..80: mol_type = other DNA
ttccatttttgttggttcttttcaagtcagctgaaacctaagtacagcaagggagacaggtggtacaaagggtgcttgca

SEQ ID NO: 8169 - DNA, 80 bp, synthetic construct
  source 1..80: mol_type = other DNA
tgtgccaccacacccagctaatctttttttttttatttttatttgagatggagtttcaccatattggccaagctggtctc

SEQ ID NO: 8170 - DNA, 80 bp, synthetic construct
  source 1..80: mol_type = other DNA
gaaaatactctggaaagcacaaacacaaaacatgtgcacagcattaccatcacaatgctagaaagctgacactccttttt

SEQ ID NO: 8171 - DNA, 80 bp, synthetic construct
  source 1..80: mol_type = other DNA
ctcttaagatgcattgacgttcttatctatgacatgggaatcacagcaacttaaagttgggaaggaccttacaggtatca

SEQ ID NO: 8172 - DNA, 80 bp, synthetic construct
  source 1..80: mol_type = other DNA
atgctatcaagaggcagaatcttacccacctccaaatctagaagctcagaaagattacacatacttttgaccaccaaatt

SEQ ID NO: 8173 - DNA, 80 bp, synthetic construct
  source 1..80: mol_type = other DNA
ttggcagtagggcacagaggcatgaccaacaaaaatgggtttcgtttccaaagaactaagtttggtcctcactttacact

SEQ ID NO: 8174 - DNA, 80 bp, synthetic construct
  source 1..80: mol_type = other DNA
ccagctttccttttattataagaaacagactcagaaaggttgggcttgcttatgttcacaccacttattagagccctcac

SEQ ID NO: 8175 - DNA, 80 bp, synthetic construct
  source 1..80: mol_type = other DNA
caataaaaagtaaattttagatacattcaaaggcttactcctctctgcctgtggacgcttacccctttctgcccgtggac

SEQ ID NO: 8176 - DNA, 80 bp, synthetic construct
  source 1..80: mol_type = other DNA
gaggcagaagctctggcccctatgctggtacaggccagtactttgccaaaccatgaaaccaaggtggctatggcagttcc

SEQ ID NO: 8177 - DNA, 80 bp, synthetic construct
  source 1..80: mol_type = other DNA
cacatggcactacacctggcttgaattaatttttttaattttttaaggaatgtggcacatactatcaatctgttttccag

SEQ ID NO: 8178 - DNA, 80 bp, synthetic construct
  source 1..80: mol_type = other DNA
taacttccagaattataagtcaccaagagaaatgactctttattgtttaagatgttcttcctctctttggcctctgcact

SEQ ID NO: 8179 - DNA, 80 bp, synthetic construct
  source 1..80: mol_type = other DNA
caattaggaaaaggcttaattagcaccccgcatcctcacagctttgtttattccaagagttttaaatggagactcagtaa

SEQ ID NO: 8180 - DNA, 80 bp, synthetic construct
  source 1..80: mol_type = other DNA
gtcataaaagaagttaaaagcagtcctgaataaccgaaactcttttgccagattgcgtaaagttagttttctggcactgc

SEQ ID NO: 8181 - DNA, 80 bp, synthetic construct
  source 1..80: mol_type = other DNA
ttcccttcaaggatcagggatgaacagctttacacataagagcatatctatagatatggactcatcctaaaccggattgc

SEQ ID NO: 8182 - DNA, 80 bp, synthetic construct
  source 1..80: mol_type = other DNA
gcaatttactggagagatgaactgctcctgctgagattgttagtgtcactgcattttaagcaggtacaacacttgaactc

SEQ ID NO: 8183 - DNA, 80 bp, synthetic construct
  source 1..80: mol_type = other DNA
ttcaaattgttgcaagtcttcaaaaaattttccaatacatttattgaaaaaaacctacatataagtggacccactcagtt

SEQ ID NO: 8184 - DNA, 80 bp, synthetic construct
  source 1..80: mol_type = other DNA
aaatagcagcttgagaagtgtgttcaggtggaagttgattttcaatattatgtggactggttggtgcagatccactactt

SEQ ID NO: 8185 - DNA, 80 bp, synthetic construct
  source 1..80: mol_type = other DNA
atcacacatatatccctgtcctaaatgttagttatggcagtcagccctgctctgacctctcatttccactatgatacaga

SEQ ID NO: 8186 - DNA, 80 bp, synthetic construct
  source 1..80: mol_type = other DNA
accatagatgaaggatataattattcctgtcccaagatttgctatattctgggtaattacagcaagcctggaacctatag

SEQ ID NO: 8187 - DNA, 80 bp, synthetic construct
  source 1..80: mol_type = other DNA
agatttccaactctgaaaccaaaagtcaagctacaaagtcagtttagtccatcactctataatttagtccagcacatctc

SEQ ID NO: 8188 - DNA, 80 bp, synthetic construct
  source 1..80: mol_type = other DNA
cacttctaggtgtgagttcatggcagaggaattacctggctatttaacttttcagacatataaatgtgcagctttggata

SEQ ID NO: 8189 - DNA, 80 bp, synthetic construct
  source 1..80: mol_type = other DNA
gatatttgtccatcaaagcacatgagcccataccacagggtctgtgtcatattgtgcaatgtcacattgcactggttact

SEQ ID NO: 8190 - DNA, 80 bp, synthetic construct
  source 1..80: mol_type = other DNA
tcacttctgtgttcaaaaccctacagtggttttccatctacttctggatataatgctgaccttaacacacttatgactct

SEQ ID NO: 8191 - DNA, 80 bp, synthetic construct
  source 1..80: mol_type = other DNA
ataaggttcaagaggggaaaagacacaccagagattacatgaattttttcaaattctacatcattttgtggacttttgcc

SEQ ID NO: 8192 - DNA, 80 bp, synthetic construct
  source 1..80: mol_type = other DNA
ctgagtgcctactttctcctacgcatgatttctaagtgttggacctgtacgaacaaaaaagacaaagtagctgctttcat

SEQ ID NO: 8193 - DNA, 80 bp, synthetic construct
  source 1..80: mol_type = other DNA
aatgttaaacagtgaaactcttattagacatccaatagagaggttgaataagcagttagataaatgtagctcagggcagt

SEQ ID NO: 8194 - DNA, 80 bp, synthetic construct
  source 1..80: mol_type = other DNA
cagaaaagaaaatgggcagtgaagaacaggacacagggatgagttttgatttgcggaaagaaagagtacagagggcatct

SEQ ID NO: 8195 - DNA, 80 bp, synthetic construct
  source 1..80: mol_type = other DNA
cagaagaaactgaggcttagagagcctgataagatccatagcccacagttataaggtcacagagttggaatcttaatcca

SEQ ID NO: 8196 - DNA, 80 bp, synthetic construct
  source 1..80: mol_type = other DNA
accacacctggccctcatactaaacttttagagtacttaattccttgccatttcatttcagccaaatgatttgcaagctg

SEQ ID NO: 8197 - DNA, 80 bp, synthetic construct
  source 1..80: mol_type = other DNA
atcattcataaattgatccagtattttttctgttcggattccctcttggagtcatgagtgccacctcaactgtgtaaagt

SEQ ID NO: 8198 - DNA, 80 bp, synthetic construct
  source 1..80: mol_type = other DNA
ctaatatcccagccctgggtcacttacctccagacttattgtcatatgaagaatgagaaaagtataaaatcataagttga

SEQ ID NO: 8199 - DNA, 80 bp, synthetic construct
  source 1..80: mol_type = other DNA
gcagttatggcaagggtgtcctcagcttgatgtttggacatatgtcactaaacagagagcattcctttcagattgtaact

SEQ ID NO: 8200 - DNA, 80 bp, synthetic construct
  source 1..80: mol_type = other DNA
atttataatggcacaaaatacaccaacaacaaaataaggccattcagttaaatttagcttcataatcctccaaaaggaaa

SEQ ID NO: 8201 - DNA, 80 bp, synthetic construct
  source 1..80: mol_type = other DNA
ctaatcactgaatgtcagctatcaaggaaaacagcaatttgtttagtaactgcagaaaaggataaagctaatctgctgtg

SEQ ID NO: 8202 - DNA, 80 bp, synthetic construct
  source 1..80: mol_type = other DNA
tctttcatgagttcatcatgatttcctttctccacaatgactccatcatcgaaaccagcgatgacgtcagcattacgaac

SEQ ID NO: 8203 - DNA, 80 bp, synthetic construct
  source 1..80: mol_type = other DNA
gaagagtcacgtaagtctcttttattttcataaaggaacagagccagatatccaggccttgtctgagacttctctaacct

SEQ ID NO: 8204 - DNA, 80 bp, synthetic construct
  source 1..80: mol_type = other DNA
aactgcacttcagcctggtgacagagtgagaaaagaaacaagaaaagaaaagataagataagataagaaaagaaaagaca

SEQ ID NO: 8205 - DNA, 80 bp, synthetic construct
  source 1..80: mol_type = other DNA
tcaataacctgtcatggcttaggtaggttttcagtatcacaggctatctgcccctttcctggaaataagaggtttcttat

SEQ ID NO: 8206 - DNA, 80 bp, synthetic construct
  source 1..80: mol_type = other DNA
ctccaaccagggtgtcaaatttctaccacagaaaacccagaatgatttagcataaggacaagctatctcagctcatattt

SEQ ID NO: 8207 - DNA, 80 bp, synthetic construct
  source 1..80: mol_type = other DNA
ctaccaggacgagtgagaaaaaaacttcaaggcaattcacagacacaggatataggaactgactgttcactaggtttaaa

SEQ ID NO: 8208 - DNA, 80 bp, synthetic construct
  source 1..80: mol_type = other DNA
tcagtctcccaagtagctaggactacaagcatgcaccatcacacctgactaattttttttattttttctagagacagggt

SEQ ID NO: 8209 - DNA, 80 bp, synthetic construct
  source 1..80: mol_type = other DNA
ttatctcagttagtcctcaaaacacgctgaaagttagggttcattcctgtcatatcatttggcagaagaggtagcagagg

SEQ ID NO: 8210 - DNA, 80 bp, synthetic construct
  source 1..80: mol_type = other DNA
gaagaggaacaatttatacttccataatttgtgaggtggattagctgccattcgaaataatttgaaaagaagtcaaaatg

SEQ ID NO: 8211 - DNA, 80 bp, synthetic construct
  source 1..80: mol_type = other DNA
catgtcgatatagcatgatagttacagagtggctaggatgtgttcagtcctgtgatatacatgcattttgtcctgctgct

SEQ ID NO: 8212 - DNA, 80 bp, synthetic construct
  source 1..80: mol_type = other DNA
attcatagcacaaaggcctaccctacattaaccaaacctggtgaggacccattaatacttcttagagcaaatataggaaa

SEQ ID NO: 8213 - DNA, 80 bp, synthetic construct
  source 1..80: mol_type = other DNA
cacaacacacagacacatacatatctctcactttatgagttgatctgaggtaaaagctaccactgggcataacttacata

SEQ ID NO: 8214 - DNA, 80 bp, synthetic construct
  source 1..80: mol_type = other DNA
atgcaagccttatgacgtttcctagaacatactaaattcttggccaccccaggaaacttggaagactcttcttcaaaccc

SEQ ID NO: 8215 - DNA, 80 bp, synthetic construct
  source 1..80: mol_type = other DNA
tctgaatccctttaaactttcagtgaactaaaatatcagatttatctaagttacaaatgttgggcttcactcccacaatg

SEQ ID NO: 8216 - DNA, 80 bp, synthetic construct
  source 1..80: mol_type = other DNA
tttccattcataggataaagccaacatgttcaggatgttttcaatttggtatttttcacatggatttatttagctaatta

SEQ ID NO: 8217 - DNA, 80 bp, synthetic construct
  source 1..80: mol_type = other DNA
cagatactctggtatcactggattaggactcatttttaatgtgaaatcctcagctttggagagagattgtttcctacttc

SEQ ID NO: 8218 - DNA, 80 bp, synthetic construct
  source 1..80: mol_type = other DNA
cttccaaatcatgtagcatatgtcagctgaataggggcagaaaggaaaatgaaccacggattaaaatgtccccatagatc

SEQ ID NO: 8219 - DNA, 80 bp, synthetic construct
  source 1..80: mol_type = other DNA
acattttaggatgccaaagatgaataattgcttgagcccaggaattctagaccagcctgggcagcatggcaagaccccgc

SEQ ID NO: 8220 - DNA, 80 bp, synthetic construct
  source 1..80: mol_type = other DNA
gcagacaaaagtatggttgaatcttcattaagtgttgtgtttttcaggagatcatgtctgtgaaaagaaaaaaaaaaaaa

SEQ ID NO: 8221 - DNA, 80 bp, synthetic construct
  source 1..80: mol_type = other DNA
ctgaatgggcaaaagctggaagcattccccttgaaaactggcacaaaacaaggatggaatcaacctaaatgcccatcaat

SEQ ID NO: 8222 - DNA, 80 bp, synthetic construct
  source 1..80: mol_type = other DNA
ggtctctagcagccagcctggggctccttttactaaataaatggcatgtgaagcaatgcataattaatcattaaaagatt

SEQ ID NO: 8223 - DNA, 80 bp, synthetic construct
  source 1..80: mol_type = other DNA
tctgccttcatgacaggagagagagctgaaggccaaggatttatatgcatccttagggactagaaagtatctgttttctt

SEQ ID NO: 8224 - DNA, 80 bp, synthetic construct
  source 1..80: mol_type = other DNA
ttcctcagaaagtatcttgttttgctctactgcacattctcagaggatttcttcattctggcaaagcccagtccttcatt

SEQ ID NO: 8225 - DNA, 80 bp, synthetic construct
  source 1..80: mol_type = other DNA
ttctgctttggctcaaatcccagctcttcacttcactgttatgtaatcttaggcaagctgcttaacttttctaagcctca

SEQ ID NO: 8226 - DNA, 80 bp, synthetic construct
  source 1..80: mol_type = other DNA
cttgaaggcagaagttgcagtgcacagagatcgtgccactacactccaacctgggtgacagagtaaaactccatctcaaa

SEQ ID NO: 8227 - DNA, 80 bp, synthetic construct
  source 1..80: mol_type = other DNA
aatgcctctccacaggaatatttggaggtatttggtcctcagctttcaaaatatgataaagtgtctccattttcggcagg

SEQ ID NO: 8228 - DNA, 80 bp, synthetic construct
  source 1..80: mol_type = other DNA
catgtcttcctccagattcatgaagaaccctgtatcattgatatcacctagaccaccacaaaacaaacataccatttatg

SEQ ID NO: 8229 - DNA, 80 bp, synthetic construct
  source 1..80: mol_type = other DNA
agtctgatttcaactggtatggaaaagaggggaaaaactatttctagcaaagtgaacaatatggacaaaagtcaacggca

SEQ ID NO: 8230 - DNA, 80 bp, synthetic construct
  source 1..80: mol_type = other DNA
aaatcagttgtgagatttcttctgctccacgttttcaaaaatgaaacaggacattgaatagtcaggtgaggatttttctc

SEQ ID NO: 8231 - DNA, 80 bp, synthetic construct
  source 1..80: mol_type = other DNA
ctctacacaaaaaccccatgacacacatttacctatgtaactatattagtctattcgtatgctgctgataaaaacatacc

SEQ ID NO: 8232 - DNA, 80 bp, synthetic construct
  source 1..80: mol_type = other DNA
gtaccaacaatgatttaccagatatttcctttacccccacacctatctcctcatttcagtagctagagcactgtgcagtc

SEQ ID NO: 8233 - DNA, 80 bp, synthetic construct
  source 1..80: mol_type = other DNA
actcttcctccatgaataaactaaagtattacatcatcttacccctagcagagtgactcatcttgcaatagaactccgta

SEQ ID NO: 8234 - DNA, 80 bp, synthetic construct
  source 1..80: mol_type = other DNA
aaaatcaaacttacagggcagcatccaagagatttaaaagaccaagtgctggcatttgcttccaatttaggcagagtgtg

SEQ ID NO: 8235 - DNA, 80 bp, synthetic construct
  source 1..80: mol_type = other DNA
aaagctccaagaacaagacccagcaaatagtaaatgttcaatgagggttggcttcagttattgctaacagttgagttctt

SEQ ID NO: 8236 - DNA, 80 bp, synthetic construct
  source 1..80: mol_type = other DNA
tatttccccagcagagggataactggatcatatggtagtttaattttccattttttgaggaacccccatactgttctcca

SEQ ID NO: 8237 - DNA, 80 bp, synthetic construct
  source 1..80: mol_type = other DNA
gatctctcatttattgagtaaaagttattcctaggtatttatttcatgtgtagcaatagtaaatgagactactttctttt

SEQ ID NO: 8238 - DNA, 80 bp, synthetic construct
  source 1..80: mol_type = other DNA
ggtgtgatactagctgtgggtctgtttatgtggcttttattttgtttatgaatgttccttctatacccagtttttatcat

SEQ ID NO: 8239 - DNA, 80 bp, synthetic construct
  source 1..80: mol_type = other DNA
tgagttaaatatgcttggtgtcccacaacattctcgtacttgaatactgatatctttctttaggcttgggaaattctgtg

SEQ ID NO: 8240 - DNA, 80 bp, synthetic construct
  source 1..80: mol_type = other DNA
gagagttccctaggctccagtcatcagagattttaaggcaaaggctacacatattctataattaaaccagagatagatgg

SEQ ID NO: 8241 - DNA, 80 bp, synthetic construct
  source 1..80: mol_type = other DNA
gctcctcaagagttgggaatgatgagggcatgtactgtgactggcacacagaatgctctaatacaaattaattgatggat

SEQ ID NO: 8242 - DNA, 80 bp, synthetic construct
  source 1..80: mol_type = other DNA
aactttcaaatatttctctaagctttctctttcccgttctcaagactagaagagtgagctgaatgagaatgactggcaag

SEQ ID NO: 8243 - DNA, 80 bp, synthetic construct
  source 1..80: mol_type = other DNA
gttctaccccagggtaaacaatgtactttttagggtcatgaagtggttctgaggacccactgacaagtatcaaaagatcc

SEQ ID NO: 8244 - DNA, 80 bp, synthetic construct
  source 1..80: mol_type = other DNA
ctttagaatcatccccgacttttcgtcttacacccatgttcaatctgttaggaaatctcacaacagattcctacttatca

SEQ ID NO: 8245 - DNA, 80 bp, synthetic construct
  source 1..80: mol_type = other DNA
aaggcccctctgaggataccatggaggaaacattgtgttgctttaagaaagtggtttgggttaaagacctgccaaacaat

SEQ ID NO: 8246 - DNA, 80 bp, synthetic construct
  source 1..80: mol_type = other DNA
aatatcaaactccttagtacaggaagagaagatagttgatatgaaaaaatttctcccatcaccaccaacacaggacattt

SEQ ID NO: 8247 - DNA, 80 bp, synthetic construct
  source 1..80: mol_type = other DNA
catttaagccaaaaagaaaagtaaactgagacagaaaagagcacaatgtgcttaaaaaagactggggaccctcaagtttg

SEQ ID NO: 8248 - DNA, 80 bp, synthetic construct
  source 1..80: mol_type = other DNA
ttaggttccttataaatgctagaacctcatatttcttaatgacatgaagcaagattgatttctagagagaagggggtgag

SEQ ID NO: 8249 - DNA, 80 bp, synthetic construct
  source 1..80: mol_type = other DNA
cagggcaaagaagtagaaggtactgacaggagagaggtttaggtaacattcaccagattagatggcaaacatgacttgga

SEQ ID NO: 8250 - DNA, 80 bp, synthetic construct
  source 1..80: mol_type = other DNA
agaatgaacactgtggcaagagcagagtgagagggaatatttgtctgcagtaaagtcagaaataacagaggtcagatatg

SEQ ID NO: 8251 - DNA, 80 bp, synthetic construct
  source 1..80: mol_type = other DNA
aaatggctttgtggaactataggaatgtccacatcatctctgactcctgtgataaggggttgaggaacttaactttacag

SEQ ID NO: 8252 - DNA, 80 bp, synthetic construct
  source 1..80: mol_type = other DNA
acttatgtccctatatgaagattatgtcacacaataaacatagggtatttaacaaatgcctggtacaagggaaacactta

SEQ ID NO: 8253 - DNA, 80 bp, synthetic construct
  source 1..80: mol_type = other DNA
tgaaattttggtgcatgctgggtaggtgcctacatgatcagttcctaataaaatccttgggcactgagtctctaatgagc

SEQ ID NO: 8254 - DNA, 80 bp, synthetic construct
  source 1..80: mol_type = other DNA
gtctcaaagtgacagcactgaaatcctggggataaatacaactttaacctaaacgcttctttccatacaagaaagtaaca

SEQ ID NO: 8255 - DNA, 80 bp, synthetic construct
  source 1..80: mol_type = other DNA
tgacctaaaaaacctgccaaatttcagagccattaaagacagcattctatgtgattggtttcctctatgcagatgggaga

SEQ ID NO: 8256 - DNA, 80 bp, synthetic construct
  source 1..80: mol_type = other DNA
cccagatattattcttaatccttccctttctagtgaagagaagtggcaattagatgctgggcataactagcctcagaaga

SEQ ID NO: 8257 - DNA, 80 bp, synthetic construct
  source 1..80: mol_type = other DNA
aagtctgttccctgaccaccaaactataaggtgcaacctcagatttctgagatactgcatcgcatcacattaaaatgcac

SEQ ID NO: 8258 - DNA, 80 bp, synthetic construct
  source 1..80: mol_type = other DNA
gaatgtcccacatcttgggtatacctgtatcaaactgaatacaaatgggaggtgcaataaatgtaaaatacacatcaaac

SEQ ID NO: 8259 - DNA, 80 bp, synthetic construct
  source 1..80: mol_type = other DNA
gatactccaggctcactttctatttttcctgtcccagacctggctgaaattagctactgaggggttcatttcttttaggg

SEQ ID NO: 8260 - DNA, 80 bp, synthetic construct
  source 1..80: mol_type = other DNA
aaaagaaagaacaaaaaagacagggaaaatgcatatgctgtgctccactcagccaacaaacttctgctctaagcagggat

SEQ ID NO: 8261 - DNA, 80 bp, synthetic construct
  source 1..80: mol_type = other DNA
ccaagacgtgaaattttggaagaagatactccgactttagtggaaagacctaaaggaaacgaacagcggcctctgcttct

SEQ ID NO: 8262 - DNA, 80 bp, synthetic construct
  source 1..80: mol_type = other DNA
ggaaaagtacgtgcaatctgcacaattcaaaattgtaaagcaatgctaactcacatcagagcttttcttacttcttatga

SEQ ID NO: 8263 - DNA, 80 bp, synthetic construct
  source 1..80: mol_type = other DNA
acctaaaacaaactagctcttgctactttcaacagtccttggtttcttgaaagacaccagtcttgcatttgtgccaccac

SEQ ID NO: 8264 - DNA, 80 bp, synthetic construct
  source 1..80: mol_type = other DNA
accatctctgctgattattatgcataggtttgaacgggttacttaactctgctatcccacagttacctttttggtaaaga

SEQ ID NO: 8265 - DNA, 80 bp, synthetic construct
  source 1..80: mol_type = other DNA
cctgcattgaaaaaaaaatccagattccgaaggtcaataggatcattttcagaggtcgtttgtcttgccatcatttagcc

SEQ ID NO: 8266 - DNA, 80 bp, synthetic construct
  source 1..80: mol_type = other DNA
agccaccacgcccagcctcctctatcaacttctaagatctttaaaactccattagagaatcatctctctgagtaagtcac

SEQ ID NO: 8267 - DNA, 80 bp, synthetic construct
  source 1..80: mol_type = other DNA
ctatgctaatatgcaaggacaaaaggcaggggaaaattataatagcataatattcactatatcaagcaaattaattggtg

SEQ ID NO: 8268 - DNA, 80 bp, synthetic construct
  source 1..80: mol_type = other DNA
ttttttttttctttacttaatttgtgtgtgtgtgagacagggtcttgctctgtcaccaaggttgaagcacagtggcgcaa

SEQ ID NO: 8269 - DNA, 80 bp, synthetic construct
  source 1..80: mol_type = other DNA
gattattcctcagggaaattcctttgacattcaacacatatttggttggaacaatcctactatgtacctatttcctcatt

SEQ ID NO: 8270 - DNA, 80 bp, synthetic construct
  source 1..80: mol_type = other DNA
tgtttgagcttgcaagagaatgtagaggtcatcttatccacttccttcactactctgagtctctgaaatgccaaagaact

SEQ ID NO: 8271 - DNA, 80 bp, synthetic construct
  source 1..80: mol_type = other DNA
acatactaccacacctggccttttttttttttttttttttttttttcagagatagagtctgcctgtgtagcccaggctgg

SEQ ID NO: 8272 - DNA, 80 bp, synthetic construct
  source 1..80: mol_type = other DNA
gcccattaggatgtttttcagcccttgctctcctcccttcttccctcctttttaggttccaagtctctactgttttcatc

SEQ ID NO: 8273 - DNA, 80 bp, synthetic construct
  source 1..80: mol_type = other DNA
ttatgattatcttcattttaaagaagagggaactaagattcaatgagttgcaaagtgagtggcaggactgatttgtctga

SEQ ID NO: 8274 - DNA, 80 bp, synthetic construct
  source 1..80: mol_type = other DNA
tttttttttttaatctattgtaagggggattgggttcttgatttgattctcagcttggtcattggtgcatagcagtgcta

SEQ ID NO: 8275 - DNA, 80 bp, synthetic construct
  source 1..80: mol_type = other DNA
gagaccctgtctctaaagaaaaattaacaaattagccagatgtggtggcatgcacctgtattcttagctactagggatgc

SEQ ID NO: 8276 - DNA, 80 bp, synthetic construct
  source 1..80: mol_type = other DNA
ctacactatacattcacaaaggaaggagctctgtctatcttgtccacttctataatccccaaaagcctctacacagagta

SEQ ID NO: 8277 - DNA, 80 bp, synthetic construct
  source 1..80: mol_type = other DNA
tataaagcgtttgttataagactatgaagaaggggaaatatgtgataagaagtgatggatgttttgtgcaatctggagct

SEQ ID NO: 8278 - DNA, 80 bp, synthetic construct
  source 1..80: mol_type = other DNA
tgggagtgggatacaagttgatttgggttatatattctatgtagcccatgaaattagagttcttcctgagcctgcaatct

SEQ ID NO: 8279 - DNA, 80 bp, synthetic construct
  source 1..80: mol_type = other DNA
gttgacattatcttctgtaggaatagtgcctcctggagtcctgccccaacttcttttatatgttcttctctcctttggaa

SEQ ID NO: 8280 - DNA, 80 bp, synthetic construct
  source 1..80: mol_type = other DNA
ttgaatcatgaaatttgatagatggaggaagccatatgcaatgggcttcacagcaacactcagtcaaaagccagccggaa

SEQ ID NO: 8281 - DNA, 80 bp, synthetic construct
  source 1..80: mol_type = other DNA
ttggttgacacaggtaaatatacttggccaaatttatgagttgaagattgctgctgtccaatttttgaacactaagcaga

SEQ ID NO: 8282 - DNA, 80 bp, synthetic construct
  source 1..80: mol_type = other DNA
tgagctagtgcctagaaaaccaacagaatcataacaaaaaatgggtaaacacttttataatctaagcacagaaaatcttt

SEQ ID NO: 8283 - DNA, 80 bp, synthetic construct
  source 1..80: mol_type = other DNA
aatactagcattagataagtattgactgtttggaaaaattaggctctttcaccaattgactcttacacaaagataactct

SEQ ID NO: 8284 - DNA, 80 bp, synthetic construct
  source 1..80: mol_type = other DNA
ttggtcagtgtgtaaaatccttcttgattcttaagaactatgtgtacagtatgggagttttgtgtttaagccttatctgg

SEQ ID NO: 8285 - DNA, 80 bp, synthetic construct
  source 1..80: mol_type = other DNA
ctgcactcccttccatgatgctctctggaacttttgctctatgaccaatactaccttgcattctccaattctttggaatg

SEQ ID NO: 8286 - DNA, 80 bp, synthetic construct
  source 1..80: mol_type = other DNA
cacttgtaattttgtctgtttcgatgagaagaaggaagttgggaaaacggtgaatgggtatgttctgcccattcggttct

SEQ ID NO: 8287 - DNA, 80 bp, synthetic construct
  source 1..80: mol_type = other DNA
tcacagtgaaaataacatgaacatgtactggaggctaggaagccaattttgaggatattaacatctcacttttctcgttc

SEQ ID NO: 8288 - DNA, 80 bp, synthetic construct
  source 1..80: mol_type = other DNA
tatatatagagagagagagagagagagagatggagtctcattctgtcgcccaggctgagacatatatatatatatatata

SEQ ID NO: 8289 - DNA, 80 bp, synthetic construct
  source 1..80: mol_type = other DNA
acgtgcgttgttaaaacattcaagagtaacagtatgccctgcattaacagggataatatataagaaaaatagagatagcc

SEQ ID NO: 8290 - DNA, 80 bp, synthetic construct
  source 1..80: mol_type = other DNA
ctcgggccattgtgttgctgtttattagcccctgggagggcgtcaggacaaaaggaaccctcctcccttcttagtactta

SEQ ID NO: 8291 - DNA, 80 bp, synthetic construct
  source 1..80: mol_type = other DNA
gactttgtgtcagttccagtgctgaaggtactggagggtagagcttggggcggggctggaggaggatttgttttgaatgt

SEQ ID NO: 8292 - DNA, 80 bp, synthetic construct
  source 1..80: mol_type = other DNA
gaacttctctgagccattaagttgttttaaaattactttcctccatcagactcctaatcatcacctagtgatattcctct

SEQ ID NO: 8293 - DNA, 80 bp, synthetic construct
  source 1..80: mol_type = other DNA
tccttttgcttctccatttttgtcttggctggctttaggtcatgtaatgatcatgtgtgcccttatcagagacagttgaa

SEQ ID NO: 8294 - DNA, 80 bp, synthetic construct
  source 1..80: mol_type = other DNA
ctaggttgactttatcattaactagtgtgcacttttacaagccatgcaacctttccatttgttcatttttgttgtctgta

SEQ ID NO: 8295 - DNA, 80 bp, synthetic construct
  source 1..80: mol_type = other DNA
gctaggagggactaataagaggaatataaggagtagtgtgataagcacggtggagacaagtgatgatttcacaattcaag

SEQ ID NO: 8296 - DNA, 80 bp, synthetic construct
  source 1..80: mol_type = other DNA
cagttcttttctttgtacttcccattctgacttgcagattataattggttgtgacctgggaaagtatataactaaactta

SEQ ID NO: 8297 - DNA, 80 bp, synthetic construct
  source 1..80: mol_type = other DNA
aatccagtgatttactttttttgttactatttggttgaatatgcttgagtatgcctcataagactgttcataccttggct

SEQ ID NO: 8298 - DNA, 80 bp, synthetic construct
  source 1..80: mol_type = other DNA
tgaaggtcatcataagaagcagtcacagagggtcttgaagttattgtcaaggacattattatgtcaaaaggggcttcttt

SEQ ID NO: 8299 - DNA, 80 bp, synthetic construct
  source 1..80: mol_type = other DNA
ttgttctgtatcctaactaatgcttgacattttctttcattttagccaatcttgtatgtttgttggggtgtcacatggtg

SEQ ID NO: 8300 - DNA, 80 bp, synthetic construct
  source 1..80: mol_type = other DNA
aactatatcaaccatactttctccactacactcatgcatcacatttatcttaggtgactggataatttgtggtctgtttc

SEQ ID NO: 8301 - DNA, 80 bp, synthetic construct
  source 1..80: mol_type = other DNA
tcttttgttgttttcatagtgaattatgttgacttttgcatgttaaaccactctggaataaaaaaacaatcagttgtgat

SEQ ID NO: 8302 - DNA, 80 bp, synthetic construct
  source 1..80: mol_type = other DNA
tctattgtctaactttcaaacagttgaaggttttttagtaaccttttatttgttgatttcgaatgaattctgttgtgcag

SEQ ID NO: 8303 - DNA, 80 bp, synthetic construct
  source 1..80: mol_type = other DNA
tacagcttaatgcaaattgtaacttttactacttctccaatagtgttagaaccatttattcccccacatcctaaaacata

SEQ ID NO: 8304 - DNA, 80 bp, synthetic construct
  source 1..80: mol_type = other DNA
ccacttaattttagaaagatatcgccaacagtttactagtacccatggccaatagtgtaggttaatgaccactttgcttt

SEQ ID NO: 8305 - DNA, 80 bp, synthetic construct
  source 1..80: mol_type = other DNA
ttgtctgtgatacaagtcagctgatgtgtgtgtttgcatagacagaaactgggacctttcattttcgtagcattctagtg

SEQ ID NO: 8306 - DNA, 80 bp, synthetic construct
  source 1..80: mol_type = other DNA
gattacaggtgtgagccaccacacctggccctgctttcttcctttatttttaagttgatttttacattgcgtaaaatttt

SEQ ID NO: 8307 - DNA, 80 bp, synthetic construct
  source 1..80: mol_type = other DNA
acgcccggccaagaattcgcaagttgcataatatttgaagaaagaagggaaattactttttttgtttgtttccgctcttt

SEQ ID NO: 8308 - DNA, 80 bp, synthetic construct
  source 1..80: mol_type = other DNA
cagttttggtaaccatctcatttctcttgctatgatgacaaagggaaaaaggtagtccatgctttcttaagttttaaggt

SEQ ID NO: 8309 - DNA, 80 bp, synthetic construct
  source 1..80: mol_type = other DNA
tgagtgggaagaatcggttagctgaaagtgaagcatagactctaagggattgatttgccttctgaaattttgggttgtgt

SEQ ID NO: 8310 - DNA, 80 bp, synthetic construct
  source 1..80: mol_type = other DNA
ccagggattggcagcattattcttgtgtattgtcactgagatggacgtaggaaataaaagttttcaagtcccttttaaat

SEQ ID NO: 8311 - DNA, 80 bp, synthetic construct
  source 1..80: mol_type = other DNA
aatgcaggcagttcttactttgcatggttccagtatttcataatttagttaagtaacatcagtcctacaataacgtggtt

SEQ ID NO: 8312 - DNA, 80 bp, synthetic construct
  source 1..80: mol_type = other DNA
agaagaatgaggcaagcactgttcagattactcttcataagtttcttacagagaagtaaaacacttgaattctcagtgtt

SEQ ID NO: 8313 - DNA, 80 bp, synthetic construct
  source 1..80: mol_type = other DNA
atgtttgtttgtgctaggaatatgcaggtggataattctccattgagaagatgacatttgagttgagacttggaaaatac

SEQ ID NO: 8314 - DNA, 80 bp, synthetic construct
  source 1..80: mol_type = other DNA
gctccctcaggcctcttttataagagtactaattctgtacatgaaagctctgccctcattatccaatcacctcccaaagg

SEQ ID NO: 8315 - DNA, 80 bp, synthetic construct
  source 1..80: mol_type = other DNA
tcttaaacttaggtatctttgtaaatgttttagcaggtagtaggttaaaaaagaggtatgtaagagacatgcttgtcttt

SEQ ID NO: 8316 - DNA, 80 bp, synthetic construct
  source 1..80: mol_type = other DNA
aatagaaaactatcaatagcaaatgaacagtaaggctatgttgagactcccatgccaagtggttgggtagactcactact

SEQ ID NO: 8317 - DNA, 80 bp, synthetic construct
  source 1..80: mol_type = other DNA
atacttctctccaccctaaccctaccactctaataaaagccactgcaaaagctggataaatatgtagaacattttgttga

SEQ ID NO: 8318 - DNA, 80 bp, synthetic construct
  source 1..80: mol_type = other DNA
aagtgccaaaacacacactagggaaaggacagtctctttaataaagggtgttgagacaactggttagccacatgtagaag

SEQ ID NO: 8319 - DNA, 80 bp, synthetic construct
  source 1..80: mol_type = other DNA
ataaaaatagaacctccatgtaaaccagcaatcccacttgtaggtacatagccaaggaaatgaaatcagtgtctcgaaga

SEQ ID NO: 8320 - DNA, 80 bp, synthetic construct
  source 1..80: mol_type = other DNA
accagtgaagctagacaatacggtatgcattagtagtattaagaaatcttaggaattggttggttgtgggtaggagaaag

SEQ ID NO: 8321 - DNA, 80 bp, synthetic construct
  source 1..80: mol_type = other DNA
taggaagacttgtacctctgggaagatgaacatgacatactttcccctatttctctcactaagtacaataataaaccctg

SEQ ID NO: 8322 - DNA, 80 bp, synthetic construct
  source 1..80: mol_type = other DNA
aaaatggaaatttggtgctgaaaaaatatgaaactgaaaaagttcagtggatggacccaacaggaaaatgggagttacag

SEQ ID NO: 8323 - DNA, 80 bp, synthetic construct
  source 1..80: mol_type = other DNA
aacaaaactttggaataacaggaagaaaggatacagtaaacaagaatatgggtaaatacattaggctttccattttactt

SEQ ID NO: 8324 - DNA, 80 bp, synthetic construct
  source 1..80: mol_type = other DNA
taaatattcttaggataaatccaacttgagcctcatatattgttttaatctactttgccagatttaggatttcggtttga

SEQ ID NO: 8325 - DNA, 80 bp, synthetic construct
  source 1..80: mol_type = other DNA
gtacatagtaggtgtatatattatggggtacatgagatttttttacaggcacacaatgtgtaataatcacatcagcataa

SEQ ID NO: 8326 - DNA, 80 bp, synthetic construct
  source 1..80: mol_type = other DNA
acattcccaccaacagtgtataagagttcccttttctccacaccctcaccagtattcattattgcttgtcttttggataa

SEQ ID NO: 8327 - DNA, 80 bp, synthetic construct
  source 1..80: mol_type = other DNA
cattgaatatgtatactgctttgagtagtatgggcattttaacaatagtcttccaattcactaacatggaatatctttca

SEQ ID NO: 8328 - DNA, 80 bp, synthetic construct
  source 1..80: mol_type = other DNA
ctctctggtgactctttgtatgatcctactggatgaaggccccacccttatacctcatttcaccttaattaactccttat

SEQ ID NO: 8329 - DNA, 80 bp, synthetic construct
  source 1..80: mol_type = other DNA
gaaccatggaaatttaaaagtatgatgtctgaaataaaacattaaccagatgagcctctaaagcagaatggagatgatag

SEQ ID NO: 8330 - DNA, 80 bp, synthetic construct
  source 1..80: mol_type = other DNA
tcactctcaagtagacctcagagtttgttgttctcatccttctttccatgtgtagtcagtgtttagctcccacttacaag

SEQ ID NO: 8331 - DNA, 80 bp, synthetic construct
  source 1..80: mol_type = other DNA
atttttttcccattctgtaggttgtctctttactctgtggatagtttcctttgctgcacagaagctcttaagtttaatta

SEQ ID NO: 8332 - DNA, 80 bp, synthetic construct
  source 1..80: mol_type = other DNA
gggtttgtcatagatggctcttattattttgaagtatgttccttcaatacctagttcactgagagtttttaacatgaagc

SEQ ID NO: 8333 - DNA, 80 bp, synthetic construct
  source 1..80: mol_type = other DNA
atttgagatctctctaactttttgatgtgggcatttagtgcaatgaagttctctcttaacactgtcttagctgtgtctca

SEQ ID NO: 8334 - DNA, 80 bp, synthetic construct
  source 1..80: mol_type = other DNA
cccttcttttttctgttttccatttgcttagtagatttttctttatctctttattttgagcctatgagtgtcattacatg

SEQ ID NO: 8335 - DNA, 80 bp, synthetic construct
  source 1..80: mol_type = other DNA
aaaaactcttgttggggaatgggtgtggtcatttggatggcatacaatactctgaacatttgagttactggagctcttgc

SEQ ID NO: 8336 - DNA, 80 bp, synthetic construct
  source 1..80: mol_type = other DNA
ttaacactctggccaattttccatagggctgctgtggtatgtttgctccagtacctggttgcctcggattttctagtacc

SEQ ID NO: 8337 - DNA, 80 bp, synthetic construct
  source 1..80: mol_type = other DNA
aggcagggatggctagaggccccacttgggaggttccacccataggaggaacaggatcaggtacctgcttaaagtagcag

SEQ ID NO: 8338 - DNA, 80 bp, synthetic construct
  source 1..80: mol_type = other DNA
ctaatgactatatatgtcttagggaatggtcatcttgtatagtattttgcaggattctctgcatatcttgaatttgaatg

SEQ ID NO: 8339 - DNA, 80 bp, synthetic construct
  source 1..80: mol_type = other DNA
ctggtatcattgtgtgccttcatgtcggtggcagtgtatctctgtgcccacacatcagtgggggaataatggcagggtac

SEQ ID NO: 8340 - DNA, 80 bp, synthetic construct
  source 1..80: mol_type = other DNA
atagaaaatggaaaagtttcctaaaatttatatcaaacctccagtcttgagtagccaaagcaaccctgagcaaaagaaac

SEQ ID NO: 8341 - DNA, 80 bp, synthetic construct
  source 1..80: mol_type = other DNA
ggactttgagatctacctgggcaacatagtgagattcccatctctacaaaaagttaaaaaattagccagacgtggtggca

SEQ ID NO: 8342 - DNA, 80 bp, synthetic construct
  source 1..80: mol_type = other DNA
tctatgtttattgcaggatttttaacagtagccaagatattaagacaacctaagtagctgtcaacagaaggatggattaa

SEQ ID NO: 8343 - DNA, 80 bp, synthetic construct
  source 1..80: mol_type = other DNA
atatagggaacaacagttcaagtgaatgcagggttttcaacaggaaccatggaggacagatgacagtgaaatagcatctt

SEQ ID NO: 8344 - DNA, 80 bp, synthetic construct
  source 1..80: mol_type = other DNA
gattaatttgccaagaagacagaacaaaaccaaagtatgtatgcagctgataacagagtctaaaaagcaaaaggtaacag

SEQ ID NO: 8345 - DNA, 80 bp, synthetic construct
  source 1..80: mol_type = other DNA
gctaggtctcactatgttgccctggctggtctcgaactactgggctcaagtggtcctctcacttcagcctttcaaagtgc

SEQ ID NO: 8346 - DNA, 80 bp, synthetic construct
  source 1..80: mol_type = other DNA
aatcccagcacttagggaggccaaggcgagtggatcaccttaggtcaggagtttaaggccagcctgactaacatggtgaa

SEQ ID NO: 8347 - DNA, 80 bp, synthetic construct
  source 1..80: mol_type = other DNA
ggggtggatatgacaatgtcttaagacaacaatgggctgggcacagtggcttacagctataatcccagcacttgggagcc

SEQ ID NO: 8348 - DNA, 80 bp, synthetic construct
  source 1..80: mol_type = other DNA
tcattgtctatggaggctagagccttaagaaatatactttttcaatagtaagacttgggtctaaattacttcctgatccc

SEQ ID NO: 8349 - DNA, 80 bp, synthetic construct
  source 1..80: mol_type = other DNA
tctttgtattcaccacttgcctaactggcacaagaggcctaggttttggctatctcagtttttgacatgccttcctcaat

SEQ ID NO: 8350 - DNA, 80 bp, synthetic construct
  source 1..80: mol_type = other DNA
cttccttaaagggcatctacagaagtttacaacagggtttctcaacattgatactgttgatattctggatgggtaattct

SEQ ID NO: 8351 - DNA, 80 bp, synthetic construct
  source 1..80: mol_type = other DNA
tcatcaaaattaaaagcttttactccctgaaagacactgttaatgataagacaaggcatagaccaggaaaaaatatttgc

SEQ ID NO: 8352 - DNA, 80 bp, synthetic construct
  source 1..80: mol_type = other DNA
tctctttacctcattcattctcttattcaacaacaaatttaggccctgtgctgggggcccaggatatgagattaataagg

SEQ ID NO: 8353 - DNA, 80 bp, synthetic construct
  source 1..80: mol_type = other DNA
aaaagctgagtataccagacaagtatagactgtcaattagaaatgtagcacttattaaagaaaaaatgattaaatgtaag

SEQ ID NO: 8354 - DNA, 80 bp, synthetic construct
  source 1..80: mol_type = other DNA
ttagatgataaacagttacctccccatgaggccatcttttgaagtacagtgtaaacactgttagaaacaatggataatca

SEQ ID NO: 8355 - DNA, 80 bp, synthetic construct
  source 1..80: mol_type = other DNA
gcttctgtttgagtcatattattgtagcattcttaattactgtgtttgttataggtatttctgggtgaacaaaatcttat

SEQ ID NO: 8356 - DNA, 80 bp, synthetic construct
  source 1..80: mol_type = other DNA
aatgagacatttccagtttgaccttgtgatttttgcaaattagcatagagcaatttgcagtacttgtaatgagcaagtca

SEQ ID NO: 8357 - DNA, 80 bp, synthetic construct
  source 1..80: mol_type = other DNA
ttcttttctttaaagttatgacttttaaacttcaaaagatttgcacttgataaacttcaaaagattagcacaatttaggt

SEQ ID NO: 8358 - DNA, 80 bp, synthetic construct
  source 1..80: mol_type = other DNA
acaaaaggttttgtttccatctcaaataagaaccccttctacaaacaagccctgggccactttgaaataatgtgagcttt

SEQ ID NO: 8359 - DNA, 80 bp, synthetic construct
  source 1..80: mol_type = other DNA
acataaaaacattagttgagcctggtggcacgcacctgtagtcttagctactcacaaggcgaaggcaggaggatcgcttg

SEQ ID NO: 8360 - DNA, 80 bp, synthetic construct
  source 1..80: mol_type = other DNA
tgagtgattttttttcctaaccaatcttataagttctgaggtgcatcgccagcaagttcagtcaagctgttgctcttctt

SEQ ID NO: 8361 - DNA, 80 bp, synthetic construct
  source 1..80: mol_type = other DNA
atattacgtgtgaagtagcagctcagggaagctgtatgaatattccagtctcagtaaaacatagatgtggcaccataaac

SEQ ID NO: 8362 - DNA, 80 bp, synthetic construct
  source 1..80: mol_type = other DNA
tgtcctgtaagtagcatgtagaactagcaatgtaagtacaattgagtatctaatgtagattctgacttcctcagattcaa

SEQ ID NO: 8363 - DNA, 80 bp, synthetic construct
  source 1..80: mol_type = other DNA
tggtcagtaacagattgtcttttagtctagcaaacttttcaccatttgtttctgtgcctaaagatgaagagagttggatt

SEQ ID NO: 8364 - DNA, 80 bp, synthetic construct
  source 1..80: mol_type = other DNA
aaccatgtcctatgccaaagtcctggacccttgtacatttccttaaaacggaaaatcttcttgttcatggacaacctatg

SEQ ID NO: 8365 - DNA, 80 bp, synthetic construct
  source 1..80: mol_type = other DNA
ttttcaatttacagaagaggcccagactcataaagtgaacctaagtcattttttcaagatcccatagctagaaagtgatc

SEQ ID NO: 8366 - DNA, 80 bp, synthetic construct
  source 1..80: mol_type = other DNA
ttctggaagaggcctttaaaacaccctgaataatgaatagaagttacctatcatgacttgtaggatttctgttggttgat

SEQ ID NO: 8367 - DNA, 80 bp, synthetic construct
  source 1..80: mol_type = other DNA
gaagagagcaaacaaatgacagttaaaggggagctttatagatgagaatggttgggtaggtggttatgcattattagtga

SEQ ID NO: 8368 - DNA, 80 bp, synthetic construct
  source 1..80: mol_type = other DNA
gcttctgggactatatcagagtggcttgccggaaagtttcacagaattgtatctgcagcattgaaaatatggaaaatgtc

SEQ ID NO: 8369 - DNA, 80 bp, synthetic construct
  source 1..80: mol_type = other DNA
aaagcttttaagtaaaaactagaattttagaaacttgtgttcaccatcttaagcttcatagcttcccaatatagaaaagc

SEQ ID NO: 8370 - DNA, 80 bp, synthetic construct
  source 1..80: mol_type = other DNA
cccgaagtgctggattacaggcgttgagtcaccatgaccaactcattatttttgaattacctaatatttaagtttccagt

SEQ ID NO: 8371 - DNA, 80 bp, synthetic construct
  source 1..80: mol_type = other DNA
gatttttgtcacctttttgagactataactataaagttcacttgttaaagccactgctccctcctgccaatcttcaacca

SEQ ID NO: 8372 - DNA, 80 bp, synthetic construct
  source 1..80: mol_type = other DNA
agcctcagttttccttttatgttttctttatggcttaagaattatatctacatttcttttggctaaggtttaggctaagg

SEQ ID NO: 8373 - DNA, 80 bp, synthetic construct
  source 1..80: mol_type = other DNA
tatctgtcctgataccacttagattcatattgtagaagcttgtcaccatggacaatctcatacttttgtctaggttaaga

SEQ ID NO: 8374 - DNA, 80 bp, synthetic construct
  source 1..80: mol_type = other DNA
acatcagccatccacatatccatgcatctttccatccaataaatttgctgtgcaaatactgaccaggctaagcaagctga

SEQ ID NO: 8375 - DNA, 80 bp, synthetic construct
  source 1..80: mol_type = other DNA
taaacaaagctgaaagcagcagggaagaggtaaaactgctgattgatgatttcacagtctagttctggagagatagaggt

SEQ ID NO: 8376 - DNA, 80 bp, synthetic construct
  source 1..80: mol_type = other DNA
gaatagaggctggaaattggttaccaaaactttcatctcaagaagctatgaaaaaagaaatacattaaagtcaaagtaga

SEQ ID NO: 8377 - DNA, 80 bp, synthetic construct
  source 1..80: mol_type = other DNA
ctgtttttcatttgtgcataaagtagggatagtattgtaacctaactcacacaattattgggaggattacttatcttctt

SEQ ID NO: 8378 - DNA, 80 bp, synthetic construct
  source 1..80: mol_type = other DNA
ctgccattgcagtgtttcaattttctatgtatttagtcttcatgaagttttttagagatttgtgaaagagttgagtgaaa

SEQ ID NO: 8379 - DNA, 80 bp, synthetic construct
  source 1..80: mol_type = other DNA
tttttatatttgattctttcttcttccttttagggtagagcctggatcagagtagcactcatggaaaaacatttatctga

SEQ ID NO: 8380 - DNA, 80 bp, synthetic construct
  source 1..80: mol_type = other DNA
ttgcaaatttagtttctcaagtgctgtatcacatttcagatgtcccattgccacatgtagctaatggtaacccaattgga

SEQ ID NO: 8381 - DNA, 80 bp, synthetic construct
  source 1..80: mol_type = other DNA
ggaaatgctttctgccttgttcttaagtgttaaccatgctttttcatagaaaggaaatgattcagctctaaaaaagtaca

SEQ ID NO: 8382 - DNA, 80 bp, synthetic construct
  source 1..80: mol_type = other DNA
aaatacatcaagtgtcatttcaaaaataacccaggggtaaggaaggaagtagtgactgggagaatggctgagtaggcttt

SEQ ID NO: 8383 - DNA, 80 bp, synthetic construct
  source 1..80: mol_type = other DNA
gttccaaaccctcagccaagattcctgagatattataccactagacaggaatatcagtaagttctattaactttaatgtg

SEQ ID NO: 8384 - DNA, 80 bp, synthetic construct
  source 1..80: mol_type = other DNA
caatccaatgtgatagacattgtacacacttaaaagatgaggggactaacgtttaaggaacttgaccaggtttacagagt

SEQ ID NO: 8385 - DNA, 80 bp, synthetic construct
  source 1..80: mol_type = other DNA
aaaaaaaaaaaaaaaggaatatcttcctcctttgtctactgaggatgaagcctcatcttccgttaccatgaagcccatgg

SEQ ID NO: 8386 - DNA, 80 bp, synthetic construct
  source 1..80: mol_type = other DNA
agaaacattgctgcatgttaaagacaatttttactgcagcagaatactgaggggttgtgccacatgttcacatgcattcg

SEQ ID NO: 8387 - DNA, 80 bp, synthetic construct
  source 1..80: mol_type = other DNA
ctttaaaggatgactgaggaaaatagcaaatgactccccagccttgtgttaaccaaggctaacaggaaattctcattcct

SEQ ID NO: 8388 - DNA, 80 bp, synthetic construct
  source 1..80: mol_type = other DNA
caatggagatgccaggaagacctgctgaagattgacaagagaactaattgccaccacaagcatactggtatatgcataac

SEQ ID NO: 8389 - DNA, 80 bp, synthetic construct
  source 1..80: mol_type = other DNA
atctattccagtagatggccttaagtaaagcagagccccatttacagaatcctcaaaacaggttttacatgacaagtgaa

SEQ ID NO: 8390 - DNA, 80 bp, synthetic construct
  source 1..80: mol_type = other DNA
caagaacaacaatcaggagtctggagatctagatcctaaccctgattgtttaggacacacctattatttgtcaaatggaa

SEQ ID NO: 8391 - DNA, 80 bp, synthetic construct
  source 1..80: mol_type = other DNA
aaaactccatctttctgtgtgccggtagtcctagctacccagaggctgaggtaggaggatcactggagcccaggaggttg

SEQ ID NO: 8392 - DNA, 80 bp, synthetic construct
  source 1..80: mol_type = other DNA
agaaaaagacttcttctttcaatgatcatgtcttccagccatacatccctgtcaactaccaaattgtaatctttcctctt

SEQ ID NO: 8393 - DNA, 80 bp, synthetic construct
  source 1..80: mol_type = other DNA
caacatttggattttctgactgtactcaaatctagaaaaactcttttctctggatatcaggtcccaaaggctcaggattt

SEQ ID NO: 8394 - DNA, 80 bp, synthetic construct
  source 1..80: mol_type = other DNA
ttttaactaacaaaaatgccaagtaccattcctaatgtacaaacagaaaagtggtaagctaaataaagtctgtaaagatt

SEQ ID NO: 8395 - DNA, 80 bp, synthetic construct
  source 1..80: mol_type = other DNA
tgcccagccagagcagttttaaaagtatgtacatataattaaaatgagtgaaaaatagccaggcctggtagacatgcagt

SEQ ID NO: 8396 - DNA, 80 bp, synthetic construct
  source 1..80: mol_type = other DNA
ccaccattctactgtctctttcagttccattgtttcagattccacattaagtgagattatgtgacatttctgtgcttagc

SEQ ID NO: 8397 - DNA, 80 bp, synthetic construct
  source 1..80: mol_type = other DNA
ctctggatttttctaccaagagctttaatggccagatttccagtcctcttcaaagttccagttgaggaccaggttactcc

SEQ ID NO: 8398 - DNA, 80 bp, synthetic construct
  source 1..80: mol_type = other DNA
tgttcagaacacaatacagtcgataaaaagtcccctcataaaatgaggtttttaagggtccactgtgactgaaactaggt

SEQ ID NO: 8399 - DNA, 80 bp, synthetic construct
  source 1..80: mol_type = other DNA
aaccttacaacggaaagaaatctgacacatgctacatgaatgagccataaagacaacatgctaaaggaaatgagtcagtt

SEQ ID NO: 8400 - DNA, 80 bp, synthetic construct
  source 1..80: mol_type = other DNA
tatggttacataatcagatctctccattaagataaacactcaatggcttggccaacgtccctgggagaaaataaaacagc

SEQ ID NO: 8401 - DNA, 80 bp, synthetic construct
  source 1..80: mol_type = other DNA
aacaagaaatgggctgggcgtggtggctcatgcctgtaatatcagcaatttgggaggccgagggggcagattgcctgaac

SEQ ID NO: 8402 - DNA, 80 bp, synthetic construct
  source 1..80: mol_type = other DNA
cagctttcaaacatattgacaaaataatcaatcccgtaaccttggcatgcttttataaggtgtgtctgtgttattctttc

SEQ ID NO: 8403 - DNA, 80 bp, synthetic construct
  source 1..80: mol_type = other DNA
tttcagtgccaatgtataatgtttcattggaataaaatgaaagttacctttttttttaagatagggtcttggccaggcac

SEQ ID NO: 8404 - DNA, 80 bp, synthetic construct
  source 1..80: mol_type = other DNA
ttatgccctctccagtattgccacataggcgatttggacaagacatttataaaccattttttgaagcaagataattcaag

SEQ ID NO: 8405 - DNA, 80 bp, synthetic construct
  source 1..80: mol_type = other DNA
tttgattaacagaaagttaatctaacaatgaatagccttgttctgtgaactcaaatttgcttactacatttgtttcacct

SEQ ID NO: 8406 - DNA, 80 bp, synthetic construct
  source 1..80: mol_type = other DNA
ctttatttgttctgctgactggttctatatcccaggtggagtgaagataacaaataattggaagggtgggtagaagataa

SEQ ID NO: 8407 - DNA, 80 bp, synthetic construct
  source 1..80: mol_type = other DNA
aggcaggaggatcatgcgaggccaggaattcaagaccagcctgagcaacgaaacgagaccctgtctctataaaaataaat

SEQ ID NO: 8408 - DNA, 80 bp, synthetic construct
  source 1..80: mol_type = other DNA
agggttattataggcctcacagtgataacctatgaaagaaggcagctcaaaaacacaaacttgatggtcttggaaaacaa

SEQ ID NO: 8409 - DNA, 80 bp, synthetic construct
  source 1..80: mol_type = other DNA
ctggtgcttaacagtacttcctcaaaaatctaaatatagacccaagaaaaaaatccaaaagcccaggtgtgttctgctct

SEQ ID NO: 8410 - DNA, 80 bp, synthetic construct
  source 1..80: mol_type = other DNA
catctaagtcaggtttaggactaaccactctattgaccgatacccactcaagggctaaagctgcaatctatagttaccag

SEQ ID NO: 8411 - DNA, 80 bp, synthetic construct
  source 1..80: mol_type = other DNA
ttaatgaagcattttacagcataaaaaagtcaaccataccagctgattcaaagtatcccaaggcctcctgagcaggcccg

SEQ ID NO: 8412 - DNA, 80 bp, synthetic construct
  source 1..80: mol_type = other DNA
aggctgggatttaatctctggtctaagtccatgaccaaaatagtgctaaagtaccttttcacaggagttatgacttacag

SEQ ID NO: 8413 - DNA, 80 bp, synthetic construct
  source 1..80: mol_type = other DNA
aaagaaaaacccattttctgaagagaaattcaagcctgctacagaaatttgcataagtaatagggaaccaaatgttaatc

SEQ ID NO: 8414 - DNA, 80 bp, synthetic construct
  source 1..80: mol_type = other DNA
ttggatttcggacttgcgtgggacctgtagccccttcgttttggccaatttctcccatttggaacaggtgtatttaccca

SEQ ID NO: 8415 - DNA, 80 bp, synthetic construct
  source 1..80: mol_type = other DNA
gactttcactccaacagaagaggaagaaattactttgatcatttctgaaccccctgccccaagaatatctgggacatagt

SEQ ID NO: 8416 - DNA, 80 bp, synthetic construct
  source 1..80: mol_type = other DNA
cttactgccagcacagcagtctaaagtcaacctgggaagcttgagcttggtggggggaggggcatccaccattactgagg

SEQ ID NO: 8417 - DNA, 80 bp, synthetic construct
  source 1..80: mol_type = other DNA
caatgcaaggaagctaagaacactgaaaaaaggatagaggaattgctaattagaataaccagtttatagaagaacataaa

SEQ ID NO: 8418 - DNA, 80 bp, synthetic construct
  source 1..80: mol_type = other DNA
ttaaaagacacagactagcaaattggataaagagtcaagacccatcggtgtgctgtattcaggagacccatctcacatga

SEQ ID NO: 8419 - DNA, 80 bp, synthetic construct
  source 1..80: mol_type = other DNA
caaaactgcacaactatgactgggcgtggtggctcatgcctgtaatcccagcactttgggaggccgaggcaggcggatca

SEQ ID NO: 8420 - DNA, 80 bp, synthetic construct
  source 1..80: mol_type = other DNA
tcaatgtgaatatcctcaataaactactggcaaactgaatccagcagcatatcaaaaaccttatccaccatgatcaagtc

SEQ ID NO: 8421 - DNA, 80 bp, synthetic construct
  source 1..80: mol_type = other DNA
gtacacaaacaaatggaaaaacatttcatgctcatggataggaagaatcaatatcatgagaatggccatactgcccaaag

SEQ ID NO: 8422 - DNA, 80 bp, synthetic construct
  source 1..80: mol_type = other DNA
cacatgtatttattgcagcactattcacaatagcaaagacttggaaccaacccaaatgcccataatgatagactgaataa

SEQ ID NO: 8423 - DNA, 80 bp, synthetic construct
  source 1..80: mol_type = other DNA
agctgtgccttcacagtctattttccctagatatcctaacaagcaacatagggcaatggctgcctgaaggtaaagaatag

SEQ ID NO: 8424 - DNA, 80 bp, synthetic construct
  source 1..80: mol_type = other DNA
aaattataggaaactgaaacatatagagcaggggtccccaacttctggggaaccaggatgcacagcaggcaagtgagcaa

SEQ ID NO: 8425 - DNA, 80 bp, synthetic construct
  source 1..80: mol_type = other DNA
tgccactttatccagacctaactcttgaatgaccctgttaatccgttcgtttttttcatgattcgtcatagttgttgcaa

SEQ ID NO: 8426 - DNA, 80 bp, synthetic construct
  source 1..80: mol_type = other DNA
ttctcttttcattgtacattacaataaagccccaaaacataaagcaagacaccattggctgatcaagtacagatctccca

SEQ ID NO: 8427 - DNA, 80 bp, synthetic construct
  source 1..80: mol_type = other DNA
tccttgaaataactaacagattcttgtgaaacatctccgttacacttactgctcttaacacagtgtgaaacgaaatacat

SEQ ID NO: 8428 - DNA, 80 bp, synthetic construct
  source 1..80: mol_type = other DNA
ttcagggtggggcctggcttgttcctttcaaaacacaggtatctatgcccattctctccttagaattgataagtaagtta

SEQ ID NO: 8429 - DNA, 80 bp, synthetic construct
  source 1..80: mol_type = other DNA
attacagaaaacaacaacaatgtccagtcataaatgccaagagtttccatttggagcagtggctaattccaactccatcc

SEQ ID NO: 8430 - DNA, 80 bp, synthetic construct
  source 1..80: mol_type = other DNA
actgaggatttacctgtgtcactagcatcttgcacaatgtcctgcactagcaggcattcaaaatttgttgaataaataaa

SEQ ID NO: 8431 - DNA, 80 bp, synthetic construct
  source 1..80: mol_type = other DNA
cagctactcaggaggctgaggtgataggatcacttgagcccaagagattgaggctgcagtgagctatgatcatgccactg

SEQ ID NO: 8432 - DNA, 80 bp, synthetic construct
  source 1..80: mol_type = other DNA
gaaaaaacagtaatgaccatgggaacatgaagagacaaagtgatgagaacaaatgcagtgaaatgttggctgagaacctg

SEQ ID NO: 8433 - DNA, 80 bp, synthetic construct
  source 1..80: mol_type = other DNA
caccaacccctgatgacctttccactaaaatgtgaaagaattgcaagatctgactgcatttttatgagcctagtaaggaa

SEQ ID NO: 8434 - DNA, 80 bp, synthetic construct
  source 1..80: mol_type = other DNA
tttgagagtcaaacatatacctaaaatgtggcccagttatttcactcctagtttagctaaaacaaatgaaagcatgtgtc

SEQ ID NO: 8435 - DNA, 80 bp, synthetic construct
  source 1..80: mol_type = other DNA
aaaaggatggatgagggttagacttgtctggcttgaaaagcatattatgatataagtcaagtgcagggacagactacatg

SEQ ID NO: 8436 - DNA, 80 bp, synthetic construct
  source 1..80: mol_type = other DNA
actatttctgagcagatatttcagcagtctgtcagcactagggagacaaaattttgttggtgttgagtgcctaacagagg

SEQ ID NO: 8437 - DNA, 80 bp, synthetic construct
  source 1..80: mol_type = other DNA
tgagagagaagggaaaatgcagcaaaatgggtacttagacagaatcagtatttgaagaaatactggccagtattttccaa

SEQ ID NO: 8438 - DNA, 80 bp, synthetic construct
  source 1..80: mol_type = other DNA
aaaatacaccaattccaacactagcaatcacttcttctactgccatccccatttgatgttccttcagccactgaggaaaa

SEQ ID NO: 8439 - DNA, 80 bp, synthetic construct
  source 1..80: mol_type = other DNA
aaacaccagtctttccccatggtcagaagctttctggacatgtgtgctgatctcattggattagcatcatctttttatat

SEQ ID NO: 8440 - DNA, 80 bp, synthetic construct
  source 1..80: mol_type = other DNA
atgaaaactgagaagaggaaaaaaaaaaaagtgcacaggtagagcctaaagtcttcagcctgccacctgcccagctggaa

SEQ ID NO: 8441 - DNA, 80 bp, synthetic construct
  source 1..80: mol_type = other DNA
agtggggacatcaaaggttaaggctttgagagggatgaacttttgttaaatcagaaccaaccaagactcatggatgacaa

SEQ ID NO: 8442 - DNA, 80 bp, synthetic construct
  source 1..80: mol_type = other DNA
aagaaagaaaagcaaagaaaaaggagaaagaaggaaggaaggaaggaaggaaggaagaaggaaggaagggagggaggaag

SEQ ID NO: 8443 - DNA, 80 bp, synthetic construct
  source 1..80: mol_type = other DNA
tgaaatttgtgaaaggtaagcacaaatccgaagcaaacctatctaagaacgcagtatgattaacacagctgtagttcaca

SEQ ID NO: 8444 - DNA, 80 bp, synthetic construct
  source 1..80: mol_type = other DNA
cagttttctgacattgtaaagtgtacacagtcctgtaaccactacaatcaagacagatcattcatgttaacccaaagaaa

SEQ ID NO: 8445 - DNA, 80 bp, synthetic construct
  source 1..80: mol_type = other DNA
agaaccctggagaaactgcttagcctctccaagcctgtttctcacctataaaattaattcggccgggcatggtggttcat

SEQ ID NO: 8446 - DNA, 80 bp, synthetic construct
  source 1..80: mol_type = other DNA
cactgaccacaggaaggactttggctttgatctgaatggcactggaaggcacaggaaagttctgagtgaagaaatgatat

SEQ ID NO: 8447 - DNA, 80 bp, synthetic construct
  source 1..80: mol_type = other DNA
tcaatatccctgctcccttccagtttataattcaatcatcggaattgcagtaaaaattatgaacagaggctgggtgcagt

SEQ ID NO: 8448 - DNA, 80 bp, synthetic construct
  source 1..80: mol_type = other DNA
atcagttaaggcaggaacaggccattttcagttcttttgtggtggaatgtcatcagttaaggcaggaaccaaccatctgg

SEQ ID NO: 8449 - DNA, 80 bp, synthetic construct
  source 1..80: mol_type = other DNA
atataaatgtttcactgaataccaagagcccgaaaaactgcttggctgatttgactaataaaggccggtcctctattgaa

SEQ ID NO: 8450 - DNA, 80 bp, synthetic construct
  source 1..80: mol_type = other DNA
cttcctttggaagtaaagcggctttgagaagcgtttttattaaagaagcattaatgatagaggacccttgtgtagtgagg

SEQ ID NO: 8451 - DNA, 80 bp, synthetic construct
  source 1..80: mol_type = other DNA
ggcaggaaccagccatctggatgtgtaagtgtaggtcacagaggatatgatggcttagcttgggctcagaggcctgacac

SEQ ID NO: 8452 - DNA, 80 bp, synthetic construct
  source 1..80: mol_type = other DNA
acaggcgccaacctgaaaaaggtcccagtggtgaaagccagaacaatttgagcagcaaattaaatactgataatattgga

SEQ ID NO: 8453 - DNA, 80 bp, synthetic construct
  source 1..80: mol_type = other DNA
taaatgcaaagtgagatcatcgattggatcctgggcagaaaaaggacagtggaaagacaagtgaaatccaaataaagtct

SEQ ID NO: 8454 - DNA, 80 bp, synthetic construct
  source 1..80: mol_type = other DNA
aaaaactcagtcgtctcgtttgaacggttaccgattttctaacaaatatatacacaacgcccaccaacctttccagacac

SEQ ID NO: 8455 - DNA, 80 bp, synthetic construct
  source 1..80: mol_type = other DNA
tgggctgatcagtacctcgtctgacctagctgggtttggtcgccgtcactggccggagcgccgaagcaccggggacgctg

SEQ ID NO: 8456 - DNA, 80 bp, synthetic construct
  source 1..80: mol_type = other DNA
aggcccatatagaaatacatgttagtcatacttcattttaagacaaaattaaggccagcacggtggctcatgcctgtaat

SEQ ID NO: 8457 - DNA, 80 bp, synthetic construct
  source 1..80: mol_type = other DNA
aaacctatacatagaaaattgctgggcaaggagtgacagctcactcctgtaatcccaacactttgggaggcagaggccaa

SEQ ID NO: 8458 - DNA, 80 bp, synthetic construct
  source 1..80: mol_type = other DNA
tcttgtaaatttgtacaaacaattttttaaaaattagctggatgtgatggcacatgcctgtggacctagctatttggggg

SEQ ID NO: 8459 - DNA, 80 bp, synthetic construct
  source 1..80: mol_type = other DNA
agttgcaaagagctggtaaggccccagtatgctacatttcttagtgcttactccaaaggtgaactccagaattgtcaatt

SEQ ID NO: 8460 - DNA, 80 bp, synthetic construct
  source 1..80: mol_type = other DNA
ctatatacttgttaccattttcaaaaatctgcagatagtcaatgtggatgagaactaaccactgagcatcaaatacatca

SEQ ID NO: 8461 - DNA, 80 bp, synthetic construct
  source 1..80: mol_type = other DNA
ataaatatctggcccataactatactttctctctgaagttgatggatgtgctgagggtatgggtgtgaatggctgatttg

SEQ ID NO: 8462 - DNA, 80 bp, synthetic construct
  source 1..80: mol_type = other DNA
cacccactgagttggtatgaagagtattttaaactgaaacatttaagacacagcagatacagaaagaagcctttctggag

SEQ ID NO: 8463 - DNA, 80 bp, synthetic construct
  source 1..80: mol_type = other DNA
attctagggtacagttttgttgggtgggtaaggcaatagaaagatgaagcaaaggagtcatgtgagtgaagtgattcatc

SEQ ID NO: 8464 - DNA, 80 bp, synthetic construct
  source 1..80: mol_type = other DNA
ccaggctctttctgccttttaaagggcttatgtgattaaatcaggcccacctttacaatcttgatatgttagagtcatct

SEQ ID NO: 8465 - DNA, 80 bp, synthetic construct
  source 1..80: mol_type = other DNA
aaaaaaaaattgtattagcaatgccacagaagcctccctcaagctccatcccttccaaaggtaacatctattaccattaa

SEQ ID NO: 8466 - DNA, 80 bp, synthetic construct
  source 1..80: mol_type = other DNA
ctcattaagcaatgtttttttgagggctcccttacattaggtcccatgtttggcactaaagaagagaaacaagacacagg

SEQ ID NO: 8467 - DNA, 80 bp, synthetic construct
  source 1..80: mol_type = other DNA
tgaaacccctgccctctctccagaaattggaaagtggaaatttttgtaaagtattctgaccactttcctccttgctgtca

SEQ ID NO: 8468 - DNA, 80 bp, synthetic construct
  source 1..80: mol_type = other DNA
atacatttatctgggaaagtttgtgtttgctttaagacacctgggaatattacccatcctgacagcctttgaattacaga

SEQ ID NO: 8469 - DNA, 80 bp, synthetic construct
  source 1..80: mol_type = other DNA
ttcttagaggaggctttatttcttctttttttaaacttccattcatagcccagcccaagatggaaatgtattctctattt

SEQ ID NO: 8470 - DNA, 80 bp, synthetic construct
  source 1..80: mol_type = other DNA
tcaatagcatgaaatatccagtcattgttcaaatatctctaatttttggccaggcatggtggctcatacctgtaatccca

SEQ ID NO: 8471 - DNA, 80 bp, synthetic construct
  source 1..80: mol_type = other DNA
gatccacccgcctcagcctcccaaagtgctgggattacaggcgtgagccaccatgcccagctgatgatagtttcttttgc

SEQ ID NO: 8472 - DNA, 80 bp, synthetic construct
  source 1..80: mol_type = other DNA
gcagagtaactgctagattcttttcctttgttttcaaaataacaagtgtgattctatatcacaatccaaaggtgactggc

SEQ ID NO: 8473 - DNA, 80 bp, synthetic construct
  source 1..80: mol_type = other DNA
tcatcttttatcaactcctttaatgaaagctattaactaactttcaataggcagataataaatacagtaatgaaaccaaa

SEQ ID NO: 8474 - DNA, 80 bp, synthetic construct
  source 1..80: mol_type = other DNA
ttaacatcaaaacccagctaatcaaaagagataaaaagagctatggaaaagagaagcaaaaagactggtaacacattaaa

SEQ ID NO: 8475 - DNA, 80 bp, synthetic construct
  source 1..80: mol_type = other DNA
taggccacgaaaacagcaattcctggaaaagttttggtgctatgctgggctcaaaaccagtggacttgaagggcaacatg

SEQ ID NO: 8476 - DNA, 80 bp, synthetic construct
  source 1..80: mol_type = other DNA
tgcccaggacagggagaacttgctgccctgaagggaaggacacaacctggctgacttcaccacctgctgattgttgaacc

SEQ ID NO: 8477 - DNA, 80 bp, synthetic construct
  source 1..80: mol_type = other DNA
aaaaagaatgaagcatgccaacaaaatctagaacatagcctgaaagggacaaagctaagagttattggccttaaagagga

SEQ ID NO: 8478 - DNA, 80 bp, synthetic construct
  source 1..80: mol_type = other DNA
attataacaccgtaattccaaagtgtaaactactcatattttgagtagaatgactaaaagataaaccaatgaaaataact

SEQ ID NO: 8479 - DNA, 80 bp, synthetic construct
  source 1..80: mol_type = other DNA
gaaaatcactttcactaaaagaaaggaaggaagataagaaaaaaaacaaccaccaccataaaacaaataacaaaatggca

SEQ ID NO: 8480 - DNA, 80 bp, synthetic construct
  source 1..80: mol_type = other DNA
aaaggtagaaaaacagccaggcgtggtggctcacgcctgtaatcctagcactttgggaggccaaagcaggcagatcacga

SEQ ID NO: 8481 - DNA, 80 bp, synthetic construct
  source 1..80: mol_type = other DNA
aaggacaaagacatgattattaaaacagatgctgaaaaagcatttgctaacattcaacatcccttcatgataaaaacctc

SEQ ID NO: 8482 - DNA, 80 bp, synthetic construct
  source 1..80: mol_type = other DNA
catttttgacaaaggtctcaagaacatacagtgggaaaagaatatctcttcaataaatgatgctgggaaaactgggtatc

SEQ ID NO: 8483 - DNA, 80 bp, synthetic construct
  source 1..80: mol_type = other DNA
tggagggagaaaagggaacccctgtgcactgttggcaggaatacatattagtccaaccactatggagaatagtttggagg

SEQ ID NO: 8484 - DNA, 80 bp, synthetic construct
  source 1..80: mol_type = other DNA
ggagatagagcaagattctgtctcaaaaaaaaaaaaaaaaaaaaaaaaaaaaaggtggttaccagagactgggaaggtag

SEQ ID NO: 8485 - DNA, 80 bp, synthetic construct
  source 1..80: mol_type = other DNA
gtcatgggttggggagggaaagcatcctgtaaaataagcaacagtgtcatagcctaaaaagcactgctaaatccaatgtc

SEQ ID NO: 8486 - DNA, 80 bp, synthetic construct
  source 1..80: mol_type = other DNA
tttctatttctacaaaaaaatggccttaggagctagataggattgcgttgaatctgtagactgtgttgggtagtattgcc

SEQ ID NO: 8487 - DNA, 80 bp, synthetic construct
  source 1..80: mol_type = other DNA
aaatcaggcacttgttaataatcttaagcgaaaaactttcagtttgatggcaccattgatatgaagttagctgtgggttt

SEQ ID NO: 8488 - DNA, 80 bp, synthetic construct
  source 1..80: mol_type = other DNA
ttcaactatccaggagtctatttacaaaattaggagggcatctggttaattgcaaagtcccttccaattccaccagtgca

SEQ ID NO: 8489 - DNA, 80 bp, synthetic construct
  source 1..80: mol_type = other DNA
agcaattcatttctcagaatctgtccaagacaaatgacagcctatgtttacacaaagggctgtaagcaaatgttttacag

SEQ ID NO: 8490 - DNA, 80 bp, synthetic construct
  source 1..80: mol_type = other DNA
gaaaaatgactacaaatgggcctgaggaatcttttgggggtgatagaaatgtccttaaatggggttcgtaatgactatac

SEQ ID NO: 8491 - DNA, 80 bp, synthetic construct
  source 1..80: mol_type = other DNA
tcagtgaacctttctcacaaggtttttgtgctaaaaatactgttttcactgtataatttcctgataagcaaatgttataa

SEQ ID NO: 8492 - DNA, 80 bp, synthetic construct
  source 1..80: mol_type = other DNA
ccaccatgctcggccaaaggtttgaattttaaaaaaacattttcaagaaatcagatgttccacttcctttttcacctgac

SEQ ID NO: 8493 - DNA, 80 bp, synthetic construct
  source 1..80: mol_type = other DNA
taaggcctggtggctcactgggactttgagctttaatttagatgtgggaagccatcagagaattttgagaagaaaaatga

SEQ ID NO: 8494 - DNA, 80 bp, synthetic construct
  source 1..80: mol_type = other DNA
gctgatcactagtttcaggtgtttctatctattgggagacgacctttccctggcgccagctgcaaccaattactattttg

SEQ ID NO: 8495 - DNA, 80 bp, synthetic construct
  source 1..80: mol_type = other DNA
aaattattatgaatcagcaactatgaacctcatcagcactagcataccgaaaagatcatttctgggcccacgttttacct

SEQ ID NO: 8496 - DNA, 80 bp, synthetic construct
  source 1..80: mol_type = other DNA
aaggctgcagtgagcagtgatcacgcgactgcactccagcctgagcaacaaagtaagaccctgtctcaaaattaaattaa

SEQ ID NO: 8497 - DNA, 80 bp, synthetic construct
  source 1..80: mol_type = other DNA
gattgccattcatgagcttacgggttgactaaacatagctgaagaaagatactctgagcttgaggatgtccagtagaaac

SEQ ID NO: 8498 - DNA, 80 bp, synthetic construct
  source 1..80: mol_type = other DNA
acatgttggtagaaaaataccaccaacttagaattctgtatactgtgaaatttcccttcagatttaaagaagaaatagac

SEQ ID NO: 8499 - DNA, 80 bp, synthetic construct
  source 1..80: mol_type = other DNA
aaaatcaataaaggtcagaaaatgaaatctacataaagaaaggagaacattaatgtgcagtggtgggatcttggctcact

SEQ ID NO: 8500 - DNA, 80 bp, synthetic construct
  source 1..80: mol_type = other DNA
cattacctggttggccctgtcagtaaaagtttttttaaaaaaagagtggacatcacttaaagaccccacagacattgaaa

SEQ ID NO: 8501 - DNA, 80 bp, synthetic construct
  source 1..80: mol_type = other DNA
gccaagatcacaaaatgaatatcggtgaagtatcattttgcttacctcaaagggccttatcaatggcactattccatggg

SEQ ID NO: 8502 - DNA, 80 bp, synthetic construct
  source 1..80: mol_type = other DNA
gagggtaattcaaaacattgtattgcaaattactaagaactggagaggtgagaagagagtgggggatggaattgaggatg

SEQ ID NO: 8503 - DNA, 80 bp, synthetic construct
  source 1..80: mol_type = other DNA
cttcaagtaggaaatgattttgtttgctttgcaaagacctaacacacctcagctgtaaagaattcaagccggccgggctt

SEQ ID NO: 8504 - DNA, 80 bp, synthetic construct
  source 1..80: mol_type = other DNA
gtgcaaaatatgtttgcaaatcccacaaaacaggaagaccagactgtcttgaacaacttgctcagtgtcttgagagtact

SEQ ID NO: 8505 - DNA, 80 bp, synthetic construct
  source 1..80: mol_type = other DNA
tcttcctttacaatgtttgaggaatctgtctctctccataacctctaaccttactttatcttagccctttatcattttat

SEQ ID NO: 8506 - DNA, 80 bp, synthetic construct
  source 1..80: mol_type = other DNA
cttgtcaagagaagtgttaaccttctgtcctttcatacaacactccccactcttcttttctaagacagctaggcatctca

SEQ ID NO: 8507 - DNA, 80 bp, synthetic construct
  source 1..80: mol_type = other DNA
taaagtggtataatatggtttcctgtgacgtggcataaacaggtctacatcctagtctcctttttaactgaaatcttagt

SEQ ID NO: 8508 - DNA, 80 bp, synthetic construct
  source 1..80: mol_type = other DNA
ctattacaacaatgttgcaaggatacatagctggatgataagggtaagctatagggagagtcggagaaatccatgggcaa

SEQ ID NO: 8509 - DNA, 80 bp, synthetic construct
  source 1..80: mol_type = other DNA
cctggccaacatggtgaaatcccatctctactaaaatacaaaaattatccaggcgtggtggtgagcgcctgtaatcccag

SEQ ID NO: 8510 - DNA, 80 bp, synthetic construct
  source 1..80: mol_type = other DNA
aaataaattgtaaaatctatttgtagtttattttgaaatgctctccccagcagccttacctttgccttattttcttgagg

SEQ ID NO: 8511 - DNA, 80 bp, synthetic construct
  source 1..80: mol_type = other DNA
caacccctgccccacccccccccacttttggagaccccagtgtctgttatttccatcatcatgttttcgttttaattttc

SEQ ID NO: 8512 - DNA, 80 bp, synthetic construct
  source 1..80: mol_type = other DNA
ctttgaatttcatgtcattacactttaacactgactacccctgcatggttgctgccatcttcagatttcagaagcatctc

SEQ ID NO: 8513 - DNA, 80 bp, synthetic construct
  source 1..80: mol_type = other DNA
cacaaagacctgtaattatctgattttaaattcttgatcaagaatctcaatgccgggaccctcagtaatgcctgacaact

SEQ ID NO: 8514 - DNA, 80 bp, synthetic construct
  source 1..80: mol_type = other DNA
ttttttttttttttttgagacagagtctcattctgtcgcccaggttagagtgcagtggtgcaatcatagcttactgaagc

SEQ ID NO: 8515 - DNA, 80 bp, synthetic construct
  source 1..80: mol_type = other DNA
taacgattctcccatctcagcctcccaagtagctggaccagaggtacatgccaccgcactcaaatctgtttttgtttgtt

SEQ ID NO: 8516 - DNA, 80 bp, synthetic construct
  source 1..80: mol_type = other DNA
cgttgtacctaattcccagacctatgtcagttaggagactgaaagctcttccatccactgatgaatatcatgaatcttcc

SEQ ID NO: 8517 - DNA, 80 bp, synthetic construct
  source 1..80: mol_type = other DNA
ggggtgaccagatggccacctagtagtagctgattgtgtgaacttttcccaacatgaaaggaacagccttttatcttctc

SEQ ID NO: 8518 - DNA, 80 bp, synthetic construct
  source 1..80: mol_type = other DNA
atagacccagactctaaaaataaaatattagcagtgcacagtagcatgttcctgtagtcccaactacttaggagactgaa

SEQ ID NO: 8519 - DNA, 80 bp, synthetic construct
  source 1..80: mol_type = other DNA
ttggtggtgatttgtgaagttttggtgtacccatcaccgaagcagtacacactgaacccaatttgcaatcttttatccct

SEQ ID NO: 8520 - DNA, 80 bp, synthetic construct
  source 1..80: mol_type = other DNA
aagtgaagaataagtaggaggcagacatgcaaatacctgagggtagagttgttttattttcttctactgtggtaaaatat

SEQ ID NO: 8521 - DNA, 80 bp, synthetic construct
  source 1..80: mol_type = other DNA
tgctgtgtataaacatctgtctgagcctctgctttcagttcttttgggtatatatctagaagtggaattgtgggattgta

SEQ ID NO: 8522 - DNA, 80 bp, synthetic construct
  source 1..80: mol_type = other DNA
aaaatgtgggaaagtttggaatttcctagagatttggacggcttagaagacaggaggatgtgggaaagtttggaacttcc

SEQ ID NO: 8523 - DNA, 80 bp, synthetic construct
  source 1..80: mol_type = other DNA
ctcgtgatagtgaatgagtctcatgagatttgagggtttaaaaaaaatagaagtttccctgcacaagctctctctttgcc

SEQ ID NO: 8524 - DNA, 80 bp, synthetic construct
  source 1..80: mol_type = other DNA
ttgaatcatgagggcagttaccttcatgctgttctcgtgacagtgagttctcatgagatctgatggttttataagggcct

SEQ ID NO: 8525 - DNA, 80 bp, synthetic construct
  source 1..80: mol_type = other DNA
aaatatgtaattttctcccattctgtgggttgtcttttaactctcttgaaagtgtctagactgggcacagtggctcacgc

SEQ ID NO: 8526 - DNA, 80 bp, synthetic construct
  source 1..80: mol_type = other DNA
ttatttataaaaataagcaggaaggatttgtcacaaaggcagtagtttgccaacccctacactagaagtcacagtttggc

SEQ ID NO: 8527 - DNA, 80 bp, synthetic construct
  source 1..80: mol_type = other DNA
gtttctgcctccagcctcactttcttcctacctggcatctatgctacagcaagagacatttctaaaatgcaattctgatt

SEQ ID NO: 8528 - DNA, 80 bp, synthetic construct
  source 1..80: mol_type = other DNA
gtagaggctgtagtgagccttgttcatgccactgcactcccgcctgggtgatacagcaataccctgtctaaaaaaaacta

SEQ ID NO: 8529 - DNA, 80 bp, synthetic construct
  source 1..80: mol_type = other DNA
cacagaccagctgtgtgcctttggcaaattgcttcactgggaccttcatttctccattcagaggttgaaattacaatctc

SEQ ID NO: 8530 - DNA, 80 bp, synthetic construct
  source 1..80: mol_type = other DNA
cataacctctgattacagaccatagtagaagggaatgttatttgaaacttagttcaaacagaagcgattcctgtctgtct

SEQ ID NO: 8531 - DNA, 80 bp, synthetic construct
  source 1..80: mol_type = other DNA
ctgtctctgtcacatttttccaactaagaaagatacaagcttctactctaggagaacgcccatgcatgtgtgggaaagat

SEQ ID NO: 8532 - DNA, 80 bp, synthetic construct
  source 1..80: mol_type = other DNA
aaggatgttgtctgattgtcttctcaggtgctcaacataaatcatgtgttcagccaaatacccttatcctgcctacaatg

SEQ ID NO: 8533 - DNA, 80 bp, synthetic construct
  source 1..80: mol_type = other DNA
aaatgtcccgagtgaaattaacagctctcctatctccttgggttccttttttctccactactagctgattatgaaccaca

SEQ ID NO: 8534 - DNA, 80 bp, synthetic construct
  source 1..80: mol_type = other DNA
cagccaaaaactttaatgcaaaggaaaagtctggattggttccacaggccttttaaaaagcggacttaaaagttgctggc

SEQ ID NO: 8535 - DNA, 80 bp, synthetic construct
  source 1..80: mol_type = other DNA
tctgacaagcatggattctttactgctttgtctacagagagcttttatcatattctcaaagtggtttgtgttcctgagaa

SEQ ID NO: 8536 - DNA, 80 bp, synthetic construct
  source 1..80: mol_type = other DNA
agactttttggagagctttggcggaacttatcagaatttgaaatgtacgtgccaatgacccagtaatcccattctgggaa

SEQ ID NO: 8537 - DNA, 80 bp, synthetic construct
  source 1..80: mol_type = other DNA
gacccttgtgtatgtcttcttaatattctgtgggttaaaaaggggggtatgcatcaagcacttctgtacagtaaagtata

SEQ ID NO: 8538 - DNA, 80 bp, synthetic construct
  source 1..80: mol_type = other DNA
cattccaatttgggcaatagagggagaccgtgtctctggggggtaaaaaaaaaaaaaaatacagttcattggtagagttt

SEQ ID NO: 8539 - DNA, 80 bp, synthetic construct
  source 1..80: mol_type = other DNA
aatgtggtaactattgatgagataacctacacaaactaagcctcttaggggccttcggttatttttcaagagtgtgacaa

SEQ ID NO: 8540 - DNA, 80 bp, synthetic construct
  source 1..80: mol_type = other DNA
gtggaatcggagaaaactttctctttttggtttgtgtgatgttccaagtgtctttttacaacaaacttgggttatcttat

SEQ ID NO: 8541 - DNA, 80 bp, synthetic construct
  source 1..80: mol_type = other DNA
tgactgagagggcggcatttgattaaagacccgaaggaggaagatgagcagcaggccctgttgaaatatgtgaaagaatt

SEQ ID NO: 8542 - DNA, 80 bp, synthetic construct
  source 1..80: mol_type = other DNA
aatatttaccatcaggtaaaaccacttatggttctcaaaactttatttaaaataatagacacttgataaatcaacactgt

SEQ ID NO: 8543 - DNA, 80 bp, synthetic construct
  source 1..80: mol_type = other DNA
ctgcctcagcctaattttttgtatttttattagagacggggtttcaccctgttagccaggatggttttgatctcgtgacc

SEQ ID NO: 8544 - DNA, 80 bp, synthetic construct
  source 1..80: mol_type = other DNA
ggaatgtgtcgggcatattttctgtgactagggggtaaaaagattaaaatggctactgaggatgggcttcagtaagagga

SEQ ID NO: 8545 - DNA, 80 bp, synthetic construct
  source 1..80: mol_type = other DNA
tgccttggccttccaaagtgctgggattacaggcgtgagccaccatgcgtggccttttaaaaaaatttttaagagataag

SEQ ID NO: 8546 - DNA, 80 bp, synthetic construct
  source 1..80: mol_type = other DNA
cttagagccacagtggccgcacaacgtgtgcatcatattgcaacgcttttcaaacgataacgttccctttgtcatctccc

SEQ ID NO: 8547 - DNA, 80 bp, synthetic construct
  source 1..80: mol_type = other DNA
aagtgtaatatgcatacagaaaggggcacaaattgaatgtacagcttgatgaatgatcacaaatgaatacctctgcattc

SEQ ID NO: 8548 - DNA, 80 bp, synthetic construct
  source 1..80: mol_type = other DNA
tagaaatttagatcgattccaaacccttcttgtccaacataggcatttaaagctgtgtatttcctactaaacactgcgtt

SEQ ID NO: 8549 - DNA, 80 bp, synthetic construct
  source 1..80: mol_type = other DNA
ttattaggaaacaggaaagactgaacaagaacaagagaactaagcatgtaactcaagaagccagagaaccaaagtaatcc

SEQ ID NO: 8550 - DNA, 80 bp, synthetic construct
  source 1..80: mol_type = other DNA
gttttcattcattagacctgtcttttcctctaaatcctagaaggtatttgtaataaagaccgtgcctgctaatttaaata

SEQ ID NO: 8551 - DNA, 80 bp, synthetic construct
  source 1..80: mol_type = other DNA
ccatacagttgtttaggacaaaaggatatctaataccacttttactgcattatggacagaagcagaagttcaattctgca

SEQ ID NO: 8552 - DNA, 80 bp, synthetic construct
  source 1..80: mol_type = other DNA
gctaccgtgcctagcctgtgtactctcaatacaggtccttcgttgggtgtatttattatgactattttcttacactttgt

SEQ ID NO: 8553 - DNA, 80 bp, synthetic construct
  source 1..80: mol_type = other DNA
tacatgtacgtgtggatctgctggggaactccttcctgttaatttgtttgtctttccttgcaccagtattacaatgtatt

SEQ ID NO: 8554 - DNA, 80 bp, synthetic construct
  source 1..80: mol_type = other DNA
tgtatttagtttttctcctggaaatgactaacagctgcttaagtccttattcctttctccaggtttctggtgctgccata

SEQ ID NO: 8555 - DNA, 80 bp, synthetic construct
  source 1..80: mol_type = other DNA
acccagtatcaagagtttagtcaaaacaaacaactcccagatttgccttggtagtgaatagattcagcatgtttgtactt

SEQ ID NO: 8556 - DNA, 80 bp, synthetic construct
  source 1..80: mol_type = other DNA
ccgcccgccttggcttcccaaagtgctgggattacaggtgtgagccactgcgcctggcctgaatcttctttttttttttt

SEQ ID NO: 8557 - DNA, 80 bp, synthetic construct
  source 1..80: mol_type = other DNA
acaaagctacagaacaaacatgtattttcagaagcttgcttgcacctctgccactctgtccttttccttctcctactcct

SEQ ID NO: 8558 - DNA, 80 bp, synthetic construct
  source 1..80: mol_type = other DNA
agtgatactcctgcctcagcctctctagtagctggaactataaatgtataccactatgcctggctgttttttgtattttt

SEQ ID NO: 8559 - DNA, 80 bp, synthetic construct
  source 1..80: mol_type = other DNA
aggagcttgaaaagactgtttccaggtctacccccaggggttaatttaattggtctggggagaggcctaagtatcagttt

SEQ ID NO: 8560 - DNA, 80 bp, synthetic construct
  source 1..80: mol_type = other DNA
aggaatggtggtctattaggagaaaaaccaaaagataagacccgagaccaaggaaattgtagtctcaatgcaaagataca

SEQ ID NO: 8561 - DNA, 80 bp, synthetic construct
  source 1..80: mol_type = other DNA
acaaatttattgtttagaggatataaggagaaaacattttttccctcagatgtatccttctgtgtgttatgtgtcttttt

SEQ ID NO: 8562 - DNA, 80 bp, synthetic construct
  source 1..80: mol_type = other DNA
atccaaccatggtatgacttctgtgggtactggtaagtccacatcattgctttgtaataatgtataatcatgactggatg

SEQ ID NO: 8563 - DNA, 80 bp, synthetic construct
  source 1..80: mol_type = other DNA
cagatttttttttttttttttttttttgtagagaagggtctcactctgttgaactcctggtggcctcaagggatcctcct

SEQ ID NO: 8564 - DNA, 80 bp, synthetic construct
  source 1..80: mol_type = other DNA
tgccggagtaacagttactgcactgataataccagttaccatgctggagtaacagttaccacactggtataccagttacc

SEQ ID NO: 8565 - DNA, 80 bp, synthetic construct
  source 1..80: mol_type = other DNA
ttcgtcacatattccctacctgttgctgccattgagggctttctctgtgctaggcactaccaaataatgctttggtaact

SEQ ID NO: 8566 - DNA, 80 bp, synthetic construct
  source 1..80: mol_type = other DNA
cttttgcaaatgtcaattctaatttggtcctaaggtctctctcttgagagtggctatagattctagccctgcccaggaaa

SEQ ID NO: 8567 - DNA, 80 bp, synthetic construct
  source 1..80: mol_type = other DNA
tctttcgctaggctggggtgcagtggccacaatctcggctcactgcaacctctgcctcccgggttcaagagattctcctg

SEQ ID NO: 8568 - DNA, 80 bp, synthetic construct
  source 1..80: mol_type = other DNA
gttcatgctggcctgcataatagagcgcctgctgtttgattttcagttttctgtagaaggaaaaaaaaaaatcaaaccaa

SEQ ID NO: 8569 - DNA, 80 bp, synthetic construct
  source 1..80: mol_type = other DNA
taactaccatcgccaccacaggacataaaatatttccataatcccaataactttcttcgtgctattctgctctcctgcct

SEQ ID NO: 8570 - DNA, 80 bp, synthetic construct
  source 1..80: mol_type = other DNA
cccttgtatcactctgaccccttgttccattgttttatttcctgttttgtaatcaagtctccctcaggctgggcacccct

SEQ ID NO: 8571 - DNA, 80 bp, synthetic construct
  source 1..80: mol_type = other DNA
aagtgtgaactgaatcataactaaaggaaagaagaacattgctgtcttaagcagatcacgcctttgtcgttatacagtat

SEQ ID NO: 8572 - DNA, 80 bp, synthetic construct
  source 1..80: mol_type = other DNA
gtcaagttcaacacagtagcttctgttgattgagttcttgtagttatgaggggaaattaatgctggtgaccagtatttga

SEQ ID NO: 8573 - DNA, 80 bp, synthetic construct
  source 1..80: mol_type = other DNA
ttgaaaaaaaaataaattatccaggtgtggtggtgcacgcctgtgttcccagctacttgggaggttaaagaggaaagatc

SEQ ID NO: 8574 - DNA, 80 bp, synthetic construct
  source 1..80: mol_type = other DNA
gtaggattgaggtagttgtagaggagtgttgataggatagtgaagaaattttaacctttgctaaaaacatgcaagacagt

SEQ ID NO: 8575 - DNA, 80 bp, synthetic construct
  source 1..80: mol_type = other DNA
atgtaattgtatccaacttgcagaccctaaatcacatttaaactgtaggtgcaggggaggtggtgatgtgtctgttagat

SEQ ID NO: 8576 - DNA, 80 bp, synthetic construct
  source 1..80: mol_type = other DNA
tcactgcatgtatgtatgtattcattcattcctcagaagaacatggccaacatgaaaattagggtgtgctgctgccatct

SEQ ID NO: 8577 - DNA, 80 bp, synthetic construct
  source 1..80: mol_type = other DNA
tgttaaatgcatgaatgaataatgagtaaagaaactgggtaatgtttttagcttggaggagagaagcctaagggaagatg

SEQ ID NO: 8578 - DNA, 80 bp, synthetic construct
  source 1..80: mol_type = other DNA
tatcatgtaaaggggagttggtctcaccctacactgctttggaaggcacaattaggagctgcggatggaagtcacaaaat

SEQ ID NO: 8579 - DNA, 80 bp, synthetic construct
  source 1..80: mol_type = other DNA
taggagacccttttgaccaattcccctctgttttccatcttggaaaaaccagaactctgttttcttgagcaaatgacgtt

SEQ ID NO: 8580 - DNA, 80 bp, synthetic construct
  source 1..80: mol_type = other DNA
aagagaagttagggctagtgtgagttgaggggaaggggatgtttctgttgttgctccttgctgagtatcttcagatatct

SEQ ID NO: 8581 - DNA, 80 bp, synthetic construct
  source 1..80: mol_type = other DNA
ggattgtttgagcctaggagttcaagaccagcctgagcaacacgatgaaacctggtccctgtaaaaaatacaaaaattag

SEQ ID NO: 8582 - DNA, 80 bp, synthetic construct
  source 1..80: mol_type = other DNA
gattacaggcgtgtactaccacgtctggctaatttttgtatttcagtagagatggggtttcaccgtgttggccaggctgc

SEQ ID NO: 8583 - DNA, 80 bp, synthetic construct
  source 1..80: mol_type = other DNA
cagcttctgtgattgatctcccaactggtcgttgtcaacttctgatggccggtcattgcactcctcatcttcaaggctct

SEQ ID NO: 8584 - DNA, 80 bp, synthetic construct
  source 1..80: mol_type = other DNA
ctgttccttttgggtttgtaatagaagctactgtccccctgatcattactgattgaaacaagaaatctgttgttcctgga

SEQ ID NO: 8585 - DNA, 80 bp, synthetic construct
  source 1..80: mol_type = other DNA
tgcgcccggcctatttcctcccctttttatgaccattcacagcctttggcataccattaaaatctgatcattgacttcta

SEQ ID NO: 8586 - DNA, 80 bp, synthetic construct
  source 1..80: mol_type = other DNA
ccagagataaccaccttgtggtaacatttatttctctgccgtagccactcttgtctgaaggagggttcatagtagatagg

SEQ ID NO: 8587 - DNA, 80 bp, synthetic construct
  source 1..80: mol_type = other DNA
caatatgccaggtatattatattggtgttaggttgggctataatattaaaaaggacagtcatggttcttgcccttgaggt

SEQ ID NO: 8588 - DNA, 80 bp, synthetic construct
  source 1..80: mol_type = other DNA
acacacacatcactgtgtccttgagggagatctttcttctctaggaatatagctgagcttaccccagaaaccaggggaga

SEQ ID NO: 8589 - DNA, 80 bp, synthetic construct
  source 1..80: mol_type = other DNA
caagggatacaagtagaatttgtagtgtgctgattaaccaaagacaagttcctccacccttttctttttggccagagttg

SEQ ID NO: 8590 - DNA, 80 bp, synthetic construct
  source 1..80: mol_type = other DNA
aggccccccagttccctttgctgctttcttctttatgccacagatttaatgcttgaacacatattgaaattttggaaagt

SEQ ID NO: 8591 - DNA, 80 bp, synthetic construct
  source 1..80: mol_type = other DNA
tctcattgggatacaaatgagtgtgccccgtggttaggaagatgaggaagtgtaggcacttgcaggggccttttcttttg

SEQ ID NO: 8592 - DNA, 80 bp, synthetic construct
  source 1..80: mol_type = other DNA
ttttagttctggaggagctgcaggttttatgaaaagggaacacatttgattcctcagagcagccacaggccagctctctg

SEQ ID NO: 8593 - DNA, 80 bp, synthetic construct
  source 1..80: mol_type = other DNA
tttccttcttgatgggaagactggcagcaggatttacttggttgctacatttgtgaatttgtaaaataattcatgctctg

SEQ ID NO: 8594 - DNA, 80 bp, synthetic construct
  source 1..80: mol_type = other DNA
gtgagggggaatttttcactctttatttcacatacatctgtcattggcacagaaaattaagcagtaaacctaaagaaaca

SEQ ID NO: 8595 - DNA, 80 bp, synthetic construct
  source 1..80: mol_type = other DNA
ataatgggtgaggagtcaaccacgttgttgcatgttatccacatttcctccttttgtgtctctgagtagtattctcttgc

SEQ ID NO: 8596 - DNA, 80 bp, synthetic construct
  source 1..80: mol_type = other DNA
cccttaacctagtcccttgggtgaattaccgactctgggtctcacttactaacatgaaaggaggttcataatctgaatcc

SEQ ID NO: 8597 - DNA, 80 bp, synthetic construct
  source 1..80: mol_type = other DNA
ttcttaagtcatactgggatagcagcagtacccagcctaagagaagctgcagtatagtttccttggtcaaatgacttttt

SEQ ID NO: 8598 - DNA, 80 bp, synthetic construct
  source 1..80: mol_type = other DNA
attgtcttcaaacacaggtatgagggagacttttgctggtgataggacagattatcctgaaaattgacctgacaaaaata

SEQ ID NO: 8599 - DNA, 80 bp, synthetic construct
  source 1..80: mol_type = other DNA
gcctggctaactcttttttttttttttttttttcattttgtagagatggggttttggggttttaccatgttgcctaggct

SEQ ID NO: 8600 - DNA, 80 bp, synthetic construct
  source 1..80: mol_type = other DNA
agctaagatcattgattggctacactttgagcaaaatgatagactagaaagaataagctgttggcagaatatttaaaaaa

SEQ ID NO: 8601 - DNA, 80 bp, synthetic construct
  source 1..80: mol_type = other DNA
agcatagagagacagaagtctaaaatataagcctataaggagagagaaaagaagtcaatagagataacagatgagagaca

SEQ ID NO: 8602 - DNA, 80 bp, synthetic construct
  source 1..80: mol_type = other DNA
gctagtgtagacaagctacagaagccacaagggaggtgctgcttagagggggctctttattctttgtttggttttaattt

SEQ ID NO: 8603 - DNA, 80 bp, synthetic construct
  source 1..80: mol_type = other DNA
gtagactgtgagcaggggaatcgaggaacctctcagggctttgtgttgggacgctgacacactgcattagtactttctag

SEQ ID NO: 8604 - DNA, 80 bp, synthetic construct
  source 1..80: mol_type = other DNA
aattcctctgctctcctttgccaagcaatgcttgcccatccactttcagatcccccagtttgttgaaatatctagtatga

SEQ ID NO: 8605 - DNA, 80 bp, synthetic construct
  source 1..80: mol_type = other DNA
tgaagttgcatctgattttgagggatactgcgggcaaacctgacagctagcttggttactagaggtttaattagttacag

SEQ ID NO: 8606 - DNA, 80 bp, synthetic construct
  source 1..80: mol_type = other DNA
atgaaaactcttgcaactttcgtttttggatagtgctcacctcgtatctgtactcgtacctgctatttctaggcgaattg

SEQ ID NO: 8607 - DNA, 80 bp, synthetic construct
  source 1..80: mol_type = other DNA
gtcatgttgacatgcgtttggattttcagtggagaagaattgccagagaagaatcttcctctgattttaaccattgacca

SEQ ID NO: 8608 - DNA, 80 bp, synthetic construct
  source 1..80: mol_type = other DNA
ctttggctcccacacctgtgagatgtgaatgttgataacacacacccacctcataggattaatgagaacatgccaagata

SEQ ID NO: 8609 - DNA, 80 bp, synthetic construct
  source 1..80: mol_type = other DNA
gtctaggtaggaatgtaaggtctcccctcaaattgagaatgacaaggctgtcttctaaggacagaatttaaggtgaacac

SEQ ID NO: 8610 - DNA, 80 bp, synthetic construct
  source 1..80: mol_type = other DNA
gggtaaattctggattttttcatatatcctgccatcccccattaaaaaccagcatctggtcttgggggattgtgagattt

SEQ ID NO: 8611 - DNA, 80 bp, synthetic construct
  source 1..80: mol_type = other DNA
cccagaaacacatatcagccatcatagacagcccagtgggtggtaccgtgcaccagctccaaccacacacaccctgcagg

SEQ ID NO: 8612 - DNA, 80 bp, synthetic construct
  source 1..80: mol_type = other DNA
gtctggttcctagctctgggtgatttagggtaggagaaatattggctctgtgtgtgagagttagataaggaggtggttca

SEQ ID NO: 8613 - DNA, 80 bp, synthetic construct
  source 1..80: mol_type = other DNA
actgctgttgctctttacttggagccaggctcatggtaagaggatggggactttcttggttctcttagtctgactccatc

SEQ ID NO: 8614 - DNA, 80 bp, synthetic construct
  source 1..80: mol_type = other DNA
ttcctcacagatcagtgcagtttgctaatacaaatactgtatgtatagttactctgttttccacatccaccattggttta

SEQ ID NO: 8615 - DNA, 80 bp, synthetic construct
  source 1..80: mol_type = other DNA
tgatttcctgaaacctcttgcatctaaaaagcaatctgtggggagacattttgtgaccatataagtaacctgctcctcat

SEQ ID NO: 8616 - DNA, 80 bp, synthetic construct
  source 1..80: mol_type = other DNA
tgtggaagctagcacaacagtttaaacggaggcccataggccatgtctaaatatttaaaagttacaaatgtgacagactg

SEQ ID NO: 8617 - DNA, 80 bp, synthetic construct
  source 1..80: mol_type = other DNA
gagacaaaaattctctggttcaggaagcccatcaaattccaaagcggcaaagaaggaaaggaaagaaattcatgtctaaa

SEQ ID NO: 8618 - DNA, 80 bp, synthetic construct
  source 1..80: mol_type = other DNA
ataccatcactaaagaacatcctcaagaagaagggaaatgacaccaagaaggaaggtttaaaatttaagacaacattaag

SEQ ID NO: 8619 - DNA, 80 bp, synthetic construct
  source 1..80: mol_type = other DNA
gtacggaattgggggagggtataagagggtttaagatgcgtgaaaaatgttgagtaggacatttcaagagatagttcaaa

SEQ ID NO: 8620 - DNA, 80 bp, synthetic construct
  source 1..80: mol_type = other DNA
ttttttctgagaaataactagagtctgtgcaagctgtgtcgtacattttgactgcaattttagtactgagtgttgcttgc

SEQ ID NO: 8621 - DNA, 80 bp, synthetic construct
  source 1..80: mol_type = other DNA
ctgacttcataaaggcccagattatgttaccccgagaaagtctttgaaggagcaagctctttcttatgcttttgttatta

SEQ ID NO: 8622 - DNA, 80 bp, synthetic construct
  source 1..80: mol_type = other DNA
gttgcttaggtgtctcccctttaagggattctgatgtctagcagtctcaatggacaaaacagataaaagagagaatgagt

SEQ ID NO: 8623 - DNA, 80 bp, synthetic construct
  source 1..80: mol_type = other DNA
gccttcaaatgatcgaatggccaggaaatacacatatttctatggtctaaggtgtcttaaacttggcctttaaaaaaaga

SEQ ID NO: 8624 - DNA, 80 bp, synthetic construct
  source 1..80: mol_type = other DNA
tccccagtagctggtactacaggcgtgtgccgccatgcttagctaattttcatatttttagtagaggcagggttttgcca

SEQ ID NO: 8625 - DNA, 80 bp, synthetic construct
  source 1..80: mol_type = other DNA
gagtggtattttccagcatggcttttctgtttcttgaaaaccctacagcactttgccatggtttctcatctggatgaaat

SEQ ID NO: 8626 - DNA, 80 bp, synthetic construct
  source 1..80: mol_type = other DNA
agagcaggtagaggtttgacagtttactcctttaaagtaatccatgtccaataacccatggaaagtcttcatgtacttct

SEQ ID NO: 8627 - DNA, 80 bp, synthetic construct
  source 1..80: mol_type = other DNA
attccttccctcagcctctggccccagacaaacacttatccactttctgtgtctgtagttttgtcttttcaagaaattcc

SEQ ID NO: 8628 - DNA, 80 bp, synthetic construct
  source 1..80: mol_type = other DNA
gatgacaggcgtgagccaccaagcccagctgacaatggattttctttgttttctccttcatctgaagatgtcttcccttt

SEQ ID NO: 8629 - DNA, 80 bp, synthetic construct
  source 1..80: mol_type = other DNA
ttcatcttggttaatttctactcatcttttttgaaatgcacatactgtccttttctttgtccattcagctgagtatatcc

SEQ ID NO: 8630 - DNA, 80 bp, synthetic construct
  source 1..80: mol_type = other DNA
ccggctctctttgttattcatagtttcctggcttctcttttctgagccacccagccaaaaatgctttgactttttctatg

SEQ ID NO: 8631 - DNA, 80 bp, synthetic construct
  source 1..80: mol_type = other DNA
atgccactgttcttcagcccaagagactgagtgagacctcttaagaaaaaaaaaaaaatgaccggacacagttgctcacg

SEQ ID NO: 8632 - DNA, 80 bp, synthetic construct
  source 1..80: mol_type = other DNA
agctcatattaagtagggggaccaagagggaggtctctcagttaaacaaagttattgacttgtctttagacaggcaagac

SEQ ID NO: 8633 - DNA, 80 bp, synthetic construct
  source 1..80: mol_type = other DNA
cctttaaaagccagctcttattaagtagggggatgaagggggaagcccttcagttaaacaaagttactgacctgtctttt

SEQ ID NO: 8634 - DNA, 80 bp, synthetic construct
  source 1..80: mol_type = other DNA
cacaaatataagtatatacttttaaatcccattcttacacacaaaagctagcatactgtgtaaagtattctggacctaca

SEQ ID NO: 8635 - DNA, 80 bp, synthetic construct
  source 1..80: mol_type = other DNA
cattccttaattttatatatatatatatatatatatatagttttttttttttttttttttgagatggagtctcactctgt

SEQ ID NO: 8636 - DNA, 80 bp, synthetic construct
  source 1..80: mol_type = other DNA
acatgattggctaagctaatggggctcagatttaccctgtcacctgaaacaactgtaaaactggagaaaatatgtcaaac

SEQ ID NO: 8637 - DNA, 80 bp, synthetic construct
  source 1..80: mol_type = other DNA
aaaatgcacaatgtttaccagccattccagaattactaggtatgagcagaagtagtaacatacaaccaataactgaccag

SEQ ID NO: 8638 - DNA, 80 bp, synthetic construct
  source 1..80: mol_type = other DNA
tggaattggagtccctgaaggaagggagggtatgagggaccaaaaaatatatatagagagagaaaaaaaaatggctgaaa

SEQ ID NO: 8639 - DNA, 80 bp, synthetic construct
  source 1..80: mol_type = other DNA
agaagtaaagtttatgacaatagcagcacaaagactgggagtgggagaacaaatatactcttgtaagctttttacactac

SEQ ID NO: 8640 - DNA, 80 bp, synthetic construct
  source 1..80: mol_type = other DNA
gtattaacagagattcaaaatacaaacttttcaaggagaaataaatctgtaattatagttgaaggtttaacaactctctc

SEQ ID NO: 8641 - DNA, 80 bp, synthetic construct
  source 1..80: mol_type = other DNA
aaaacaaacaaacaaaagcctcagtgaatgtaagctgattcaatttgtagaaagtatgatctctggccaggtgcggtggc

SEQ ID NO: 8642 - DNA, 80 bp, synthetic construct
  source 1..80: mol_type = other DNA
ccagactgatcaggggaaaaaagggaagacaataactgtaatatcagcagtgaaagagatgacatcacacagattctaaa

SEQ ID NO: 8643 - DNA, 80 bp, synthetic construct
  source 1..80: mol_type = other DNA
cagatctgatatagtcacttcttcctttgttcagttaaacccagcttcatgtttctgcttgcccagggccaataactttg

SEQ ID NO: 8644 - DNA, 80 bp, synthetic construct
  source 1..80: mol_type = other DNA
tcactcttcacctcctttgggtctttgctcagttgtcatcttcagtgatggctcttctgatcaccttatttaatttttat

SEQ ID NO: 8645 - DNA, 80 bp, synthetic construct
  source 1..80: mol_type = other DNA
tttgttatcagtcatccctcccagccctggcaactgctgctcactttcctgaccttagaattttgcttattacagaatgt

SEQ ID NO: 8646 - DNA, 80 bp, synthetic construct
  source 1..80: mol_type = other DNA
ggtcgtaggataagtatatgcttaacttaggagaccctgccacagtattttacaaagtaagggtgctattttgcattact

SEQ ID NO: 8647 - DNA, 80 bp, synthetic construct
  source 1..80: mol_type = other DNA
gcccctgtagctgttgtgcgtatgtttattattgagtttttctggcctttgcagttctttcagtgtctgattctccctct

SEQ ID NO: 8648 - DNA, 80 bp, synthetic construct
  source 1..80: mol_type = other DNA
tttttttttttttacagcaggaggtgtttctgcttctactttgctgtgacttctgtttctccaggcattcctggtatgga

SEQ ID NO: 8649 - DNA, 80 bp, synthetic construct
  source 1..80: mol_type = other DNA
gcttggaactgagcagccctcactgggtgcatttctaatcctttgtctcatcatttatatgacatccacttagaaaaagg

SEQ ID NO: 8650 - DNA, 80 bp, synthetic construct
  source 1..80: mol_type = other DNA
tgctgagtctttttttttttttttgagatggagttttgctcttgttgcctgggctggagtgcaatggcataatcttggct

SEQ ID NO: 8651 - DNA, 80 bp, synthetic construct
  source 1..80: mol_type = other DNA
tcttttgattatagctattggaatgggtgtgaagcagcatctcgtgattttagtttccatttcttgaatgactaatgata

SEQ ID NO: 8652 - DNA, 80 bp, synthetic construct
  source 1..80: mol_type = other DNA
ccataaggactaaatggctgttacagacccaaaataggagcaattcaaacaagcgagatgcttctctctgtaacaggctg

SEQ ID NO: 8653 - DNA, 80 bp, synthetic construct
  source 1..80: mol_type = other DNA
ttagacattaaatttgattttggtgttgctgtaaagaatacagatcttaggcaccagctcgtaggaggggtggtaaacaa

SEQ ID NO: 8654 - DNA, 80 bp, synthetic construct
  source 1..80: mol_type = other DNA
tcaataaccagggcttgggcttttcttttatcagttcctcctacttggctgagtttacctcatcataaatcttatcacac

SEQ ID NO: 8655 - DNA, 80 bp, synthetic construct
  source 1..80: mol_type = other DNA
tggccaaaatatatatatacatattttaagtgaagatgtgtaaggactaaaggagcccaaaggagacagtaggggataag

SEQ ID NO: 8656 - DNA, 80 bp, synthetic construct
  source 1..80: mol_type = other DNA
ggaaaaagttgaatgaccctagagaaaagccctacagataccaacatttagggattctcttgaaaaagcgagtttaccat

SEQ ID NO: 8657 - DNA, 80 bp, synthetic construct
  source 1..80: mol_type = other DNA
aactattctttgctatccttggagagagagattgcaaatgtcagaaaacaggatgcttttaaaaacaataacaatcagaa

SEQ ID NO: 8658 - DNA, 80 bp, synthetic construct
  source 1..80: mol_type = other DNA
caagtcattttaaggggtcaggaaccagaatgggattgcatctctaaacaatacttactggaaactagatagtagcagat

SEQ ID NO: 8659 - DNA, 80 bp, synthetic construct
  source 1..80: mol_type = other DNA
caagatgatgttactagctaaaaatctgaaggaggctgtctctgcggaaacatacaggggaaagggattgctgtttttta

SEQ ID NO: 8660 - DNA, 80 bp, synthetic construct
  source 1..80: mol_type = other DNA
cagacctgatacagaaatagtcctcttttggaaataacaatagctactgtttatcgagcaccttctgtgctttgggcact

SEQ ID NO: 8661 - DNA, 80 bp, synthetic construct
  source 1..80: mol_type = other DNA
atatccattcctgttcgtcctattcccagtgaaaataagcaactcttccctcttccaaaacagtggatttcttttctttt

SEQ ID NO: 8662 - DNA, 80 bp, synthetic construct
  source 1..80: mol_type = other DNA
aattggaaattttctgccattttacaaagttcaagactttcctaccttcctacctcctggctgtgtgaacttggacagaa

SEQ ID NO: 8663 - DNA, 80 bp, synthetic construct
  source 1..80: mol_type = other DNA
ctggtaccacgactctagcagtaggtccattcaatggcagtaaaaatacatgttgtatgttgatcagaatttggcaggac

SEQ ID NO: 8664 - DNA, 80 bp, synthetic construct
  source 1..80: mol_type = other DNA
ctgttaaagaaaatgaatcagagaagaggcccagaccgtgcctccgaaaattctcattgtagggactaagtcctctcact

SEQ ID NO: 8665 - DNA, 80 bp, synthetic construct
  source 1..80: mol_type = other DNA
agcagaaaggctatctgtgcttcagagatggagtggcacttggacttctctgttgttttcaactaagaatataagagtaa

SEQ ID NO: 8666 - DNA, 80 bp, synthetic construct
  source 1..80: mol_type = other DNA
cagagctggagcaaagtttaggtcacagctttgccaagtcattgttttgttttcctgggagtaaaccggagatttagtat

SEQ ID NO: 8667 - DNA, 80 bp, synthetic construct
  source 1..80: mol_type = other DNA
catgctacctgctactcagcctagctgtcaaagcaacactggtaaacataaagatggctagcaattattaaatgcttact

SEQ ID NO: 8668 - DNA, 80 bp, synthetic construct
  source 1..80: mol_type = other DNA
gtcttgctctgtcacccaggctggactgcagtggcacaatcacagctcactgcagccttgagctcctggtctcaagcaac

SEQ ID NO: 8669 - DNA, 80 bp, synthetic construct
  source 1..80: mol_type = other DNA
tttaccagtttctgtaatggttgaagtgatgacagaattcagccaatcccacccatagtttttcttgctaataaagcagt

SEQ ID NO: 8670 - DNA, 80 bp, synthetic construct
  source 1..80: mol_type = other DNA
cacattgggagaaaaattgtcttgggccacacgtaaaacatactaacgatagctgatgagctaaaccaacaaaacaaatc

SEQ ID NO: 8671 - DNA, 80 bp, synthetic construct
  source 1..80: mol_type = other DNA
gggaaatctatagagacagagactgagagacaaatacaaaaaggttgagacaggaaagggaaaaaaaaacaagctgggag

SEQ ID NO: 8672 - DNA, 80 bp, synthetic construct
  source 1..80: mol_type = other DNA
gaatctggagcaaatcctatttcttttgaaagcacagagaactgtgtttttacattatacctttaggattttggccatgg

SEQ ID NO: 8673 - DNA, 80 bp, synthetic construct
  source 1..80: mol_type = other DNA
tttgtactgctggggacatgtgaacagattgcttactgggtgatagatgcagggtggtgatagagacagacaccaggtac

SEQ ID NO: 8674 - DNA, 80 bp, synthetic construct
  source 1..80: mol_type = other DNA
ttttttttcctttttggttgagggagggggacagggactgtgtatcttcagaaaggttaatatttgaggccaaggcaggc

SEQ ID NO: 8675 - DNA, 80 bp, synthetic construct
  source 1..80: mol_type = other DNA
aggtgacggttgtgatcattgttcgcaccactactttgaaatgacatagttgccactggaccttgttatttaatgtgcga

SEQ ID NO: 8676 - DNA, 80 bp, synthetic construct
  source 1..80: mol_type = other DNA
tttaaataattgaatgtgagcaaaattaaagggaacgtttgtcacgtctgacatgctccatcctcctgtcccccccacac

SEQ ID NO: 8677 - DNA, 80 bp, synthetic construct
  source 1..80: mol_type = other DNA
atgctaaaatttatttcccaagacaatagccaaaaagatctgctggaagaacagaagaagggaactagttggggcatctt

SEQ ID NO: 8678 - DNA, 80 bp, synthetic construct
  source 1..80: mol_type = other DNA
cgatggagtgagactccaactcaaaaaaaaaaaaaaaaaaatttcaattggcttctattaaagcttttttatgtttgtca

SEQ ID NO: 8679 - DNA, 80 bp, synthetic construct
  source 1..80: mol_type = other DNA
cactggctgtcagcgtcaaaaagatgtatctgcagatttggcaaggaatttgcatttcagtgattattatcaagcgttca

SEQ ID NO: 8680 - DNA, 80 bp, synthetic construct
  source 1..80: mol_type = other DNA
atgcgtagtgaatggctctaagttctccctccatctgtaggaaattgaagctggaagtgagatgatatattcattatagg

SEQ ID NO: 8681 - DNA, 80 bp, synthetic construct
  source 1..80: mol_type = other DNA
acatatgactaagcttcttctacactctaggagatgtcagtattgcaagatcctgttccttgaaattatctttgcccccc

SEQ ID NO: 8682 - DNA, 80 bp, synthetic construct
  source 1..80: mol_type = other DNA
ggggtgagcctccacgccgggcctctctttttaagataataaaaattactaaacatcataatgacatgatttgggattac

SEQ ID NO: 8683 - DNA, 80 bp, synthetic construct
  source 1..80: mol_type = other DNA
cacaaggttaaaaaaaaaaatttacagaagaacatatttgagggtggtcgtgggggcaagaaagctggaaggacgggtgg

SEQ ID NO: 8684 - DNA, 80 bp, synthetic construct
  source 1..80: mol_type = other DNA
aagctcaaactattggggaacaataattaccaccttggagtgaaaatacttaatttccacaagatttagtaaaggaagag

SEQ ID NO: 8685 - DNA, 80 bp, synthetic construct
  source 1..80: mol_type = other DNA
gtttctaagggagtcgactctccttagaggagttcttgtacaatagccctgggcaaaaacagaacttgccctatttttta

SEQ ID NO: 8686 - DNA, 80 bp, synthetic construct
  source 1..80: mol_type = other DNA
ttgaggatccgttctgtgatattacaagttcctgggactggtatgattctcttattgtcttgctagagttttgttgttag

SEQ ID NO: 8687 - DNA, 80 bp, synthetic construct
  source 1..80: mol_type = other DNA
aagcaatctgccctcctcggcctcccaaaatgctgggattacaggcacgagccactgtgcccagcctatattttttaaat

SEQ ID NO: 8688 - DNA, 80 bp, synthetic construct
  source 1..80: mol_type = other DNA
ttgcacgtgcttctttatgtgggtgtaagtgtgtgcagataagttgccagaactgactgaaggttatgtgcatcaccagg

SEQ ID NO: 8689 - DNA, 80 bp, synthetic construct
  source 1..80: mol_type = other DNA
gtgctatttatccaaggcaagtcatgctgcaccgagatagtcacttgaggtttgcaccgaacaggataatggtttctttt

SEQ ID NO: 8690 - DNA, 80 bp, synthetic construct
  source 1..80: mol_type = other DNA
tcttgaaagaaatttgcccagttgacatttattttcatcgtctgctgaagtgacagatccaaggccctaagcttcagcag

SEQ ID NO: 8691 - DNA, 80 bp, synthetic construct
  source 1..80: mol_type = other DNA
gcaaaatgctgtttctaagcgtttctttgacaagtcccatccttcaggttcatgcatgattagggagaggcagcagccct

SEQ ID NO: 8692 - DNA, 80 bp, synthetic construct
  source 1..80: mol_type = other DNA
gccacagtccttacaccttgagcaagttccccagagtgaagcaatctttctagacaagttttgcgtttctcagaatttta

SEQ ID NO: 8693 - DNA, 80 bp, synthetic construct
  source 1..80: mol_type = other DNA
catgtggaattgtttttggtaaggaagtattcccttgccacaccaatgaaaagagaagaaaacaggtagctggcacccac

SEQ ID NO: 8694 - DNA, 80 bp, synthetic construct
  source 1..80: mol_type = other DNA
ctgaaggctgttccctgtttccttcagctctacgtctcctccgagagccgcttcaacaccctggccgagttggttcatca

SEQ ID NO: 8695 - DNA, 80 bp, synthetic construct
  source 1..80: mol_type = other DNA
cacagaaatcaagagaggcagcccctttttagagctgttagaaaagaactgaaacatccacctctgggaaaaatagagtt

SEQ ID NO: 8696 - DNA, 80 bp, synthetic construct
  source 1..80: mol_type = other DNA
tcaagttcttcacttctatttgacggttcctgggctcaacactggattagaaaatgaatgggacagagttcttcatctga

SEQ ID NO: 8697 - DNA, 80 bp, synthetic construct
  source 1..80: mol_type = other DNA
cgcagaaacatccctgcagtatgttgcctatttgtcaaataagattagtgtaaatatggggcatttacctttgctataga

SEQ ID NO: 8698 - DNA, 80 bp, synthetic construct
  source 1..80: mol_type = other DNA
atgccttttaaaaaaaaatcaccttttccccccactctcccatttacttcctttgcagtttgtggctacgatctaccttc

SEQ ID NO: 8699 - DNA, 80 bp, synthetic construct
  source 1..80: mol_type = other DNA
agtgggcctttctcttatttccaatattttgctgttctaaacagcagcacagtgattcccctcatttgcatgtatgtgaa

SEQ ID NO: 8700 - DNA, 80 bp, synthetic construct
  source 1..80: mol_type = other DNA
tctgatgggtgaaggaatattggaaataaggataatccctgtggtgtttcactgtgcctgtaacctctctcacctagcat

SEQ ID NO: 8701 - DNA, 80 bp, synthetic construct
  source 1..80: mol_type = other DNA
agcctttgttttctacaagctatctgttcggtctactcaggaatagagataaactgccttaatagtaataaaagcaagca

SEQ ID NO: 8702 - DNA, 80 bp, synthetic construct
  source 1..80: mol_type = other DNA
tttcctcccttgtgtgtttgtgtgtatgtaagagagacagatgagaagagggctgcctttgagagccatgttccttttgc

SEQ ID NO: 8703 - DNA, 80 bp, synthetic construct
  source 1..80: mol_type = other DNA
aggacacggtgtctcccaaacgggccggaacatacaaggttctacgtttaatagaaagttgatcaagccttcctctttgg

SEQ ID NO: 8704 - DNA, 80 bp, synthetic construct
  source 1..80: mol_type = other DNA
ccatggaggtggaagagttcttgaaagaagctgcagtcatgaaagagatcaaacaccctaacctggtgcagctccttggt

SEQ ID NO: 8705 - DNA, 80 bp, synthetic construct
  source 1..80: mol_type = other DNA
ttggaagttgggcccaggactgaggagcagagtcagaatccttcagaaggctttttctttagacagttgtttgttcagtt

SEQ ID NO: 8706 - DNA, 80 bp, synthetic construct
  source 1..80: mol_type = other DNA
tacgagatgttctccacaccaccactgtgacctttcctacccaattagctcaagtatgaaacctctacatgagatttcat

SEQ ID NO: 8707 - DNA, 80 bp, synthetic construct
  source 1..80: mol_type = other DNA
attaatacaaacttccagggcattggactcaatctttccattgtcagcattgcacctttgctcagcagtggtggatttgt

SEQ ID NO: 8708 - DNA, 80 bp, synthetic construct
  source 1..80: mol_type = other DNA
catcacattcaggtttgactgtttctcttttagtaagagtggatcaggggagatggtgtgcccttccatcagtagataca

SEQ ID NO: 8709 - DNA, 80 bp, synthetic construct
  source 1..80: mol_type = other DNA
aaacagttcctcatctgtgtggttactcagtggtacagttcatgtaggaagagcagggtcaattcttgcttctttgtttt

SEQ ID NO: 8710 - DNA, 80 bp, synthetic construct
  source 1..80: mol_type = other DNA
ctgtgccccaggcctgaatcacccatttctctaaggaatcttatcctttaatgggaaatggaattttaaggcaataatct

SEQ ID NO: 8711 - DNA, 80 bp, synthetic construct
  source 1..80: mol_type = other DNA
caaaggtaactgattttaaatgtagtgtagtgaaatgctacacatcttgaacagcctttctctttcggttttctttcagc

SEQ ID NO: 8712 - DNA, 80 bp, synthetic construct
  source 1..80: mol_type = other DNA
atatcttataaggtatttatatggccatttcttacactgttttcccacacatgtctttccacgtccatatattcagatct

SEQ ID NO: 8713 - DNA, 80 bp, synthetic construct
  source 1..80: mol_type = other DNA
cttaatgtctataacaggacatgatgacattcatcgttttgacttgttgcagcaaaagatggttagcaggattggaatgt

SEQ ID NO: 8714 - DNA, 80 bp, synthetic construct
  source 1..80: mol_type = other DNA
agccatggcctttgtcaatggttcagcttcggaaggaggaaggttctcctctccccacctgcctcctatcccctccctct

SEQ ID NO: 8715 - DNA, 80 bp, synthetic construct
  source 1..80: mol_type = other DNA
atggtggactccattctaatggactgcagactgggtacatgtgaagggactggacaaagccctacttcttgaagatttat

SEQ ID NO: 8716 - DNA, 80 bp, synthetic construct
  source 1..80: mol_type = other DNA
gccgggcgtggtggctcacacctgtaatcccagcactttaggaggccgaggtcagcgaatcacaaggtcaggctcccgtg

SEQ ID NO: 8717 - DNA, 80 bp, synthetic construct
  source 1..80: mol_type = other DNA
cccacccacatcactctctagtgagtataaaaacgatgacaaggccaagcaaagggtcaaaacctgtggctctcctgcca

SEQ ID NO: 8718 - DNA, 80 bp, synthetic construct
  source 1..80: mol_type = other DNA
cgtccacatttggagggcacaaaagtgagaagccggctctgcctcggaagagggcaggggagaacaggtctgaccaggtg

SEQ ID NO: 8719 - DNA, 80 bp, synthetic construct
  source 1..80: mol_type = other DNA
gctatgtggattccatccagcaaatgaggaacaagtttgccttccgagaggccatcaacaaactggagaataatctccgg

SEQ ID NO: 8720 - DNA, 80 bp, synthetic construct
  source 1..80: mol_type = other DNA
gattcttacaaggccctttcctttggaacaagacagccttcacttttctgagttcttgaagcatttcaaagccctgcctc

SEQ ID NO: 8721 - DNA, 80 bp, synthetic construct
  source 1..80: mol_type = other DNA
tactggtcccttccttttgttaacgtgatgtgccactatattttacacgtatctcttggtatgcatcttttatagacgct

SEQ ID NO: 8722 - DNA, 80 bp, synthetic construct
  source 1..80: mol_type = other DNA
gacccgcagctgcgcaggatcatcggagctgtgcgcaccctgggctctgccaacctgcccctggctaagcggcagcaggt

SEQ ID NO: 8723 - DNA, 80 bp, synthetic construct
  source 1..80: mol_type = other DNA
agcattcctcccctctgactccccagtacaacgccctgctaagcaacatgagcaggatctactccaccgccaaggtctgc

SEQ ID NO: 8724 - DNA, 80 bp, synthetic construct
  source 1..80: mol_type = other DNA
tctggtgaaggccgttgaagacttcaacgtggaggcctcctcaccgaccctgcctgcctgtgtctcagatctcaccaaca

SEQ ID NO: 8725 - DNA, 80 bp, synthetic construct
  source 1..80: mol_type = other DNA
gtgaccctcacatctcacatgtgtggggcatcatactgtttgcttcacatgcaggagaccattcgtgttcccactttaca

SEQ ID NO: 8726 - DNA, 80 bp, synthetic construct
  source 1..80: mol_type = other DNA
gggtggcagaggagttcttcacctccctggagctctcccccatgcctcccgagttctgggaagggtcgatgctggagaag

SEQ ID NO: 8727 - DNA, 80 bp, synthetic construct
  source 1..80: mol_type = other DNA
agctctgcccttctttctgcctcccggccccaggtcaggcagggttcgggatcctcctagagcctcacggtgcacactgc

SEQ ID NO: 8728 - DNA, 80 bp, synthetic construct
  source 1..80: mol_type = other DNA
tcctcctgttacccgaaacgaaacccactttgatgctggagctaagtttcatgttccaaatgtgacaccatacatcaggt

SEQ ID NO: 8729 - DNA, 80 bp, synthetic construct
  source 1..80: mol_type = other DNA
gccgctgctcaagtacttccagccagtcacccagtggctgcaggagcagaaccagcagaacggcgaggtcctgggctggc

SEQ ID NO: 8730 - DNA, 80 bp, synthetic construct
  source 1..80: mol_type = other DNA
aactacaacaccaacatcaccacagagaccagcaagattctggtgggagccacctccccacccccaaacctgagcatgtg

SEQ ID NO: 8731 - DNA, 80 bp, synthetic construct
  source 1..80: mol_type = other DNA
tgttccttggcactttgatctgttgcctcatctttttctcaacagccttgcaaaattggtgagcttattcccattttaca

SEQ ID NO: 8732 - DNA, 80 bp, synthetic construct
  source 1..80: mol_type = other DNA
ctcctgtcctctctgcatgccgcccctcagagcagcgggatctcaaagttatatttcatgggcttggactccaaatgggg

SEQ ID NO: 8733 - DNA, 80 bp, synthetic construct
  source 1..80: mol_type = other DNA
ctaaaaatacaaaagttagctgggcgtggtggtagatgcctgtagtcccagctacttgggaggctgaggcatgagaatcg

SEQ ID NO: 8734 - DNA, 80 bp, synthetic construct
  source 1..80: mol_type = other DNA
gcaccgtcactacggggcccagcacatcaacctggaggggcccattcctgctcacctgctgggtaagggcacatgtcggg

SEQ ID NO: 8735 - DNA, 80 bp, synthetic construct
  source 1..80: mol_type = other DNA
aaatctgtttctgagccttccattcatcctgagtttcttccttttcctctgtcgtggagaactaggctcttttcttacac

SEQ ID NO: 8736 - DNA, 80 bp, synthetic construct
  source 1..80: mol_type = other DNA
acctggtccaacatctatgacttggtggtgcccttcccttcagccccctcgatggacaccacagaggctatgctaaagca

SEQ ID NO: 8737 - DNA, 80 bp, synthetic construct
  source 1..80: mol_type = other DNA
acgaaacaaccagttgattttgcttatgattttatgtgccaggaattcaggcagtacacagtggaaatggcctttctcta

SEQ ID NO: 8738 - DNA, 80 bp, synthetic construct
  source 1..80: mol_type = other DNA
atttcataaaaaataaataagtaaatgagaacaaggaaggactgacgagagacggtagaaccttctggtttgggcagctc

SEQ ID NO: 8739 - DNA, 80 bp, synthetic construct
  source 1..80: mol_type = other DNA
gagcatgacatcaactttctgatgaagatggcccttgacaagatcgcctttatccccttcagctacctcgtcgatcagtg

SEQ ID NO: 8740 - DNA, 80 bp, synthetic construct
  source 1..80: mol_type = other DNA
ctgccaaggctgatgggttttttcttgaacattcttttgatgagagtctgtaccatccaaacagttgaacacagaaactc

SEQ ID NO: 8741 - DNA, 80 bp, synthetic construct
  source 1..80: mol_type = other DNA
ctagcttcccagcttaatgcagacaattctccaaacaggggtgggcaaaggagacttggctgctctagaaaaacattccg

SEQ ID NO: 8742 - DNA, 80 bp, synthetic construct
  source 1..80: mol_type = other DNA
cgctctgctccaggtactttgtcagcttcatcatccagttccagttccacgaggcactgtgccaggcagctggccacacg

SEQ ID NO: 8743 - DNA, 80 bp, synthetic construct
  source 1..80: mol_type = other DNA
agccccttctcccagcacacggctgcctgacactgagccccacctctccaagtctctctgtgaatacaattaaaggtcct

SEQ ID NO: 8744 - DNA, 80 bp, synthetic construct
  source 1..80: mol_type = other DNA
cagcacacacctcctcactccctgcattggagggagtgtcattttaagggacatttttatgacttttatgtgtatgttta

SEQ ID NO: 8745 - DNA, 80 bp, synthetic construct
  source 1..80: mol_type = other DNA
attctgagtatgcctgtcatttagacttcaatactacgttagcatcttcaaaaaatcattgttgtgtgcccacgttcctg

SEQ ID NO: 8746 - DNA, 80 bp, synthetic construct
  source 1..80: mol_type = other DNA
atgtttgatattacagaaacaagtaaacatgctgaaacacatatgtgtgtttgaatagttgattatttctgtagaataga

SEQ ID NO: 8747 - DNA, 80 bp, synthetic construct
  source 1..80: mol_type = other DNA
gctggttgtgagagttaagtgttagagacaggaaatagaattggcttagttttctaagcttcagacaaaaagtaagccaa

SEQ ID NO: 8748 - DNA, 80 bp, synthetic construct
  source 1..80: mol_type = other DNA
atggtggcatcagaaatgtcgattttgggaccttctgcctgcattagttccatatctagttgatttggagactgtagata

SEQ ID NO: 8749 - DNA, 80 bp, synthetic construct
  source 1..80: mol_type = other DNA
acccattactttcaaccacatattttaatgggaaacaagataaatgattatatcaccaaagtagtctcttgtccacttga

SEQ ID NO: 8750 - DNA, 80 bp, synthetic construct
  source 1..80: mol_type = other DNA
ttgagcttcactttccttagggcatgtttttgttaataaaacaatagttggcctaaaattgcttacttcttttggccaaa

SEQ ID NO: 8751 - DNA, 80 bp, synthetic construct
  source 1..80: mol_type = other DNA
cccaggccaaacacagcacaggtagagcctggggtgacctgtgttttcagaaaatgcaaaaatggattataaaaacttta

SEQ ID NO: 8752 - DNA, 80 bp, synthetic construct
  source 1..80: mol_type = other DNA
taaaagatattttagtctcagctctcatattaaccagcagtgagactttgggcaaatatctttatatctctgggcctcgg

SEQ ID NO: 8753 - DNA, 80 bp, synthetic construct
  source 1..80: mol_type = other DNA
cgacattcaaaatctacaaaaataatcttcgattcttgtgagacattccttccctttgggttcctgacagtctgcgtgta

SEQ ID NO: 8754 - DNA, 80 bp, synthetic construct
  source 1..80: mol_type = other DNA
ggtaagacctgttttttgttatagtttgatttacaataaaaatgagaattttgaactaattcttttcaaagtaactaggt

SEQ ID NO: 8755 - DNA, 80 bp, synthetic construct
  source 1..80: mol_type = other DNA
gatagtatggaagtgtcctagttattctccctttataattagtaatccgtaaccagttacatttaagcatggctgaaagt

SEQ ID NO: 8756 - DNA, 80 bp, synthetic construct
  source 1..80: mol_type = other DNA
taaaacttaaatacaaatggaaaaatgtatttcaccttaatacgaacttcatgggccttaggaggtgcaacctccacctc

SEQ ID NO: 8757 - DNA, 80 bp, synthetic construct
  source 1..80: mol_type = other DNA
agaatacttggaagtaaagtactaatagtaggagttcctgattatcaggtgcctatgatgtgacaggcacattgtggcct

SEQ ID NO: 8758 - DNA, 80 bp, synthetic construct
  source 1..80: mol_type = other DNA
agtctcaaagctggctttccagagaataaagatgaatctagccttatgttttcactactcggtgtcagtaaaaagttagc

SEQ ID NO: 8759 - DNA, 80 bp, synthetic construct
  source 1..80: mol_type = other DNA
ccttgatgattctaatgctgtgagaccaatgagcattttgtaaactattttatgttaaggttaaaagggtatttcaaagt

SEQ ID NO: 8760 - DNA, 80 bp, synthetic construct
  source 1..80: mol_type = other DNA
caggtagtgtcccatgatgatgttatcttacggacattctgaaaactttcttgaccctgagtaactccttcagcattttc

SEQ ID NO: 8761 - DNA, 80 bp, synthetic construct; identical to SEQ ID NO: 8760
  source 1..80: mol_type = other DNA

SEQ ID NO: 8762 - DNA, 80 bp, synthetic construct
  source 1..80: mol_type = other DNA
tcctgtatttagaactcttggaccttcactacttgtaaatgtgagtctatcctttaccttaccctagcttttaccccagg

SEQ ID NO: 8763 - DNA, 80 bp, synthetic construct
  source 1..80: mol_type = other DNA
tcccagctaccctatttccatccccatacatttggttcaagaaaaaggaagttcatcttttttggttttcttttcttttc

SEQ ID NO: 8764 - DNA, 80 bp, synthetic construct
  source 1..80: mol_type = other DNA
taactgcctgtttccagttgtgcctcatgtaaatgcaggtgacaaaattcattttaatagctggttgtaagtgttaaatg

SEQ ID NO: 8765 - DNA, 80 bp, synthetic construct
  source 1..80: mol_type = other DNA
gtagatttgcatgttctactaaaaatttccatgccttacacagtcacaagtacaaaaacagatggagattaaaggtcctg

SEQ ID NO: 8766 - DNA, 80 bp, synthetic construct
  source 1..80: mol_type = other DNA
cttcctaataaaggtattttgaacccagtactttcaaccagatattttgacggtgaacaagataaacaattatatcaccg

SEQ ID NO: 8767 - DNA, 80 bp, synthetic construct
  source 1..80: mol_type = other DNA
atgacataagcactgcaagattggaaatagtatttcatatcaataatgccaactgaggctcagcatggttgctcatgtct

SEQ ID NO: 8768 - DNA, 80 bp, synthetic construct
  source 1..80: mol_type = other DNA
tagaggcagaaatctcagggcatgtcatggtacataccatggtgtcaagccgaccgatgacttcaaatgaaaaatccaca

SEQ ID NO: 8769 - DNA, 80 bp, synthetic construct
  source 1..80: mol_type = other DNA
tgaattttttctttgtggttggctaggggctatttattaaacctagtctcccatagtcagtcttcattgtgggtaacatg

SEQ ID NO: 8770 - DNA, 80 bp, synthetic construct
  source 1..80: mol_type = other DNA
atggtgcctgaggcatttataggtgctctctaatcgttgaatgaattactaaatgaattcttaggtctaaaatttcatga

SEQ ID NO: 8771 - DNA, 80 bp, synthetic construct
  source 1..80: mol_type = other DNA
ctgaggattcctactgagaaatcgcaaatgtgggagaccacacagattaaaaaaattacttccactgtactaatagttaa

SEQ ID NO: 8772 - DNA, 80 bp, synthetic construct
  source 1..80: mol_type = other DNA
tagcctccattttgtgaactcagcacagaacagtttccacatttactttttttccctcctcccgtttctacttctatctg

SEQ ID NO: 8773 - DNA, 80 bp, synthetic construct
  source 1..80: mol_type = other DNA
atatcctttggaatttttttctgtacaaacataaattcttttgtattttactggaattatactgtatgtactctttgatc

SEQ ID NO: 8774 - DNA, 80 bp, synthetic construct
  source 1..80: mol_type = other DNA
cctactcatttgaaacttagctttggcagcctgttttgtaatctaatttatgtgtagagacttctttcagcttagatttg

SEQ ID NO: 8775 - DNA, 80 bp, synthetic construct
  source 1..80: mol_type = other DNA
gagcctgtttgtcacacaatgcagagagaagcctcagaacctttaaattgaattatcatagtgagatattttacagtgtg

SEQ ID NO: 8776 - DNA, 80 bp, synthetic construct
  source 1..80: mol_type = other DNA
cccactggattattcccagactgtcaaaacagataaaagggtactgaaccagcaatcaaaatattgacttccaaattcta

SEQ ID NO: 8777 - DNA, 80 bp, synthetic construct
  source 1..80: mol_type = other DNA
taattgtgagaaatggagcaaaatcctcactggatcatttccattaccctttgatcaatgtagctagtatcctcatggct

SEQ ID NO: 8778 - DNA, 80 bp, synthetic construct
  source 1..80: mol_type = other DNA
cttcaactgtacctagtttcatgtgtacaataggtgtttaatgaaagattgttgaattcttgtgctcctttatgttagga

SEQ ID NO: 8779 - DNA, 80 bp, synthetic construct
  source 1..80: mol_type = other DNA
ccaactactatattataaatgcagcttatccagagagatgatatgcttgcttcagtttgggtcagcgatccccggtgtgc

SEQ ID NO: 8780 - DNA, 80 bp, synthetic construct
  source 1..80: mol_type = other DNA
actggctgtggctgtggagcctggaattcttccatgaagagcgtgtgtgagagaacaaaatgtttgtttacattcctcct

SEQ ID NO: 8781 - DNA, 80 bp, synthetic construct
  source 1..80: mol_type = other DNA
ttaaattgcttgagatatgagatgatgacatagtccctgaaaattttattcccagctgtgtatctccctggagtctttga

SEQ ID NO: 8782 - DNA, 80 bp, synthetic construct
  source 1..80: mol_type = other DNA
agccacttgggagaaaaaaggcaaaacccaggactacccaggtaattccaaaagcttgttcgcattaatcttgcaagact

SEQ ID NO: 8783 - DNA, 80 bp, synthetic construct
  source 1..80: mol_type = other DNA
acacacacacagaaatatagaggtgtggagtgggaaatcaggggtctcacagcctccagagctgacagcctcaaacagag

SEQ ID NO: 8784 - DNA, 80 bp, synthetic construct
  source 1..80: mol_type = other DNA
tgatcatctgacattataggagactctgttgtgttagacttgaggggttttggagtcaggagtttgggagcatgagagga

SEQ ID NO: 8785 - DNA, 80 bp, synthetic construct
  source 1..80: mol_type = other DNA
aattgaggtcagagattcttgccccacaaaaatgactaagagttggccctacaacaactgtacctcccattattttcttt

SEQ ID NO: 8786 - DNA, 80 bp, synthetic construct
  source 1..80: mol_type = other DNA
cttccccacaaatacctgatactgtctttagatcctaagttggtaaatttggacaacctttggacaaccacatcaagttg

SEQ ID NO: 8787 - DNA, 80 bp, synthetic construct
  source 1..80: mol_type = other DNA
gactctcagaagtcaactagcacattttgaatgtcctctgtctttaaatgtccctgaagaaggagaagataccaaatgta

SEQ ID NO: 8788 - DNA, 80 bp, synthetic construct
  source 1..80: mol_type = other DNA
acctagtacctgggtgataaaataatctgtacaactgcctatgacatgagtttacctacataactaacctgcacatgtac

SEQ ID NO: 8789 - DNA, 80 bp, synthetic construct
  source 1..80: mol_type = other DNA
gaacatttggttacagaaatgaatagtcaggtgtctaagcatgtgtttatcagatatagatttgctctcactatacttca

SEQ ID NO: 8790 - DNA, 80 bp, synthetic construct
  source 1..80: mol_type = other DNA
aaagctcaaaatgcaaatcttccccaagagtggaaaagcattaacaaatggccaccgcaggcctttacctattcaaaata

SEQ ID NO: 8791 - DNA, 80 bp, synthetic construct
  source 1..80: mol_type = other DNA
ctttaccatactgtagtttttaccttagggatttggtacattttatttaaaaaaggaaaatgcagacagtgaaaattgag

SEQ ID NO: 8792 - DNA, 80 bp, synthetic construct
  source 1..80: mol_type = other DNA
tattaattctaagctacttcattcttgtgaagattagaaatgtaacatttacactagaattaatgccttttctataaacc

SEQ ID NO: 8793 - DNA, 80 bp, synthetic construct
  source 1..80: mol_type = other DNA
atgacattcttgtaaagtgaatttaggcatgctccatgccttcttttgttgctcaatagtgtcttctggttttggtcatc

SEQ ID NO: 8794 - DNA, 80 bp, synthetic construct
  source 1..80: mol_type = other DNA
taccttacatgtgctccatgcaaagattgaactggcaatggaaaaccaaggcactgtaattttttctcatccttccacct

SEQ ID NO: 8795 - DNA, 80 bp, synthetic construct
  source 1..80: mol_type = other DNA
ttcttaggttaatgagaatttggctctgaagcctaactacatacctccaaaaatagctcctttccacgtgcgtccagtca

SEQ ID NO: 8796 - DNA, 80 bp, synthetic construct
  source 1..80: mol_type = other DNA
ctccctgttacccacactgctggaccttctagaaaacctcagcaatggaaacttttttgtttctggagactttttcagta

SEQ ID NO: 8797 - DNA, 80 bp, synthetic construct
  source 1..80: mol_type = other DNA
cctttatacataatacgtatattctactgcctaaatgcatcctccaggttgcagaggcagaaatttcagggcatgtcacg

SEQ ID NO: 8798 - DNA, 80 bp, synthetic construct
  source 1..80: mol_type = other DNA
ttcagtagtcgtgaccagtatatccctcctttaaaaaatacacttgtgaacaacacagcaatgaaacattagtctatatt

SEQ ID NO: 8799 - DNA, 80 bp, synthetic construct
  source 1..80: mol_type = other DNA
agcagaacctatggtgcctgaggtatgtataggtgctctctaattgttgattgaattacaacatgaattagttcacagat

SEQ ID NO: 8800 - DNA, 80 bp, synthetic construct
  source 1..80: mol_type = other DNA
attgcctgccaaggcattgttttttagtttgggtttataagtgcctgaagaatcctaaagagaaaatacaagtgtgggaa

SEQ ID NO: 8801 - DNA, 80 bp, synthetic construct
  source 1..80: mol_type = other DNA
gatggtggatggctcctgctatgtttctttcattttctttcacctagtcagtttcattgattccatgctcaggaagagag

SEQ ID NO: 8802 - DNA, 80 bp, synthetic construct
  source 1..80: mol_type = other DNA
tatccctttgcatttttttctgtacaaacctataaattcttttgtatttcactggagttatccttcatatactgtttgcc

SEQ ID NO: 8803 - DNA, 80 bp, synthetic construct
  source 1..80: mol_type = other DNA
atgatgatttccagcttcatccatgtccctacaaaggacatgaactcatcattttttatggctgcatagtattccatggt

SEQ ID NO: 8804 - DNA, 80 bp, synthetic construct
  source 1..80: mol_type = other DNA
acaactattggctggtacatgttctaagtcacctttactttgctgacagagtcagtgtctgtccaaaatacactgctttc

SEQ ID NO: 8805 - DNA, 80 bp, synthetic construct
  source 1..80: mol_type = other DNA
tatgcctttgtatcctcatagcttagctcccacttataagtgagaccatatggtatttggttttccattcctgagttact

SEQ ID NO: 8806 - DNA, 80 bp, synthetic construct
  source 1..80: mol_type = other DNA
aaagtaaagtgaagtggtgtaagaacagtaccaatgggccactcatgtgatttccaaccagtcttattgacatgagcctg

SEQ ID NO: 8807 - DNA, 80 bp, synthetic construct
  source 1..80: mol_type = other DNA
tattctttttgaaggtatttaggaatagcttatttccactgtagttcagtatacattacatattatagcatatattgcat

SEQ ID NO: 8808 - DNA, 80 bp, synthetic construct
  source 1..80: mol_type = other DNA
ccgcacacggtaagacctcttgctttcgctcaggctcaagattcaagatacagatattgatatgtatatatatatttaat

SEQ ID NO: 8809 - DNA, 80 bp, synthetic construct
  source 1..80: mol_type = other DNA
acgaggtcatgggctactggtacttcggcaaggcttggtgcgagatctacctggcgctcgacgtgctcttctgcacgtcg

SEQ ID NO: 8810 - DNA, 80 bp, synthetic construct
  source 1..80: mol_type = other DNA
cttcaagaagatcctctgtcggggggacaggaagcggatcgtgtgaggtttccgctggcgcccgcgtagactcacgctga

SEQ ID NO: 8811 - DNA, 80 bp, synthetic construct
  source 1..80: mol_type = other DNA
actttaaaacctctctttccagtgttccctctctccctccagggccactgcttgaagaagaatatgtatgtttctatctt

SEQ ID NO: 8812 - DNA, 80 bp, synthetic construct
  source 1..80: mol_type = other DNA
ggtgatcgtggccatcgccaagacgccgcggctgcagacgctcaccaacctcttcatcatgtccctggccagcgccgacc

SEQ ID NO: 8813 - DNA, 80 bp, synthetic construct
  source 1..80: mol_type = other DNA
tttttttctgtttgtggtccggccttcttttgtgtgtgcgtgtgatgcatctttagatttttttcccccaccaggtggtt

SEQ ID NO: 8814 - DNA, 80 bp, synthetic construct
  source 1..80: mol_type = other DNA
tgtgtgttttaccaagtatttatactctggtgcaactaactactgtgtgaggaattggtccatgtgcaataaataccaat

SEQ ID NO: 8815 - DNA, 80 bp, synthetic construct
  source 1..80: mol_type = other DNA
attcttatgaaaatgtggacttttggcaacttctggtgcgagttttggacttccattgatgtgctgtgcgtcacggccag

SEQ ID NO: 8816 - DNA, 80 bp, synthetic construct
  source 1..80: mol_type = other DNA
acggaagactttgtgggccatcaaggtactgtgcctagcgataacattgattcacaagggaggaattgtagtacaaatga

SEQ ID NO: 8817 - DNA, 80 bp, synthetic construct
  source 1..80: mol_type = other DNA
agagctttctctcatcttaggtctgtcctgatttgctgtggaaaaggtaaaatgacaagggctaatgttcagatgtggct

SEQ ID NO: 8818 - DNA, 80 bp, synthetic construct
  source 1..80: mol_type = other DNA
ttcatctagtaaacctgtctttgaatgtctttccaaaatgctgggaatcctagggcactgtggcactatgtgtgatgtgg

SEQ ID NO: 8819 - DNA, 80 bp, synthetic construct
  source 1..80: mol_type = other DNA
ggttggctttttactccattttacaaaacaatctataagttttaggcccacatgaaagaacttttgagtgtgacactgag

SEQ ID NO: 8820 - DNA, 80 bp, synthetic construct
  source 1..80: mol_type = other DNA
tgtatgagagttccagttttgctgcattttcctcaaagctcttttgaggataaccatcctcgtgggtttaaagtggtctc

SEQ ID NO: 8821 - DNA, 80 bp, synthetic construct
  source 1..80: mol_type = other DNA
tggaaagcaagacagatgttgagggtgtttcatgggctgtctgcagtgatatttcaaactttcatacatttgcaagaaag

SEQ ID NO: 8822 - DNA, 80 bp, synthetic construct
  source 1..80: mol_type = other DNA
cagcatacattagaaggccctctctttctgaaagagtatgcggtatttagtcttagaaattaccttccatagagagttca

SEQ ID NO: 8823 - DNA, 80 bp, synthetic construct
  source 1..80: mol_type = other DNA
aaaaaaaagaaagaactttcctttctacatgctctaataggagaagtggttgggtatttggtcgggttcctaatccccat

SEQ ID NO: 8824 - DNA, 80 bp, synthetic construct
  source 1..80: mol_type = other DNA
atccttgaagctgggtttgaggggactgattcacaaacagaactcatgaaagacaaatatgtaaaaccagaatactagtt

SEQ ID NO: 8825 - DNA, 80 bp, synthetic construct
  source 1..80: mol_type = other DNA
actacagtcacacgccaccatgcctggctgattttttgtatttatttatttatttatttattttttgagaaggaattttg

SEQ ID NO: 8826 - DNA, 80 bp, synthetic construct
  source 1..80: mol_type = other DNA
tcaggcaaattgggcacctgtcaggtctccagttctttacctgagggcttatgcaacttttaatcaccgcctattcagaa

SEQ ID NO: 8827 - DNA, 80 bp, synthetic construct
  source 1..80: mol_type = other DNA
cagtaaagttgggttgcatctcaggaacagagagcaatttatttctacagctgtgtgaaatggggccagcttgcatccat

SEQ ID NO: 8828 - DNA, 80 bp, synthetic construct
  source 1..80: mol_type = other DNA
ccagactcgattaggctgacataacatgcctcttgctcatttctctgccttcatctctcagaatgcttctctccattctc

SEQ ID NO: 8829 - DNA, 80 bp, synthetic construct
  source 1..80: mol_type = other DNA
ccaggccccctagtattccattccctgtcccattgccctgcttaatctatctccacagtatttaaaattttttgtatata

SEQ ID NO: 8830 - DNA, 80 bp, synthetic construct
  source 1..80: mol_type = other DNA
tctatcaacattttaagggataccgctagcaccaaacagataccatttccttttactctgcaaagactgatggaagaata

SEQ ID NO: 8831 - DNA, 80 bp, synthetic construct
  source 1..80: mol_type = other DNA
ggtgtgaaaataaaataaaatattgggatgccatactcactatgccaaaaggaaaagttaagcttagaaactgagtctcc

SEQ ID NO: 8832 - DNA, 80 bp, synthetic construct
  source 1..80: mol_type = other DNA
ttgtttagtgtagccaccttcatcaattaacctatctagatatacataactcgctgcagcttctccatcagcacttgctg

SEQ ID NO: 8833 - DNA, 80 bp, synthetic construct
  source 1..80: mol_type = other DNA
ggcagaaagacagggaagtggcggttcagtagaacagtcagaacacaagcaatatttgttaagtttgctgtcttatatgg

SEQ ID NO: 8834 - DNA, 80 bp, synthetic construct
  source 1..80: mol_type = other DNA
attcttcaaaaaaaccccttggattcttataggaatctcagttttctgattgtgacaacattttccagatccttgatatg

SEQ ID NO: 8835 - DNA, 80 bp, synthetic construct
  source 1..80: mol_type = other DNA
agggacatggctcataccttggaaggccaacaaaaataactaaaatgctcactggattagagctttgtaaagtcatacta

SEQ ID NO: 8836 - DNA, 80 bp, synthetic construct
  source 1..80: mol_type = other DNA
acctaagggtaattcctcccttcccccatccataatgtgtgtagctaagtaccgacagcatactcacactttgttaaaat

SEQ ID NO: 8837 - DNA, 80 bp, synthetic construct
  source 1..80: mol_type = other DNA
gctcaaggcatttattttgcatctctgacagtacttacttatgtacaaatattcaagatccagttgtcaccaagggggaa

SEQ ID NO: 8838 - DNA, 80 bp, synthetic construct
  source 1..80: mol_type = other DNA
tattcctttggggtgctactttcccttttcctgtgttttattttttattttatgtaaagcaagggtctcactctgttgcc

SEQ ID NO: 8839 - DNA, 80 bp, synthetic construct
  source 1..80: mol_type = other DNA
aacggggggtgaaaatcaaaagaaaagaaaggcaaatttcccacagctaaagagagaactgaggcttcagagtaaaaaag

SEQ ID NO: 8840 - DNA, 80 bp, synthetic construct
  source 1..80: mol_type = other DNA
gtaggatctttggtcccacttttacaatttggacttagaggtttggcagcttcaactgtctcctagggaagaaagctgca

SEQ ID NO: 8841 - DNA, 80 bp, synthetic construct
  source 1..80: mol_type = other DNA
tgatgaggaaatgtggtttgaggcgtcccgctcctacaagagtgggcagagtttagaacagattaaggatatatgtggag

SEQ ID NO: 8842 - DNA, 80 bp, synthetic construct
  source 1..80: mol_type = other DNA
agtaaagctactgggatccatgaaactaagctaaacggaaaagactctctttctcaaagcacacaacaaagaaaagttcc

SEQ ID NO: 8843 - DNA, 80 bp, synthetic construct
  source 1..80: mol_type = other DNA
aaatcttaatctgttggttattacctatataaatgattgccaaacaactacttgatatgtagaaaacaaagcatgctact

SEQ ID NO: 8844 - DNA, 80 bp, synthetic construct
  source 1..80: mol_type = other DNA
gttactctactatccaggtggaaaaagaaacattgtaatcttttggcttgtaatacccacattttatttctaagtaaaca

SEQ ID NO: 8845 - DNA, 80 bp, synthetic construct
  source 1..80: mol_type = other DNA
gcctgtccaacatggtggctccatcttctcttttccttgtcaaccacgtgcacagtaaggagtaggcaacatggcatgag

SEQ ID NO: 8846 - DNA, 80 bp, synthetic construct
  source 1..80: mol_type = other DNA
gctgaggagtatgggtgcatggcacgggactggtgggcagctccgtctgcggccccagtgcgggatccactaggtgaagc

SEQ ID NO: 8847 - DNA, 80 bp, synthetic construct
  source 1..80: mol_type = other DNA
gacccctctttcccagtctatgggaaggtaaagtttaactttgttaagcacaattagcaaacacaggtgacctgatcaca

SEQ ID NO: 8848 - DNA, 80 bp, synthetic construct
  source 1..80: mol_type = other DNA
gtggcatagtgagtttgaggtcctagattctatttttcttttacagttcaacctctcttccctattgaagtcttgaccct

SEQ ID NO: 8849 - DNA, 80 bp, synthetic construct
  source 1..80: mol_type = other DNA
ccaaaaaatggacaatgttggatcttaggcaagttgcttaggtaccctaagtccctgagtctccatttctttatccataa

SEQ ID NO: 8850 - DNA, 80 bp, synthetic construct
  source 1..80: mol_type = other DNA
agcttgtccatcgtcatggagggtacatgtcaggcattgtaagaaatgagtaatgatgacaaaaaaacaaaagagtaatg

SEQ ID NO: 8851 - DNA, 80 bp, synthetic construct
  source 1..80: mol_type = other DNA
ttcaagccggctacaggaatttgcataagtaatgaggagtcgaatgttaatactcaagacaatagggaaaatgtctccag

SEQ ID NO: 8852 - DNA, 80 bp, synthetic construct
  source 1..80: mol_type = other DNA
gagatatggagtcaaaggagataattttggagctttaagatttgactgcctcactggatttcagacttgcatggggcttg

SEQ ID NO: 8853 - DNA, 80 bp, synthetic construct
  source 1..80: mol_type = other DNA
gtgtacttccagaccatgtaagaagtcaaggagataaaattgcactttcactctgctaaagccaacagctatttacaagg

SEQ ID NO: 8854 - DNA, 80 bp, synthetic construct
  source 1..80: mol_type = other DNA
cttcagaagattttcattagcaggagtaggaacagtttctgtaaaggcagcagaccaaagactaaataggttgccaatca

SEQ ID NO: 8855 - DNA, 80 bp, synthetic construct
  source 1..80: mol_type = other DNA
aaacaattgtaagacatgagagattccaacaggggataagtgtcttgctcaatgctctgtgtgttcccgagaaatcaaaa

SEQ ID NO: 8856 - DNA, 80 bp, synthetic construct
  source 1..80: mol_type = other DNA
acaaacttgctatgaataggagctttgtatgtatttgggtccaagcctttactttaaattttgggtgtccttcttttcct

SEQ ID NO: 8857 - DNA, 80 bp, synthetic construct
  source 1..80: mol_type = other DNA
gaaaagctaagaatccaaaaaagggatgttctgtttgttccttgtcacactgatttgagtgccaacatcccaaagtggaa

SEQ ID NO: 8858 - DNA, 80 bp, synthetic construct
  source 1..80: mol_type = other DNA
atatgtactctgaatagttttacataagacagatgcatttgagatgtaggtacacagtggcaggagcatgcctggctcat

SEQ ID NO: 8859 - DNA, 80 bp, synthetic construct
  source 1..80: mol_type = other DNA
cctctgtttccaaccaatatgattagcaactctttctattttgtgggggaaagctgccagggaagtggacagagacatga

SEQ ID NO: 8860 - DNA, 80 bp, synthetic construct
  source 1..80: mol_type = other DNA
atctcagacctgtcactcaaatatccaacacatctgactttgacccatagatttctcagggctccacttgtacatccaat

SEQ ID NO: 8861 - DNA, 80 bp, synthetic construct
  source 1..80: mol_type = other DNA
caccaaaaaaaaaaagtcatggtcattgtttggtggtctgctgccagtctgatccactacgtctgagaattatgctcagc

SEQ ID NO: 8862 - DNA, 80 bp, synthetic construct
  source 1..80: mol_type = other DNA
actgcaataaacatacgtgtgcaggtgccttcatagtagaatgatttataatcctctggataaatactcagcaatgggat

SEQ ID NO: 8863 - DNA, 80 bp, synthetic construct
  source 1..80: mol_type = other DNA
tggtgtaaggaagggtccagcttcaatcttctgtatatggctagccagttatcctagctccatgtattgaaaagggaatc

SEQ ID NO: 8864 - DNA, 80 bp, synthetic construct
  source 1..80: mol_type = other DNA
tgccagttttcagggggaatacttccagcttttgaccattcagcataatggcctttggtttattataaatggctcttgtt

SEQ ID NO: 8865 - DNA, 80 bp, synthetic construct
  source 1..80: mol_type = other DNA
gtccctagcttcttattgttcttatttctaagctaaaatgatgggattaaattggccagaaacttttagctcatttggaa

SEQ ID NO: 8866 - DNA, 80 bp, synthetic construct
  source 1..80: mol_type = other DNA
gaacatgagaaaatgccagaattatagagctggaagacattggagattctagtgcaaatgccttcatccaatggaggcct

SEQ ID NO: 8867 - DNA, 80 bp, synthetic construct
  source 1..80: mol_type = other DNA
tcatcaaacccactccattggcctcaaatctttatctcttccggtatttcttatctcagtgtttgtttacgtcagaaaca

SEQ ID NO: 8868 - DNA, 80 bp, synthetic construct
  source 1..80: mol_type = other DNA
tcttctatacatccccaaatctgcataaaaggagacccagctctataacattttgaaagaactagtcaaatcaggctgag

SEQ ID NO: 8869 - DNA, 80 bp, synthetic construct
  source 1..80: mol_type = other DNA
cttcctcattttctttatacttgtcccttgaatgtggcaactgccgtgcctcttctaaaactgaacctcaatgtcttctc

SEQ ID NO: 8870 - DNA, 80 bp, synthetic construct
  source 1..80: mol_type = other DNA
cactctgcgtctagctaaaggattgtaaacgcaccaatcagtactctgtaaaatggaccaatcagcaatctgtaaagtgg

SEQ ID NO: 8871 - DNA, 80 bp, synthetic construct
  source 1..80: mol_type = other DNA
gattgatgttaacagacattagttgctgaacagtgggtactcagagaggtgtgggcggctattttaaacctgtattttag

SEQ ID NO: 8872 - DNA, 80 bp, synthetic construct
  source 1..80: mol_type = other DNA
ctccatagggattcatagagctggacttgtagggctggactcactaaatcaacaaatatttagcatgttctgggagcttt

SEQ ID NO: 8873 - DNA, 80 bp, synthetic construct
  source 1..80: mol_type = other DNA
ctatgtggttgcaaatcctaaggcctcttgtggtgtaatgctctgaagtgagggataagatttaaatatctggagaaaaa

SEQ ID NO: 8874 - DNA, 80 bp, synthetic construct
  source 1..80: mol_type = other DNA
cataattctcttcctgcaaagatagccactattctgatctctgtcactagagatgatttggaaccttacatacttgaagt

SEQ ID NO: 8875 - DNA, 80 bp, synthetic construct
  source 1..80: mol_type = other DNA
cttaaattatagtcgtagttggggaagctaacatttaaggaggaggagcaggcaaagataggaaagaggcagaagataga

SEQ ID NO: 8876 - DNA, 80 bp, synthetic construct
  source 1..80: mol_type = other DNA
acacattgctggttagaagaagtcagtagacttcagtcatctcaacttggtgttccgatacctcttttcatagagaagag

SEQ ID NO: 8877 - DNA, 80 bp, synthetic construct
  source 1..80: mol_type = other DNA
ttaatttaacccacctgcactatgaccacagtcactcactgactcaccaaaaatggggtaaataattattttgcctgttt

SEQ ID NO: 8878 - DNA, 80 bp, synthetic construct
  source 1..80: mol_type = other DNA
attattttatccttaagtaatttcaaatgggataaaggaaagaaactgtactaaggagtacattcaactctgtagccaca

SEQ ID NO: 8879 - DNA, 80 bp, synthetic construct
  source 1..80: mol_type = other DNA
tattgacttatgaaagatgtaaaaaaaaaagatccaaacaaatgaaaagacactgtattcttgaatggaaagacttaaca

SEQ ID NO: 8880 - DNA, 80 bp, synthetic construct
  source 1..80: mol_type = other DNA
agccaaactgtatcaaaaagctaatgcccaggaatagaagaatgtgtcaatgtgtgagtataaagtgtatataatatccc

SEQ ID NO: 8881 - DNA, 80 bp, synthetic construct
  source 1..80: mol_type = other DNA
aagatgcctctccctctgcaggctgcttgcaacttgaaaaattgtccctgacactgtcaatgatatttcataagaatgat

SEQ ID NO: 8882 - DNA, 80 bp, synthetic construct
  source 1..80: mol_type = other DNA
tccactgccccttcatttgacatgtcatttcccacactgtaattcctccatgagttaatatccagctacactccaagaga

SEQ ID NO: 8883 - DNA, 80 bp, synthetic construct
  source 1..80: mol_type = other DNA
agcattaattaccttttttatgagaagaccacagcttagttatcatgtgtacgtcttcaaagtgcagcaagtcgcccagc

SEQ ID NO: 8884 - DNA, 80 bp, synthetic construct
  source 1..80: mol_type = other DNA
tcttcattatgggatgctttttggtgctttcaaatggaaaaagcagagttgttccaggcactgacagaaatctgtgctgt

SEQ ID NO: 8885 - DNA, 80 bp, synthetic construct
  source 1..80: mol_type = other DNA
gacaaatgtcttctgtgagtattcacgagggtgtatctgaccagtaagcaattttcttttcctgccagtttctcgcccca

SEQ ID NO: 8886 - DNA, 80 bp, synthetic construct
  source 1..80: mol_type = other DNA
ttgacatgaaataaaggaattcagttcaacttgaatgcaattgcatcagtttgtctgctgtcactccttagcacacaaag

SEQ ID NO: 8887 - DNA, 80 bp, synthetic construct
  source 1..80: mol_type = other DNA
cattaaaatgtgaaaatcttggtctgggggaaggggattgacacgatgggaaggagaggatgtcactgtatttcattgac

SEQ ID NO: 8888 - DNA, 80 bp, synthetic construct
  source 1..80: mol_type = other DNA
tctcaatttactaagcaaccataactatgaggcaaacacactatatttttaatgtgcgccgtatcctgggggttaaagat

SEQ ID NO: 8889 - DNA, 80 bp, synthetic construct
  source 1..80: mol_type = other DNA
aatgaaagacacaaactctcacatgctttgaaatcatacttgggtgggaaatgcagagaggcatgagttcagtaagagca

SEQ ID NO: 8890 - DNA, 80 bp, synthetic construct
  source 1..80: mol_type = other DNA
aggatttcttcaccttgcttccaggcttgtctgaatttctaactgctttttctattggttgtctcaaagtctcagtatag

SEQ ID NO: 8891 - DNA, 80 bp, synthetic construct
  source 1..80: mol_type = other DNA
agatttttaaaaatacatttaaaaaacctacctatgggctgggtggcatggctcacacctgtaatccagcactttgggag

SEQ ID NO: 8892 - DNA, 80 bp, synthetic construct
  source 1..80: mol_type = other DNA
aagagaagcacctggctccaatattacccaggcagcccctgaaatcttacagccaaccacttctcaagaagtctctcaaa

SEQ ID NO: 8893 - DNA, 80 bp, synthetic construct
  source 1..80: mol_type = other DNA
gcctagagctaatttgtctgcctcttgaggtgatatccttctgaatgctcaatttgatgtcctgtgacttatgaagtttc

SEQ ID NO: 8894 - DNA, 80 bp, synthetic construct
  source 1..80: mol_type = other DNA
aaatattatcttttacactggtgagttggtttaccatcttctgctttagggtaagacgttgtcaagagagagtgtcaagt

SEQ ID NO: 8895 - DNA, 80 bp, synthetic construct
  source 1..80: mol_type = other DNA
aacagaaaatacaaatatgaagaaacagtaggtaaaaaaatactttgggatgatgttaggagtcaggggaccagatacag

SEQ ID NO: 8896 - DNA, 80 bp, synthetic construct
  source 1..80: mol_type = other DNA
cttgtcctgaaggaaagtttgtgactgtgtattctttgcagaaagtaaggactatggatctcattaaaatgtccccaacc

SEQ ID NO: 8897 - DNA, 80 bp, synthetic construct
  source 1..80: mol_type = other DNA
tttgaggacagatatggtggggttggaaaacgtaaggatatttgtaggtgagaaggaaatccatctaaagacataaaaag

SEQ ID NO: 8898 - DNA, 80 bp, synthetic construct
  source 1..80: mol_type = other DNA
tggggcaatgtatgctggatgagggtgagaagaaatttcataagttatgtgattttaggtgactcggactacttccctga

SEQ ID NO: 8899 - DNA, 80 bp, synthetic construct
  source 1..80: mol_type = other DNA
catgtgaattagagtgaaagcaaaagggagggaaatggtaggaaaacatcagaatgttggtgggtgttgtgtaccttttg

SEQ ID NO: 8900 - DNA, 80 bp, synthetic construct
  source 1..80: mol_type = other DNA
agttcactatgtccatagctgatagtggacatagagaagtcccccaggagaaaaggccaaagggttacagaaaatggcta

SEQ ID NO: 8901 - DNA, 80 bp, synthetic construct
  source 1..80: mol_type = other DNA
tcagattcttcctttttttctcgtcaatcctgcttactggaacatgggtgtaatggctgacactctagttgctattttgg

SEQ ID NO: 8902 - DNA, 80 bp, synthetic construct
  source 1..80: mol_type = other DNA
gtaccatatgacgctacctattgcaacacaactaattagaccaaaggtgggaaactaaccagtgcagtcaatgcatagac

SEQ ID NO: 8903 - DNA, 80 bp, synthetic construct
  source 1..80: mol_type = other DNA
tcctgccctcctctagtagtttccagtgtctgttattgccgtctttatgtctatgggtacccaatggttggttcccactc

SEQ ID NO: 8904 - DNA, 80 bp, synthetic construct
  source 1..80: mol_type = other DNA
tgtaggttgtctgtttattttattgagtttcttttgctgcgcagaagctctttagtttttaattaggtctcacttttcag

SEQ ID NO: 8905 - DNA, 80 bp, synthetic construct
  source 1..80: mol_type = other DNA
atggccattttactgatattgagtcttccaatccatgagcatagcatgtttttccatttatttatgtcatctgttatttc

SEQ ID NO: 8906 - DNA, 80 bp, synthetic construct
  source 1..80: mol_type = other DNA
cttcaaagacatagtgagaaaattctcattccacactcccttgacacctaggaacttaaggtggaattgaaaccattgtg

SEQ ID NO: 8907 - DNA, 80 bp, synthetic construct
  source 1..80: mol_type = other DNA
ttccataccactctattcatcagctgagaagagaactgacagtacagattggtgtcacaagcatatcacagaatgaagag

SEQ ID NO: 8908 - DNA, 80 bp, synthetic construct
  source 1..80: mol_type = other DNA
agatctccccaaagtgatcgtaatttattacaaaaacatagtacccttacacacctatgaaaatctagtgtcaggttcaa

SEQ ID NO: 8909 - DNA, 80 bp, synthetic construct
  source 1..80: mol_type = other DNA
aatctcttcctgtccccattctccctacactttccagcctctaataacttctactgagctttttacttctatgagataaa

SEQ ID NO: 8910 - DNA, 80 bp, synthetic construct
  source 1..80: mol_type = other DNA
aggcaggaggattgcttgagaccaggagtttgagaccagactaggcagcacagtgaaaccccatctctactaaaaataca

SEQ ID NO: 8911 - DNA, 80 bp, synthetic construct
  source 1..80: mol_type = other DNA
ttgatatttcaatttcagcttagatataaaatctctgggttttgctttctttaagtatcgggggaaattcagtgcctgat

SEQ ID NO: 8912 - DNA, 80 bp, synthetic construct
  source 1..80: mol_type = other DNA
ttatggttggcttgtcttactcttatacctaatttgctcttttttgtctggagggcctgcatgtggatttttgttctttc

SEQ ID NO: 8913 - DNA, 80 bp, synthetic construct
  source 1..80: mol_type = other DNA
atttcctcttctctatttttttccctttcccccagaagcaatgcttcaatgttgccaatttccaactcgctcagttgtaa

SEQ ID NO: 8914 - DNA, 80 bp, synthetic construct
  source 1..80: mol_type = other DNA
ctctctctctgtacctctctgtctttctctctctctattctctcacttccttcctctctccttccactttctaatgtttt

SEQ ID NO: 8915 - DNA, 80 bp, synthetic construct
  source 1..80: mol_type = other DNA
tttttatatatggagtgtcactctgtcaccaggctggagtacagtggcacaatctcagatcattgcaaactccgcctccc

SEQ ID NO: 8916 - DNA, 80 bp, synthetic construct
  source 1..80: mol_type = other DNA
tcagcattgctggttatccctagcaaggagggaaaaattgtaatggaaaaggtgtaaactatgggcatggaggtgttttg

SEQ ID NO: 8917 - DNA, 80 bp, synthetic construct
  source 1..80: mol_type = other DNA
atgagaccctttgctagtgctaatattgagctgtagagggaataggggaatagacagaatggtgataacagatgagattt

SEQ ID NO: 8918 - DNA, 80 bp, synthetic construct
  source 1..80: mol_type = other DNA
cagcaattgttaatagtgaacaagatcatagggactacctctctgtgataacaattccatcttaactttcaggagcttct

SEQ ID NO: 8919 - DNA, 80 bp, synthetic construct
  source 1..80: mol_type = other DNA
cattagtatcatcagtgatacggtttcctgtgctttgcttactgacatagtgacttcctgtgattgccttaagggctgtg

SEQ ID NO: 8920 - DNA, 80 bp, synthetic construct
  source 1..80: mol_type = other DNA
ccatcttttccagctgatcttcttcttaaatctaaaatattctatagctatttcttcttctctgtatatttttagcaatc

SEQ ID NO: 8921 - DNA, 80 bp, synthetic construct
  source 1..80: mol_type = other DNA
aacttcatcaccaagcaattttaccttcttggagctgaaatgtcaagcatcaccacttgtgtggagggactttgtagagc

SEQ ID NO: 8922 - DNA, 80 bp, synthetic construct
  source 1..80: mol_type = other DNA
ctttatttctgtatgcctggcagggaggaggagatagtttctctatcttgggtcagttgattcttctatactcagctatc

SEQ ID NO: 8923 - DNA, 80 bp, synthetic construct
  source 1..80: mol_type = other DNA
aaagtgagtaggaaaaatccagtgttttttcaaacggcctccagaatgattctcaagtggtagttgaatagtgagagaat

SEQ ID NO: 8924 - DNA, 80 bp, synthetic construct
  source 1..80: mol_type = other DNA
aacaatgcgtttaagaatcagtactaataagtggcagtggagtcatgctgtctggcaaaaataaaaaagagcagcgtttt

SEQ ID NO: 8925 - DNA, 80 bp, synthetic construct
  source 1..80: mol_type = other DNA
ttgctttgatcagtatttctaagggtctatgctatgttttctggcttgccaatcacttagacttctgcccttcaaagata

SEQ ID NO: 8926 - DNA, 80 bp, synthetic construct
  source 1..80: mol_type = other DNA
tttttccaattgtgtgaagaaagtcattggtagcttgatggggatggcattgaatctgtaaattaccttgggcagtatgg

SEQ ID NO: 8927 - DNA, 80 bp, synthetic construct
  source 1..80: mol_type = other DNA
ttttcgcaacctactcatctgacaaagggctaatatccagaatctacaatgaactcaaacaaatttacaagaaaaaaaac

SEQ ID NO: 8928 - DNA, 80 bp, synthetic construct
  source 1..80: mol_type = other DNA
gatgtttccattcagctgttggcataataatggattacagtgtggtgaaggaaagagttggggtttcagattaatacttg

SEQ ID NO: 8929 - DNA, 80 bp, synthetic construct
  source 1..80: mol_type = other DNA
agctcactgcattcccttatttgttacagcattattcacaatagcaagatgtgggaacaactcaagtgttaatcaacaga

SEQ ID NO: 8930 - DNA, 80 bp, synthetic construct
  source 1..80: mol_type = other DNA
ttaaatttgtgttaacctgtcactttgtgagggtcatctactttttatacaaagtcactgcaacctacatacttaattct

SEQ ID NO: 8931 - DNA, 80 bp, synthetic construct
  source 1..80: mol_type = other DNA
ctaagcatgggctttttacagtacgtggtgcttgatcagtctatgaattcaacccaattaacattttctctgtagaaatt

SEQ ID NO: 8932 - DNA, 80 bp, synthetic construct
  source 1..80: mol_type = other DNA
ggttccagttcccagcatatactcacactttgctcttagtcatttttcattgccatccctctctgctgactgcattcagg

SEQ ID NO: 8933 - DNA, 80 bp, synthetic construct
  source 1..80: mol_type = other DNA
aggaccaggggaagaaaaagagattttcccatattcagtgaggtcatttctgcaattagtggtttggagtgggtcccctt

SEQ ID NO: 8934 - DNA, 80 bp, synthetic construct
  source 1..80: mol_type = other DNA
tccaactcaggtaccatcacttcctaaattttctttcccctctttgtttatatgtatagtctattttgcacagcatacct

SEQ ID NO: 8935 - DNA, 80 bp, synthetic construct
  source 1..80: mol_type = other DNA
attaagattctccatctctgtcctggaatttaccctatcattgaaatcatggttatgtgtaatgaacaagctaactgctc

SEQ ID NO: 8936 - DNA, 80 bp, synthetic construct
  source 1..80: mol_type = other DNA
tctctgtttggtctagtgcttaagtgaacttgctaactaaagccttccttcctcctgtgtaagtgaatgaaaaacctctc

SEQ ID NO: 8937 - DNA, 80 bp, synthetic construct
  source 1..80: mol_type = other DNA
gtgttaatgccgtcgaagtggtagtggttgtgtggaatattgtttgagaattctgggactgcatgtagattaggaaaaag

SEQ ID NO: 8938 - DNA, 80 bp, synthetic construct
  source 1..80: mol_type = other DNA
ggcaaagttcagatatgggtggcacctttagaaggaagaaggcagtcaagggaatctaaggatacataccacgtttttac

SEQ ID NO: 8939 - DNA, 80 bp, synthetic construct
  source 1..80: mol_type = other DNA
tgaagcatcagagctaacccagggagacaggaagtggcattagatttttttctgttttagccctgcttagagatgtagtc

SEQ ID NO: 8940 - DNA, 80 bp, synthetic construct
  source 1..80: mol_type = other DNA
tttttctgcacttctaggaatctgagagcatttgctctacaccttgtattctatctaattctgccgtctcttgttctcct

SEQ ID NO: 8941 - DNA, 80 bp, synthetic construct
  source 1..80: mol_type = other DNA
caccactagttttctcactgttcttctccacatgactgttggactccattccatgcttcttgcttcctcctctatattct

SEQ ID NO: 8942 - DNA, 80 bp, synthetic construct
  source 1..80: mol_type = other DNA
tagcagatagcaacagaacacaggctatgagcagtcatgctgtgctagaaatttagtttcttcaccactcaaaaagaaag

SEQ ID NO: 8943 - DNA, 80 bp, synthetic construct
  source 1..80: mol_type = other DNA
tgtgtctttatcaattttttaaacgcagaagggcccatgaaacacacagcagaattcaatgttctatgctaaatgcagag

SEQ ID NO: 8944 - DNA, 80 bp, synthetic construct
  source 1..80: mol_type = other DNA
cctccaccccaggtacatgccacagctaagctgtgcaactcagaagggtataatttaatgtatttttacctgcagtatgt

SEQ ID NO: 8945 - DNA, 80 bp, synthetic construct
  source 1..80: mol_type = other DNA
ccagaattgttgtagacttgtacaaggagctatgaactcacattctaacaggtaaaggacagatgatggaactaccaata

SEQ ID NO: 8946 - DNA, 80 bp, synthetic construct
  source 1..80: mol_type = other DNA
ttggggcaagacacataagtagctgtgagaatcaaggcaagacatgtaaatggtggggttctcaatttctttgtaaaaca

SEQ ID NO: 8947 - DNA, 80 bp, synthetic construct
  source 1..80: mol_type = other DNA
cccacgatgtggtggtaaacaatgtgccactgctactaacatttattttctacttttaatattagcaatagagttgtagt

SEQ ID NO: 8948 - DNA, 80 bp, synthetic construct
  source 1..80: mol_type = other DNA
catacaacaaatttgaatttaaatgtaggcttgcggtgtaactagtttggggacaatgggtaggtcgcagcttttttgat

SEQ ID NO: 8949 - DNA, 80 bp, synthetic construct
  source 1..80: mol_type = other DNA
tctggtaagaagacgaagctcaacttgtcgttttcccctagattttctaattgcaatgcatggtagtcattttatttcag

SEQ ID NO: 8950 - DNA, 80 bp, synthetic construct
  source 1..80: mol_type = other DNA
caaagggcattgttaggtagatcagattaaagattcatgggaaatatgccagaatttgaagacttttgcacatggaagta

SEQ ID NO: 8951 - DNA, 80 bp, synthetic construct
  source 1..80: mol_type = other DNA
tttcttgccattgctggtacagtactgaagaatgttctgtacagcttcttagagaatctcagtgagactgagcctacatt

SEQ ID NO: 8952 - DNA, 80 bp, synthetic construct
  source 1..80: mol_type = other DNA
tgctatgtttggactatgtttctggtccagaaaatttgagaaaagtttagcacaatgaagccaggaaagttttatcacgc

SEQ ID NO: 8953 - DNA, 80 bp, synthetic construct
  source 1..80: mol_type = other DNA
gatatcctttcctcttcctggaatgagacactggctctgtttcaaatagatcttttggcacagaaatagagtatgtttca

SEQ ID NO: 8954 - DNA, 80 bp, synthetic construct
  source 1..80: mol_type = other DNA
aggttttgcatatcctttggaaaaaatgagtggaagacagctatctccacccaaacttgtagagagctgttttcctaaga

SEQ ID NO: 8955 - DNA, 80 bp, synthetic construct
  source 1..80: mol_type = other DNA
ccttagtgtctgttacactcatatctcttcctggactagtttctccaaatacattttttttttaatcctgcacggacaat

SEQ ID NO: 8956 - DNA, 80 bp, synthetic construct
  source 1..80: mol_type = other DNA
atgagttaattatgtggtgagagaccttgttttctgccctcttttctgtttgtcatctgtccttttttcctcccctcttt

SEQ ID NO: 8957 - DNA, 80 bp, synthetic construct
  source 1..80: mol_type = other DNA
taggatgcatgttcacatggtggtggtgttagcatgatctgtaggtagaacatcaaaagtgtacctatcgaacactcaag

SEQ ID NO: 8958 - DNA, 80 bp, synthetic construct
  source 1..80: mol_type = other DNA
ctatcattctatattgccttcttgatattctgctttaagattcctcctcagtcacatatttctatggctgatagactggt

SEQ ID NO: 8959 - DNA, 80 bp, synthetic construct
  source 1..80: mol_type = other DNA
caccggtgtattcttcttatttttaagaataatttggtgacctctagagaggtctatgcggtctcttcagagcacctata

SEQ ID NO: 8960 - DNA, 80 bp, synthetic construct
  source 1..80: mol_type = other DNA
ccctctatgacagaaatccaaagcctccttaacctgcttctcatattgacacccatggataatcccaactatacaaggaa

SEQ ID NO: 8961 - DNA, 80 bp, synthetic construct
  source 1..80: mol_type = other DNA
gttggagcgctaagtctttgaaggcagagcttatgcatatttcacaggtctcatcatatgataggttctcaatgaataca

SEQ ID NO: 8962 - DNA, 80 bp, synthetic construct
  source 1..80: mol_type = other DNA
cacacacacacacatatatggtgtatacttgtgttatatgtgtgcttaaaaccacaaatgtatagcaaacacacccatat

SEQ ID NO: 8963 - DNA, 80 bp, synthetic construct
  source 1..80: mol_type = other DNA
tattaccaataagtttctacatgatgtggttcctgtatgcctctctgatcccaactatgaaatcttccagtcttcttttt

SEQ ID NO: 8964 - DNA, 80 bp, synthetic construct
  source 1..80: mol_type = other DNA
ttctggatattatccctttgtcagatgagtagattgcaaaaattttctcccattctgtaggttgcctgttcactctgatg

SEQ ID NO: 8965 - DNA, 80 bp, synthetic construct
  source 1..80: mol_type = other DNA
ttttgtatcctgagactttgctgaatttgcctatcagcttaaggcgattttgggctgagacgatggggttttctagatat

SEQ ID NO: 8966 - DNA, 80 bp, synthetic construct
  source 1..80: mol_type = other DNA
gcagggcgaggcatcgcgtcacccaggaagcacaaggggtcagggaattccttttcctagtcaaagaaaggagtgacaga

SEQ ID NO: 8967 - DNA, 80 bp, synthetic construct
  source 1..80: mol_type = other DNA
tccgtccttgtttctttctaacacaccaagcttattcactcctggaattttgtgcttcctctctgctgatctatttatga

SEQ ID NO: 8968 - DNA, 80 bp, synthetic construct
  source 1..80: mol_type = other DNA
agaggttaaatattttctcatcaagatgtaagagctcttagccacgttaatcatttggtcttttcttcccccaacactat

SEQ ID NO: 8969 - DNA, 80 bp, synthetic construct
  source 1..80: mol_type = other DNA
ttggctctaaagctacttattgcattttcacatgccaggcaaagggaaagaatggcaaaaactcttacgttgaactgcaa

SEQ ID NO: 8970 - DNA, 80 bp, synthetic construct
  source 1..80: mol_type = other DNA
tattgggcagaaaaatcattccagacagagggaacagctaatgccaacgtttgaagggaaaccatgcctggcatgttcaa

SEQ ID NO: 8971 - DNA, 80 bp, synthetic construct
  source 1..80: mol_type = other DNA
ctgtaaggtgagaatgaaggaatgaacatactgttgaatgctgaggcaggtaggatgatggttatgtgaatatttgtctg

SEQ ID NO: 8972 - DNA, 80 bp, synthetic construct
  source 1..80: mol_type = other DNA
tgcttaaccaagctatttaacttttccaagtattgagttctttgtgtgttaagtgtggtatttgggctaaattctccttt

SEQ ID NO: 8973 - DNA, 80 bp, synthetic construct
  source 1..80: mol_type = other DNA
agatcatggcaaacttgcttgtctgttggttccctacacatatggacccttttatattcaaggacaaaatgaagtcacca

SEQ ID NO: 8974 - DNA, 80 bp, synthetic construct
  source 1..80: mol_type = other DNA
aaagggaactggataattctattacatttatggaaacgtaggaccagaaggttaagtgtgaatgcactatgtgctctagg

SEQ ID NO: 8975 - DNA, 80 bp, synthetic construct
  source 1..80: mol_type = other DNA
tggtcaacttaatatttaagaggcattttttctgctgcttgattattttgtttactaaatatgcgtcacctttatagctt

SEQ ID NO: 8976 - DNA, 80 bp, synthetic construct
  source 1..80: mol_type = other DNA
ttgcagatgacgatagtgagataaaatacctaaaatcgaagagcagatggaggttaagaaagtacatcatcattgcttaa

SEQ ID NO: 8977 - DNA, 80 bp, synthetic construct
  source 1..80: mol_type = other DNA
tggctctctctttctggtcattgtcttctcaggatatgctgcctagaactgctgcagctatcacatgaccataaagtttt

SEQ ID NO: 8978 - DNA, 80 bp, synthetic construct
  source 1..80: mol_type = other DNA
tgctttcctccatttctgaatcaacttcttgctacttctggccattcagttctaataaggagaagagagaaggcatttgc

SEQ ID NO: 8979 - DNA, 80 bp, synthetic construct
  source 1..80: mol_type = other DNA
tgttttctaaagttatttatccaaggagaaattgcccctcccctgcttccttctatagggaatcttacaggactaggatt

SEQ ID NO: 8980 - DNA, 80 bp, synthetic construct
  source 1..80: mol_type = other DNA
cagatcttgtgttaatgctagccaccagccaggcaatgtagaattgagtacatgtggctgtacatttgtaccaatattct

SEQ ID NO: 8981 - DNA, 80 bp, synthetic construct
  source 1..80: mol_type = other DNA
tgctaagaacgaaaactcacccgtaacaacatgctattatggaagtaagttttattagcacagtaagtcagtggatcagg

SEQ ID NO: 8982 - DNA, 80 bp, synthetic construct
  source 1..80: mol_type = other DNA
caatgcgattatttattataattgactcagtcaagtccacacatcacccattattcctgtgttatttcccagctgacttg

SEQ ID NO: 8983 - DNA, 80 bp, synthetic construct
  source 1..80: mol_type = other DNA
tcattcagcatgtggctgacactttcagtgattctcatcataaatattttgctgccacatcgcaaaggaagagtagaaaa

SEQ ID NO: 8984 - DNA, 80 bp, synthetic construct
  source 1..80: mol_type = other DNA
aaggcggaaagtgattctttccatggatcttttattacgtgacacaatgtaccacagcaactaaactgctcttcagcagc

SEQ ID NO: 8985 - DNA, 80 bp, synthetic construct
  source 1..80: mol_type = other DNA
ggaatggaaaggtatgcttgggaagaatggggacagggaattgagaaggtggaaaaacagcattttctgcttaatgtaac

SEQ ID NO: 8986 - DNA, 80 bp, synthetic construct
  source 1..80: mol_type = other DNA
tcatggcatctggggtactggaggccttcatgtgttaaaactccttaggtttctgcttcaaatgggaaaggcttctttca

SEQ ID NO: 8987 - DNA, 80 bp, synthetic construct
  source 1..80: mol_type = other DNA
ggcccctgggttatagtacataggcctctggattacagtacaatttcctatgcaaaccaggttatttcctgacagatttt

SEQ ID NO: 8988 - DNA, 80 bp, synthetic construct
  source 1..80: mol_type = other DNA
gctccataaaggatgtctgaagtacaatcatcttaagagaggtcttttctcagaaagatgttaaagctaggagatttttg

SEQ ID NO: 8989 - DNA, 80 bp, synthetic construct
  source 1..80: mol_type = other DNA
agttgaggcatgagagtagatctctccaatggtgccataagcagcagcatggtcaatggtgtgttttctctaagttttct

SEQ ID NO: 8990 - DNA, 80 bp, synthetic construct
  source 1..80: mol_type = other DNA
ctgtgtaattgaatacaaattgtaccctttaaccaacatctttcaattatccatcccacgttccaactcccaacccctaa

SEQ ID NO: 8991 - DNA, 80 bp, synthetic construct
  source 1..80: mol_type = other DNA
aatttaaaaggtatctcatcatctctagttgtgtgtagattcatgttggatgcatttatgcgcacattcccaatgatggt

SEQ ID NO: 8992 - DNA, 80 bp, synthetic construct
  source 1..80: mol_type = other DNA
gaacgcttcaggcaagacacaatatctgggtgtccctaagaaatcagaagatagggctcaagattataagccatagacag

SEQ ID NO: 8993 - DNA, 80 bp, synthetic construct
  source 1..80: mol_type = other DNA
tcatccttgtggctcttctctaaacttgcttcaaattctcgaactttctggtaaattgtgcagctcagaactgaacacat

SEQ ID NO: 8994 - DNA, 80 bp, synthetic construct
  source 1..80: mol_type = other DNA
agataagagaaattctgaggttggcatgtcccaaataatgaggtttggtgatacctgtcaaggctatggagctcctgaag

SEQ ID NO: 8995 - DNA, 80 bp, synthetic construct
  source 1..80: mol_type = other DNA
cttctgttatttgagaggaaaagcaaattcctacatccttctgtcttcaagtgctgtcaatcttcctttgaaatatgggc

SEQ ID NO: 8996 - DNA, 80 bp, synthetic construct
  source 1..80: mol_type = other DNA
catggttatagcttcaggtttaaaaactctagccctatatcccaaagacatttttttcctaaaagttttataattttata

SEQ ID NO: 8997 - DNA, 80 bp, synthetic construct
  source 1..80: mol_type = other DNA
aacagcagatagatgttgttgccttgttcctgattttacagagcaagcattcaatctttcattctttataattttagctg

SEQ ID NO: 8998 - DNA, 80 bp, synthetic construct
  source 1..80: mol_type = other DNA
cactggtcttctttttatagattcttgaggagcaagcttgaattactgatttgaagcattgtctctaccctaatctaagt

SEQ ID NO: 8999 - DNA, 80 bp, synthetic construct
  source 1..80: mol_type = other DNA
agaaactatatttgggtggtattttaaaatctgctttgccaatctttgtcttcccagtggcatgatcatagctttttgta

SEQ ID NO: 9000 - DNA, 80 bp, synthetic construct
  source 1..80: mol_type = other DNA
ggttgctctaggtgttacattatacacacaaaacttaccacagtctaatggtagtatgattttaccagtttgagtgaagt

SEQ ID NO: 9001 - DNA, 80 bp, synthetic construct
  source 1..80: mol_type = other DNA
ttcattttttttttcagtctatttcctgtcctcctgtccgttgctgaaattgcataatttctattgttccatctttcaat

SEQ ID NO: 9002 - DNA, 80 bp, synthetic construct
  source 1..80: mol_type = other DNA
agtgttggaatttccaactgttagtgttggatttggagaaatggcctctttattgctggcggttgctaaagttctgactc

SEQ ID NO: 9003 - DNA, 80 bp, synthetic construct
  source 1..80: mol_type = other DNA
agtttaatttgtgggagaaacaggaacaagtgcatcaacttcatcttctcagaggtggagccaggagttgtgcatattta

SEQ ID NO: 9004 - DNA, 80 bp, synthetic construct
  source 1..80: mol_type = other DNA
ctcactaggcacgtgcatgtggaacacatattagttctggcagataagaaatttaaaaaacagaaaatggtgccaggcat

SEQ ID NO: 9005 - DNA, 80 bp, synthetic construct
  source 1..80: mol_type = other DNA
caggagactttcctgtgcattgaaaataagaatatacaaataatctgtccacttctctcacctccattccaccatcatta

SEQ ID NO: 9006 - DNA, 80 bp, synthetic construct
  source 1..80: mol_type = other DNA
ttacataacttaataaatggctgactgccaaataaatggacccctaacctaggagtggctcatactgcaatgggacaatg

SEQ ID NO: 9007 - DNA, 80 bp, synthetic construct
  source 1..80: mol_type = other DNA
cactcccacttctgccaaattcaaatgtttttcaccagcccaaaaccttccgcatccccctctaaaatttaggacagaaa

SEQ ID NO: 9008 - DNA, 80 bp, synthetic construct
  source 1..80: mol_type = other DNA
ttttcataattgactatttcagttaatagccctaggcttcaagaaaggctgcgcatcttggaagtattagggcatgagtc

SEQ ID NO: 9009 - DNA, 80 bp, synthetic construct
  source 1..80: mol_type = other DNA
cccagctttacacaggttagaaacttgtcctcttaatttagtattttaaatttagtgatccatgcagtagtggacatgtt

SEQ ID NO: 9010 - DNA, 80 bp, synthetic construct
  source 1..80: mol_type = other DNA
acaggtatgaatcatggtgtccagctgcaacattaactctgctccaactggacctgaagtggaaaaaaattgttaacttg

SEQ ID NO: 9011 - DNA, 80 bp, synthetic construct
  source 1..80: mol_type = other DNA
cctggaagacacacacaatgacttctgcttggctactccaagagagtcaagaaaatgagtctttagctgagttcatcaag

SEQ ID NO: 9012 - DNA, 80 bp, synthetic construct
  source 1..80: mol_type = other DNA
gcattgctaatatcccacgagaaactcagtaaaactcccaacagacctaggcagtaaaagggagcatcaatataatcttt

SEQ ID NO: 9013 - DNA, 80 bp, synthetic construct
  source 1..80: mol_type = other DNA
gacaatgcaccgtcattacagttggacgatattgggatgtttctgcttcacataagcttttaaataaatgcatatgcatt

SEQ ID NO: 9014 - DNA, 80 bp, synthetic construct
  source 1..80: mol_type = other DNA
taagcttctgtgtgtcaggaaggtaagcagggatttcaattctctcatgggctcttgagtggatagaagtgttgagtaac

SEQ ID NO: 9015 - DNA, 80 bp, synthetic construct
  source 1..80: mol_type = other DNA
tcctggtatcctaagtgacagctgctccatgtcaccaaagctctttttttttttttttcagatcaaatccccacttcatg

SEQ ID NO: 9016 - DNA, 80 bp, synthetic construct
  source 1..80: mol_type = other DNA
gacaagaatgcatgcgtggtatcttctcacagtgttcagggacttgttattgctgtcactgtttttaaatgtgatttctg

SEQ ID NO: 9017 - DNA, 80 bp, synthetic construct
  source 1..80: mol_type = other DNA
cctcgaaggctggacctggatgaatcttctgtaagatcctagcaacttcagctttgttcagggtagttttaggattctat

SEQ ID NO: 9018 - DNA, 80 bp, synthetic construct
  source 1..80: mol_type = other DNA
ttgtcctgttttatctcaccatgcccagattccgggaatcctaaggtaatccctcatctagaaggtcagtgaaaatttgg

SEQ ID NO: 9019 - DNA, 80 bp, synthetic construct
  source 1..80: mol_type = other DNA
aaaagaaccaatgccacacatttctttagtgtctccagtgcagtgtctgaactacttgaggactttttaatctgttcata

SEQ ID NO: 9020 - DNA, 80 bp, synthetic construct
  source 1..80: mol_type = other DNA
atgtaaaataggtgaagggtggggaccaataagaggaaagtgcaccaaatgaaaagacaggttctcaatccattctgagg

SEQ ID NO: 9021 - DNA, 80 bp, synthetic construct
  source 1..80: mol_type = other DNA
acctaggttcagctctataactcctctatgattactcagggatggaaatcttgagaaccacctgctagtgggattatggg

SEQ ID NO: 9022 - DNA, 80 bp, synthetic construct
  source 1..80: mol_type = other DNA
acaaataaatagctatatagcaaactcctcgactgagtagatctgtcctgtgtttatgtaattgtaccaatgctgtgcct

SEQ ID NO: 9023 - DNA, 80 bp, synthetic construct
  source 1..80: mol_type = other DNA
attagtaggcattaaaaaaatcatccaaggggaaaggtctagggagaaacatgaggctctcaggggagctgtattggtaa

SEQ ID NO: 9024 - DNA, 80 bp, synthetic construct
  source 1..80: mol_type = other DNA
aacacaggtgtcctgtcgaatacatttctaagaatgaaattgtgggatcatcggatatgtgtctttagctagaagcttta

SEQ ID NO: 9025 - DNA, 80 bp, synthetic construct
  source 1..80: mol_type = other DNA
gagttgtcccaccgttgcctcgagttgtcccacctttccgaactgaaccaatggacatcttacacatactgattgaggtc

SEQ ID NO: 9026 - DNA, 80 bp, synthetic construct
  source 1..80: mol_type = other DNA
accgttatagcactcagtgatcatattgttgagttatttggtgttgatggtggttccatctttattccatcagatttgac

SEQ ID NO: 9027 - DNA, 80 bp, synthetic construct
  source 1..80: mol_type = other DNA
catagatttctggagagagaaactgagacacgtaagagggtggaaatgacttgcccacaagcagcacacatcagtccacc

SEQ ID NO: 9028 - DNA, 80 bp, synthetic construct
  source 1..80: mol_type = other DNA
cccaaggcagaatgatgtttgcttatgtaagttttaatcatcttcgggcctagtagaagatgccaataaaaataaactgc

SEQ ID NO: 9029 - DNA, 80 bp, synthetic construct
  source 1..80: mol_type = other DNA
gatccactttagaaggtagttttataatcagcataaaactcaagagcacctgttggtgctcttgaacacaagtttctgat

SEQ ID NO: 9030 - DNA, 80 bp, synthetic construct
  source 1..80: mol_type = other DNA
ctagtcttgcctaacgtttttcaattttttttattttctacagattggagcaaactctaatttttcttggctacaagtct

SEQ ID NO: 9031 - DNA, 80 bp, synthetic construct
  source 1..80: mol_type = other DNA
tatgaaatgcatttatccttcagaattcatgggtgatgggttctaggacctcctgaagataccgaaaattgcaaatgctc

SEQ ID NO: 9032 - DNA, 80 bp, synthetic construct
  source 1..80: mol_type = other DNA
atgacatatatacatacataaatgaatttgtttctggattttcaactctgcccctctgttctctttgccggtccttcctc

SEQ ID NO: 9033 - DNA, 80 bp, synthetic construct
  source 1..80: mol_type = other DNA
ttgctgggtcaaatggtatttctgattctagatccttgaggaattgccataatgtcttccacaatggttgaactaattta

SEQ ID NO: 9034 - DNA, 80 bp, synthetic construct
  source 1..80: mol_type = other DNA
ttgtcttggctacgcaggctctttttttggtaccagatgaaatttaaagtagttttttcttttcttctttcttttttaaa

SEQ ID NO: 9035 - DNA, 80 bp, synthetic construct
  source 1..80: mol_type = other DNA
tgttatggtagacatgctcatgcaggtaatacctcagaagttttccaggcattactgtctggtaatgtgtagataaaaca

SEQ ID NO: 9036 - DNA, 80 bp, synthetic construct
  source 1..80: mol_type = other DNA
ttagggagggaagactcttatctttcatttcttatgtacccccatgaagactttcagctgaaataactcatctctcactc

SEQ ID NO: 9037 - DNA, 80 bp, synthetic construct
  source 1..80: mol_type = other DNA
attattttgtttagcgagtttgaaataacttgttgagcatgctctgctagcacctttctcctgactgtgttcagttgtgt

SEQ ID NO: 9038 - DNA, 80 bp, synthetic construct
  source 1..80: mol_type = other DNA
cagggtgtggttgctgaaggttagggtggctgtggcaatttcttaaaataagacgacagtgaagtttgctgcatcaatgg

SEQ ID NO: 9039 - DNA, 80 bp, synthetic construct
  source 1..80: mol_type = other DNA
gacacaatgaacagtatcaaaattcagagaatgtcactgtggatgagagtgatctggaaagattccatcaaagctggtgg

SEQ ID NO: 9040 - DNA, 80 bp, synthetic construct
  source 1..80: mol_type = other DNA
aaggtggatctgagcaaggcattaccaaaaaatctgctcagttaccctagagtgattatacatttttgtccacgcttctg

SEQ ID NO: 9041 - DNA, 80 bp, synthetic construct
  source 1..80: mol_type = other DNA
agcagtcttcattgcgtgaaagagtttctctcgagtttctcagacccacagtggatgttgcataaataagagaaatgaga

SEQ ID NO: 9042 - DNA, 80 bp, synthetic construct
  source 1..80: mol_type = other DNA
aaatttgctgctttcaaccaatggctaaaatttgcatctgtcttatgttggtgaattaatctactccgaattttctcata

SEQ ID NO: 9043 - DNA, 80 bp, synthetic construct
  source 1..80: mol_type = other DNA
gatgagtgtgtatggctggaatggaatgtgtgaggagaaataagagaaactctgtggctcaattcacagagccaaaatca

SEQ ID NO: 9044 - DNA, 80 bp, synthetic construct
  source 1..80: mol_type = other DNA
aggcctgcaggtatattaaaagtaaatgcttgttttacttttttacccttcaagaacagagctattttgggaaacgtgtc

SEQ ID NO: 9045 - DNA, 80 bp, synthetic construct
  source 1..80: mol_type = other DNA
acacagacagtgaaaagaattacagagacactaagggcaccatgaataaagaaggtttgggctccctgaattaactcatt

SEQ ID NO: 9046 - DNA, 80 bp, synthetic construct
  source 1..80: mol_type = other DNA
gtactaggtgcttaagagatgcttgctaagtgagtctgtaacaaatgtatgttggcaggaagctatatgtgagctatcat

SEQ ID NO: 9047 - DNA, 80 bp, synthetic construct
  source 1..80: mol_type = other DNA
ggactataccatttgactcatgactattctgtcttgcttcacatcttatttgtttgtctggattccccagcaggacacta

SEQ ID NO: 9048 - DNA, 80 bp, synthetic construct
  source 1..80: mol_type = other DNA
aatctgttaagccacgctccatttttatccttctcttttttctttttgtcttcccctgtggcgtggaagagatacttccc

SEQ ID NO: 9049 - DNA, 80 bp, synthetic construct
  source 1..80: mol_type = other DNA
gtagaaaggaaggactattgagagaacaatttggccatctctttgcttccaggtatatttgtatcacactgcaaagcaaa

SEQ ID NO: 9050 - DNA, 80 bp, synthetic construct
  source 1..80: mol_type = other DNA
atattaagctcaattgtgaagttattaagctcttggaatgggcctaaactacgaaaatttgaacaacacctagaagaaat

SEQ ID NO: 9051 - DNA, 80 bp, synthetic construct
  source 1..80: mol_type = other DNA
aggtcaacatccagattcctttaccaactatgtgagaatctactaaaagcattctctaataatacagtcagccctgggaa

SEQ ID NO: 9052 - DNA, 80 bp, synthetic construct
  source 1..80: mol_type = other DNA
aagatccctcaggcagtttgttgagaataaagcatgtcttaagccacatgcctttatttttttacccttgctctgtctcg

SEQ ID NO: 9053 - DNA, 80 bp, synthetic construct
  source 1..80: mol_type = other DNA
aagaaccttgaagtgagaggattagactagaatatccaggtgggaccaatctagtcaccccagtctttaaaagcagagaa

SEQ ID NO: 9054 - DNA, 80 bp, synthetic construct
  source 1..80: mol_type = other DNA
gagggtagtttgttgtaggggagatgcaaggcagggatagattggggaaatatgacccagaagaaatgaaatcactacct

SEQ ID NO: 9055 - DNA, 80 bp, synthetic construct
  source 1..80: mol_type = other DNA
caatctaatcatatgagtcctttaaaggaaagagttagccagctgaagagaatcagacatggcagcagcattgagaaggt

SEQ ID NO: 9056 - DNA, 80 bp, synthetic construct
  source 1..80: mol_type = other DNA
acattacaatccactctcaagtgtgtatggagaatcggaaaagggcctgtctggccactgtgggaaaaaaaaacaaaaag

SEQ ID NO: 9057 - DNA, 80 bp, synthetic construct
  source 1..80: mol_type = other DNA
ttgtctagattaggcagaaaatgagaccatacagatgcctacaactccagtccattaccacatggatcattctacgttcc

SEQ ID NO: 9058 - DNA, 80 bp, synthetic construct
  source 1..80: mol_type = other DNA
tttgtaagaaacttcaaaactgtcttgcaaattggccatattattttgtgtatctgccagcaatgattgagagttcttgt

SEQ ID NO: 9059 - DNA, 80 bp, synthetic construct
  source 1..80: mol_type = other DNA
tcctgtttctagtctataatttctgcttaattctttcctatattgggccgtcaactcattctgtcatctgctttatttcc

SEQ ID NO: 9060 - DNA, 80 bp, synthetic construct
  source 1..80: mol_type = other DNA
aagaaacatgaactaatccagcacaggtttggggtaggtcaggagtaagcaataagtaaaaaatttggctagatctatat

SEQ ID NO: 9061 - DNA, 80 bp, synthetic construct
  source 1..80: mol_type = other DNA
gggactaaattgagactgcttcttatcctcctaatgtcttaaaagcctggttgggctgctaagagagattacaggaaaag

SEQ ID NO: 9062 - DNA, 80 bp, synthetic construct
  source 1..80: mol_type = other DNA
aatggaaatgatgaggccactaatgtagacaaagtagctattgtctgagagcccctgagtcatcttgtgtcacagaaaat

SEQ ID NO: 9063 - DNA, 80 bp, synthetic construct
  source 1..80: mol_type = other DNA
atattcttaggctcttgcaaattataattaaaggtatattctatctggaaaatgaatgtgtcagtgatttctttcttttt

SEQ ID NO: 9064 - DNA, 80 bp, synthetic construct
  source 1..80: mol_type = other DNA
agtgaaaatacaaaaattagcctggcttcatggtgggcacctgtaatcccagatactagggaggctggggcaggagaatt

SEQ ID NO: 9065 - DNA, 80 bp, synthetic construct
  source 1..80: mol_type = other DNA
attgagccaatttccctgtctgacacacccttctcttagaaggatgtctttctgtggctcctacatgaaacaagtaaaat

SEQ ID NO: 9066 - DNA, 80 bp, synthetic construct
  source 1..80: mol_type = other DNA
ttctgggcaaataggaaaacaggcagctttatctttggagttgactctgaggaaaattcttctggtgtcaaaggaatgat

SEQ ID NO: 9067 - DNA, 80 bp, synthetic construct
  source 1..80: mol_type = other DNA
ggggggagcatcggttctcagcaggcaaaatcttagctattaaattggctgtggccctccagaaaatttatgtactacat

SEQ ID NO: 9068 - DNA, 80 bp, synthetic construct
  source 1..80: mol_type = other DNA
taagaatcatacagaaggggaggtaggtgcactcagtgtcacttttattttaaaaatctgcacataagtgggcccgagta

SEQ ID NO: 9069 - DNA, 80 bp, synthetic construct
  source 1..80: mol_type = other DNA
gcggacacctgcttctattcatatatccaactccctctttctatcttcacttagatgtctaaaagtgtaccgaatctaaa

SEQ ID NO: 9070 - DNA, 80 bp, synthetic construct
  source 1..80: mol_type = other DNA
tctgttaaacagggttcaggagacgttttatttacatttacctatctttatcctgagcacatagggtgccagcccataaa

SEQ ID NO: 9071 - DNA, 80 bp, synthetic construct
  source 1..80: mol_type = other DNA
accagctccagttatcagctttacttaacctcaagccatgctcagaaaaaaaacactccctttacctttattcattcaat

SEQ ID NO: 9072 - DNA, 80 bp, synthetic construct
  source 1..80: mol_type = other DNA
tcatctggaatgaactctgcaatattttcaccatccaactgcaaacattgtttttctgaagccacaaattccaatttgtt

SEQ ID NO: 9073 - DNA, 80 bp, synthetic construct
  source 1..80: mol_type = other DNA
aaaaataatagaagcacttcaggaacagtggtatgagggactccgtgaactcactccccatagaatcaatcataactagt

SEQ ID NO: 9074 - DNA, 80 bp, synthetic construct
  source 1..80: mol_type = other DNA
cagcatgtaggaagagggaactccatagctctctctaggggaactgactttatttggaacagaacatgggaagctttact

SEQ ID NO: 9075 - DNA, 80 bp, synthetic construct
  source 1..80: mol_type = other DNA
tacaattgccaaaaactggaagcagccaacatgtcattcaataggtgagcagataaatgtggcctatctatacaacgaaa

SEQ ID NO: 9076 - DNA, 80 bp, synthetic construct
  source 1..80: mol_type = other DNA
gagagatgacacataagattttgacctgatgtcagactcctcaatgatgaatcaactacagtgtttcccatttcttataa

SEQ ID NO: 9077 - DNA, 80 bp, synthetic construct
  source 1..80: mol_type = other DNA
aagcatttgacaaacaaaatatcctttcatgtacaagtgtgcaacaaactaagagaaaggacctttcttaatcataaaat

SEQ ID NO: 9078 - DNA, 80 bp, synthetic construct
  source 1..80: mol_type = other DNA
ttgttaaaatgctaatacaatcctcccttgatatttgtgggaagattggtttcaggagcccctgtggatagcacatgcat

SEQ ID NO: 9079 - DNA, 80 bp, synthetic construct
  source 1..80: mol_type = other DNA
ggacgtgagccaccacgcccagcaatagacatcattttacaaagaaaatgtaattattctaaatgaagtgaccaaatata

SEQ ID NO: 9080 - DNA, 80 bp, synthetic construct
  source 1..80: mol_type = other DNA
gctttagtgcagaagaacatgaaagcccaccttaccaatattaggtgaataagatgctagtgcttataaagtggagttaa

SEQ ID NO: 9081 - DNA, 80 bp, synthetic construct
  source 1..80: mol_type = other DNA
aacacaaggaaaaccaatcagaaggccaaagttgaggaagactcatgtctaagaaaatgaaggtgtacatcaggcttagg

SEQ ID NO: 9082 - DNA, 80 bp, synthetic construct
  source 1..80: mol_type = other DNA
cctagtgaataacttttaaaaacattctgccagtgacaagtaaaaaaaaaaaaaaatactgaagctcccgtattgcttca

SEQ ID NO: 9083 - DNA, 80 bp, synthetic construct
  source 1..80: mol_type = other DNA
cttattctacctccagtgttgtttccccaccacacacaatcctgttctgcatatctcaagccaaaataaccagtcagttc

SEQ ID NO: 9084 - DNA, 80 bp, synthetic construct
  source 1..80: mol_type = other DNA
aagacacatggtggattatggagtagctcagaatttgtctaacaatccttactcatgtttgcaatttgttaagggcctag

SEQ ID NO: 9085 - DNA, 80 bp, synthetic construct
  source 1..80: mol_type = other DNA
ccagttctagatccttgaggaatcgccacactgacttccacaatggttgaattagttaacagtcccaccaacagtgtgaa

SEQ ID NO: 9086 - DNA, 80 bp, synthetic construct
  source 1..80: mol_type = other DNA
ttcttgtttttgtcaggtttgtcaaagatcagataggtgtagatatgtggcattatttctgagggctctgttctgttcca

SEQ ID NO: 9087 - DNA, 80 bp, synthetic construct
  source 1..80: mol_type = other DNA
gcttatccaccatgatcaagtgggcttcatccctgggatgcaaggctggttcaacatatgcaaatcagtaaacgtaatcc

SEQ ID NO: 9088 - DNA, 80 bp, synthetic construct
  source 1..80: mol_type = other DNA
gaatattgcatctgttgggtcagtaagttctcactgagaaaattagagaacacaacatcacatggtatgttgcttaagtt

SEQ ID NO: 9089 - DNA, 80 bp, synthetic construct
  source 1..80: mol_type = other DNA
atatgatatatggagaaatcggaaacaaggtgatatgcaatataattgtactgtgcatgcaaatcaaaagggaccagaaa

SEQ ID NO: 9090 - DNA, 80 bp, synthetic construct
  source 1..80: mol_type = other DNA
ttgggggaaacacaattcaggccatagcattttacaatgtgacctcatgctgtaatacaaagaacataaacattttattt

SEQ ID NO: 9091 - DNA, 80 bp, synthetic construct
  source 1..80: mol_type = other DNA
ttctgcagcatttaactgttgagtgttttctgtaagtatccacttgggtagcagtgaccttggcccaagtcatacaaaga

SEQ ID NO: 9092 - DNA, 80 bp, synthetic construct
  source 1..80: mol_type = other DNA
aatacctgttagagttctcgttatatctttatggttactctgtttctgcctcctgctagggcttggggtgatacatctga

SEQ ID NO: 9093 - DNA, 80 bp, synthetic construct
  source 1..80: mol_type = other DNA
aaggctcctccaattatgtgtaacaaatttaaaagcaagactccaaaagaccaaactcttcccatgtaacttaactgctt

SEQ ID NO: 9094 - DNA, 80 bp, synthetic construct
  source 1..80: mol_type = other DNA
catagggacatagagaataatcaaaacaaataagcctcgctaaatttcccccagttcatcatcattagatcataccctct

SEQ ID NO: 9095 - DNA, 80 bp, synthetic construct
  source 1..80: mol_type = other DNA
aatgaagaatatagtcatctttcagtattcatgagggactggttctaggatccctgttggataccaaagtccacagatgc

SEQ ID NO: 9096 - DNA, 80 bp, synthetic construct
  source 1..80: mol_type = other DNA
cataaataggttaaaagtaaaaggataggaaaaaataccataaaagtagtcagcagaaagctggattggctatattaata

SEQ ID NO: 9097 - DNA, 80 bp, synthetic construct
  source 1..80: mol_type = other DNA
gaagtaaacctgtagcagagaaagcctatattagaaaaagaagaaacttctgaagtcagagtttcatatttaaggaagga

SEQ ID NO: 9098 - DNA, 80 bp, synthetic construct
  source 1..80: mol_type = other DNA
cccttccttgggaactgtatgtaagttactatctatctttccaatggcagttctcacctgatctgttggcctcactacac

SEQ ID NO: 9099 - DNA, 80 bp, synthetic construct
  source 1..80: mol_type = other DNA
gtagtttatcaaatcacctctcaggatttactccttgctcgtgatgtctctagagctacccttccctcgcttcaaaactc

SEQ ID NO: 9100 - DNA, 80 bp, synthetic construct
  source 1..80: mol_type = other DNA
agtaattgctttacaagtgtttgttttatataactgaattgcagtgaatagcggggcttagcctgagcttcagctgattc

SEQ ID NO: 9101 - DNA, 80 bp, synthetic construct
  source 1..80: mol_type = other DNA
atgtccccttgaaaaactgcaggtatttatgttgctgtctgcagttggaacaggactagtgtttccactgtaggaatgga

SEQ ID NO: 9102 - DNA, 80 bp, synthetic construct
  source 1..80: mol_type = other DNA
tttcaggatcttatcagcccatggcctttagtcacgtgaaactgcctggaatgttttattctcctgcgaacaccctgtat

SEQ ID NO: 9103 - DNA, 80 bp, synthetic construct
  source 1..80: mol_type = other DNA
cagatagccagggctataggaaaatgctttaagattttccatccaggacttgcacagctttagaggaaagaaaaaagaaa

SEQ ID NO: 9104 - DNA, 80 bp, synthetic construct
  source 1..80: mol_type = other DNA
tgccacattcatgtactttgcacctcataaacaaggattatactcaggtgaatgagacaaatttttcactttatagctgg

SEQ ID NO: 9105 - DNA, 80 bp, synthetic construct
  source 1..80: mol_type = other DNA
tttgtcttacatgttactgaagataaaatctcccaataggctaattggacaaaaattccggttgtggccacctcttactg

SEQ ID NO: 9106 - DNA, 80 bp, synthetic construct
  source 1..80: mol_type = other DNA
acaacctctgagaactcattgattcctattcgacagtttattatttgctttcatgttgcctgtaatataaatgcacccag

SEQ ID NO: 9107 - DNA, 80 bp, synthetic construct
  source 1..80: mol_type = other DNA
aagcagcttgtccaaagtacccaggtggtaagcagtggagtcagcattttacactagactttatagcgccaccatgctgt

SEQ ID NO: 9108 - DNA, 80 bp, synthetic construct
  source 1..80: mol_type = other DNA
tatgacagggagtgagaaagaagataaaacaaccatgcctaatgattaggtagacagagttagccacctgaagatttaat

SEQ ID NO: 9109 - DNA, 80 bp, synthetic construct
  source 1..80: mol_type = other DNA
agcccggccaatatggtgaaaccccgtctctacaaaaaatgtacaaaaaaacaaaaaacaactagttggacatggtgaca

SEQ ID NO: 9110 - DNA, 80 bp, synthetic construct
  source 1..80: mol_type = other DNA
tagtctcatttaacaaatgtctttttgataggcttaattataaatcaataaaagtgttaaagaggaaatccctgatgctt

SEQ ID NO: 9111 - DNA, 80 bp, synthetic construct
  source 1..80: mol_type = other DNA
tgtttatttccattgttcctggaaaagaattaagatttgggattccaaataccatcagaaatgactgcctttggggtatt

SEQ ID NO: 9112 - DNA, 80 bp, synthetic construct
  source 1..80: mol_type = other DNA
gctagagaaaatattgggagtatatccagtagttcagacacacagccttacaagcattctttttgtgggttcagccctgg

SEQ ID NO: 9113 - DNA, 80 bp, synthetic construct
  source 1..80: mol_type = other DNA
tgtctcaataatttcttgctctttagcaaaactctatgagcttcaggggggttatgaggggggtgttcttaataatttct

SEQ ID NO: 9114 - DNA, 80 bp, synthetic construct
  source 1..80: mol_type = other DNA
gagttggcttttaacaaactggtgaatctgaaattggtaccaggaaaccctcactgtgaaggtaaccaatacttacgaag

SEQ ID NO: 9115 - DNA, 80 bp, synthetic construct
  source 1..80: mol_type = other DNA
aatttccatattgctttttatagaggctatgctattttgtattcccaccaacagtatggagtcttaggttctccatatcc

SEQ ID NO: 9116 - DNA, 80 bp, synthetic construct
  source 1..80: mol_type = other DNA
tgttttgaaatcaagatgtgtgaagtctccagctctgcttttctctttcaagatggttttggctgttcagagtcccatga

SEQ ID NO: 9117 - DNA, 80 bp, synthetic construct
  source 1..80: mol_type = other DNA
cacctagaaataggaaactacttttatgtccctaaacatggtatattgtttcatgcctgtatgagtgtgctcctgctgct

SEQ ID NO: 9118 - DNA, 80 bp, synthetic construct
  source 1..80: mol_type = other DNA
ctttttcacacaaccaatttacacatgtttggcaagtatgtccaggctcaaaaccttgaaaccaagcatgctgcaaaacc

SEQ ID NO: 9119 - DNA, 80 bp, synthetic construct
  source 1..80: mol_type = other DNA
atggaactagtcagtgcagatacaggttttaaacccaggtatgttagactcctaatcctgtactctttgcatactttttt

SEQ ID NO: 9120 - DNA, 80 bp, synthetic construct
  source 1..80: mol_type = other DNA
ctctgctcccacttcttactagcaagactcctttgttcccactcaattcctcttctatttactgccaatcaaaattatta

SEQ ID NO: 9121 - DNA, 80 bp, synthetic construct
  source 1..80: mol_type = other DNA
tacccccactctgtttgtgtatctgttcactttttttttttctccacaggttgccacaaccctaactttcctggccaaat

SEQ ID NO: 9122 - DNA, 80 bp, synthetic construct
  source 1..80: mol_type = other DNA
ttccatgaccctggactggacaacagagtggaaatgaggctaaccttcatttagactcattattaggaacttcactcaaa

SEQ ID NO: 9123 - DNA, 80 bp, synthetic construct
  source 1..80: mol_type = other DNA
acttcaatgtcactttgagcatggcaggtcttagcttaaccaggccatggttttcattcccttctgcagaatttgcataa

SEQ ID NO: 9124 - DNA, 80 bp, synthetic construct
  source 1..80: mol_type = other DNA
tttctttctttctttctttctttttctttctttttaacctttaaattcagaggtacatgtgcaggtttgttacatatgca

SEQ ID NO: 9125 - DNA, 80 bp, synthetic construct
  source 1..80: mol_type = other DNA
ctagaagcttgtgcaggaatggtccatgttcgttgtctctctgttctactcccagcggtaggtagtaatatttaaaatat

SEQ ID NO: 9126 - DNA, 80 bp, synthetic construct
  source 1..80: mol_type = other DNA
tttaaatgcatagcagctaaatttgggaagcactgggagtatgggttcctgtggcaaagttacctctagatagggaatcc

SEQ ID NO: 9127 - DNA, 80 bp, synthetic construct
  source 1..80: mol_type = other DNA
actgaagaagcagttcttccatttttatagtgcgtatgtgagtatttgtgggtgtggacaaggagaaggcgtaacttcct

SEQ ID NO: 9128 - DNA, 80 bp, synthetic construct
  source 1..80: mol_type = other DNA
acctcttagaagattgctctgtcctgctaattgccttctctgaagtgtgattctttccagaagcagtacataaccattcc

SEQ ID NO: 9129 - DNA, 80 bp, synthetic construct
  source 1..80: mol_type = other DNA
ggagtcctttcctcattgtttgctattgtcgactttcgtgaacatcaggtggtttagatgtgtgtctttatttctgggct

SEQ ID NO: 9130 - DNA, 80 bp, synthetic construct
  source 1..80: mol_type = other DNA
gctgtgcagaagcttttttgtttgatgcaatcccatttttctatttttgttttgttgcctatgctttggggatcatatcg

SEQ ID NO: 9131 - DNA, 80 bp, synthetic construct
  source 1..80: mol_type = other DNA
aaacattacgttgagagcaacgacttcttctggctatttgaggtgatataagtgtataagggttactagattccttacca

SEQ ID NO: 9132 - DNA, 80 bp, synthetic construct
  source 1..80: mol_type = other DNA
atccatatacacgatgggctttgccacttacacatattgaagctaggatgtcaattggatagggctcacaatctcaaact

SEQ ID NO: 9133 - DNA, 80 bp, synthetic construct
  source 1..80: mol_type = other DNA
atgtgttttggagcacccctgggaataaaaagaaacaaaacctattctgccattggcatttggcttccccaatgttttca

SEQ ID NO: 9134 - DNA, 80 bp, synthetic construct
  source 1..80: mol_type = other DNA
gactatttctgggctgcagtgatctatgccaattgggtgtctgcattaagttttgcctctatatgatgaccttctgagag

SEQ ID NO: 9135 - DNA, 80 bp, synthetic construct
  source 1..80: mol_type = other DNA
caggatcagataagaggccagtcatagtctagtctttggccacctctgaactcctctgaactcccttgagcatgatattt

SEQ ID NO: 9136 - DNA, 80 bp, synthetic construct
  source 1..80: mol_type = other DNA
tgtacaggaatggcctctggtggtccagccttttaccatgtccatggaagtttaccttattgtaaaaccaagtaagtatt

SEQ ID NO: 9137 - DNA, 80 bp, synthetic construct
  source 1..80: mol_type = other DNA
acttgaggctaaacaaatccttgctctgaaacaaagcttctgttgctgatcctgaaggactcaaagggagctattttaaa

SEQ ID NO: 9138 - DNA, 80 bp, synthetic construct
  source 1..80: mol_type = other DNA
acaaattagctatttgtctaagtatactcatagctatttggggctagaatgcatcgcacctgatgctgtggttaactgca

SEQ ID NO: 9139 - DNA, 80 bp, synthetic construct
  source 1..80: mol_type = other DNA
ttgggaagtaggacaaaggaagaagccagagtatttctaccttttctgtctgtcatggaagatgcttctggatatgactg

SEQ ID NO: 9140 - DNA, 80 bp, synthetic construct
  source 1..80: mol_type = other DNA
catagagatggtcctcattcttttatgctgctgcatattactctgtcatatgaatgtggcacaattaattcaggctattc

SEQ ID NO: 9141 - DNA, 80 bp, synthetic construct
  source 1..80: mol_type = other DNA
ttttttcctctcctctctcttaacctttggagtctatgtcctgtagcttataatcatcataaaatttggagagaaagctt

SEQ ID NO: 9142 - DNA, 80 bp, synthetic construct
  source 1..80: mol_type = other DNA
ccatccaaattattttcataacaattgtgttaaatgcttatgtgatgttttgatttctttgctcaggaacatctccactt

SEQ ID NO: 9143 - DNA, 80 bp, synthetic construct
  source 1..80: mol_type = other DNA
tgctgatattacagacattagtaactgtgccctgccagaaatgacttttaatagagtgataatttgaattatttttcaaa

SEQ ID NO: 9144 - DNA, 80 bp, synthetic construct
  source 1..80: mol_type = other DNA
ctacgaaacacttaaaagaaaataaacgggtaaatctttgtaacctgggattaggcgatggttactgtgatataatacca

SEQ ID NO: 9145 - DNA, 80 bp, synthetic construct
  source 1..80: mol_type = other DNA
tttggtaccagtaccatgctgttttggttactgcagccttgtagtgtagtttgaagtcaggtagtgtgatgcctccagct

SEQ ID NO: 9146 - DNA, 80 bp, synthetic construct
  source 1..80: mol_type = other DNA
ttttcttaatccagtctatcattgttggacatttgggttggttccaagtctttgctattgtgaatagtgccacaataaac

SEQ ID NO: 9147 - DNA, 80 bp, synthetic construct
  source 1..80: mol_type = other DNA
tagcaacattattcataataattcaaaagtataaacaactgaattatccatcacctgacaaatggatgaagaaagcatgg

SEQ ID NO: 9148 - DNA, 80 bp, synthetic construct
  source 1..80: mol_type = other DNA
taaaatggtcttgtggtacttctgtcacatctagaagtatagtttcgctaagacagtacttacaccctagccctggggat

SEQ ID NO: 9149 - DNA, 80 bp, synthetic construct
  source 1..80: mol_type = other DNA
agtttttttacttaacctcaataattcctttagacatgtgagctctgcaaatctatggactttgcagcagaatgcctttc

SEQ ID NO: 9150 - DNA, 80 bp, synthetic construct
  source 1..80: mol_type = other DNA
gaaaaagtggaaggtcttgtctgcctgatgtgctcccaatgtgatgtggtatatttgaaagagatccagttgttatcaag

SEQ ID NO: 9151 - DNA, 80 bp, synthetic construct
  source 1..80: mol_type = other DNA
attcagtcattgcttttatcatctcattggtaaattccttcagtatgatggtgaggtgccttatgttaccatgttcttgc

SEQ ID NO: 9152 - DNA, 80 bp, synthetic construct
  source 1..80: mol_type = other DNA
cgacattatgtataactcagaactcttcacagcaactttcaaataagattatcagaacttcttgcatggattggcacagg

SEQ ID NO: 9153 - DNA, 80 bp, synthetic construct
  source 1..80: mol_type = other DNA
gcaatgtctgaggcattcacgaaaactgtagtaagcctcaaaggaagctttaataccttcccaaaagcgcaatatcacat

SEQ ID NO: 9154 - DNA, 80 bp, synthetic construct
  source 1..80: mol_type = other DNA
gacaacatttggtaattggtattcttcagcaactagtaggctgcatagtggggaaatgaaaatagtaaaaccatgaaaga

SEQ ID NO: 9155 - DNA, 80 bp, synthetic construct
  source 1..80: mol_type = other DNA
tctctaggaattttcattatgatctttcctttgggcaaattgagcaagtctgacctttggcacattcaagtttgaatctt

SEQ ID NO: 9156 - DNA, 80 bp, synthetic construct
  source 1..80: mol_type = other DNA
ttccccattttgccttggtcagttgtaactacatttgaatggctgaaaatgtctcatcgcaaggatctttctgggcataa

SEQ ID NO: 9157 - DNA, 80 bp, synthetic construct
  source 1..80: mol_type = other DNA
caccagtggattgtctttcctcattcagattgtagcttgcctggttcttgatgaatgattttctgttacatcctggacat

SEQ ID NO: 9158 - DNA, 80 bp, synthetic construct
  source 1..80: mol_type = other DNA
gtttacaggtcctcacactagttctgatttcctctgcagcaagtcaaatagtgctgatacttcagatcttacagaagtgg

SEQ ID NO: 9159 - DNA, 80 bp, synthetic construct
  source 1..80: mol_type = other DNA
tgaatctggatcccaggaattatgcagtataaaaaaagaaaaaatacaggcacacaggatgaaacagacaaaatatagca

SEQ ID NO: 9160 - DNA, 80 bp, synthetic construct
  source 1..80: mol_type = other DNA
tgtctgtgcttttaacttatatcctgtatatgtcttcctgacaactatccatacaagcggctttcattccctgtttccag

SEQ ID NO: 9161 - DNA, 80 bp, synthetic construct
  source 1..80: mol_type = other DNA
ttttttatttgtgcagtgtttgctgactctgagtggacacctcagaaactgtaacatctttggtcaatttggtcaatcgt

SEQ ID NO: 9162 - DNA, 80 bp, synthetic construct
  source 1..80: mol_type = other DNA
caaaactctttaatagttcaatggcttcttgaggaccatgacttatttattattgtatctgcagcacccatcatggtgcc

SEQ ID NO: 9163 - DNA, 80 bp, synthetic construct
  source 1..80: mol_type = other DNA
attgtttgcctccttttaaattcctgggtgatgttatctatttccttcactttggcatctctcacatgttaatgccacca

SEQ ID NO: 9164 - DNA, 80 bp, synthetic construct
  source 1..80: mol_type = other DNA
aagttattagtttacatgtgttcggcattgtgctgatgtggatggagaactaacttaggtcatctccccaaaactctaac

SEQ ID NO: 9165 - DNA, 80 bp, synthetic construct
  source 1..80: mol_type = other DNA
aaatgatttcatgagctccattattcactgagggaataaagaggtctgtgtaggctaccacacttgacaacatgagtact

SEQ ID NO: 9166 - DNA, 80 bp, synthetic construct
  source 1..80: mol_type = other DNA
gggcttatacctcctggtataaggagaaataaaataagtgagtaatcacatcctttatgatggatgctgtggaaggaatg

SEQ ID NO: 9167 - DNA, 80 bp, synthetic construct
  source 1..80: mol_type = other DNA
gttatctcacctttgtgaaatgaggttaaataaagcaggcagcagattcagtttagaaaaaagacaagtggcagcagagg

SEQ ID NO: 9168 - DNA, 80 bp, synthetic construct
  source 1..80: mol_type = other DNA
gatgaacataggctaggggaaattaaagtacattgattttatctcaggaatcacttggaaattatttcttccaagtatgt

SEQ ID NO: 9169 - DNA, 80 bp, synthetic construct
  source 1..80: mol_type = other DNA
cttaggaccattccagtgaccttggttaatacggcttttgaatcccgcatggccaactttgactattttcaagtagagaa

SEQ ID NO: 9170 - DNA, 80 bp, synthetic construct
  source 1..80: mol_type = other DNA
acaataatcctaaattccaatcccccttcacagagccaataattgctaccaggttaatgtggatacttctacactttttg

SEQ ID NO: 9171 - DNA, 80 bp, synthetic construct
  source 1..80: mol_type = other DNA
ataatcatatatattttagttcattcttagattcctagcccactcctttgatctagttttcaattcctgtcccagcacta

SEQ ID NO: 9172 - DNA, 80 bp, synthetic construct
  source 1..80: mol_type = other DNA
tgttttcctcacttatttaggttttcttttatgcccttcagtaaagtcttgtcaggattgttcctaagtatttgatatga

SEQ ID NO: 9173 - DNA, 80 bp, synthetic construct
  source 1..80: mol_type = other DNA
cccaggagttggagaccagcctgggcaacatggcaaaaccccatctttacaaaaaatatacaaaaattagccaggcatgg

SEQ ID NO: 9174 - DNA, 80 bp, synthetic construct
  source 1..80: mol_type = other DNA
tataagctttcatccacagttcctggcttataattcccatagcccttgttttttcctaactgattaaacaatgagcatat

SEQ ID NO: 9175 - DNA, 80 bp, synthetic construct
  source 1..80: mol_type = other DNA
ctccatgcgaatggaagctcctgcacttggtaccttttcaaacctcgcactatgaatttctttatctggctttttattta

SEQ ID NO: 9176 - DNA, 80 bp, synthetic construct
  source 1..80: mol_type = other DNA
ttggtaaggatgtctattggactgaaaaagatatttctcagtgtctgggaaaggaagaattggtcagatggtgtgaagtt

SEQ ID NO: 9177 - DNA, 80 bp, synthetic construct
  source 1..80: mol_type = other DNA
tactagaaagttgctcaactcactacttaacccttgcctaaatggttgtgtgttagcatatacaaattaagtgtacatat

SEQ ID NO: 9178 - DNA, 80 bp, synthetic construct
  source 1..80: mol_type = other DNA
gcatagtttgtgaaaattctctcccactctgtgggttgtctgtttactttgctgattatttcttttgccatgcagaagct

SEQ ID NO: 9179 - DNA, 80 bp, synthetic construct
  source 1..80: mol_type = other DNA
ggctatcagctcactaatccagctcaattatctagatatcttgttggtatgcatttattacccatggccacctgatccaa

SEQ ID NO: 9180 - DNA, 80 bp, synthetic construct
  source 1..80: mol_type = other DNA
tttgctcaagttaacacaattgataggtagacaaactgggagcccaagcattttagcttcagaatctgtgcttttaactg

SEQ ID NO: 9181 - DNA, 80 bp, synthetic construct
  source 1..80: mol_type = other DNA
ctccattccctacgttccatattcactcagatactaggcctgttttaaatcactagtgtatgctcaatgttgggcccaga

SEQ ID NO: 9182 - DNA, 80 bp, synthetic construct
  source 1..80: mol_type = other DNA
gctggtgaggatgtggagcagcccatacattgctggtgtgagtgcaaagtgatgctgccactttggaaaataatttgtaa

SEQ ID NO: 9183 - DNA, 80 bp, synthetic construct
  source 1..80: mol_type = other DNA
ttaggtactgcgatagaagagtaaaaagcaaagtccctgtactcacatatcttactttctactggagagaaatggaccaa

SEQ ID NO: 9184 - DNA, 80 bp, synthetic construct
  source 1..80: mol_type = other DNA
cagagtaagagataatgatgacttgaactaggtggggatagagatgatcaataggttatcaaattacaaagcacattagc

SEQ ID NO: 9185 - DNA, 80 bp, synthetic construct
  source 1..80: mol_type = other DNA
tgtctatgtgtcagcactcaaccatgccctcagtttactgtcaacacacagatagacaaagatcatgcatagaccatatt

SEQ ID NO: 9186 - DNA, 80 bp, synthetic construct
  source 1..80: mol_type = other DNA
tcaaggaagggagaatggccaacagcattatcagaggatgctgagacatctgtctcatgaatttgactagtctaggtact

SEQ ID NO: 9187 - DNA, 80 bp, synthetic construct
  source 1..80: mol_type = other DNA
ccaaagtttgttcatcctgcaaggcgcaacttattgccattttcttataagagtcttcctcatcacataaaaataagtgt

SEQ ID NO: 9188 - DNA, 80 bp, synthetic construct
  source 1..80: mol_type = other DNA
ctcttcttcagccattatctaaatggtatttgcagtttgggagcatacagcttatttgacatcacaggggctgtaggaag

SEQ ID NO: 9189 - DNA, 80 bp, synthetic construct
  source 1..80: mol_type = other DNA
tctttccttctctgcgtttttgttgaaattcgcctaatttccactaaattcccaagtccgactatgggaaaaaaacattc

SEQ ID NO: 9190 - DNA, 80 bp, synthetic construct
  source 1..80: mol_type = other DNA
ttcccttactgttctatcagattaccatgtatagcaacttgccattcagcagttactcatttctaaggttgtaaatgtcg

SEQ ID NO: 9191 - DNA, 80 bp, synthetic construct
  source 1..80: mol_type = other DNA
agaaagccatcttgtatgtacctctgatattttcatccaacacttcttttcctcaatctttttcctaggtatttctacag

SEQ ID NO: 9192 - DNA, 80 bp, synthetic construct
  source 1..80: mol_type = other DNA
cagcactacagcttgctttagtcctgtttcatctatacccagattgtgttagcccagctggaacattctgagtttaggcc

SEQ ID NO: 9193 - DNA, 80 bp, synthetic construct
  source 1..80: mol_type = other DNA
actttctggccagatagagagacttgacaacagaagaatggccagaaagatgcaacttgagaaggattcaacccacctgt

SEQ ID NO: 9194 - DNA, 80 bp, synthetic construct
  source 1..80: mol_type = other DNA
ttatttcccttggatatatacccacagtgggattgctggattacccagcaattctttcctaattttttgaggaacctcca

SEQ ID NO: 9195 - DNA, 80 bp, synthetic construct
  source 1..80: mol_type = other DNA
taatgtggaatcaggaaatgtgatgcttccaaccttcttcttactcaagattactttacctcctcagagatatttgtggt

SEQ ID NO: 9196 - DNA, 80 bp, synthetic construct
  source 1..80: mol_type = other DNA
ttttctaaggatttgtgcttcaaagttcataaagaatattgaactaatcatttctgatagtgtcttgttattagggtaag

SEQ ID NO: 9197 - DNA, 80 bp, synthetic construct
  source 1..80: mol_type = other DNA
gcttgttttgtagcccaacatataatttatcctggagaatgttctgtgggcacttgagaagaatgtgtatttgctactgt

SEQ ID NO: 9198 - DNA, 80 bp, synthetic construct
  source 1..80: mol_type = other DNA
atagtatcagtctattgtaaggtgacaataactttgattgcatgaaacaaccctaccctttattccccaccctacctaca

SEQ ID NO: 9199 - DNA, 80 bp, synthetic construct
  source 1..80: mol_type = other DNA
tgccacttgctggtgtcctacaaatcactgaggcttttgtcacattttactttttattccttcaattggataatttcaag

SEQ ID NO: 9200 - DNA, 80 bp, synthetic construct
  source 1..80: mol_type = other DNA
gggctactgcagcagcattggtaatactgcatgaggcttgggtgcttatggagcagctagggagctagaacaagaaaaca

SEQ ID NO: 9201 - DNA, 80 bp, synthetic construct
  source 1..80: mol_type = other DNA
gaagcagcaaagtatgatgcgacagaaattaaagaaatcaaactaacgggctgatttcatatcctgacctggtgcagaga

SEQ ID NO: 9202 - DNA, 80 bp, synthetic construct
  source 1..80: mol_type = other DNA
aacaacttcacctccaatatactctaactgcaagtgtccaaacatttcttgcatcctgctgcctctgtacagaatagaac

SEQ ID NO: 9203 - DNA, 80 bp, synthetic construct
  source 1..80: mol_type = other DNA
tactgtctgagaaggaaagaatcggagaacatagattttgaaagctaaaagtttccttgtgggttatcaattctgctgta

SEQ ID NO: 9204 - DNA, 80 bp, synthetic construct
  source 1..80: mol_type = other DNA
aaagcagacactgctgcttctgtctcatataatggtctctttatttcctatcgagtctctccaatgtgacaggaagtggt

SEQ ID NO: 9205 - DNA, 80 bp, synthetic construct
  source 1..80: mol_type = other DNA
ttaatcttcctccagataaacctacttataagtgatctgtacaaaaaacccgcagtgccaattttcacttgattaagtat

SEQ ID NO: 9206 - DNA, 80 bp, synthetic construct
  source 1..80: mol_type = other DNA
ataccaggtattttgtttggttctgagaataaaatgtgaaatctaataggcccacactgtgccttcatagagtggggagg

SEQ ID NO: 9207 - DNA, 80 bp, synthetic construct
  source 1..80: mol_type = other DNA
gccagctgcaacatacatgtttgttttgccagtgaaaacaagcagacacattaatgaatacactgatgttttatttaatt

SEQ ID NO: 9208 - DNA, 80 bp, synthetic construct
  source 1..80: mol_type = other DNA
taagttgctggggactgtagggtttcacctgaggaagaacttccagtgagtctcgtgaaccaatgatgaaatgtatgatg

SEQ ID NO: 9209 - DNA, 80 bp, synthetic construct
  source 1..80: mol_type = other DNA
ctgtcatcagtttcattagcttcggattatatgtatcatctgttggttttgggtgtaaactggcgtgtgcaaatgttttt

SEQ ID NO: 9210 - DNA, 80 bp, synthetic construct
  source 1..80: mol_type = other DNA
tcatccctgagtcaaacaaagcagctccatgttcacctgttttccatattagaccagtttccgtattaacagcactgggg

SEQ ID NO: 9211 - DNA, 80 bp, synthetic construct
  source 1..80: mol_type = other DNA
atatagcttcagaaatctcatcattcaaccgtggctttcaagcagctacctacacactcacaggaatttgttcgtgaaag

SEQ ID NO: 9212 - DNA, 80 bp, synthetic construct
  source 1..80: mol_type = other DNA
tttacaaaggtatgtgccacaaaaaacccatgaaagactgatccattaaaagttgctttctgttcaatattccctcttga

SEQ ID NO: 9213 - DNA, 80 bp, synthetic construct
  source 1..80: mol_type = other DNA
ttataatttggcctcaacctacatctcagtcctcaattgccagcatattctccatctacagtctagcacccagttacacc

SEQ ID NO: 9214 - DNA, 80 bp, synthetic construct
  source 1..80: mol_type = other DNA
tggcaatgattaatgttggagaggggtgccaacgtaatacaatgggagaaacaatagtcttttcagcagaagtgctggga

SEQ ID NO: 9215 - DNA, 80 bp, synthetic construct
  source 1..80: mol_type = other DNA
tgatgaagggaatagacaaatgcggtatatctacacaatgaaataatattcaggcataaaaaatgaagtattaatacatg

SEQ ID NO: 9216 - DNA, 80 bp, synthetic construct
  source 1..80: mol_type = other DNA
aaagggaccactttatccacattttcctgactagtgaaatttgcgctaatgtaggtacaccaagctgtacttcttataag

SEQ ID NO: 9217 - DNA, 80 bp, synthetic construct
  source 1..80: mol_type = other DNA
ccaatttcttcaaaaaatttgtttcttctgcgattccaggtttaattttggttatcccatgacaagtggttcacaacact

SEQ ID NO: 9218 - DNA, 80 bp, synthetic construct
  source 1..80: mol_type = other DNA
atgaggttgagaccacagtgagctgtagttgtgccactgcactcagcccaggtgacagagcaagatcttgtcttaaaaat

SEQ ID NO: 9219 - DNA, 80 bp, synthetic construct
  source 1..80: mol_type = other DNA
ctcaaaatcttgccagacatggtgttatgtcagtccacttccacttacagaattagccatagtgcttctaattatgacca

SEQ ID NO: 9220 - DNA, 80 bp, synthetic construct
  source 1..80: mol_type = other DNA
aaagtgcaaatggttgccagttggccatatccaccatactgagattcaaaggttttagaaatttcttatccaaggtcaca

SEQ ID NO: 9221 - DNA, 80 bp, synthetic construct
  source 1..80: mol_type = other DNA
aatcatcactttcatttcaaatgcactttaaagtaatttggggaacatattttaaaatgtacatacaatgacctaagtac

SEQ ID NO: 9222 - DNA, 80 bp, synthetic construct
  source 1..80: mol_type = other DNA
gtattatttggtaagtgggctacagagtagaacttaaaaaatatatccctatctcagttatcccacatttttagtatctt

SEQ ID NO: 9223 - DNA, 80 bp, synthetic construct
  source 1..80: mol_type = other DNA
agaaggattgagtgtttgtgtgcctaaaaaccacgacctacttcataactggctaataccttcagtatgaacaaactttt

SEQ ID NO: 9224 - DNA, 80 bp, synthetic construct
  source 1..80: mol_type = other DNA
ggacactccaccctcagctatatccccttgattaattatgtaaccagatctccttcatcaacttaccgattaggtaatgg

SEQ ID NO: 9225 - DNA, 80 bp, synthetic construct
  source 1..80: mol_type = other DNA
taaaagctgggtgcctaatatgtatctgtcctgacctcccatggaaacaattatcaggcttcagatattttgtctctcaa

SEQ ID NO: 9226 - DNA, 80 bp, synthetic construct
  source 1..80: mol_type = other DNA
attgttgtatccaagcaagtaaagaagacattaagcatttagaaacagcccttagatgtctatgtctgttcttcagtgtt

SEQ ID NO: 9227 - DNA, 80 bp, synthetic construct
  source 1..80: mol_type = other DNA
gcacggtgtccaactgatgtcactgtgttggccttgaaaatttaaaatatcccatgatagtgcccctgtgagtttgttgt

SEQ ID NO: 9228 - DNA, 80 bp, synthetic construct
  source 1..80: mol_type = other DNA
tggcagctcattttttaaaaatggcactacactatactgtattcacatgccagcaaaactgttaaggtaagttcatgtca

SEQ ID NO: 9229 - DNA, 80 bp, synthetic construct
  source 1..80: mol_type = other DNA
tagtagcctactatatctcacccactgtccttctttcctccagctatggtagagaactgctcctccaactttatgtacat

SEQ ID NO: 9230 - DNA, 80 bp, synthetic construct
  source 1..80: mol_type = other DNA
ttgtaattcttagccacaagttagctgacccaccgtctctcaaacaggtgaagttaagctcaatatttggcatatcttga

SEQ ID NO: 9231 - DNA, 80 bp, synthetic construct
  source 1..80: mol_type = other DNA
tgcattttaaaaattgtcctcccacccatcctcttcccccgcaccagtgcatacacaccctctcacatttgcaactttgt

SEQ ID NO: 9232 - DNA, 80 bp, synthetic construct
  source 1..80: mol_type = other DNA
acgtcttctcagaccaaatcagaagtgtgcattttgcttagactccaactatcactaatgggaaccagaaaaataacact

SEQ ID NO: 9233 - DNA, 80 bp, synthetic construct
  source 1..80: mol_type = other DNA
agttttaaaattaaactaccagtttgtggcctaatgagccccaaaacatgccaacattggggaaaatagatcttgttttg

SEQ ID NO: 9234 - DNA, 80 bp, synthetic construct
  source 1..80: mol_type = other DNA
gtagtggtgattaagccattatgaagtgtcagaactggaagtcacttctgagccttagctgatctttctttaaaatgcat

SEQ ID NO: 9235 - DNA, 80 bp, synthetic construct
  source 1..80: mol_type = other DNA
gaaacagtaagaggcagtatacgattatgttctcaattacggctacggctgaaatgtgctacttcactggtgaataaatt

SEQ ID NO: 9236 - DNA, 80 bp, synthetic construct
  source 1..80: mol_type = other DNA
agttatatgttgggatcatggttatgtataggagaagcacttgtatttgcagattttctacttagggtgtcctttacgta

SEQ ID NO: 9237 - DNA, 80 bp, synthetic construct
  source 1..80: mol_type = other DNA
caggattatggaactagtagtggtttctaggccatatttcattttcctgatcttccctgctaatgtcttgtgctagaaac

SEQ ID NO: 9238 - DNA, 80 bp, synthetic construct
  source 1..80: mol_type = other DNA
gacttttttgatggagatgttaaaaaggctttcaagatagcattcagactggcattgggcatactgttgggcctgttacc

SEQ ID NO: 9239 - DNA, 80 bp, synthetic construct
  source 1..80: mol_type = other DNA
catttcttctctgtgtctatgcctcttccatagccctatacctaaatgttggtattactgaggtctatcctcaagccact

SEQ ID NO: 9240 - DNA, 80 bp, synthetic construct
  source 1..80: mol_type = other DNA
gatctacttgagcggggacttgaaaccaatgggacataacaaggaggttgtatgaaagcactaaaccacatgttgtaact

SEQ ID NO: 9241 - DNA, 80 bp, synthetic construct
  source 1..80: mol_type = other DNA
caagcagttgctgcttctgcttagctcccataacactttttgaatagttaggagaaaagtgtttacctgggctgtacagg

SEQ ID NO: 9242 - DNA, 80 bp, synthetic construct
  source 1..80: mol_type = other DNA
ggtgtcagaggggctttgggacattatctctaatgagttgaaagtaaataaatacagaaagctggtgatatgaagataaa

SEQ ID NO: 9243 - DNA, 80 bp, synthetic construct
  source 1..80: mol_type = other DNA
ccacaagatgttattaataagttggacaaactttcagttcttaggctcagcgtcagttacctgagagccaagagcttctt

SEQ ID NO: 9244 - DNA, 80 bp, synthetic construct
  source 1..80: mol_type = other DNA
cccgtatctcagttttctcagcagtaaaggttggggttttgagctaggcagctggatgatatttgttacctttaaattgc

SEQ ID NO: 9245 - DNA, 80 bp, synthetic construct
  source 1..80: mol_type = other DNA
atgcaaattattgggtccaaccctagacctgtggaatctaaggtggtgggacctttggtgatagggctagatgcatattg

SEQ ID NO: 9246 - DNA, 80 bp, synthetic construct
  source 1..80: mol_type = other DNA
gtgcataagaattacctagaaagctttttaaaatgcaaatttggaggcatgcccctgctgataacaaggaagttctgtgt

SEQ ID NO: 9247 - DNA, 80 bp, synthetic construct
  source 1..80: mol_type = other DNA
tgttaaacagtgtacactgggcttgttgatcaatctaatcagcattgtaatgtttcattcctaatttcagcatatcttta

SEQ ID NO: 9248 - DNA, 80 bp, synthetic construct
  source 1..80: mol_type = other DNA
ggaacccctgcagatttaaacatgaataaatacaaagaatagtagcgcattcttattgaatgaatatacaaatcctggct

SEQ ID NO: 9249 - DNA, 80 bp, synthetic construct
  source 1..80: mol_type = other DNA
aagtaccaaagataagatgttttaaggatgagcaggggtagtaaaaagtgaaatctgtggagtatgaaagtatgctaagg

SEQ ID NO: 9250 - DNA, 80 bp, synthetic construct
  source 1..80: mol_type = other DNA
tcactgttccacagggtcttcatcttctcagcatgtttgataaagatgcttgcttgccctgatatattaggtttgtagta

SEQ ID NO: 9251 - DNA, 80 bp, synthetic construct
  source 1..80: mol_type = other DNA
tatatgaaaagctaagtgcaactcattccccactgaaaaggtcaattaactgctcttgttccattaatgcagagatttgt

SEQ ID NO: 9252 - DNA, 80 bp, synthetic construct
  source 1..80: mol_type = other DNA
atgttgagtaggctgaggaagggttggtcttgctggcttgggagtggcagaggcatgtaagtggacttgcatagttcaaa

SEQ ID NO: 9253 - DNA, 80 bp, synthetic construct
  source 1..80: mol_type = other DNA
acatatgagtactaagtaaggtcactccaatggtaggaagcagctcttgtgacagtgtctcatgtcactttcttactcat

SEQ ID NO: 9254 - DNA, 80 bp, synthetic construct
  source 1..80: mol_type = other DNA
aaaggccattctctcttctgccattctctctgtgtacagattaaacatttcctttggtcttgatgaactgttaggtcagt

SEQ ID NO: 9255 - DNA, 80 bp, synthetic construct
  source 1..80: mol_type = other DNA
tttaagtggtagctgttattatttctattcagctgcgcttcctcccagactataaatacatacataccacacacatacac

SEQ ID NO: 9256 - DNA, 80 bp, synthetic construct
  source 1..80: mol_type = other DNA
tgtttttcctttttttccatagttgcattaaaatcctcccctactgaaagaaacggaggccaggataactgtagagcagc

SEQ ID NO: 9257 - DNA, 80 bp, synthetic construct
  source 1..80: mol_type = other DNA
gaatgtgtccctgttaagtaatgcatgactgtatatgaagtagattagttagaagaccggtcaaccccttctgttgtatt

SEQ ID NO: 9258 - DNA, 80 bp, synthetic construct
  source 1..80: mol_type = other DNA
ttctactaagggcctaatgaaatcccgtatttcaggtgaaatagacagatatgtactgattgacgtaacacttggcaagt

SEQ ID NO: 9259 - DNA, 80 bp, synthetic construct
  source 1..80: mol_type = other DNA
ggttgagtgaatctttgtgactaaaagaatgatgatctcttttatttaattagcatattaattccttctgttaatttatt

SEQ ID NO: 9260 - DNA, 80 bp, synthetic construct
  source 1..80: mol_type = other DNA
aacacataaaggcagcatatcatgttatttaagtgagtacgctttggagccagactgaatttatctcctggatcagccat

SEQ ID NO: 9261 - DNA, 80 bp, synthetic construct
  source 1..80: mol_type = other DNA
cattagctgtgatcacatagtaaagaatagatcaagtaccaaattgaactcaaggagaaaatagtgagggcttgtagaat

SEQ ID NO: 9262 - DNA, 80 bp, synthetic construct
  source 1..80: mol_type = other DNA
attcatggttactgtgtttcttctttcgcttatcaagaatcttatatataagaaactttcaggcacgtagggtctagggg

SEQ ID NO: 9263 - DNA, 80 bp, synthetic construct
  source 1..80: mol_type = other DNA
tatacccagtggaaaccactgaagggttttgttacagggggtgtgtatatttcaacttgtgtttcagatgcaacttttgg

SEQ ID NO: 9264 - DNA, 80 bp, synthetic construct
  source 1..80: mol_type = other DNA
ataccattaagcttagagaagtcaaagaggcctggggtggttaggaaaagctgcatggaagagataagaatctaaaaact

SEQ ID NO: 9265 - DNA, 80 bp, synthetic construct
  source 1..80: mol_type = other DNA
atggaaagtaaattttgttttgcctttatttctacagaagccactggtctcccccagacagtagtctgttataacccaga

SEQ ID NO: 9266 - DNA, 80 bp, synthetic construct
  source 1..80: mol_type = other DNA
aggagatgctgttttcttgttacaaagtctgaacacctgcataggagttgactgtagggaacagcttaggattcctcaga

SEQ ID NO: 9267 - DNA, 80 bp, synthetic construct
  source 1..80: mol_type = other DNA
ttatagaataaggatataaagaaagaaaatgtttttgtatggctgtacactgtgtttaagtgttattacagaagagtcaa

SEQ ID NO: 9268 - DNA, 80 bp, synthetic construct
  source 1..80: mol_type = other DNA
gactttatcaccattcaggatatattgattgcctggtgtgcaaggagctgtgtgaggtgaaaatgatagggtaatggcaa

SEQ ID NO: 9269 - DNA, 80 bp, synthetic construct
  source 1..80: mol_type = other DNA
tttatatcatatcaaacatatcagtgcttttctcctttctaatgtgggaatgcagagaggtaattagaaaaaccttcttc

SEQ ID NO: 9270 - DNA, 80 bp, synthetic construct
  source 1..80: mol_type = other DNA
ccggcttcttacaaaaaacaaccgatggacttgggtccagtctaatgcacgcctgctttataaaaatggaagaccagatt

SEQ ID NO: 9271 - DNA, 80 bp, synthetic construct
  source 1..80: mol_type = other DNA
aaagcagttgtctgaaaatctgttgagattttgagtgcaattaccttgaaactgtagatcatttggggagaattaacatc

SEQ ID NO: 9272 - DNA, 80 bp, synthetic construct
  source 1..80: mol_type = other DNA
gccaccgcgcccggccctttttacgtttttctatgacatttttcttttataaattacatttgtatcatttacctgttttt

SEQ ID NO: 9273 - DNA, 80 bp, synthetic construct
  source 1..80: mol_type = other DNA
agagtagctgaagactgtaggcatgtgccaccatgcccagctagtttttatttttttgtagaggtgagggtcttgccatg

SEQ ID NO: 9274 - DNA, 80 bp, synthetic construct
  source 1..80: mol_type = other DNA
ggatgaaatcctgacgtatgtccaagattctttaagtaagtctcccttcataccttcagattatcaacagcaacagtcct

SEQ ID NO: 9275 - DNA, 80 bp, synthetic construct
  source 1..80: mol_type = other DNA
ctgccaggccaacaggcatttttaaacaaggtaagggtgttatcaaactgaattaaatctttcagtgattctttttacct

SEQ ID NO: 9276 - DNA, 80 bp, synthetic construct
  source 1..80: mol_type = other DNA
tgactaaaattaagctccttgacccctgtttactctgtattagagtataataattaaaagtatgacctgaagctttatct

SEQ ID NO: 9277 - DNA, 80 bp, synthetic construct
  source 1..80: mol_type = other DNA
ttaaagtttccagaacgtccactaactaaaatataaaggctctgtaatctataaaactctacagagctatacatcttcat

SEQ ID NO: 9278 - DNA, 80 bp, synthetic construct
  source 1..80: mol_type = other DNA
atggaaaaataaaactgtcactgttggacgtcagcaagttcacatggaggcattgatgcatgctattcacaattattcca

SEQ ID NO: 9279 - DNA, 80 bp, synthetic construct
  source 1..80: mol_type = other DNA
cctaaatccaaccattttcattaattcaggcatattttaactccactgcttacctactttcttcaggtaaagggcaaata

SEQ ID NO: 9280 - DNA, 80 bp, synthetic construct
  source 1..80: mol_type = other DNA
gcattcagctcttcttttctttagatatgagagctgaagagcttagacacattttgcatgtattatttgaaaatctgatg

SEQ ID NO: 9281 - DNA, 80 bp, synthetic construct
  source 1..80: mol_type = other DNA
caaacaaaggatacttagtgcactgctacattgtgggatttatttctagatgatgtgcacatctaaggatatggatgtgt

SEQ ID NO: 9282 - DNA, 80 bp, synthetic construct
  source 1..80: mol_type = other DNA
gtgactgtaaggagatgcttagctattgaagagcttctctccactcttgtattttctttatgagttcttctgagagattt

SEQ ID NO: 9283 - DNA, 80 bp, synthetic construct
  source 1..80: mol_type = other DNA
tatttaccatgtgtgattgtcatagaagtggtaaggggatagaaattgatcatggtttcatttttagtctgaggtgccct

SEQ ID NO: 9284 - DNA, 80 bp, synthetic construct
  source 1..80: mol_type = other DNA
tagatcaatcaacccatgactttcgccaataggctttccattgtattttgggtcatataggcacttgaagctctcaggag

SEQ ID NO: 9285 - DNA, 80 bp, synthetic construct
  source 1..80: mol_type = other DNA
gagtcatttgaggttatcgcctgagtaataacttgtaactcttggaacatcttgcagcaaatgacttggttattaaattc

SEQ ID NO: 9286 - DNA, 80 bp, synthetic construct
  source 1..80: mol_type = other DNA
atccccataaatccacaccaatcaacaaaattcactagcccctcaacataccacatgtaatgttccatgcaagaaagccc

SEQ ID NO: 9287 - DNA, 80 bp, synthetic construct
  source 1..80: mol_type = other DNA
cttatttaaatggtttattcaaataactagagtgtttacatttgcacctttcttgcaatcaccaatgcatagtttccacc

SEQ ID NO: 9288 - DNA, 80 bp, synthetic construct
  source 1..80: mol_type = other DNA
ctagatggggaaaattagaatgcagttttgcagaccataaacaatttgtttagctttaaatttgctggtggccaaaagtt

SEQ ID NO: 9289 - DNA, 80 bp, synthetic construct
  source 1..80: mol_type = other DNA
caataattttcctgaaaacaccaagcagctattaggtctgggacaatgccagaaaattattatcttctaggatatgtagt

SEQ ID NO: 9290 - DNA, 80 bp, synthetic construct
  source 1..80: mol_type = other DNA
aacaaaatacaaagattagctgggcttggtggtacatgcctgtagtcccagctagttgggaggctgaggcaggagaatca

SEQ ID NO: 9291 - DNA, 80 bp, synthetic construct
  source 1..80: mol_type = other DNA
tcaaggcagcaactgcttttctagaaggataggtaattccaaatgaaaaatccaagtctgaaaaagttcaaggtagtaat

SEQ ID NO: 9292 - DNA, 80 bp, synthetic construct
  source 1..80: mol_type = other DNA
cttatcttccaagtcactacacatagtaacaagtcccagaaagcaatctactggataaatgaataggcaatgataatctg

SEQ ID NO: 9293 - DNA, 80 bp, synthetic construct
  source 1..80: mol_type = other DNA
gcacatagaaggtagggagtgatagaggggatgaatgctgttttcaaatacatggatggctgttatatagaaagagtcta

SEQ ID NO: 9294 - DNA, 80 bp, synthetic construct
  source 1..80: mol_type = other DNA
gacaaaacatggcaacaaaaagaacagaacagaatgaagccatttacctcctctttggcaatgcgcatctcatctgtaac

SEQ ID NO: 9295 - DNA, 80 bp, synthetic construct
  source 1..80: mol_type = other DNA
gcttccaatttctggcctgtcctgaatgtcaccatcctgcttcattaaatgagccacatctaactatgtgccaagtatta

SEQ ID NO: 9296 - DNA, 80 bp, synthetic construct
  source 1..80: mol_type = other DNA
tgccaatcaaatccctgcatacatactggagaaaagggctgaaaagccttatttgttggaaaacttagatggtcgctaac

SEQ ID NO: 9297 - DNA, 80 bp, synthetic construct
  source 1..80: mol_type = other DNA
aactgtaactccaaagtccatctttccacactattataaggtgctactctgtgataattttagtatcgtttatgtggcta

SEQ ID NO: 9298 - DNA, 80 bp, synthetic construct
  source 1..80: mol_type = other DNA
tgtcttgagatgaacaggaaaatccaagactgtccaacttacttggactgtaaactccatgaggtccgggatcaagtcct

SEQ ID NO: 9299 - DNA, 80 bp, synthetic construct
  source 1..80: mol_type = other DNA
ggaataattgggctttaacaactgaaatacgaagtttgccgcaaaggaaactcaggacattttaggaccccatgctacga

SEQ ID NO: 9300 - DNA, 80 bp, synthetic construct
  source 1..80: mol_type = other DNA
aaaattatgagttgtgtagtcagacatgggctcagtatagtttacctcctaccagccaggtggcaaattaatctttctga

SEQ ID NO: 9301 - DNA, 80 bp, synthetic construct
  source 1..80: mol_type = other DNA
ttcttctgatcatttcatttaatgagtgtatgacccagagtgaagggagagggcaaatgtgaaactgctgtctcctcagt

SEQ ID NO: 9302 - DNA, 80 bp, synthetic construct
  source 1..80: mol_type = other DNA
cccgggttcaagtgattctctggcaaatggcatttttaaagatctggcacttttagatatgtaaagctccctcatccaag

SEQ ID NO: 9303 - DNA, 80 bp, synthetic construct
  source 1..80: mol_type = other DNA
tctttctttctctgtcttcccacccaacacacacacctttgaacagtggaactggatgaaagaaatgggatctgtgcagc

SEQ ID NO: 9304 - DNA, 80 bp, synthetic construct
  source 1..80: mol_type = other DNA
ccatgtggagcagaagtagcaaatgcccatgaaaatggtctagcttattatgtcttgcataatgtgggtagagttctatt

SEQ ID NO: 9305 - DNA, 80 bp, synthetic construct
  source 1..80: mol_type = other DNA
tgatggtttctggagataacaatgaataagactgtctttgaggataatcagcaagagagagagacacataaggcaatagg

SEQ ID NO: 9306 - DNA, 80 bp, synthetic construct
  source 1..80: mol_type = other DNA
gtggggtttgcttttccctatctcaattagggagttgcagaatgcaaactttttttactctacgtctgtgaaaaacaaag

SEQ ID NO: 9307 - DNA, 80 bp, synthetic construct
  source 1..80: mol_type = other DNA
gctctctttcacagtgtccaggagaaagacaaccccaaataaggtgcaaagggtgagactctactatttaattttcataa

SEQ ID NO: 9308 - DNA, 80 bp, synthetic construct
  source 1..80: mol_type = other DNA
gaagggatctaacattttttagttcctagctgttgttgattgttgagggcataactgctgagttgcaaattcccattggc

SEQ ID NO: 9309 - DNA, 80 bp, synthetic construct
  source 1..80: mol_type = other DNA
gctaaatgtattccccccactggacaggagccatctgtaaataatgtactttatagtagcaacaaatgaggtcttcctat

SEQ ID NO: 9310 - DNA, 80 bp, synthetic construct
  source 1..80: mol_type = other DNA
tgtgaactcacacaggttacgtgctctctgtatctgatttcataatctgtgagtgctgataatagtcctctctgcctcag

SEQ ID NO: 9311 - DNA, 80 bp, synthetic construct
  source 1..80: mol_type = other DNA
tatgcaagaagtttagtcacagggagaccaagttcaacaaatcttacatttactccacatttaacaaatacataagcatc

SEQ ID NO: 9312 - DNA, 80 bp, synthetic construct
  source 1..80: mol_type = other DNA
ttagtaccaccgaggtcttactctcctctcaactttctgctatcacttctgacctcctgcatgctccaattggattggaa

SEQ ID NO: 9313 - DNA, 80 bp, synthetic construct
  source 1..80: mol_type = other DNA
tttggttgacatctttaaaagggagagtttgaaattattcagctctatagtaaactcctcgctcctatcctcaccattag

SEQ ID NO: 9314 - DNA, 80 bp, synthetic construct
  source 1..80: mol_type = other DNA
atggtcaggtaaagttaaacattttctagtcatgtgccctaaccattataagatgacctatctcccctttggcttctctt

SEQ ID NO: 9315 - DNA, 80 bp, synthetic construct
  source 1..80: mol_type = other DNA
tgatccctaaaatcaaaacaacttgccatttcaaacgctgaatgcttttgagagctctagctacccatccagcttggata

SEQ ID NO: 9316 - DNA, 80 bp, synthetic construct
  source 1..80: mol_type = other DNA
gaagggtgaataagaactttgctttgctgttgaagaataaaccttagaaacatgtgctcattcctcttgtgcagagggaa

SEQ ID NO: 9317 - DNA, 80 bp, synthetic construct
  source 1..80: mol_type = other DNA
tctaaggagatatcttcccctcaaatggacctcaaattaacatcctcctccttaggctatattcaatcaagaagacccac

SEQ ID NO: 9318 - DNA, 80 bp, synthetic construct
  source 1..80: mol_type = other DNA
gctaaagacagcagagtgaagtaagaagattgtccttttggaatattcaatcaaatgggagagacatacaatcaaatcac

SEQ ID NO: 9319 - DNA, 80 bp, synthetic construct
  source 1..80: mol_type = other DNA
ggattacaggcacacagggattataggtgtgtattgctgcacctagcaagttctaatgtattttaatccttcctttcagt

SEQ ID NO: 9320 - DNA, 80 bp, synthetic construct
  source 1..80: mol_type = other DNA
aaatgatgatgagatatcaaatgcctcctaaagcacagttaaggaaggactgaactcttccatcactcccagatggtaca

SEQ ID NO: 9321 - DNA, 80 bp, synthetic construct
  source 1..80: mol_type = other DNA
agaggaacatttgaggtggtggtgtgtggatctcctgaagtctctgataaaaggcgttcattcttctttgaaaggtgaag

SEQ ID NO: 9322 - DNA, 80 bp, synthetic construct
  source 1..80: mol_type = other DNA
aatgagagatgcagtgttgatctctgcaagaagcatattgtctcagacaaattaacctatagctgtataatacaaaggtt

SEQ ID NO: 9323 - DNA, 80 bp, synthetic construct
  source 1..80: mol_type = other DNA
gtaatggaaaagactgggcaggagactggcaggaacatgtgatcgctataattaactaaaacacattgtcatgaataata

SEQ ID NO: 9324 - DNA, 80 bp, synthetic construct
  source 1..80: mol_type = other DNA
aaagtgaagcagtagccctactaggcacaggttatagtgtcagaggaacagcattttaatgttgaggttattacttatta

SEQ ID NO: 9325 - DNA, 80 bp, synthetic construct
  source 1..80: mol_type = other DNA
caatggggttcaggagctcagaatggcaaaaaaccaagaaacctggcataaaatgaaactagtgttcagaaactcacctt

SEQ ID NO: 9326 - DNA, 80 bp, synthetic construct
  source 1..80: mol_type = other DNA
actttcatgtcactgaatttgtcttttcttgaggagccagctttcacatttctaattatttgaaatatgaaaacaatcat

SEQ ID NO: 9327 - DNA, 80 bp, synthetic construct
  source 1..80: mol_type = other DNA
taaagggaaaaggggcccaaagctgttcagatgaagagactagatgtgcaaaaatacatatatggggaaatgagaaagat

SEQ ID NO: 9328 - DNA, 80 bp, synthetic construct
  source 1..80: mol_type = other DNA
tactgcctcaaacaccatgctgttttttgcagcatgcttttattcacactgttctttagactagagttccactattttct

SEQ ID NO: 9329 - DNA, 80 bp, synthetic construct
  source 1..80: mol_type = other DNA
agaattaaagactgtggagcaaaatggccaaagcagcggtgttgtcaataaatggtgtagaggggcataggctgaaagaa

SEQ ID NO: 9330 - DNA, 80 bp, synthetic construct
  source 1..80: mol_type = other DNA
tgggcatttgccttccagctaactgtgtgaccaaacgtttttgtataatcactgttcctatagttatattaatggttata

SEQ ID NO: 9331 - DNA, 80 bp, synthetic construct
  source 1..80: mol_type = other DNA
atttaaaagaatcaaagctggatctctggcaactgctttgcaccctaaccctgaggcaggaaagcaaaatgttgagactc

SEQ ID NO: 9332 - DNA, 80 bp, synthetic construct
  source 1..80: mol_type = other DNA
gttcaggcaaagtttttagagatgtgagatttgtgcaaattccccagtgaacaaatttccattagtaagtcaaacgttac

SEQ ID NO: 9333 - DNA, 80 bp, synthetic construct
  source 1..80: mol_type = other DNA
gaaactggaagctctattgtgaagtaactggaaggtggttgctgcattgaagttataaggctcactcacctaaaactttt

SEQ ID NO: 9334 - DNA, 80 bp, synthetic construct
  source 1..80: mol_type = other DNA
gcttccaagcccaaagcaaacaaaatattgcttcagttggaaggaagttaaaaacatttcccaagtgaaagcagcatcac

SEQ ID NO: 9335 - DNA, 80 bp, synthetic construct
  source 1..80: mol_type = other DNA
caaagtcctctgcctcatagcctctcctagcccaaacgtcacattttcagtcaaagcagaaaacctatttcctttcaatt

SEQ ID NO: 9336 - DNA, 80 bp, synthetic construct
  source 1..80: mol_type = other DNA
gattcagaaaaataggactaggatcactaacgttaaatcatttcccatgtccaggcattatttcaagggctttgtacgca

SEQ ID NO: 9337 - DNA, 80 bp, synthetic construct
  source 1..80: mol_type = other DNA
ctttccctagaggggagttgttgcacagtgacttcgaagtgaataggtttcaatctcaaaatcatctctctgtgttaagg

SEQ ID NO: 9338 - DNA, 80 bp, synthetic construct
  source 1..80: mol_type = other DNA
ttagattgtgttttattcatttgtttgttttggagttctaggatctgacaggaaagcagtgtgaaacaggcaaagttcag

SEQ ID NO: 9339 - DNA, 80 bp, synthetic construct
  source 1..80: mol_type = other DNA
ttgttccttttttatctgcacgggctaaagtttatttgcatactcggatacgattggatgaacaaactcagagcaaaaaa

SEQ ID NO: 9340 - DNA, 80 bp, synthetic construct
  source 1..80: mol_type = other DNA
cctggttttggaagttgtctgtatttatcaacataggcagtgtacaaagactaaatttaagcagggcttccaaacaattc

SEQ ID NO: 9341 - DNA, 80 bp, synthetic construct
  source 1..80: mol_type = other DNA
ttgtattttattggataattatgtaagaacagtccctttataccaggcattcctgaatgtaggcaaaaggagttgctttg

SEQ ID NO: 9342 - DNA, 80 bp, synthetic construct
  source 1..80: mol_type = other DNA
ccatgtgatggtattaggagatggagcctttgggaggtgtattagtccattcccatgctactaataaagacatacttgag

SEQ ID NO: 9343 - DNA, 80 bp, synthetic construct
  source 1..80: mol_type = other DNA
ttcaagatgctggaaccatttattgaagatgaacctctcctactccagttacatgaccactcccctaactattctctgtt

SEQ ID NO: 9344 - DNA, 80 bp, synthetic construct
  source 1..80: mol_type = other DNA
acttttcttaccacccctgccctggcaatgaatcaatattttgaagctattgaaggggaccagaagacaaataattaaag

SEQ ID NO: 9345 - DNA, 80 bp, synthetic construct
  source 1..80: mol_type = other DNA
tctcacatggcaaaatacatcattccttttcaatagtcctccagaatcctagcttgttccagcatcaactcaaaagttcg

SEQ ID NO: 9346 - DNA, 80 bp, synthetic construct
  source 1..80: mol_type = other DNA
gctggtggattcttctcccgaaaatgctctttccttctctaccacatgttcaggctgaaaattttctgaatttttacact

SEQ ID NO: 9347 - DNA, 80 bp, synthetic construct
  source 1..80: mol_type = other DNA
aagttatacatacatatccagatctatgaccacaatccaaatttatcttccaggccctggctttgcatttcaactgctgg

SEQ ID NO: 9348 - DNA, 80 bp, synthetic construct
  source 1..80: mol_type = other DNA
caagatggaaatggattcttctctcacataaacagattgtaagcaggttgtccatggcagccatggtgtcagaatggaaa

SEQ ID NO: 9349 - DNA, 80 bp, synthetic construct
  source 1..80: mol_type = other DNA
tggcccagccatcccattgctgggtatatacccaaaggattataaatcatgctgctataaagacacattcacacgtatgt

SEQ ID NO: 9350 - DNA, 80 bp, synthetic construct
  source 1..80: mol_type = other DNA
aattttaacaaacttacatgtaaatataattactatttttttcttacaaagaattcagggatttttgaacactctcattg

SEQ ID NO: 9351 - DNA, 80 bp, synthetic construct
  source 1..80: mol_type = other DNA
actttaaaatttctctattggttagtaataaacaaccgcaaaatctttgtggcttacaagagtaaggctgttttttatgt

SEQ ID NO: 9352 - DNA, 80 bp, synthetic construct
  source 1..80: mol_type = other DNA
tactcatccatataactgaatatctataccttttgaccaacatattcccattgcccccacttccttcacctggtaaccaa

SEQ ID NO: 9353 - DNA, 80 bp, synthetic construct
  source 1..80: mol_type = other DNA
gtggcccagctggaaatcgatttttttccctcagcaatgttataatgaaaagatgttgaacaaagcaatgttattggagg

SEQ ID NO: 9354 - DNA, 80 bp, synthetic construct
  source 1..80: mol_type = other DNA
aaaagttaaaccaatgttccattcctgggataattcttacttggttgtgaagtagtaactttgtatataccttttgggtt

SEQ ID NO: 9355 - DNA, 80 bp, synthetic construct
  source 1..80: mol_type = other DNA
acattctaagttggcggttatgttagcactttgaagataccattctaatgccatctatttcctttgtgttgttccatcag

SEQ ID NO: 9356 - DNA, 80 bp, synthetic construct
  source 1..80: mol_type = other DNA
agtggctgaactaatttacatttccaccaacaatgtataagtcttcccttttctctgcagcctcaccagtatctgttgtt

SEQ ID NO: 9357 - DNA, 80 bp, synthetic construct
  source 1..80: mol_type = other DNA
gtcattcatcctctcttctctattttttattattgtatctctttgtgatgcattattggaattttcttacaccctaacca

SEQ ID NO: 9358 - DNA, 80 bp, synthetic construct
  source 1..80: mol_type = other DNA
attcctttccaggacctccatcttgccctagaatctagcccaatagtgtgtcaccatctggttagcaattttatatgttt

SEQ ID NO: 9359 - DNA, 80 bp, synthetic construct
  source 1..80: mol_type = other DNA
tttgatagacatttgggaggggctgcagttttaagtctaagtgctgaaacactgacaatgagtatggaaggaataacttt

SEQ ID NO: 9360 - DNA, 80 bp, synthetic construct
  source 1..80: mol_type = other DNA
aagctaaaatccacttccattgagacatttttgggtgtgtctggaataattacacatggcctatcaggagcatctttaaa

SEQ ID NO: 9361 - DNA, 80 bp, synthetic construct
  source 1..80: mol_type = other DNA
tgttttggaactagataagggtagtggctgtaacactttgagaatgtactaaatgccactcagctgctcactttaacatg

SEQ ID NO: 9362 - DNA, 80 bp, synthetic construct
  source 1..80: mol_type = other DNA
tttaaaaaacaaatggtatatgaacataggaaatagtttccctcaggcgatagtatcatgatctgtcctggacccagatt

SEQ ID NO: 9363 - DNA, 80 bp, synthetic construct
  source 1..80: mol_type = other DNA
ctaagtcctgtggcattctggattcataccaatgaaatatccagcagctgatgattctattccatgtgcctggcatccta

SEQ ID NO: 9364 - DNA, 80 bp, synthetic construct
  source 1..80: mol_type = other DNA
cttctctcatctctagtgaaagagacagaaattatgagaatcgttcataattcagtttgaaagtagaaagccccaaagaa

SEQ ID NO: 9365 - DNA, 80 bp, synthetic construct
  source 1..80: mol_type = other DNA
ttcttcttttccctatgagttttttatttgcccggaatcgattttgtctttatgttgtcctaacacaatttattaaatgg

SEQ ID NO: 9366 - DNA, 80 bp, synthetic construct
  source 1..80: mol_type = other DNA
caagattaatcttgaatttttgaatagtggcaatggatgcttttttcagctgcattttggcacagacatggcatcatctc

SEQ ID NO: 9367 - DNA, 80 bp, synthetic construct
  source 1..80: mol_type = other DNA
gccatcagggttctctttctccatcctcagctctactttctgacactcttgcttataatcttaatcatactgttttataa

SEQ ID NO: 9368 - DNA, 80 bp, synthetic construct
  source 1..80: mol_type = other DNA
atcaagcacgccctgaaactttttactgtgtagcctctttctcagagcaactgtagattactgctttcttttctactgac

SEQ ID NO: 9369 - DNA, 80 bp, synthetic construct
  source 1..80: mol_type = other DNA
tttcagaaatgtgagacaaatagttggcaatttagtggtggtgggggcagtgataaaattgtctacaggtatccaaatag

SEQ ID NO: 9370 - DNA, 80 bp, synthetic construct
  source 1..80: mol_type = other DNA
aacttgttctctcgagtttccactttcccatgggtgctggtggtaggcgagaaagttctttctacattttatgttatttt

SEQ ID NO: 9371 - DNA, 80 bp, synthetic construct
  source 1..80: mol_type = other DNA
atttctgagaaatatctgtgtcatggggatagggaacctaagcagatttttgaaagtgaggcagcatgactcattcaaag

SEQ ID NO: 9372 - DNA, 80 bp, synthetic construct
  source 1..80: mol_type = other DNA
attaaaatactggatcaagtggaaaggatcctgattccagtcaagagtcagtgtctcagttccagccatctgaaagtcaa

SEQ ID NO: 9373 - DNA, 80 bp, synthetic construct
  source 1..80: mol_type = other DNA
tggtgataggatgtcatcgttaatgatttgagttccctaaagaaagctctgtagcctttggagaaagctaacgatgtgta

SEQ ID NO: 9374 - DNA, 80 bp, synthetic construct
  source 1..80: mol_type = other DNA
ccttccttcatgtgatctaatagatgcttgatccaaagcatctaacgacttccagtcatggaacttatcagactatggtg

SEQ ID NO: 9375 - DNA, 80 bp, synthetic construct
  source 1..80: mol_type = other DNA
gaagtagcgctctgagtaaagggatacacagtaaatcttggctgcaaacaataaaacaattatgatggtgttcatagtac

SEQ ID NO: 9376 - DNA, 80 bp, synthetic construct
  source 1..80: mol_type = other DNA
cttctgctatgggacatattttgaaaaccagggcaataaacacatctcacaacctgctcttctttacaagagggcagcag

SEQ ID NO: 9377 - DNA, 80 bp, synthetic construct
  source 1..80: mol_type = other DNA
gatttagttggttcataagcttgtaagtgatatcaagatggagctccctttttatattctggagtgtaaatccctctgtt

SEQ ID NO: 9378 - DNA, 80 bp, synthetic construct
  source 1..80: mol_type = other DNA
tcagtactttagacacttttttactgactggccttgggtagaaaaatttatataaagcactagacaagaaaagcttatag

SEQ ID NO: 9379 - DNA, 80 bp, synthetic construct
  source 1..80: mol_type = other DNA
tttttaaacataaagagagtcttgctatgttgctcaggcttagaactcctggcctgaaacaatcctcctgcgtcagtctc

SEQ ID NO: 9380 - DNA, 80 bp, synthetic construct
  source 1..80: mol_type = other DNA
actggacaacattgatctacattgtagatagaaattaaaattcaccagtctttgcagtttataaaatctgtggccaatta

SEQ ID NO: 9381 - DNA, 80 bp, synthetic construct
  source 1..80: mol_type = other DNA
actgtaagtaatatgcagtgaaaattctggggccaccttacatttgccaaaggttttactattcccccaactatcacata

SEQ ID NO: 9382 - DNA, 80 bp, synthetic construct
  source 1..80: mol_type = other DNA
tcctaagcgaagtttcctttcggggtgtcaaatcacaccacagctgccaggttttcaatataatgtaaccactaatattt

SEQ ID NO: 9383 - DNA, 80 bp, synthetic construct
  source 1..80: mol_type = other DNA
acaaattgggccacagcttcataaatgttgaaagcaagactaaccaatcaatggctgtagcccatctgaataaatgttcc

SEQ ID NO: 9384 - DNA, 80 bp, synthetic construct
  source 1..80: mol_type = other DNA
tgcatttaggcagtttttccattcaccatttttaggctctttcagttgattttctagtaccctcgcttctctccctcttt

SEQ ID NO: 9385 - DNA, 80 bp, synthetic construct
  source 1..80: mol_type = other DNA
gagccacagcgcccggccacgatctttcaaatgctctaaccattcctggagagtagatctctaattataatatttcgaat

SEQ ID NO: 9386 - DNA, 80 bp, synthetic construct
  source 1..80: mol_type = other DNA
agcatttttaattaaggtatgtataattctttggtagacataatgctagcccacacttaatagactaccgtaaagggtaa

SEQ ID NO: 9387 - DNA, 80 bp, synthetic construct
  source 1..80: mol_type = other DNA
tgtgaagcctgtgcttcataaaactcaaaaccttcaccatataataagccttatttaaaatatgagtgggaaatcttgtc

SEQ ID NO: 9388 - DNA, 80 bp, synthetic construct
  source 1..80: mol_type = other DNA
tgctgaggttaataggaactgtggatatctcagactgccaaaacataaggagatatgacaggaaaccaaacgggaaactg

SEQ ID NO: 9389 - DNA, 80 bp, synthetic construct
  source 1..80: mol_type = other DNA
aatgtaagactttacttgctttgacactgaggaagggaaggtgtaagagtgagaagagaggggaaaattccacaaagcat

SEQ ID NO: 9390 - DNA, 80 bp, synthetic construct
  source 1..80: mol_type = other DNA
ttgggcaaatgtataatgacatggctccatcattgcactatcatacagaacagtttcactgccctaaaagtcctctgtgc

SEQ ID NO: 9391 - DNA, 80 bp, synthetic construct
  source 1..80: mol_type = other DNA
cattgagctatttttttgtgaaggctgtaaggcatatacctagacttattttttggcatgcggacttccatttgtcccag

SEQ ID NO: 9392 - DNA, 80 bp, synthetic construct
  source 1..80: mol_type = other DNA
ttcatattgtctatttattcttgtgtacattttggcacattgtgtctttcaagaaattggtagaattttggggtatagag

SEQ ID NO: 9393 - DNA, 80 bp, synthetic construct
  source 1..80: mol_type = other DNA
aaaaggagtgggagttttattaaacttgttcagttatgttttatggtcaaaaatgtggcctatcatggtgaatgttccat

SEQ ID NO: 9394 - DNA, 80 bp, synthetic construct
  source 1..80: mol_type = other DNA
gtactgcttcatgggtagtgcaaatattttataataatgaaatgttcctaattccttactcctgtaccttgtataattac

SEQ ID NO: 9395 - DNA, 80 bp, synthetic construct
  source 1..80: mol_type = other DNA
tcattcaatcatgatttgttgaggtctgattgtggcaggtaatctaatagaagccctgtccctacacccagagagaagga

SEQ ID NO: 9396 - DNA, 80 bp, synthetic construct
  source 1..80: mol_type = other DNA
agcccatcaaaggaattcatttgtttcattgttcttgatctaaggcatatctttttgatgctttcttagaatttgcatct

SEQ ID NO: 9397 - DNA, 80 bp, synthetic construct
  source 1..80: mol_type = other DNA
aaattgtgtgtttcaaaaggaaaaataaacgttcttcttactgctttatgtattctaaatatatgttctaaataccacat

SEQ ID NO: 9398 - DNA, 80 bp, synthetic construct
  source 1..80: mol_type = other DNA
cataggaaaaactgctactccaaaattttagagacaggcagatatagagaattacaacttactgtaccagaaacctgcat

SEQ ID NO: 9399 - DNA, 80 bp, synthetic construct
  source 1..80: mol_type = other DNA
ctacttttcaaggtctgagatcaacatagcaatagcatggaaaattacagtgctctctgtgtggcagcattttgaggaaa

SEQ ID NO: 9400 - DNA, 80 bp, synthetic construct
  source 1..80: mol_type = other DNA
tgagatccacacagctcaggggaagaatctgcttgtcttactctgttgtcttttaagatgtttttgctgctgctagggaa

SEQ ID NO: 9401 - DNA, 80 bp, synthetic construct
  source 1..80: mol_type = other DNA
atcacgagagcatggttaacgtttctaacttttgtcttttcatgtctattccatgtcccccttgtcctcagctaactaga

SEQ ID NO: 9402 - DNA, 80 bp, synthetic construct
  source 1..80: mol_type = other DNA
ttgctctggtctccactcaaatttggcagttttagatgtgactcaataaatggaaatggtagctgggaatcagatctctg

SEQ ID NO: 9403 - DNA, 80 bp, synthetic construct
  source 1..80: mol_type = other DNA
aataaaagtttggatgcaaacttcctctttctctctcccttcctgtctgtttccctcccttccttcttgtctttctcctc

SEQ ID NO: 9404 - DNA, 80 bp, synthetic construct
  source 1..80: mol_type = other DNA
cttcaggctattttgcctttcttttgcaatgcaaacacttacacctcaactcagtggtccccaaatcagacacagtgaag

SEQ ID NO: 9405 - DNA, 80 bp, synthetic construct
  source 1..80: mol_type = other DNA
gccaaaccaaatactaaacttggaattatacgggttatagttttcaggtcatttaggagatgtttgctacttcaaattgc

SEQ ID NO: 9406 - DNA, 80 bp, synthetic construct
  source 1..80: mol_type = other DNA
ttgttgttgttgtctcttaatatagttgtggtcaggaatatgggcaaaattacaagttttgccttgatgagatttgcact

SEQ ID NO: 9407 - DNA, 80 bp, synthetic construct
  source 1..80: mol_type = other DNA
ttgtgaggattaatgagttaataaatgtgtagggcttagagcagtgccttgcatacagtaaattctccatgagtattagc

SEQ ID NO: 9408 - DNA, 80 bp, synthetic construct
  source 1..80: mol_type = other DNA
agccacctcgtccagccagaaccaataaattattaaatcaataaccaatgaggtaacttcagatacttattataatatga

SEQ ID NO: 9409 - DNA, 80 bp, synthetic construct
  source 1..80: mol_type = other DNA
atgcagcaaaaacaatgcttacaggaaaatttcaccaaccttaatgaaaagaaaatactagtggtatttaaatagcttca

SEQ ID NO: 9410 - DNA, 80 bp, synthetic construct
  source 1..80: mol_type = other DNA
taataaaacctatttgtttgcctattgcctctggatgcttttttgttatgatagctgtgttgaacagttgcaacagagac

SEQ ID NO: 9411 - DNA, 80 bp, synthetic construct
  source 1..80: mol_type = other DNA
cctcattgaattgtcctggcatgctggtctaaaatcatttgactatatattcaacagtttatttctggactctctatttg

SEQ ID NO: 9412 - DNA, 80 bp, synthetic construct
  source 1..80: mol_type = other DNA
attcttgtcttctttctgatcttggaggaaaaatcttcagtcttccaccagtaagtataacactggctataggcttttta

SEQ ID NO: 9413 - DNA, 80 bp, synthetic construct
  source 1..80: mol_type = other DNA
tgtaatctttgttcaatttatgagtccttaattgtccagtttcatgttgtgtatcatggctgggccaatgactctttccc

SEQ ID NO: 9414 - DNA, 80 bp, synthetic construct
  source 1..80: mol_type = other DNA
aagattcagggctattcatgaacaagaacttcaacaccaattatctcccccaatataggaagctatcaccagtgaatgcc

SEQ ID NO: 9415 - DNA, 80 bp, synthetic construct
  source 1..80: mol_type = other DNA
gcaaaacagttccactcttacttagctattattccattacagagctactatagagctgaattttgagctcttactactgt

SEQ ID NO: 9416 - DNA, 80 bp, synthetic construct
  source 1..80: mol_type = other DNA
ttagtcatttgaccttctgggacttactgtccttatttgtaaactagaagacgttggtccagattttttctaatagtcct

SEQ ID NO: 9417 - DNA, 80 bp, synthetic construct
  source 1..80: mol_type = other DNA
tgtgtcactcagctggaaagataaaatatgaaatagccacaaggagacagttaattacaagtagattccgtaccatactg

SEQ ID NO: 9418 - DNA, 80 bp, synthetic construct
  source 1..80: mol_type = other DNA
ttttgaagaatgaataaactagacttgataactcactgaatgtggctgatgaggaagaaagaagaatctcaaattgctga

SEQ ID NO: 9419 - DNA, 80 bp, synthetic construct
  source 1..80: mol_type = other DNA
agtagagacaaacaaaaagggaagattcacacacgttttttctaaataaatcagccaccctgtctccagccaactgtgga

SEQ ID NO: 9420 - DNA, 80 bp, synthetic construct
  source 1..80: mol_type = other DNA
catggattttccaggatgaggtccagaaagtgtacagtaggatctgagatacagtatgattcttatactatgaagttata

SEQ ID NO: 9421 - DNA, 80 bp, synthetic construct
  source 1..80: mol_type = other DNA
agcccaaggcacatagaatttgaaaatacacaggtctctctttagggctcttatgattaatgttggctcatgctactatt

SEQ ID NO: 9422 - DNA, 80 bp, synthetic construct
  source 1..80: mol_type = other DNA
taaagctaaggtgaaatgaaatgttaccatttggggaaaacgtttgatgaatatattcttgcaaatataccattggacca

SEQ ID NO: 9423 - DNA, 80 bp, synthetic construct
  source 1..80: mol_type = other DNA
tcaccaaatagctaactaggtggacagcaggctattggaggattttcaggatttaagctttcccccctcctttacatttt

SEQ ID NO: 9424 - DNA, 80 bp, synthetic construct
  source 1..80: mol_type = other DNA
ccgcacccagcttctggcaactatcattctactttttgtctccatgaatttgactactctagagaccttatataagcaga

SEQ ID NO: 9425 - DNA, 80 bp, synthetic construct
  source 1..80: mol_type = other DNA
ccaaagatgagagctagttaaaaagagggctgaagagagactaactaaagttaggtcagagagagtctagtcaattatat

SEQ ID NO: 9426 - DNA, 80 bp, synthetic construct
  source 1..80: mol_type = other DNA
aagaggaagtgtgagacttcgaactttgtgcttctgtttcaagtgttttagctcttcagggtcccttgtgatttcacatg

SEQ ID NO: 9427 - DNA, 80 bp, synthetic construct
  source 1..80: mol_type = other DNA
gagaagaaaaatgagaatttcctgtgttgtagaataagaatactttttttccttacatgaattatctatttcaaatgagt

SEQ ID NO: 9428 - DNA, 80 bp, synthetic construct
  source 1..80: mol_type = other DNA
tcctacgcatgtggtgtggtgtctacttttttactcagcaaagtggcagggacatcttcatggttataaatattgagata

SEQ ID NO: 9429 - DNA, 80 bp, synthetic construct
  source 1..80: mol_type = other DNA
tgatcccagatgtagacagccagattacttccagaggaggtttttgttgacaaacattcttggcacattcttccaaaaag

SEQ ID NO: 9430 - DNA, 80 bp, synthetic construct
  source 1..80: mol_type = other DNA
tcgaggaaatagagaaagacaatttgggcagaaggtgaacacaatccacaaggtatatgtgggtgcaaccaaagtcttaa

SEQ ID NO: 9431 - DNA, 80 bp, synthetic construct
  source 1..80: mol_type = other DNA
agaggaagtgaataagcaatgtgatcagatttgttcatttgaaaactgattagaccagcagaatggagtatgactgggga

SEQ ID NO: 9432 - DNA, 80 bp, synthetic construct
  source 1..80: mol_type = other DNA
ttttaactactctctgaggcaggtactgctagatgtatcttatatgacagtttcttataggaggtcacatcagtaaggat

SEQ ID NO: 9433 - DNA, 80 bp, synthetic construct
  source 1..80: mol_type = other DNA
tatgacatgattaaatgtcaattagcataacgtctgccagtgggtcagaaaattcctgtggtttgtcggctcttgtcaga

SEQ ID NO: 9434 - DNA, 80 bp, synthetic construct
  source 1..80: mol_type = other DNA
ttcttaggacacacacagctttgccaaaatccttctctgtcttttggttcctgcaccagattcctcacactgacccacaa

SEQ ID NO: 9435 - DNA, 80 bp, synthetic construct
  source 1..80: mol_type = other DNA
gcttttccagccacacatacctcccacctactcactactcagctttggaaatgcaactgattattgtcaatgtagaaact

SEQ ID NO: 9436 - DNA, 80 bp, synthetic construct
  source 1..80: mol_type = other DNA
aatagtgggagctatttatgctgtgtaaggtctttaagataaatatgcctttgatcctaggttctttttctaggagaaca

SEQ ID NO: 9437 - DNA, 80 bp, synthetic construct
  source 1..80: mol_type = other DNA
ggaagtccaaggacagagggagtaggcaaacaaccaattagatatccgttaaatggctggtaattcacaaagtactgttt

SEQ ID NO: 9438 - DNA, 80 bp, synthetic construct
  source 1..80: mol_type = other DNA
cactgactttcatcttcttctgtctatggtcagtgactcatcttgcaggattttggtctggtgattagaactgtgaaaag

SEQ ID NO: 9439 - DNA, 80 bp, synthetic construct
  source 1..80: mol_type = other DNA
agttttaccaggccctgaatgggtttattgcactacacgtacaagatcatcttgctacctatggtaaggtaaggatttga

SEQ ID NO: 9440 - DNA, 80 bp, synthetic construct
  source 1..80: mol_type = other DNA
gaggctattaaattatttggggctcacttcgatggtcagcagaataaatttctgtcttgaaatacatatgtaccaggaag

SEQ ID NO: 9441 - DNA, 80 bp, synthetic construct
  source 1..80: mol_type = other DNA
ctcaatgggttcccttcaagttatatggtaatatggctcttcctgcatgggatttaaattgatatacaacatagacaggg

SEQ ID NO: 9442 - DNA, 80 bp, synthetic construct
  source 1..80: mol_type = other DNA
ctgattgtttgcacctcctggcttgcacagaaaatgcagatattgaatgttgtgctaaagctaagatgaccactcttgta

SEQ ID NO: 9443 - DNA, 80 bp, synthetic construct
  source 1..80: mol_type = other DNA
tctagatgcattacctcacatagtcatcatttttgtggtgagaacacttaaaatccactctcagcattttttaagaacac

SEQ ID NO: 9444 - DNA, 80 bp, synthetic construct
  source 1..80: mol_type = other DNA
tagagttgatatattccacacagaagtccagattttcacactacactgtgctctgctatagacatcatggtcagtaactg

SEQ ID NO: 9445 - DNA, 80 bp, synthetic construct
  source 1..80: mol_type = other DNA
ccttcattatgtgctcatataatgttcaaatttaagtattggctcttccttttatgagttcattcaccttgagcaaaacc

SEQ ID NO: 9446 - DNA, 80 bp, synthetic construct
  source 1..80: mol_type = other DNA
ttttaggaacttccatactactttctatagtagctacaccattttgcactaccctaatgggtgagaagttcagcaaaagc

SEQ ID NO: 9447 - DNA, 80 bp, synthetic construct
  source 1..80: mol_type = other DNA
agcatgtaattctcctttaaaacagccactagtggtggggtggaggcattgaagaatcttagacattggaataccttaag

SEQ ID NO: 9448 - DNA, 80 bp, synthetic construct
  source 1..80: mol_type = other DNA
ccagacagcaagtgacatagttccctgtattttgccctttgtttgctctctttattcacacacagtggctatttttttca

SEQ ID NO: 9449 - DNA, 80 bp, synthetic construct
  source 1..80: mol_type = other DNA
ctagttttcaccatgtggcttagagctagatcaagtagacctcgaaattaacatacttctctactcagtctccagctagg

SEQ ID NO: 9450 - DNA, 80 bp, synthetic construct
  source 1..80: mol_type = other DNA
tgagttgctggtgacagtttagagatgggtaatttgaattgacaggaagtgctgtaatgctgttttttgctgtcttagta

SEQ ID NO: 9451 - DNA, 80 bp, synthetic construct
  source 1..80: mol_type = other DNA
tcagaaggtggcagaggtaggactcaaatccaaatgtgtaaattttatgtaatggaaaccatgtgcttcctgtagtggtc

SEQ ID NO: 9452 - DNA, 80 bp, synthetic construct
  source 1..80: mol_type = other DNA
tattgagcaatgaaaaatacgaaaaataagtgaattgcacttggtgaagcactgtgaggaggggaggtcatctgccgcac

SEQ ID NO: 9453 - DNA, 80 bp, synthetic construct
  source 1..80: mol_type = other DNA
tcttcatttaaaataattaaattcatggctaacccataccttgaagttagcttgcaggagagccgagctagaactggctc

SEQ ID NO: 9454 - DNA, 80 bp, synthetic construct
  source 1..80: mol_type = other DNA
actttaagataataataaagtgtgatgtaaatcagggggtttaaatccagatctcacacagtggtgtcctgggtgtcatg

SEQ ID NO: 9455 - DNA, 80 bp, synthetic construct
  source 1..80: mol_type = other DNA
cacagggccttttctttttgtgcacacatccctggggtctctccctctttatataagaacaatagtcataatgtattaag

SEQ ID NO: 9456 - DNA, 80 bp, synthetic construct
  source 1..80: mol_type = other DNA
attcaactggggagaacagtgagagagatgtggctctctagataatgatgatcttggccaagatgtgacaatggaagtag

SEQ ID NO: 9457 - DNA, 80 bp, synthetic construct
  source 1..80: mol_type = other DNA
gaattcaagatgagtgaggtcttagaggcaacatgtatgaagtacaaaagcagagttataggaattaaataccctgcttc

SEQ ID NO: 9458 - DNA, 80 bp, synthetic construct
  source 1..80: mol_type = other DNA
tgtaaattctgcacacaaaagtgttgtttttatctgctctccctgtgtactgatgcatggtgcatgaatacatttcccag

SEQ ID NO: 9459 - DNA, 80 bp, synthetic construct
  source 1..80: mol_type = other DNA
gtgtgccactacacccagctattttatttttattttttgtagaggcagtgtctcgctatgttgcccaagctgatctcaag

SEQ ID NO: 9460 - DNA, 80 bp, synthetic construct
  source 1..80: mol_type = other DNA
gtgccaaaattagataagcaagcattcgtcttgatttgttctggttctctcaagctattgctatttcctttcactgccag

SEQ ID NO: 9461 - DNA, 80 bp, synthetic construct
  source 1..80: mol_type = other DNA
gctaaagaagccatagagtgaaaaacgacatttggaacacatagagtagacagaggagtagtatccagaattaagaagac

SEQ ID NO: 9462 - DNA, 80 bp, synthetic construct
  source 1..80: mol_type = other DNA
ccgtgcccggcctacataaatttttttaacacacgaaaaatcatgctgtattttgtatggacatattcaagtgtttatac

SEQ ID NO: 9463 - DNA, 80 bp, synthetic construct
  source 1..80: mol_type = other DNA
tttcatgttaatgagtgttttcagggccctagtctaagccaggcactttaggtgccaagcataaaaaaaaatgactcaaa

SEQ ID NO: 9464 - DNA, 80 bp, synthetic construct
  source 1..80: mol_type = other DNA
cccctccagagaggagtgactagccagttctagagttcattcactctggttccctcattcccttgctcgcatgcttcctc

SEQ ID NO: 9465 - DNA, 80 bp, synthetic construct
  source 1..80: mol_type = other DNA
tcactaggcctttgtgggtcatagaatagtattgcttgtaaagactttcgaaaggtaaaattgctatgggcagtgaagtg

SEQ ID NO: 9466 - DNA, 80 bp, synthetic construct
  source 1..80: mol_type = other DNA
aaataggcacacagaccaatataatagaatagagaacccagaaataaacccaaatacttatattcaacaggacttcgaca

SEQ ID NO: 9467 - DNA, 80 bp, synthetic construct
  source 1..80: mol_type = other DNA
ttatactgttggtgggaatgtaaactagtacaaccatcatggaaaacggtgtggaggttccttaaataactaaaagtaga

SEQ ID NO: 9468 - DNA, 80 bp, synthetic construct
  source 1..80: mol_type = other DNA
tttcctctaaggaaaattaacttgctcacttctcctacttattgcttccagctctgtactacacacacacacatctgtgt

SEQ ID NO: 9469 - DNA, 80 bp, synthetic construct
  source 1..80: mol_type = other DNA
gtccttcaaaagttaatgatctcccattcttccccacctcctaccaaatacaaatgatattagctcacagttaccatggc

SEQ ID NO: 9470 - DNA, 80 bp, synthetic construct
  source 1..80: mol_type = other DNA
tcctttatggtttctgtgatttctgtcatacttgggaatatctttcccatctcaaatttacacaagtaaacttctaaatt

SEQ ID NO: 9471 - DNA, 80 bp, synthetic construct
  source 1..80: mol_type = other DNA
cttttcaagagctactggaaagagacggagacatctttattcctggaagagagattttggcaaacatcctgtcatgagga

SEQ ID NO: 9472 - DNA, 80 bp, synthetic construct
  source 1..80: mol_type = other DNA
ctgtgctttttgactcaaagaaaatataacttgaacccacaatgatgtgaagtttcttctatatagatctttgtttatcc

SEQ ID NO: 9473 - DNA, 80 bp, synthetic construct
  source 1..80: mol_type = other DNA
ctattcatggagttgtagtgaaggagaaatcaaaatggatatctaagggaaacaccttccaggcaagtaagaccctgaga

SEQ ID NO: 9474 - DNA, 80 bp, synthetic construct
  source 1..80: mol_type = other DNA
ttttgtgtttcagtgggcaactaaacatagtctgacaactcttttagggtatcaaattctacccctgctcattgtctttg

SEQ ID NO: 9475 - DNA, 80 bp, synthetic construct
  source 1..80: mol_type = other DNA
aaaataagaaggcaatccagaggagtgagtgagtactggatctgctaatgtgaggggtcatgagctcttgggacaggaaa

SEQ ID NO: 9476 - DNA, 80 bp, synthetic construct
  source 1..80: mol_type = other DNA
gaatttattttggtgctctctcactcacacccatcttatgaaaaccaaagcatttgggggtcttttactcatccggttac

SEQ ID NO: 9477 - DNA, 80 bp, synthetic construct
  source 1..80: mol_type = other DNA
ttagtcattacaaataactcctttatttccgttccctctcccctcaaatggctcatgtccacatcaacaaggcaaggaaa

SEQ ID NO: 9478 - DNA, 80 bp, synthetic construct
  source 1..80: mol_type = other DNA
ggcaaagcggtgttgattacatccgggtcctgccgtaggggaaattattaaaactttgaatcagagacaaaaaatgttgg

SEQ ID NO: 9479 - DNA, 80 bp, synthetic construct
  source 1..80: mol_type = other DNA
gtgctgtgaggaaaaccatttacaaaaacaactgtgtgctagatcattttcacagtaatagactgtaacatagaagaaca

SEQ ID NO: 9480 - DNA, 80 bp, synthetic construct
  source 1..80: mol_type = other DNA
aaatattctcagaattagatatcctggcagaacgagaaccaagagagagggaaagaaagtgaatacagggaagaggagag

SEQ ID NO: 9481 - DNA, 80 bp, synthetic construct
  source 1..80: mol_type = other DNA
gcctgtcttcaggctgatgttgccagcactgagtcattatccggtatctaaaagaagaagcacattaattaaaataagga

SEQ ID NO: 9482 - DNA, 80 bp, synthetic construct
  source 1..80: mol_type = other DNA
agaaaaactgcttagtaactagcagaagtgttcctaaaagagtcatacacaggcccagggcagttcttgggtgggtccat

SEQ ID NO: 9483 - DNA, 80 bp, synthetic construct
  source 1..80: mol_type = other DNA
tccaaatgtgttactctgttcatctaccagcaccatgtaaaagcgtggtagacacactcaccagcattgagtattcttaa

SEQ ID NO: 9484 - DNA, 80 bp, synthetic construct
  source 1..80: mol_type = other DNA
gcttttcaaataactactcttccaacactatgcataagataatttcctccttacccattgactcacgattaaaaacaggt

SEQ ID NO: 9485 - DNA, 80 bp, synthetic construct
  source 1..80: mol_type = other DNA
tgccctaaacaggagcgacaaaagcccaaagctttgcaccagagcatttaaaatcaaatatacatacgtatatatgtata

SEQ ID NO: 9486 - DNA, 80 bp, synthetic construct
  source 1..80: mol_type = other DNA
cagcacctctggttatgcatttgttcaagcccaaaacccaggagtcatccttgactccgttatcccacacccctccactt

SEQ ID NO: 9487 - DNA, 80 bp, synthetic construct
  source 1..80: mol_type = other DNA
gaaagaccccacctccctctctctgctctcctgaagttagactgtatcctacaattgtatgtttcacatttttaaacaat

SEQ ID NO: 9488 - DNA, 80 bp, synthetic construct
  source 1..80: mol_type = other DNA
taggttaaaaccaaatctcactggtgtaaaaacaacaaaggctcttgctctcattatctaatgctggtcagaaaggcagc

SEQ ID NO: 9489 - DNA, 80 bp, synthetic construct
  source 1..80: mol_type = other DNA
agaaactatgaatacacggagttctcctatacctcacacttgatccctgctactgttagcatcacactagtgcgatacac

SEQ ID NO: 9490 - DNA, 80 bp, synthetic construct
  source 1..80: mol_type = other DNA
gttcatattttaagactgggatattaagaagccagtagaaagttctgtgtaacacattggctggtgggtagcttgcttgc

SEQ ID NO: 9491 - DNA, 80 bp, synthetic construct
  source 1..80: mol_type = other DNA
tcaggggtgaggggctcagccacaggatttacttattccttaaacagacctttcatgaattttcctgtttgctatacctc

SEQ ID NO: 9492 - DNA, 80 bp, synthetic construct
  source 1..80: mol_type = other DNA
tcccagaccttctgaatcataaattcccagggtagggtccaataatctgaattttaacaagtctttatgaattctgatag

SEQ ID NO: 9493 - DNA, 80 bp, synthetic construct
  source 1..80: mol_type = other DNA
tgtgtttctgatgatctgcagtaatgcaagatccaaaatgggagaactgagagcagggcttgtgtcttaatcattttgga

SEQ ID NO: 9494 - DNA, 80 bp, synthetic construct
  source 1..80: mol_type = other DNA
gtcatcctgtgcaaggagggacttgctgagctcacatagcaagtcagtgttgtaaataatcagggaaaaaaaggaactag

SEQ ID NO: 9495 - DNA, 80 bp, synthetic construct
  source 1..80: mol_type = other DNA
gcatggtcactaattaaggtttcccatagcctgaaaaggaacttagtgaaattttaggtagaaagttgacagggtaccag

SEQ ID NO: 9496 - DNA, 80 bp, synthetic construct
  source 1..80: mol_type = other DNA
tttttaaaaagtaagctaaaagtagataacatagggccataaggaatgctatctggccttaggcagatttggtacaaacc

SEQ ID NO: 9497 - DNA, 80 bp, synthetic construct
  source 1..80: mol_type = other DNA
atgcagtacatagaatacatcaagagttgggagagtgacacgtcatttatgaaatggcaataaaccatgtccaaaggaaa

SEQ ID NO: 9498 - DNA, 80 bp, synthetic construct
  source 1..80: mol_type = other DNA
ggctgaaaaactaccttaaaaaaaagaacagaactgatagactcttagaaggagcagatggtaaagctaggcccagctcc

SEQ ID NO: 9499 - DNA, 80 bp, synthetic construct
  source 1..80: mol_type = other DNA
ataaattattgtgagttcaccaggttattatttactacattagaggcaaatcattaaggaagagctttgcaaagagcctg

SEQ ID NO: 9500 - DNA, 80 bp, synthetic construct
  source 1..80: mol_type = other DNA
acacagatcagcgacaggatgacaggaagagcacagtcactttgactcaccggtggatgaagtggttttcctccaaatac

SEQ ID NO: 9501 - DNA, 80 bp, synthetic construct
  source 1..80: mol_type = other DNA
ttggttgattatagctgcaggccaggatttacctggaggagtatgattcacatacctccccaagaaagcacacgcaggta

SEQ ID NO: 9502 - DNA, 80 bp, synthetic construct
  source 1..80: mol_type = other DNA
gatccaaggagttaaaatggaagagagagtgcctgaagggggttggagcgtatgtatgtgactacagtgcccaatgcaca

SEQ ID NO: 9503 - DNA, 80 bp, synthetic construct
  source 1..80: mol_type = other DNA
atatgtgtgtggtgtgtatatgtgcagtatatatggtgtgtgttgtatgtgtgtggtgtgtgcgtggcatgtgtgattgg

SEQ ID NO: 9504 - DNA, 80 bp, synthetic construct
  source 1..80: mol_type = other DNA
ttctgtcatttcatgtttgcacagatgttgtctgaggccagagccttttatcccatctcaaagggtctttgatcctgatc

SEQ ID NO: 9505 - DNA, 80 bp, synthetic construct
  source 1..80: mol_type = other DNA
agagagaatgatctgcctttccttgctggactatgttctttgtaataatattggaatcatctttcatcatcaaaggagag

SEQ ID NO: 9506 - DNA, 80 bp, synthetic construct
  source 1..80: mol_type = other DNA
agacagtattcttcttagatactgagatgcgtcacccagtggctaaggtgaaggtattttacatggatcctgactgaagg

SEQ ID NO: 9507 - DNA, 80 bp, synthetic construct
  source 1..80: mol_type = other DNA
ctgtacagcctgcagaactatgagccacttaaatctcttttctttgtaaattactcagagtcaggtagttcttatataaa

SEQ ID NO: 9508 - DNA, 80 bp, synthetic construct
  source 1..80: mol_type = other DNA
cctcacgagtctatcagtttcccgtggattcctcatgggagggaccaagacttgggttttcttgttaacatgatcccttt

SEQ ID NO: 9509 - DNA, 80 bp, synthetic construct
  source 1..80: mol_type = other DNA
gcacaattactgggattggtgaagggtcttggagggagattatatcttgtactgtcaaagtctagcatgctccatttctt

SEQ ID NO: 9510 - DNA, 80 bp, synthetic construct
  source 1..80: mol_type = other DNA
cattgtataaactccataaactatgggagttaatgtaagccaacatacatggccctgaatgtcaaggcttgtcctcctag

SEQ ID NO: 9511 - DNA, 80 bp, synthetic construct
  source 1..80: mol_type = other DNA
gcagagtcatgttagtctggttcctccaagaagcagactggagatgggattagacccaatatggtctgcagattttatta

SEQ ID NO: 9512 - DNA, 80 bp, synthetic construct
  source 1..80: mol_type = other DNA
attgaaatgtgtaaattgccgagcacgtagtaaccatgcaacaagtgttagctcctattatcctgtccctttgagggatg

SEQ ID NO: 9513 - DNA, 80 bp, synthetic construct
  source 1..80: mol_type = other DNA
aagggaaatttaacagggatgaatatcagtggcgggatgttggtttgaaacatgagctgcacaactatggggtgaggatg

SEQ ID NO: 9514 - DNA, 80 bp, synthetic construct
  source 1..80: mol_type = other DNA
aaaaaaaaagaggaggagaatgggagcactgtcttcaaacactgcacatgcacagctgctgctgtaaggaaacctaggag

SEQ ID NO: 9515 - DNA, 80 bp, synthetic construct
  source 1..80: mol_type = other DNA
ctgccagggacccataattgtgcctctgtatcctggatacaggtcagagactctgaggttttagcttggtgggaggactg

SEQ ID NO: 9516 - DNA, 80 bp, synthetic construct
  source 1..80: mol_type = other DNA
ggggagtccttatgggtgactcagagactagtctggcaagccaaagcctctttatcatcgactttgggggacatcaagaa

SEQ ID NO: 9517 - DNA, 80 bp, synthetic construct
  source 1..80: mol_type = other DNA
tcgtttcattaactgcctcccgtcctaacgagaaaagggactcaccagtctttgagcagccacatgtcaaaaccttgcac

SEQ ID NO: 9518 - DNA, 80 bp, synthetic construct
  source 1..80: mol_type = other DNA
attctaaaaaccctaaaaccctttctgctgcagcagatgatgcatgctggggacctggaaattgatggtggaaggcagaa

SEQ ID NO: 9519 - DNA, 80 bp, synthetic construct
  source 1..80: mol_type = other DNA
agccttcgagcaaatgtgtggaaaggaaaataacccatatcaaaatcagaacaacggtgttttaaaaatacgaattgagt

SEQ ID NO: 9520 - DNA, 80 bp, synthetic construct
  source 1..80: mol_type = other DNA
gcctgacattgcccagatttttttcacctgctcatatcctaactggggggcccatctgcccctggaggaagaaggaatct

SEQ ID NO: 9521 - DNA, 80 bp, synthetic construct
  source 1..80: mol_type = other DNA
atgtatcagtaagagaagagttctaccctttcctggacagacagactctatatctctctggatctcagtctgctcatctt

SEQ ID NO: 9522 - DNA, 80 bp, synthetic construct
  source 1..80: mol_type = other DNA
tattgctgtgaggactgcttgtaggaggcggcttttagttgagccttgaaggatagggagtttttttttgtttgtttttg

SEQ ID NO: 9523 - DNA, 80 bp, synthetic construct
  source 1..80: mol_type = other DNA
atgaagacaacacaggtcgttgtggcatttactgagcgtagtacaagtactaccctcaggcatctagtggagcgcctcac

SEQ ID NO: 9524 - DNA, 80 bp, synthetic construct
  source 1..80: mol_type = other DNA
tgagctgtcagctgggcagagcacaggattcagggtccaatctgggttctttcttttgagacagggtctcactctgtcac

SEQ ID NO: 9525 - DNA, 80 bp, synthetic construct
  source 1..80: mol_type = other DNA
ctaggcaatctcatcctgtctcaaatttatgctaatttctccaatatttatatccccagcctggacctctctcctgaact

SEQ ID NO: 9526 - DNA, 80 bp, synthetic construct
  source 1..80: mol_type = other DNA
taatggtggaatttaacatttagaacagacttggcttcctaggggacatttggaagtgtctggaggcttttgtgattgtc

SEQ ID NO: 9527 - DNA, 80 bp, synthetic construct
  source 1..80: mol_type = other DNA
ccctttccaagtgcctcctcagaggtggagatgtgaagccacagcgaagaccagtcactctccccacatgcccctgctat

SEQ ID NO: 9528 - DNA, 80 bp, synthetic construct
  source 1..80: mol_type = other DNA
tgcaaagctgctgtttaattactctttgctgtctcattctcctggtatgaacttccaggaggagggtgttgagtgttggt

SEQ ID NO: 9529 - DNA, 80 bp, synthetic construct
  source 1..80: mol_type = other DNA
tattaatgacggtagtagccataattgacttggtacaaagttgtaaagtctccccatggggtctggaaacaaggaggttc

SEQ ID NO: 9530 - DNA, 80 bp, synthetic construct
  source 1..80: mol_type = other DNA
tgagccccagcccctttcctagtaagagaagaatcattttcattccaaacaacatgatagtccaacaaaaggagctcatg

SEQ ID NO: 9531 - DNA, 80 bp, synthetic construct
  source 1..80: mol_type = other DNA
ccccaggtttctgagtcctggtcaggctgcataaaaaagtcatctccacctgaagatgtggtttgcttggaaaacttcag

SEQ ID NO: 9532 - DNA, 80 bp, synthetic construct
  source 1..80: mol_type = other DNA
cagggggagcaggcagctgcctacctgaaataattgcaggagtcctagaaggagtagctccctcatcagtcccctgaagc

SEQ ID NO: 9533 - DNA, 80 bp, synthetic construct
  source 1..80: mol_type = other DNA
ctgtaattttttgttttttcctcatctaaatccatgtcccctggtcagaagagatgtttattgggtttgtgttttgtatt

SEQ ID NO: 9534 - DNA, 80 bp, synthetic construct
  source 1..80: mol_type = other DNA
ggcattgtggactgttattaaacttttctgtcctgtggtctttccagagactgtgaggctccagagtctcaggcctttct

SEQ ID NO: 9535 - DNA, 80 bp, synthetic construct
  source 1..80: mol_type = other DNA
tgagctgtgggacgactgccttcgggagctatgggccatgcttgacaaatggtgttatatacgatctgtgtgtgtatggt

SEQ ID NO: 9536 - DNA, 80 bp, synthetic construct
  source 1..80: mol_type = other DNA
ccacccgcttttttgtagacaatgcttagggccttcgaacttaacccaggtgcccctctcctggcagaagccattcacaa

SEQ ID NO: 9537 - DNA, 80 bp, synthetic construct
  source 1..80: mol_type = other DNA
gctgacttctcagtcatattctgacttggggacattttgaagtggtctaaaaatcaaatcattaactgtctgcttcttag

SEQ ID NO: 9538 - DNA, 80 bp, synthetic construct
  source 1..80: mol_type = other DNA
tgtagttcatctggcagtccaaatttttcagaatacagggctcatctgaggaagtcagagaaaagtctttggagacagga

SEQ ID NO: 9539 - DNA, 80 bp, synthetic construct
  source 1..80: mol_type = other DNA
tcctccgactccagagttctcccttggaaacatgggaacaccaataataatgctacccaccctatgctcatacaggagca

SEQ ID NO: 9540 - DNA, 80 bp, synthetic construct
  source 1..80: mol_type = other DNA
cctcatttgaagagcattaagcaatattcaatgaacaggccaccataattatccttattagcaataattctgaagctagc

SEQ ID NO: 9541 - DNA, 80 bp, synthetic construct
  source 1..80: mol_type = other DNA
tgactgcaactaacctgctcccaaaggctcagcattgcctataggagcctcttagcttggagacaattgaaaaagagaat

SEQ ID NO: 9542 - DNA, 80 bp, synthetic construct
  source 1..80: mol_type = other DNA
aggttaacttgggttgccgattataagcaatagattgagactgccatgggcagggttgctaatctgaaaactgggccagt

SEQ ID NO: 9543 - DNA, 80 bp, synthetic construct
  source 1..80: mol_type = other DNA
agaggctggattgacatattaaaagaagcaaaggggtaggaaatttcgctgctaagtcccaaactctaaacatgtgagtg

SEQ ID NO: 9544 - DNA, 80 bp, synthetic construct
  source 1..80: mol_type = other DNA
acctctctaagcctcagtttttaaaatgtgaacaattggagactgtaagacataccacctagactttctgtgagaattag

SEQ ID NO: 9545 - DNA, 80 bp, synthetic construct
  source 1..80: mol_type = other DNA
tggcaatctctgaattcagtgttttccaaaccacctgaggacctttcacatacagattctagggacctggagattcaaat

SEQ ID NO: 9546 - DNA, 80 bp, synthetic construct
  source 1..80: mol_type = other DNA
atacgaagtagataactggtctagccaggaactaaatgtagatcttctgagtccaagttcaaggcttgaaaaggggctca

SEQ ID NO: 9547 - DNA, 80 bp, synthetic construct
  source 1..80: mol_type = other DNA
gcacattgtagcaccctccaagaagaaacaaatcaattagtaataaacagtacatcgctaaaaaaaaaataggctagaca

SEQ ID NO: 9548 - DNA, 80 bp, synthetic construct
  source 1..80: mol_type = other DNA
catattttctcgttttgaagaaactgggctatttgactgcagcatttcccagattctgaattttgctgactccttctcca

SEQ ID NO: 9549 - DNA, 80 bp, synthetic construct
  source 1..80: mol_type = other DNA
gagcattcaacttttttttgtatatgttctttccattctcctgtgattttgtgtactgtactacacatagctgccccggg

SEQ ID NO: 9550 - DNA, 80 bp, synthetic construct
  source 1..80: mol_type = other DNA
cttcccttaatagattagccttcatttttgaaaatagtttttcttttattgcaaattctttgctgagttctagcaccaca

SEQ ID NO: 9551 - DNA, 80 bp, synthetic construct
  source 1..80: mol_type = other DNA
tcttatttattctctattatccctttcctactcaatattgattttatccccagaactttcttctccaagtgggccctttc

SEQ ID NO: 9552 - DNA, 80 bp, synthetic construct
  source 1..80: mol_type = other DNA
ccctacccctcttcatgtatcaggctaaggggcagttaactgcagaaaatctttatgtcacagttttggaacgtatttat

SEQ ID NO: 9553 - DNA, 80 bp, synthetic construct
  source 1..80: mol_type = other DNA
aaacactaccctgaaagcagagctgtaaaaattaagttaagggaggcctcagggctaatttggttatttctaacttggct

SEQ ID NO: 9554 - DNA, 80 bp, synthetic construct
  source 1..80: mol_type = other DNA
cgcatatgagaagatatgagatccaaatttcaggggcagaaaagaaagcagtggggaagcattaggaccaaatactagac

SEQ ID NO: 9555 - DNA, 80 bp, synthetic construct
  source 1..80: mol_type = other DNA
tacactagtttgctttctgcactagcacatatactccataagagtagggcttgtctgttttgttcactgctttgtgtcca

SEQ ID NO: 9556 - DNA, 80 bp, synthetic construct
  source 1..80: mol_type = other DNA
ctgaatggtctagttagtaggatcacgatcataaagccagctgaggggaaagaaatagtcctcttttccaggaaactatt

SEQ ID NO: 9557 - DNA, 80 bp, synthetic construct
  source 1..80: mol_type = other DNA
tatacataagagtgtgcagctcatagaatttcgtgtatacacaaaagtgtgcacaactcatagaaggaggtggactgtaa

SEQ ID NO: 9558 - DNA, 80 bp, synthetic construct
  source 1..80: mol_type = other DNA
gtttacggtcatttgttacaacacaatagataactatccaggcaccccaaatcccctgctgcacagctggtacacacttt

SEQ ID NO: 9559 - DNA, 80 bp, synthetic construct
  source 1..80: mol_type = other DNA
gacacattttgaaaatgatgattagttcagaataatttgcaatgcaccatctagggcaaggtcaagtgagggcacctgtc

SEQ ID NO: 9560 - DNA, 80 bp, synthetic construct
  source 1..80: mol_type = other DNA
aagcattgataatctaagcaccattttttgatgcaaggaaacaaaggcacagacagcagaagggaggtgcttagagtgag

SEQ ID NO: 9561 - DNA, 80 bp, synthetic construct
  source 1..80: mol_type = other DNA
aaggctggggagcatggaggaatgccaattagctgcaattatcagctttcttacatgtgcgtgggaacactgcctgcctg

SEQ ID NO: 9562 - DNA, 80 bp, synthetic construct
  source 1..80: mol_type = other DNA
ttgtgagtcctggattgcgtctgtaactggggatttctggggaaagctgttaatgatgccattaacacaagagtctatct

SEQ ID NO: 9563 - DNA, 80 bp, synthetic construct
  source 1..80: mol_type = other DNA
ccagtgcttttcccatgacactatatagttttaattgcttttatcccccctttggcgagagatgtgtatgcagaaaatgg

SEQ ID NO: 9564 - DNA, 80 bp, synthetic construct
  source 1..80: mol_type = other DNA
ttagggaagcttagaagtgttgtcagtaactgttctcaaaagaccccaaagggcctttgcgtttctagttctctaaagcc

SEQ ID NO: 9565 - DNA, 80 bp, synthetic construct
  source 1..80: mol_type = other DNA
actaaaaggggaagtctggcttcttccctccatttataaatttatacatttcctgaatttataacagggaggtggtagtt

SEQ ID NO: 9566 - DNA, 80 bp, synthetic construct
  source 1..80: mol_type = other DNA
agccgctggtctaatagaagagtggtggagaagtcacacctgtggtttataaccagaggctgacgagttctgctgaagtg

SEQ ID NO: 9567 - DNA, 80 bp, synthetic construct
  source 1..80: mol_type = other DNA
tgctgatcacctggctcagaatgtgagtttgaaaaaggctcgctaatcccagagcagtggcgagagaagagcagtcagct

SEQ ID NO: 9568 - DNA, 80 bp, synthetic construct
  source 1..80: mol_type = other DNA
aagcgacttgactatcacccctggaagtgttgtaaccaacacaggggtcataaaagtgttaacaacaaacccattaagat

SEQ ID NO: 9569 - DNA, 80 bp, synthetic construct
  source 1..80: mol_type = other DNA
gaaagatgcagaggaagagatatggaaagaaagggcatttgctcatatggatttgcagtgaggcagcaaagctttagcca

SEQ ID NO: 9570 - DNA, 80 bp, synthetic construct
  source 1..80: mol_type = other DNA
tggagagccactggaggtttctaacaggacagtggcaagatcaaagacctcttagaggataattgtgatgggagtagtaa

SEQ ID NO: 9571 - DNA, 80 bp, synthetic construct
  source 1..80: mol_type = other DNA
tttgagtcaggaacacgcacaaccatcaggaagattcaatcagatggcaatatggaaccaggcagtgctgcctctgtcca

SEQ ID NO: 9572 - DNA, 80 bp, synthetic construct
  source 1..80: mol_type = other DNA
gtatatacagatggactactctgggactgagggaacgttttagtgtctaccaggtagtccattctgggattgagtgaaag

SEQ ID NO: 9573 - DNA, 80 bp, synthetic construct
  source 1..80: mol_type = other DNA
agggaaagttctagtatgtaccaggtgatccattctgggattgaagaaaagttctggcatgtaccaggtagaccactgtg

SEQ ID NO: 9574 - DNA, 80 bp, synthetic construct
  source 1..80: mol_type = other DNA
attgacaaacctaattaagttcacttaatgattttaagtagctgacagaaaggtttgtgtctgatgtggatggagggaat

SEQ ID NO: 9575 - DNA, 80 bp, synthetic construct
  source 1..80: mol_type = other DNA
gagacccatctctggcaagttcctgtttttctttcattctcgaaatctgtgtagtgtatgttgagctctgctgggccctg

SEQ ID NO: 9576 - DNA, 80 bp, synthetic construct
  source 1..80: mol_type = other DNA
cctctttctttgagcagagattatctgcgcaggtactgtaaatcacatacttgtgcctatagctaggagtgtagagatgt

SEQ ID NO: 9577 - DNA, 80 bp, synthetic construct
  source 1..80: mol_type = other DNA
ccttgctccaatgatctgggatattttctgagaaagaaacagggccagatccttccagaattatgaatgtttgatttcta

SEQ ID NO: 9578 - DNA, 80 bp, synthetic construct
  source 1..80: mol_type = other DNA
cacctggccttcagtggctgtttattacctgtattcctaaatccaaaacacctggcctaatattcacactcactctctcc

SEQ ID NO: 9579 - DNA, 80 bp, synthetic construct
  source 1..80: mol_type = other DNA
gaaatgacaaattcgggggtggggggaaattctgaggtggtttctgccagaaagtaagattttgctgcatcataaaaatt

SEQ ID NO: 9580 - DNA, 80 bp, synthetic construct
  source 1..80: mol_type = other DNA
caggtcaacatcattctgcgttactgttggccttgtgtcttacacacaatagatgcctaacatctaatgaccaagacctt

SEQ ID NO: 9581 - DNA, 80 bp, synthetic construct
  source 1..80: mol_type = other DNA
tttcacttgggtcctgaccacacacccatatccctctctggatgactgatctggcaccccagtctgtgcctggtgtgctc

SEQ ID NO: 9582 - DNA, 80 bp, synthetic construct
  source 1..80: mol_type = other DNA
aagcatggtgtgcacttgaagtgttttgaaccccttggggaaagacttgatgggtttagtcaatgtaatttaccctgcat

SEQ ID NO: 9583 - DNA, 80 bp, synthetic construct
  source 1..80: mol_type = other DNA
ctgtcttttcagctgaaattagggaatgacatctaccctagctgctcagatgcgagcctgagtgagaaccttgtgttgtg

SEQ ID NO: 9584 - DNA, 80 bp, synthetic construct
  source 1..80: mol_type = other DNA
attaaaaaattaaaaaacaacaacaatggctactgtttttcaagtttctgctacatgccaagccccatgcatcacttcct

SEQ ID NO: 9585 - DNA, 80 bp, synthetic construct
  source 1..80: mol_type = other DNA
acgagttgaacttagcatggcttctgctctgtaagcgtgtcaaagcttaggatagtgtgggaacattgtgtttaatttag

SEQ ID NO: 9586 - DNA, 80 bp, synthetic construct
  source 1..80: mol_type = other DNA
atgaagtgattccaacaggaatgtgaccagagacaaagaaagcacaggtaccaggcaagtccctaaagataattccttgt

SEQ ID NO: 9587 - DNA, 80 bp, synthetic construct
  source 1..80: mol_type = other DNA
ccctaataaagttactttaaaaattttgtaatgtgtgaaggttgaggaacctgggagcagaggtgatttgggacagcata

SEQ ID NO: 9588 - DNA, 80 bp, synthetic construct
  source 1..80: mol_type = other DNA
gaatggaagcactcttgttttctgtaattgtacacttattaggtcacaaggcatcatcaaaccaagctgtcttttgtcgg

SEQ ID NO: 9589 - DNA, 80 bp, synthetic construct
  source 1..80: mol_type = other DNA
ccttgccttgagccctctgtcctcattttttgaaggtggatccaccaggatggtaatttgattgtgttttaggagtctca

SEQ ID NO: 9590 - DNA, 80 bp, synthetic construct
  source 1..80: mol_type = other DNA
aagggaaggcatgatttctttttcattttagctgatagaggagaagggtattgggggagatgcatagagcctacctgtca

SEQ ID NO: 9591 - DNA, 80 bp, synthetic construct
  source 1..80: mol_type = other DNA
ctcatttgaatggtgtcatgtcacatgtcagctaactaaagacccaatgacttgacacctgtggccactggcaggcaaag

SEQ ID NO: 9592 - DNA, 80 bp, synthetic construct
  source 1..80: mol_type = other DNA
ctgagaagatctactatgtcaggaacaatctccttcagtccccttctctcttttttgtgggcccagtgtttatttatcct

SEQ ID NO: 9593 - DNA, 80 bp, synthetic construct
  source 1..80: mol_type = other DNA
gcatttcaaagggaagtgtaagagcacaaggttgcagaactttcaagagaggtggataaaaatgaatgacataattctta

SEQ ID NO: 9594 - DNA, 80 bp, synthetic construct
  source 1..80: mol_type = other DNA
atgcatgtgccctaagtcaaggcgaaaaattctaagccatggtggaggggatgaggagaaaggtggatctacaaaggaac

SEQ ID NO: 9595 - DNA, 80 bp, synthetic construct
  source 1..80: mol_type = other DNA
tttcaggaggcctttttcttttcatccatctcagaaaccacttcctcctcctcttaaatcttctaaggttattgggacct

SEQ ID NO: 9596 - DNA, 80 bp, synthetic construct
  source 1..80: mol_type = other DNA
acaaatgttctgattgtagcaaaaggtgaagtaattggagccacttgacagtcaggacatatgacacaagataatcgagg

SEQ ID NO: 9597 - DNA, 80 bp, synthetic construct
  source 1..80: mol_type = other DNA
ttgacaatggggacctaactaaagagcttctgcacaacaaaagaaactataaacagagtttataacagcctacagaatgg

SEQ ID NO: 9598 - DNA, 80 bp, synthetic construct
  source 1..80: mol_type = other DNA
cagcattatgctattgcataacgtaacaaacctgcatgtttatcccctgaatctaggaaaaaaaagatacaagcagtcca

SEQ ID NO: 9599 - DNA, 80 bp, synthetic construct
  source 1..80: mol_type = other DNA
actttgagtaagaggcaattcttaataacttacaaatggcttaaaatgtgcccaccatcaccaaggtgtagagggggcga

SEQ ID NO: 9600 - DNA, 80 bp, synthetic construct
  source 1..80: mol_type = other DNA
tgggggttggggacccctggcctactggatatgaagtcatttgttaattgactctttactgaatgccaggaagctgaact

SEQ ID NO: 9601 - DNA, 80 bp, synthetic construct
  source 1..80: mol_type = other DNA
gtgtttgactaataaactcttttatatgcagacagcaaatgagacaagtgagtagagacaacaccaggagtacgccacca

SEQ ID NO: 9602 - DNA, 80 bp, synthetic construct
  source 1..80: mol_type = other DNA
aaatcaacccagcacagcaagaagctggccagatgcagatttttgataacaaggaaataaaacacgtttctggcaaatgc

SEQ ID NO: 9603 - DNA, 80 bp, synthetic construct
  source 1..80: mol_type = other DNA
gttccctagagaattatctttccaggcttatgggaagaaaaagatggtattttcttcagtcacactgtcatggtgtgatc

SEQ ID NO: 9604 - DNA, 80 bp, synthetic construct
  source 1..80: mol_type = other DNA
gtggctgaatttatgcagcagcaacttcctcatgcctgagtaacgtaagatgagggatcataataataataattgctgcc

SEQ ID NO: 9605 - DNA, 80 bp, synthetic construct
  source 1..80: mol_type = other DNA
gtaagtgttcttaacttttctgtagaataaacaccccaaagagatcccagattcctgtgggctatctccccgcatggctg

SEQ ID NO: 9606 - DNA, 80 bp, synthetic construct
  source 1..80: mol_type = other DNA
tttaagttaaaaaaaggggtttgtaaaagaaaagtcaggcttatgacgttctgctctgggccgtgtcaccagacttcctc

SEQ ID NO: 9607 - DNA, 80 bp, synthetic construct
  source 1..80: mol_type = other DNA
tgcaggaagaggcgtgtgcagagaacagcatgtgtgaaaacaatccccagccagactagctggatctgctcttaatttag

SEQ ID NO: 9608 - DNA, 80 bp, synthetic construct
  source 1..80: mol_type = other DNA
gtgacaggaagagcatgaaactcagaatcataagatctaggtttggtcttgtgtttattagctgtgggtcttgaggtgaa

SEQ ID NO: 9609 - DNA, 80 bp, synthetic construct
  source 1..80: mol_type = other DNA
aggaactgaccaccacaaattggggggatcccatctcatttttggatcaaattgcacttctgtagctcacacaagaaaaa

SEQ ID NO: 9610 - DNA, 80 bp, synthetic construct
  source 1..80: mol_type = other DNA
tttctcatcccttttctgactcatctttctaaaagacaagtgacatcacgctatttggggccacagacaggaggaaaact

SEQ ID NO: 9611 - DNA, 80 bp, synthetic construct
  source 1..80: mol_type = other DNA
ccgcccgggaggaggaaatcaacttcctgcattctgcatttaggattcacataaaataaatggtagggcttacaaatcta

SEQ ID NO: 9612 - DNA, 80 bp, synthetic construct
  source 1..80: mol_type = other DNA
agtttttattttatgagaaactcgaggggcttgattctgcctgcatcccttagcaggggcaatcctgttgtctgtccctc

SEQ ID NO: 9613 - DNA, 80 bp, synthetic construct
  source 1..80: mol_type = other DNA
tctcccttgttatgccatggaaaatctcttctgggtttgattaaatcatggttctactgcaagtagttcagtgcagctgg

SEQ ID NO: 9614 - DNA, 80 bp, synthetic construct
  source 1..80: mol_type = other DNA
tgcccatgaagactcacttcttatattttctaagcatggctctgcctgaaaatctgggagaacaggggctcccatccaca

SEQ ID NO: 9615 - DNA, 80 bp, synthetic construct
  source 1..80: mol_type = other DNA
gaatgctaagaaggatgctgctgcacagtggggactgagccaactcactgttcaacaaataagcattggagggtctctag

SEQ ID NO: 9616 - DNA, 80 bp, synthetic construct
  source 1..80: mol_type = other DNA
gatgactaatgacactgattataatgaagagaagcccccaagccctaactgatgcccgtgctggtttacagttttcttat

SEQ ID NO: 9617 - DNA, 80 bp, synthetic construct
  source 1..80: mol_type = other DNA
aatgttatcccaagccactgagatatggggtttattactgcagcataatctagcctgtcctgatcaaacaatcccagtca

SEQ ID NO: 9618 - DNA, 80 bp, synthetic construct
  source 1..80: mol_type = other DNA
gtgggtgatggattcctggaggaaggaggaggccggcctgaggtgggagatgcacagtacgtcactccctccttaccctt

SEQ ID NO: 9619 - DNA, 80 bp, synthetic construct
  source 1..80: mol_type = other DNA
cttttctcttctcattcgccccaagctcctactcagtcagcacactggaagacttcaaaacttatttgctgaacaaaagg

SEQ ID NO: 9620 - DNA, 80 bp, synthetic construct
  source 1..80: mol_type = other DNA
tttaaaacactgtttttgcctggcaggaagagtatccccagcacacagatgagattatcaagtccatgggggaaaagtga

SEQ ID NO: 9621 - DNA, 80 bp, synthetic construct
  source 1..80: mol_type = other DNA
tgagcttcagcttccttgtctctaacaaagatgggtacaatagcatcacacaggatgttgtaaggatgaagcaagttcct

SEQ ID NO: 9622 - DNA, 80 bp, synthetic construct
  source 1..80: mol_type = other DNA
tgggaagtaggtatcaaaaaacttgaaaaaggcaatcgcgaaatcacagagttcagaggcactgctggaaacactgcaga

SEQ ID NO: 9623 - DNA, 80 bp, synthetic construct
  source 1..80: mol_type = other DNA
gctaaatgcccagaataggcaaatctatagaaacaaagattagtggttggttcaggctaatggcagggggtttggagcaa

SEQ ID NO: 9624 - DNA, 80 bp, synthetic construct
  source 1..80: mol_type = other DNA
tttgccatgagaggagtcacaagtgtcagtggatatcaggaaggctgtccatgctctcatgcctgggataatggggacaa

SEQ ID NO: 9625 - DNA, 80 bp, synthetic construct
  source 1..80: mol_type = other DNA
cagagggggaagggatgggggcagtttataatgaacatacagagttatcagtttctggattaagaacaatgcattttgat

SEQ ID NO: 9626 - DNA, 80 bp, synthetic construct
  source 1..80: mol_type = other DNA
tcctactgggcattctctgcaaatactagtaatgggaaaacagatcccacctccttccagggaatcatatctgagccctt

SEQ ID NO: 9627 - DNA, 80 bp, synthetic construct
  source 1..80: mol_type = other DNA
cttgaacaatacaggtttggacccacttatacatggatctcacccaacacggatggaaaatacaatatttttgggtttgg

SEQ ID NO: 9628 - DNA, 80 bp, synthetic construct
  source 1..80: mol_type = other DNA
taaatatagttaagaccttattaccctcactcccagccctgccacagaaaacataagtgaacttaaaaatcagccaggcg

SEQ ID NO: 9629 - DNA, 80 bp, synthetic construct
  source 1..80: mol_type = other DNA
tgattgggctgctagtctgtttatgatgacgctttgaagaatatctttgagcgtaaacctttgcctgcactgcagattat

SEQ ID NO: 9630 - DNA, 80 bp, synthetic construct
  source 1..80: mol_type = other DNA
cctattcatattttccttggtgatttcctcttctgtatggatgcttactgagtttgttccatgtgggatcagtaggtcac

SEQ ID NO: 9631 - DNA, 80 bp, synthetic construct
  source 1..80: mol_type = other DNA
ctgttttttatggggcccataaattccaagaaggaatgtatccttggtgaatgattttaatcaagggcctgagttcccaa

SEQ ID NO: 9632 - DNA, 80 bp, synthetic construct
  source 1..80: mol_type = other DNA
atgactcagattaaattgtcttctaggagaggctccctgactgcccatgggagtcacttgggaagtaaggaatatttttg

SEQ ID NO: 9633 - DNA, 80 bp, synthetic construct
  source 1..80: mol_type = other DNA
cctgaagcagcaggccacatttgtttgcccatttatctcctctctggatatagtagaaattagttcagatttgcactgga

SEQ ID NO: 9634 - DNA, 80 bp, synthetic construct
  source 1..80: mol_type = other DNA
atgattccgggaagtgggagagttagtttgaggcctagccttgccatcagccctctgggaccatgaacaagtctctttct

SEQ ID NO: 9635 - DNA, 80 bp, synthetic construct
  source 1..80: mol_type = other DNA
agctatgaaaaattatacttgcaatgatgggttttcagcattagttgtctctggagtcacctcaccaccagagtcagctt

SEQ ID NO: 9636 - DNA, 80 bp, synthetic construct
  source 1..80: mol_type = other DNA
aaagtgatgtgtcttctctgtggaggtgatatgtgagctgatagtgaaggatgagagagaatcagccatgaaaaaggctg

SEQ ID NO: 9637 - DNA, 80 bp, synthetic construct
  source 1..80: mol_type = other DNA
ctagtactaatcataaacaaattatagctactactgagactactgcagggaccaggctttagattctgcagcagagaaag

SEQ ID NO: 9638 - DNA, 80 bp, synthetic construct
  source 1..80: mol_type = other DNA
taatataaaattagtatttcagaggacttccacatagccccaactcctgtggctatgtgtgtacaaagctggcatttgtt

SEQ ID NO: 9639 - DNA, 80 bp, synthetic construct
  source 1..80: mol_type = other DNA
ataagccagtttcaaaaagacaaatgtgccatttcacttacatgagataccttgtgtagtgaaatccatacagacagcag

SEQ ID NO: 9640 - DNA, 80 bp, synthetic construct
  source 1..80: mol_type = other DNA
agcctcctgggctcaagtgatcctcccatctcagtctcccaagtagcctggatcacaggtgtgtgtcactgcatctggct

SEQ ID NO: 9641 - DNA, 80 bp, synthetic construct
  source 1..80: mol_type = other DNA
gggattctgccaggtactatattctctagagtgaagagctactaagcagagtctacaatttcatttagggaaaaaaggtg

SEQ ID NO: 9642 - DNA, 80 bp, synthetic construct
  source 1..80: mol_type = other DNA
tgggtaagaattctaaacaaaagagaaaagataagggaactccaggaacagatgatgccatgctcagggaatagtgactt

SEQ ID NO: 9643 - DNA, 80 bp, synthetic construct
  source 1..80: mol_type = other DNA
aataaattaactaaaaagaaaaccaaccagccaaccaaacaagcccaatgcacctgtatctaagactgttggaacagcat

SEQ ID NO: 9644 - DNA, 80 bp, synthetic construct
  source 1..80: mol_type = other DNA
tccatctgctttcctgacctcacttgtcttctttaaagagcagcgactcagaataataaagatctttatttgcatagcac

SEQ ID NO: 9645 - DNA, 80 bp, synthetic construct
  source 1..80: mol_type = other DNA
atgcatcaaagtcatgcttcttaacacccccggagtttccgattcagtagatctaggatagagcttgataatttgcattt

SEQ ID NO: 9646 - DNA, 80 bp, synthetic construct
  source 1..80: mol_type = other DNA
ggacgagggcaggacactgattgtttataggaaagcaacaaatgctcacagctcgtatggtaagcatcatagtttaagaa

SEQ ID NO: 9647 - DNA, 80 bp, synthetic construct
  source 1..80: mol_type = other DNA
tacctgggctgttttaaatactctagtgcaaaaatcagggcagcttgctctggccaaaggcctcccctttcattatttcc

SEQ ID NO: 9648 - DNA, 80 bp, synthetic construct
  source 1..80: mol_type = other DNA
gagcaagtcccactggacccactgtttgtcattttatcctcctaccaaccctgtgagtaggtattatcatctttgtttaa

SEQ ID NO: 9649 - DNA, 80 bp, synthetic construct
  source 1..80: mol_type = other DNA
acctgtgacttgtgtggttccgccttaagagatagactggagcaatcagattctcagtttgagaaatctgatcaaacaca

SEQ ID NO: 9650 - DNA, 80 bp, synthetic construct
  source 1..80: mol_type = other DNA
ctgtggtgagtatgctaaagcaaagatacagaggacagaatctcaggctcagaggtcttttagacaggcaacatccaatt

SEQ ID NO: 9651 - DNA, 80 bp, synthetic construct
  source 1..80: mol_type = other DNA
ggaagagagcaaaaaaatgacatgattaaacagaagactcatctctggaattttccaacctgagaacacagagcttttat

SEQ ID NO: 9652 - DNA, 80 bp, synthetic construct
  source 1..80: mol_type = other DNA
ttgtctttaaggggctaagaaaagactgtagaagtgtctgaggagcacaggatgttccagagaggccaactgtggctgtt

SEQ ID NO: 9653 - DNA, 80 bp, synthetic construct
  source 1..80: mol_type = other DNA
cacattcccactccagtgctgtttttatgtaatttctctggttctcaggtcactttctacgagggtaattcctgagtttc

SEQ ID NO: 9654 - DNA, 80 bp, synthetic construct
  source 1..80: mol_type = other DNA
tctcttcccaattccacatctggagacctcacagtggtatcttataatcagccatcatgggaatatttacactacagaaa

SEQ ID NO: 9655 - DNA, 80 bp, synthetic construct
  source 1..80: mol_type = other DNA
agtaaaccacaggctttttcccatccaactgagtgcgaagattcaaccaggccatggtactcacttctgctcttacatat

SEQ ID NO: 9656 - DNA, 80 bp, synthetic construct
  source 1..80: mol_type = other DNA
tctcactggcttggccctttcctgggtcaaaagtaaaatctccctgtgtactaatcactttgataaacataatgtgcaat

SEQ ID NO: 9657 - DNA, 80 bp, synthetic construct
  source 1..80: mol_type = other DNA
gaatttgattgtttgccagttctacttggacatggatttactctgcctgcaaatgcccacctttctgtacagcatctcat

SEQ ID NO: 9658 - DNA, 80 bp, synthetic construct
  source 1..80: mol_type = other DNA
cataataaaagctgactggtaatttatggctgttccacttgaaggtgactttgggatcaatagacactctagctggactt

SEQ ID NO: 9659 - DNA, 80 bp, synthetic construct
  source 1..80: mol_type = other DNA
cgatggattctttcctctgaagccatgtgtttgtcaatgacttcatgttgagatttgatttattgggcatctttcccgtg

SEQ ID NO: 9660 - DNA, 80 bp, synthetic construct
  source 1..80: mol_type = other DNA
ctggatgcatttctcagcaggaagaatgactccctgtatgctggctgcatcaatcctggcgcgtaggaaatgcatttgct

SEQ ID NO: 9661 - DNA, 80 bp, synthetic construct
  source 1..80: mol_type = other DNA
gcaaacatgaagaaaacatggttcttgcatacaaggagctgacagtatattagaaggaggcagagggttaaatgtgtgac

SEQ ID NO: 9662 - DNA, 80 bp, synthetic construct
  source 1..80: mol_type = other DNA
tctccatggagtggcgcctttctgagctcacagccctcagccccagagaggtctgtctcctgacttgaaagtgtaggtag

SEQ ID NO: 9663 - DNA, 80 bp, synthetic construct
  source 1..80: mol_type = other DNA
atccttccttacatacatcctggatttcactatcaagaaaactgaagcccagtgtagggtccttgctaagcgtttcttag

SEQ ID NO: 9664 - DNA, 80 bp, synthetic construct
  source 1..80: mol_type = other DNA
taatttaaggccagttagtgccaaatgtgcagtttaaacataggaagcactcacagatgcctcagggagatgaaatgaga

SEQ ID NO: 9665 - DNA, 80 bp, synthetic construct
  source 1..80: mol_type = other DNA
atctggaaccaagaattgataggccccaaaacctagatttgtagtcaaaagtcacagagtgaggcagaatgtgcagtgat

SEQ ID NO: 9666 - DNA, 80 bp, synthetic construct
  source 1..80: mol_type = other DNA
aacagaataggaggttaaaaactcatgacttggccacttggtagctgtagaaccataatgtctttgggattcaatctgct

SEQ ID NO: 9667 - DNA, 80 bp, synthetic construct
  source 1..80: mol_type = other DNA
tttacaaaaattcatggagcctccattttgtcccaggctttgagccaaacaccagggatgtggagataaaggggatggct

SEQ ID NO: 9668 - DNA, 80 bp, synthetic construct
  source 1..80: mol_type = other DNA
aagacaagggcaaaacaaataaacaaacatacatcaaaaaaccgccagcactcgccatgaatttaaggctctgtgctttg

SEQ ID NO: 9669 - DNA, 80 bp, synthetic construct
  source 1..80: mol_type = other DNA
tctgagtcgagcacctgcttttgcattacatacagccacagataaggaacaggaagaatagaatggagaaaaaggccaca

SEQ ID NO: 9670 - DNA, 80 bp, synthetic construct
  source 1..80: mol_type = other DNA
gatacgaaatgctggctaagagctaaaggaagaagcagaagcagcaaaagctgaaagactttatatccacccaaatgctg

SEQ ID NO: 9671 - DNA, 80 bp, synthetic construct
  source 1..80: mol_type = other DNA
gccaatcacaggagacttttatatctaatgtttggtgggtttggttctgacttggtacgtcagtttagaaactgagcact

SEQ ID NO: 9672 - DNA, 80 bp, synthetic construct
  source 1..80: mol_type = other DNA
actcataccaattgtttgtatcaattgttagttaatgaagagccgccaaggccactgggccaacaataccatgatctgca

SEQ ID NO: 9673 - DNA, 80 bp, synthetic construct
  source 1..80: mol_type = other DNA
ttgtgtctgcccccatttctgggcaagttccaatgatcgaatatttaaaatagttgcccaagcaggcattgtttctaagc

SEQ ID NO: 9674 - DNA, 80 bp, synthetic construct
  source 1..80: mol_type = other DNA
gcgatggagctggcatccaaatacattcagtctgattctaaagcctctaatctctctcctacattggaataagcaaacct

SEQ ID NO: 9675 - DNA, 80 bp, synthetic construct
  source 1..80: mol_type = other DNA
tatccctattttattttatttttatttttatttatttatttttttgagacggagtctcgctgtctcccaggctggagtgc

SEQ ID NO: 9676 - DNA, 80 bp, synthetic construct
  source 1..80: mol_type = other DNA
aacaactattttatattaatgttagcatgtacccagtttagtacttgctcagaaactgtctgtggcatagatgagtggat

SEQ ID NO: 9677 - DNA, 80 bp, synthetic construct
  source 1..80: mol_type = other DNA
agagagcttagaatcagactgtccaatggttcttaaaatgtatttcatgaagccccattgagggggaatgtcaagggctc

SEQ ID NO: 9678 - DNA, 80 bp, synthetic construct
  source 1..80: mol_type = other DNA
ggtgtggtagctaagaacatggattttggagccagatggcctccatttcaataccagctgtgtgactttgaggaaattac

SEQ ID NO: 9679 - DNA, 80 bp, synthetic construct
  source 1..80: mol_type = other DNA
cactggcctttcagtgaaaaatctcttccaagccatttctacttacagctactttcttttggaagtagtagggtaatagc

SEQ ID NO: 9680 - DNA, 80 bp, synthetic construct
  source 1..80: mol_type = other DNA
acttgcaatcatggtagaaggcaaaagggaagcaggcacatcctacacggctaaagcaggaggaaaagagcaatgaggaa

SEQ ID NO: 9681 - DNA, 80 bp, synthetic construct
  source 1..80: mol_type = other DNA
tagtccctgctttacagcattatcgtaaagcttgcatgatgtaacacataaaggcattgacacttggctttgcgcatggc

SEQ ID NO: 9682 - DNA, 80 bp, synthetic construct
  source 1..80: mol_type = other DNA
tccctcctctaagagggtgccctgccagcggagactttctgagattagaaagattagaaaaaattagagagattttaggg

SEQ ID NO: 9683 - DNA, 80 bp, synthetic construct
  source 1..80: mol_type = other DNA
tacatggaacagatgactgtgggacatgggccttcaaagttattcaggaatagcctaaattgagaatttaggtctgggag

SEQ ID NO: 9684 - DNA, 80 bp, synthetic construct
  source 1..80: mol_type = other DNA
gtccaactggttgcattggaaaacagaggagaaaagcatagagaaacagatatgagaattaggcctaacatgtggacagg

SEQ ID NO: 9685 - DNA, 80 bp, synthetic construct
  source 1..80: mol_type = other DNA
agtgtatgatttgatggtgggttttggcttatttatacatctatgaaatcatcacaatatttcacatttttttttttttt

SEQ ID NO: 9686 - DNA, 80 bp, synthetic construct
  source 1..80: mol_type = other DNA
acagtaaatcgggggcccatttctgcatgcgcttgctaacactaattcccaccaaatcttttctgcctttgctaactttt

SEQ ID NO: 9687 - DNA, 80 bp, synthetic construct
  source 1..80: mol_type = other DNA
agagaacgccaaaaacccagtgaaaaacaaatctaaactctcttcttggtctgcctccattttctttgcttacacccaag

SEQ ID NO: 9688 - DNA, 80 bp, synthetic construct
  source 1..80: mol_type = other DNA
cttgctcaaggtcacacattgagttacctgcagacttaggattaaaataaagcatattattgctccaagactgcaagcac

SEQ ID NO: 9689 - DNA, 80 bp, synthetic construct
  source 1..80: mol_type = other DNA
ccaccatccaccaccctaagctacgaccttaggcaaatgatttaattcctctgagctccagtttccctatttttaagatg

SEQ ID NO: 9690 - DNA, 80 bp, synthetic construct
  source 1..80: mol_type = other DNA
gagtttctgacactcttggtcaaaatttatattgcagtggagctgagttaatccaaacgttcgtgtcaattcatgaacac

SEQ ID NO: 9691 - DNA, 80 bp, synthetic construct
  source 1..80: mol_type = other DNA
gacgaggtgtgaaggtgtaaagatttgttagaaacaaagaactgagcctgtgggagtttgtctggatcaatacagaaaga

SEQ ID NO: 9692 - DNA, 80 bp, synthetic construct
  source 1..80: mol_type = other DNA
ttccaaactgcatttccttaattattttctcatgtttcggaacaaagacaacataaatggtcctgagctccttttcctag

SEQ ID NO: 9693 - DNA, 80 bp, synthetic construct
  source 1..80: mol_type = other DNA
agatgtatgccaaatgcaagtaactcattttttagaagagcttttggtgggtcagaggtgggttgtgcttgaagaacagc

SEQ ID NO: 9694 - DNA, 80 bp, synthetic construct
  source 1..80: mol_type = other DNA
tcctcttccccaaaatcagtcataggaactagcacccctctcccctggagcaagccataaaactagaatggttattctct

SEQ ID NO: 9695 - DNA, 80 bp, synthetic construct
  source 1..80: mol_type = other DNA
gaacatcatggatgaggtgttatgaatgtaatttatgagaaagacaatgaggaactctaatcaacagaccacaccacact

SEQ ID NO: 9696 - DNA, 80 bp, synthetic construct
  source 1..80: mol_type = other DNA
taaataccacttaatgcctgcatgtattgattggttcaaatgcgaatgcaagcctctgagccaagcaaaatgctgacacc

SEQ ID NO: 9697 - DNA, 80 bp, synthetic construct
  source 1..80: mol_type = other DNA
tttttggggtcccccttctgtctattagccttagctcatacccttttgcctaatcatatttctacacagctatctgttct

SEQ ID NO: 9698 - DNA, 80 bp, synthetic construct
  source 1..80: mol_type = other DNA
tttttttgctacttggctactcctcattgatcaaggctcatcttggtgtttttcaggaatacacctcccaggttggacca

SEQ ID NO: 9699 - DNA, 80 bp, synthetic construct
  source 1..80: mol_type = other DNA
gcctcccagatgaatactatcaccatacccttcagggaggcccctctgtagaatgatactaggaagtgtttgctaacaat

SEQ ID NO: 9700 - DNA, 80 bp, synthetic construct
  source 1..80: mol_type = other DNA
ttcctggacacccactgttttataagtgtcactatagccactggtgagctggcaatgcagttttcttaaaagcaaaccaa

SEQ ID NO: 9701 - DNA, 80 bp, synthetic construct
  source 1..80: mol_type = other DNA
ccatggtgtctgcctgctgtgtgtgcctgtggagcctgaccggtgatgtctcttccgtttatgaggtcttcctttggtag

SEQ ID NO: 9702 - DNA, 80 bp, synthetic construct
  source 1..80: mol_type = other DNA
atgttaatagtaccgcaggtaatcattttgaatatcctggggtgacagcactctgttttgggacacaatagcttagccca

SEQ ID NO: 9703 - DNA, 80 bp, synthetic construct
  source 1..80: mol_type = other DNA
ctttcaaaacaagcctcagtgagcatatacatcctaacacatctggtacttgcttccagttggggagtggaagaacagag

SEQ ID NO: 9704 - DNA, 80 bp, synthetic construct
  source 1..80: mol_type = other DNA
gatcccaactcaagagccagactcttcactggctggctgtgggcgagtcactccacttctttccttgtggtttctttatt

SEQ ID NO: 9705 - DNA, 80 bp, synthetic construct
  source 1..80: mol_type = other DNA
actcactatgcctctttggataaaagtgttcaatttgccacagactcacctaccagaatatcaggaaagcattgtccagt

SEQ ID NO: 9706 - DNA, 80 bp, synthetic construct
  source 1..80: mol_type = other DNA
tccttgcatttcaatctaaaaataaaattgtctataaaaggagttgtaggccgggcatgttagctcacgcctgtaatccc

SEQ ID NO: 9707 - DNA, 80 bp, synthetic construct
  source 1..80: mol_type = other DNA
ggacgaatatgggattccatcacctgattgctcaagacttttaaagctcaaatgccctagacggagacaatgatcaaaat

SEQ ID NO: 9708 - DNA, 80 bp, synthetic construct
  source 1..80: mol_type = other DNA
aataatcagagctaggagctgtgattgtattataagcaaagcatttgaataattgcagagccgacaaggcccagagtgac

SEQ ID NO: 9709 - DNA, 80 bp, synthetic construct
  source 1..80: mol_type = other DNA
gcacagtctgttctttttcttcttctgcacattctggttttgtccatgtatcagctgtcctgattagcagcacatcttat

SEQ ID NO: 9710 - DNA, 80 bp, synthetic construct
  source 1..80: mol_type = other DNA
cctccacctttttctacctcatctctgggtgagtgtggagctgaaaaaaggaattaagccaaataaagaccaattactag

SEQ ID NO: 9711 - DNA, 80 bp, synthetic construct
  source 1..80: mol_type = other DNA
acatgacacagctcagtcaccctgaaccaatctgcgaattgttaacctgaagtcagtgttcaatcgaggtatatgcatat

SEQ ID NO: 9712 - DNA, 80 bp, synthetic construct
  source 1..80: mol_type = other DNA
gaccgtggtgcagtatttttgctgagttttgcctttctttactaagactcttatctgtgtccttgattcctagtgggctt

SEQ ID NO: 9713 - DNA, 80 bp, synthetic construct
  source 1..80: mol_type = other DNA
tacagcatgttactgtactgaatactgtaggcaaaggtaacacacggtatttgtgtatctaaacacatctaaacatagaa

SEQ ID NO: 9714 - DNA, 80 bp, synthetic construct
  source 1..80: mol_type = other DNA
gtagctgggagatgtcttcaaactttttgaggaccttgttgaggtctggaaaagcttctgctaaacccttcactatgaat

SEQ ID NO: 9715 - DNA, 80 bp, synthetic construct
  source 1..80: mol_type = other DNA
aatagcacttctccatttcactgagacagcaattcaggaaggcatcttggaggaggagctgggtcatccatgacttctaa

SEQ ID NO: 9716 - DNA, 80 bp, synthetic construct
  source 1..80: mol_type = other DNA
ctaaatcaagcacaagagaaaacgacaccatcaagagacatggtaaacacaagatggatgaggctgctgttggggtaaca

SEQ ID NO: 9717 - DNA, 80 bp, synthetic construct
  source 1..80: mol_type = other DNA
aaattgaatgtaacctgacagcctggagactgaactgggattaggactttggtcttttgagtccccattcttgccaaaac

SEQ ID NO: 9718 - DNA, 80 bp, synthetic construct
  source 1..80: mol_type = other DNA
acacagctagtaggctgggttggcattcaaactcattagttttctactgtacccccaaagcacattctttatctctaatc

SEQ ID NO: 9719 - DNA, 80 bp, synthetic construct
  source 1..80: mol_type = other DNA
cccgactacattaaaccaccagttttcctgcttctccagtttgcaggcgacatactgtgggacttatcagcctctataat

SEQ ID NO: 9720 - DNA, 80 bp, synthetic construct
  source 1..80: mol_type = other DNA
gacaaaagcttcttatgtatcaccagcatctggctcaatgcctgcctcatatatggcatgtagtcaataaatatttgctc

SEQ ID NO: 9721 - DNA, 80 bp, synthetic construct
  source 1..80: mol_type = other DNA
ctgctaagtataatatgactgtcccaagtactgtattgtagcataacagcatgctttagacccgaacgcatttaccctag

SEQ ID NO: 9722 - DNA, 80 bp, synthetic construct
  source 1..80: mol_type = other DNA
tgctactaagaggtgagtatctttgcattgggtggtataggaaaatagagataaaggctaagaaaatgtacatccagaat

SEQ ID NO: 9723 - DNA, 80 bp, synthetic construct
  source 1..80: mol_type = other DNA
aagaatggagacaccttgggaagctactgcaggaatcaaactttgagaggagaaagtttgaaccaaaatgcatgctgaca

SEQ ID NO: 9724 - DNA, 80 bp, synthetic construct
  source 1..80: mol_type = other DNA
tgaggagcctcttcaaagttcattaccatctttattcagcggttattcacatttgaggaacgcattctggttgaggactg

SEQ ID NO: 9725 - DNA, 80 bp, synthetic construct
  source 1..80: mol_type = other DNA
aaaagagagtcttggtactcatttcagctccgttattgagtcagcagcacaatgtgtactcattcattccacatttgttg

SEQ ID NO: 9726 - DNA, 80 bp, synthetic construct
  source 1..80: mol_type = other DNA
ctttcttactaatagaaaacacagtctccttggccagggaaagaggcttgtgaatgactgactacatgtacctaattggt

SEQ ID NO: 9727 - DNA, 80 bp, synthetic construct
  source 1..80: mol_type = other DNA
gcaacttgctattggtaacaggatgtgtctttagaagtacctcttcaattttctctgcttcttcgtgaccaagctggtgt

SEQ ID NO: 9728 - DNA, 80 bp, synthetic construct
  source 1..80: mol_type = other DNA
aactcaaagggaagactttttgcaaattccagagaccttagcactacattttctgaatatcgtggctacataatagccac

SEQ ID NO: 9729 - DNA, 80 bp, synthetic construct
  source 1..80: mol_type = other DNA
taagagaagctactaaaactcattaaggacagtgagaatttgtaacattgggaccatgacctgctctctcttttcccctc

SEQ ID NO: 9730 - DNA, 80 bp, synthetic construct
  source 1..80: mol_type = other DNA
ccaaaaacaatggaataatcagctgacaattagtaagtgcctacagctggatgtgatgccagcagaagcagttggtttaa

SEQ ID NO: 9731 - DNA, 80 bp, synthetic construct
  source 1..80: mol_type = other DNA
aaagacttttttaatacatagttcttgtccttctttctcttaatggatttaaaaagcagttataggccgggcacggtggc

SEQ ID NO: 9732 - DNA, 80 bp, synthetic construct
  source 1..80: mol_type = other DNA
aacagaaacccaaaatctgtctatatgctttctacagcaggtatgaataaaaaatcttcttaaatgcacaggaaactttc

SEQ ID NO: 9733 - DNA, 80 bp, synthetic construct
  source 1..80: mol_type = other DNA
gaggaaacacttcccaacgcattctacgatgtcagtattattttgataccagaaccagacaaagttattacaggaaaaga

SEQ ID NO: 9734 - DNA, 80 bp, synthetic construct
  source 1..80: mol_type = other DNA
aaattcatataaaattttcgagggaccccaaatagccaaaagagtttttaataagaagaaccaagtaggagattttctga

SEQ ID NO: 9735 - DNA, 80 bp, synthetic construct
  source 1..80: mol_type = other DNA
caggcagaggccaaatactgtgtatgctttcctatgtactcactttgatttgaacaaatttcctaacaccctgtgttttt

SEQ ID NO: 9736 - DNA, 80 bp, synthetic construct
  source 1..80: mol_type = other DNA
ttgccactgcaagcaagaactgcaacagggactgtgtaagtgttcatgtaggtctgtctataacctcagatttgtatgat

SEQ ID NO: 9737 - DNA, 80 bp, synthetic construct
  source 1..80: mol_type = other DNA
gttcctataattccattttctccccttgacaacttgaccctaagcaatggataacccaatggtaaactagatgtagcctt

SEQ ID NO: 9738 - DNA, 80 bp, synthetic construct
  source 1..80: mol_type = other DNA
cactgagggcaatatagcccaaatagcatcccctgctagactttgccattgcagcatgaaaatatgtaacaggtaagcat

SEQ ID NO: 9739 - DNA, 80 bp, synthetic construct
  source 1..80: mol_type = other DNA
gtcctttggatggaagagcataatgacctaatgcaaatgagacggaggctagggtagtatgttgaggatagttcattcct

SEQ ID NO: 9740 - DNA, 80 bp, synthetic construct
  source 1..80: mol_type = other DNA
ccaccaacaagaggataaaactgagcacttcgtaagattaaaaaaaaagtttgaacatgcaggtgcaatgccaggtgctt

SEQ ID NO: 9741 - DNA, 80 bp, synthetic construct
  source 1..80: mol_type = other DNA
cctaatcacttcccagttctctctgcctattccccaggggactggttttataacgtcatcatctttaagccaataccttt

SEQ ID NO: 9742 - DNA, 80 bp, synthetic construct
  source 1..80: mol_type = other DNA
tcccaacttctttccccctttatgtttctccttccttcctcatttttctccctcccttctttcttctgtctcttagatat

SEQ ID NO: 9743 - DNA, 80 bp, synthetic construct
  source 1..80: mol_type = other DNA
gggcatagacaagcggcaaaactaactcagattcaaacagtcatttatattttgaaaagcttttatacccattattttat

SEQ ID NO: 9744 - DNA, 80 bp, synthetic construct
  source 1..80: mol_type = other DNA
ccagatattgttgctgagagaactggtgttggctccaggtcatttcaaaattcaacatttacctcgaggacatctgcaag

SEQ ID NO: 9745 - DNA, 80 bp, synthetic construct
  source 1..80: mol_type = other DNA
aaaaaaaaaaaggatgggagatacgtgcagagagaaggccatgtcaggccagaagcagaagtgggagggatgtggctgca

SEQ ID NO: 9746 - DNA, 80 bp, synthetic construct
  source 1..80: mol_type = other DNA
gctgatgaatcaattcttctaagagtttttggtatgcaactgctgcaaacccttctcttgtcagggtcccctgcaatcat

SEQ ID NO: 9747 - DNA, 80 bp, synthetic construct
  source 1..80: mol_type = other DNA
tgatttgggcattacagttgcattgagactaaggagcaacaatgtctttccaaattggcaggaacaggactatccactgt

SEQ ID NO: 9748 - DNA, 80 bp, synthetic construct
  source 1..80: mol_type = other DNA
tacacgttttccaggcctggttggtgtcaggatgcataaaataatgagagtaaaagcacacctagatcctaagcatgtgg

SEQ ID NO: 9749 - DNA, 80 bp, synthetic construct
  source 1..80: mol_type = other DNA
ctacttgccaccgagtctttctttggtcttttggctcccttccagtttgggggaagggtttgtttgtttaatacaattct

SEQ ID NO: 9750 - DNA, 80 bp, synthetic construct
  source 1..80: mol_type = other DNA
agtgaatcgggagctccatttatgaactctcccctcttctcttttattgcttggcttgaggtggttgagggttatgggca

SEQ ID NO: 9751 - DNA, 80 bp, synthetic construct
  source 1..80: mol_type = other DNA
tcaatatcagagaggccaaggccaagttatcaaagataaaggagccaggatttgaactcagctctgactgcttccaaagc

SEQ ID NO: 9752 - DNA, 80 bp, synthetic construct
  source 1..80: mol_type = other DNA
acaaaaaaaatgaagaaaacacaacaaccagcaaatagggacattttacctcttctcaaggcaactctggatcaattctc

SEQ ID NO: 9753 - DNA, 80 bp, synthetic construct
  source 1..80: mol_type = other DNA
agtgtttcattcattaatcacttaaaactgatggtgccaggcacttactcactggaagaggagtaaggaaccaaccctcc

SEQ ID NO: 9754 - DNA, 80 bp, synthetic construct
  source 1..80: mol_type = other DNA
ctactctcaacttttcccaatctctttgctgctcaaatatgtgtgagtttttcggcaaaatttattgcttaatgggggtg

SEQ ID NO: 9755 - DNA, 80 bp, synthetic construct
  source 1..80: mol_type = other DNA
tctcaaggttggaagaaaccttaaaagtgtccagaccggtcacccctccaaatgtctgcacctgaatcctcttagaaaat

SEQ ID NO: 9756 - DNA, 80 bp, synthetic construct
  source 1..80: mol_type = other DNA
cccatctgttctgtagaggcatggattgccaaaggaaatgttgaggctcaagcattttgtctgaaatgtgacataattgg

SEQ ID NO: 9757 - DNA, 80 bp, synthetic construct
  source 1..80: mol_type = other DNA
ctcaggactccacattttaataagctgctcgaggtgacttttatgagccctaaagtttacaaaaccctgatttgtgtaaa

SEQ ID NO: 9758 - DNA, 80 bp, synthetic construct
  source 1..80: mol_type = other DNA
actaacataataaatgacctccagaaaacacacgcagccacgctgtccagtggacgttattgccatgatgaatttgttct

SEQ ID NO: 9759 - DNA, 80 bp, synthetic construct
  source 1..80: mol_type = other DNA
cgactaacatcaccagttacaagacattttgacatgagatgcccacttgatatgatgcactgagaaggatccatcacttc

SEQ ID NO: 9760 - DNA, 80 bp, synthetic construct
  source 1..80: mol_type = other DNA
gtacctgctacatagtagatattaaatatttatttgtgaatgacaggaagactgagaatgaagaaggaaagatggaatag

SEQ ID NO: 9761 - DNA, 80 bp, synthetic construct
  source 1..80: mol_type = other DNA
attgtatatgctgtgctgtcttccaaatctaaggagacaagaagggctcaaaatttggggtgtctttccagtagaaagaa

SEQ ID NO: 9762 - DNA, 80 bp, synthetic construct
  source 1..80: mol_type = other DNA
agtcctgcctttgtctcatattatttcagtggaatcaatgaaggcatttgccttttctgagccttagctgtgtcatctgt

SEQ ID NO: 9763 - DNA, 80 bp, synthetic construct
  source 1..80: mol_type = other DNA
gttaaacatagaattgtcgtatgctccagcaattctactcctgggcatatactggagagaattgaaagcagggagtcaaa

SEQ ID NO: 9764 - DNA, 80 bp, synthetic construct
  source 1..80: mol_type = other DNA
gcaagatgaccacactcaaagaagaaagaaagtaatcacaagccagtctggagaccctgctttctccattgtatgcctta

SEQ ID NO: 9765 - DNA, 80 bp, synthetic construct
  source 1..80: mol_type = other DNA
ggtgccttgtacaaggtactaaaacaaaaaaatccttcacacatacttttctcctgtccagccacagtctttcagcatct

SEQ ID NO: 9766 - DNA, 80 bp, synthetic construct
  source 1..80: mol_type = other DNA
attctcctggtgctggagaaaattgtcagtaagaataaaagttgctgccatgattgagtgcttacactgtggaggggctg

SEQ ID NO: 9767 - DNA, 80 bp, synthetic construct
  source 1..80: mol_type = other DNA
aatccatgttttgtaaaaagcagcctcagaaaggttatgtgactcactccaaatctctaagcaagtacacagtggatcct

SEQ ID NO: 9768 - DNA, 80 bp, synthetic construct
  source 1..80: mol_type = other DNA
acatgccattctccatttttctccctatcttcaggcctttctattccttgagacacatcatatttaaatgaggccaatta

SEQ ID NO: 9769 - DNA, 80 bp, synthetic construct
  source 1..80: mol_type = other DNA
aaatatgcttgttgacaatgtacctggttacacaagggctctgatggagctgtataaggaagtcaatattgtattcattc

SEQ ID NO: 9770 - DNA, 80 bp, synthetic construct
  source 1..80: mol_type = other DNA
gaagaaatgcaagagttaaactagagtccttttaaagcaatggctcctttttgctacaatgtgtccttgaaaacagtgtt

SEQ ID NO: 9771 - DNA, 80 bp, synthetic construct
  source 1..80: mol_type = other DNA
tgctacagggattgctctcatgttacaaagaaatagaaagctggaaatctagaaaaaatggtgggtttcagccactgaac

SEQ ID NO: 9772 - DNA, 80 bp, synthetic construct
  source 1..80: mol_type = other DNA
taggctttgcaggtcgtcaactattcaactctcctgttgagtcatgaaaacagccatcataatatactggcaaatgggca

SEQ ID NO: 9773 - DNA, 80 bp, synthetic construct
  source 1..80: mol_type = other DNA
ataagaatggcagcagactcattgtcagaagtcacacaggtcaaaagacaatagagcaatatctttaaagtgttaaaaga

SEQ ID NO: 9774 - DNA, 80 bp, synthetic construct
  source 1..80: mol_type = other DNA
tctggacatcatgtggcctgatttcttccttcttctttaaaaagccgtgaaaacactagtacagacctcagaaaagaatc

SEQ ID NO: 9775 - DNA, 80 bp, synthetic construct
  source 1..80: mol_type = other DNA
gaatatggcagtgaacaagccctcagagcctgaagcctagtttcactattttagatttttcagttacataagccaattag

SEQ ID NO: 9776 - DNA, 80 bp, synthetic construct
  source 1..80: mol_type = other DNA
tttaatagtgtaaaggagtcctgagataaaaattatgagaactgctgacctagaccaatgctgagcacttgggagattaa

SEQ ID NO: 9777 - DNA, 80 bp, synthetic construct
  source 1..80: mol_type = other DNA
ctaatggcacaggctgaaggctgatatgtcttggaaatagtcaaccctaatgaggtctgagagggtaaagatcatactat

SEQ ID NO: 9778 - DNA, 80 bp, synthetic construct
  source 1..80: mol_type = other DNA
atgaaaaggtctaaaatacatataatttgaagtcccagacaagaggaaagagggaaaggacagaggcaatatgtgaagaa

SEQ ID NO: 9779 - DNA, 80 bp, synthetic construct
  source 1..80: mol_type = other DNA
caggccaagttggctttatcaatgagttcttccaaatatttaaagatgcagtaaaaccaatttcacacaaactcttagca

SEQ ID NO: 9780 - DNA, 80 bp, synthetic construct
  source 1..80: mol_type = other DNA
gccactgagttttgggaaaattttttatgccattgtaggaactggaacggaaggaaacttcctcaatctgacaaatggta

SEQ ID NO: 9781 - DNA, 80 bp, synthetic construct
  source 1..80: mol_type = other DNA
cttaaaaccacctgattcacagcaaagatgccattgcaatgcagtggagaaaggagaatcttttcaacataaatgagcct

SEQ ID NO: 9782 - DNA, 80 bp, synthetic construct
  source 1..80: mol_type = other DNA
taccaagttgttgagactatggagcacattctcaatacattgctgggaggagttaagttggtacaattactttggcaaac

SEQ ID NO: 9783 - DNA, 80 bp, synthetic construct
  source 1..80: mol_type = other DNA
gagaggtggagcaaggggtggttcatcagatcaagttgaaaagccaagatagaagcacaaaagcctgaacaaattatcta

SEQ ID NO: 9784 - DNA, 80 bp, synthetic construct
  source 1..80: mol_type = other DNA
ttggaagactctgagtgcctgaagaggaattgtgcaaactgccatcacaataaacagagagagagagcatgtctataaaa

SEQ ID NO: 9785 - DNA, 80 bp, synthetic construct
  source 1..80: mol_type = other DNA
atgtatagctaggaatttgttactaatgactctctgggtattgatcaccttgcccttttatcgttggttgacactggagc

SEQ ID NO: 9786 - DNA, 80 bp, synthetic construct
  source 1..80: mol_type = other DNA
gaggtgctatatgattctttataacccagagttggtcccagattttaaagggcatggactaaacagatggcttctcagtg

SEQ ID NO: 9787 - DNA, 80 bp, synthetic construct
  source 1..80: mol_type = other DNA
ttctttccacgactcctccttctttccatgactcccttaccctgtacttaacttgagaagagctttgaagtaatgagctc

SEQ ID NO: 9788 - DNA, 80 bp, synthetic construct
  source 1..80: mol_type = other DNA
tttgcattttcttcatgtattgctgggttcagggagttgagccttctctagtcacaggcaatttgattgaagaccacagg

SEQ ID NO: 9789 - DNA, 80 bp, synthetic construct
  source 1..80: mol_type = other DNA
taggtgattgtctgttatatttcttgtctctgctttttattgccccgttgccccagggatgagttgacacttcttgctgt

SEQ ID NO: 9790 - DNA, 80 bp, synthetic construct
  source 1..80: mol_type = other DNA
tggcagatctggactagcacttggaatcctggtttgtagttcagtgctttaactattttaccatttcatcattttcctct

SEQ ID NO: 9791 - DNA, 80 bp, synthetic construct
  source 1..80: mol_type = other DNA
ctcaaatgggaaaagtgcaaacctgtagtatatccctctgaataaattctgcctcttccctcaagaaaggcctggtttga

SEQ ID NO: 9792 - DNA, 80 bp, synthetic construct
  source 1..80: mol_type = other DNA
actgaatgagcaacatgtgttctagaataggaaacccaaagggcaggaacttggaaaagactgtggtaaatatttgcact

SEQ ID NO: 9793 - DNA, 80 bp, synthetic construct
  source 1..80: mol_type = other DNA
agtaggtaattagatggattgattgatagaatgactttgtcttcttaacatgatttctgttgatccattcttgcattctt

SEQ ID NO: 9794 - DNA, 80 bp, synthetic construct
  source 1..80: mol_type = other DNA
gcacctatcttccatgtctctaaaccactttttcaaatatttagacaatctctctctgctgcattctgagtaaccaccaa

SEQ ID NO: 9795 - DNA, 80 bp, synthetic construct
  source 1..80: mol_type = other DNA
tactactttccatttctgttctgggtttgagagatggaaacacggtgtctattgttcaggacagttatgtcattcccatg

SEQ ID NO: 9796 - DNA, 80 bp, synthetic construct
  source 1..80: mol_type = other DNA
ttctaaagtggagtcctaaaagggtaacaatggcgaatacaatgccaactaactgacctatatcaatgtttccagaagag

SEQ ID NO: 9797 - DNA, 80 bp, synthetic construct
  source 1..80: mol_type = other DNA
gcttaacaactgagtgactttgagcaactcagctgctttgaggctcagtttcctaatagaaatatagggttactggtatc

SEQ ID NO: 9798 - DNA, 80 bp, synthetic construct
  source 1..80: mol_type = other DNA
ttcatctcttatttagtatggggagaacttcaaattactcagtcccagtggaactccataaccacggtgtatgttcaaag

SEQ ID NO: 9799 - DNA, 80 bp, synthetic construct
  source 1..80: mol_type = other DNA
tattaatctgatgttcaatactgccccaaatagcaaagcatgaaaaatgtgttatttaaggcatgaagcagtgttttaca

SEQ ID NO: 9800 - DNA, 80 bp, synthetic construct
  source 1..80: mol_type = other DNA
gaggattccaacacatactcaactttgagaaccactgtgttcgacaacatctaaatcaggcccttggattttatggatgc

SEQ ID NO: 9801 - DNA, 80 bp, synthetic construct
  source 1..80: mol_type = other DNA
tagtgcctctcagagtgcctagaacagggccgagttcataatatgtactcagtaagtatgcgttgattgcatgaatgaat

SEQ ID NO: 9802 - DNA, 80 bp, synthetic construct
  source 1..80: mol_type = other DNA
gttacaagtgtgtatttgagtgtgttttccatggaagacatggagctagccactggggatgcactgagaaataaaatata

SEQ ID NO: 9803 - DNA, 80 bp, synthetic construct
  source 1..80: mol_type = other DNA
tccagatgtcccataacagaatgagctgtctgttccataacaaaacgagtccttgttaggatgtttctaggaggtccctg

SEQ ID NO: 9804 - DNA, 80 bp, synthetic construct
  source 1..80: mol_type = other DNA
tttttaaaaatgaaacaggagctgcgggagaaatctgggatgagaggcagatgctaacactacagagagcttggtgaatg

SEQ ID NO: 9805 - DNA, 80 bp, synthetic construct
  source 1..80: mol_type = other DNA
tagatatcgctcacctgcgatagcagactgtgctttatgatgctttcacccaagatgctagcatgttctctactcaaaaa

SEQ ID NO: 9806 - DNA, 80 bp, synthetic construct
  source 1..80: mol_type = other DNA
tggaagatgctgtcaggaggtttcagtgtaattaattatgctggcacatccaatgaatggagctatgatttagcaagtct

SEQ ID NO: 9807 - DNA, 80 bp, synthetic construct
  source 1..80: mol_type = other DNA
atttcaggatagtgaatccacagcacctggaacaatgaccacaatcatcatcacattccgggcactatagattcaccatc

SEQ ID NO: 9808 - DNA, 80 bp, synthetic construct
  source 1..80: mol_type = other DNA
tgctgctaatcagcactcaatggtaatttgtaaatgtctgcaaaactcattataattcttttgtgtgtccaggcgctgca

SEQ ID NO: 9809 - DNA, 80 bp, synthetic construct
  source 1..80: mol_type = other DNA
tctttgctcatttgctcatttgtctgccaagagcagaggggctttttctaatttacaggaagaagctgtttgtgctcaca

SEQ ID NO: 9810 - DNA, 80 bp, synthetic construct
  source 1..80: mol_type = other DNA
agccaacctctttatcagattgttcatcattattgctcaggctgaaaatccaaaccccagctctcctcttccaaccctca

SEQ ID NO: 9811 - DNA, 80 bp, synthetic construct
  source 1..80: mol_type = other DNA
tctttttcttctacctggtctagcctcttctttttttttctggaaccatccctttatcctcatcatgtgctctagtccct

SEQ ID NO: 9812 - DNA, 80 bp, synthetic construct
  source 1..80: mol_type = other DNA
tgaatgtcaatgtcttattcctcatttacttggcattcatcctgtgagcctcacttccatgccgacaattctctggagat

SEQ ID NO: 9813 - DNA, 80 bp, synthetic construct
  source 1..80: mol_type = other DNA
gaccattgctggcttctttggtggtccccaaacccctaacagagctttgtacagagttaatgcatagttaagatttgctg

SEQ ID NO: 9814 - DNA, 80 bp, synthetic construct
  source 1..80: mol_type = other DNA
caaaagattaatgcaaagatgctgcagaccaagaactaagacagttcagggtagattgtctttatgcagggtgggcaact

SEQ ID NO: 9815 - DNA, 80 bp, synthetic construct
  source 1..80: mol_type = other DNA
gagcttctactaagtgctatgaatggtgtttagtgctgtgttactgtggatataatgagatccataaagttcttgccctc

SEQ ID NO: 9816 - DNA, 80 bp, synthetic construct
  source 1..80: mol_type = other DNA
cttgatcccatagcagatagggagccagtgactgatgctaagcagaagaataacacagtcaagctggcattttattaggt

SEQ ID NO: 9817 - DNA, 80 bp, synthetic construct
  source 1..80: mol_type = other DNA
aaatcaccattctaaaaggccaacaccagcaccattcagctctttccataatctaaggcagctacactaattgaaaaaaa

SEQ ID NO: 9818 - DNA, 80 bp, synthetic construct
  source 1..80: mol_type = other DNA
caggggataatgctttgcactttttagaaaatatgagacttagctttagaagttgagcaggattggctcatgtctgtaat

SEQ ID NO: 9819 - DNA, 80 bp, synthetic construct
  source 1..80: mol_type = other DNA
actaagaggcagaaatgacttccaggccaggcccaaatcaggaggagcagggtttgactaaaattaacatttctatggcc

SEQ ID NO: 9820 - DNA, 80 bp, synthetic construct
  source 1..80: mol_type = other DNA
tttcctttctgactcctgctactgaaagtggtctgttcagagcagtataggcgtcagcttgttagaaatgcagaaaatgt

SEQ ID NO: 9821 - DNA, 80 bp, synthetic construct
  source 1..80: mol_type = other DNA
attctagctttgacctttttcagcattattgatttcggcttcatctctcacagaagcatcctcaacacatccctggtttc

SEQ ID NO: 9822 - DNA, 80 bp, synthetic construct
  source 1..80: mol_type = other DNA
ttctctcacagggaaggagaagaaatcctagaagaagtaaaaaggctgctgggtaagcagagaggaggaagctgactcca

SEQ ID NO: 9823 - DNA, 80 bp, synthetic construct
  source 1..80: mol_type = other DNA
tccaaatatagaacatttccatcatctccaaccctctctctaccttccaaaaagttatcttgtccctttgcagtcaatcc

SEQ ID NO: 9824 - DNA, 80 bp, synthetic construct
  source 1..80: mol_type = other DNA
gtatatcttctttagtgtaacgtctattaaaatattttgcccacttaattgggtgggtacaagttcttttcagatgtaag

SEQ ID NO: 9825 - DNA, 80 bp, synthetic construct
  source 1..80: mol_type = other DNA
acagacaaacagagagccaaatcatgagtgaactcccattcacaattgcttcaaagagaataaaaatacctaggaatcca

SEQ ID NO: 9826 - DNA, 80 bp, synthetic construct
  source 1..80: mol_type = other DNA
actgtaaactagttcaaccattgtggaagtcagtgtggcgattcctcagggatctagaactagaaataccatttgaccca

SEQ ID NO: 9827 - DNA, 80 bp, synthetic construct
  source 1..80: mol_type = other DNA
cctggccttctctccagccagtctcctcttttctttcagactcagatgcatgttttccctgatttcctaaaaaatatcct

SEQ ID NO: 9828 - DNA, 80 bp, synthetic construct
  source 1..80: mol_type = other DNA
cacaggcaagaggggaaagttcaattagaggaagatgttttcataagccaattagaaaacagggagatattttcaccctt

SEQ ID NO: 9829 - DNA, 80 bp, synthetic construct
  source 1..80: mol_type = other DNA
atttagaacaatgtccagcatatagtaagtgctataaacgtggtagctgttgttatttgacagcaatgagctgggttagc

SEQ ID NO: 9830 - DNA, 80 bp, synthetic construct
  source 1..80: mol_type = other DNA
cacatgattatcaggattgcagccttgctttttcaccagttccagaacatcacttaatttttaaactacagcgttggctg

SEQ ID NO: 9831 - DNA, 80 bp, synthetic construct
  source 1..80: mol_type = other DNA
ggtaagaatccctctgaacaatatggctgtggcaactatgctgtagaagagactaaaatcacttagcctgggaaaacaag

SEQ ID NO: 9832 - DNA, 80 bp, synthetic construct
  source 1..80: mol_type = other DNA
caagttctgctagctagattatgcctttaacccacaaacagtcatgtaggattgtgaaattggagaggcagtcatgggtg

SEQ ID NO: 9833 - DNA, 80 bp, synthetic construct
  source 1..80: mol_type = other DNA
agaaggaagtgagtcgttatgaagaacagagatggaattttggtcaagagcattatagatgcattcttaaaaccatgtcg

SEQ ID NO: 9834 - DNA, 80 bp, synthetic construct
  source 1..80: mol_type = other DNA
aatcagtcattggaaaggagtgggaacactcattcactgagcttactgatgtaagattctcccaggaatagacattgcac

SEQ ID NO: 9835 - DNA, 80 bp, synthetic construct
  source 1..80: mol_type = other DNA
atcaaagccttataactttgccatttattgcggacaggaaggactgtatgcacaccatagaaaaatgcagctgggattta

SEQ ID NO: 9836 - DNA, 80 bp, synthetic construct
  source 1..80: mol_type = other DNA
tggtgtaaaaaatagttgtatgcacagattgtccatataggtacttggagttttcgttagggaagaagatactaccagag

SEQ ID NO: 9837 - DNA, 80 bp, synthetic construct
  source 1..80: mol_type = other DNA
gcccatcaatgaaagcaatcgtgagtaaaagttgtacctgccaggaaaggaattgtcctttgtacttcatgacaaccttc

SEQ ID NO: 9838 - DNA, 80 bp, synthetic construct
  source 1..80: mol_type = other DNA
gtgaataatatgaatggtacagatcatagtaaaggtgaaatgagttgatagaggttgactcacttggcaaactgaacatg

SEQ ID NO: 9839 - DNA, 80 bp, synthetic construct
  source 1..80: mol_type = other DNA
tgcacacccagaatccctgcagagctttctaaacatacatatgctcatggcccactccaagacgagtaaaatcagaatag

SEQ ID NO: 9840 - DNA, 80 bp, synthetic construct
  source 1..80: mol_type = other DNA
cctgacaagcctgggtgtgagttttaaggcttttaaaaattacctttagagcctttgaatggctctctctttttagtgta

SEQ ID NO: 9841 - DNA, 80 bp, synthetic construct
  source 1..80: mol_type = other DNA
ggtacccagcatgaatgcaaatttttcttcacttggggagggtggctgcagattttaatctaagggcagtgagtttgagg

SEQ ID NO: 9842 - DNA, 80 bp, synthetic construct
  source 1..80: mol_type = other DNA
aattttaaaacattcacataagcatgtgctgttgctattctgcttgtgtcttccttactggactagatgttccttgaaag

SEQ ID NO: 9843 - DNA, 80 bp, synthetic construct
  source 1..80: mol_type = other DNA
tttattattacaacttcctccctcgttactacaaacacggaatgttgttttccaaatagtggtccccaaaccaccgtctc

SEQ ID NO: 9844 - DNA, 80 bp, synthetic construct
  source 1..80: mol_type = other DNA
ctcctcttttaaatgagaattgacttcctatatgagcatagaaaggtaaagagggaaaaactatttgcaaggccctatgg

SEQ ID NO: 9845 - DNA, 80 bp, synthetic construct
  source 1..80: mol_type = other DNA
attccactgtcatatgtcttggtggttgtagcacaaagctctgttccaatctctactgaattacattggcgtagtatcca

SEQ ID NO: 9846 - DNA, 80 bp, synthetic construct
  source 1..80: mol_type = other DNA
tataatcaggcagaccaaggttcgaaccttagctcccctacttcctacttctgtgtcctagagccttcgatttttcatct

SEQ ID NO: 9847 - DNA, 80 bp, synthetic construct
  source 1..80: mol_type = other DNA
taacccagtttcccaaataggcaaataaactagcagcctgcaataaacaatggtgcagataaaagagggggattcctacc

SEQ ID NO: 9848 - DNA, 80 bp, synthetic construct
  source 1..80: mol_type = other DNA
gaccacagagagcattgcttcttggctgaagatttccagcttcattttgtggataatagagagccagatattttgagcag

SEQ ID NO: 9849 - DNA, 80 bp, synthetic construct
  source 1..80: mol_type = other DNA
ctctttttggtttctatttattttgctcaggatagcttggggctaggcaaagtctcctggggtcctttctaactaagaag

SEQ ID NO: 9850 - DNA, 80 bp, synthetic construct
  source 1..80: mol_type = other DNA
tcttcttctcataattcacctctctgagggttatataccaacagttttaatcgattggccaaatactccatgaactttcc

SEQ ID NO: 9851 - DNA, 80 bp, synthetic construct
  source 1..80: mol_type = other DNA
aaagttattgaaaactggaataaaggtaacctgtgttacacctcagcaaataattgggctgcattcatgttcatgcctta

SEQ ID NO: 9852 - DNA, 80 bp, synthetic construct
  source 1..80: mol_type = other DNA
aagctttaagatttaatgactgccctgctgtgttccacacttgtgtgatgcctattacccctttgttttggtcagtttct

SEQ ID NO: 9853 - DNA, 80 bp, synthetic construct
  source 1..80: mol_type = other DNA
ctctgctccacctgaccacattccacacactggaaaatttttttttaaggatttctaacttctttaggttgctgccttca

SEQ ID NO: 9854 - DNA, 80 bp, synthetic construct
  source 1..80: mol_type = other DNA
ttcattgaaaggactctgacaggttctcttgagcacagggtagatcatatcattcgactaggtaaaaaaagttcaagact

SEQ ID NO: 9855 - DNA, 80 bp, synthetic construct
  source 1..80: mol_type = other DNA
tattagaaattaaaactgtgcttttcttataaccctgcaaactaaagataggccacttaaataaccttcaagaaaaatta

SEQ ID NO: 9856 - DNA, 80 bp, synthetic construct
  source 1..80: mol_type = other DNA
aaccagctcttcccttgtccagagctaggaaaaattaacggagaggttgatacctttaaaagtctgaaaaatacatttat

SEQ ID NO: 9857 - DNA, 80 bp, synthetic construct
  source 1..80: mol_type = other DNA
tatccgtggcatttgctggcctctgtcaatcagaaaacacatgcctctttcatctctagcaaatcttgttttattatttc

SEQ ID NO: 9858 - DNA, 80 bp, synthetic construct
  source 1..80: mol_type = other DNA
tcatcctttctttcaggtgatcttttacctgcactctcagcagataggacacctcctctattctaaacctttttggcaca

SEQ ID NO: 9859 - DNA, 80 bp, synthetic construct
  source 1..80: mol_type = other DNA
gggtacaacaagaagtaaacaggctctttcactgaagacttctcagagccttgatatgccaataagagttgtggctcttc

SEQ ID NO: 9860 - DNA, 80 bp, synthetic construct
  source 1..80: mol_type = other DNA
tggcatgctttgcctaatattgagataatggaaagacagaacttcaaagctctagaggctcttggaaatcatttggtcca

SEQ ID NO: 9861 - DNA, 80 bp, synthetic construct
  source 1..80: mol_type = other DNA
cctttttccctaagagctcattttggtaatcctcaaggaaaatagaaaagcacttgatctgactagaaggagaaagggga

SEQ ID NO: 9862 - DNA, 80 bp, synthetic construct
  source 1..80: mol_type = other DNA
ttttaaactcttcaattccttctcactgaatacagattaaaacagaaattccataatacggggccaggcgaggtggctca

SEQ ID NO: 9863 - DNA, 80 bp, synthetic construct
  source 1..80: mol_type = other DNA
aaagtttcccctttctgcttctttcttctttttcttgcctagaatatgaacataatgcctggaggtgtggcagctgtctt

SEQ ID NO: 9864 - DNA, 80 bp, synthetic construct
  source 1..80: mol_type = other DNA
gattgaaagccaggttcaagatgagtagtgttcaaatttcaaatgtccatatgtggaaatcacattggcctgattcttgt

SEQ ID NO: 9865 - DNA, 80 bp, synthetic construct
  source 1..80: mol_type = other DNA
gcactactttaaggattaagtatcttgccctaagcccctggataaaaaagtgcttcaattactattacaattcaggtccc

SEQ ID NO: 9866 - DNA, 80 bp, synthetic construct
  source 1..80: mol_type = other DNA
ttccagtttcttgctattgataaagttgttctcctgcttctgtgaatatcatactctttctggaagatagtccaccaaaa

SEQ ID NO: 9867 - DNA, 80 bp, synthetic construct
  source 1..80: mol_type = other DNA
atcccaaacaaaacctctgtactcacttaacaataactttccattaatccctcccctcagcacctggtaacctctattct

SEQ ID NO: 9868 - DNA, 80 bp, synthetic construct
  source 1..80: mol_type = other DNA
aaacaaaccacagtgacttttgtgcagaattttaaaaagtaaacatcggattgtatccattccctgcttccgtatctcaa

SEQ ID NO: 9869 - DNA, 80 bp, synthetic construct
  source 1..80: mol_type = other DNA
aggctttatattttgtctatcagtaatgcacggcagtacctgtttcattgcacccctgtctgaactgggaattatatttg

SEQ ID NO: 9870 - DNA, 80 bp, synthetic construct
  source 1..80: mol_type = other DNA
ggaaaagggaaggaagatctggcaatgttgggcctattgtttcttttttggtggcaataaatggctggatttgaatacct

SEQ ID NO: 9871 - DNA, 80 bp, synthetic construct
  source 1..80: mol_type = other DNA
tgtctgttctctccacccctgccctccacctttctctccttccccttcccttggtttggatttaatgaatatgatttata

SEQ ID NO: 9872 - DNA, 80 bp, synthetic construct
  source 1..80: mol_type = other DNA
tttaaatacagaagctattatcaagaagccttagggttttgctattgattttagtggggcctgtgagaaccatccaggtt

SEQ ID NO: 9873 - DNA, 80 bp, synthetic construct
  source 1..80: mol_type = other DNA
ggcatattgaaagtgcttgattctcaggaaccaaatggtcatgagaaatgtatttccaacctagccaagaatgctgatac

SEQ ID NO: 9874 - DNA, 80 bp, synthetic construct
  source 1..80: mol_type = other DNA
ttgcctatagaatgaagtccaaactctttagcctggcccaacattatctttacagctccctgctttctgaccctttggtt

SEQ ID NO: 9875 - DNA, 80 bp, synthetic construct
  source 1..80: mol_type = other DNA
gttatctttctagtcaatatgcatccagtacctaacataccttgaagggttcagacagaagaaccttgaagggttcagac

SEQ ID NO: 9876 - DNA, 80 bp, synthetic construct
  source 1..80: mol_type = other DNA
agatttgtacatgactgtccatagcagctttatcagtacgtaatagccaaagagtggaaataactcaaatgttcagtaac

SEQ ID NO: 9877 - DNA, 80 bp, synthetic construct
  source 1..80: mol_type = other DNA
gagccacggcacccggcccaactctgtaaaatttactaaaaattattgattttttttttttacctaaaacaagtaaattt

SEQ ID NO: 9878 - DNA, 80 bp, synthetic construct
  source 1..80: mol_type = other DNA
ggttttcaacagatactactgagaatcactgacccagggccttgctcagcaaggacttctagtgaactttggattaatag

SEQ ID NO: 9879 - DNA, 80 bp, synthetic construct
  source 1..80: mol_type = other DNA
acagagggcttaacagattcgaaaggattgggtctatcttaagtagggtaccttctatttggggaaatgatttgtttccc

SEQ ID NO: 9880 - DNA, 80 bp, synthetic construct
  source 1..80: mol_type = other DNA
ttttgtaacatacaaaccaagaggctctttctgatgtgggtataacagtgaaaaggaggcctaacatggctaactccatg

SEQ ID NO: 9881 - DNA, 80 bp, synthetic construct
  source 1..80: mol_type = other DNA
cactcttgtcatctttccgttgttgctttatttttagtgtgtttgtgtggccacaacttggttcctgcatggttattttc

SEQ ID NO: 9882 - DNA, 80 bp, synthetic construct
  source 1..80: mol_type = other DNA
gattatggaaaagcaatctcagatagccacagcagcagagaataacaacagcagagcctaaacaaacaagaagagccctt

SEQ ID NO: 9883 - DNA, 80 bp, synthetic construct
  source 1..80: mol_type = other DNA
tatcccaagtacactcatgtgttgttaagaagtgaactctagacagtcaaaggaaccaaggcaagaatgtgggagaacaa

SEQ ID NO: 9884 - DNA, 80 bp, synthetic construct
  source 1..80: mol_type = other DNA
gcacttagtacgtattcaagtattctcttgaattgacacagcttttgtctactctctgtttctagcaggggtaatatttg

SEQ ID NO: 9885 - DNA, 80 bp, synthetic construct
  source 1..80: mol_type = other DNA
taattcaatctctctcacagttgattgaacagagtgcctttcctcttttgacaacggcatagtgacattttttctttcca

SEQ ID NO: 9886 - DNA, 80 bp, synthetic construct
  source 1..80: mol_type = other DNA
gcaagtttcctttcattcacccttagagcatggggttggaaatcaaatagcctgactttctataattacagcaacagctg

SEQ ID NO: 9887 - DNA, 80 bp, synthetic construct
  source 1..80: mol_type = other DNA
aggattctaatggatttctaaaaagaaagagaagataaagaaataggagcgatcaatgctccggatgtcacaaagacact

SEQ ID NO: 9888 - DNA, 80 bp, synthetic construct
  source 1..80: mol_type = other DNA
cctagagacctacagagaggggctcagccacacacagaggtagtttatagactagtgatgtggtttggttctgtgtcccc

SEQ ID NO: 9889 - DNA, 80 bp, synthetic construct
  source 1..80: mol_type = other DNA
ctgtgttgagtatcatttccaaattgtggcacttgagggtctctctgctgatgtcacttaaagccattttggatttgttt

SEQ ID NO: 9890 - DNA, 80 bp, synthetic construct
  source 1..80: mol_type = other DNA
gctccataaacacctgatggctgattacctgttgcttgatgcaatttcatgatatagttatgcgttggtttggtcactcc

SEQ ID NO: 9891 - DNA, 80 bp, synthetic construct
  source 1..80: mol_type = other DNA
aggtgtcagtgctcatgactacactcacaggaaggaaacagacagtatacaaataaagactgattcatgcaataagggaa

SEQ ID NO: 9892 - DNA, 80 bp, synthetic construct
  source 1..80: mol_type = other DNA
tttccaaaaaggatgaaggtgagcctgctgaagtgccctttgatgctggggagatgactgccagaaaaacacatgtgaaa

SEQ ID NO: 9893 - DNA, 80 bp, synthetic construct
  source 1..80: mol_type = other DNA
tttaatttgctagaatgagacagaataaagcacgaaggctcgggtcagtgcatttatcttgctagggggaaattagtgct

SEQ ID NO: 9894 - DNA, 80 bp, synthetic construct
  source 1..80: mol_type = other DNA
cattttccttcctaccaccatgcacactgccttccaactgcaggctaacttggcaaatgccctcaactgtcaatgccaac

SEQ ID NO: 9895 - DNA, 80 bp, synthetic construct
  source 1..80: mol_type = other DNA
atatggaagtaaataaagatgcctacttcagatacgcttaaagcagatgacatctgtcatggtccttgtatgctctgctc

SEQ ID NO: 9896 - DNA, 80 bp, synthetic construct
  source 1..80: mol_type = other DNA
ttaatagaatcatgaagtgctgatgccgaaagggtctttgaggatggttattccagtgttttcctaactctgtggagtcc

SEQ ID NO: 9897 - DNA, 80 bp, synthetic construct
  source 1..80: mol_type = other DNA
ttagcaattttgtctttgacttgcctcacctatggatggtttatgcctaagttccgttccagctttagcgttccaggctc

SEQ ID NO: 9898 - DNA, 80 bp, synthetic construct
  source 1..80: mol_type = other DNA
attatcccaacatctgaaaagctgccttttgtaaattacattgccactaatgaagcccagatgcactcgcttcggtgtcc

SEQ ID NO: 9899 - DNA, 80 bp, synthetic construct
  source 1..80: mol_type = other DNA
tggccataccatgtggttctgccaaagcctggcatcaagattcctttccaagaagttgtcacacatgtttcagagacaga

SEQ ID NO: 9900 - DNA, 80 bp, synthetic construct
  source 1..80: mol_type = other DNA
caaagcatggggccagtgtatgaagacaaagaaatatctcccacttaagccctgaccttgagttgctcagtcttcatgag

SEQ ID NO: 9901 - DNA, 80 bp, synthetic construct
  source 1..80: mol_type = other DNA
acggaaccagagagaactagaatttttttccagtgtcaacttcacacaaggaaaagaacaaaagtcagaattcaaaccca

SEQ ID NO: 9902 - DNA, 80 bp, synthetic construct
  source 1..80: mol_type = other DNA
tgtcatttgtcccatctcttgcagtcacactcacctgatgaaccagataagctattctacacaaaacctgggatgttaac

SEQ ID NO: 9903 - DNA, 80 bp, synthetic construct
  source 1..80: mol_type = other DNA
ggaatacttttcttcacagagaaactccaggacctgcagaactccttctatagaatggctggttcggtgttctggagtct

SEQ ID NO: 9904 - DNA, 80 bp, synthetic construct
  source 1..80: mol_type = other DNA
atatttaccattttctcatttgggggcttttagcatcttctcagggttttgctttggtatttttttctattataaataat

SEQ ID NO: 9905 - DNA, 80 bp, synthetic construct
  source 1..80: mol_type = other DNA
tgcagtgtgattggaagtgaatcagaaagccccatctccccattgctacctaccaaaatatataaaacactttcaacatc

SEQ ID NO: 9906 - DNA, 80 bp, synthetic construct
  source 1..80: mol_type = other DNA
cattgatttcacaaagaagtataaagctcaaggtgaaatagcctttgctattctgagagatcacttcttcttctgcccct

SEQ ID NO: 9907 - DNA, 80 bp, synthetic construct
  source 1..80: mol_type = other DNA
aaagaaattaagctctctttttgtctctagatttggggattgtggtaaggtgagtcacatgctatcccagaggttagcaa

SEQ ID NO: 9908 - DNA, 80 bp, synthetic construct
  source 1..80: mol_type = other DNA
gagtttgtacagtgatgaaatcgagggcagagagaccaacaagcttcctcaagtttgtacagcttatgaacagcagagct

SEQ ID NO: 9909 - DNA, 80 bp, synthetic construct
  source 1..80: mol_type = other DNA
cggatatgcataattcttccagaggcacactaagaagaacaaataaattcctaatcacgcaactatttaatttctctgaa

SEQ ID NO: 9910 - DNA, 80 bp, synthetic construct
  source 1..80: mol_type = other DNA
aaaaaaatcccactgcagtggcccctttccctatcatgatggtcctgaacgaagtcttaccatgcttcagcaagaatcat

SEQ ID NO: 9911 - DNA, 80 bp, synthetic construct
  source 1..80: mol_type = other DNA
ctttattcttttcggcttgagatcccttgttgccaatcttaagatcactctctatctcaggtacaaagtcaaggctaccc

SEQ ID NO: 9912 - DNA, 80 bp, synthetic construct
  source 1..80: mol_type = other DNA
accaatatcagaatatcttctgttgccatacattggacagaggggtatggactgggcctcacgagttcagacaaatgagt

SEQ ID NO: 9913 - DNA, 80 bp, synthetic construct
  source 1..80: mol_type = other DNA
tctctatagtcaatgctgtgagtgttgagctgaagctgacagtaccagcttttaaagttgattgtgacattttcaggaac

SEQ ID NO: 9914 - DNA, 80 bp, synthetic construct
  source 1..80: mol_type = other DNA
tcactactggagaaatgggtatagtgtggctataggggtgtgtgtgggggttctcttctctttctcacttctttcaaaag

SEQ ID NO: 9915 - DNA, 80 bp, synthetic construct
  source 1..80: mol_type = other DNA
tgtcgtgctccagtagcggcaagctggcttgataatgagaaaatgaggctggggccatgtttaagaagtgagagtaaacg

SEQ ID NO: 9916 - DNA, 80 bp, synthetic construct
  source 1..80: mol_type = other DNA
gatcataaaacccagtggagagtcctaactgaaagggactggaagcaaaatagcctttgataaaatagactctacaagag

SEQ ID NO: 9917 - DNA, 80 bp, synthetic construct
  source 1..80: mol_type = other DNA
ttcctaacaggaaaggtgactcatatggattttgcattagggaagaaaaaacctgacaactaagaggtctcaactggttt

SEQ ID NO: 9918 - DNA, 80 bp, synthetic construct
  source 1..80: mol_type = other DNA
tggcatgatcctaaaacagcttgttcttatcctaacagtttttattagggacatcatgaaagctcatggcttcacagtct

SEQ ID NO: 9919 - DNA, 80 bp, synthetic construct
  source 1..80: mol_type = other DNA
tcaaagtcaacgaggaactaactgccaggagtaggatggcaactctctcacttcataacatgtttttaagcagaaaaatt

SEQ ID NO: 9920 - DNA, 80 bp, synthetic construct
  source 1..80: mol_type = other DNA
ggaaacaaaatgctgaggttaaagaagtagctcctggcattggagaagaagcaaatgagagaaacagatcctaagcctgc

SEQ ID NO: 9921 - DNA, 80 bp, synthetic construct
  source 1..80: mol_type = other DNA
cctctgcctatcctaaagtattagggttatcttgagtatcaaatgcaaggatatgaatggaagactttgtgagctgtggc

SEQ ID NO: 9922 - DNA, 80 bp, synthetic construct
  source 1..80: mol_type = other DNA
aggcctggggaggacccaaaaaccatcaagtccagtgagctttttatgaaatcctattttgaatgaactctttaatatat

SEQ ID NO: 9923 - DNA, 80 bp, synthetic construct
  source 1..80: mol_type = other DNA
attcagacctttaaaaggtacctgagtttcagctaatcttgtcaggatcagaaaaatacgtagacagggaaggggattct

SEQ ID NO: 9924 - DNA, 80 bp, synthetic construct
  source 1..80: mol_type = other DNA
gtcacctctgtatactcagggtctagcacagggtgggcaaattacaatctgtagatcaaatctggcccactacctatttt

SEQ ID NO: 9925 - DNA, 80 bp, synthetic construct
  source 1..80: mol_type = other DNA
tataaaatgcaacaaccctaggagtttcatgttctggcaccacattgctctttcagatcttgctttgttctgctcacatc

SEQ ID NO: 9926 - DNA, 80 bp, synthetic construct
  source 1..80: mol_type = other DNA
atggaatgctgcctccccacccctctgacaaaatcaaagtgactcctgcttatcagctgaaatttgctccctgtaagttc

SEQ ID NO: 9927 - DNA, 80 bp, synthetic construct
  source 1..80: mol_type = other DNA
tcacctattgtctatggttgtttttgtgctagaatggcaggcttcagtagttgcaacagagacaatggctcacaaaatct

SEQ ID NO: 9928 - DNA, 80 bp, synthetic construct
  source 1..80: mol_type = other DNA
aaaatcacattcctatccagctacctcccacccatttctgctgacatttgcaatagaactcctctaaagcactgtcaata

SEQ ID NO: 9929 - DNA, 80 bp, synthetic construct
  source 1..80: mol_type = other DNA
ttatatttgttagctgtctgtcttccctcactagaacatatgcttcatgaaggcagggaatattttgttcttggctgcaa

SEQ ID NO: 9930 - DNA, 80 bp, synthetic construct
  source 1..80: mol_type = other DNA
atcctggtggcccacagaagagaaatattaagagcttttgtttagaggtcttctctcactcatctacacatccaaaatta

SEQ ID NO: 9931 - DNA, 80 bp, synthetic construct
  source 1..80: mol_type = other DNA
acaaatgattcccggctgcttgtcctttgctctgacttggactccttaatgtattgcatactccagagaaagctattata

SEQ ID NO: 9932 - DNA, 80 bp, synthetic construct
  source 1..80: mol_type = other DNA
agatcccctttgttgcctacttctcagactttggctccaaaagtagaacagaagtttctctaatgtgacctaggtcacta

SEQ ID NO: 9933 - DNA, 80 bp, synthetic construct
  source 1..80: mol_type = other DNA
tttgtgcttctgagacagatacctttgcagttgccatctcagtagtgtgctaatagcatctctgattttgaaaatgaaaa

SEQ ID NO: 9934 - DNA, 80 bp, synthetic construct
  source 1..80: mol_type = other DNA
tgtcttgctgtagtaccttcggaattttagagttccagactacataacaccttcagaacaattccagaacagtttgggaa

SEQ ID NO: 9935 - DNA, 80 bp, synthetic construct
  source 1..80: mol_type = other DNA
gccctgtggtaaccaggttacttagctttgcagattcagctggtcttgcttttccctctggctaagtagagacagatcca

SEQ ID NO: 9936 - DNA, 80 bp, synthetic construct
  source 1..80: mol_type = other DNA
gcccgtatggtgaaacctctgttgcagtcatccggaataaactctgccttacagttctttaacaagtatcatggataatt

SEQ ID NO: 9937 - DNA, 80 bp, synthetic construct
  source 1..80: mol_type = other DNA
tcttatagtttatagttactgttgttatcaatactatttgccctgtgcccactactgaccccacaatccttgactgggag

SEQ ID NO: 9938 - DNA, 80 bp, synthetic construct
  source 1..80: mol_type = other DNA
taatctgagagaccaaaacagacgccccctgatgaactaagacagacacaaaggttaaggggaaaagattatctattggc

SEQ ID NO: 9939 - DNA, 80 bp, synthetic construct
  source 1..80: mol_type = other DNA
tcgacaaggggcaaaccttagtttcctcttctatcacattgaaataagccttcctacttcaggggatggtgtgataactg

SEQ ID NO: 9940 - DNA, 80 bp, synthetic construct
  source 1..80: mol_type = other DNA
taacccctggtgcaaagctgcccacgctacagactaggtggctactacccgtgatatgcaaaaccaataaaaaataaaaa

SEQ ID NO: 9941 - DNA, 80 bp, synthetic construct
  source 1..80: mol_type = other DNA
gtgctttcacggagctggctcctttcctgatttccaaatgtactcaagtttctccagtgtggaaaataaaccaccaatac

SEQ ID NO: 9942 - DNA, 80 bp, synthetic construct
  source 1..80: mol_type = other DNA
tgggggtgaggacctcaacatatacttttctctttttttttgcggggtgggggggtggtgggtgggcacaatttaaccta

SEQ ID NO: 9943 - DNA, 80 bp, synthetic construct
  source 1..80: mol_type = other DNA
caaaggagggggagagattcacaggcagactttccagaatacatgcatcattcatggcctctaatttttcatgcataaat

SEQ ID NO: 9944 - DNA, 80 bp, synthetic construct
  source 1..80: mol_type = other DNA
agaaaaacaaaaaagggatgaggtggggtgggtgggagactttgaagaccatctttgcccacctcactatgctgccagat

SEQ ID NO: 9945 - DNA, 80 bp, synthetic construct
  source 1..80: mol_type = other DNA
aaccccaatgtgagacgcggtccctggcacctaggaggttcctaacaatgtttattgtgaatgaacaattttttaaccat

SEQ ID NO: 9946 - DNA, 80 bp, synthetic construct
  source 1..80: mol_type = other DNA
cacagctggtaagtaatagagtctgaatttaaacccaagacagcctgtgtctagacactgtgttcttaactgtaatgata

SEQ ID NO: 9947 - DNA, 80 bp, synthetic construct
  source 1..80: mol_type = other DNA
caaacacataaaagtaggactcattccctctgcaattcccaaatcccacgccaaggcactacaaataagagtgttcctct

SEQ ID NO: 9948 - DNA, 80 bp, synthetic construct
  source 1..80: mol_type = other DNA
tttcatcactgtgtcagcatcatacaatgttcttatacaagcctaggcgatatggccttctatacgccaggtgtttggct

SEQ ID NO: 9949 - DNA, 80 bp, synthetic construct
  source 1..80: mol_type = other DNA
atagactaaaacagtctccatgatgggatttgcgtcctgtaataagaggaagtgatcagaactggcactctcccctcccc

SEQ ID NO: 9950 - DNA, 80 bp, synthetic construct
  source 1..80: mol_type = other DNA
agatggctggtagcccatttccactccctaatttcgcatatgaagatgattactgtgtttatgttgtgtgaacagcagtg

SEQ ID NO: 9951 - DNA, 80 bp, synthetic construct
  source 1..80: mol_type = other DNA
aggccttttatgattcactgcaagcattttacatttgtcaacatgcaatctatgagccttacatcctcccacaaaaccac

SEQ ID NO: 9952 - DNA, 80 bp, synthetic construct
  source 1..80: mol_type = other DNA
acatctgagttttaagaatcccacactcaaacccaactgacaggaccattgcctattaaccaggatgaaaacaatttgtc

SEQ ID NO: 9953 - DNA, 80 bp, synthetic construct
  source 1..80: mol_type = other DNA
cagttattagtctcattttacaggtcaaagcagtaagtcacactgaggcaggtgatagatctttgaggatttgaatgcag

SEQ ID NO: 9954 - DNA, 80 bp, synthetic construct
  source 1..80: mol_type = other DNA
ctccagcatcacataagccattgttcatgaagatccattactcatccctctctatatagatgtatttagctgcgatttgt

SEQ ID NO: 9955 - DNA, 80 bp, synthetic construct
  source 1..80: mol_type = other DNA
ctacctcagtctccttgctatctagccacatatcctctgctctagtgacctgaatcaggttaccattttctaccatatga

SEQ ID NO: 9956 - DNA, 80 bp, synthetic construct
  source 1..80: mol_type = other DNA
aggtaattatggctgaagccctaatctgatagaattggtggccttacctgaagaggaagagaaaaatctttctctctccc

SEQ ID NO: 9957 - DNA, 80 bp, synthetic construct
  source 1..80: mol_type = other DNA
agctcaggaggtgtgggagagatttacccatgtcagctattacacatagatcccaaaggaagtctcaagtaaatttaaaa

SEQ ID NO: 9958 - DNA, 80 bp, synthetic construct
  source 1..80: mol_type = other DNA
agaattatataccatgattaactgggagctatttcagggatgcaaggctggttcaatattaaaaaaatcaatcaatataa

SEQ ID NO: 9959 - DNA, 80 bp, synthetic construct
  source 1..80: mol_type = other DNA
gtggtcttcacagatatggttaaattaaagatcttgacaagggggtattaacctagatgatccaggtgagccctacattc

SEQ ID NO: 9960 - DNA, 80 bp, synthetic construct
  source 1..80: mol_type = other DNA
acagcggccacacgaaactaatacaaggtttagcacaattcctatcagaatcccaggaagattcttgtgaaaaaggaact

SEQ ID NO: 9961 - DNA, 80 bp, synthetic construct
  source 1..80: mol_type = other DNA
attaccacaggactcagtggttgctctcctgaaaatgtattccagagaaatgaagacatgttcacacaaaaatctgtaca

SEQ ID NO: 9962 - DNA, 80 bp, synthetic construct
  source 1..80: mol_type = other DNA
taagcagagctctagtgttcagatcagagctttttagagggctgtggaatatgttcttctctattgactccgttttccct

SEQ ID NO: 9963 - DNA, 80 bp, synthetic construct
  source 1..80: mol_type = other DNA
catgtggaccacatggttgctcctgctctcttagacaagaaataaatgccagctttattgaaaacaaatagggcttctac

SEQ ID NO: 9964 - DNA, 80 bp, synthetic construct
  source 1..80: mol_type = other DNA
agaatgtgactctgagctttctggcagtcaaagctaagagagaaaaacatggttcacgaattcagtgaacataaggcaaa

SEQ ID NO: 9965 - DNA, 80 bp, synthetic construct
  source 1..80: mol_type = other DNA
atgtgaagatggcctaatataccaggtatgtgttgaacaatatggagttagtctcgaaaggacagttatgtccttttggg

SEQ ID NO: 9966 - DNA, 80 bp, synthetic construct
  source 1..80: mol_type = other DNA
atgatgtgtttgaataacataattgcttaatagccattccttaccaccaccaccaccaccccctactattagcacaaaac

SEQ ID NO: 9967 - DNA, 80 bp, synthetic construct
  source 1..80: mol_type = other DNA
aagaagccgaatcagcaaaggtaaatcaagtcctgaattgtgctggctcatgcatatattgagagacaaacaaaaaagga

SEQ ID NO: 9968 - DNA, 80 bp, synthetic construct
  source 1..80: mol_type = other DNA
ggagcaaccaataactttctaaatagaggagtgacaaagccaagcctgagtctttggaggaaaatgctggctaagagaat

SEQ ID NO: 9969 - DNA, 80 bp, synthetic construct
  source 1..80: mol_type = other DNA
aagaaatctagtagtttcctgctatccttcagtatttttcacctagagctgcttctagctttccctgtggtttcagaaac

SEQ ID NO: 9970 - DNA, 80 bp, synthetic construct
  source 1..80: mol_type = other DNA
agcctttactttctcctcttttcttctcttttgtaatatttttgctaccaccaggtggtagtgggtaagtgcatctatga

SEQ ID NO: 9971 - DNA, 80 bp, synthetic construct
  source 1..80: mol_type = other DNA
gggccctttatctctcttccttcttaagatctccacttggccattgttatggattgaatgattccagtttcccacattag

SEQ ID NO: 9972 - DNA, 80 bp, synthetic construct
  source 1..80: mol_type = other DNA
atgttgattgggttcactgatgggtctgtgtgtataaaccagttccttgcactgttgtattgaatcaatgtgtgttgaac

SEQ ID NO: 9973 - DNA, 80 bp, synthetic construct
  source 1..80: mol_type = other DNA
cctttacccaatgtgttcaaccctctccatgaagaagaaaattcttaaagttctctgcacgctgttttgcacctcattga

SEQ ID NO: 9974 - DNA, 80 bp, synthetic construct
  source 1..80: mol_type = other DNA
acatttatcaactgacttctaggtccccaaattgcagatgttaatgcagatgctactctgattccccatcatttgtatac

SEQ ID NO: 9975 - DNA, 80 bp, synthetic construct
  source 1..80: mol_type = other DNA
taagaaagcatatgtatagaccacaaaatctatgcagaggacagagaccctttgggaatcaaactccacatccttaaaac

SEQ ID NO: 9976 - DNA, 80 bp, synthetic construct
  source 1..80: mol_type = other DNA
atatgtctgactcacttaagaagtttcatccagtgacagtaaccatacccgatgaggtctccgtgttaacagagcttaaa

SEQ ID NO: 9977 - DNA, 80 bp, synthetic construct
  source 1..80: mol_type = other DNA
tttctttccaaactctgagagtcacccaattcaaaggcttctgtgtgctgttttgcagttatgccctgcacaactcgagg

SEQ ID NO: 9978 - DNA, 80 bp, synthetic construct
  source 1..80: mol_type = other DNA
atgtaatcaatcacgcttaggtaatgatgtttccataaaaactccaaagaacagggttcagagagcttgtgggtagctga

SEQ ID NO: 9979 - DNA, 80 bp, synthetic construct
  source 1..80: mol_type = other DNA
ggaccagatatggattggatgctcaataaatgtcaggcaggagcaaagggtggctaaagttttatcagaaggtaaaggaa

SEQ ID NO: 9980 - DNA, 80 bp, synthetic construct
  source 1..80: mol_type = other DNA
aatatgaaaattgcaactggagatcaccctttgaggttaggacccagagaaaagtgatgttatgagtcctgagttatttt

SEQ ID NO: 9981 - DNA, 80 bp, synthetic construct
  source 1..80: mol_type = other DNA
ccaagccattttttgggggtaaaagaaaaaaatgctgaagatagtatcttacggggtcccacactaacactgaggtttca

SEQ ID NO: 9982 - DNA, 80 bp, synthetic construct
  source 1..80: mol_type = other DNA
cccacaggacactaatgactgagactgtaagcatgtatttaaacctggccaactaatgtatacatatttcttcccacagg

SEQ ID NO: 9983 - DNA, 80 bp, synthetic construct
  source 1..80: mol_type = other DNA
gcagctgttgtggattagaaagaccacttgactcagagtcagaagtcctgatcttaataccatttgtgtctttcagtaga

SEQ ID NO: 9984 - DNA, 80 bp, synthetic construct
  source 1..80: mol_type = other DNA
gcttattattagttccacagcaagttaattaatttttgccagtcactttgggtcacttgctggactgagcatctgtctca

SEQ ID NO: 9985 - DNA, 80 bp, synthetic construct
  source 1..80: mol_type = other DNA
aaagagatgatgatgttaaagtcctagatttaatgcttagccagtgctctagaattgtgggtttcctctcctcctgcctc

SEQ ID NO: 9986 - DNA, 80 bp, synthetic construct
  source 1..80: mol_type = other DNA
caatctcttagaggagccctctctccctgcctccttctcttcttgtctgctgtactttaccttctttccaactttctcct

SEQ ID NO: 9987 - DNA, 80 bp, synthetic construct
  source 1..80: mol_type = other DNA
aagcacttactctgctcctctctggctccttgtaacatagttacggaaagagactgaagacaccaatacttactgagtgt

SEQ ID NO: 9988 - DNA, 80 bp, synthetic construct
  source 1..80: mol_type = other DNA
gttcactctatcctccacttacacacttactaaaatggccaatctgtgtcatttagagctggcatagcagaaaactgagg

SEQ ID NO: 9989 - DNA, 80 bp, synthetic construct
  source 1..80: mol_type = other DNA
gaataagtaccatatcttttactgctatgtattgctctccaggcctagaagaatgtccagtagatagtagggactcaaga

SEQ ID NO: 9990 - DNA, 80 bp, synthetic construct
  source 1..80: mol_type = other DNA
gtacaaccagtgatggcatcagtgagatccttaagcaatttccctctatagagtttaatctcatggggataatttcaaga

SEQ ID NO: 9991 - DNA, 80 bp, synthetic construct
  source 1..80: mol_type = other DNA
ggtttcttaatatgacttttacagtcctcttcacaagctggttctaaacctatctttccatcctcatgctgcaacccagc

SEQ ID NO: 9992 - DNA, 80 bp, synthetic construct
  source 1..80: mol_type = other DNA
tttatcctttatgcctaccatggcctggaacatagcaggtactaaataacttattatagcattaagtaccaggctgtgag

SEQ ID NO: 9993 - DNA, 80 bp, synthetic construct
  source 1..80: mol_type = other DNA
atggtattttcttactctgttgagtcatagaataagaaaggagctcccagaagtcacttgatcaatgcccttgtatctcc

SEQ ID NO: 9994 - DNA, 80 bp, synthetic construct
  source 1..80: mol_type = other DNA
aggacctccagtgttatgttaaataaaactggtgaaactgggcatccttaccttgttccattccttagaggaaaggcttt

SEQ ID NO: 9995 - DNA, 80 bp, synthetic construct
  source 1..80: mol_type = other DNA
atttttttcagtttgggggtttgatttattcttgcttttccttggggttcattagtctacttgaggtctttttacttttt

SEQ ID NO: 9996 - DNA, 80 bp, synthetic construct
  source 1..80: mol_type = other DNA
tttgctttatatacttgggagctctgatattaggtacatagatatttataattgttatatcctcttcttgaatttgaccc

SEQ ID NO: 9997 - DNA, 80 bp, synthetic construct
  source 1..80: mol_type = other DNA
cttttgggcctcatattagagttataagtgaattgcacgccataattacaatacagtattatgggtttatttgtgtactt

SEQ ID NO: 9998 - DNA, 80 bp, synthetic construct
  source 1..80: mol_type = other DNA
acaaatggccactttgttagggtcagtcactgtattgttgctttgtccttttggtaggtcatggttccctgttagctgtt

SEQ ID NO: 9999 - DNA, 80 bp, synthetic construct
  source 1..80: mol_type = other DNA
tcctagttccccaaccaaaattctactctccaaaagtaattggcaataatagtttggtatacatgcttccaggacatttt

SEQ ID NO: 10000 - DNA, 80 bp, synthetic construct
  source 1..80: mol_type = other DNA
ccatcagagtgaacaggcaacctacaaaatgggagaaaatttttgcaacctactcatctgacaaagggctaatatccaga

SEQ ID NO: 10001 - DNA, 80 bp, synthetic construct
  source 1..80: mol_type = other DNA
tcctattcaacatagtgttggaagttctggccagggcaattaggcaggtgaaggaaataaagggtattcaattaggaaaa

SEQ ID NO: 10002 - DNA, 80 bp, synthetic construct
  source 1..80: mol_type = other DNA
cctaaaaacgtttttccccacccaaggtcacaaagatgttctgtcattttcattttcttgggtagaaactgtatactttt

SEQ ID NO: 10003 - DNA, 80 bp, synthetic construct
  source 1..80: mol_type = other DNA
ttatcctttccaatctgtatatctgtatgtttttagttccctccctccctattttatcctttccaatctgtatatctgca

SEQ ID NO: 10004 - DNA, 80 bp, synthetic construct
  source 1..80: mol_type = other DNA
ggggttttctttccttgtcacatctattttcctagatttaggatcaggggaatagtgagtggcctcatagaatgagttgg

SEQ ID NO: 10005 - DNA, 80 bp, synthetic construct
  source 1..80: mol_type = other DNA
tattgaagaatgttctctgtttacttgaaaggtttgtattatgtagtcgttaggtggaaaggtgtttatttgtcagttag

SEQ ID NO: 10006 - DNA, 80 bp, synthetic construct
  source 1..80: mol_type = other DNA
ctatttctagtactcttcatttctccccgtggattcaagttagctcctggtatgattcatttcagcctgaaacacttcct

SEQ ID NO: 10007 - DNA, 80 bp, synthetic construct
  source 1..80: mol_type = other DNA
agttttgtttcttcatttagtaacttggctgggttctatctgtgaagtctgtcttccctgcagtgtgtgtaggctgatgt

SEQ ID NO: 10008 - DNA, 80 bp, synthetic construct
  source 1..80: mol_type = other DNA
ccttctgaaggacactgagttttcatcctgtctttgatctcaggagcacagaacccagttgatccagcttactttaaaaa

SEQ ID NO: 10009 - DNA, 80 bp, synthetic construct
  source 1..80: mol_type = other DNA
acactgcactgcctgggtacataccactatagaatgaattccttttgggtatcaatgtgttgtcttaataaatgaagaaa

SEQ ID NO: 10010 - DNA, 80 bp, synthetic construct
  source 1..80: mol_type = other DNA
ctcattctcagcaaatcctttgtcatgtccaaaatttttgagtttaacccaccccccattcccagatatgatgttatatg

SEQ ID NO: 10011 - DNA, 80 bp, synthetic construct
  source 1..80: mol_type = other DNA
atacttttatagatgatctagtcccacccactcaattcaccaatttagagactgaggtctgatgtcacgtgtcagccaac

SEQ ID NO: 10012 - DNA, 80 bp, synthetic construct
  source 1..80: mol_type = other DNA
tagtggaggagacagtttaaggactgcatttccagccagaattcattggataccttcaatatatgtaagtcagtttgtct

SEQ ID NO: 10013 - DNA, 80 bp, synthetic construct
  source 1..80: mol_type = other DNA
ggtatttggccatcatttgtattggatatgcctaagccttgccttagagcaggaaatggccttattgaccatctagtcta

SEQ ID NO: 10014 - DNA, 80 bp, synthetic construct
  source 1..80: mol_type = other DNA
tgtttctgtactcttacttagatgctgggattggcccctgggtatattcctgagcctgctgcacacttattttccacatt

SEQ ID NO: 10015 - DNA, 80 bp, synthetic construct
  source 1..80: mol_type = other DNA
cctctccaagtgatgtagattctaagaaaagaggataaaggtctttgaaacttaagagggaacacaggggctagagctgt

SEQ ID NO: 10016 - DNA, 80 bp, synthetic construct
  source 1..80: mol_type = other DNA
aggaaatgctgggcagccctttatcattccatagcctatcaatacctcaaaagatcaagagtcagaggtgagactcagag

SEQ ID NO: 10017 - DNA, 80 bp, synthetic construct
  source 1..80: mol_type = other DNA
catccttagccactccagggctccaggatggtgtttcaccatcttttgaaaatgaagccatcttgatgaacagaagaacc

SEQ ID NO: 10018 - DNA, 80 bp, synthetic construct
  source 1..80: mol_type = other DNA
acaataggctgcttcatgaggaacaacgctacttcagggaaaggtagtgttataaataactgactacaaaagtgatgaga

SEQ ID NO: 10019 - DNA, 80 bp, synthetic construct
  source 1..80: mol_type = other DNA
ctgaatgggagtaagtcaacagtattacaagcccagctatgcctcagaatcatccaagaaacttatgaaaaatgaaataa

SEQ ID NO: 10020 - DNA, 80 bp, synthetic construct
  source 1..80: mol_type = other DNA
tatacaagggtgaaaacatgcaaacctagtcaatatgttgtttggagctgtatacataggtggtatagccatgaagaaga

SEQ ID NO: 10021 - DNA, 80 bp, synthetic construct
  source 1..80: mol_type = other DNA
ctcttttggttctttgatgacaaggtagaggctgaggtataagcctgagagcattaattgtttttgtgccacctccaatc

SEQ ID NO: 10022 - DNA, 80 bp, synthetic construct
  source 1..80: mol_type = other DNA
caggtttcaaagtaaacagagcagaacaggagtgaagtctcatcatttcaaacagaaataggtattccagcctggccctg

SEQ ID NO: 10023 - DNA, 80 bp, synthetic construct
  source 1..80: mol_type = other DNA
gtacattaggctgataattaccactcaagtttgccgtaagaactggtggtaaaacatactgcctaagaacatgtaatgta

SEQ ID NO: 10024 - DNA, 80 bp, synthetic construct
  source 1..80: mol_type = other DNA
gatcattagcgtatcattataatgcaaaagtccccacccatagaagagaatcactgccactttctgcacacgtgtcgtat

SEQ ID NO: 10025 - DNA, 80 bp, synthetic construct
  source 1..80: mol_type = other DNA
gcgggctctcaaagctggcttatggattaacagaagatgccaagatgcaaaatgttcaaccacctcttacttcatcctct

SEQ ID NO: 10026 - DNA, 80 bp, synthetic construct
  source 1..80: mol_type = other DNA
tcttcaagatgtgcttgaagacacctggttttcagagcagactgcaaagagaaaactggtccaacattttgtactttgca

SEQ ID NO: 10027 - DNA, 80 bp, synthetic construct
  source 1..80: mol_type = other DNA
tagtgtgcttcttgaatctctctccttcaccctcttccaactcagtgcctatgaggtagagactgtagaatctattttac

SEQ ID NO: 10028 - DNA, 80 bp, synthetic construct
  source 1..80: mol_type = other DNA
tatttctgtctctaggcctgtttctttgcatttggaagatgaaagaaatggagcatgtaccctccatggtgccattcatc

SEQ ID NO: 10029 - DNA, 80 bp, synthetic construct
  source 1..80: mol_type = other DNA
gctgtagaagagttgtcaatgacaaaccaccttgaacactctgaacctgagggtggaaatatagcctctaggaatgtgtg

SEQ ID NO: 10030 - DNA, 80 bp, synthetic construct
  source 1..80: mol_type = other DNA
tatgaattaggcaggattcttatctccattcaacagatgaaggcattggagctcagagaagtgaagtcacatctgatgtt

SEQ ID NO: 10031 - DNA, 80 bp, synthetic construct
  source 1..80: mol_type = other DNA
ccaagccatatcactgatgtcttccagaatatgtgctgtgtttcttgggtctgattgggatcccagtttagaaaactgag

SEQ ID NO: 10032 - DNA, 80 bp, synthetic construct
  source 1..80: mol_type = other DNA
agaagtgaaaaaaagcaagacccaggcaagggaaaatactgacttagggccacgccactgattaatgagtccttcacata

SEQ ID NO: 10033 - DNA, 80 bp, synthetic construct
  source 1..80: mol_type = other DNA
atgatcagatggctcaactcacctccaataaagctttttgggttgtctcctcctgcatgtattcttctgccaacaaactg

SEQ ID NO: 10034 - DNA, 80 bp, synthetic construct
  source 1..80: mol_type = other DNA
ctgtgatgattgcataaggtaatgaatgtcgccatgctttcaaaaccctgagataccatatattaatagatggatactct

SEQ ID NO: 10035 - DNA, 80 bp, synthetic construct
  source 1..80: mol_type = other DNA
taccatgctaagaataattgcccctttgggcaggtggccaaaataaactctctaacttcactctagccagctggtcagca

SEQ ID NO: 10036 - DNA, 80 bp, synthetic construct
  source 1..80: mol_type = other DNA
ttgtatcactgctcaatatgacatctgtctaaatgggtttattcctgaaaccagaaggctggagatgaactctgagcaat

SEQ ID NO: 10037 - DNA, 80 bp, synthetic construct
  source 1..80: mol_type = other DNA
accaaaaggagtaggtagtggctgaaggtaatacaactcacaagaatcagagctgggaattcattccacatctcagattc

SEQ ID NO: 10038 - DNA, 80 bp, synthetic construct
  source 1..80: mol_type = other DNA
ggacacacgtctttctaggttggttagaagtgctctgtatacagtatctcagatgtcccaaagctgtcaaaagagaaatt

SEQ ID NO: 10039 - DNA, 80 bp, synthetic construct
  source 1..80: mol_type = other DNA
tctaatttggggttatagtgcggtcaccagctgctggttgtgaatacttgctatatggtatccaaaaggaagctctatta

SEQ ID NO: 10040 - DNA, 80 bp, synthetic construct
  source 1..80: mol_type = other DNA
caaacgattctcctacctcagacttccaagtagctaaggctacaggcacatgtgcacccagctaatttttgtatttttag

SEQ ID NO: 10041 - DNA, 80 bp, synthetic construct
  source 1..80: mol_type = other DNA
tctctgtccccttcccctcatcatctgtttccctttgtcagtgtctgtcccactttgtgaaaagtgttttgaatggatct

SEQ ID NO: 10042 - DNA, 80 bp, synthetic construct
  source 1..80: mol_type = other DNA
gccacattaaatacgtaatttcagaaatgcgatcaaactgacttcctgccagagctatgaagcaaatcctatacagagcc

SEQ ID NO: 10043 - DNA, 80 bp, synthetic construct
  source 1..80: mol_type = other DNA
aactttgtgatatgatagaaagagcacacagagagtcagaaagtccaggttcattcttttctaatggctcacctactccg

SEQ ID NO: 10044 - DNA, 80 bp, synthetic construct
  source 1..80: mol_type = other DNA
tccaccttgtctcttctcataaaacactggaaaaaagaaagccattccaattcagaactggacagctcacccaacagagg

SEQ ID NO: 10045 - DNA, 80 bp, synthetic construct
  source 1..80: mol_type = other DNA
gtggtaatgtcttcataagtctcagctgaattaaatatggcagaaagatgtaaagcctctggaatgcccaccatagtcag

SEQ ID NO: 10046 - DNA, 80 bp, synthetic construct
  source 1..80: mol_type = other DNA
gactggaagcttttctatagtgagtggaacatctctgttaggtgcattttaaatagcttaggcccaagggtatagactgc

SEQ ID NO: 10047 - DNA, 80 bp, synthetic construct
  source 1..80: mol_type = other DNA
ctagaaacactgtgggttagaaccagaaagcaagctacagtcaagaagcaaataagcatctcctctaatgattgataagg

SEQ ID NO: 10048 - DNA, 80 bp, synthetic construct
  source 1..80: mol_type = other DNA
tatcaatgagagggctgaaactgcactctgaagttatgagttcttaacaattatgttattgtcagggttgtgggggaagc

SEQ ID NO: 10049 - DNA, 80 bp, synthetic construct
  source 1..80: mol_type = other DNA
taactgttaacccacttggagggactttgtgaagaggaaaagggggagaagaggagaagaagagaaagaagaaaaggcag

SEQ ID NO: 10050 - DNA, 80 bp, synthetic construct
  source 1..80: mol_type = other DNA
ggtctgggaagactcggacaatcaatctccatgtgaataaaaattcacttagactctaggtctgagtcattggctaatct

SEQ ID NO: 10051 - DNA, 80 bp, synthetic construct
  source 1..80: mol_type = other DNA
aagcaatccatttaagctagagaaagccttgtcttttcagggttccactctgaaaatatgaggatccagagtgaaatggg

SEQ ID NO: 10052 - DNA, 80 bp, synthetic construct
  source 1..80: mol_type = other DNA
gcatcaacaattttccctctctaccaagtcagtcacacaaacatgcaccatcttataaagaaagaaaaagcttctttgac

SEQ ID NO: 10053 - DNA, 80 bp, synthetic construct
  source 1..80: mol_type = other DNA
catggctctaaatatcatccacatactactgttaccaaatttgtgtcttcagcccaatctctcccctgaacaacagaata

SEQ ID NO: 10054 - DNA, 80 bp, synthetic construct
  source 1..80: mol_type = other DNA
agaaagaatttccctggtcatcctgctgagagacaactcattgtaagccactcccatccctttgccctatttcttacaca

SEQ ID NO: 10055 - DNA, 80 bp, synthetic construct
  source 1..80: mol_type = other DNA
tctgaaaaacagagatgtgatttcagagaaaggagagagtttgcagatgcaccatttgtcctaaacatatagccctcccc

SEQ ID NO: 10056 - DNA, 80 bp, synthetic construct
  source 1..80: mol_type = other DNA
cagccttatttcccattcagaatccttcctttcacattctatcccattactccttagtctccaaacttatgcccaagcta

SEQ ID NO: 10057 - DNA, 80 bp, synthetic construct
  source 1..80: mol_type = other DNA
tccccccaaaatatgttgactagaataataatcaaaaggaaggctttgaactgccatcaggcctttcatcttgtgatctc

SEQ ID NO: 10058 - DNA, 80 bp, synthetic construct
  source 1..80: mol_type = other DNA
gaagagggacaaaacactttctcctaacttccagacctttcaatccctctttatctacttgtcacccctgtcatttcagg

SEQ ID NO: 10059 - DNA, 80 bp, synthetic construct
  source 1..80: mol_type = other DNA
gaaggaaagatgcttcactcgaagtcatctcgttagtgaaaaaaatcacaaaatatgatcttctgtgcccccattctatg

SEQ ID NO: 10060 - DNA, 80 bp, synthetic construct
  source 1..80: mol_type = other DNA
tcagaacggagcgccagctccttatttgccaccaagaaaagtgaggcattatagaggaaccttgatggatggcccaatca

SEQ ID NO: 10061 - DNA, 80 bp, synthetic construct
  source 1..80: mol_type = other DNA
cagtaatttggagctggcaagtgtgaaggaatgtggaagctgttatttgccttcatgcagcacatcttgagtgcatcttt

SEQ ID NO: 10062 - DNA, 80 bp, synthetic construct
  source 1..80: mol_type = other DNA
aggaaaacaaagaatcagagaggctaagccagtgcttcctcaccttttttcatatcatgacacacagagaaaataatatt

SEQ ID NO: 10063 - DNA, 80 bp, synthetic construct
  source 1..80: mol_type = other DNA
agaaactaaaccttccggcctgctgaattaatgattttattagatacaggtaggtcacactcaggcagcacttacacaac

SEQ ID NO: 10064 - DNA, 80 bp, synthetic construct
  source 1..80: mol_type = other DNA
tctatactaggtttaactcacccttggggtgaaaaagacttgaggaagatgtgtttatgggttgttgactgttagggaga

SEQ ID NO: 10065 - DNA, 80 bp, synthetic construct
  source 1..80: mol_type = other DNA
tcacagttccaacacttactagcacctacgtgacctcaggcaaactatttaacttcttcacacttcactttcctgttctg

SEQ ID NO: 10066 - DNA, 80 bp, synthetic construct
  source 1..80: mol_type = other DNA
ctcggggaccacaggcctataagtttaacagtgctcttggagaaaactctaaaatagatcattaatcagatggcacggaa

SEQ ID NO: 10067 - DNA, 80 bp, synthetic construct
  source 1..80: mol_type = other DNA
gttattgcatactcattatgtaccaggtgctagtttaagctttacttgaattatctcacctattctttattgacatggtt

SEQ ID NO: 10068 - DNA, 80 bp, synthetic construct
  source 1..80: mol_type = other DNA
aaccatgtgtcattttttttttaaatccagggtggaaataaagtaagccatgttcatgccaaattacccttattttcatt

SEQ ID NO: 10069 - DNA, 80 bp, synthetic construct
  source 1..80: mol_type = other DNA
tacatttcatatatagtttaaaaaatgggtctggatgtatgattgccccaagctctggatagctagcagtgcagcatggc

SEQ ID NO: 10070 - DNA, 80 bp, synthetic construct
  source 1..80: mol_type = other DNA
tcagcaacagcaagctagaaagatggctttggcagtagcttttcatgtgcctcaggtcaggaagatcatgttatattata

SEQ ID NO: 10071 - DNA, 80 bp, synthetic construct
  source 1..80: mol_type = other DNA
ttgctattgacaatccagttccaaaaatagcaaaacaataatttctaggatatctgatttcaaagatgtgcagaaaaggg

SEQ ID NO: 10072 - DNA, 80 bp, synthetic construct
  source 1..80: mol_type = other DNA
acccccattagaatcaaataattagaggcaagcatgggttttgactctatagccagtgatacataccacagcagtacaag

SEQ ID NO: 10073 - DNA, 80 bp, synthetic construct
  source 1..80: mol_type = other DNA
tttatttaattgtggtacatcccgataatgagatatcattcagcgctcaaaagaaatgtgctattaggctaggcgtggtg

SEQ ID NO: 10074 - DNA, 80 bp, synthetic construct
  source 1..80: mol_type = other DNA
agcctctttggcctctatccccttacaaaagtctctggggcaagttgaaggtgccacatagatagactctgacatgggat

SEQ ID NO: 10075 - DNA, 80 bp, synthetic construct
  source 1..80: mol_type = other DNA
acttattctcccattctagccaggtgagcaagcatgccttaggttgcaatccaaagtggaactacaacctgaagagctta

SEQ ID NO: 10076 - DNA, 80 bp, synthetic construct
  source 1..80: mol_type = other DNA
gaaatgataaaacacacagcatcttttaaagaccatctgccagaaaccacccaacagatgggggcttaaaactctgttag

SEQ ID NO: 10077 - DNA, 80 bp, synthetic construct
  source 1..80: mol_type = other DNA
agacaaagaagtgtgctattctagttatctgttgctgtgtagcaaacaaccccaatacttagggcttaaaacaatgacag

SEQ ID NO: 10078 - DNA, 80 bp, synthetic construct
  source 1..80: mol_type = other DNA
tgtacagatgagaagaaagctggggctctcaatttgtttggagtactcctggtgaaatcgtgtctaccttatgcactaat

SEQ ID NO: 10079 - DNA, 80 bp, synthetic construct
  source 1..80: mol_type = other DNA
aggttcttactgagatctgtttgactccacagcctgctctatcggctattaggcaatactgccaactatgggtttcttta

SEQ ID NO: 10080 - DNA, 80 bp, synthetic construct
  source 1..80: mol_type = other DNA
tctcaaactgtcctatggaaaactagagggaaaacagcccatttcttctcctctaatcagggctttattcacaacaatat

SEQ ID NO: 10081 - DNA, 80 bp, synthetic construct
  source 1..80: mol_type = other DNA
ctaccctagaatgacactttctactcaagggtgtgttgactaaactatgaatcagcagcccacacatagcaagtgctcta

SEQ ID NO: 10082 - DNA, 80 bp, synthetic construct
  source 1..80: mol_type = other DNA
gatactaacatatctcttgaatgatcatactgaaggtgtgtcctctggcctgttacagaagagaaatacctgacatccac

SEQ ID NO: 10083 - DNA, 80 bp, synthetic construct
  source 1..80: mol_type = other DNA
catgattgcatgggactcgagaagtatagtaatgcattgcttaacgatggggatttgttctaagaaatgcatcattagat

SEQ ID NO: 10084 - DNA, 80 bp, synthetic construct
  source 1..80: mol_type = other DNA
agcaagactccatctcaaaaggaaggggaggagaggggagggaaaagagaagaaagaaaggttacagtaaacattaaaga

SEQ ID NO: 10085 - DNA, 80 bp, synthetic construct
  source 1..80: mol_type = other DNA
cacaaagctaacatcatctaacctgagtctgtctgtcatcaaagaccttacctgtactctacaaagacgttctgaactta

SEQ ID NO: 10086 - DNA, 80 bp, synthetic construct
  source 1..80: mol_type = other DNA
agggtcacaggtttatctccttcactaggaccattcaggctcatgtcttccttgtctccaccctgctaactgtctacaaa

SEQ ID NO: 10087 - DNA, 80 bp, synthetic construct
  source 1..80: mol_type = other DNA
gttttacatcttgttatttcacagcatctttgtaagaaaagtaaagcagatttgctccctctcccaccgaccgcgcacta

SEQ ID NO: 10088 - DNA, 80 bp, synthetic construct
  source 1..80: mol_type = other DNA
tctacctacaacagcttctacatccatttgacaaatagtagtatagaagtgttcaggacaaaaatgtctcttggtctcag

SEQ ID NO: 10089 - DNA, 80 bp, synthetic construct
  source 1..80: mol_type = other DNA
cttctaattatcttgttttttacgaggcacatattagtacccacctccccattttgttagtggggagattgaggctcata

SEQ ID NO: 10090 - DNA, 80 bp, synthetic construct
  source 1..80: mol_type = other DNA
gtagttgggattacaggcacgcaccaccacgactggctaattattgtatttttagtagagacagggtttcaccatgttag

SEQ ID NO: 10091 - DNA, 80 bp, synthetic construct
  source 1..80: mol_type = other DNA
ctttggattttgtctaaatgtggtgggaatccactagagcagaggtcagcaaacatttttctgtaaagggcaagacagta

SEQ ID NO: 10092 - DNA, 80 bp, synthetic construct
  source 1..80: mol_type = other DNA
tcactgcccatgggatgtatcagagatgaacaggatttgtaccttgtagaccaagttcccttggcctactttctggatct

SEQ ID NO: 10093 - DNA, 80 bp, synthetic construct
  source 1..80: mol_type = other DNA
aacagtcaagcaataccattgactgagacctccatgaggtactaaggaagtttgagagaaatcaaagatccctgggcatg

SEQ ID NO: 10094 - DNA, 80 bp, synthetic construct
  source 1..80: mol_type = other DNA
tacatagtaagtgcttgataagtgcaaatatcattggctaagctcctccagtgtagaacctcactaaggtccacccttcc

SEQ ID NO: 10095 - DNA, 80 bp, synthetic construct
  source 1..80: mol_type = other DNA
agtagacagggggctttgttgcattagaaccaagcagccctcacaatgatgaggttccatttataaatttgggacgtagt

SEQ ID NO: 10096 - DNA, 80 bp, synthetic construct
  source 1..80: mol_type = other DNA
ttattattatcaacattatgaagcctgtcagaagcaggcccattgttcaaacgaattgacctccactacaattgacctta

SEQ ID NO: 10097 - DNA, 80 bp, synthetic construct
  source 1..80: mol_type = other DNA
aaaaaaaaaaaaaaataggactctgaagtcagatgacctgggtatgggtcttgtgccaccactttctagctgtgtgacat

SEQ ID NO: 10098 - DNA, 80 bp, synthetic construct
  source 1..80: mol_type = other DNA
gttatgatttgtctgaggcccctgagattcctgaaaccttaactcatgtcccctaaccctagggcactgaaaggtgactt

SEQ ID NO: 10099 - DNA, 80 bp, synthetic construct
  source 1..80: mol_type = other DNA
gactcccaaaagcaaagacattcaagtccagtcattttggtttatgtcatcagcttcaataataataaggttgcaagagg

SEQ ID NO: 10100 - DNA, 80 bp, synthetic construct
  source 1..80: mol_type = other DNA
agcttgcttttatttttctttttatttattttttattttgcagaaacagggtcccactacgttgcccaggctggtctcaa

SEQ ID NO: 10101 - DNA, 80 bp, synthetic construct
  source 1..80: mol_type = other DNA
atagctcctttctctcccccagccaccatgaatcaccccatgttctcaatacaaacatatttgcctcacatatttgagta

SEQ ID NO: 10102 - DNA, 80 bp, synthetic construct
  source 1..80: mol_type = other DNA
gcctaatggaagatacagtcattaggatgcgtgtattcattttcccgggcccttagtgaaataggcattttggaatctgt

SEQ ID NO: 10103 - DNA, 80 bp, synthetic construct
  source 1..80: mol_type = other DNA
ttctatctgagccagccttagaattctgggtaaacgggggcccagtaaatggtaattaaacaacttcagggagagctgat

SEQ ID NO: 10104 - DNA, 80 bp, synthetic construct
  source 1..80: mol_type = other DNA
tttcctattaaagaaggcaaagaagtatatggaaaggggttggagtctcttgacttccatctttccccagccctattttt

SEQ ID NO: 10105 - DNA, 80 bp, synthetic construct
  source 1..80: mol_type = other DNA
cactaggcctatacctctaagcaggtaactaggagagcttttccaaggggatttgaaaagctcaaaaggaaagacctaaa

SEQ ID NO: 10106 - DNA, 80 bp, synthetic construct
  source 1..80: mol_type = other DNA
gacatacacagaaacacagacacacacatgcacacatacacaaatacacacaaacacaaacacatacatgcacacataca

SEQ ID NO: 10107 - DNA, 80 bp, synthetic construct
  source 1..80: mol_type = other DNA
gattagaaatacagacaactggcagagtctgaggttgacacagtgatacaatcagaggaaactaagctaatataaaagga

SEQ ID NO: 10108 - DNA, 80 bp, synthetic construct
  source 1..80: mol_type = other DNA
cttcaagtgccccagcctcttacaggtcttgataatattttcctacctggtctcatgatcaaagcagaggactggcttac

SEQ ID NO: 10109 - DNA, 80 bp, synthetic construct
  source 1..80: mol_type = other DNA
ctgttgtggaaaagttctaaaagatataaataagacccttgcccatcgatgctcagagctgttgcaggcaaggcacagtg

SEQ ID NO: 10110 - DNA, 80 bp, synthetic construct
  source 1..80: mol_type = other DNA
gcgaaaggcaccactctagaccagacaaagatggatactgacacccgtaattaaagagtttctgttgagtacatatgact

SEQ ID NO: 10111 - DNA, 80 bp, synthetic construct
  source 1..80: mol_type = other DNA
cttagttaatcacttggactcttctagacagacttctttgggtaaaaatccctgcttccccatttactagctgggtgacc

SEQ ID NO: 10112 - DNA, 80 bp, synthetic construct
  source 1..80: mol_type = other DNA
caaatctgagtcagatctgtttctcattagctcccggaggctaagatatggataaactcaaaacaagtcctgattttgct

SEQ ID NO: 10113 - DNA, 80 bp, synthetic construct
  source 1..80: mol_type = other DNA
ctggctgtttactggaacatacctacagatcacctgagaatcttgttcaaatgcagatttgaactcagaatgtctaggat

SEQ ID NO: 10114 - DNA, 80 bp, synthetic construct
  source 1..80: mol_type = other DNA
caccctcattcctatggcagctgaaagtttcctatggcctagaaaaggcaacactacaactctgtccatcaaaaattgaa

SEQ ID NO: 10115 - DNA, 80 bp, synthetic construct
  source 1..80: mol_type = other DNA
cacccttcatgcttccttggttataatgaacagacacagataaaaaggtgtgcactttcaaatacctcgagggggcttta

SEQ ID NO: 10116 - DNA, 80 bp, synthetic construct
  source 1..80: mol_type = other DNA
ctttcctattttgtctctaagggagcccatttccggaaagtgtgaaggtgataaattcacccaagtgagctcattgccaa

SEQ ID NO: 10117 - DNA, 80 bp, synthetic construct
  source 1..80: mol_type = other DNA
tcagacattgcccccagggagttcaaggggtagtgagagagaaacttacacacaaatatttaaaagacacccacttacta

SEQ ID NO: 10118 - DNA, 80 bp, synthetic construct
  source 1..80: mol_type = other DNA
ggagatattaactgaggtgctttttattccatagatttccccttatctgcttaccctatctcttcctcatgtcattgcct

SEQ ID NO: 10119 - DNA, 80 bp, synthetic construct
  source 1..80: mol_type = other DNA
agtaaccatttcgagcagttaggctttgaagtgagccagtgacctacacagaagtgaaaagcttcaaatgccattatcat

SEQ ID NO: 10120 - DNA, 80 bp, synthetic construct
  source 1..80: mol_type = other DNA
caggagaggagttggtttagctgttttatcaaaaagctttgaaatataaagtgctcccgaggagttcgaaaggacacagg

SEQ ID NO: 10121 - DNA, 80 bp, synthetic construct
  source 1..80: mol_type = other DNA
tgttattacgttatagtgcctcctaaaccattctccctgttgtttagcaagagatgcagtgctctcttctgctttagttt

SEQ ID NO: 10122 - DNA, 80 bp, synthetic construct
  source 1..80: mol_type = other DNA
aggtgagttacatgggcataagtccatgtgacttgcaaaaatgcgtaaaacaagaagcaaagcatacaaatgtgtgcagg

SEQ ID NO: 10123 - DNA, 80 bp, synthetic construct
  source 1..80: mol_type = other DNA
aggccagcaagttgcacttgaacaaataacttctcctagaaaggaaatggcatccgcagcaatcaatgttatacctagat

SEQ ID NO: 10124 - DNA, 80 bp, synthetic construct
  source 1..80: mol_type = other DNA
tgttcatctagaatacatgtacttactatgtccgagacacagtgctgggtgctgggtaggggatacaaagatgaattaat

SEQ ID NO: 10125 - DNA, 80 bp, synthetic construct
  source 1..80: mol_type = other DNA
caaacgaacttgtcttagcttatccagccatctggctgtagtacagctggttagattaaggagcatagtgataactcgct

SEQ ID NO: 10126 - DNA, 80 bp, synthetic construct
  source 1..80: mol_type = other DNA
aaatatcatcacacctccttgtaaaaggcaaggtctagaagagtaatgaccacacttagccaaccaggcaggctattcta

SEQ ID NO: 10127 - DNA, 80 bp, synthetic construct
  source 1..80: mol_type = other DNA
tgagatcacatttgcaaagtgtttggggctctagggaagaaatctctaatgtatgcagctaaagcatgattacagcaatg

SEQ ID NO: 10128 - DNA, 80 bp, synthetic construct
  source 1..80: mol_type = other DNA
ataggaatctgtatctgggtccacctcttacagtctctgtgacctcttggcaagtctcttcctttcctttatcttatttt

SEQ ID NO: 10129 - DNA, 80 bp, synthetic construct
  source 1..80: mol_type = other DNA
ctcctctgttgcaacaaatagctaaaaatagttttaaccttttttgttagggaaaacaaatggagggatggggaattctc

SEQ ID NO: 10130 - DNA, 80 bp, synthetic construct
  source 1..80: mol_type = other DNA
taatttaaaaatactttattgctaaaatggctgacaatcatctgggtctttggtgagtcataatctttttgctgatggag

SEQ ID NO: 10131 - DNA, 80 bp, synthetic construct
  source 1..80: mol_type = other DNA
ctatgaaagtcctaagtgtcatcttcttctaatataaggttgttttgcctagtttgatggtttagtgtagccaccttcat

SEQ ID NO: 10132 - DNA, 80 bp, synthetic construct
  source 1..80: mol_type = other DNA
cttcgccaccttataggggcatggtttgtggcatcccaatgcaattagaagagtaacatcaatgatcaccaatcacatat

SEQ ID NO: 10133 - DNA, 80 bp, synthetic construct
  source 1..80: mol_type = other DNA
aactgcatattccaattattactttgcaacaggagaaagataggatgaggttgacaacggccttcgaactgcttttcctt

SEQ ID NO: 10134 - DNA, 80 bp, synthetic construct
  source 1..80: mol_type = other DNA
ataagcacaaataaaattctattagtgtaattttaggagacacaaggtcatgatgctcacaacttactatcaaatggctc

SEQ ID NO: 10135 - DNA, 80 bp, synthetic construct
  source 1..80: mol_type = other DNA
catttactcattgacccaagaatttgggtcaagaaagctttagctgtggccatccaaagggtaccagaaaagatgaaaag

SEQ ID NO: 10136 - DNA, 80 bp, synthetic construct
  source 1..80: mol_type = other DNA
atgataataacccaaagaacttttttcttcctttaagccgcacttaggtaaggacggctttatccccaccccagggagaa

SEQ ID NO: 10137 - DNA, 80 bp, synthetic construct
  source 1..80: mol_type = other DNA
aaatgcaaaactagaccaaaaagtacaatgacaacaactgtggccgagccagcatccttgcattcatctattcattcagc

SEQ ID NO: 10138 - DNA, 80 bp, synthetic construct
  source 1..80: mol_type = other DNA
ctgagtcctaaataaggcaatttggggagctgagtaatttacagtatagtcatttgtcatctgtgatgtgtggtgacaga

SEQ ID NO: 10139 - DNA, 80 bp, synthetic construct
  source 1..80: mol_type = other DNA
ctccctgcctgacttctttctttttccaggaggacagaaatacagctctccatttgctagtgcaaaccataaaagttaaa

SEQ ID NO: 10140 - DNA, 80 bp, synthetic construct
  source 1..80: mol_type = other DNA
agccaaatcccaaatctatattcagggtatgattatcaagttggtagattattcaggattttttctctacccatcccctt

SEQ ID NO: 10141 - DNA, 80 bp, synthetic construct
  source 1..80: mol_type = other DNA
gagaaaaataacattgggctgtcagggtgctggtctttaccttcttcaccattatttccgattgctctatgtttcatcca

SEQ ID NO: 10142 - DNA, 80 bp, synthetic construct
  source 1..80: mol_type = other DNA
gcattgtttgggtcacaacggactttcaaaccctcacctcatatgcagcttaagactgtaaccatttaaaagtaaggcag

SEQ ID NO: 10143 - DNA, 80 bp, synthetic construct
  source 1..80: mol_type = other DNA
aggacatgcagatttgttacatagtgtggacatgtgcaggacatgcagatttgttacatggcatacataaatgtgtgcca

SEQ ID NO: 10144 - DNA, 80 bp, synthetic construct
  source 1..80: mol_type = other DNA
ttctaactgtgataccatatggaaaggcctgaatcccttaggatggtcttaagactaaggtaagaggtcagagagagttg

SEQ ID NO: 10145 - DNA, 80 bp, synthetic construct
  source 1..80: mol_type = other DNA
aactttaactttcttaaagcccacaaatagtgccttgagtctttatggcaagttgtcaggtgctaccaagagctcgcctt

SEQ ID NO: 10146 - DNA, 80 bp, synthetic construct
  source 1..80: mol_type = other DNA
ttttaacaaagagagagcaagcttcaggcttagagactttgatttggccaaagcatctatcaaggatctaatctcattgt

SEQ ID NO: 10147 - DNA, 80 bp, synthetic construct
  source 1..80: mol_type = other DNA
ctacatgataaagcccagagacactttgatgaagtaaataatttagccccatccatactcacctgccattcccaaatcct

SEQ ID NO: 10148 - DNA, 80 bp, synthetic construct
  source 1..80: mol_type = other DNA
tgtggtctgtatttgcctatggctttagaatcttcccaagtcagacttgaagagtttgacaagtccatggatttctcatt

SEQ ID NO: 10149 - DNA, 80 bp, synthetic construct
  source 1..80: mol_type = other DNA
actgcagagtcgaaagagatgaggtaagaaaaaaggtgtcaagtgtcacacagataaggagctttcatacagtgctgagg

SEQ ID NO: 10150 - DNA, 80 bp, synthetic construct
  source 1..80: mol_type = other DNA
attgcttcacacaggaaatattcccgtgctcctaacacaaactgatttcatgccaaaggcatgactctaaagcacaaaca

SEQ ID NO: 10151 - DNA, 80 bp, synthetic construct
  source 1..80: mol_type = other DNA
aatgatggggtttcagattaaactccatttgccttttaccaagcacatgtgagtgtactggtataaccaaggtggtgcct

SEQ ID NO: 10152 - DNA, 80 bp, synthetic construct
  source 1..80: mol_type = other DNA
agtgtctcatctaaactcagtctgttctccttgtggaaccccgtaactcacaattgtgtggcaaatagcatctatatcat

SEQ ID NO: 10153 - DNA, 80 bp, synthetic construct
  source 1..80: mol_type = other DNA
gagtcaggcatgcctaagcctgaatcttgggtctgctttactagttgcatgaatttgaccatgttatttaacttatctga

SEQ ID NO: 10154 - DNA, 80 bp, synthetic construct
  source 1..80: mol_type = other DNA
tctctcgtgtgggattcacagaggaggccatgcagggttgcctggaatcaactgttttaatgaataatattaaggtagta

SEQ ID NO: 10155 - DNA, 80 bp, synthetic construct
  source 1..80: mol_type = other DNA
ttcctttctctaaacctgtttccttctctctagaggagataaaaataatctctgcctcacgggttgttgcatcgatgaga

SEQ ID NO: 10156 - DNA, 80 bp, synthetic construct
  source 1..80: mol_type = other DNA
tcttagtcctagtcctttctttgatttctctgtgacaactggataggtcagctttcatggatctcagttttaactaggac

SEQ ID NO: 10157 - DNA, 80 bp, synthetic construct
  source 1..80: mol_type = other DNA
actgtttgcttccatttttcccagagttgtgaatttataaaactgacaggagttttgatgtgacccggattatacaaaca

SEQ ID NO: 10158 - DNA, 80 bp, synthetic construct
  source 1..80: mol_type = other DNA
ctccaatcaggatcatcagggagcctgttataaataaagaatctcagcctccaaccagaacctattgaatccaaatttgc

SEQ ID NO: 10159 - DNA, 80 bp, synthetic construct
  source 1..80: mol_type = other DNA
tttttaaatacatccacagattctttggtattcctctcttcaagagatggagcataattccttcctctgtgaaagcgagc

SEQ ID NO: 10160 - DNA, 80 bp, synthetic construct
  source 1..80: mol_type = other DNA
ttggggatacatgttgttctcaggggttgggggtagagcagagtgatgctgtgtggagaagaaggagctagtggatagca

SEQ ID NO: 10161 - DNA, 80 bp, synthetic construct
  source 1..80: mol_type = other DNA
tctggacattccttcctacctattagaaaggaaagggacctcaggaagctctctcaggccctgtatgcttagcttctaaa

SEQ ID NO: 10162 - DNA, 80 bp, synthetic construct
  source 1..80: mol_type = other DNA
tatttccgaattcaatgattctacatggagggagatataatagaaagatactgttccagacattgactcccttctctgct

SEQ ID NO: 10163 - DNA, 80 bp, synthetic construct
  source 1..80: mol_type = other DNA
agaaatttgcataagtaataaggagttgcatattaatccccaagacaatggggaaaatgtctccagggcatgtcagaggt

SEQ ID NO: 10164 - DNA, 80 bp, synthetic construct
  source 1..80: mol_type = other DNA
gcatgattgttttgaaatgtgagaacatgagatttgggagaggccagaagtggaatgatatggtttggctatgttcccac

SEQ ID NO: 10165 - DNA, 80 bp, synthetic construct
  source 1..80: mol_type = other DNA
tctcctggggctctttcaggtgacaggtgcccacctgcaactgtccttccctgcagtgcccctccccaccccctagcatc

SEQ ID NO: 10166 - DNA, 80 bp, synthetic construct
  source 1..80: mol_type = other DNA
ggcagctctgggagcatggttttccaagcccagaaaaattagaatatcagagctggaagtgaaggcctttaagattattt

SEQ ID NO: 10167 - DNA, 80 bp, synthetic construct
  source 1..80: mol_type = other DNA
tccaagtcaatcctaagccaaaagaagaaagctggaggcatcacgctatctgacttcaaactatactacaaggctacagt

SEQ ID NO: 10168 - DNA, 80 bp, synthetic construct
  source 1..80: mol_type = other DNA
ggtatatacccaaaggattataaatcatgctgctataaagacacatgcacatgtatgtttattgtggcactcttcacaat

SEQ ID NO: 10169 - DNA, 80 bp, synthetic construct
  source 1..80: mol_type = other DNA
acatttgagatttccattaagttgatgccataatttgctgtctctctgcaaggttttgctctccattctgggcatccttc

SEQ ID NO: 10170 - DNA, 80 bp, synthetic construct
  source 1..80: mol_type = other DNA
aggtcaggagttgaagaccagcctggaaaacacagcaagaccctgtctctaaaatagtttaaaaaaaaaaaaaaaaaaaa

SEQ ID NO: 10171 - DNA, 80 bp, synthetic construct
  source 1..80: mol_type = other DNA
cttttacaactcaagtctggccagtgcaatgccttctcaagattcaacacctaatagttagccttgggagttgatagaaa

SEQ ID NO: 10172 - DNA, 80 bp, synthetic construct
  source 1..80: mol_type = other DNA
acatttctgtcatgcctcttctcactatgtatgtgggtattttgcccagagatctaaagcttctgaacatagctacttcg

SEQ ID NO: 10173 - DNA, 80 bp, synthetic construct
  source 1..80: mol_type = other DNA
aaaataggaaatctgcctgttttcaggtccatctttggacacgatcatctctcatgctctacagtgtgaattttcactag

SEQ ID NO: 10174 - DNA, 80 bp, synthetic construct
  source 1..80: mol_type = other DNA
ttgacagagctggaggcagaaaattctaggggaagtaccaactctaaacaattaggacaatgtcagtatgtggaaagtaa

SEQ ID NO: 10175 - DNA, 80 bp, synthetic construct
  source 1..80: mol_type = other DNA
gtgagtgggtaaatcaagtggtgacaaagaaacaagcaattttgacccatgtctttttgtgcagcaaaaggctgagtatc

SEQ ID NO: 10176 - DNA, 80 bp, synthetic construct
  source 1..80: mol_type = other DNA
tctcacttcagggtctgcttctggggaaccaacctagacaatcaaaatagcaaattttatcaaagttatctgtatcactc

SEQ ID NO: 10177 - DNA, 80 bp, synthetic construct
  source 1..80: mol_type = other DNA
caaaatgaactgacagcattactttatgtgttctttcactttggtcaagataaaataactggtacagagctatgtgtcct

SEQ ID NO: 10178 - DNA, 80 bp, synthetic construct
  source 1..80: mol_type = other DNA
cagagaaatacaatatctaaaatgaaaagttcactggatgggcttaacaacagaggacactgcagaagaaaagattagtg

SEQ ID NO: 10179 - DNA, 80 bp, synthetic construct
  source 1..80: mol_type = other DNA
ggcaaggggcatgaggaacctttctgtgatgatagaaatattatatatctcaatagggaagagggttatgcaggtgcatg

SEQ ID NO: 10180 - DNA, 80 bp, synthetic construct
  source 1..80: mol_type = other DNA
cagtcatgctccaaggtaggcagcattaacacaattcatagaggaggaaactcaggtttagagaagccaaattatttgct

SEQ ID NO: 10181 - DNA, 80 bp, synthetic construct
  source 1..80: mol_type = other DNA
cactttggagtagacaaggcaatttggattatcccaattttacagatttaagaaaactgagacttggtgaagtgatttgc

SEQ ID NO: 10182 - DNA, 80 bp, synthetic construct
  source 1..80: mol_type = other DNA
aacaagagccttagtgctgtctgaaacacaaaggggagtgaagaaatctgtttgccaaattgaaacgggcagaattgaca

SEQ ID NO: 10183 - DNA, 80 bp, synthetic construct
  source 1..80: mol_type = other DNA
aactttctcaccaactaccccacacagttaccacttcactctccaaggataaacactcaagttcccaggttagttatggt

SEQ ID NO: 10184 - DNA, 80 bp, synthetic construct
  source 1..80: mol_type = other DNA
aatgtaaatgtgatcatatggatggctgctgatggatatggttatcatatactcctgcagcctgagggtgggcagagtga

SEQ ID NO: 10185 - DNA, 80 bp, synthetic construct
  source 1..80: mol_type = other DNA
caacaaaggaaaaaagacattttagggaaagaaaacaacgcatgcatatgccttgtggaaagcaggggtgggtaagagca

SEQ ID NO: 10186 - DNA, 80 bp, synthetic construct
  source 1..80: mol_type = other DNA
tcccttgtcctgctagcaaaatgaaaataaagcaagtggatcagggctaacataggcacagttgacactcaatgatttga

SEQ ID NO: 10187 - DNA, 80 bp, synthetic construct
  source 1..80: mol_type = other DNA
aaaaagaaatctggttttgggcttgggagtgtgatgttctgtgatcagcaggctctcataatctggccctgccaatctct

SEQ ID NO: 10188 - DNA, 80 bp, synthetic construct
  source 1..80: mol_type = other DNA
gcactactattatcatattagccacacttgttgagtgtttaccatgtgccaggatctatgtgaagccttttacatacatc

SEQ ID NO: 10189 - DNA, 80 bp, synthetic construct
  source 1..80: mol_type = other DNA
cattggcaggggaaggggtaaaaaaagagagaaaggagaagagaaatgagagagcgtaggaagaggacaagaaggagagg

SEQ ID NO: 10190 - DNA, 80 bp, synthetic construct
  source 1..80: mol_type = other DNA
tctaaagtgtttctgctagcctgcagggcttttcgcatagtgttttaatacctagcctgtaaaaccttaataaatgttaa

SEQ ID NO: 10191 - DNA, 80 bp, synthetic construct
  source 1..80: mol_type = other DNA
atttaccaagtgtccacaccaagccatctttaaaaatgaacaagatacatttcctgcccttcacaggctctggagggcaa

SEQ ID NO: 10192 - DNA, 80 bp, synthetic construct
  source 1..80: mol_type = other DNA
tgggaatgtcctgtttcttgatcatgatgtggggaggcagggggaacataggtgtgttcatttgaaaaaaattctttgtg

SEQ ID NO: 10193 - DNA, 80 bp, synthetic construct
  source 1..80: mol_type = other DNA
aaggcccttctctgctccaaaccccttaatggctttcaattgaccagagcataaactgcaaaatcttttccccggtttac

SEQ ID NO: 10194 - DNA, 80 bp, synthetic construct
  source 1..80: mol_type = other DNA
ccttggaagaggctatgctaaggtaggtaaggtggtgatggactaataaagcttgcaacttcttacattttcatggcatg

SEQ ID NO: 10195 - DNA, 80 bp, synthetic construct
  source 1..80: mol_type = other DNA
tccaggctttgcatccttagttcttcaccttctctcacctggacagactggacatccaatctctcagcaagtctgttcat

SEQ ID NO: 10196 - DNA, 80 bp, synthetic construct
  source 1..80: mol_type = other DNA
gtcattgatcatgttgtcacctcctcaaggaggccttcgctatcacactagctacgttaacgttccctgtattctatttg

SEQ ID NO: 10197 - DNA, 80 bp, synthetic construct
  source 1..80: mol_type = other DNA
ttttcctttctatagttggatacaccaaggctcttaggttaagagacttacatctgagtcagaatgaatcttgggcccat

SEQ ID NO: 10198 - DNA, 80 bp, synthetic construct
  source 1..80: mol_type = other DNA
ggcctcggacaaatgacttaacagggccctagctctctcatctgtaaagtgagaaataataacagcatctttattttaga

SEQ ID NO: 10199 - DNA, 80 bp, synthetic construct
  source 1..80: mol_type = other DNA
agtttttttagtataaaattgggaggttgatgggaaggaatcttaagatcctacaagactatgtgaatgggcagagaaag

SEQ ID NO: 10200 - DNA, 80 bp, synthetic construct
  source 1..80: mol_type = other DNA
atagcagagtgatcctgtggtgtccgttttactcagtttctgccaatggtaacatcttcgtaactttagtgcaatagcat

SEQ ID NO: 10201 - DNA, 80 bp, synthetic construct
  source 1..80: mol_type = other DNA
acaaaaacaaaagttctgacccagttgatcttccagacattctcaggaaacggccactttgatttaacaacttgagtggg

SEQ ID NO: 10202 - DNA, 80 bp, synthetic construct
  source 1..80: mol_type = other DNA
aagcaaagttgagagatgtgctatgaggctcggaagatgtgaaaatttgacatattgattgacaatcatgttcctggttg

SEQ ID NO: 10203 - DNA, 80 bp, synthetic construct
  source 1..80: mol_type = other DNA
caagacatttctcccaacagcctgtcgtgcatctaatcctatcttgacacctgcttctcagaggatttggactaacataa

SEQ ID NO: 10204 - DNA, 80 bp, synthetic construct
  source 1..80: mol_type = other DNA
aagacacatcccatgtttggagaactgggagtgtttttcctagaccagacatgtatagaactagcagttagacatgcaag

SEQ ID NO: 10205 - DNA, 80 bp, synthetic construct
  source 1..80: mol_type = other DNA
gctgacaaagtctgtttagtacaaggaaactgaaagttgaaaagataagtttactcaaataggtaatgtgggaagtcacc

SEQ ID NO: 10206 - DNA, 80 bp, synthetic construct
  source 1..80: mol_type = other DNA
agcggaccctgtctaagaacccaaactacacgtgaatggaagagttttttaatttctatggtaataaggagcctaaactc

SEQ ID NO: 10207 - DNA, 80 bp, synthetic construct
  source 1..80: mol_type = other DNA
aaacattaagagattgtctaaatgttctccagggcgaaggtagcgagagtagaagaaccataaccaaaatagtcatttgc

SEQ ID NO: 10208 - DNA, 80 bp, synthetic construct
  source 1..80: mol_type = other DNA
ataaagagtttcagagtgtgtgtaaggtcaaatttaaatagagtggtcggtcaggagagacctcactgagaaggtggtta

SEQ ID NO: 10209 - DNA, 80 bp, synthetic construct
  source 1..80: mol_type = other DNA
tcagactctgtggaacagaaacaagacattttcactgtacccttttcaaattccagacccatataatccatgggcataat

SEQ ID NO: 10210 - DNA, 80 bp, synthetic construct
  source 1..80: mol_type = other DNA
tttgcaggctgtacaggctaatgcttctgaggaggcctcaggaaacttacaatagtggcagaaagtgaagtggaagcagg

SEQ ID NO: 10211 - DNA, 80 bp, synthetic construct
  source 1..80: mol_type = other DNA
ttttggaggaaagtgaggaatccaggactgttttacgcatcagccctcagtttgtgcatgagtgtgttttatgttccttt

SEQ ID NO: 10212 - DNA, 80 bp, synthetic construct
  source 1..80: mol_type = other DNA
gaagaagcaatcacaaattgagggcaattatattacctgcccgatcaggtgagagagacaccactcatatctgatagagg

SEQ ID NO: 10213 - DNA, 80 bp, synthetic construct
  source 1..80: mol_type = other DNA
aggtctcttataactatgtttctttaaatttcaattttctaatctctgccatagatctgcccaaaagtagctctcttcac

SEQ ID NO: 10214 - DNA, 80 bp, synthetic construct
  source 1..80: mol_type = other DNA
aacctggtttgtactggaagcactttctttcagcagaacccaaatttagcagtggaagaaataccggttccataaaggat

SEQ ID NO: 10215 - DNA, 80 bp, synthetic construct
  source 1..80: mol_type = other DNA
tgctcatcaagtgaacttccttatcagtccctacctgtactcagctcttctggcctgactgcacattagaatcacctaaa

SEQ ID NO: 10216 - DNA, 80 bp, synthetic construct
  source 1..80: mol_type = other DNA
ccctctccttgtcccctacccccgacaggccccggcgtgtgatgttcctcccactgtgtccatgtgttctcgttgttcaa

SEQ ID NO: 10217 - DNA, 80 bp, synthetic construct
  source 1..80: mol_type = other DNA
gtgatggcaattgtgatgatggtggtgatggtgatggtagtggtaatggtggtaatggtaatgatgatggtgatggtgat

SEQ ID NO: 10218 - DNA, 80 bp, synthetic construct
  source 1..80: mol_type = other DNA
tgtttaactgaatgaattcatgaggcctcagtccaccaactatctcattggctcagaatttcacagacgtagcagcatat

SEQ ID NO: 10219 - DNA, 80 bp, synthetic construct
  source 1..80: mol_type = other DNA
aaatatgctgaaaggtcctgttgaggcattttaaaacaacttcccctagctcagacctggatgttactagtaggtcgagg

SEQ ID NO: 10220 - DNA, 80 bp, synthetic construct
  source 1..80: mol_type = other DNA
tgttttaaactattctgctccagctctttaggcatcagacacctcccaaacaaatcccactgtccactcatgtcctagga

SEQ ID NO: 10221 - DNA, 80 bp, synthetic construct
  source 1..80: mol_type = other DNA
ctccatcctgctccatacctttgttgcctatcagcttctatcttgattgggtcctggtcatatcagaattagctgtgaag

SEQ ID NO: 10222 - DNA, 80 bp, synthetic construct
  source 1..80: mol_type = other DNA
tccctcttctgattggcaggttggtgcttttatcaaatttcagagaggagcatttctgtgtcttccaggatgcaagaaag

SEQ ID NO: 10223 - DNA, 80 bp, synthetic construct
  source 1..80: mol_type = other DNA
tcaataaacttaatcatttctaagctggccatgaaaaggttgtgaaggactgtaggtgtgagagcatcgatgtcccctca

SEQ ID NO: 10224 - DNA, 80 bp, synthetic construct
  source 1..80: mol_type = other DNA
aagaaaagaaaagaagtacagcattaaagaatcccttacttccctgttaggcaggtcaaaacaatggttatccagcaacc

SEQ ID NO: 10225 - DNA, 80 bp, synthetic construct
  source 1..80: mol_type = other DNA
actgtactactgtaatagtttcataaccacctgttactattgcaagaggtcaagtgttgaatctgtttaaaatcttcatg

SEQ ID NO: 10226 - DNA, 80 bp, synthetic construct
  source 1..80: mol_type = other DNA
ttttaatgcagattaaagtaccctactcagaaaagaaatggccacaaagcacatttatgagtaacgaacagaagtgagca

SEQ ID NO: 10227 - DNA, 80 bp, synthetic construct
  source 1..80: mol_type = other DNA
gaaaacaaattgacagtagacaatccagaaaaagggttctaattactcaaaactactttttacttcttttgcaacatgta

SEQ ID NO: 10228 - DNA, 80 bp, synthetic construct
  source 1..80: mol_type = other DNA
aacattctcacttgaaatcaggaatattttaacccacccaagcattttgactactctgtggacttttctcaatgcctccc

SEQ ID NO: 10229 - DNA, 80 bp, synthetic construct
  source 1..80: mol_type = other DNA
ccttggattctacatttttaacagattcccaagtgatgccagtatggacattttaaaagtcacactgtgggtaggaaagg

SEQ ID NO: 10230 - DNA, 80 bp, synthetic construct
  source 1..80: mol_type = other DNA
tccaatacaccatttccttctgactcctggggaactcgctgttggtgtaaaagtggaattttcaagctgtttagttgaaa

SEQ ID NO: 10231 - DNA, 80 bp, synthetic construct
  source 1..80: mol_type = other DNA
tccagtactgctagtcctggatgactgtgtagtcatttcatctctttatgacccaagttattgaaggataagaacaacca

SEQ ID NO: 10232 - DNA, 80 bp, synthetic construct
  source 1..80: mol_type = other DNA
attgccttttcaggcagaacctctgttgagggaaaatggcagttaggtttgttcccatttccttctaaagagaaccaaca

SEQ ID NO: 10233 - DNA, 80 bp, synthetic construct
  source 1..80: mol_type = other DNA
tctggggagaaccataagaactataagaaaatgctgaattctgatgctgcctgggaaacaagtgttaatattcacatcca

SEQ ID NO: 10234 - DNA, 80 bp, synthetic construct
  source 1..80: mol_type = other DNA
tgtgctaagcactttacaatcaatcagcccattggaccctcacaatgagcaattattaaggtattactgtccctgttcta

SEQ ID NO: 10235 - DNA, 80 bp, synthetic construct
  source 1..80: mol_type = other DNA
tggccctgggatttcagccactttccattcagaaaaagattgctccatttattctcagcttcatggtcctttttacattt

SEQ ID NO: 10236 - DNA, 80 bp, synthetic construct
  source 1..80: mol_type = other DNA
gggtgtcaaggacccaaacccttttcttataatagaaaatgatcaagaaacccagagagaacttggctgtcctcatctgc

SEQ ID NO: 10237 - DNA, 80 bp, synthetic construct
  source 1..80: mol_type = other DNA
cgctggttgatcctaattctctagaatgatgtaaaaccttaattagctctgaaagttgttacttgggatgacctcctccc

SEQ ID NO: 10238 - DNA, 80 bp, synthetic construct
  source 1..80: mol_type = other DNA
cagctctctccatcctgaagtaagggaaacttactgaatgtgtccctaggatccatgaactgtttcctgcaatgggagag

SEQ ID NO: 10239 - DNA, 80 bp, synthetic construct
  source 1..80: mol_type = other DNA
aggagaaagagcctaggttgatgttttgagcaaagcagagcttagatatagatagacatagatgtaaatagagatctaca

SEQ ID NO: 10240 - DNA, 80 bp, synthetic construct
  source 1..80: mol_type = other DNA
gaaaggggaaagagaagatgaaagaaaagcagtcatatccaaaggcaaaattatgagcttgaagtcagacagaagtgaaa

SEQ ID NO: 10241 - DNA, 80 bp, synthetic construct
  source 1..80: mol_type = other DNA
gctttttttcagatttggggcttctaggtacttcaggggcctgggagatgattgctgaatagttcaaatcaatgcatttc

SEQ ID NO: 10242 - DNA, 80 bp, synthetic construct
  source 1..80: mol_type = other DNA
ctctgaacgggtctctgttacttgcagccaaatgtattctaactagaaggttcaggatgcacttaccatgggccaagcac

SEQ ID NO: 10243 - DNA, 80 bp, synthetic construct
  source 1..80: mol_type = other DNA
tccacctcaagagagagacatgtaagaagaaaggagcacatcccactatgagaggtagagaacaagagaaaagaaatcaa

SEQ ID NO: 10244 - DNA, 80 bp, synthetic construct
  source 1..80: mol_type = other DNA
gcattattggccaagccgctcatctctcattgagaatcagtgctttacttaagaaaagctgcaaatcaaacaacagggct

SEQ ID NO: 10245 - DNA, 80 bp, synthetic construct
  source 1..80: mol_type = other DNA
tcaaatgacccattattattctaatcttgctggcaaaaagtgctagaaagcttgaatttctctttttcggccccttgtgc

SEQ ID NO: 10246 - DNA, 80 bp, synthetic construct
  source 1..80: mol_type = other DNA
catcttgtaattattgcctgttaccctatagaaccgtacaaagtcctgaacgcatggaaagtctcagggactatttgtag

SEQ ID NO: 10247 - DNA, 80 bp, synthetic construct
  source 1..80: mol_type = other DNA
gcataatgggacaggattggttttctggtaactttcactcttagagcaaaacagctgctccagtgctcaatatctaaaga

SEQ ID NO: 10248 - DNA, 80 bp, synthetic construct
  source 1..80: mol_type = other DNA
acattttctgttttctgaaatgcaaacaccactgcttgtgatggatcccttaaagtgcttctgattcacataggtcagca

SEQ ID NO: 10249 - DNA, 80 bp, synthetic construct
  source 1..80: mol_type = other DNA
cctgtggtgaatgaggaaaagtgacaagggggctagagacgtttgtttccttcccagcatgtatcatcatttctcattat

SEQ ID NO: 10250 - DNA, 80 bp, synthetic construct
  source 1..80: mol_type = other DNA
caacagacttgtccaacaggtaacagggaagccttggaaaatagtgatccccacatccccagaaatatacatatacattt

SEQ ID NO: 10251 - DNA, 80 bp, synthetic construct
  source 1..80: mol_type = other DNA
tctctttttttcaaggattaaattaccacgtgcatgtaaatagctcccacatcgatatcttcagccttgacctcttcccc

SEQ ID NO: 10252 - DNA, 80 bp, synthetic construct
  source 1..80: mol_type = other DNA
ttgacctgactccctgccaaaaggcaataagcttattgtttctaaaattccagagctatagtttcctgtctcagagaaac

SEQ ID NO: 10253 - DNA, 80 bp, synthetic construct
  source 1..80: mol_type = other DNA
tgcctagaagtcctcttgagtctttggctaaatattaagttgtgcattcatacagtgagattccacaagactaagcaaag

SEQ ID NO: 10254 - DNA, 80 bp, synthetic construct
  source 1..80: mol_type = other DNA
ttctctgactcactggaaataatgcaaaccatgtaacaatggagcaacagcattaaagtgctatccacctgaaagtatac

SEQ ID NO: 10255 - DNA, 80 bp, synthetic construct
  source 1..80: mol_type = other DNA
aatccccattttgtttctctttatcatctctctactttcatctgctttatcatctctctgctgtcatctctcaagggcaa

SEQ ID NO: 10256 - DNA, 80 bp, synthetic construct
  source 1..80: mol_type = other DNA
aaaatattgaaagcaattacaaaaaggaacaacaatgtaatggcagattgctcatcacaaactatgaaggacacaggaac

SEQ ID NO: 10257 - DNA, 80 bp, synthetic construct
  source 1..80: mol_type = other DNA
ggttaagaaacattggccacaccctagaccacagagcaacacaatggctgtaaagaagaaggactccttgatagctttat

SEQ ID NO: 10258 - DNA, 80 bp, synthetic construct
  source 1..80: mol_type = other DNA
taaagttaagccttggtttccttctgtaggaaaaaagaactggattgcgaatatgctggtggactctttgaactgaatcc

SEQ ID NO: 10259 - DNA, 80 bp, synthetic construct
  source 1..80: mol_type = other DNA
ggggaactgtggttctagtcagtatgaaagtttccaggtgtataccattttgtgctatatgacctggaaaaatatggtct

SEQ ID NO: 10260 - DNA, 80 bp, synthetic construct
  source 1..80: mol_type = other DNA
aagacacaggtcaccttttgccctgctcagtgatgctttgtcatataccctcacccatagatgtatcttagatacacaat

SEQ ID NO: 10261 - DNA, 80 bp, synthetic construct
  source 1..80: mol_type = other DNA
gcattgcatacatctctaaattgctcaggcctctccatagtacatgtaaaatccaaagtcatgtatccactttcctgggt

SEQ ID NO: 10262 - DNA, 80 bp, synthetic construct
  source 1..80: mol_type = other DNA
gaacggaaccataatgatacatgttgtctgaaacacagaacatggtatagcaaggtgtatctactccatggggatgtctg

SEQ ID NO: 10263 - DNA, 80 bp, synthetic construct
  source 1..80: mol_type = other DNA
tatcaaactcatcagtgcctcttaggatggtctatataaattccagcactaaatgaaaagggctcactttaggtgccagt

SEQ ID NO: 10264 - DNA, 80 bp, synthetic construct
  source 1..80: mol_type = other DNA
aaataaagaagagacaatccctggcaatacctgcccaagccaacgtttggaatggggacagttgggtgagattcaataat

SEQ ID NO: 10265 - DNA, 80 bp, synthetic construct
  source 1..80: mol_type = other DNA
gcgcgctggccggtccccatcccggagcccacagctgccgtggaaagcagcagcggcaggagccacaggagcccgatggc

SEQ ID NO: 10266 - DNA, 80 bp, synthetic construct
  source 1..80: mol_type = other DNA
gcacctcggtgccccgcgaccctccgaacagaggcggcgggaggtaccagctgctaccaccgctgccgcccccagagccg

SEQ ID NO: 10267 - DNA, 80 bp, synthetic construct
  source 1..80: mol_type = other DNA
ttacattctcaggacagtccccagaggaaattaaagggaaggaacagaacccaggccaggagaggcttttcctaaatgga

SEQ ID NO: 10268 - DNA, 80 bp, synthetic construct
  source 1..80: mol_type = other DNA
ttcaagaagagttaggtgttgagtacaagagcaaccttcagttgcttagttgccccagtcggggaactgaccctgaggac

SEQ ID NO: 10269 - DNA, 80 bp, synthetic construct
  source 1..80: mol_type = other DNA
ttattctcatcagagttccgcatagtgattcagtcaggactgggaatcaagtccttcgcaggtgggattatcctataaac

SEQ ID NO: 10270 - DNA, 80 bp, synthetic construct
  source 1..80: mol_type = other DNA
tccaataaaaagttaaaagcaacaagcaaaatcagcaaagtggccccttgtgaaatgaggccggtgagttgcaggtttcc

SEQ ID NO: 10271 - DNA, 80 bp, synthetic construct
  source 1..80: mol_type = other DNA
cttccgaagatattttgcagtttgacacatgtgaccctggtattttcctggaaggaggcctttatctgtcattcttccat

SEQ ID NO: 10272 - DNA, 80 bp, synthetic construct
  source 1..80: mol_type = other DNA
ttttctcaatggtcctgcaagtgaggggtatctcctttgggtagatgaagaaacagcttcagagaatgaagcaatgtgcc

SEQ ID NO: 10273 - DNA, 80 bp, synthetic construct
  source 1..80: mol_type = other DNA
tcaagttcccattcctcttaggaagccctccaggggtcctcctggcagcttggaggcagggcatggaatggggatgcctg

SEQ ID NO: 10274 - DNA, 80 bp, synthetic construct
  source 1..80: mol_type = other DNA
aatccatgcaagctccctgtatctaagcctcaccattttcactcacttattatccccactgaaaactggaaagagaggaa

SEQ ID NO: 10275 - DNA, 80 bp, synthetic construct
  source 1..80: mol_type = other DNA
tcatctcctgcttctaagaaacagcacgaatgtcagagtatcttgcacctgctgtttttttaagtgcttttcattcaacg

SEQ ID NO: 10276 - DNA, 80 bp, synthetic construct
  source 1..80: mol_type = other DNA
gacaagcctgcaaatcacagttaccagttcttcaacccgaagtctcacctttcgctgaaagaaagaagaacctcaaatct

SEQ ID NO: 10277 - DNA, 80 bp, synthetic construct
  source 1..80: mol_type = other DNA
gagaagctgtccagcaagttccattctctctactgctgtaaaaccaacctccttggtaactttaaacagccatttaattt

SEQ ID NO: 10278 - DNA, 80 bp, synthetic construct
  source 1..80: mol_type = other DNA
agccattggataaattcttcaaacaccttcgggaccaggggagacagaactattctctttttgaaacttggcatgttgca

SEQ ID NO: 10279 - DNA, 80 bp, synthetic construct
  source 1..80: mol_type = other DNA
aatgtagagagaccccatctctacaaaaaaaattgaaaattagctaggggccgaggcgggtggatcacaaggtcaggaga

SEQ ID NO: 10280 - DNA, 80 bp, synthetic construct
  source 1..80: mol_type = other DNA
cacagcttcagtgacagagcccaagtccaagcacatgtgtctcttctaaagccatctaggacactgcactcttttagaat

SEQ ID NO: 10281 - DNA, 80 bp, synthetic construct
  source 1..80: mol_type = other DNA
atgaggaactggatttggcttttgtaaagtgagtggctaagagcacaggagttgagttttatgttgaaaattcactaatt

SEQ ID NO: 10282 - DNA, 80 bp, synthetic construct
  source 1..80: mol_type = other DNA
aaaccttgaaaaaagattagacgaatggctaactagaataaccaatgtagagaagtccttaaatgacctgatggagctga

SEQ ID NO: 10283 - DNA, 80 bp, synthetic construct
  source 1..80: mol_type = other DNA
atgtaaatgggctaaatgctccaattaaaagacacagactggcaaattggataaagagtcaagacccatcagtgtgctgt

SEQ ID NO: 10284 - DNA, 80 bp, synthetic construct
  source 1..80: mol_type = other DNA
gcagaaggcaagaaataattaagatcagagcagaactgaaggaggtagagacacaaaaatcccttcaaaaaatcaatgag

SEQ ID NO: 10285 - DNA, 80 bp, synthetic construct
  source 1..80: mol_type = other DNA
gtctctgcctggccacccatcgtctgggatgtaaggagcccctctgcctggctgcccagtctggaaagtgaggagcgtct

SEQ ID NO: 10286 - DNA, 80 bp, synthetic construct
  source 1..80: mol_type = other DNA
atgcttgaaggcagcaggctccttaagagtcatcaccactccctaatctcaagtacccagggacacaaacactgcggatg

SEQ ID NO: 10287 - DNA, 80 bp, synthetic construct
  source 1..80: mol_type = other DNA
tagaaaaccccattgtctcagcccaaaatctccttaaagctgataggcaacttcagcaaagtctcaggatacaaaatcaa

SEQ ID NO: 10288 - DNA, 80 bp, synthetic construct
  source 1..80: mol_type = other DNA
agctggatcccttccttacaccttatacaaaaattaattcaaggtggattaaagacttaaatgttagacctaaaaccatc

SEQ ID NO: 10289 - DNA, 80 bp, synthetic construct
  source 1..80: mol_type = other DNA
aaaagaaaattcactaattaggtgtgtgaccttgggtaaagttcaagagcaaagctacacaacttccctaagcctcagtt

SEQ ID NO: 10290 - DNA, 80 bp, synthetic construct
  source 1..80: mol_type = other DNA
gacaactcttcagccaactgaccagaggattcaaaccattaaaatgagcaataagagaaaatcaatacagaaattaaaat

SEQ ID NO: 10291 - DNA, 80 bp, synthetic construct
  source 1..80: mol_type = other DNA
gggtctagccagctcagttagggaataaaaagataagtaaaggcacccacaatggagtacagtaagtaaaactaccacaa

SEQ ID NO: 10292 - DNA, 80 bp, synthetic construct
  source 1..80: mol_type = other DNA
ccagaaataagcccttacacttatggccaattaatttttgacagaagcagcaagacagtttaacagagaaagaatagtct

SEQ ID NO: 10293 - DNA, 80 bp, synthetic construct
  source 1..80: mol_type = other DNA
gaggaagtggtcatgggagtgacagctaaaggatacagtgttccttttgccggggatgaaaatgttctaaaactgatggt

SEQ ID NO: 10294 - DNA, 80 bp, synthetic construct
  source 1..80: mol_type = other DNA
aaagacagatagtaacaagtgctgccaaggatgtggagaaactggaaccctgatgctgctaccggaatgtaagatgatgc

SEQ ID NO: 10295 - DNA, 80 bp, synthetic construct
  source 1..80: mol_type = other DNA
tgggtggctgatgggctgtatccagcctctacaagtgtttgatggatcattattgacttatgagtaaacagagatattct

SEQ ID NO: 10296 - DNA, 80 bp, synthetic construct
  source 1..80: mol_type = other DNA
attccattggatggatgcctcatcattcacttaaacacccagcttccctggacatttaggaggtttctaatttttgtatt

SEQ ID NO: 10297 - DNA, 80 bp, synthetic construct
  source 1..80: mol_type = other DNA
cctagtatgtgaaggacctacaaatctttaagaaggggagtgtcattcactagaaaatgggcaagaagtttgagtactta

SEQ ID NO: 10298 - DNA, 80 bp, synthetic construct
  source 1..80: mol_type = other DNA
ggtgagggtacggacaatgttctgattttttacctggatggtgttcgtacaggtgttttgtacatttttctgcatgtgtg

SEQ ID NO: 10299 - DNA, 80 bp, synthetic construct
  source 1..80: mol_type = other DNA
gtctttaatttctagctgttgcaaaccaagcgacagtgagctttctcacacatctctctgtgctctcatggaagagttac

SEQ ID NO: 10300 - DNA, 80 bp, synthetic construct
  source 1..80: mol_type = other DNA
ttgggtttcctcctttgcttaagaaaaccctttccatcccagtgttacacaaatacttcccccgtaattttgtctaatac

SEQ ID NO: 10301 - DNA, 80 bp, synthetic construct
  source 1..80: mol_type = other DNA
tgggtctgtttccgcactttatgtgttagcctatttttctactcgagaccccagcaccagcttttggttatcataacttt

SEQ ID NO: 10302 - DNA, 80 bp, synthetic construct
  source 1..80: mol_type = other DNA
ccccctacccatcccctcaaacaaattcccctgccctcattgatgacaatatgagaggcttagatgacgatctaaaaaaa

SEQ ID NO: 10303 - DNA, 80 bp, synthetic construct
  source 1..80: mol_type = other DNA
tctccttttggagcttttactccttgcatattacatctgtatctggctttcatgtctgttaatgaaaagagtcacactct

SEQ ID NO: 10304 - DNA, 80 bp, synthetic construct
  source 1..80: mol_type = other DNA
ctgtaacctaactggatgtgtaaacagactgtcacctactctcatagcaagtaaccaagtctcagccaatcacagcggcc

SEQ ID NO: 10305 - DNA, 80 bp, synthetic construct
  source 1..80: mol_type = other DNA
atggggcaagaaggtctttttggtgctgaagaagtattccacatccgtccaagtggactattcacttaagaaaacattaa

SEQ ID NO: 10306 - DNA, 80 bp, synthetic construct
  source 1..80: mol_type = other DNA
aggcaaggcagtagcatgggctactcgactgagcatacttacagtcacttcgtgatcatgtgctaaacaatgagtggatt

SEQ ID NO: 10307 - DNA, 80 bp, synthetic construct
  source 1..80: mol_type = other DNA
tggaagaggtcccagaaccttactggacacagggtcagcctatgatgtgttgactttattttgagtacatcaatctccct

SEQ ID NO: 10308 - DNA, 80 bp, synthetic construct
  source 1..80: mol_type = other DNA
gtgtagggatctttaaatctgcacattgaccctatagggaattttaaaaatcatgtcagtttggcgaaactattccaatc

SEQ ID NO: 10309 - DNA, 80 bp, synthetic construct
  source 1..80: mol_type = other DNA
aagaggacacaaacaaatggaagaacattccatgctcatggataggaagaatcaatatcatgaaaatggccatactccca

SEQ ID NO: 10310 - DNA, 80 bp, synthetic construct
  source 1..80: mol_type = other DNA
acagaatgggaaaaaaattttgcaatctactcagctgacaaaaggctgatatccagaatctacaaacaactcaaacaaac

SEQ ID NO: 10311 - DNA, 80 bp, synthetic construct
  source 1..80: mol_type = other DNA
aatccacaggaacagttggtggactgtgcctttttccgaagatgtctttaagggcatcaatatttaaaggagaacaggct

SEQ ID NO: 10312 - DNA, 80 bp, synthetic construct
  source 1..80: mol_type = other DNA
ggatggaagaagaggtggatgggggatggatggagagatagatgagaaattgatatacggatggatggattcatggatgg

SEQ ID NO: 10313 - DNA, 80 bp, synthetic construct
  source 1..80: mol_type = other DNA
gaagtccagcacagttatattttagggctactggtggattccagtgtatagccaggattaagaacactggcctgtaatgc

SEQ ID NO: 10314 - DNA, 80 bp, synthetic construct
  source 1..80: mol_type = other DNA
cggtgtcctcaaatgaacaatgagacccggccccagctcctccccagggttgtgagattaaaatgggatcgcacacatca

SEQ ID NO: 10315 - DNA, 80 bp, synthetic construct
  source 1..80: mol_type = other DNA
cccgtgctccagacgacccagctacatggatggcagcgtcctgaagggggatgatcggtagggagtgggtgcggaggctc

SEQ ID NO: 10316 - DNA, 80 bp, synthetic construct
  source 1..80: mol_type = other DNA
taaatttgtttggaaaatgtagggtggtatcccatctaaaaatcagacgaggctagaaaatttcaattttatttgctaag

SEQ ID NO: 10317 - DNA, 80 bp, synthetic construct
  source 1..80: mol_type = other DNA
agaaatattttgcctctagatgacatgtaaatatgttcctcctaactccacttcttcctacatctgtggcttcttctgag

SEQ ID NO: 10318 - DNA, 80 bp, synthetic construct
  source 1..80: mol_type = other DNA
ccagtgtctcttgcttatcctaggagttcccccctgtggttgctccagtttgctgccttcatgcatgttcacagggtgat

SEQ ID NO: 10319 - DNA, 80 bp, synthetic construct
  source 1..80: mol_type = other DNA
ttcaacacatgaatttggggagcacaatttagtccacagcagaaaagaaaggggcacagagcattccagcctgaaggaaa

SEQ ID NO: 10320 - DNA, 80 bp, synthetic construct
  source 1..80: mol_type = other DNA
catcaaccgcttcatgcacatgttccagtcttcttggaatgacttcgccgactttgagaaaatctttgtcaagatcagca

SEQ ID NO: 10321 - DNA, 80 bp, synthetic construct
  source 1..80: mol_type = other DNA
tgggcctcgcttttctcctggtagagcgggtcatgaatcactggcaggaagacctgatgtttggctaccagttcctgaat

SEQ ID NO: 10322 - DNA, 80 bp, synthetic construct
  source 1..80: mol_type = other DNA
cccacacactgagagagcatctgtgttcctgagtggactgaattgctagatgtagtaacattgatttggtggctataggt

SEQ ID NO: 10323 - DNA, 80 bp, synthetic construct
  source 1..80: mol_type = other DNA
ctccatgtctcaatcctctgcctctggtgattttttccttaggagggtttccttatgtggaggtaaaaaatgatcaccgg

SEQ ID NO: 10324 - DNA, 80 bp, synthetic construct
  source 1..80: mol_type = other DNA
cctccccagccactgcagacccttccccctctgcttctgcagcacctctcccgaaacacgctcattcccgcccccgcaga

SEQ ID NO: 10325 - DNA, 80 bp, synthetic construct
  source 1..80: mol_type = other DNA
caggccagtcctggtatgccacctttgatgatgatgtgagttcttatgtccaccggagatgaggcaggaggaagagggag

SEQ ID NO: 10326 - DNA, 80 bp, synthetic construct
  source 1..80: mol_type = other DNA
ctaagaaactgaagcagcaggtaaagggacaggtgacctaaaagaagacaaaattgctgggagatccccggagatcccag

SEQ ID NO: 10327 - DNA, 80 bp, synthetic construct
  source 1..80: mol_type = other DNA
aaattagaagaaattgtagaaaataggccaatttccatatagtgattggaaacagacctacacagcgagcagctgagtct

SEQ ID NO: 10328 - DNA, 80 bp, synthetic construct
  source 1..80: mol_type = other DNA
gctaccgcacccggccaactataaagttattttaaaggatatacaatgaactcttaacagtgatttgatattggggagga

SEQ ID NO: 10329 - DNA, 80 bp, synthetic construct
  source 1..80: mol_type = other DNA
ctgctctgtcatgccatttacaaaaataaatctcatcatgtagaggagttgcttagaagaaaaagaaaaaattcagatga

SEQ ID NO: 10330 - DNA, 80 bp, synthetic construct
  source 1..80: mol_type = other DNA
taatctacgagaacacaaggcatttattgcggggaccaaaaaaggagaattgggcagctcactcttaagaccggaactcc

SEQ ID NO: 10331 - DNA, 80 bp, synthetic construct
  source 1..80: mol_type = other DNA
ctagcagccactcagcagaaatgaaagcacaaatgtgtgtgggtagcaacaggagcatagtttgtgatggggaaaaaaat

SEQ ID NO: 10332 - DNA, 80 bp, synthetic construct
  source 1..80: mol_type = other DNA
cccacttttatgcccatgtgtacacaatgcttagctcccacttataaataagaacatgcagtattcgattttctgtttct

SEQ ID NO: 10333 - DNA, 80 bp, synthetic construct
  source 1..80: mol_type = other DNA
gtaatttttgtatatggtgagaggtaggggcccagcgtcattcttctgcatataggtagccagtttttccaacactattt

SEQ ID NO: 10334 - DNA, 80 bp, synthetic construct
  source 1..80: mol_type = other DNA
gttttttttttgttaaggagtaaattatgtgttagaaataatagttttttctaaagactaactttttttaagccttttcg

SEQ ID NO: 10335 - DNA, 80 bp, synthetic construct
  source 1..80: mol_type = other DNA
tgggtacagcaaggaatatctgccttgcagggtcaaagtgaggattaagtgagatagcatgggtaaagcccctagcacac

SEQ ID NO: 10336 - DNA, 80 bp, synthetic construct
  source 1..80: mol_type = other DNA
tgggatttggctcgtccaaaccaaaacctgctgcaagtgcaaagttcacacctgatttttaagacttagaataaggaggt

SEQ ID NO: 10337 - DNA, 80 bp, synthetic construct
  source 1..80: mol_type = other DNA
ccccacatgacagatgctgaagccggagcttagaaagcccagtgtgtcatccagagtcatgcaggttgtaagtaatatgg

SEQ ID NO: 10338 - DNA, 80 bp, synthetic construct
  source 1..80: mol_type = other DNA
gagcaaagaggtaagcattgtacaagtgctggccaggaccctctgaatcattatcatgcttagtaagcatcagaggggtg

SEQ ID NO: 10339 - DNA, 80 bp, synthetic construct
  source 1..80: mol_type = other DNA
gatgaccactgaagttgagacactgtttgggctgcaaatgacaaaacccaactcaaaccagctgcagctggacaagacat

SEQ ID NO: 10340 - DNA, 80 bp, synthetic construct
  source 1..80: mol_type = other DNA
atccctcccccatctcacaggacaagggcttgcacctctgcctgcctggcctcctcgcctcccctggcacatttcctcag

SEQ ID NO: 10341 - DNA, 80 bp, synthetic construct
  source 1..80: mol_type = other DNA
ggctcccttctcaaggccgctgcctcctcccccgccccggttctgcacgcgtactgcaccctcggacagcctcggggcct

SEQ ID NO: 10342 - DNA, 80 bp, synthetic construct
  source 1..80: mol_type = other DNA
ggctttgcacatgtgttcagtatgaccgcacacattcctagcagacaaattccttggtcaaagaatattgatactgaatt

SEQ ID NO: 10343 - DNA, 80 bp, synthetic construct
  source 1..80: mol_type = other DNA
ggcagtcacatctcttcctccgaggccagtacctttccatttattctttgatcttcagggaactgcatagattgatcaaa

SEQ ID NO: 10344 - DNA, 80 bp, synthetic construct
  source 1..80: mol_type = other DNA
taaccaaaatagagttggcacataatacctgtttgtagactcaacagaggtcaaaggcaagcgggaactacctaccaaag

SEQ ID NO: 10345 - DNA, 80 bp, synthetic construct
  source 1..80: mol_type = other DNA
tagccttttgaatatagaacgaaaggaaacagatggcagtgacatgattacactgtgagacattgatgctaactcctgcc

SEQ ID NO: 10346 - DNA, 80 bp, synthetic construct
  source 1..80: mol_type = other DNA
ttaaagctaacttgatgtctggcttgcccaaaggaatggaggatccactaaaatgtccactccatgagagtgtctgtttt

SEQ ID NO: 10347 - DNA, 80 bp, synthetic construct
  source 1..80: mol_type = other DNA
aaatccatactaattaggtaccatttgagtagagatttgaaggaaatgaaggggtaatccatgtggctctgttagggagg

SEQ ID NO: 10348 - DNA, 80 bp, synthetic construct
  source 1..80: mol_type = other DNA
agacaagtaggagaaaagcaggagaatgttgacacgtggctcaagtaacgaagtttcaagaaaaagagtcagagatctga

SEQ ID NO: 10349 - DNA, 80 bp, synthetic construct
  source 1..80: mol_type = other DNA
gggagaaagggaaagagataccttgaaggtggatagtaaaaggatatactaaaatatcaacagaggctagctctggaagg

SEQ ID NO: 10350 - DNA, 80 bp, synthetic construct
  source 1..80: mol_type = other DNA
ttttaagcagttcccttcatggacaaattctaaaggcagggatcacactgcaatagagatggctaagcagtgaaatttgg

SEQ ID NO: 10351 - DNA, 80 bp, synthetic construct
  source 1..80: mol_type = other DNA
tggcaacttcattcatagtctctggataataacacctaccacatcctaactacatgccaggcactgtttaagtgcttttt

SEQ ID NO: 10352 - DNA, 80 bp, synthetic construct
  source 1..80: mol_type = other DNA
agggattcctctcctcaccctccttccttcctgcctctatttctagagctcacgtcacagctaaaggaaaggaaaggtca

SEQ ID NO: 10353 - DNA, 80 bp, synthetic construct
  source 1..80: mol_type = other DNA
atcctccagcctcatcctcccaaagtgctgggattacaggtatgaaccactgtacctggcctagaaggactttttgaggc

SEQ ID NO: 10354 - DNA, 80 bp, synthetic construct
  source 1..80: mol_type = other DNA
tctggagggtttctccagctcagtgttttcctctagacagctggggatagtcatggcaaaggataaaggtttcccaggat

SEQ ID NO: 10355 - DNA, 80 bp, synthetic construct
  source 1..80: mol_type = other DNA
caggactcagctctccaggacgaccgagcctgaacttgaatagtaacatttatggctgtgtagagagccatgcttaggaa

SEQ ID NO: 10356 - DNA, 80 bp, synthetic construct
  source 1..80: mol_type = other DNA
cacctggcggtccagaggagcaccttcctgagtgtcatcaacctcctagaacatcacgcaaatgtccacgcccgcaacaa

SEQ ID NO: 10357 - DNA, 80 bp, synthetic construct
  source 1..80: mol_type = other DNA
aattgtccctgtttatagaataaagctcagcccctaagtgttcttgtccttgactgtggcatgtggaaagagccaggaaa

SEQ ID NO: 10358 - DNA, 80 bp, synthetic construct
  source 1..80: mol_type = other DNA
aaaaaagaaaaaaaacccacaagtcccaaaaccaaaactggtatttcccatgtacattcgaccttaactgttgctcattc

SEQ ID NO: 10359 - DNA, 80 bp, synthetic construct
  source 1..80: mol_type = other DNA
gagcaccaggcaccgtgttatgtatgcaatttgcaaatattatctgattaaatgctcacaataaggctatcagagaggta

SEQ ID NO: 10360 - DNA, 80 bp, synthetic construct
  source 1..80: mol_type = other DNA
gaggtttaataataggtgccaggccaggtggttaatagaagtctggggcattgtagggggacagaggaggatatatgtcc

SEQ ID NO: 10361 - DNA, 80 bp, synthetic construct
  source 1..80: mol_type = other DNA
aaaaaaagaattaaaaaagatttttttaatgaacaaaacaggctcggcacagtggctcatgcctgtaatcccaagcactt

SEQ ID NO: 10362 - DNA, 80 bp, synthetic construct
  source 1..80: mol_type = other DNA
ctcagtttccccatcttcatagtggaattgtattggtgcctacccagagggttgtgtcaacaattaggatggcacctagc

SEQ ID NO: 10363 - DNA, 80 bp, synthetic construct
  source 1..80: mol_type = other DNA
atccctgagcaaacagtgcagtgttgcccatctgtggtttcacattgaactaattatatactcaagtgctgtttaactgt

SEQ ID NO: 10364 - DNA, 80 bp, synthetic construct
  source 1..80: mol_type = other DNA
tagagttctgcagcggtcctggctcctcagggaagcaacacatcggcctccctgagcaccatctcctccttgcacaggtg

SEQ ID NO: 10365 - DNA, 80 bp, synthetic construct
  source 1..80: mol_type = other DNA
ttttttttgagacagggttttgctctgtcacctagtctggagtgtagtggcgctatctgagctaactgcaaactctgcct

SEQ ID NO: 10366 - DNA, 80 bp, synthetic construct
  source 1..80: mol_type = other DNA
aattggttgtggtgatggttgtacagtaaagtgtaaactttaaatgagtaaattgtgaatgatatctcagtaaagctggt

SEQ ID NO: 10367 - DNA, 80 bp, synthetic construct
  source 1..80: mol_type = other DNA
cgaggcagcagtgagctatgatcatgccactgcactccagtctgggcaacagaacgagaccttgtctctaaaaataaaaa

SEQ ID NO: 10368 - DNA, 80 bp, synthetic construct
  source 1..80: mol_type = other DNA
ggactctgcatggagccccagctctcgctaaggtgacgaccaagccattgaatgtgtctgagcagggccagagccctcca

SEQ ID NO: 10369 - DNA, 80 bp, synthetic construct
  source 1..80: mol_type = other DNA
tttcctcccacacctccacggacaggctggttgtggtgatattgtacactgaagtataaaccttaaatgggtaaagtggg

SEQ ID NO: 10370 - DNA, 80 bp, synthetic construct
  source 1..80: mol_type = other DNA
ctggtgactgggaaccttttctcccagccgagttcctgttctgggcttcgctgtgcatgacccatctcagcaggatggcc

SEQ ID NO: 10371 - DNA, 80 bp, synthetic construct
  source 1..80: mol_type = other DNA
tagatgagactcagggggcctggggcctgtcaaatggcctgaccagaactctttaaaaaaagaaaatctaaacaaaaggc

SEQ ID NO: 10372 - DNA, 80 bp, synthetic construct
  source 1..80: mol_type = other DNA
aattcccatcatcacatcatttcattcctaaatagttcaggatatgtcttgaaatcagtgtttcttggctgggtgcagag

SEQ ID NO: 10373 - DNA, 80 bp, synthetic construct
  source 1..80: mol_type = other DNA
ctgtctcctaaaacagaaaacaaatcctccaggaacatctgatgcatgctgaagataaggactctttgaaaacataaagg

SEQ ID NO: 10374 - DNA, 80 bp, synthetic construct
  source 1..80: mol_type = other DNA
accagctgtcactgcaggagctgcagaccatcaggtacggcccatccccttccccatgctgcctcctaggaagtgagcct

SEQ ID NO: 10375 - DNA, 80 bp, synthetic construct
  source 1..80: mol_type = other DNA
ataaataaataaacgaaaaataaatggaagcggagaaaactgggcaagggcaatgagagtcgtagacgggaagggaagag

SEQ ID NO: 10376 - DNA, 80 bp, synthetic construct
  source 1..80: mol_type = other DNA
tttcctgggcgtggtggtacatgcctgtaatcccagctacttgggaggctgagggagaagaatcacttgaacctgggagg

SEQ ID NO: 10377 - DNA, 80 bp, synthetic construct
  source 1..80: mol_type = other DNA
aaattgatttttccagtccatcatgtaattgttccagcgatggaatcctgctttccactcccattctgcttcatcaatat

SEQ ID NO: 10378 - DNA, 80 bp, synthetic construct
  source 1..80: mol_type = other DNA
aaaggggtgtgtaggtaggaatagcgtgaggcagtgaaccactaatggtctatatacttcaagaactttgaaattctgat

SEQ ID NO: 10379 - DNA, 80 bp, synthetic construct
  source 1..80: mol_type = other DNA
ttttcctctttcctctccttcttttcttagtccgcctctctttctttgtcttcttatttcatattggcttgtttattact

SEQ ID NO: 10380 - DNA, 80 bp, synthetic construct
  source 1..80: mol_type = other DNA
gtataaaaagtgtcttaattcataatatcaacaataggtcacatagtatttatccattgacctcagctgatggcatttaa

SEQ ID NO: 10381 - DNA, 80 bp, synthetic construct
  source 1..80: mol_type = other DNA
tcaactgtgcaggggttggtgcccctaacccccagattgtttttccagagtcaactgtttatgcaaacatagatgatatt

SEQ ID NO: 10382 - DNA, 80 bp, synthetic construct
  source 1..80: mol_type = other DNA
tgcagttcctggctcacagtagcagcatataggctctgtaaatgttatcaaattagttgacaaaaaagactttttaaaag

SEQ ID NO: 10383 - DNA, 80 bp, synthetic construct
  source 1..80: mol_type = other DNA
ttcccataaactactattgactttcttcacagaattagaaaaatctactttaaatttaatatgtaaccaaaaaagagcct

SEQ ID NO: 10384 - DNA, 80 bp, synthetic construct
  source 1..80: mol_type = other DNA
tcaaaaagtgggcacataatacgaacagacacttctcaaaagaagacatttatgtggccaacaaatgtatgaaaaaaagc

SEQ ID NO: 10385 - DNA, 80 bp, synthetic construct
  source 1..80: mol_type = other DNA
gaacacatggacacagggaggggaacagtacacactggggccagtcgggggtggagggtgaggggagggagagcattagg

SEQ ID NO: 10386 - DNA, 80 bp, synthetic construct
  source 1..80: mol_type = other DNA
tttatttttcacaattgaggaggctttccagcagattatacttccatctaagatcaagcaacgtagactgttgtctgatg

SEQ ID NO: 10387 - DNA, 80 bp, synthetic construct
  source 1..80: mol_type = other DNA
ccagtcttgctaactgattagcaaatagtagtaaatgattttcaaagtaaccagttcaaagggtattttggcccttaaat

SEQ ID NO: 10388 - DNA, 80 bp, synthetic construct
  source 1..80: mol_type = other DNA
attttcaagacacactgaacctaaccttaagcatggtcctagaccacagctaggtaggtatttccatagagctcagcgtt

SEQ ID NO: 10389 - DNA, 80 bp, synthetic construct
  source 1..80: mol_type = other DNA
agttggatatatgtcatatttgtcagagaagatcaaactaaggtgacacatgtttgatcactcaagtggattgaaatatt

SEQ ID NO: 10390 - DNA, 80 bp, synthetic construct
  source 1..80: mol_type = other DNA
tgactctgtattcaaggttagatatttttgttcagtgcttttgaagacaggccagcttgtgctattgttctgagtctcat

SEQ ID NO: 10391 - DNA, 80 bp, synthetic construct
  source 1..80: mol_type = other DNA
gcactcaataatatattaatgccaaggtcacacaaacaggaactcagagatttttaaaagtggctctacacagtcactac

SEQ ID NO: 10392 - DNA, 80 bp, synthetic construct
  source 1..80: mol_type = other DNA
agctattcaagctaaaccaatatcatagcaagattgaaacctcctgctttagggtattatttgagagaggtcaaggagaa

SEQ ID NO: 10393 - DNA, 80 bp, synthetic construct
  source 1..80: mol_type = other DNA
atcaggttctttttctactttgtggtataccaaaatgctctacagatcacccattagaattttcttcatatgtaggtttg

SEQ ID NO: 10394 - DNA, 80 bp, synthetic construct
  source 1..80: mol_type = other DNA
ttagatgatactaggtgctagtgataataaaatgaggactggggataaatagaaatggcgggtgagtaagtatcagtgtg

SEQ ID NO: 10395 - DNA, 80 bp, synthetic construct
  source 1..80: mol_type = other DNA
ggacagtaagttcacattatttagtgccatgtatgtctttgaaagcattttgtgcctactcagagtaagagagggaagaa

SEQ ID NO: 10396 - DNA, 80 bp, synthetic construct
  source 1..80: mol_type = other DNA
aaactggaagaatgaatgtagttgacattgctgagataggaaagactgcaagaagagcacgtttggaatgcaatatcaag

SEQ ID NO: 10397 - DNA, 80 bp, synthetic construct
  source 1..80: mol_type = other DNA
ttcaattctgtatgtatgtgtattgcaataaaaactgatttaaaatgtttgttgtgctgatatcttcctccaaaaactgc

SEQ ID NO: 10398 - DNA, 80 bp, synthetic construct
  source 1..80: mol_type = other DNA
gtaactatttgttgtggcaatcagacaccctgggacaacttttcagtgtctcacgtgcaaaccattttttaccatgttca

SEQ ID NO: 10399 - DNA, 80 bp, synthetic construct
  source 1..80: mol_type = other DNA
atgaatttggaagcacacaagctttcagcctatagagcagacaaacatgtgtgtgtgcatgtgtgtgtgtgtctgtgtgt

SEQ ID NO: 10400 - DNA, 80 bp, synthetic construct
  source 1..80: mol_type = other DNA
gtggattggaatacatcctcagcttcacagagaatttggatataggtttttatgagaaaaaagaagggaagagaaaggga

SEQ ID NO: 10401 - DNA, 80 bp, synthetic construct
  source 1..80: mol_type = other DNA
gtttccagtgcacagttctcttttagtaatttctttgtattgcacatcttcagttattcatcagctgaaagggcaaagag

SEQ ID NO: 10402 - DNA, 80 bp, synthetic construct
  source 1..80: mol_type = other DNA
tgtacccattttcatcttccagagacaacaaagcaactgttatcatttgaatgcgatcatacgaatcccagaggagtgac

SEQ ID NO: 10403 - DNA, 80 bp, synthetic construct
  source 1..80: mol_type = other DNA
tctaaacaactggtgtggatgttggctaagatattttgaggttgtttgagacctgtttcagaggtatatgagtaaattta

SEQ ID NO: 10404 - DNA, 80 bp, synthetic construct
  source 1..80: mol_type = other DNA
ttttgtctctatttagcgttgtgtttccttccaaatggcacagatttcaacttggaatcatgagaatataattgccttac

SEQ ID NO: 10405 - DNA, 80 bp, synthetic construct
  source 1..80: mol_type = other DNA
atctggacaaggtcattccaatccctgacaactttattcgttactaaatctagttggaaaaatagacctgcattcaggcc

SEQ ID NO: 10406 - DNA, 80 bp, synthetic construct
  source 1..80: mol_type = other DNA
attgcagctaagtcagtcacaggattttgtttcttctgtccaaggcggatgtgccataatgaaaaccgcaaggataatta

SEQ ID NO: 10407 - DNA, 80 bp, synthetic construct
  source 1..80: mol_type = other DNA
ctgcatggtttggaatcaccagctttgcaaccagagtctgctactaaaagctggttgaatttgcatgaagttattcaaat

SEQ ID NO: 10408 - DNA, 80 bp, synthetic construct
  source 1..80: mol_type = other DNA
ccaccgctccggccaatagatgatattttttaaaggaagagtacaggaaaagagaagaaaagagaaataagaactgagct

SEQ ID NO: 10409 - DNA, 80 bp, synthetic construct
  source 1..80: mol_type = other DNA
cctgggctgcagatataactggaagtcatcagtatgtagatgttagttaaggcagtaaaactgactgatatcacccatgg

SEQ ID NO: 10410 - DNA, 80 bp, synthetic construct
  source 1..80: mol_type = other DNA
taaattggctagagacattaatgccaggcaacattaaagaatctcttgagtttaaggtcttgaatttattcacatagtgt

SEQ ID NO: 10411 - DNA, 80 bp, synthetic construct
  source 1..80: mol_type = other DNA
gcatatttgcacactcatatgcacgtaggcagatggaaagacatgtctcttcatatgattctgtaagatctgagatacag

SEQ ID NO: 10412 - DNA, 80 bp, synthetic construct
  source 1..80: mol_type = other DNA
agcggtaagtggtaacctcagtgatggtaggcctgcattttactctacgatatattcatactgactccatagcacctagc

SEQ ID NO: 10413 - DNA, 80 bp, synthetic construct
  source 1..80: mol_type = other DNA
ttgttttcaacaaccagttaccatcagcggcatagtacactcagatatttatttaataatgattgagataaagataaaga

SEQ ID NO: 10414 - DNA, 80 bp, synthetic construct
  source 1..80: mol_type = other DNA
tataaacatgataaataaatatttaatttgaaacgctatgactatagatcgggtgaggtggctcattcctgtaatctcag

SEQ ID NO: 10415 - DNA, 80 bp, synthetic construct
  source 1..80: mol_type = other DNA
tatgtggtcctcttgagggattggatggacaacattaagccaatataagcaaacgtatttaaatccaagtataaaaccat

SEQ ID NO: 10416 - DNA, 80 bp, synthetic construct
  source 1..80: mol_type = other DNA
ataaatatctgataacaagtgttagttatcttcagttacacccagtgtgaggtaaggatattcttctgttcaagttgtga

SEQ ID NO: 10417 - DNA, 80 bp, synthetic construct
  source 1..80: mol_type = other DNA
catggatggataacaagttgtatgtagatgtgcctaagagagcagtgtaagtgtgtgtgtggaatgaaagaatgtgtgat

SEQ ID NO: 10418 - DNA, 80 bp, synthetic construct
  source 1..80: mol_type = other DNA
atctgaaggctgtatactaaagactgtgaatactgaccttcaagaacagacggaggaccacctgaattacatcaggaata

SEQ ID NO: 10419 - DNA, 80 bp, synthetic construct
  source 1..80: mol_type = other DNA
taggatttttacatttttctaattactctatcatcattacttttggtttgaagcattccatgagagtccttttttttcct

SEQ ID NO: 10420 - DNA, 80 bp, synthetic construct
  source 1..80: mol_type = other DNA
ctgacgccaaagttgatggagaaagcaagattaggatttgtacatcccagaaatacagtaatttttcgtaagtgttaggt

SEQ ID NO: 10421 - DNA, 80 bp, synthetic construct
  source 1..80: mol_type = other DNA
atattacttacagtatgtatctggaataatgtcaggcatattacatatagtttctcaaatttccataacagccaaggaga

SEQ ID NO: 10422 - DNA, 80 bp, synthetic construct
  source 1..80: mol_type = other DNA
ttataatcactgtaccattcccatcagttcacaatcatgttgcaatattccccatgaaaaagcaaggccaatcgaaaaca

SEQ ID NO: 10423 - DNA, 80 bp, synthetic construct
  source 1..80: mol_type = other DNA
tctatgatcatttctcaactggattgctgtaataacctcctagttcttctgtacacttcatgcttgtgtacctaccagtc

SEQ ID NO: 10424 - DNA, 80 bp, synthetic construct
  source 1..80: mol_type = other DNA
gtctatctgagggaatgctgaagaatcagaagcatcttgttttattaaatgttatactgctttacaattacagctacaga

SEQ ID NO: 10425 - DNA, 80 bp, synthetic construct
  source 1..80: mol_type = other DNA
ctatgtggcaaacatggcttcaaaatcaagctattttcctctaatgccatgctcttttgatgcatcatgctatgttggaa

SEQ ID NO: 10426 - DNA, 80 bp, synthetic construct
  source 1..80: mol_type = other DNA
ttctgacaggtcttttgaagcattacatctgtgtgtacattcctgaaattattactttgatttctaaaaaaatgatttat

SEQ ID NO: 10427 - DNA, 80 bp, synthetic construct
  source 1..80: mol_type = other DNA
tgcattttgtaagcatacttaatgactgcttttaagaattcatggtgaaggcagcctggcgaatgtataatacaaggaaa

SEQ ID NO: 10428 - DNA, 80 bp, synthetic construct
  source 1..80: mol_type = other DNA
atttggcttagcatgtaattgtcttacccactccccattacaaaaatcaagaactgttctcatttacttttttccagatc

SEQ ID NO: 10429 - DNA, 80 bp, synthetic construct
  source 1..80: mol_type = other DNA
ctcataacccaagtttaatttcaccaattttctgtaccactgggatagtattgacaacatttcattaagttctggttgac

SEQ ID NO: 10430 - DNA, 80 bp, synthetic construct
  source 1..80: mol_type = other DNA
tttttttttaatgtagagatggactctctcactttgttgctcaggctagtctataactttgggcttcaagcagtcctcct

SEQ ID NO: 10431 - DNA, 80 bp, synthetic construct
  source 1..80: mol_type = other DNA
taccaaactttataagtgaaattagcaagcttgcatgacgtagaaaatcaagtgtatatttagatactagcaaaatctaa

SEQ ID NO: 10432 - DNA, 80 bp, synthetic construct
  source 1..80: mol_type = other DNA
tgaatataagaattcttacaagtcaatgagagataaacccaataaaaattggcaaaagacttaaacatttcaaaatagaa

SEQ ID NO: 10433 - DNA, 80 bp, synthetic construct
  source 1..80: mol_type = other DNA
gcaaagaggtggggggggactttattctgaggcaatggaattatgctttatctttatggagttgtacatattggtaaaaa

SEQ ID NO: 10434 - DNA, 80 bp, synthetic construct
  source 1..80: mol_type = other DNA
ggtctgttatatgggtgccataaacaaggcatttaacacatctgattctttgtgttctccattgtgaaatgagaaaatat

SEQ ID NO: 10435 - DNA, 80 bp, synthetic construct
  source 1..80: mol_type = other DNA
gaaacatacatacagtaacatgaaatacaaagaattccaaatggagggtggaaaagaacaccagaaagcaataatgtaac

SEQ ID NO: 10436 - DNA, 80 bp, synthetic construct
  source 1..80: mol_type = other DNA
gtctttatactaaagtctaccccagagaccaagcaaagctaagcaaaacggatcaaaccaagccagagaacaatgacaaa

SEQ ID NO: 10437 - DNA, 80 bp, synthetic construct
  source 1..80: mol_type = other DNA
ggatttccaccaaaggctgctatatttttttgaacccactgaagagccaactgttgatcaaataaacccatgttccctgg

SEQ ID NO: 10438 - DNA, 80 bp, synthetic construct
  source 1..80: mol_type = other DNA
tgttacttctgactatatgtacagctccaccaaaaaagcagtaaacagtagtctacctacatcagatataatttctgcct

SEQ ID NO: 10439 - DNA, 80 bp, synthetic construct
  source 1..80: mol_type = other DNA
aattaaaaatcagatttggaaactctgtgacaaagagggacagcaaaatgtgatgcaaatatcatttaaatgaactaatg

SEQ ID NO: 10440 - DNA, 80 bp, synthetic construct
  source 1..80: mol_type = other DNA
aagtgtactcacgcaaacttagatgccatagcctaccacacctttaggctatatggtataggctgttgcatctaggctac

SEQ ID NO: 10441 - DNA, 80 bp, synthetic construct
  source 1..80: mol_type = other DNA
ttgtacccattctccctcttgcctagctcagtcaatgttcttctaagtctaatgcaaaagccatctattttttccttgat

SEQ ID NO: 10442 - DNA, 80 bp, synthetic construct
  source 1..80: mol_type = other DNA
aaattctggtgcaattggatactgtctcacatgattctgagagaacatagtagcataaacattatcataaaaatggggca

SEQ ID NO: 10443 - DNA, 80 bp, synthetic construct
  source 1..80: mol_type = other DNA
aggttgctatctattcaattacaattctcttaacatctgggaccgtctaattttggtaagaatgagcagatgctggcaag

SEQ ID NO: 10444 - DNA, 80 bp, synthetic construct
  source 1..80: mol_type = other DNA
agagttgaataaattcattattttctcagcagttaaataaacaaagtctgcgttccctgaataataggaagatttgatgc

SEQ ID NO: 10445 - DNA, 80 bp, synthetic construct
  source 1..80: mol_type = other DNA
ggccggaggggagccaagtgttcctgttccaggactgcagaactggcccagacctctgtattggaaaggtctttatggac

SEQ ID NO: 10446 - DNA, 80 bp, synthetic construct
  source 1..80: mol_type = other DNA
gcagatggagcgcaaaaagtcccagcacggcgcgggctcgagcgtgggggatgcatccaggcccccttaccggggacgct

SEQ ID NO: 10447 - DNA, 80 bp, synthetic construct
  source 1..80: mol_type = other DNA
aggggttatatgacacgtttgtgaaacctgagatatgctagctgctcctaggccatagaagtgtcaggtttgcttgctaa

SEQ ID NO: 10448 - DNA, 80 bp, synthetic construct
  source 1..80: mol_type = other DNA
tgaatgtgcttggtttgtcaaaatcctcttcaaacgagtgaggctatttttggctcttagagctgctgcctttttgtggt

SEQ ID NO: 10449 - DNA, 80 bp, synthetic construct
  source 1..80: mol_type = other DNA
gcaaaattgatcgggaaatatagcaatttcccacatactccctacccctacacccccacagcctccccagttaacatctc

SEQ ID NO: 10450 - DNA, 80 bp, synthetic construct
  source 1..80: mol_type = other DNA
ttacaggtaaagacacaactgggaagcggcaaggctgggattctgggtctctgtgtgaatgcagagctgttccgtttggc

SEQ ID NO: 10451 - DNA, 80 bp, synthetic construct
  source 1..80: mol_type = other DNA
aacaaaagttactgtcttaacccttttaaattgtttctttgggtaaggccagtcaagtgaagcaggggaacattttaacc

SEQ ID NO: 10452 - DNA, 80 bp, synthetic construct
  source 1..80: mol_type = other DNA
tggttcatttctgggtgtcccagggagcctggttctgagctttacacatagcacatactggaagagcccttcctcctttt

SEQ ID NO: 10453 - DNA, 80 bp, synthetic construct
  source 1..80: mol_type = other DNA
tagatcaaattttacaagcgttctctggttcaggaaggctgacttgttttgggaacagaatggagcattctgaaacattt

SEQ ID NO: 10454 - DNA, 80 bp, synthetic construct
  source 1..80: mol_type = other DNA
gccactgcgcccggctaaaatttatattataagatgcaccattttctccatttttaagtgtacagttcagtggcattaag

SEQ ID NO: 10455 - DNA, 80 bp, synthetic construct
  source 1..80: mol_type = other DNA
ctctgcacatggtctttttctctgtgcatgaactcccctggcatctctctgtgtccaaatttcccttctttttttgtttt

SEQ ID NO: 10456 - DNA, 80 bp, synthetic construct
  source 1..80: mol_type = other DNA
ttcgtgtgctgccatctctctccacatccaaaaagtaggggtgggaacaggtcattgctaaggttctttcgttagcttct

SEQ ID NO: 10457 - DNA, 80 bp, synthetic construct
  source 1..80: mol_type = other DNA
ttggctttggagattatcccgctggttctgtttccttctttgctggtgattggtactccctggctcacccttagagaact

SEQ ID NO: 10458 - DNA, 80 bp, synthetic construct
  source 1..80: mol_type = other DNA
ccctctcattttgcaaatctccaagatagggatttcctgactcttgatagctccttctgggacactttggtaaggcttct

SEQ ID NO: 10459 - DNA, 80 bp, synthetic construct
  source 1..80: mol_type = other DNA
ggagttcttacattttgaaggttatgcaatggactgcatgtttggatccatctgcaaattccccttttggggagaggctg

SEQ ID NO: 10460 - DNA, 80 bp, synthetic construct
  source 1..80: mol_type = other DNA
gagacatggattgttacctgaaacctacttttcagatggtcttgatgtgaaaactgttgccaggctgggcgtggtggctc

SEQ ID NO: 10461 - DNA, 80 bp, synthetic construct
  source 1..80: mol_type = other DNA
cgcctgtaatcccagctactcaaggaggctgtggcaggagaattgtttgaacccgagaggcaggggttgcagtgagccaa

SEQ ID NO: 10462 - DNA, 80 bp, synthetic construct
  source 1..80: mol_type = other DNA
ttagtagtgttaagcctctagtgttttataagtggcagagttgatgggaaaacactgatcttcaggaggggttttttcag

SEQ ID NO: 10463 - DNA, 80 bp, synthetic construct
  source 1..80: mol_type = other DNA
atgcatttctcaacatatccccttttaagcaaggtatggctttatctaataaaatataaatgctttgtaaatagttgtta

SEQ ID NO: 10464 - DNA, 80 bp, synthetic construct
  source 1..80: mol_type = other DNA
gagagaaagaagtgggggagtttatgttgcggaaaggctaaaaggaagtgactgttaggaggttatgggataaaggacag

SEQ ID NO: 10465 - DNA, 80 bp, synthetic construct
  source 1..80: mol_type = other DNA
gtttcctctctcatggcatttctttagtggccagatggtgtgagtggctccagaagactcttctcttctctgtgcaagag

SEQ ID NO: 10466 - DNA, 80 bp, synthetic construct
  source 1..80: mol_type = other DNA
tggacatcaaaggctggagcaggacttcctcctagggaacatcctcagatatgtagatgtcaccgtgtgggctcagacat

SEQ ID NO: 10467 - DNA, 80 bp, synthetic construct
  source 1..80: mol_type = other DNA
aggtccctactctggctgcccatgtagttaaaaagtcacacacgtgcgcagctggtctgattaatgagtttgttttttga

SEQ ID NO: 10468 - DNA, 80 bp, synthetic construct
  source 1..80: mol_type = other DNA
tggcatctcaagaggggagcagatgaagagtcatggggaaggttcctgtgcagtatgaggaaggtttaattttcttgcca

SEQ ID NO: 10469 - DNA, 80 bp, synthetic construct
  source 1..80: mol_type = other DNA
tgttttactgtgtttcagaaccccttcctttttaagcttgagtaataattcaattgtttgtgtgtgtgtgtgtgtgtgtg

SEQ ID NO: 10470 - DNA, 80 bp, synthetic construct
  source 1..80: mol_type = other DNA
gttctttgtcagcgctgtggttcttggtagggaaagaacttactgtccccttgtctgttgtgaagtttgctagtttattg

SEQ ID NO: 10471 - DNA, 80 bp, synthetic construct
  source 1..80: mol_type = other DNA
agcaaattatttggaaatccctcttggtggatgtcccaaagcagccttcctgtaggatcctggttgtgtctggcttcctg

SEQ ID NO: 10472 - DNA, 80 bp, synthetic construct
  source 1..80: mol_type = other DNA
tgaccagatagtaactaattttatgtttgtggctgagaggcaaaatcgatgctactttgtggatacttacataaccattt

SEQ ID NO: 10473 - DNA, 80 bp, synthetic construct
  source 1..80: mol_type = other DNA
taccaaaaaacccttccacattgagagaacagggtgttaaaactcagaaaccttttcaagccccaagatgagcaaacttg

SEQ ID NO: 10474 - DNA, 80 bp, synthetic construct
  source 1..80: mol_type = other DNA
aagacattaaggagaggatggcccattagttggatcttgaatggactcaaaaggagtatattgtaatcccagtactttgg

SEQ ID NO: 10475 - DNA, 80 bp, synthetic construct
  source 1..80: mol_type = other DNA
ccacttaccaggcccagagcatgcatggtggactgtgggagatagtcattgggatttttcatttgattttatgttttttt

SEQ ID NO: 10476 - DNA, 80 bp, synthetic construct
  source 1..80: mol_type = other DNA
ttaaagctgaataatattccattggtagacacacattttgtttatccatctctctgccagtagacacttgggttgcctcc

SEQ ID NO: 10477 - DNA, 80 bp, synthetic construct
  source 1..80: mol_type = other DNA
tgggcaacaaagtgagaccccatctctacaaaaaaatttgaaaattagctgggcatggtggcatggacctatagtcctgg

SEQ ID NO: 10478 - DNA, 80 bp, synthetic construct
  source 1..80: mol_type = other DNA
ctgcctctgtggatttgtcttttctgggcttttcataaatgggatcacatggtacatagcttttggtgacagagttctta

SEQ ID NO: 10479 - DNA, 80 bp, synthetic construct
  source 1..80: mol_type = other DNA
gaaactgcactctctgacctctgcaaggggactgctgctttcccatgagcttctcctctttccgttgctggtttcttctt

SEQ ID NO: 10480 - DNA, 80 bp, synthetic construct
  source 1..80: mol_type = other DNA
gctttaacttgattcctgggaggctgccggcctcaaaaaggacaaggactggcaatcagatgggcattctctctaatttg

SEQ ID NO: 10481 - DNA, 80 bp, synthetic construct
  source 1..80: mol_type = other DNA
gcacctagcgtggctgctggcatgccctgagtgcttaataacatttgttattctcattttattgttgttatcgtagttgc

SEQ ID NO: 10482 - DNA, 80 bp, synthetic construct
  source 1..80: mol_type = other DNA
tccaaacctgcatttggaaggggtcaaagtaggctgggctttgtttttactttttctttttaaattatgatgaactatac

SEQ ID NO: 10483 - DNA, 80 bp, synthetic construct
  source 1..80: mol_type = other DNA
ccaggaatttcccctttcctgtaaacatgggtcattttctagaattaccacgttccctttaattttgccatgtttaggaa

SEQ ID NO: 10484 - DNA, 80 bp, synthetic construct
  source 1..80: mol_type = other DNA
ttagcttggtagacgattctgtcatcatccgatggtaaggatgaaaatgaattagcaacgtggaacattgtcataagtgg

SEQ ID NO: 10485 - DNA, 80 bp, synthetic construct
  source 1..80: mol_type = other DNA
agggaagtgggtggggaacatggaattgtcaatccttcaggctccttttgaaggtcattgttttcctaaacagatggtta

SEQ ID NO: 10486 - DNA, 80 bp, synthetic construct
  source 1..80: mol_type = other DNA
caccgggtttaaactttttacttgctagccatagagctcttaatcagacaatatccaggggaacccccattatgtaaggc

SEQ ID NO: 10487 - DNA, 80 bp, synthetic construct
  source 1..80: mol_type = other DNA
cattttcaagctctgttccttatgttagacgatgttgttttagcacaaagcctccccccggatcccaagcctctccccac

SEQ ID NO: 10488 - DNA, 80 bp, synthetic construct
  source 1..80: mol_type = other DNA
tcagtggctataactgtcttggagcagcatttgcttccaggttgggttcaggtatgaagtgctgaaaacatgggaatccc

SEQ ID NO: 10489 - DNA, 80 bp, synthetic construct
  source 1..80: mol_type = other DNA
ccttctgattacctcctggttcagcttccttgacaacaaactagaattgcttcagatgcaatacttcattcttcctagtg

SEQ ID NO: 10490 - DNA, 80 bp, synthetic construct
  source 1..80: mol_type = other DNA
cactatgtgctttgttcacttctacatccacagtgcctaaaacaatgccagcacgtagtaggtgctcagttaatgcttgc

SEQ ID NO: 10491 - DNA, 80 bp, synthetic construct
  source 1..80: mol_type = other DNA
ttagtgcgcacagttctggatttggggaagtttgagatcaaggcacctacagattacatgttagataagggctccctgct

SEQ ID NO: 10492 - DNA, 80 bp, synthetic construct
  source 1..80: mol_type = other DNA
acagacaggagtgcccttatctcacccgctggtttggagggacagtttatctctcttttccacatggtctaaaggaagct

SEQ ID NO: 10493 - DNA, 80 bp, synthetic construct
  source 1..80: mol_type = other DNA
agcaagtgttcttatagatgtctctggtcgtcttggccactggctcggagacagccaccgagacccggcatttggagcag

SEQ ID NO: 10494 - DNA, 80 bp, synthetic construct
  source 1..80: mol_type = other DNA
gcctgaaacacgctttgagccttcatttttgttttcttcccagtggccttatttttacactgtttgatttcttaaggctg

SEQ ID NO: 10495 - DNA, 80 bp, synthetic construct
  source 1..80: mol_type = other DNA
atgtataacatttggctgctttcatgctatgatgacaaggttgagtagttgagacagatgccatgtggcttgcaaagctg

SEQ ID NO: 10496 - DNA, 80 bp, synthetic construct
  source 1..80: mol_type = other DNA
aggagctttggaaaggagaaacatttgtaagtctattttcagctttcagctgcatggtgacacagggcattggccttgat

SEQ ID NO: 10497 - DNA, 80 bp, synthetic construct
  source 1..80: mol_type = other DNA
aaaacatactaccttatagttctggccagaagcttaaaagaggccttatagggctaagtcttagttttccttcatctgag

SEQ ID NO: 10498 - DNA, 80 bp, synthetic construct
  source 1..80: mol_type = other DNA
gttgcttagttctctgtcaagtaattttgggttatatcctggacatcttgagtgtaatattatgagactccggaccctgt

SEQ ID NO: 10499 - DNA, 80 bp, synthetic construct
  source 1..80: mol_type = other DNA
gtgcccatgctgggaggcaaaattccaaaaactggaaaaccagaaaaatcactgccaaggtgtccttaaagtcctgcaat

SEQ ID NO: 10500 - DNA, 80 bp, synthetic construct
  source 1..80: mol_type = other DNA
atagtgctgtgttgggattagcagtaaacagtttggcatgtggtagatgctcgggaaatggaagctgcccttttttccta

SEQ ID NO: 10501 - DNA, 80 bp, synthetic construct
  source 1..80: mol_type = other DNA
agcccaggggcttgctctccatgtagtaactaataccttagtgtgatcctctaattttctgttgctttcttgcttccatg

SEQ ID NO: 10502 - DNA, 80 bp, synthetic construct
  source 1..80: mol_type = other DNA
tgagggaagaaaaggtgctctaatagcttcagcctggacttgggtccagagctttggatagaagcatctttccagacaat

SEQ ID NO: 10503 - DNA, 80 bp, synthetic construct
  source 1..80: mol_type = other DNA
aattctattatgtgtcctatcagctagtaaaggaggggagcttgccttgagttgtgtttttctgcgaccctgtgtgtttg

SEQ ID NO: 10504 - DNA, 80 bp, synthetic construct
  source 1..80: mol_type = other DNA
aaaaccagggtcagctcgagactatgacccagttcccatttcacctcctgggtcttctccaggttctgtggggttttttg

SEQ ID NO: 10505 - DNA, 80 bp, synthetic construct
  source 1..80: mol_type = other DNA
tgaacatttattctgtgtgctgtaaggggcatctcagagtgccacccccacatctccaaagctgctggaccttgcatatg

SEQ ID NO: 10506 - DNA, 80 bp, synthetic construct
  source 1..80: mol_type = other DNA
tggctctggcagggggtagctgtggaggcaagagtgttgggcagggtgacctgattgagccaagctgttattcttccacc

SEQ ID NO: 10507 - DNA, 80 bp, synthetic construct
  source 1..80: mol_type = other DNA
tgcatcccccagaagccaggcaagaggaggtcataaggtttttctggaaaggagcgaaagagtgcgctgctaaatgttgc

SEQ ID NO: 10508 - DNA, 80 bp, synthetic construct
  source 1..80: mol_type = other DNA
cctccttcttagctgtggagctcagggtatgttggttccacgtccaaaccttcaaccttcatctgtaaaatggggtactg

SEQ ID NO: 10509 - DNA, 80 bp, synthetic construct
  source 1..80: mol_type = other DNA
ggaaatatgagattgagatgttggctgggttggatccttataggtggcagttttcaagttcacatgacattctccctata

SEQ ID NO: 10510 - DNA, 80 bp, synthetic construct
  source 1..80: mol_type = other DNA
agaactttttcatattctccacactgaaactccactaaacgctaactccctcctcccctcctgtccagcacctcacaacc

SEQ ID NO: 10511 - DNA, 80 bp, synthetic construct
  source 1..80: mol_type = other DNA
ggcactgttcccacgccatcctcctttgaagggcactacccatcttccctgtcttgccccttcccaccctcttcccaggg

SEQ ID NO: 10512 - DNA, 80 bp, synthetic construct
  source 1..80: mol_type = other DNA
ggggcagtaaattcttgagcagtcactgggagatatatgaggggtgtaaacctggtggaagataagggttactttgttaa

SEQ ID NO: 10513 - DNA, 80 bp, synthetic construct
  source 1..80: mol_type = other DNA
atcatcagtggccaatgatttagtcttgcctacctagtggaacctccatgaaaacactacacagtgaggttcagagagct

SEQ ID NO: 10514 - DNA, 80 bp, synthetic construct
  source 1..80: mol_type = other DNA
acatctgcaaaaagactctttccaggtaaggtcgcattcgcagattctagggttaggatatgaacgtgttcctttggggg

SEQ ID NO: 10515 - DNA, 80 bp, synthetic construct
  source 1..80: mol_type = other DNA
gaggcacactcggcttgtggaggaaaacggctgactagtgcccccagaaaatcgccagcaaagttgaccttctggtgatt

SEQ ID NO: 10516 - DNA, 80 bp, synthetic construct
  source 1..80: mol_type = other DNA
ctttctgtctttatgggtttacgtattgtggggatttaatatcaatggagtcatacaacatgtggcactttgtgactggc

SEQ ID NO: 10517 - DNA, 80 bp, synthetic construct
  source 1..80: mol_type = other DNA
ttcaaagatttgggtcttttttgctgtcagaggaacttacctccctgaagcactacgggtattccctgaccttacctgag

SEQ ID NO: 10518 - DNA, 80 bp, synthetic construct
  source 1..80: mol_type = other DNA
gtgcttctcccttcttctgtcagtggacattgggttctttccacctcttccttcccatgttgtgatgaatatgggtgtgc

SEQ ID NO: 10519 - DNA, 80 bp, synthetic construct
  source 1..80: mol_type = other DNA
gggggcaggagccaggcctcccaattggttctggctcttgggagatggtggctttcaaaatgccaaataatgtactttat

SEQ ID NO: 10520 - DNA, 80 bp, synthetic construct
  source 1..80: mol_type = other DNA
ctgaaaataaaatcacgggtggggggtggtgctttgtgtacttaggggagctcaggtgtgaaaaactgcgttttgaaaaa

SEQ ID NO: 10521 - DNA, 80 bp, synthetic construct
  source 1..80: mol_type = other DNA
ttggagactagcctaggcaccttagcgagtcaacgtctctgttaaaattaataaatgaagtcaagaaaggtgaggcatgg

SEQ ID NO: 10522 - DNA, 80 bp, synthetic construct
  source 1..80: mol_type = other DNA
ggtgtgtgtggtggcagttgtaaactcctgaatgaacaccaaggtcacctctgctggtaacctttgggcagggctgctta

SEQ ID NO: 10523 - DNA, 80 bp, synthetic construct
  source 1..80: mol_type = other DNA
gggcaggtgtgcaaggtgcaaggaccgttcctgacatcaagacggtaacggtaacattttgggtttccctttctttttct

SEQ ID NO: 10524 - DNA, 80 bp, synthetic construct
  source 1..80: mol_type = other DNA
tggagattccaagggttttaggacctgcatgccaggaaagtagagggtgggatatgcaaagatcaaatatacatttctta

SEQ ID NO: 10525 - DNA, 80 bp, synthetic construct
  source 1..80: mol_type = other DNA
gaccagagcctttcctgtgaattttcacttgaccctcattaataattcttggcctttctgtcacttccactttacaaagg

SEQ ID NO: 10526 - DNA, 80 bp, synthetic construct
  source 1..80: mol_type = other DNA
agagagagatggacttttccccatttctgtaaggaagctccagaagtgtatcttctcactgagctgcttttttctggggc

SEQ ID NO: 10527 - DNA, 80 bp, synthetic construct
  source 1..80: mol_type = other DNA
agccatgcaacaagccatgcaaatgtcatctttcatttctgatctttggtttgaagacatggctgtcgcttcctaggaca

SEQ ID NO: 10528 - DNA, 80 bp, synthetic construct
  source 1..80: mol_type = other DNA
ctggtagccagctgacaacagttttattcacctgttctctgttggcttttcctgcttggttgtcacaagcccagtttgtt

SEQ ID NO: 10529 - DNA, 80 bp, synthetic construct
  source 1..80: mol_type = other DNA
aagatccactcattgatttattaaatgaatcttaattgagcacctgggtgttctgggcactgtgctagacagggaagttc

SEQ ID NO: 10530 - DNA, 80 bp, synthetic construct
  source 1..80: mol_type = other DNA
ggcatgtgtggcagcgcctggagacattgtggctgccacacctcgggggagagggtgttactcacatacgataggtagag

SEQ ID NO: 10531 - DNA, 80 bp, synthetic construct
  source 1..80: mol_type = other DNA
ctcctggcctcaggtgatctgcccgcctcggcctcccaaactgctgggattacaggcgtgagacattgagcctggacccc

SEQ ID NO: 10532 - DNA, 80 bp, synthetic construct
  source 1..80: mol_type = other DNA
cctggcccagcctgctccgcaccaaactctgtttcgtggtctggcaagagtaagggtggccctggtgttgccagatgacc

SEQ ID NO: 10533 - DNA, 80 bp, synthetic construct
  source 1..80: mol_type = other DNA
cacctctcagccggtgctgacgagtcagcagatcgagaccatcttcttcaaagtgcctgagctctacgagatccacaagg

SEQ ID NO: 10534 - DNA, 80 bp, synthetic construct
  source 1..80: mol_type = other DNA
gcaggaggctgtattttgatacatgctgccccctccatctttgaagcccccccacccccgtttctccgtgtgtgtgtcag

SEQ ID NO: 10535 - DNA, 80 bp, synthetic construct
  source 1..80: mol_type = other DNA
ggagatgcagtcagatgccctggatgcagctagaggatgatgctttgtacatatcccaggctaatttcatcctggcctac

SEQ ID NO: 10536 - DNA, 80 bp, synthetic construct
  source 1..80: mol_type = other DNA
cctccttctatagcgttgtacggctgtgggaccggcaccaaagggcctgcccgcacaccttcccgctgacgtcgacccgc

SEQ ID NO: 10537 - DNA, 80 bp, synthetic construct
  source 1..80: mol_type = other DNA
attccgaaatcactcagagacttttttaaaactttaatatctgaggaacactggaatttaactttggaaggtttccgctg

SEQ ID NO: 10538 - DNA, 80 bp, synthetic construct
  source 1..80: mol_type = other DNA
ggtttaagatcatgttatgtacttggttgtcccatctctctagtctccttccatctgtaccagttccttagactttgctt

SEQ ID NO: 10539 - DNA, 80 bp, synthetic construct
  source 1..80: mol_type = other DNA
tccctgtcctgcttataaccatctgccattactttgcttgtgtgtgttcatgcatgtgtttatcaggcactgtcctgtta

SEQ ID NO: 10540 - DNA, 80 bp, synthetic construct
  source 1..80: mol_type = other DNA
agtgtgtgtctgagctggaggtgcagtgaggagatctattattgccattggtttaataaagaacaaacaacacctctcgc

SEQ ID NO: 10541 - DNA, 80 bp, synthetic construct
  source 1..80: mol_type = other DNA
gaacagagtgcaccagatcaagatctggtcgtgaaccccagctgtttccagattctgttgggttcgttgcgtcagccctg

SEQ ID NO: 10542 - DNA, 80 bp, synthetic construct
  source 1..80: mol_type = other DNA
agtgaccttgacaaatcagggacctgatcttttaagaacaggttacagttaagcgggcaagttcaagtccacccagacag

SEQ ID NO: 10543 - DNA, 80 bp, synthetic construct
  source 1..80: mol_type = other DNA
cagatatacagaagaacagtcactgcgagggctgttaaactctcaggaaaggtaccaaagtgcatggcagcgtttggccc

SEQ ID NO: 10544 - DNA, 80 bp, synthetic construct
  source 1..80: mol_type = other DNA
gtgtgaacatgcgcttttctctctgcagaacctgagagccagaagcaacaaagatgccaaggatccaacgaccaagaact

SEQ ID NO: 10545 - DNA, 80 bp, synthetic construct
  source 1..80: mol_type = other DNA
ttccctatctgcaaaatgaaaatagcgatgagtgccttatgctggttgtgggagtcttgtgaagaacatacttggcatgt

SEQ ID NO: 10546 - DNA, 80 bp, synthetic construct
  source 1..80: mol_type = other DNA
agctctctcttgtccctccacaaagagttactccacgcaaaatgtccacagtgctgaggttgagaaaccctgccctagat

SEQ ID NO: 10547 - DNA, 80 bp, synthetic construct
  source 1..80: mol_type = other DNA
taaaaaacagttaacatcgggtttaaggattagaaagtggggttcgtggtttgtgtctgtgacgtgagactggttgaagc

SEQ ID NO: 10548 - DNA, 80 bp, synthetic construct
  source 1..80: mol_type = other DNA
ccacctcatcgggcacctgggctgtcaaatgggcatgatttagtggcagtcctcgccatccgtgttggctccttggcagt

SEQ ID NO: 10549 - DNA, 80 bp, synthetic construct
  source 1..80: mol_type = other DNA
aatcctagtactttgggaggccgaggcaggcggatcaccaggtcagaagtttgagaccatcctggctaacacgataaaac

SEQ ID NO: 10550 - DNA, 80 bp, synthetic construct
  source 1..80: mol_type = other DNA
atttgcagccaggggcagggcctgaacttttctcagttctgcccatctcttagtttggtacatgacatggagtgtcaagt

SEQ ID NO: 10551 - DNA, 80 bp, synthetic construct
  source 1..80: mol_type = other DNA
tgggttctgagggctggtgggtggcgctcatttgtttaggtgaattaacttcacagttagataaccaatccccactgctg

SEQ ID NO: 10552 - DNA, 80 bp, synthetic construct
  source 1..80: mol_type = other DNA
aaacaaagcttgggttctcggcttgtctgggccaagttctaattccttccaggagcgtgggcacgttgcttacctcttag

SEQ ID NO: 10553 - DNA, 80 bp, synthetic construct
  source 1..80: mol_type = other DNA
ccagataccagcccattggagttagggcctcagcataaattctgagggggacagaaactttcagccctaacagtatgctt

SEQ ID NO: 10554 - DNA, 80 bp, synthetic construct
  source 1..80: mol_type = other DNA
ccacaggcctgtgtggggttccacgcacgagggcacgctcaggcactcacactcacacaagaatgaacacacctggaaac

SEQ ID NO: 10555 - DNA, 80 bp, synthetic construct
  source 1..80: mol_type = other DNA
tgagcatggggtgccctctgctggtgatggcgagaagctcactgcctttgtatggagaaggctgccatccagccccgcca

SEQ ID NO: 10556 - DNA, 80 bp, synthetic construct
  source 1..80: mol_type = other DNA
gacagagggtggacctccctgaagctctgttttctcattaaggacctgcctacagcctgttgtggggattgggtcaaata

SEQ ID NO: 10557 - DNA, 80 bp, synthetic construct
  source 1..80: mol_type = other DNA
cctcccaccctcttccaaaggctgaacacacaggagggattgggaaatttgttgaacaaagaagttacacataagccctg

SEQ ID NO: 10558 - DNA, 80 bp, synthetic construct
  source 1..80: mol_type = other DNA
acgtgctgggttttaggtcaggtaaaccatgtatggccgagaacactggctcttgggctcttgacagcagtgacatcagc

SEQ ID NO: 10559 - DNA, 80 bp, synthetic construct
  source 1..80: mol_type = other DNA
gacagctagcagtatttataagggaacagggtgtgatcactttaagttcacaggcaaatgcctggatggtccttttaagg

SEQ ID NO: 10560 - DNA, 80 bp, synthetic construct
  source 1..80: mol_type = other DNA
ggaacacagggagcttcaagactggggtgaacattctattgtcatccttgtgggactgtgacctccagggtagggtgtcc

SEQ ID NO: 10561 - DNA, 80 bp, synthetic construct
  source 1..80: mol_type = other DNA
ctgccatctgtaacctgggcctctccctcctgtcaatacatgtctgtcaatgtccagaatggcttgttttctagcctgac

SEQ ID NO: 10562 - DNA, 80 bp, synthetic construct
  source 1..80: mol_type = other DNA
gaggggttttatccaagtgaagtgttgcatggagggctaatttagaaaagaagttggcgacagccatcccgataggcccc

SEQ ID NO: 10563 - DNA, 80 bp, synthetic construct
  source 1..80: mol_type = other DNA
gccactcattctcagacctgccttgtggctgtgcttaggtagcgtgggatgtgtgtgtttgtaagtctcatgctaagact

SEQ ID NO: 10564 - DNA, 80 bp, synthetic construct
  source 1..80: mol_type = other DNA
tattacacttcgagtcactggtttgcctgtattgtgaaaccagctggatcctgagatccccaagacagaaatcatgatga

SEQ ID NO: 10565 - DNA, 80 bp, synthetic construct
  source 1..80: mol_type = other DNA
agttcctagaaacagcaaaatgtggagacagaaagcttaccagggattgttggggaatggggttgggagagaggactaac

SEQ ID NO: 10566 - DNA, 80 bp, synthetic construct
  source 1..80: mol_type = other DNA
agggtccccactaccaggcctctccatccccagtctcaggtagtttttctaaaatgcaaaccccaccctgcaacttaccg

SEQ ID NO: 10567 - DNA, 80 bp, synthetic construct
  source 1..80: mol_type = other DNA
ttttgtctgcctttgttagcgcttatgtttacttggtaggtttccatagtgtttttccgcagaagttggaatgagctccc

SEQ ID NO: 10568 - DNA, 80 bp, synthetic construct
  source 1..80: mol_type = other DNA
ctccctcctgtatcaaccccaaggatcactcttttgtttccttttagatataattcattttttaaagagcggttttaggt

SEQ ID NO: 10569 - DNA, 80 bp, synthetic construct
  source 1..80: mol_type = other DNA
aaatatcttaacaagtaccctggcgattgtgaggcaggtggtgtggggatcaccctttgagatgctggtgtaaggagttt

SEQ ID NO: 10570 - DNA, 80 bp, synthetic construct
  source 1..80: mol_type = other DNA
tagtgcattatatcagtgggttgtgggtacagctctctcttcccaggaccttccatcttcacaagaggcctctagaggga

SEQ ID NO: 10571 - DNA, 80 bp, synthetic construct
  source 1..80: mol_type = other DNA
ccagcctgggcaacatagacccctgtctaaaacaaaataaattaactaaaaattgctctcagctctcctgtcgctgtccc

SEQ ID NO: 10572 - DNA, 80 bp, synthetic construct
  source 1..80: mol_type = other DNA
ggctccttttttcagctcatcaaaccaggtaaagggaggttcagattctgccaaccattgactcaattcatccaaatctt

SEQ ID NO: 10573 - DNA, 80 bp, synthetic construct
  source 1..80: mol_type = other DNA
attcttgcaaaatttgggctcctgagaacatgcccaaggatgggatctagctggaataaaaagctggagggaccagatga

SEQ ID NO: 10574 - DNA, 80 bp, synthetic construct
  source 1..80: mol_type = other DNA
ttatgtttgtctctgctgctggaaagtaaacgtggaggacagggctttgtccagttcattctctgtggtatctccagtat

SEQ ID NO: 10575 - DNA, 80 bp, synthetic construct
  source 1..80: mol_type = other DNA
cagctcctgttaacctctagtccactttctgcctctgtggatttgcctactctagctacctcatgtaagtggaatcatac

SEQ ID NO: 10576 - DNA, 80 bp, synthetic construct
  source 1..80: mol_type = other DNA
aaaaaagacagaaaaaacctgaagaaattcctaatggcagcaaggctccaatttccccagctctgccaactgtggtgact

SEQ ID NO: 10577 - DNA, 80 bp, synthetic construct
  source 1..80: mol_type = other DNA
tttgtgctgtcagtggctcttttctggactgtgggcaccaccacagctttgtccctgctgtactgtgtatccccttgcct

SEQ ID NO: 10578 - DNA, 80 bp, synthetic construct
  source 1..80: mol_type = other DNA
ctctagatccattaaacaatgtattattacataacttatagaggtatgttttatgtctctgtctgggtactggagatacc

SEQ ID NO: 10579 - DNA, 80 bp, synthetic construct
  source 1..80: mol_type = other DNA
tggatagtgatacaggtcctccttgctctattgagagccacttttggaccctttatttttaacttttgtaccatgaaatg

SEQ ID NO: 10580 - DNA, 80 bp, synthetic construct
  source 1..80: mol_type = other DNA
catttctctacatcctcaccgatgctggttatagtgtatcctaagggagaagggtgtgttccttttgaagtgatgttaga

SEQ ID NO: 10581 - DNA, 80 bp, synthetic construct
  source 1..80: mol_type = other DNA
ttcccccttggtcatctgtttttccaaaccccagtcttttgcttgtttacttctctggtgctttaaataactgcacgaga

SEQ ID NO: 10582 - DNA, 80 bp, synthetic construct
  source 1..80: mol_type = other DNA
ttcccgtaaccaataggctggggtgggagggtgttcttcccacacacacacaaaaaagtggaacccggaggtgatgggaa

SEQ ID NO: 10583 - DNA, 80 bp, synthetic construct
  source 1..80: mol_type = other DNA
ggaaagtgccacttgagagtttcctttttatgtgtggttctgactgaccgctccctgctcacagatgctgcttctcaggg

SEQ ID NO: 10584 - DNA, 80 bp, synthetic construct
  source 1..80: mol_type = other DNA
taaaacgggagacagaggcttcacggatgggggacatgtggcttggtcatgacagggtgttacataccaggacagactgt

SEQ ID NO: 10585 - DNA, 80 bp, synthetic construct
  source 1..80: mol_type = other DNA
tggaatgcagttgccagccaggccctgagcatccctcctcaaacaaaggtctcatggcaccaccaggacaggtggggcct

SEQ ID NO: 10586 - DNA, 80 bp, synthetic construct
  source 1..80: mol_type = other DNA
gtgaggtcaggccccagggaacacggcgtcttcagctacctcctgtgtttcctgcaaaccagctcaggaatgtccttgcc

SEQ ID NO: 10587 - DNA, 80 bp, synthetic construct
  source 1..80: mol_type = other DNA
aaagtacatgccatgaggacagagcttgcagagggaggacaggcatgcagaaggctctgtgtgcagccccagacctgggt

SEQ ID NO: 10588 - DNA, 80 bp, synthetic construct
  source 1..80: mol_type = other DNA
atctcaccaaccctcacaggctatgaaggacctggaactgtcacaaatgccaggggagggcactgagaccccagagggtc

SEQ ID NO: 10589 - DNA, 80 bp, synthetic construct
  source 1..80: mol_type = other DNA
gtcctggaaggccttgcccatccctagagggctccctgtccctactcctcaaggagaccaagaggctgaaatagtcagca

SEQ ID NO: 10590 - DNA, 80 bp, synthetic construct
  source 1..80: mol_type = other DNA
tagacccccaacaccgaggaccttttctcctgacccttgtctgcagtcactcactgcctttggcgactagtgccactgcc

SEQ ID NO: 10591 - DNA, 80 bp, synthetic construct
  source 1..80: mol_type = other DNA
acttggaggcttgggccccaaagacctcccaccagcagctgtgagccccgctctgagccactcttctcttccctactctg

SEQ ID NO: 10592 - DNA, 80 bp, synthetic construct
  source 1..80: mol_type = other DNA
cacttctaacagggtttgagaggcttagtcagcactgggtagcgttttgactccattcttggctttctttttctttccag

SEQ ID NO: 10593 - DNA, 80 bp, synthetic construct
  source 1..80: mol_type = other DNA
gcagaaaacagccacttgaaggctttctgtctgcgtctgtgtgcagtgtggatttagttgtgcttttttcttgctgggag

SEQ ID NO: 10594 - DNA, 80 bp, synthetic construct
  source 1..80: mol_type = other DNA
ggtaagtggctggtgtcttagcagctgcaatctgagctcagccacctacacaccaccgtggccgacactttcattaaaaa

SEQ ID NO: 10595 - DNA, 80 bp, synthetic construct
  source 1..80: mol_type = other DNA
agtcatgtcctcaaaccaaggaatacatgaaaaggggggatttcctttttcttggtctaaaccaaagagcaatgacaact

SEQ ID NO: 10596 - DNA, 80 bp, synthetic construct
  source 1..80: mol_type = other DNA
gtaattttcaaaacaaaaccaggactaagcaacttcatcaaaacccccaatcccacccgtcaacagacccttcctttgcg

SEQ ID NO: 10597 - DNA, 80 bp, synthetic construct
  source 1..80: mol_type = other DNA
ctgaaaaatcagtgtctaggttggcagcagtactctggaaactgataaaaccaaattcggtcctatatttcaatttcccc

SEQ ID NO: 10598 - DNA, 80 bp, synthetic construct
  source 1..80: mol_type = other DNA
ctaatggttggaatctgctcgtctcaaggtgctggtattcctagcactaacaatgccaacttggacaaagaagagaatct

SEQ ID NO: 10599 - DNA, 80 bp, synthetic construct
  source 1..80: mol_type = other DNA
cacccttacaagatgatcagtgacgcagccacatactgtctatacaattactcataaagtgcttttcacaaataaggact

SEQ ID NO: 10600 - DNA, 80 bp, synthetic construct
  source 1..80: mol_type = other DNA
gttctacctcctcagcaggacatgaaacacatcctcttgttcaagcccaggtctctctacctgcggaaacttgaagccaa

SEQ ID NO: 10601 - DNA, 80 bp, synthetic construct
  source 1..80: mol_type = other DNA
ggatatagtgttaggaatcagttggaagaaacaatgagattattagcaaagatgttagtgtggatccagcaagtaccatt

SEQ ID NO: 10602 - DNA, 80 bp, synthetic construct
  source 1..80: mol_type = other DNA
aaacactggcagcagagaattctggttcctaaaacattctttcctcttttgttggatgggaaattccattctgttccaca

SEQ ID NO: 10603 - DNA, 80 bp, synthetic construct
  source 1..80: mol_type = other DNA
gtcaactgatttgttcacaccacacgtttgacagagaaagaaaatccagactgcctattttctagttaatttcaccttca

SEQ ID NO: 10604 - DNA, 80 bp, synthetic construct
  source 1..80: mol_type = other DNA
tacacatctgcatccaattctcatgataaccctatgaggcagatgctatcatctatattatatagatgaggaagccaggg

SEQ ID NO: 10605 - DNA, 80 bp, synthetic construct
  source 1..80: mol_type = other DNA
cttgagcccaggagtttgagaccaggtagggcaacatagtgagacgctgtctctccaaaaaaaaaaaaaaaaaaaaatca

SEQ ID NO: 10606 - DNA, 80 bp, synthetic construct
  source 1..80: mol_type = other DNA
agcaaacactatcactctatcaaaagtctagtgcttctaacagaatgcagtcctttttatagtcatacttggtgttgagg

SEQ ID NO: 10607 - DNA, 80 bp, synthetic construct
  source 1..80: mol_type = other DNA
agccaccacaaccggccatgcattttcaagttaactttatttaggaatagagcagagaacaactgggaagactgaaaaaa

SEQ ID NO: 10608 - DNA, 80 bp, synthetic construct
  source 1..80: mol_type = other DNA
aattttcttaaactaagagtgactcacttgagagaaaggccatttaagctggtatattaaatagccaatgttttagagag

SEQ ID NO: 10609 - DNA, 80 bp, synthetic construct
  source 1..80: mol_type = other DNA
ctatttctccagatccatgttagctaaacatgtcacctgtcacatttttaatgtcctttcactaacatttccggtggacc

SEQ ID NO: 10610 - DNA, 80 bp, synthetic construct
  source 1..80: mol_type = other DNA
atttaaagtcttctcaatttccttctttattgacttcaaggaggcatttatgcagatatgtgtttactggaagaaccttg

SEQ ID NO: 10611 - DNA, 80 bp, synthetic construct
  source 1..80: mol_type = other DNA
caaacccggaacagaaagtaaagcctctagaagaggctctgccaatttttagcaatgtctatgtattttaacccttggat

SEQ ID NO: 10612 - DNA, 80 bp, synthetic construct
  source 1..80: mol_type = other DNA
aaagcactttatgactatctctaaacagaattatcacagctacttgccctttaaagaaacctagccatgggaaatgtttt

SEQ ID NO: 10613 - DNA, 80 bp, synthetic construct
  source 1..80: mol_type = other DNA
cctcttcagtacctttttttatgtataaaaatacatacatgaaaacaaggcccacctgaacaccactttttttttttgga

SEQ ID NO: 10614 - DNA, 80 bp, synthetic construct
  source 1..80: mol_type = other DNA
aaacctttaaaattttacatagaatgctcctcctcacttcccaacattgttcccagtgctggatattaccaacctgagag

SEQ ID NO: 10615 - DNA, 80 bp, synthetic construct
  source 1..80: mol_type = other DNA
tatctacccagccaaccacttagctttccctttcttttcttaggcaacaccctgacagacttgttaaaaccatcaatttt

SEQ ID NO: 10616 - DNA, 80 bp, synthetic construct
  source 1..80: mol_type = other DNA
gtattaaaggaaagcttgaatctgtttaccaccaagaagaaataaagcagtggttcacaaaatgtggtccgtggaccacc

SEQ ID NO: 10617 - DNA, 80 bp, synthetic construct
  source 1..80: mol_type = other DNA
cttgtctggagtctgcacatagaatccaaactcatgaaatacacactgtgtgcccaaaaaagtgctcagaaatctgtcta

SEQ ID NO: 10618 - DNA, 80 bp, synthetic construct
  source 1..80: mol_type = other DNA
gcctctatgtagtagaggttaaaggatgaaccttggaaagagttactgaattgaggggattacagttttctttcacaatg

SEQ ID NO: 10619 - DNA, 80 bp, synthetic construct
  source 1..80: mol_type = other DNA
attaatctttttgtgatatgtatcttatctaagttctccaatgagactatgggtgctcaggcagagagattgtgactcat

SEQ ID NO: 10620 - DNA, 80 bp, synthetic construct
  source 1..80: mol_type = other DNA
actatcaacttactggtatcccctttgaaaaaactgatttgccagagaaccactcaagtggaagtgtaacacttatcttg

SEQ ID NO: 10621 - DNA, 80 bp, synthetic construct
  source 1..80: mol_type = other DNA
aaaggcacaccttttacccatatgtaacctaactatagtatacattgtcccagggtgtaaaaacctctggggcaacaaag

SEQ ID NO: 10622 - DNA, 80 bp, synthetic construct
  source 1..80: mol_type = other DNA
ctagtgtcctaacaaaaaagttgtatttatccacagatacatacattaattgaagggaaaagaaaagccccatgtcattc

SEQ ID NO: 10623 - DNA, 80 bp, synthetic construct
  source 1..80: mol_type = other DNA
gactgatttttcatactttcaatacacactcagtactcctggtgtctcgaccctgtcaattcactccatggtattactgg

SEQ ID NO: 10624 - DNA, 80 bp, synthetic construct
  source 1..80: mol_type = other DNA
aagagctaagagaactattttagaaaagaatctgatttttgaagctggaagaaattcttagccgaattcccttattttgc

SEQ ID NO: 10625 - DNA, 80 bp, synthetic construct
  source 1..80: mol_type = other DNA
cctaaaatgccaagaagtggatgagagaagaactctgggatgcttttatctgtattttggagataatacttgtttctata

SEQ ID NO: 10626 - DNA, 80 bp, synthetic construct
  source 1..80: mol_type = other DNA
ttcacttttcttggccaattttaaaagtctaagcgagcctactgaggcagagatagaaaaggctaagagctccatgaggc

SEQ ID NO: 10627 - DNA, 80 bp, synthetic construct
  source 1..80: mol_type = other DNA
tgattaagctgaagaaaaaaacctctacatactcagaaagagacagtattagcagagattttgtattgtattactaagat

SEQ ID NO: 10628 - DNA, 80 bp, synthetic construct
  source 1..80: mol_type = other DNA
ttaattagtctttaaagctccacagatgattctagtgtccaaccaaagttgagaaccactgatggaagatctgtgggatg

SEQ ID NO: 10629 - DNA, 80 bp, synthetic construct
  source 1..80: mol_type = other DNA
aaaatctgttttccctcatctttttaggatacactgccatctttttcacaaggtgtgtatgccttaataaaggtgcctga

SEQ ID NO: 10630 - DNA, 80 bp, synthetic construct
  source 1..80: mol_type = other DNA
ctcccaggtagctggaactatggactccagccaccatgagtggcctgtgattctcctcaatgtctggcttaacagcagcc

SEQ ID NO: 10631 - DNA, 80 bp, synthetic construct
  source 1..80: mol_type = other DNA
tgggaactatgaaaatactatagttgagaccttcaatgactttctagtaactcagcagcatctcagggccaaaaatttaa

SEQ ID NO: 10632 - DNA, 80 bp, synthetic construct
  source 1..80: mol_type = other DNA
catcattttaacctgagtagggctaaaggactctggcctcgaaatctacagaacatacttgggggtgtaaagacttattt

SEQ ID NO: 10633 - DNA, 80 bp, synthetic construct
  source 1..80: mol_type = other DNA
ccctaaaaactgctttagctacattcattgaagtaaaaggcagcattgttgttgttgtttttggggagacaaagtcttac

SEQ ID NO: 10634 - DNA, 80 bp, synthetic construct
  source 1..80: mol_type = other DNA
actcagagagacctgggatctagtatacagccaaggtgttggtctttgaaaggaggttctttttcctgcaagacttaaaa

SEQ ID NO: 10635 - DNA, 80 bp, synthetic construct
  source 1..80: mol_type = other DNA
ccacattcttacagagcataatgtggtgccccaaattaaaagcaatacttcagatcggatctaaccaacacaaactatgg

SEQ ID NO: 10636 - DNA, 80 bp, synthetic construct
  source 1..80: mol_type = other DNA
atagtttgctgtcttcaggtatgatcattcatccagtatgaacccagttaaatcctgtcattcatgttacatcacttgat

SEQ ID NO: 10637 - DNA, 80 bp, synthetic construct
  source 1..80: mol_type = other DNA
ttataggtgtaagccatcaggtatttttcacttttaaaaactgaaatttactgaggtacagtttacacacaagatgcacc

SEQ ID NO: 10638 - DNA, 80 bp, synthetic construct
  source 1..80: mol_type = other DNA
tatgagagttccagttgttctttatccttgataatactttgtattgctggttctgattataggttatttatttatttaag

SEQ ID NO: 10639 - DNA, 80 bp, synthetic construct
  source 1..80: mol_type = other DNA
caagataaaaaggaaggagagcaactggacagtgaataccaacaagtcttttgagaagttttactgtcgaaggaagaaga

SEQ ID NO: 10640 - DNA, 80 bp, synthetic construct
  source 1..80: mol_type = other DNA
aagaccatcgagactaggaagaaactgcatcaactaacgagcaaaataaccagctaatatcataatgacaggatcaaatt

SEQ ID NO: 10641 - DNA, 80 bp, synthetic construct
  source 1..80: mol_type = other DNA
aacagaaattataacaaactgtgtctcagaccacagtgcaatctaactagaactcaggattaagaaactcactcaaaacc

SEQ ID NO: 10642 - DNA, 80 bp, synthetic construct
  source 1..80: mol_type = other DNA
cctcccagacggggtggtggccgggcagaggggctcctcacttcccagtaggggcggccggggagaggcgcccctcacct

SEQ ID NO: 10643 - DNA, 80 bp, synthetic construct
  source 1..80: mol_type = other DNA
agcttattcaccatgatcaagtgggcttcatccctgggatgcaaggctggttcaacatacgcaaatcaataaatgtaatc

SEQ ID NO: 10644 - DNA, 80 bp, synthetic construct
  source 1..80: mol_type = other DNA
tagttgtagatatgtggcgttatttctgagggctctgttctgttccattgatctatatctctgttttggtaccagtacca

SEQ ID NO: 10645 - DNA, 80 bp, synthetic construct
  source 1..80: mol_type = other DNA
acatggacacaggaaggggaacatcacactctggggactattgtggggtggggcaggggggagggatagcattagaagat

SEQ ID NO: 10646 - DNA, 80 bp, synthetic construct
  source 1..80: mol_type = other DNA
acaggtgtgaaccactgcactcagtgaaagatgttttatttatttacttatttttgagacagagtcttgctctgtcaccc

SEQ ID NO: 10647 - DNA, 80 bp, synthetic construct
  source 1..80: mol_type = other DNA
attacagtatattttaagaaaccccacagaacatagttggcataaagaaaaaggggagacagtgagttaacagtatgtag

SEQ ID NO: 10648 - DNA, 80 bp, synthetic construct
  source 1..80: mol_type = other DNA
tcttctgcttctccaccatgttaccatgcagtaggaaagccctcaccagaagcccagcagatgttagcaccaatgccctt

SEQ ID NO: 10649 - DNA, 80 bp, synthetic construct
  source 1..80: mol_type = other DNA
ctctaatcctatgaacatttgatcttatcagaactcaggcattttgccaattccagtgggtggaaagtggtacctttttg

SEQ ID NO: 10650 - DNA, 80 bp, synthetic construct
  source 1..80: mol_type = other DNA
cctgtaatcccagttactcaggaggctgaggcaggagaatcgcttgaacctgagaggcggaggtttcagtgagccaaggt

SEQ ID NO: 10651 - DNA, 80 bp, synthetic construct
  source 1..80: mol_type = other DNA
atagactatatctggcttggtcagtcctttgtgagatgatgctggtcagggaagaggatatagacatgaagagttgaaag

SEQ ID NO: 10652 - DNA, 80 bp, synthetic construct
  source 1..80: mol_type = other DNA
caggaatatccacttcaagactcactgatgcaatctggttatgtgttccaattaattatacatattttatgtaacttggt

SEQ ID NO: 10653 - DNA, 80 bp, synthetic construct
  source 1..80: mol_type = other DNA
aaacaggcctttcattttaaccctttcatcccctgagatagctgatattgccaattcctgagaattgaggattctacggt

SEQ ID NO: 10654 - DNA, 80 bp, synthetic construct
  source 1..80: mol_type = other DNA
atgcccagccacatttctcagctgtgatgtgagaaggatttggcatctctttcttctgaaaggtaaatctatcaataata

SEQ ID NO: 10655 - DNA, 80 bp, synthetic construct
  source 1..80: mol_type = other DNA
ggtaagtgggggtgttactgaataaggtaataatttgctgtaataagtattttggccgaatataggcttgtaaacaatct

SEQ ID NO: 10656 - DNA, 80 bp, synthetic construct
  source 1..80: mol_type = other DNA
ctttttagcaggtttttgctgtttctatcttctgaacctctcttgcttagctcaatcactgagtgctaagcctaagtttg

SEQ ID NO: 10657 - DNA, 80 bp, synthetic construct
  source 1..80: mol_type = other DNA
aacagccttctgtgaactaaatatcctcagttctgttgattattttcccccgttacacctctagaatcttccctatttag

SEQ ID NO: 10658 - DNA, 80 bp, synthetic construct
  source 1..80: mol_type = other DNA
ttcaactaacaatgatattcctgtactagtatttcaaaatatcaatccaaaaaatagccaaccttgtttgttccatggaa

SEQ ID NO: 10659 - DNA, 80 bp, synthetic construct
  source 1..80: mol_type = other DNA
ttgggagagaggtgattggctagaagaggacatgggagggtgtttctagagtgctagtaatgttctgtttatttaatttt

SEQ ID NO: 10660 - DNA, 80 bp, synthetic construct
  source 1..80: mol_type = other DNA
taattatgtcactcaaaagtgacattatatgttattaggcttttacatgaatttagtgtgaatatttatgaacacctgtg

SEQ ID NO: 10661 - DNA, 80 bp, synthetic construct
  source 1..80: mol_type = other DNA
tagttaacctggaggaattcccctttaaaaattattactgtaataaaatggtaggagtcccgactgctgtgaacagtttt

SEQ ID NO: 10662 - DNA, 80 bp, synthetic construct
  source 1..80: mol_type = other DNA
atgagcaggaatgtatattactgaaataagtaaaatgtttttatcatctggaagactttaaggagcaagataagtgctgc

SEQ ID NO: 10663 - DNA, 80 bp, synthetic construct
  source 1..80: mol_type = other DNA
gggggggtagcagacaaacctgtggttgatcctaaattagtgaaaagaaaaatgtatacattaaggaggagcaagtatgt

SEQ ID NO: 10664 - DNA, 80 bp, synthetic construct
  source 1..80: mol_type = other DNA
tcttactggggcctgaatacagctgagtagaactcagatgtccaggcaatagttctatatacagaacaacaaaatgacct

SEQ ID NO: 10665 - DNA, 80 bp, synthetic construct
  source 1..80: mol_type = other DNA
cagtttaactactaaataaaacatggcaagatgaaatgggagaatgaaattatactgtaaactttcttctattaggacat

SEQ ID NO: 10666 - DNA, 80 bp, synthetic construct
  source 1..80: mol_type = other DNA
tagtttgctttgggtgaaaacaagaaagaagagcccaactacctctgaacactgggccaggctcaaaatcaaacactatt

SEQ ID NO: 10667 - DNA, 80 bp, synthetic construct
  source 1..80: mol_type = other DNA
aagtatcagtggagccccacaaaggaaatttatcaacaatagctttcaagatggttagaaattaataaagcgggtataaa

SEQ ID NO: 10668 - DNA, 80 bp, synthetic construct
  source 1..80: mol_type = other DNA
aaacctgaaatcactacttacctccatcaccacgaaatccttggtctctaatcaagtcctacaaataaatagtaatgtat

SEQ ID NO: 10669 - DNA, 80 bp, synthetic construct
  source 1..80: mol_type = other DNA
atggatggataagggcacactagaagaggaaagaaacaaagtggctcatagaaaggttttgttaaaatttgtcctttttt

SEQ ID NO: 10670 - DNA, 80 bp, synthetic construct
  source 1..80: mol_type = other DNA
gagatgccaaagtttgctgctcaattgattgccaactaagtgatacaggtgataagattttgagatgaagtcttgctctt

SEQ ID NO: 10671 - DNA, 80 bp, synthetic construct
  source 1..80: mol_type = other DNA
agctggctatgtccatctttaattcttcacagtctctgagagacataatttccaagctcaaggaattttactacatcaat

SEQ ID NO: 10672 - DNA, 80 bp, synthetic construct
  source 1..80: mol_type = other DNA
tactttggtattcttgaaaccccttttcttcctttggcttctgcaacacttgttcttagttatctggggctagacttagg

SEQ ID NO: 10673 - DNA, 80 bp, synthetic construct
  source 1..80: mol_type = other DNA
tattcaccataatctggcttaaaggttgtcccttctctgctcaatgttcctagatccaaccagatggagtttattacccc

SEQ ID NO: 10674 - DNA, 80 bp, synthetic construct
  source 1..80: mol_type = other DNA
cttcctttgtttttaggtcttgctagatagaggtgaaccttgctagttaaggaaaactagtactagaaaaaagtcactta

SEQ ID NO: 10675 - DNA, 80 bp, synthetic construct
  source 1..80: mol_type = other DNA
ctagcaatgctggatacttacatcaatattgacaggttctattgtgtttatatgcacattgggagctgatgaggatcggt

SEQ ID NO: 10676 - DNA, 80 bp, synthetic construct
  source 1..80: mol_type = other DNA
acctggcactcacagagaacactaaagttttgagactagattgtaaacacttggaaggatgtagcccctcagaaagggta

SEQ ID NO: 10677 - DNA, 80 bp, synthetic construct
  source 1..80: mol_type = other DNA
gatagtctactgtaataattgatctgggataggcagagatggcagtaagtcacttctgaaactcaccaagttaggaatat

SEQ ID NO: 10678 - DNA, 80 bp, synthetic construct
  source 1..80: mol_type = other DNA
accaaggtaacttataccctatgaagtatcttggcagtcggcaaactggctttctcccaatgatacctgtacctatcttg

SEQ ID NO: 10679 - DNA, 80 bp, synthetic construct
  source 1..80: mol_type = other DNA
atgactccactagaagagataactgctacaacctgacaagagaacacaacggctgcattttccagtgttccaaataggta

SEQ ID NO: 10680 - DNA, 80 bp, synthetic construct
  source 1..80: mol_type = other DNA
agtaaactgatacccacttaactcatctttattgtgtcttcctttttatttcctactatgaagcttaaatgacgcctttg

SEQ ID NO: 10681 - DNA, 80 bp, synthetic construct
  source 1..80: mol_type = other DNA
ggtgtagactcaaaatgatctgttgcatgattttttcaggactggttctgaaatagtctatgtcagctttaatcccactt

SEQ ID NO: 10682 - DNA, 80 bp, synthetic construct
  source 1..80: mol_type = other DNA
aggcaaaacaaaacaaacctaacttgtgcaaaacccagaagcttcatataccaaaatacatagttaaccaaaaaaactga

SEQ ID NO: 10683 - DNA, 80 bp, synthetic construct
  source 1..80: mol_type = other DNA
aagtactattataaaatgaaaaccgggggttcaagataatagatggactacacatatttatttcccaccccactatctaa

SEQ ID NO: 10684 - DNA, 80 bp, synthetic construct
  source 1..80: mol_type = other DNA
ggattacaaacatgagccaccgtgtgcagcttgtgtcttcatttttaacagaaaagtttaaaaagtaaaaaagaaaaatt

SEQ ID NO: 10685 - DNA, 80 bp, synthetic construct
  source 1..80: mol_type = other DNA
ttaaaaattaacagtgaattcctccagagtggaattgggggtgggagggagagagactataaatacaatctacataatag

SEQ ID NO: 10686 - DNA, 80 bp, synthetic construct
  source 1..80: mol_type = other DNA
caccacactcggcctctatattcttaattcatttcagtttttcagagattttttttttgagacagagtctcactgtcacc

SEQ ID NO: 10687 - DNA, 80 bp, synthetic construct
  source 1..80: mol_type = other DNA
ttttttatgtggccattattcaccaaaccaagtaggtaggtgaccaaaacagctgaaggaaagaaaacatgtggatatgc

SEQ ID NO: 10688 - DNA, 80 bp, synthetic construct
  source 1..80: mol_type = other DNA
ctactcttcaaccttgtatcatccattctgaacttctttcaaaactttgaaaggtaacatgctttcttgctcttccctct

SEQ ID NO: 10689 - DNA, 80 bp, synthetic construct
  source 1..80: mol_type = other DNA
ccttcagaaacacaagggtgtgtacaagtgtgtcaagatatatgcagaaagaccttgtttagccctgtatgtaacagatt

SEQ ID NO: 10690 - DNA, 80 bp, synthetic construct
  source 1..80: mol_type = other DNA
attcttctccagtaagccaggaaatatcagtgtcccaaccaattggtttcttctctctgaaaaatgtagacacaagcctt

SEQ ID NO: 10691 - DNA, 80 bp, synthetic construct
  source 1..80: mol_type = other DNA
cggactgtaactccacaccttgcaggtacctatggtatcataaatatattgataagaggtaaagggagcaaattacattt

SEQ ID NO: 10692 - DNA, 80 bp, synthetic construct
  source 1..80: mol_type = other DNA
tagatttgcagaagatacaaatctggagccctcaatggccatattctccaccacactgagaaaatctgttatagaatgaa

SEQ ID NO: 10693 - DNA, 80 bp, synthetic construct
  source 1..80: mol_type = other DNA
cacaaacaaacaaagaaaaaccctgaacttttacctacccagcaaggtaaaagtttgtcatgagagactgggctcatcac

SEQ ID NO: 10694 - DNA, 80 bp, synthetic construct
  source 1..80: mol_type = other DNA
agacaacccagcagggagtctatgtatcaaagagctccaaagggcaacagcagcttggaatctttatagccttgggattt

SEQ ID NO: 10695 - DNA, 80 bp, synthetic construct
  source 1..80: mol_type = other DNA
atccttcagcctctttggtaatttcccttaggcactccagtaatgcacttcaaatatggctatgctccctcatgcttctc

SEQ ID NO: 10696 - DNA, 80 bp, synthetic construct
  source 1..80: mol_type = other DNA
attcactacagtactgactgtatatcaaaagtctagaaagaacctgaatgaccatacacacatcactggttaaatacact

SEQ ID NO: 10697 - DNA, 80 bp, synthetic construct
  source 1..80: mol_type = other DNA
gagtcaatggaaccatgtgaatatttgccaaggaaactttagaccaaaacaaaatgtatgagtccaaactttcacacgtc

SEQ ID NO: 10698 - DNA, 80 bp, synthetic construct
  source 1..80: mol_type = other DNA
gatctcctgacctcatgattcgcccgcctcagcctcccaaagtgctaggattacaggtgtgagccatttttttttttttt

SEQ ID NO: 10699 - DNA, 80 bp, synthetic construct
  source 1..80: mol_type = other DNA
tcaccctctttgatcacttgtagatcttagtttctgctttgctgttgctaaaaataaaaggagagggaaggtctagcatt

SEQ ID NO: 10700 - DNA, 80 bp, synthetic construct
  source 1..80: mol_type = other DNA
gaagtgaaagatttctacaatgaaaactataaaacactgatgcaagaaactggagagaacacatgaaaaaatggaaagac

SEQ ID NO: 10701 - DNA, 80 bp, synthetic construct
  source 1..80: mol_type = other DNA
aggaatgggactggtagtggaacctaaatttgtacttctatgtataatatgaagcaaatataacaaaaaattagtatttg

SEQ ID NO: 10702 - DNA, 80 bp, synthetic construct
  source 1..80: mol_type = other DNA
cctatcttacgtagtctaccttacactgaagatagcttacctaggaataaacttaaaaacaaagaagatactgaagagag

SEQ ID NO: 10703 - DNA, 80 bp, synthetic construct
  source 1..80: mol_type = other DNA
gaacacaagccatcttttggggtaatcaggtgagtctaatattttttggttaattttttgtcatataatacaaacaactg

SEQ ID NO: 10704 - DNA, 80 bp, synthetic construct
  source 1..80: mol_type = other DNA
ctacctctacaaaaaaatttaaaaattaggcatggcacacgcctgtggtctcagctacttggagggtgagatgggaggat

SEQ ID NO: 10705 - DNA, 80 bp, synthetic construct
  source 1..80: mol_type = other DNA
actttgggtactcatggacataaagacagcaataacagaaaccggaggctactagagcggggagggcaaaggttgaaaaa

SEQ ID NO: 10706 - DNA, 80 bp, synthetic construct
  source 1..80: mol_type = other DNA
tagcagttcattcctttctactgagtagtattcccttttatagatacaccacaatccaaccattcacctgtttatggaca

SEQ ID NO: 10707 - DNA, 80 bp, synthetic construct
  source 1..80: mol_type = other DNA
aacctctatactgttttccatagcagttgctccattttacatttccaccaacagtgcaacaggggtccaatttctccaca

SEQ ID NO: 10708 - DNA, 80 bp, synthetic construct
  source 1..80: mol_type = other DNA
gatattcagttgccagcatcatttgctgaacagattctctttacttcatggagtggtcctggtacccttgtcaaagatca

SEQ ID NO: 10709 - DNA, 80 bp, synthetic construct
  source 1..80: mol_type = other DNA
tttttattctcttaatactgtcttttgaagagcagaagttttacattttgattaacccaataaactaatacgttcattat

SEQ ID NO: 10710 - DNA, 80 bp, synthetic construct
  source 1..80: mol_type = other DNA
caccatttgaagttaagtttccaagtaactgacagagatagaaatgaaatagtggttatttttagtgaattgggaggggc

SEQ ID NO: 10711 - DNA, 80 bp, synthetic construct
  source 1..80: mol_type = other DNA
ggttcctggacaatgcaggcagtataaatttgaatcccacacaatgatgagaataggtccatagttaaaaaatcacaggg

SEQ ID NO: 10712 - DNA, 80 bp, synthetic construct
  source 1..80: mol_type = other DNA
ttcgcaggccatacaaaaatagatggtgggttagatttgttgagggttatagttcagcgataccttaacatatcagctcc

SEQ ID NO: 10713 - DNA, 80 bp, synthetic construct
  source 1..80: mol_type = other DNA
tcttggtatctgggcaccaatgctgtttccaaatttatacagactattgactctgttaaggttttttttttgtggggggg

SEQ ID NO: 10714 - DNA, 80 bp, synthetic construct
  source 1..80: mol_type = other DNA
gttgcccctatctatctgaaggctggtttttgtttaacacaggaaaattttcctgtattatgtctgtgaatacatcttcc

SEQ ID NO: 10715 - DNA, 80 bp, synthetic construct
  source 1..80: mol_type = other DNA
gaaatgcaatgttcctagagcttccagggtgctgaacatttggaggtagtggaaggtgatgctcctaaagagagcacaga

SEQ ID NO: 10716 - DNA, 80 bp, synthetic construct
  source 1..80: mol_type = other DNA
gctatctgcttcatcaggattttgctaagaatggctcccttcatgtaagaatctagctcctagtattttgtttggttttc

SEQ ID NO: 10717 - DNA, 80 bp, synthetic construct
  source 1..80: mol_type = other DNA
ccacaaacccatttactgatgattcataaggccttttaagttcacgatatacagtttttctgagtattgaatacgaattg

SEQ ID NO: 10718 - DNA, 80 bp, synthetic construct
  source 1..80: mol_type = other DNA
cctgacaataaatgatgcctttagaaagccatatttcctaagataaaaacttacaggctggtaactcgtaactccattag

SEQ ID NO: 10719 - DNA, 80 bp, synthetic construct
  source 1..80: mol_type = other DNA
tgtgggattttgaaaaactgaaagagatgaaggtagcactgaaaggctagaagaggaagaagatgtaacggtatccattg

SEQ ID NO: 10720 - DNA, 80 bp, synthetic construct
  source 1..80: mol_type = other DNA
tgtggcttataccctacagccaagaaattatggggctactatccatcagagtatcttcctagaagtttcatttgatgaag

SEQ ID NO: 10721 - DNA, 80 bp, synthetic construct
  source 1..80: mol_type = other DNA
atttaaacttcatcaaaaggtcttctttgtttacagcctgctagttgccctacccagaccctgtttcatagtagatgagg

SEQ ID NO: 10722 - DNA, 80 bp, synthetic construct
  source 1..80: mol_type = other DNA
ctcaaacagttgctaagatttggccattgttgtcttccttcacatactttgcggctcacaactacaacaatgccattggt

SEQ ID NO: 10723 - DNA, 80 bp, synthetic construct
  source 1..80: mol_type = other DNA
tattcaagatgctgcagataccagataccacttcttcaggagacagttgttcaaaaaccctattccttctcatcaaaact

SEQ ID NO: 10724 - DNA, 80 bp, synthetic construct
  source 1..80: mol_type = other DNA
atccacacacagaagaatgaagttgggctactacctcacaacatatccaaaaactaactcgaaataggccaggcatgttg

SEQ ID NO: 10725 - DNA, 80 bp, synthetic construct
  source 1..80: mol_type = other DNA
taaggcaggaagcctgtacgtcttcttcctttaagctaactttggaataaaaaagtcactttatactagactttgctctt

SEQ ID NO: 10726 - DNA, 80 bp, synthetic construct
  source 1..80: mol_type = other DNA
ttaggaatacaaaatagtgcagcaactttgaaaaactgtctggcagttagttcctcaaagtgtaaaacagagttaccaca

SEQ ID NO: 10727 - DNA, 80 bp, synthetic construct
  source 1..80: mol_type = other DNA
attcagaatgtctgggattcaaaccttggctaccaattacaagttgtgtaaccttggccatattattaaatccctctgtg

SEQ ID NO: 10728 - DNA, 80 bp, synthetic construct
  source 1..80: mol_type = other DNA
cgtgggaaaaagaaaatcaagaggatttctgatggtggtgtaaccaatttctctgttttgctacaatgaagagaagaagc

SEQ ID NO: 10729 - DNA, 80 bp, synthetic construct
  source 1..80: mol_type = other DNA
ccactgcactcccgcctgggtgacagagcaagactccatctcaaaaaaagaaaaataataataaaaattaaaaaattcta

SEQ ID NO: 10730 - DNA, 80 bp, synthetic construct
  source 1..80: mol_type = other DNA
tccagcctgggtgacaaagtgagactccatctcaaaaaaaaaaaaggaatctcaagggatcctgaatagccaaaacaatt

SEQ ID NO: 10731 - DNA, 80 bp, synthetic construct
  source 1..80: mol_type = other DNA
tgctgggattacaggtgcgcaccactacacacacctgaaatttttgtattttttagtagagacaggatttcatcatgtta

SEQ ID NO: 10732 - DNA, 80 bp, synthetic construct
  source 1..80: mol_type = other DNA
atggcagatgagaaacctgcagaacggtgggtctcagtgagtaatcagtagatctagctcttcactgatgggcctttaaa

SEQ ID NO: 10733 - DNA, 80 bp, synthetic construct
  source 1..80: mol_type = other DNA
caagatgtgatattatttccactttactaatgaggtggggtataagaaggctggatatcttgagtacagaaactaagcca

SEQ ID NO: 10734 - DNA, 80 bp, synthetic construct
  source 1..80: mol_type = other DNA
acagaataagaagctctaaggtttgttgttagtgatcagtcttcaaatagtaaaaagcctgaagagttatgtgaggaggg

SEQ ID NO: 10735 - DNA, 80 bp, synthetic construct
  source 1..80: mol_type = other DNA
aaaccaattttggggaaactcattctggaaaaaatattttaaaaaattaccccattttccaatatggtaactggtttgct

SEQ ID NO: 10736 - DNA, 80 bp, synthetic construct
  source 1..80: mol_type = other DNA
tacatcacagtaactgccagtgttcctcaaattttgagcttagagatcatttagtacagtggtttttctcttttattatg

SEQ ID NO: 10737 - DNA, 80 bp, synthetic construct
  source 1..80: mol_type = other DNA
gtgagaactggctattaggttatacggaagattctgtttctaagttgaatgatctaaatctgcagctttaaggcttgtcc

SEQ ID NO: 10738 - DNA, 80 bp, synthetic construct
  source 1..80: mol_type = other DNA
aaaaatacaaaaattagccgggcatggtggtgcatgcctgtagtcccaggtactcagaaggctgatgtgggaggattacc

SEQ ID NO: 10739 - DNA, 80 bp, synthetic construct
  source 1..80: mol_type = other DNA
tctcaaaaacaaaactataactgcagatcacatgtcattctcttgctcaaaaccctccactggcttccccactaaaaatc

SEQ ID NO: 10740 - DNA, 80 bp, synthetic construct
  source 1..80: mol_type = other DNA
tttgtcccctcatgatttattttggtgtcttagtcataataggtatgcaattaaagctgaagatttaagctggtttcaga

SEQ ID NO: 10741 - DNA, 80 bp, synthetic construct
  source 1..80: mol_type = other DNA
ttggaattttaaagaatgtgtttgggagagaaagtctttcagaatctccagaagagtcagagaaagaactttgatgactc

SEQ ID NO: 10742 - DNA, 80 bp, synthetic construct
  source 1..80: mol_type = other DNA
aggtggggttgggggaggaacagagggagggaagggagagacagaagtggtcttaaaatttcaagaaaatggttgaaaga

SEQ ID NO: 10743 - DNA, 80 bp, synthetic construct
  source 1..80: mol_type = other DNA
cctagaaaaaggaaactgaatcaagaagtaatatcaaagaaagagtggcatgagagggctgaatagtggccccccaccaa

SEQ ID NO: 10744 - DNA, 80 bp, synthetic construct
  source 1..80: mol_type = other DNA
caggatacttacatagtgccaaagtatttcgccacagattaaagatgaaggggaaaacataccttcaagtggcttagaat

SEQ ID NO: 10745 - DNA, 80 bp, synthetic construct
  source 1..80: mol_type = other DNA
ttgtaggaaacatgctatctacagaaaaacccaagagaatctacaaaccatcagggctaatacctattaactataaaaac

SEQ ID NO: 10746 - DNA, 80 bp, synthetic construct
  source 1..80: mol_type = other DNA
aagcactgtataatagtagcctttggctattttgaataataaggagggtaagactggtgttaccaggaaaacaagactta

SEQ ID NO: 10747 - DNA, 80 bp, synthetic construct
  source 1..80: mol_type = other DNA
ctgcaaaaaaattgggcctaataatacaagagttggtaatcatgtacatgtagcaacaaacactatcatattctacatgt

SEQ ID NO: 10748 - DNA, 80 bp, synthetic construct
  source 1..80: mol_type = other DNA
atgcaatcaacgttctagattgtttgtggatctacacccacagcaaaagtatctgaaatgtgcatgggcatgataaacag

SEQ ID NO: 10749 - DNA, 80 bp, synthetic construct
  source 1..80: mol_type = other DNA
caccaatggtctgagtaaaagggctcagtgaggctaaggcggatgaattaaaagactcatatctacataaatcctagttt

SEQ ID NO: 10750 - DNA, 80 bp, synthetic construct
  source 1..80: mol_type = other DNA
taaagatagtgactgtggctatatggtaagcaaggggagagtagaaacaagatgggtatcagaaaaattaggcaatatgc

SEQ ID NO: 10751 - DNA, 80 bp, synthetic construct
  source 1..80: mol_type = other DNA
gacctacaagagagtataggccaagaaggctcagccctggggatcataaacatttacaagagaaaccaaaaatggctgaa

SEQ ID NO: 10752 - DNA, 80 bp, synthetic construct
  source 1..80: mol_type = other DNA
gaagaagcagctgcactgccagacattgttgatgccctgttgagggttttggtatacatttaaagcactacattcaattg

SEQ ID NO: 10753 - DNA, 80 bp, synthetic construct
  source 1..80: mol_type = other DNA
caaaaccctgggacaccattccagagcaccacatcctatcattccaaaattaaaagtctgtgggaaacactgtcacaaat

SEQ ID NO: 10754 - DNA, 80 bp, synthetic construct
  source 1..80: mol_type = other DNA
aacttggcccaagtcagacagctaagtaaatggtagaattactcatatattgcatggtctatgtctctataagaagtaga

SEQ ID NO: 10755 - DNA, 80 bp, synthetic construct
  source 1..80: mol_type = other DNA
caaagttagtgcagtgcagaatatagtgtgctcattgacccaagcagtggttgttttaagcactatgctttggagtggct

SEQ ID NO: 10756 - DNA, 80 bp, synthetic construct
  source 1..80: mol_type = other DNA
tggaaatgaactatagtgtaaatgccaagaaaccagatgggaaatgatggccaagtgaaagatgatggtggcttttatca

SEQ ID NO: 10757 - DNA, 80 bp, synthetic construct
  source 1..80: mol_type = other DNA
gggtcaaccaaaaaaaggaagaaagaaagacgataaaagagggcaagggggaaaggaaggaaagagtaatcatcattgca

SEQ ID NO: 10758 - DNA, 80 bp, synthetic construct
  source 1..80: mol_type = other DNA
aaagacttttaacaaatttggtttagatgcaaatcacatgttcaagagtaactcagtctggctgggcgcggtggctcacg

SEQ ID NO: 10759 - DNA, 80 bp, synthetic construct
  source 1..80: mol_type = other DNA
aggccacattcccagccactgcagctactggctaatatactgcatagcacagaaaattatattgtatatagtgctattat

SEQ ID NO: 10760 - DNA, 80 bp, synthetic construct
  source 1..80: mol_type = other DNA
agaaaatttaagaatttctccttgagccaaaaggcaaataagagtcttcagaaccaaagttccttttttaacaaagaaag

SEQ ID NO: 10761 - DNA, 80 bp, synthetic construct
  source 1..80: mol_type = other DNA
tgtgtgagggtgttgacaattgatttggagtgctgtgaatttaagtgataacctccactgcaagttgggggcttaataca

SEQ ID NO: 10762 - DNA, 80 bp, synthetic construct
  source 1..80: mol_type = other DNA
aatagcagtagacgattgggatagaggacaaggatctgaatcatcatgaaaccatcagtgagtttacattttacatactt

SEQ ID NO: 10763 - DNA, 80 bp, synthetic construct
  source 1..80: mol_type = other DNA
caagaatagagtaatacatcagggatctatgggacagtaacaaaaagatctaacatctgtgtcagtgaacttctaaaagc

SEQ ID NO: 10764 - DNA, 80 bp, synthetic construct
  source 1..80: mol_type = other DNA
ttctaaaagaattgctaaaagaaattcctcacacagaagggaaataataccggaaggaaacctggaagagtaggttgagg

SEQ ID NO: 10765 - DNA, 80 bp, synthetic construct
  source 1..80: mol_type = other DNA
aaaatattagcatacagaatccagcaattgtaaaaggcataataaacatgacaataaggttaatcccaggaccacaaggc

SEQ ID NO: 10766 - DNA, 80 bp, synthetic construct
  source 1..80: mol_type = other DNA
acaaaataccttccatgaaacagaaaaggagtaagtaatttccaactcactttatgattccagcatcacctttacactaa

SEQ ID NO: 10767 - DNA, 80 bp, synthetic construct
  source 1..80: mol_type = other DNA
aagggataaagggaagttggttaatggatacaaacatacaactggacagaaacagtaagttctagtatttcacagtatag

SEQ ID NO: 10768 - DNA, 80 bp, synthetic construct
  source 1..80: mol_type = other DNA
aaaagcacatatcttaattttaaaatagtgttaaaaaccactaacaattacctgggccttcaaggagtcatcatttttgt

SEQ ID NO: 10769 - DNA, 80 bp, synthetic construct
  source 1..80: mol_type = other DNA
cacaaacattcttaatggcatctagaaaggtgaataatttgcagaaggttttcaattaatgttgcccagatccatcatag

SEQ ID NO: 10770 - DNA, 80 bp, synthetic construct
  source 1..80: mol_type = other DNA
tcaagtgatcctcccaccttggcctcttaaaagtgctgggattacaggcatgagcctgttttgctttcttatcattcgtg

SEQ ID NO: 10771 - DNA, 80 bp, synthetic construct
  source 1..80: mol_type = other DNA
ccttgaattgccacccaagtagctgggactacaggcgcacgccaccacacccagctaatttttgtatttttagtagagat

SEQ ID NO: 10772 - DNA, 80 bp, synthetic construct
  source 1..80: mol_type = other DNA
gattgttatatcctgatttatccacagacctctctgctcactaactgaaactaaccccagtatgtatgtgctgtgtatat

SEQ ID NO: 10773 - DNA, 80 bp, synthetic construct
  source 1..80: mol_type = other DNA
tttttaaatttttttgtagagatagggtcttgctatgttggatcttcctgcattggcctcccaaagtgttgggattacag

SEQ ID NO: 10774 - DNA, 80 bp, synthetic construct
  source 1..80: mol_type = other DNA
aatgtagtttccacaaatgcggcaactgtgtctatttttgtatgtggatatatccataatgtctacacatagtacctggc

SEQ ID NO: 10775 - DNA, 80 bp, synthetic construct
  source 1..80: mol_type = other DNA
ttctgtagtcagagtagaatctgcaaaacacataactgattcacaacactccccttccttaaaccctttaatggctcccc

SEQ ID NO: 10776 - DNA, 80 bp, synthetic construct
  source 1..80: mol_type = other DNA
taggtggaggtcagttcagagagctaaaattacttttcccttttgggtaatatggctgcagtgacacaaattgaacaata

SEQ ID NO: 10777 - DNA, 80 bp, synthetic construct
  source 1..80: mol_type = other DNA
agggttagtatcagagatgtgacacatatagtcaagaggtctgctgaaggctgggcattccatactgcagaacacttgac

SEQ ID NO: 10778 - DNA, 80 bp, synthetic construct
  source 1..80: mol_type = other DNA
tctgcaagttctacatcgtaggattcactcaactgcagatcataaccctacaagcaagaattacatccatttcaaaacat

SEQ ID NO: 10779 - DNA, 80 bp, synthetic construct
  source 1..80: mol_type = other DNA
ctgcataacctttctaaaccatatctaactcttagggttgtggtgaagacttatggtaaggcatagcagttaagagtaca

SEQ ID NO: 10780 - DNA, 80 bp, synthetic construct
  source 1..80: mol_type = other DNA
tatactacaaagtggttacttcaaataatcaagatgtgcctaaaatactctgagagtaccacgcagagaaaatgagaggg

SEQ ID NO: 10781 - DNA, 80 bp, synthetic construct
  source 1..80: mol_type = other DNA
ggacaaagggccagaaacaacaggaaacaaccctgaaaaaatgcaaggatttgattggtattaaacagcatttccctaaa

SEQ ID NO: 10782 - DNA, 80 bp, synthetic construct
  source 1..80: mol_type = other DNA
tggtttagattttgtttttaaagtgaaacacagacctccctgtctttacttccccacccctaaatgatccagggaacaaa

SEQ ID NO: 10783 - DNA, 80 bp, synthetic construct
  source 1..80: mol_type = other DNA
tgcattttaggggaaaaaaatgactgaaaaaacaaaattgaagaacagatgaaatgggagatgaggcaggaggcagtggc

SEQ ID NO: 10784 - DNA, 80 bp, synthetic construct
  source 1..80: mol_type = other DNA
caatgacaaggtttatatctcatatgaagagatggaaaaaaatttttttaatggtagctggggaaagggaggtataagtg

SEQ ID NO: 10785 - DNA, 80 bp, synthetic construct
  source 1..80: mol_type = other DNA
cagagcttccactctacccctactattcccagcccgagtatcctctgttatactttttacttctatgaaatcaactcttt

SEQ ID NO: 10786 - DNA, 80 bp, synthetic construct
  source 1..80: mol_type = other DNA
catttcccaagtcttctacagttttatagcagccatcctacctggggccagatgataccacactgtggtttcaccttgta

SEQ ID NO: 10787 - DNA, 80 bp, synthetic construct
  source 1..80: mol_type = other DNA
agacttagaggacattgacaatctaattcttctaatggtcacgtggaagagtgaatgagcatatgtttgccgcaaataaa

SEQ ID NO: 10788 - DNA, 80 bp, synthetic construct
  source 1..80: mol_type = other DNA
tgggcaacacagcaagactccatctctacaaattttttctttttcaaattagttgggcacagtggtgtgcatttgtccca

SEQ ID NO: 10789 - DNA, 80 bp, synthetic construct
  source 1..80: mol_type = other DNA
ttcacacatttctctatgtctaaagcaatggctgactctcaaagtatgattcctggacaagcagcaccaacatcccaccc

SEQ ID NO: 10790 - DNA, 80 bp, synthetic construct
  source 1..80: mol_type = other DNA
aagtgatggggtgccacttccaagactaaaatactgtggtttccatcttgggtgttttctcttactcccttctagaaagc

SEQ ID NO: 10791 - DNA, 80 bp, synthetic construct
  source 1..80: mol_type = other DNA
ttgggtaactgctctttggacagcactcagcagtagattctcctctccttttctaacaaagccatagtccaactgacata

SEQ ID NO: 10792 - DNA, 80 bp, synthetic construct
  source 1..80: mol_type = other DNA
gattcttctgcatctggggcacactttcatcacagtacactgtccttaattctttatttatctacttctaccacttaact

SEQ ID NO: 10793 - DNA, 80 bp, synthetic construct
  source 1..80: mol_type = other DNA
gtttgagaccagcctagccaacacagtgagaccctctaagaattaaaagaaaaatagtttaagaaaagcaagcaagcaaa

SEQ ID NO: 10794 - DNA, 80 bp, synthetic construct
  source 1..80: mol_type = other DNA
agccttctgcaaagaattcacctttctcgatgccataaagaacatttgtaattcatgggaggaggtaaaactggcaacat

SEQ ID NO: 10795 - DNA, 80 bp, synthetic construct
  source 1..80: mol_type = other DNA
agaatctttcataggtggtaggtatttcttttttgggggaggcagggaggggtgtcaagaaacttcgtatctaaagacat

SEQ ID NO: 10796 - DNA, 80 bp, synthetic construct
  source 1..80: mol_type = other DNA
aattggtcattttatcatttgaggtgactcttctgccaataatgctttctgccttactgtccacctttgatattaactgt

SEQ ID NO: 10797 - DNA, 80 bp, synthetic construct
  source 1..80: mol_type = other DNA
gagtagctggggctatgggcatgcaccaccacacccagctaatttttatattatttgtagagacgggatttcactatgtt

SEQ ID NO: 10798 - DNA, 80 bp, synthetic construct
  source 1..80: mol_type = other DNA
gttcacttctggaatttctatttggttttttgcaaatctattaagttgggtttttcccccccttttcttttttgagacag

SEQ ID NO: 10799 - DNA, 80 bp, synthetic construct
  source 1..80: mol_type = other DNA
tgattacttgtgacaatgtactgttcattgtccttgaaaaattactggaagcaattccctagaatgaaaggcctttctcc

SEQ ID NO: 10800 - DNA, 80 bp, synthetic construct
  source 1..80: mol_type = other DNA
taacccagtcttccaatactgaaaacagaaatcaatttctcctttttacaacaactattttgtacattctctatactacc

SEQ ID NO: 10801 - DNA, 80 bp, synthetic construct
  source 1..80: mol_type = other DNA
tcaaagtccagcaagtcattctaggtcatgtggtgatttggaacaattcttaaatgtgcaaactgtcctgaacattgtgg

SEQ ID NO: 10802 - DNA, 80 bp, synthetic construct
  source 1..80: mol_type = other DNA
ggactacatgtggatgccaccacactcagctaattttttgtagagacaggggctcgctatgttgcccaggctgatctcaa

SEQ ID NO: 10803 - DNA, 80 bp, synthetic construct
  source 1..80: mol_type = other DNA
gaaaagcagttaccagaccactccaaatttagcctacattcatggcaggatagtggcaggtacttcattaaggagtaata

SEQ ID NO: 10804 - DNA, 80 bp, synthetic construct
  source 1..80: mol_type = other DNA
catttctctgttcccctttacaggataattcctcaccatctttacttcccctcctcttctctcttaaaatcacttcaatc

SEQ ID NO: 10805 - DNA, 80 bp, synthetic construct
  source 1..80: mol_type = other DNA
ccactgcgcccggccaaccacagcttttaaataccaaaacacaagtcataattaccagttttcctataaatggaacagtc

SEQ ID NO: 10806 - DNA, 80 bp, synthetic construct
  source 1..80: mol_type = other DNA
tgatgggaattaagtcacctccataaaacattaccagaaattacgctaacaagagctctataaaaataatcagccaggca

SEQ ID NO: 10807 - DNA, 80 bp, synthetic construct
  source 1..80: mol_type = other DNA
ttaaaaatagtctgccaagatattgtattactctctccctggaagtgtagtttcaaaatcggcaaggtgatgctgggtgc

SEQ ID NO: 10808 - DNA, 80 bp, synthetic construct
  source 1..80: mol_type = other DNA
ctgtcacttttcatgaacctcaccaccacataattcaagacagagatatattaactatatactgaagtcttaagtatttg

SEQ ID NO: 10809 - DNA, 80 bp, synthetic construct
  source 1..80: mol_type = other DNA
ttctatagacctctaacctacatcttactttgagaacctcaaatataacatatatagtctcccttagaccaggagtcaga

SEQ ID NO: 10810 - DNA, 80 bp, synthetic construct
  source 1..80: mol_type = other DNA
taacctctgaagaaggtccttgaaaccccaaaacagtgtttttcaaactgcctgttgcagccaatttggctgtcaatttc

SEQ ID NO: 10811 - DNA, 80 bp, synthetic construct
  source 1..80: mol_type = other DNA
catttgtcccaaacgtgctgtcaggaactgcagctacattacaagaatgaaaacgacgctttatccgatgttacagagct

SEQ ID NO: 10812 - DNA, 80 bp, synthetic construct
  source 1..80: mol_type = other DNA
aggtttccagctgctatatccagacccacctcctattcattctaatcaagaaagcaagggatagaaaaacaagaaaagtc

SEQ ID NO: 10813 - DNA, 80 bp, synthetic construct
  source 1..80: mol_type = other DNA
gagaagctcccttctacagaaacagcacaggaagaacagttaataaatatcactctggtatcacacttaaaaaaatgtat

SEQ ID NO: 10814 - DNA, 80 bp, synthetic construct
  source 1..80: mol_type = other DNA
ggaaaactactgttcaccactaaacattaaaacctgggtaaagaggacagtaggaaacacttgttttttaaccaagtaaa

SEQ ID NO: 10815 - DNA, 80 bp, synthetic construct
  source 1..80: mol_type = other DNA
gttaatagtaagtagcaaagagaacttcgagcaaagtcaacagagtaagtcacattacctaatcaataactgtaaaccac

SEQ ID NO: 10816 - DNA, 80 bp, synthetic construct
  source 1..80: mol_type = other DNA
gaacagaggaccagagaccagaaaaggcatcggaaactgcgatttaggattgaaaaagtaaagactaaatcaaaataatt

SEQ ID NO: 10817 - DNA, 80 bp, synthetic construct
  source 1..80: mol_type = other DNA
ctcagaatttcctccccaatgttccactccaacatttgagaactgcccaaggactattctgactttaagtcacataatcg

SEQ ID NO: 10818 - DNA, 80 bp, synthetic construct
  source 1..80: mol_type = other DNA
ctgataaataatgaatcagcatcttgctcaattggtggcgtttaaatggttttaaaatcttctcaggtgaaaaattacca

SEQ ID NO: 10819 - DNA, 80 bp, synthetic construct
  source 1..80: mol_type = other DNA
tatttttagtagagatggggtttcgccatattggccaggctggtctcaaactcctgatgtcaggtgatccgccctgaggc

SEQ ID NO: 10820 - DNA, 80 bp, synthetic construct
  source 1..80: mol_type = other DNA
tatttaaaatgtgccaagaactgtgctactcaagcaccaggtaatgagtgataaaccaaacccatgcaaaaggaccccat

SEQ ID NO: 10821 - DNA, 80 bp, synthetic construct
  source 1..80: mol_type = other DNA
tggggcactggcccagcccatcatttctctctctctctttttttttgagacggagtctcgctctgtcgcccgggctggag

SEQ ID NO: 10822 - DNA, 80 bp, synthetic construct
  source 1..80: mol_type = other DNA
atgatgaaagctccttcaccacagaagcaccacacagctgtaccatccattccagttgatctaaaatggacatttagatg

SEQ ID NO: 10823 - DNA, 80 bp, synthetic construct
  source 1..80: mol_type = other DNA
taagctttatagcagtcctaagcataacattgtattaagtgtcaagtttaattagaaaatgttcatggagagggctgggc

SEQ ID NO: 10824 - DNA, 80 bp, synthetic construct
  source 1..80: mol_type = other DNA
agaaatagaatagcctctagaacatttcagcaatctgaggaacccccatcgtgggatcttgcttataatactccactatg

SEQ ID NO: 10825 - DNA, 80 bp, synthetic construct
  source 1..80: mol_type = other DNA
ccttctcactactctgagaatggccattgtatctttaggccacctaagcagtttttaatctagaagtgaagccaggttct

SEQ ID NO: 10826 - DNA, 80 bp, synthetic construct
  source 1..80: mol_type = other DNA
gccaaggcctaaaattcacctggcttcaaagagactgcgatagagaaaaaaatcaggaagctaaaaatacacggatggcc

SEQ ID NO: 10827 - DNA, 80 bp, synthetic construct
  source 1..80: mol_type = other DNA
cgagacggcgccactgcactccagcctgggtgacatagcgagactctgtctcaaaaaaaaaaagaaatttgaagtttcag

SEQ ID NO: 10828 - DNA, 80 bp, synthetic construct
  source 1..80: mol_type = other DNA
tcactgcaacctccgcctcctgggttcaaccgattctctagcctcagcctcccgagtaatcctgagctaggattacaggt

SEQ ID NO: 10829 - DNA, 80 bp, synthetic construct
  source 1..80: mol_type = other DNA
ctggccaacatggcaaaaccccatctctaataaaaatataaaaattaaggccgggtgcagtggctcatgcctgtaatccc

SEQ ID NO: 10830 - DNA, 80 bp, synthetic construct
  source 1..80: mol_type = other DNA
ttccgagtagctggaactacaagtacatgccaccacgcctggctaatttttgtatattttttttggtagagatggggttt

SEQ ID NO: 10831 - DNA, 80 bp, synthetic construct
  source 1..80: mol_type = other DNA
gctgaaagaaaccaaacacaacccatcaggataagagaaagagaagcttccttcaatggaagtggagcagacacgtcata

SEQ ID NO: 10832 - DNA, 80 bp, synthetic construct
  source 1..80: mol_type = other DNA
gctgggcaacacagtgagaccccttctctagaaaaaagatacataaaacctcagccaggcatagttgcatgtgcctgcag

SEQ ID NO: 10833 - DNA, 80 bp, synthetic construct
  source 1..80: mol_type = other DNA
tacccctgagcttcatacaatgtgtccaactgcctacttaacttctctatccagaagtctagtatacatctcaaaattca

SEQ ID NO: 10834 - DNA, 80 bp, synthetic construct
  source 1..80: mol_type = other DNA
cctgccccagcctcccaagtagctgtgattacaggcacatgccaccattcccagctaatttttttttgtttttgagatgg

SEQ ID NO: 10835 - DNA, 80 bp, synthetic construct
  source 1..80: mol_type = other DNA
tcccttcatttttcaaggacaattatttcttgttatttaggtctcagctcaattttttcagaaaggctttccctggcctc

SEQ ID NO: 10836 - DNA, 80 bp, synthetic construct
  source 1..80: mol_type = other DNA
ctttcacatttcattttgcctgatctgttgtcacagaagttctcagatggctgttctgaaattattcctcctcctacact

SEQ ID NO: 10837 - DNA, 80 bp, synthetic construct
  source 1..80: mol_type = other DNA
ggttagagtgcaatgatgcgatctcagctcactgcaacccccgcctcccaggttcaagtgattctcctgcctcagcctcc

SEQ ID NO: 10838 - DNA, 80 bp, synthetic construct
  source 1..80: mol_type = other DNA
ataagtttgcctgctgcacatggattcctgccgactattaaataaatccctagctcatatgctaacattgctaggagcag

SEQ ID NO: 10839 - DNA, 80 bp, synthetic construct
  source 1..80: mol_type = other DNA
gaaagcagtagctaaagaatcacttgtttatttcccagtgtttcaaaggcccttctgaagaactaagcaaactaaggaaa

SEQ ID NO: 10840 - DNA, 80 bp, synthetic construct
  source 1..80: mol_type = other DNA
tcatcatcaagtgaactggaacacatccagagaactaattttgttagaaagattttagagttgagccacacaatctgcat

SEQ ID NO: 10841 - DNA, 80 bp, synthetic construct
  source 1..80: mol_type = other DNA
tttcctgaaaaactctcaacaatactcaaactaggtgttacatgaagctggggtctccaggttttgcctcacttgttctt

SEQ ID NO: 10842 - DNA, 80 bp, synthetic construct
  source 1..80: mol_type = other DNA
ttgtctttcataaagtaattgattgactattagaagactatcatccatgctatgctcaacaaatattcttattttttcac

SEQ ID NO: 10843 - DNA, 80 bp, synthetic construct
  source 1..80: mol_type = other DNA
atattataaacctactacgtaccacaaaacttaaaacttaaaaaatatatactgggccagacacggcagctcatgcctat

SEQ ID NO: 10844 - DNA, 80 bp, synthetic construct
  source 1..80: mol_type = other DNA
ttgtctgataaataactttgtttaccaagggccatcatttactagccatagccacagccactcacaccagtatttacgtg

SEQ ID NO: 10845 - DNA, 80 bp, synthetic construct
  source 1..80: mol_type = other DNA
agatatttcagaatgacttggtcatctctcagtgtgcaataaatggcacacccactactgaatccatttgataatctggt

SEQ ID NO: 10846 - DNA, 80 bp, synthetic construct
  source 1..80: mol_type = other DNA
tgaccctttctgttgaagctgtcaattctggcttctccctgctcacactttcttccattgcattatacccagcagtatca

SEQ ID NO: 10847 - DNA, 80 bp, synthetic construct
  source 1..80: mol_type = other DNA
acattattttaaaaataaaagtttatgggccgagcacggtggctcacacctgtaatcccagcactttgggaggccgagac

SEQ ID NO: 10848 - DNA, 80 bp, synthetic construct
  source 1..80: mol_type = other DNA
tttatagagatcaggtctcgctacattgcccaggctggtcttgaactcttggcctcgagcaattctcccaccttggcctc

SEQ ID NO: 10849 - DNA, 80 bp, synthetic construct
  source 1..80: mol_type = other DNA
agtgattctgctgcctcagcctccagagtagctaggattacgggcatgcactagcacacccagttaatttttttgtattt

SEQ ID NO: 10850 - DNA, 80 bp, synthetic construct
  source 1..80: mol_type = other DNA
aatgatgggcatttagaaggggatgacctagaaagataaatggaaggagaaaaccatcgccaccaattgtgaaaggacaa

SEQ ID NO: 10851 - DNA, 80 bp, synthetic construct
  source 1..80: mol_type = other DNA
cagaggttaattaatttaaacaattattgggtgcttactatgggtcaaatactaaggctaggccccctggattgaagatg

SEQ ID NO: 10852 - DNA, 80 bp, synthetic construct
  source 1..80: mol_type = other DNA
caagcttgttcaggttttacctccattatatttttttctgaccttcagaagggacatatctatctaaccgcacatttctc

SEQ ID NO: 10853 - DNA, 80 bp, synthetic construct
  source 1..80: mol_type = other DNA
gaaaaaaacaaataaaccccctaaaccaacacatacacaaaaaaatcccaaggtgctggttgataagaaatcttaaataa

SEQ ID NO: 10854 - DNA, 80 bp, synthetic construct
  source 1..80: mol_type = other DNA
atacccagcctggtctagaactcttaaactcaagtgatcctcctgccttggcatctcacagtgctgggattataggcgtg

SEQ ID NO: 10855 - DNA, 80 bp, synthetic construct
  source 1..80: mol_type = other DNA
tgatatatgttctctaggccttttagaaaacatggagttgttcctttggccatgtatatgcgaatctgtaagaaaggtga

SEQ ID NO: 10856 - DNA, 80 bp, synthetic construct
  source 1..80: mol_type = other DNA
taaggaagacactggaagacaacagatattaagaaataataaactaggccaggcaccgtagctcccaagtaggtgggatt

SEQ ID NO: 10857 - DNA, 80 bp, synthetic construct
  source 1..80: mol_type = other DNA
ttagactgaagatggtgaaagtaccctaaagaagagtattatactggggatgggactctgatctctcattatctgagaga

SEQ ID NO: 10858 - DNA, 80 bp, synthetic construct
  source 1..80: mol_type = other DNA
agtactttttcatagctttctgaaattatggggttgcctgtcaccaatttctcccattccacttagcttccaatagagca

SEQ ID NO: 10859 - DNA, 80 bp, synthetic construct
  source 1..80: mol_type = other DNA
tgagggaaaaaatcctcaaattcccccaaatagacttgatgttattgtgatgtccttttgaagttggttattttctttta

SEQ ID NO: 10860 - DNA, 80 bp, synthetic construct
  source 1..80: mol_type = other DNA
tttttgcttatgggctcctgttgtttattggtccatttcaaagaagagtgtgctaagtccaagtatttgataaacaaaga

SEQ ID NO: 10861 - DNA, 80 bp, synthetic construct
  source 1..80: mol_type = other DNA
aatgcttcacaggctgtattagtcactactgtcacaaccatcacatctaacctctacgtggccattacataaatcagaaa

SEQ ID NO: 10862 - DNA, 80 bp, synthetic construct
  source 1..80: mol_type = other DNA
ggataaaattcctcaacatagcattcaaaaggccctttataccctggtattatctctcatttctcccaacacccctcaca

SEQ ID NO: 10863 - DNA, 80 bp, synthetic construct
  source 1..80: mol_type = other DNA
ctgcctgtgctactttagacgtaagacagcctgaaatctgacttcaacggttttgggtagatgcttagtaaaaacacgtt

SEQ ID NO: 10864 - DNA, 80 bp, synthetic construct
  source 1..80: mol_type = other DNA
ttagctatcaggatgccactatagtgatgtacataatagcaaactgtgcctcttaccctgaaacctccaacattcagcaa

SEQ ID NO: 10865 - DNA, 80 bp, synthetic construct
  source 1..80: mol_type = other DNA
ttttttttaactgctccttgtggagcaaggcttatctataggcaatgtacccagagtaaccaaatgtaactattctaggt

SEQ ID NO: 10866 - DNA, 80 bp, synthetic construct
  source 1..80: mol_type = other DNA
taggagaaagagcctggttctatgatgaagatgatattcatttttagacgttgtgatacagaatgttttttctagactat

SEQ ID NO: 10867 - DNA, 80 bp, synthetic construct
  source 1..80: mol_type = other DNA
tcctgctgtggctcctttttctcacctctcttgatacagtaagtgccgtcatgtttttgctataggggaaatgatgtgtt

SEQ ID NO: 10868 - DNA, 80 bp, synthetic construct
  source 1..80: mol_type = other DNA
acccagatgctgcttcaccttaaataacaaaaacagaggttcagatgtaaaagcagactataaacgctgcaacttgctgt

SEQ ID NO: 10869 - DNA, 80 bp, synthetic construct
  source 1..80: mol_type = other DNA
gatgcttacaattacttccaggaagactttgtttatagacctcaggttgcaaaacccctaatctaagcatagcattcaat

SEQ ID NO: 10870 - DNA, 80 bp, synthetic construct
  source 1..80: mol_type = other DNA
gtaacgagatactttcctgagtgccataatcagtaccaggtaccaatgaaatactgctactctctacagatctttcagtt

SEQ ID NO: 10871 - DNA, 80 bp, synthetic construct
  source 1..80: mol_type = other DNA
tcacttgaccattctgctccgtttggttagttccctgatttatcatttcaggagtcttttgaactgccaaatctgctttc

SEQ ID NO: 10872 - DNA, 80 bp, synthetic construct
  source 1..80: mol_type = other DNA
ggaggtggaaatcaaccaactggctatattagagaaactaacctcataaactaccaagtatactgaagatgtagctcata

SEQ ID NO: 10873 - DNA, 80 bp, synthetic construct
  source 1..80: mol_type = other DNA
cagaatccaaactgatttcatccctggttccttgaggggtgatttgtaacaattcttgatctcccacactatagggaaaa

SEQ ID NO: 10874 - DNA, 80 bp, synthetic construct
  source 1..80: mol_type = other DNA
tgtatatgaggaacttagagaacaatctgctagaagcaagcatgtgcagagttctactgttatcctaaattcctttggac

SEQ ID NO: 10875 - DNA, 80 bp, synthetic construct
  source 1..80: mol_type = other DNA
aaaagcacaggctctgacatctaacttcctaggtttgaatcatggctcagccacttactaggtttaataccttggaaaaa

SEQ ID NO: 10876 - DNA, 80 bp, synthetic construct
  source 1..80: mol_type = other DNA
gtggtgtagtgttggctcattgtaacctccgcctccctggttcaagcgattctcctgcctcagcctcccaagtagctggg

SEQ ID NO: 10877 - DNA, 80 bp, synthetic construct
  source 1..80: mol_type = other DNA
gcgtcttttacattttttataactcaccatagggctcataaaattcacttcccaaagctgcctaccacaaatacaaatta

SEQ ID NO: 10878 - DNA, 80 bp, synthetic construct
  source 1..80: mol_type = other DNA
tttgaagctgatacttgatatacattccaatcacatctgataacttttttttttgttttggggggtgtacagagtcctgc

SEQ ID NO: 10879 - DNA, 80 bp, synthetic construct
  source 1..80: mol_type = other DNA
agaacaattacttttttttcttttttgagacagagtctcactctacggcccaggctggagtgcagtggcgcgatcttggc

SEQ ID NO: 10880 - DNA, 80 bp, synthetic construct
  source 1..80: mol_type = other DNA
agtccgccatcacgctcagctaatttttctgtgtttttagtagagacgggctttcaccatgtgagccaggatagtcttga

SEQ ID NO: 10881 - DNA, 80 bp, synthetic construct
  source 1..80: mol_type = other DNA
atatcagtgaccttatggctattttagataagcatcacagagcagataaagctccaaagcaaggaagggcctataagagc

SEQ ID NO: 10882 - DNA, 80 bp, synthetic construct
  source 1..80: mol_type = other DNA
gaagaagaagaaaacaaatggttttaccaaggaaggattttcgggttcactctgtagaagtcttttggcacggtttctgt

SEQ ID NO: 10883 - DNA, 80 bp, synthetic construct
  source 1..80: mol_type = other DNA
tgcagcaacagtagaaaacctctataatcaatacatcattgacatctgtataaaccgtgtgatggcagtgatttagtaac

SEQ ID NO: 10884 - DNA, 80 bp, synthetic construct
  source 1..80: mol_type = other DNA
agtctgcaagtttttacactagaagcattagagaaaggcagtaagtttctaatacctgtataaggcagatgtcccataaa

SEQ ID NO: 10885 - DNA, 80 bp, synthetic construct
  source 1..80: mol_type = other DNA
tcaagaaagtgtggtaatagcataagaatagacacatacatcaataaaatggaattgacagtacagaaataaactcatac

SEQ ID NO: 10886 - DNA, 80 bp, synthetic construct
  source 1..80: mol_type = other DNA
tagatggaggggattcaatagaaaagcaaaataagatcctgcaaaataaaacataaaggacataatatactggtgaaggg

SEQ ID NO: 10887 - DNA, 80 bp, synthetic construct
  source 1..80: mol_type = other DNA
tacctatctatctgtctacagtcttgaactcccgacctcaagtgatcgcctgcttcagcctcccaaagtgctgggattac

SEQ ID NO: 10888 - DNA, 80 bp, synthetic construct
  source 1..80: mol_type = other DNA
caattcagagcaggggtagggaggaaattcccttatgatagtactgcagaatatagtacagtagagtgacaagctaagct

SEQ ID NO: 10889 - DNA, 80 bp, synthetic construct
  source 1..80: mol_type = other DNA
ctgggtgcggtggctcatgcctataatcccaccattttgggaggtggaggtgggcggatcacttgaggtcagctcaagac

SEQ ID NO: 10890 - DNA, 80 bp, synthetic construct
  source 1..80: mol_type = other DNA
tgggtcaataaagttgttttatttttagcaattagagtttatccgtagaaaatacaattaatacaacaaaagcatggggg

SEQ ID NO: 10891 - DNA, 80 bp, synthetic construct
  source 1..80: mol_type = other DNA
gcttgaaaccaagcttctcactcttctccagttgccaactctaatcctctcaatctcaacagctgttttttgttgttttt

SEQ ID NO: 10892 - DNA, 80 bp, synthetic construct
  source 1..80: mol_type = other DNA
ccgcgcccgtcctctattttcttttatttgtacatttgctcgtattattatctctgcctataagcctataatttccttct

SEQ ID NO: 10893 - DNA, 80 bp, synthetic construct
  source 1..80: mol_type = other DNA
gaactctggaatttaaaaattcctcaaaggatacataagaaattgatcattgtggttgtctggggagggaacagggaggc

SEQ ID NO: 10894 - DNA, 80 bp, synthetic construct
  source 1..80: mol_type = other DNA
tttaccaggaactatgattacaaccaacttttgataactatatactctctgagaaagaatgaaatggagttggatttttc

SEQ ID NO: 10895 - DNA, 80 bp, synthetic construct
  source 1..80: mol_type = other DNA
caccctggtccaacaaccatcaactcatggccaagctgtttcacccatatccacccctaccccagattattttaattatt

SEQ ID NO: 10896 - DNA, 80 bp, synthetic construct
  source 1..80: mol_type = other DNA
aatatggtgaaaccctgtctacgctaaaaatacaaaaattagccgggcgtggtggcgcatgcctgtggtctcagctactt

SEQ ID NO: 10897 - DNA, 80 bp, synthetic construct
  source 1..80: mol_type = other DNA
tgctaaaatgtaataatccaggaggatattgtagggaaagagcatcagagaggtagctggtaacttttggtaggaacctg

SEQ ID NO: 10898 - DNA, 80 bp, synthetic construct
  source 1..80: mol_type = other DNA
gatcacaagaaaagcttgtggacagtaaccttattgtgaagggttgtaatacaactcttgtaatcatggggtttttgaca

SEQ ID NO: 10899 - DNA, 80 bp, synthetic construct
  source 1..80: mol_type = other DNA
tgaaatatgatccctatcctagaactttccatacaaatgaatgtaaaacaccataaaaattaatcttaaggccgggcgcg

SEQ ID NO: 10900 - DNA, 80 bp, synthetic construct
  source 1..80: mol_type = other DNA
aaaaaaacaaaacaaaacaaaacaaaaagtctgggagcggtggctcacgcctgtaatcccagcactttcggaggccaagg

SEQ ID NO: 10901 - DNA, 80 bp, synthetic construct
  source 1..80: mol_type = other DNA
ggcaagggagaggatggttatttataaatcttgtatcgctctgaaaacacaacatacattttccttaatctgattaactt

SEQ ID NO: 10902 - DNA, 80 bp, synthetic construct
  source 1..80: mol_type = other DNA
gtaaataagtatgtaatttcattgtatgtacagagccagtttcaaacaaaggttcttccaaatacctatcctctcaacga

SEQ ID NO: 10903 - DNA, 80 bp, synthetic construct
  source 1..80: mol_type = other DNA
atcataggaatcccaaattaatacactcttgtgctgacttaccagatgggacactctaagattttctgcatagcattaat

SEQ ID NO: 10904 - DNA, 80 bp, synthetic construct
  source 1..80: mol_type = other DNA
ctcgcgacctacaaactgcccccctccccagggttcacaacgccttacgcctctcaggttccgcccctaccccccgtcaa

SEQ ID NO: 10905 - DNA, 80 bp, synthetic construct
  source 1..80: mol_type = other DNA
atataagtaataaggattgttgggggggtggagggaaataattatttccagcatgcgttgcggaatgaaaggtcttcgcc

SEQ ID NO: 10906 - DNA, 80 bp, synthetic construct
  source 1..80: mol_type = other DNA
cgctcgctctcggcgcctcctcggccttggcgtccattctggccgtgctggaggagcccttcagcccgccactgcgctgt

SEQ ID NO: 10907 - DNA, 80 bp, synthetic construct
  source 1..80: mol_type = other DNA
gtgcctgtaatcccctctactggggaggttgaggcaggagaatggcgtgaacccgggaggcggagcttgcagtgagccca

SEQ ID NO: 10908 - DNA, 80 bp, synthetic construct
  source 1..80: mol_type = other DNA
aaagaccagcccaggctggtcttgaactcctgagctcaagcgatcctcctgccttggcctcccaaagtgctgggattaca

SEQ ID NO: 10909 - DNA, 80 bp, synthetic construct
  source 1..80: mol_type = other DNA
ccgcttttggcagactgagtcagtcacttcattttcctgattttttgcctaaggtcctggtgaattgacaaagattctgc

SEQ ID NO: 10910 - DNA, 80 bp, synthetic construct
  source 1..80: mol_type = other DNA
cagttttatgtctagtaatgggccagagctgtgtctagaacccaagtcttcccattttttgtgctcacacacatacacac

SEQ ID NO: 10911 - DNA, 80 bp, synthetic construct
  source 1..80: mol_type = other DNA
ttttattgaaccccgtctctactaaaaatacaaaaaattagccaaatgtggcagcaggcgcctgtagtcctagctacttg

SEQ ID NO: 10912 - DNA, 80 bp, synthetic construct
  source 1..80: mol_type = other DNA
gagaatcctacttctatcacttactagttctgtggctctggccgcccccgcccaagttacttaacctctttttttttttt

SEQ ID NO: 10913 - DNA, 80 bp, synthetic construct
  source 1..80: mol_type = other DNA
catgatcttcgctcactgcaagctccgcctcccgggttcaagcaattatcataccttagcctcctgagtagctgggacta

SEQ ID NO: 10914 - DNA, 80 bp, synthetic construct
  source 1..80: mol_type = other DNA
ttcaaagaagtggggtggcttgggaagtaaaagaagatctggagataggagttcctaaaaagcagacaagagattaccga

SEQ ID NO: 10915 - DNA, 80 bp, synthetic construct
  source 1..80: mol_type = other DNA
gaactttcttccaactgccgtttgggatggttgattaggacgcgttgctgtggcggtagctcaccaatccaatgcatgca

SEQ ID NO: 10916 - DNA, 80 bp, synthetic construct
  source 1..80: mol_type = other DNA
taaaaacttaaacataagatctaaaaccataaaaaccctaaaagaaaacctaggcaataccattcaggacataggcaggg

SEQ ID NO: 10917 - DNA, 80 bp, synthetic construct
  source 1..80: mol_type = other DNA
gtgtgagttggaagggaggcattgaggatcagccatttaaagcagcatacaaggatgttcaaggctcgagatccacaggt

SEQ ID NO: 10918 - DNA, 80 bp, synthetic construct
  source 1..80: mol_type = other DNA
ccaaacaaacaaaacccctgaacttccctgcgggcacattttctctggcagcctttttcaatgagagctatgttttctcc

SEQ ID NO: 10919 - DNA, 80 bp, synthetic construct
  source 1..80: mol_type = other DNA
gtctttttttttttttaaatttatcatttttcttttctcccaggtgttttttccttttttttttttttaacttttatttt

SEQ ID NO: 10920 - DNA, 80 bp, synthetic construct
  source 1..80: mol_type = other DNA
tttgtagtgtcctgtctagaaggcctttccttcctcttttctgctcagaaaacttttcttccacttcccttcttctaagc

SEQ ID NO: 10921 - DNA, 80 bp, synthetic construct
  source 1..80: mol_type = other DNA
gagctatgaatgcaccactgcactccaggctgggtgacacatcaagaccctgtctcaaaagaaaaatgtgcacatttgag

SEQ ID NO: 10922 - DNA, 80 bp, synthetic construct
  source 1..80: mol_type = other DNA
ttctcaccatccgtatgttattgttattgactcttcaatggcaaccatggcttatccccctttatctccctatgtcctac

SEQ ID NO: 10923 - DNA, 80 bp, synthetic construct
  source 1..80: mol_type = other DNA
ataaagacacttttcattctcagtaaggaactttgggagataattggggcaggcagctaaagaacaggtgtcttttgtct

SEQ ID NO: 10924 - DNA, 80 bp, synthetic construct
  source 1..80: mol_type = other DNA
tccatctcaataaaaaaaataaagtgaattttcctccatcttgtaagggcgaaaagccccctaccatgtctgaatgaaca

SEQ ID NO: 10925 - DNA, 80 bp, synthetic construct
  source 1..80: mol_type = other DNA
gttcgagaccagcctggccaacatagcgagagcagctccggtggcgggaggagtggcagcggccaggcagcccagcttcg

SEQ ID NO: 10926 - DNA, 80 bp, synthetic construct
  source 1..80: mol_type = other DNA
gtagtagaattgtttcctaaagaaaacaactccttgattatggctcaccctgttggagttgtgggcactctgtaacatct

SEQ ID NO: 10927 - DNA, 80 bp, synthetic construct
  source 1..80: mol_type = other DNA
aaaaaagaaaaataagtaattttacaggaggcctgaggtgggctagggtcactctgtgttctcctcctagggcagggcct

SEQ ID NO: 10928 - DNA, 80 bp, synthetic construct
  source 1..80: mol_type = other DNA
ttagaattctgtgaggtttgtataaaaggaatagagtgggggcccaaaaaccagtaagatgagaaagtactgtttgctca

SEQ ID NO: 10929 - DNA, 80 bp, synthetic construct
  source 1..80: mol_type = other DNA
ccatcacaacaaccactatctccaaatctgtattcattccttttaattcattataagtctcatctacctaatgagataac

SEQ ID NO: 10930 - DNA, 80 bp, synthetic construct
  source 1..80: mol_type = other DNA
tcagactaaactataataaaagagaaagcagagagagtaagagcacctcatatggaatcacctacatttcagaagctgga

SEQ ID NO: 10931 - DNA, 80 bp, synthetic construct
  source 1..80: mol_type = other DNA
aagtccctgttttgggaagaatgaagctgagctctagctaaaaaaaaacaactccatttggggatctaaaaattttgcag

SEQ ID NO: 10932 - DNA, 80 bp, synthetic construct
  source 1..80: mol_type = other DNA
tttgagaccagcctggccaacataacaagaccacatctctactaaaaatacaaaaatgagccacatgtggtggcgcatgc

SEQ ID NO: 10933 - DNA, 80 bp, synthetic construct
  source 1..80: mol_type = other DNA
caagtggagggtagaactgcatttattcatccttttccaacacatctagcaagacgtagtagagacgcaagagaaatttg

SEQ ID NO: 10934 - DNA, 80 bp, synthetic construct
  source 1..80: mol_type = other DNA
gcttccccctgcacagatctcccccaccccaccaaatgcttaaaaggtaacttaactctttgttcagggctcagtccttt

SEQ ID NO: 10935 - DNA, 80 bp, synthetic construct
  source 1..80: mol_type = other DNA
ctttagaaaatacatcaccccagttcccatccctacctgtctatccacaaaaccaaggcattcctgagagtaattcattt

SEQ ID NO: 10936 - DNA, 80 bp, synthetic construct
  source 1..80: mol_type = other DNA
agcatcagagaggtagctggtaacttttggtaggaacctgccagctattttaaatctttagctttattctggtcttttta

SEQ ID NO: 10937 - DNA, 80 bp, synthetic construct
  source 1..80: mol_type = other DNA
ggggaaaccccgcctctgctaaaactacaaaaattaaccaggcatggtggcacgcacctgtagtcctggctactcgggag

SEQ ID NO: 10938 - DNA, 80 bp, synthetic construct
  source 1..80: mol_type = other DNA
aggtcctgatgagagtaaatgtttactataaaaatgattcaaatattttaaacacttttcaaaccaggcaatattttagg

SEQ ID NO: 10939 - DNA, 80 bp, synthetic construct
  source 1..80: mol_type = other DNA
tcactctgattgtcatgagtaagttgtgctttttcaaaagcagttttttcctacaatgtcatttcctgcttctctggctc

SEQ ID NO: 10940 - DNA, 80 bp, synthetic construct
  source 1..80: mol_type = other DNA
ctgctactctggaggctgaggtgggaggatcgcttgagcctggcgaggttgaggctgcagtgagctgtgatagcaccact

SEQ ID NO: 10941 - DNA, 80 bp, synthetic construct
  source 1..80: mol_type = other DNA
gctaaaggctttgatgatttgcagtattcttatttaaatgtacagagccagcttcagaggaaggttcttccaaagaccta

SEQ ID NO: 10942 - DNA, 80 bp, synthetic construct
  source 1..80: mol_type = other DNA
gagggagcagtaagtaggttcctattactattataactcttattataagagttttaaatcctcctagcgctgggaaccat

SEQ ID NO: 10943 - DNA, 80 bp, synthetic construct
  source 1..80: mol_type = other DNA
attactagctctaaggggttacattgtcccttagcacaggaagggccatttttttcctttctgaaggtggactggatcct

SEQ ID NO: 10944 - DNA, 80 bp, synthetic construct
  source 1..80: mol_type = other DNA
tcactttgcaggggttggcgaagctactcccgtccacgtacccctcacagtctactgatgtttaaggatagtctcggagg

SEQ ID NO: 10945 - DNA, 80 bp, synthetic construct
  source 1..80: mol_type = other DNA
gctaactgcatcctttcaggtctccaaggaacgctaagtttcctccctgttgtgagagacatgaagtgaacttagtgttg

SEQ ID NO: 10946 - DNA, 80 bp, synthetic construct
  source 1..80: mol_type = other DNA
aggctggctcgagtttttcttctttccacctttcgatgagaatgtgatcttcaggctggtgctggtttactagaaattct

SEQ ID NO: 10947 - DNA, 80 bp, synthetic construct
  source 1..80: mol_type = other DNA
ctctttttatataaattccgccccccctttttttccttttttttttcgaagatgataaccattcttttccaaagcgaacc

SEQ ID NO: 10948 - DNA, 80 bp, synthetic construct
  source 1..80: mol_type = other DNA
aaagaaccggtaaaaagggcgcacacacagttttgcagtttgcaccaaaccaaaatcagagtatccagaaatccaagcca

SEQ ID NO: 10949 - DNA, 80 bp, synthetic construct
  source 1..80: mol_type = other DNA
agaaaaccaaaatgccagttaatctaaactagattcctgccccagtgcagaaccaatcaagacagggtccctgtctttca

SEQ ID NO: 10950 - DNA, 80 bp, synthetic construct
  source 1..80: mol_type = other DNA
ctacaggggagtgactgaccgggtaagtggtgagctttctccaatgcttctggctgttttctttttcttgcataaaacca

SEQ ID NO: 10951 - DNA, 80 bp, synthetic construct
  source 1..80: mol_type = other DNA
ccatccccggcgaccagctgatgttcttatacacatggtgtccccttcaaggcacattccagttcctatcaggaggattc

SEQ ID NO: 10952 - DNA, 80 bp, synthetic construct
  source 1..80: mol_type = other DNA
gcaaaattccagatcatctgagggcaactcaaccaagatccacagaaaggggaggatggagggatcccgtcccttctgta

SEQ ID NO: 10953 - DNA, 80 bp, synthetic construct
  source 1..80: mol_type = other DNA
gggctcctactgtcacacagcagtctaggacatactagactacaagatcatttgcagaagggccccagagtcaagacgtc

SEQ ID NO: 10954 - DNA, 80 bp, synthetic construct
  source 1..80: mol_type = other DNA
gagaaccattctaggtctttccagcccatggtgatccataccccctctgcactctcaggacactaaatatctgttattat

SEQ ID NO: 10955 - DNA, 80 bp, synthetic construct
  source 1..80: mol_type = other DNA
acctaaatccagtgatggaatcttattgtccacagtcttttgtggtatgtgctaccaccgaagatcctctcctaacctat

SEQ ID NO: 10956 - DNA, 80 bp, synthetic construct
  source 1..80: mol_type = other DNA
catctcacatgatctctgtgggccactatttcctcatgaataacccaaaaagacctaactaggtgtcattaaagaccttc

SEQ ID NO: 10957 - DNA, 80 bp, synthetic construct
  source 1..80: mol_type = other DNA
gtttcttatcactgtacccagggctctcccaaagccccagcctaggccccactctccctcttgggttattgaatatctca

SEQ ID NO: 10958 - DNA, 80 bp, synthetic construct
  source 1..80: mol_type = other DNA
aaaaaaagcatcagtgttaatttcctgattttgtggttatgttgtggttacatagaagaattatgcaggataacgccctt

SEQ ID NO: 10959 - DNA, 80 bp, synthetic construct
  source 1..80: mol_type = other DNA
cacctggacccatacccagtggaacattttaagagcccttcatggatcacctttctttagagagaactgttctttttttt

SEQ ID NO: 10960 - DNA, 80 bp, synthetic construct
  source 1..80: mol_type = other DNA
gcaggagaaaggcaaaagttacccagatcacaccaactgcacttgacaaggccacccagttctttctgaacctttcagac

SEQ ID NO: 10961 - DNA, 80 bp, synthetic construct
  source 1..80: mol_type = other DNA
gagggggctcacattggaaggcactctcaccttccgtcttgatcttgagtgccgtgcggaccagggcaaagagtgtggca

SEQ ID NO: 10962 - DNA, 80 bp, synthetic construct
  source 1..80: mol_type = other DNA
gttaggattaactgttgtctacaaaatgggtaccccaaaataggctctctcctttggcgcattccctcagatatgggata

SEQ ID NO: 10963 - DNA, 80 bp, synthetic construct
  source 1..80: mol_type = other DNA
ctggccttgctaaattccttttgatgagtgctaaccaaaacaaaaaaaaaaagtaagaacttttggcagcctctctggag

SEQ ID NO: 10964 - DNA, 80 bp, synthetic construct
  source 1..80: mol_type = other DNA
caagcaggagctaaactttagagaagagggcaaaatcaatctgattcaagttactagagggatgcactgttctgaccaaa

SEQ ID NO: 10965 - DNA, 80 bp, synthetic construct
  source 1..80: mol_type = other DNA
ttcactcagtggaggagcccagtgcaaaataaagctgtgggaccacttgttcaaaatgatgaatatcttcaaggcagtga

SEQ ID NO: 10966 - DNA, 80 bp, synthetic construct
  source 1..80: mol_type = other DNA
tcagcagcttgatcagcctcatgacacggaacaggcggaagaaggcgctggagatgcgggcactctcatctgggtcctgc

SEQ ID NO: 10967 - DNA, 80 bp, synthetic construct
  source 1..80: mol_type = other DNA
aactgtcactaaggtcctttgccagcgatcacagttctctctggactgtgtttccatctgcatagagggtgccagagaga

SEQ ID NO: 10968 - DNA, 80 bp, synthetic construct
  source 1..80: mol_type = other DNA
tcacctgaagaactcgaaaaacacatatacctttgctgggtctgcacttaggtcaattaagtcagcttctaggggatggg

SEQ ID NO: 10969 - DNA, 80 bp, synthetic construct
  source 1..80: mol_type = other DNA
cctcagagactccagacttttcctcagccattcctctcacccacaccccacctcaggcatccccagtgctgatccttcca

SEQ ID NO: 10970 - DNA, 80 bp, synthetic construct
  source 1..80: mol_type = other DNA
ctacagtttagtttgttcgcaacacagcagccacagtgattgttttagaactaaagtctgttcacacttaaaccctccaa

SEQ ID NO: 10971 - DNA, 80 bp, synthetic construct
  source 1..80: mol_type = other DNA
cgactttcctttccgttacagctcttgcctttgatagtgtagtaggtacacccattgtgtccccctggtatctgagttac

SEQ ID NO: 10972 - DNA, 80 bp, synthetic construct
  source 1..80: mol_type = other DNA
tgagaacgaaagagacaaggcaagattttcccccagccctgggactgttcttcagaaacttcagagcaggcgagaatgta

SEQ ID NO: 10973 - DNA, 80 bp, synthetic construct
  source 1..80: mol_type = other DNA
ccagggatctcttacccttttattagaaagtggatgaaattctacctcttccacaaaaccttccaggtagtttgggagga

SEQ ID NO: 10974 - DNA, 80 bp, synthetic construct
  source 1..80: mol_type = other DNA
acatttttctcctggggagcccttacctgcatgccgaggcagatggtgttgagcatgatgagggcaaacatcaggtattc

SEQ ID NO: 10975 - DNA, 80 bp, synthetic construct
  source 1..80: mol_type = other DNA
ctggctgtggagagccaagagagccttctcaacaatcaagttacgggacaggagttaggtcggcgccaggaaagaccaga

SEQ ID NO: 10976 - DNA, 80 bp, synthetic construct
  source 1..80: mol_type = other DNA
cccctgcagccaggaagagggagggagggagggaggcatgttgtcatggaaacaggatagaaaagtgggctctgggagtg

SEQ ID NO: 10977 - DNA, 80 bp, synthetic construct
  source 1..80: mol_type = other DNA
cggattctggtgcagttccttcaaagacccagatagggaaactgcctcggccaaggacacagcactagttgaagacacag

SEQ ID NO: 10978 - DNA, 80 bp, synthetic construct
  source 1..80: mol_type = other DNA
tgattgtaagatgatgccatttcatgtctaagactgactggggttatgtaattatgactttgaaagatcgtgctttggtg

SEQ ID NO: 10979 - DNA, 80 bp, synthetic construct
  source 1..80: mol_type = other DNA
tctaagtgcatgacaatagctttaagagatggggcttgaattgtatttaaatttcaactcagtagacacatgaccctctg

SEQ ID NO: 10980 - DNA, 80 bp, synthetic construct
  source 1..80: mol_type = other DNA
atatcctgccctccacaccagctgcctttctgcctgaaaacactcccaccttccccttccctttcctccagccgtgagag

SEQ ID NO: 10981 - DNA, 80 bp, synthetic construct
  source 1..80: mol_type = other DNA
aaatctctatatttcactcaactccttgcagtggcctaaatgcatttcctatctctgctcgcagttgttgaaatgtgagg

SEQ ID NO: 10982 - DNA, 80 bp, synthetic construct
  source 1..80: mol_type = other DNA
ctcttggaggaaaaggcctttccagtcactgttaacagaggtctagggatgacaaatcacacagctccccggctctgctc

SEQ ID NO: 10983 - DNA, 80 bp, synthetic construct
  source 1..80: mol_type = other DNA
aaagaaaaaataaaaagaaaaatgcctgaggcttcaagacatgggctgtactctgtggatgggggagccacaggctggct

SEQ ID NO: 10984 - DNA, 80 bp, synthetic construct
  source 1..80: mol_type = other DNA
aggcagacagatgaaactccacagagactatggcctgtgtatagtttaaaggtgtaaaattatgaagccgataaaaacta

SEQ ID NO: 10985 - DNA, 80 bp, synthetic construct
  source 1..80: mol_type = other DNA
gttgaaataaaaggaccctgtgatcctctcctgggctaggattttaaaaatagtaacttcacagagaagcttcttccagc

SEQ ID NO: 10986 - DNA, 80 bp, synthetic construct
  source 1..80: mol_type = other DNA
gcacatatcttttgctgtaagccatttcaaactatttttagaaagaagcaggatataaacacattcagtccccttggtaa

SEQ ID NO: 10987 - DNA, 80 bp, synthetic construct
  source 1..80: mol_type = other DNA
agacactggatagtgagtaatctgcctcatcacgacatatatgggcgtgtcctcatttatgatccattctgcatgactgg

SEQ ID NO: 10988 - DNA, 80 bp, synthetic construct
  source 1..80: mol_type = other DNA
actttttgaactccacttcctcagttttcaggaatggtgagcagagtcagatgggaatgagcagggcagggctagcaatg

SEQ ID NO: 10989 - DNA, 80 bp, synthetic construct
  source 1..80: mol_type = other DNA
ccccatgtgcaggttacagaagtttgcccactgaggtgggtgtcaccatgtcagggaccctgatcattgggttacaggga

SEQ ID NO: 10990 - DNA, 80 bp, synthetic construct
  source 1..80: mol_type = other DNA
agccaaacaaccctgtgagtctctaatctttttggcacaaagaattatcctacagctgtacctgcatttgctatgtccta

SEQ ID NO: 10991 - DNA, 80 bp, synthetic construct
  source 1..80: mol_type = other DNA
aacaaaacaaaacccctatcccagtgatctagaagcttattgctgctctctatggacaagaaattggactgtgggctcac

SEQ ID NO: 10992 - DNA, 80 bp, synthetic construct
  source 1..80: mol_type = other DNA
tggctgcatgcccactctctccttcctgcagagcacttgtctgtttgtaatttcacgctggttaatatgactattgatta

SEQ ID NO: 10993 - DNA, 80 bp, synthetic construct
  source 1..80: mol_type = other DNA
ctgactcccagccttggctgtggctgggcctcaacccaggacgccccttcccttgtttccaaggcaccatggatgttttt

SEQ ID NO: 10994 - DNA, 80 bp, synthetic construct
  source 1..80: mol_type = other DNA
ccctgtccgtgattctttttctttcctatatatttaacttctttctttcaaatggaccctcactttgccattcttaaagc

SEQ ID NO: 10995 - DNA, 80 bp, synthetic construct
  source 1..80: mol_type = other DNA
tcatgagaattgctgcaacattctgtatagtaagtttccccaacaaaagctttggactgatcaccctggcatttagtgct

SEQ ID NO: 10996 - DNA, 80 bp, synthetic construct
  source 1..80: mol_type = other DNA
agtgttttgacaacgattggcacattcacggtgctctcgagaagattggttgagatgaatgaatgaatgaattcatctga

SEQ ID NO: 10997 - DNA, 80 bp, synthetic construct
  source 1..80: mol_type = other DNA
cctaaagtgtaaagtccaacactttattcacatataaggcctgatatcgtttggatagacagccctgcccaaatctcatg

SEQ ID NO: 10998 - DNA, 80 bp, synthetic construct
  source 1..80: mol_type = other DNA
gtttcagcatctcttctgtgattctcctcttgctgctaccttgtatttacctctatcattgccctccttctattgacttg

SEQ ID NO: 10999 - DNA, 80 bp, synthetic construct
  source 1..80: mol_type = other DNA
agccagactgagtaaaatcctccatctttcacagaagagcgataatgacacaaacctccgaggcaatggaatgagaggat

SEQ ID NO: 11000 - DNA, 80 bp, synthetic construct
  source 1..80: mol_type = other DNA
ctgcacatctgttaccatggttacctctttgaagggcactggagaccttcatcttttctttgatgtatagctctattgtt

SEQ ID NO: 11001 - DNA, 80 bp, synthetic construct
  source 1..80: mol_type = other DNA
gaactggatgattttgttcaagcctgcaatttcatacaggctctctgtgtcagagccaccttcatccaaagacagttttc

SEQ ID NO: 11002 - DNA, 80 bp, synthetic construct
  source 1..80: mol_type = other DNA
aactgaatcagccacggagcctcaaattggccatactgccccaacccttcaaactaccttagaaatttagttttgtacag

SEQ ID NO: 11003 - DNA, 80 bp, synthetic construct
  source 1..80: mol_type = other DNA
acaactgtaatgtgacatgatttctattaggacaagtcataggccctgctaatagcactgtggtttgttgcctatgttca

SEQ ID NO: 11004 - DNA, 80 bp, synthetic construct
  source 1..80: mol_type = other DNA
tcttttctcccctggctacctttgaatttcttacccactcaggacacccagcaccaggttgaggatgaagaaggatccca

SEQ ID NO: 11005 - DNA, 80 bp, synthetic construct
  source 1..80: mol_type = other DNA
atagttatatgggaaagcagtcttgcagaggcaaggaaaaagactcaaagggcccttcgttcctcaaaaagtgtgaaatt

SEQ ID NO: 11006 - DNA, 80 bp, synthetic construct
  source 1..80: mol_type = other DNA
gattaattgtcctaagcagtgcaacccatgaaagaggagtaatctgagtgtcatttgtccccacagaactttaaaaaaga

SEQ ID NO: 11007 - DNA, 80 bp, synthetic construct
  source 1..80: mol_type = other DNA
acagaagttgatgtgagagtccagcagcctctatcaagccaggcagtgaagagatttacaaaaagtgtaaaatagcgtca

SEQ ID NO: 11008 - DNA, 80 bp, synthetic construct
  source 1..80: mol_type = other DNA
gagcatggccttgaagatggagttcaggaccacctgcaggcctgcagaggcaggcagggaagggaaaagaggagtcgcct

SEQ ID NO: 11009 - DNA, 80 bp, synthetic construct
  source 1..80: mol_type = other DNA
cccagagaagaaactccacagcaagttctccctctgtgcttttcctcctggctgcactttttgataatgccctttatttt

SEQ ID NO: 11010 - DNA, 80 bp, synthetic construct
  source 1..80: mol_type = other DNA
tcaatacaggtctgtggaataaactaataaatgacagaggctgagaaacttatgaacatccagaaactgctggccagtgg

SEQ ID NO: 11011 - DNA, 80 bp, synthetic construct
  source 1..80: mol_type = other DNA
attagaatgggttgaataaatgaaggatctgaggtacccaaaatgaaagtccccaggtggtttctggctttggcaccttt

SEQ ID NO: 11012 - DNA, 80 bp, synthetic construct
  source 1..80: mol_type = other DNA
gaagataatttatttttacttccaagtgagtaggtatgggaggcaagggaagaggtccccaaatggctcactattgtgga

SEQ ID NO: 11013 - DNA, 80 bp, synthetic construct
  source 1..80: mol_type = other DNA
gttggctgacagcctctgcagcctgggctcagtcttccatggaaaaatgagggatagtcattccacagatatttattaag

SEQ ID NO: 11014 - DNA, 80 bp, synthetic construct
  source 1..80: mol_type = other DNA
aatggctccacaacacctaccagaaaaatccaaatgcgtttccgtggcatgcaagatcctccataacatgacccttgctg

SEQ ID NO: 11015 - DNA, 80 bp, synthetic construct
  source 1..80: mol_type = other DNA
ctgcctgcaatgttcttccccagatatcctcatgactcacttttttctttctttcagggcccaacttgaaggtcacttta

SEQ ID NO: 11016 - DNA, 80 bp, synthetic construct
  source 1..80: mol_type = other DNA
aacttcgtgaggtgagagctcccttacctcaccccccaacaagggcctttattattaaatgtccccttcaaggaaattct

SEQ ID NO: 11017 - DNA, 80 bp, synthetic construct
  source 1..80: mol_type = other DNA
aggcttggcaggtgctactattagaagacagttttacaatattcctgattgctttcctcccggattccctcactttcttg

SEQ ID NO: 11018 - DNA, 80 bp, synthetic construct
  source 1..80: mol_type = other DNA
agaaaaataatcatcacagattacaaagggctaacgcagtaatagaagaatgaatgaatctctttagcctagaaagcgga

SEQ ID NO: 11019 - DNA, 80 bp, synthetic construct
  source 1..80: mol_type = other DNA
ggagagggtgagagagactcgcacctttcagggccgaggcacacacaccttctggtgtctgatgcccaaagtttgtgctg

SEQ ID NO: 11020 - DNA, 80 bp, synthetic construct
  source 1..80: mol_type = other DNA
cacatagctaccaagaggcagagccatgatatgtatagacagtttgattccagactccatggtctcaaccactatgccag

SEQ ID NO: 11021 - DNA, 80 bp, synthetic construct
  source 1..80: mol_type = other DNA
ctaaaatccaggctttcattcatttccacagacccttttggagcaccatcacttctctgtacagtggcccaggctcaaac

SEQ ID NO: 11022 - DNA, 80 bp, synthetic construct
  source 1..80: mol_type = other DNA
tatctaacctagcaatcctattccatcattctctctccggtgtcataacttctgctgctctaattccctttaactcagct

SEQ ID NO: 11023 - DNA, 80 bp, synthetic construct
  source 1..80: mol_type = other DNA
tacctgaaataatcctttggcataactgttgggggttagaccctttgaatctagaacaacctgggggtctctgtgactat

SEQ ID NO: 11024 - DNA, 80 bp, synthetic construct
  source 1..80: mol_type = other DNA
attccacctggcaggtctttcttaaggccacctcacagccatctttaccatcaccagtgccttggcccagcctcccctgt

SEQ ID NO: 11025 - DNA, 80 bp, synthetic construct
  source 1..80: mol_type = other DNA
aacatcccatacttggggaagccttcctgatctcaagactagcttaggttctctgtcaatatgctaccataatatcccca

SEQ ID NO: 11026 - DNA, 80 bp, synthetic construct
  source 1..80: mol_type = other DNA
actcataatactgtctctatgaactctaggcctaacccaaggttttgcaactccagcccacaaactaaagaaaaacatac

SEQ ID NO: 11027 - DNA, 80 bp, synthetic construct
  source 1..80: mol_type = other DNA
cctgttgaaaaggtggttccattgttctgtcccctagggagcctgaggccactgtttataagagggcttcccctagaagt

SEQ ID NO: 11028 - DNA, 80 bp, synthetic construct
  source 1..80: mol_type = other DNA
acacaagtttcttatgaattacatttggggaagagaaattagcattcaacctctgtggctcactagctgaccttactaag

SEQ ID NO: 11029 - DNA, 80 bp, synthetic construct
  source 1..80: mol_type = other DNA
ttgtttgggggtggatggggaggcatattacgtagttgggcttgacagaaaaatcccattctcttcccagtaacctccag

SEQ ID NO: 11030 - DNA, 80 bp, synthetic construct
  source 1..80: mol_type = other DNA
caagggagagttttctcaaagaggccatcgcatctttttttggtccctatcctattctaaaatgaggctggtgcttcaaa

SEQ ID NO: 11031 - DNA, 80 bp, synthetic construct
  source 1..80: mol_type = other DNA
aggcggatcacaagttcatgagatcgagaccatcttggccaacatggtgagaccctgtccctattaaaaatacaaaaatt

SEQ ID NO: 11032 - DNA, 80 bp, synthetic construct
  source 1..80: mol_type = other DNA
atggtggcagcagaccagctaaaccttggctctgttaaaatgatcttgcttggtatatggaaaacacataccaaaaacgt

SEQ ID NO: 11033 - DNA, 80 bp, synthetic construct
  source 1..80: mol_type = other DNA
acatctgaaactccataaatgcctcatgaatgcgcctgaatatgaggaaaaattccattgaacacttaagcttaaatggg

SEQ ID NO: 11034 - DNA, 80 bp, synthetic construct
  source 1..80: mol_type = other DNA
agggcaaataaggagtccagttttaagcagaagcaggttgatataattgtatgaaatctgggtgaagctgtcaagcaggg

SEQ ID NO: 11035 - DNA, 80 bp, synthetic construct
  source 1..80: mol_type = other DNA
acagcctggagttgtcaaccaggcttttgggtttttcgcaggcaacaaattaaacaatgactgagctccgtttgtttttt

SEQ ID NO: 11036 - DNA, 80 bp, synthetic construct
  source 1..80: mol_type = other DNA
gaaaatctgaggggcttgtaattgaaaagggcttcaaggcaacctaaccaaaatgtgggtgaagcttgattctgattact

SEQ ID NO: 11037 - DNA, 80 bp, synthetic construct
  source 1..80: mol_type = other DNA
tttgatggctgaaataattttgtttatttgcagtcaaagagggttcctgaggatgctggcctaggagtgaaagaatgact

SEQ ID NO: 11038 - DNA, 80 bp, synthetic construct
  source 1..80: mol_type = other DNA
ttcattttgagaagagagaggctcccagatcccactgagtgaaaggcagctttaaggccccttcttacaggtctcagatt

SEQ ID NO: 11039 - DNA, 80 bp, synthetic construct
  source 1..80: mol_type = other DNA
gctaaaatttgtctaagacagaagacagataagagagaaagtaagttatatagctttcttcagaaagccagcacctgcgg

SEQ ID NO: 11040 - DNA, 80 bp, synthetic construct
  source 1..80: mol_type = other DNA
tcaatccaaagaaccagaaaagacatgctggggaagagggtcctcttatatttgaaataaggtttttgctccccaaggcc

SEQ ID NO: 11041 - DNA, 80 bp, synthetic construct
  source 1..80: mol_type = other DNA
tttttttctgataatgaattcctttgctttctaccaagtcttagaaattgacttgggctgtggactcccatcacctccta

SEQ ID NO: 11042 - DNA, 80 bp, synthetic construct
  source 1..80: mol_type = other DNA
tcaatttctccagaatctgtgcactgtcaatccatttctccagttgcttaggagagctctctgtgcagtttcttttcttt

SEQ ID NO: 11043 - DNA, 80 bp, synthetic construct
  source 1..80: mol_type = other DNA
caattctatgctactgtatttattttgcagatgaccgagaagcaaggctgagagaggtggaagcactcacccaaagttac

SEQ ID NO: 11044 - DNA, 80 bp, synthetic construct
  source 1..80: mol_type = other DNA
ctctcccagttacagggacctgggcatctttaaaggatgtcttagaatgaaattcctcttcggaattacactgccccatg

SEQ ID NO: 11045 - DNA, 80 bp, synthetic construct
  source 1..80: mol_type = other DNA
tctaaatcgctaatagtaatttcactgtcttgccactaacttttttccagcttggagcatgtgctgattcagtttgggcc

SEQ ID NO: 11046 - DNA, 80 bp, synthetic construct
  source 1..80: mol_type = other DNA
gctcaattgcagtttggggctaccttcatctcttctatgtactgggtttgcagacttgaaattcaaacccttaaccttga

SEQ ID NO: 11047 - DNA, 80 bp, synthetic construct
  source 1..80: mol_type = other DNA
gaattgacttaaaatattacatacctgttataatggggcagaggaggaagaagaggtagagagagaaataatgggggatt

SEQ ID NO: 11048 - DNA, 80 bp, synthetic construct
  source 1..80: mol_type = other DNA
tatgtgtgtatagctggcggaaaaagggaaaaatgttcttttacaatctggctacagtttgagggatttcatggtcttga

SEQ ID NO: 11049 - DNA, 80 bp, synthetic construct
  source 1..80: mol_type = other DNA
aggatgttcttaaagtgaagttgggtgttttctcgttctatttgctaccagttgcattggctatcacctcacgttttcca

SEQ ID NO: 11050 - DNA, 80 bp, synthetic construct
  source 1..80: mol_type = other DNA
gccaccgcatctggtcatttttttcttttttaatggcattctaattagccggttgccaaattttggaattggtcctctat

SEQ ID NO: 11051 - DNA, 80 bp, synthetic construct
  source 1..80: mol_type = other DNA
aactctggttgtagaggtggggcttgtggaccaaaaaatattgctttctggtgagttggcagggcaatgactatgttttt

SEQ ID NO: 11052 - DNA, 80 bp, synthetic construct
  source 1..80: mol_type = other DNA
ctcctccccatgtgccttaatcccatctaagttttactacgtggcatcctgtcaataaatacttgttcatgtgacatagc

SEQ ID NO: 11053 - DNA, 80 bp, synthetic construct
  source 1..80: mol_type = other DNA
agttataaagacaaacttctcctaaggaagttttggtttcttaagtcagttcttctgaagactgagcccaagcagccctt

SEQ ID NO: 11054 - DNA, 80 bp, synthetic construct
  source 1..80: mol_type = other DNA
cagtgactgtgggtgggcttagctagaaaatataaggtgtggaatttacatttgtggaattcaagaacattaccgttgac

SEQ ID NO: 11055 - DNA, 80 bp, synthetic construct
  source 1..80: mol_type = other DNA
ttgaatttcagatgatttcaatgagcaaatatattcaatttatttgctgattctggccaccctgctaaacctcagtctcc

SEQ ID NO: 11056 - DNA, 80 bp, synthetic construct
  source 1..80: mol_type = other DNA
agaaattaacaaatgcatgaaaattaaacttaagtatttaactttctctcccactgttcaatgccttcctcttgccttcc

SEQ ID NO: 11057 - DNA, 80 bp, synthetic construct
  source 1..80: mol_type = other DNA
aaaatgtgtgaagacacacacaaagaaaaaaaatcatcagtaaactaccttccaaaggtagtagctgctggtttttcccc

SEQ ID NO: 11058 - DNA, 80 bp, synthetic construct
  source 1..80: mol_type = other DNA
tcccatgttcttttctatttttaagttagaggcaccttttagggaaagtattttcatggaattcctcttattcttatgga

SEQ ID NO: 11059 - DNA, 80 bp, synthetic construct
  source 1..80: mol_type = other DNA
ctgaaactatgattaaatgatatagcacagaggatctaaaatgacattacagtacagagacacatgagggtgctctaacc

SEQ ID NO: 11060 - DNA, 80 bp, synthetic construct
  source 1..80: mol_type = other DNA
tactatttgtaaacagttcaggtcacactcatgttataccatgtgctaagcaagagttctttccttctaacttcctttaa

SEQ ID NO: 11061 - DNA, 80 bp, synthetic construct
  source 1..80: mol_type = other DNA
tcccaaagagggcatccctaaatctagaagaagccaacaaaccatgcttgatgagttgttttcatgatacatgtaagaaa

SEQ ID NO: 11062 - DNA, 80 bp, synthetic construct
  source 1..80: mol_type = other DNA
agacaacctttgccactagacaacaaggtactgatattcttgaagggttcttttctagagcccaggctctttctttaata

SEQ ID NO: 11063 - DNA, 80 bp, synthetic construct
  source 1..80: mol_type = other DNA
gaagccctgcttgtttccgtttgtcattcagtgctaaaatttattatacatcccttgcaatatttgctctgctagtctca

SEQ ID NO: 11064 - DNA, 80 bp, synthetic construct
  source 1..80: mol_type = other DNA
tacctccagatggtttggtaccatgtagataatagccctaaaatgttttcagttacgtgtttagatgaatcactaaaatg

SEQ ID NO: 11065 - DNA, 80 bp, synthetic construct
  source 1..80: mol_type = other DNA
ctggccttctgtgaagaatggaaagaaattgtgtagcatgagtggtttaagttctgagtactgtggcaaagtattctgct

SEQ ID NO: 11066 - DNA, 80 bp, synthetic construct
  source 1..80: mol_type = other DNA
tagagaataaaattgcagaatatcgcagtaaattaactttagggatactctaagaatgagagtactacgcccttggggga

SEQ ID NO: 11067 - DNA, 80 bp, synthetic construct
  source 1..80: mol_type = other DNA
gaatttacaatctgttgggaggaaaaatgttgaatttagacacagaggcaccaaggctgagtagctaaatggaaggtgaa

SEQ ID NO: 11068 - DNA, 80 bp, synthetic construct
  source 1..80: mol_type = other DNA
aggcctggctcagtgttcctgggagactaaggagttcaaagcacttttcaaatatgaattccttatccttctggtgatat

SEQ ID NO: 11069 - DNA, 80 bp, synthetic construct
  source 1..80: mol_type = other DNA
gcccacgataacgggtgtctctgaatcaatattttaatatctgttctgaaacttttaggtgcaaggaaattacagggcta

SEQ ID NO: 11070 - DNA, 80 bp, synthetic construct
  source 1..80: mol_type = other DNA
tgtcgctcagctggatccaaataaaccaaacatcggagctctcatttgagggggaatgtggttttatggagttgtcaaag

SEQ ID NO: 11071 - DNA, 80 bp, synthetic construct
  source 1..80: mol_type = other DNA
ttactatgcatgggatacaagaatccagagatgattctcaactcattgcttcgcttctctccctgaagctgggatgaaga

SEQ ID NO: 11072 - DNA, 80 bp, synthetic construct
  source 1..80: mol_type = other DNA
cttacatgcttatgctcacaaacctccttcccccgtgaagcaggggaataaacgaaagcttacctccacccttctttgtc

SEQ ID NO: 11073 - DNA, 80 bp, synthetic construct
  source 1..80: mol_type = other DNA
ctccacccctttcacttatgaaccattacttagccccagtataacttattttcctgccaagaaggcctttactccctcct

SEQ ID NO: 11074 - DNA, 80 bp, synthetic construct
  source 1..80: mol_type = other DNA
agctgaatatagacatgacaaaactctgcagggcctaacagagattacctgctgcatgtagtgcattattgagagacatt

SEQ ID NO: 11075 - DNA, 80 bp, synthetic construct
  source 1..80: mol_type = other DNA
gaataattactcagcatatcacactggcacacatcaaactatttaaagccatggatgaaaaatctctaaagcagccaaag

SEQ ID NO: 11076 - DNA, 80 bp, synthetic construct
  source 1..80: mol_type = other DNA
atggacccacaggtaatttagagttctgacttatctgagagggactccaaaataattaaaaatgtctttttttttggcca

SEQ ID NO: 11077 - DNA, 80 bp, synthetic construct
  source 1..80: mol_type = other DNA
ctgacttttcaacagaaactattgaaatcagaagatggtagaatggcatctttagaaaagaggtggagtggagaaggata

SEQ ID NO: 11078 - DNA, 80 bp, synthetic construct
  source 1..80: mol_type = other DNA
gcttaaaactctgagagatgggaaactttctctccagaggaactgtgttcccaaagagatgagatgaaattccatagctt

SEQ ID NO: 11079 - DNA, 80 bp, synthetic construct
  source 1..80: mol_type = other DNA
atggttaaatacttactaaatttggccaaaggtatagacctagagattcagaaagctcagcaaatccaaagaggatacct

SEQ ID NO: 11080 - DNA, 80 bp, synthetic construct
  source 1..80: mol_type = other DNA
tgacaatgccaacagttaagatatggaacaaatggaactctcactccttgctagttgaagtaaaagtggtaaaaccactt

SEQ ID NO: 11081 - DNA, 80 bp, synthetic construct
  source 1..80: mol_type = other DNA
ttagcttggtggttcatgcttgggatccttgatatcatttcaggggttgcagctgggactggattcatctgaaagattga

SEQ ID NO: 11082 - DNA, 80 bp, synthetic construct
  source 1..80: mol_type = other DNA
aaaacaaactccatacattcagtggaaagaaagtaggaaaggagaagagcttaaaaggagggcagaagggatggtagaga

SEQ ID NO: 11083 - DNA, 80 bp, synthetic construct
  source 1..80: mol_type = other DNA
atgtgatggaagatcagaaaagtagcaaggaaacaaatgttaatgcacaagcactttgcaagcctttgcttgcatcacat

SEQ ID NO: 11084 - DNA, 80 bp, synthetic construct
  source 1..80: mol_type = other DNA
ataagacaaatacagaaaaaatgacaaaggcatacactgttaagaaaaaaggagaagaattacaggttcagtaagattta

SEQ ID NO: 11085 - DNA, 80 bp, synthetic construct
  source 1..80: mol_type = other DNA
gatgatgtgaacatgtacatggaaaacctaaaagtgttaaagaacaagactattagaataaactggtcatggtagcatgc

SEQ ID NO: 11086 - DNA, 80 bp, synthetic construct
  source 1..80: mol_type = other DNA
aaacagatggaggataattcaaggaggtttgatttacaaagagactatgaggatgtgagcagaggaactgttaccacctc

SEQ ID NO: 11087 - DNA, 80 bp, synthetic construct
  source 1..80: mol_type = other DNA
tgtatatctcaagtgcataacctctggtgcccatgatggtatgtaaaatgtttcaggaagatgaggtcctctgtgtgact

SEQ ID NO: 11088 - DNA, 80 bp, synthetic construct
  source 1..80: mol_type = other DNA
tgctgggattacaggcgtgagccaccgcgtccagcctaaataagcttattaaaatatacgtttgattacattagctaaat

SEQ ID NO: 11089 - DNA, 80 bp, synthetic construct
  source 1..80: mol_type = other DNA
accagtcatttctgggaataggaagtgctatagggaactcagctatctttgacggagaaaactctcaaagaaagctgagg

SEQ ID NO: 11090 - DNA, 80 bp, synthetic construct
  source 1..80: mol_type = other DNA
tacccctactcctatggggaaaagtaagtgaatctatcactacactctcaactgtaaaaaaaactgttaaaaaacaaaaa

SEQ ID NO: 11091 - DNA, 80 bp, synthetic construct
  source 1..80: mol_type = other DNA
agagattaggggttgagaagggacagcatacaacagcagacatggaactcacaaaagaaaaataataaagaagattaaag

SEQ ID NO: 11092 - DNA, 80 bp, synthetic construct
  source 1..80: mol_type = other DNA
ttctggggtaagctctatactaagcacaaagcagataccccagaaatactgattaaagaattttactgccaggatggtag

SEQ ID NO: 11093 - DNA, 80 bp, synthetic construct
  source 1..80: mol_type = other DNA
cttggggtcagaatacacctcagaggctggccttaaaaactacttctgtccagttttaattctatcagaatacagagtaa

SEQ ID NO: 11094 - DNA, 80 bp, synthetic construct
  source 1..80: mol_type = other DNA
gacgagaaataaagagtctcagagaaacctgggacacttttgggtataccaacattggtataatggaatgaccagaaggt

SEQ ID NO: 11095 - DNA, 80 bp, synthetic construct
  source 1..80: mol_type = other DNA
tcctaggactttataggctgccatcttgcaccctttccctgtgattctgcccttagggtaggctgcccacatgtgcagtg

SEQ ID NO: 11096 - DNA, 80 bp, synthetic construct
  source 1..80: mol_type = other DNA
tagttcaagacattataatagttcaagaagatgaaggacaggatagagatatacaagagtaacatttctatatctcactc

SEQ ID NO: 11097 - DNA, 80 bp, synthetic construct
  source 1..80: mol_type = other DNA
acacattcttctcaagcacacatggactattctacaagatagaccatatgtgtgctaggccataaaacaagtttcaataa

SEQ ID NO: 11098 - DNA, 80 bp, synthetic construct
  source 1..80: mol_type = other DNA
tgaaacagaaaaactcccagaaagacacaaacttctgaaattgactcaagaagaaatgaaatgctgaaatagacataaga

SEQ ID NO: 11099 - DNA, 80 bp, synthetic construct
  source 1..80: mol_type = other DNA
tctatcaaaatcccacatttatgtaatgtcaactaatcttcagtgaagggtgccaagacaattcaatggggaaaagtaca

SEQ ID NO: 11100 - DNA, 80 bp, synthetic construct
  source 1..80: mol_type = other DNA
ggtctgcagtttctcaaatggtcttatagagtcatcatatgagctcgcaattctactcctaggtatatatctaagagaaa

SEQ ID NO: 11101 - DNA, 80 bp, synthetic construct
  source 1..80: mol_type = other DNA
aattcttattgcctagtggaatcatggccattgtaacactctagtgcaatgcattactcacgtgtttgtggtggtgatgg

SEQ ID NO: 11102 - DNA, 80 bp, synthetic construct
  source 1..80: mol_type = other DNA
cataaagtctagatgtgtagcaggctatacctctaggtttgtttaaatacactctatgatgtttgcacaatgacagaatt

SEQ ID NO: 11103 - DNA, 80 bp, synthetic construct
  source 1..80: mol_type = other DNA
gtggtttaaactagtaatgtatgagtttcaagtactttatccctactaccacttggtgtcattctttttaaattttagtc

SEQ ID NO: 11104 - DNA, 80 bp, synthetic construct
  source 1..80: mol_type = other DNA
tacccccagatatctgtatggcttactctctaatcctttatgttctcaaacgttctgaagtttgagacatcttccctgac

SEQ ID NO: 11105 - DNA, 80 bp, synthetic construct
  source 1..80: mol_type = other DNA
ttatcaggattaaaagagcctcacatttgtaactctgtgacattagactgaggtctgtaaactataggttggtgggccaa

SEQ ID NO: 11106 - DNA, 80 bp, synthetic construct
  source 1..80: mol_type = other DNA
aatgcctcccttcccgcaaaaagcactgtaatcaggtgaaataatcagagtaggaagagacttatgctctagatgaaata

SEQ ID NO: 11107 - DNA, 80 bp, synthetic construct
  source 1..80: mol_type = other DNA
tttatctgtgctttgtttacttctcaaacaactgtagatcaactgcatctgtttaagtatggcactaagtcaggcaagat

SEQ ID NO: 11108 - DNA, 80 bp, synthetic construct
  source 1..80: mol_type = other DNA
cgaatccgcatatggtaatagctgtcctcttcaaaattctactattccatgtagatacttcttcccttaattgtatatga

SEQ ID NO: 11109 - DNA, 80 bp, synthetic construct
  source 1..80: mol_type = other DNA
gacagtcattccttttattaatcaattacttagaatgaccctttctgacaggagcctgtcagtgtgttggcttgaaagag

SEQ ID NO: 11110 - DNA, 80 bp, synthetic construct
  source 1..80: mol_type = other DNA
cacacacccttacccctcacccccatgtttttagttcatcttggagaaaccaaattagtaaataaccctgaagcaaatag

SEQ ID NO: 11111 - DNA, 80 bp, synthetic construct
  source 1..80: mol_type = other DNA
ctctttagtcgactggaagtgtttttctttattatccatctccaacaaaggttcccattccaacagcttagattttgtta

SEQ ID NO: 11112 - DNA, 80 bp, synthetic construct
  source 1..80: mol_type = other DNA
aacattattaaccaattcttcacaaactgaagtaaaattctggggagaagcccattccagtgttatctgttaatattttc

SEQ ID NO: 11113 - DNA, 80 bp, synthetic construct
  source 1..80: mol_type = other DNA
tttgtagaataccttttgagaatttacaggtaactcagtaataacattctgtacagctgttattaaatggccacactgtt

SEQ ID NO: 11114 - DNA, 80 bp, synthetic construct
  source 1..80: mol_type = other DNA
aagcagaataattaggcaactaacagagaaatgcatccaagagatgatgaaggaaaacttaaactaaggatctggcagtg

SEQ ID NO: 11115 - DNA, 80 bp, synthetic construct
  source 1..80: mol_type = other DNA
gaaaagattaggcacattaagtatactgattttggcaatgagaaaacactggtgactagattagcttcagtggcagaagc

SEQ ID NO: 11116 - DNA, 80 bp, synthetic construct
  source 1..80: mol_type = other DNA
agcccccaaaggatacttctaagcccatacagaaattcttacttgtagaagttttgactacatactatacaaagtttctt

SEQ ID NO: 11117 - DNA, 80 bp, synthetic construct
  source 1..80: mol_type = other DNA
ttatttgatcaaattctcatgtcttttctacagagctaactagtaccagtcccccgatccctgtcaggggactataattc

SEQ ID NO: 11118 - DNA, 80 bp, synthetic construct
  source 1..80: mol_type = other DNA
tctatatagattttttggggtggagctgtttccttgatggacatagttttgagatgcttctgacaccttcaagtggatgt

SEQ ID NO: 11119 - DNA, 80 bp, synthetic construct
  source 1..80: mol_type = other DNA
aagtcctcacaagtgaaatccttcacaatgcatttaaatatttaagagctattatgttattctgaaacaatgatgaggca

SEQ ID NO: 11120 - DNA, 80 bp, synthetic construct
  source 1..80: mol_type = other DNA
ctattcttagtccctgtgataatggttacttttggactcatatgaaaccaaaagaagaaaggaagagagtttcctaagca

SEQ ID NO: 11121 - DNA, 80 bp, synthetic construct
  source 1..80: mol_type = other DNA
gggaaatgtaaaagactaaatgtttacataagaaaaaaagtctcaaaaatgatctagatttctgcctcaagaatctagaa

SEQ ID NO: 11122 - DNA, 80 bp, synthetic construct
  source 1..80: mol_type = other DNA
aaaaaagtgcatggttttctcctgagattgggaagaaggcaagaatgtccactatctaccactcttatccaacataatac

SEQ ID NO: 11123 - DNA, 80 bp, synthetic construct
  source 1..80: mol_type = other DNA
aaatgggaggaatcactcttcctgatattaaggtttaccatatagttagagtaatcaagacgtggtactttcagagggat

SEQ ID NO: 11124 - DNA, 80 bp, synthetic construct
  source 1..80: mol_type = other DNA
ttctggaaaacagttgggcagttttaaaatatactaaatatgcaaccaccgtacaacctaacaattgtcctctttggcat

SEQ ID NO: 11125 - DNA, 80 bp, synthetic construct
  source 1..80: mol_type = other DNA
tacagtaaggctgaaaatagaactgagctacatgagacatgttttcttattgccctaagtgaaaatattactactttgaa

SEQ ID NO: 11126 - DNA, 80 bp, synthetic construct
  source 1..80: mol_type = other DNA
ttgagaaccaaacaaaaggcttgggagacgtgttaatacccatatacataaaaaaactatctcttatttgtaagtgcccc

SEQ ID NO: 11127 - DNA, 80 bp, synthetic construct
  source 1..80: mol_type = other DNA
ggtaacaactgtcatggactcaaaccccataatgtatgcttaaaacacccacacagtgcttggcatatgatctgatttaa

SEQ ID NO: 11128 - DNA, 80 bp, synthetic construct
  source 1..80: mol_type = other DNA
tttaagtaactttaaatggggtaaggagagaattatttttggccatgtactcaacagtggtgttctggggggaaaagtat

SEQ ID NO: 11129 - DNA, 80 bp, synthetic construct
  source 1..80: mol_type = other DNA
atattaagatagtactttaaaaacattgctaagtggcaagagagtaatgagcatgactaaatgtatacaaatcctaactg

SEQ ID NO: 11130 - DNA, 80 bp, synthetic construct
  source 1..80: mol_type = other DNA
gattatacatccaggtatattatcactttatcgtaagccctgtcacacatataagagcaaatgttgtttaaggaatttaa

SEQ ID NO: 11131 - DNA, 80 bp, synthetic construct
  source 1..80: mol_type = other DNA
attcctcatttctatttcttttcttttctttttttttgagatggagtttcgctcttgttgcccaggctgaagtgcagtgg

SEQ ID NO: 11132 - DNA, 80 bp, synthetic construct
  source 1..80: mol_type = other DNA
gtgtacccacactatgcttatgctaggaatatagtaatgaatgacacaaataaggtccctgccctcaaaggatttgctaa

SEQ ID NO: 11133 - DNA, 80 bp, synthetic construct
  source 1..80: mol_type = other DNA
aaaaaattagctggatgtggtctgcacaactgtaatcccagctacttcagaggtgggagaatcacctgagcctgggagat

SEQ ID NO: 11134 - DNA, 80 bp, synthetic construct
  source 1..80: mol_type = other DNA
cacaagctaccacagctcactcaaaaagaaataacctgaatagccctagacttattttttaaaaacttaattagtaatta

SEQ ID NO: 11135 - DNA, 80 bp, synthetic construct
  source 1..80: mol_type = other DNA
ccaggaaatctattgctgtttattagaaatgcacctagtatttgcatatatgcatatataaatacagggtgatggtgatg

SEQ ID NO: 11136 - DNA, 80 bp, synthetic construct
  source 1..80: mol_type = other DNA
gcatgcgtgctgctgcaaaggacatggtttcttttttatggctgtatagtattccatgacctatatgtggcatattttct

SEQ ID NO: 11137 - DNA, 80 bp, synthetic construct
  source 1..80: mol_type = other DNA
cctgactttttaataatagccattctgaagggtgtgagatggtacctcattgtggttttgatttgcatctctgatgagta

SEQ ID NO: 11138 - DNA, 80 bp, synthetic construct
  source 1..80: mol_type = other DNA
taatgatactgcagtcttccatccaatctgtgatcacggaattctttttcatttgtttgtcatttataatttctttcagc

SEQ ID NO: 11139 - DNA, 80 bp, synthetic construct
  source 1..80: mol_type = other DNA
tacaagcataagccactgagcctagctgggtagcataaaaaaaaaaaattcttaaaagactttctttgtggtctacaaca

SEQ ID NO: 11140 - DNA, 80 bp, synthetic construct
  source 1..80: mol_type = other DNA
tctccttggacatagaatcaccttgttagattgatcaagttctcttagtttcactcccacccactccatctgaaagcttt

SEQ ID NO: 11141 - DNA, 80 bp, synthetic construct
  source 1..80: mol_type = other DNA
cacctctatcttctagtccactactcagctcttcagatgagtcccatctactcttctacctcttctacacaaatacttag

SEQ ID NO: 11142 - DNA, 80 bp, synthetic construct
  source 1..80: mol_type = other DNA
tgagcacagctgtgttccagtgaaacttaagaagtctgccaacctctgatttagaatgttaagctgtggagtcagaatgc

SEQ ID NO: 11143 - DNA, 80 bp, synthetic construct
  source 1..80: mol_type = other DNA
atctattccttggaagtttaaaataagtaacctattaaaatctctgagcctaacactttttttggaagttatctttctga

SEQ ID NO: 11144 - DNA, 80 bp, synthetic construct
  source 1..80: mol_type = other DNA
taaaccccagaaaaccttgtgagcagggcccctgaaccacaaatgatgtatttttgtttctctgtactaaaggtaaaatg

SEQ ID NO: 11145 - DNA, 80 bp, synthetic construct
  source 1..80: mol_type = other DNA
ctttcatgataaaaattcgtatctctcagtaggattacacaggttactatctagcctctgccaaagtgcatcaattctga

SEQ ID NO: 11146 - DNA, 80 bp, synthetic construct
  source 1..80: mol_type = other DNA
aattttttacattcaagagttggctacatgtaaagtgtccagaacaggcgaacctatagagttataaggtagattagtgg

SEQ ID NO: 11147 - DNA, 80 bp, synthetic construct
  source 1..80: mol_type = other DNA
ctagatgctaagagggctttgagcattcccacaaatagcagaggaaataaaaattggcattcatgatcctcaaagggaga

SEQ ID NO: 11148 - DNA, 80 bp, synthetic construct
  source 1..80: mol_type = other DNA
aatctaataccttcaaagaatcaacaataagagtaacagctgacttgttgtgctggacccctactggctccaatagggat

SEQ ID NO: 11149 - DNA, 80 bp, synthetic construct
  source 1..80: mol_type = other DNA
catgttgtaagaggtgatatttagcattgagttgttgctccatgatgatatatttagcttcagcccccttccatagttgg

SEQ ID NO: 11150 - DNA, 80 bp, synthetic construct
  source 1..80: mol_type = other DNA
gggctgggcaactgtattggtgtccattttgtgttaccgtgattatgttttgtcatcctaactctcagttggaatttttt

SEQ ID NO: 11151 - DNA, 80 bp, synthetic construct
  source 1..80: mol_type = other DNA
atatatagtttttatatgaggcctctggtccctggccatcactgtttgtactgggattctgaggccttggcctttatctt

SEQ ID NO: 11152 - DNA, 80 bp, synthetic construct
  source 1..80: mol_type = other DNA
ttttagtctgagctaactaagcatttctttctaatcacagcttgtcttgtaactgatgcacccttgcctgtgcagtgacc

SEQ ID NO: 11153 - DNA, 80 bp, synthetic construct
  source 1..80: mol_type = other DNA
gtcattatcagagtatgcttgagttaatgctgtcgggcatagaagctttcagtaaaaataagagacaacaaaatgatagc

SEQ ID NO: 11154 - DNA, 80 bp, synthetic construct
  source 1..80: mol_type = other DNA
aagagcactgactaatgaaacaccgatcagtgtgcacattaaaggcaggtagactaaacaatgaaaagaaaactactgtc

SEQ ID NO: 11155 - DNA, 80 bp, synthetic construct
  source 1..80: mol_type = other DNA
gatgtctaaagactcttatcatttgggagattccaaggctttcagaagttctagtgtcaggaaccagtggttaagaccaa

SEQ ID NO: 11156 - DNA, 80 bp, synthetic construct
  source 1..80: mol_type = other DNA
aagtatgtcaagtggcattatataatgtttatggatgattatatacacacgcacagatggatgatcatatgtgtaattta

SEQ ID NO: 11157 - DNA, 80 bp, synthetic construct
  source 1..80: mol_type = other DNA
ccctaattattaataggtactcctggtatctgcttagtagtacagtcataactaaagtgtgattctttaatggcatcagc

SEQ ID NO: 11158 - DNA, 80 bp, synthetic construct
  source 1..80: mol_type = other DNA
tgatatcagctattagtacttcaggacagggtatggaaagcctttttcctaaaagatgtaagaggaaaaaaaaaatcaca

SEQ ID NO: 11159 - DNA, 80 bp, synthetic construct
  source 1..80: mol_type = other DNA
ttacagagctagtaaatgacaaagttgggattcaaaccttggcagtctggttcataagacagtactcttaaccaccatat

SEQ ID NO: 11160 - DNA, 80 bp, synthetic construct
  source 1..80: mol_type = other DNA
tgccacatcactttacaaaacccttatcttatgactgagcaatcctaatgtaacaaatacatatggtagaaaaattacct

SEQ ID NO: 11161 - DNA, 80 bp, synthetic construct
  source 1..80: mol_type = other DNA
ccgtacactgtgttaaatattgtcagtatcaagatccaagagatgcataagatgtaatttgtgtcctagaggcttaattt

SEQ ID NO: 11162 - DNA, 80 bp, synthetic construct
  source 1..80: mol_type = other DNA
ggatgttttttccttttcaagaagccactttcaagatgaaagagaagaaatgttggaagaagctacaaaatttttgcaaa

SEQ ID NO: 11163 - DNA, 80 bp, synthetic construct
  source 1..80: mol_type = other DNA
acgctatatatactacacacccaattatcactgacggatctgtctcaattatcagattgacagatcttttcagatcattt

SEQ ID NO: 11164 - DNA, 80 bp, synthetic construct
  source 1..80: mol_type = other DNA
ccttagcatagagcctaaatactttaaaattctgcctaatgaaatcttgttaacaactttatggcttttttgtcctttct

SEQ ID NO: 11165 - DNA, 80 bp, synthetic construct
  source 1..80: mol_type = other DNA
tggctgactctttccttgtgctctttttcttgagaggtaatttttctcagcaatggcattgctcaacaaaaaaggctaca

SEQ ID NO: 11166 - DNA, 80 bp, synthetic construct
  source 1..80: mol_type = other DNA
ttgaggagaaagaatagtctagaacctatgacactggcttgactgacttctgtgtgtttacaacattttaggtgattagg

SEQ ID NO: 11167 - DNA, 80 bp, synthetic construct
  source 1..80: mol_type = other DNA
tcttttttatctttgtttaaatattaattatccactcaatacatcttggcccttctcacactagatcagggtttctcaac

SEQ ID NO: 11168 - DNA, 80 bp, synthetic construct
  source 1..80: mol_type = other DNA
tgtcctcctttccctctcattctaaattcttatgacgtttctctcaaaatgtagagttgaaagactactttcatgatatc

SEQ ID NO: 11169 - DNA, 80 bp, synthetic construct
  source 1..80: mol_type = other DNA
ctttctgaactcactgtttcctaaaactcttcttcccttggctctcatggtgccagcaaagatcagagtaaattaaacac

SEQ ID NO: 11170 - DNA, 80 bp, synthetic construct
  source 1..80: mol_type = other DNA
gctattgctaggattataagcatgagccaccatgcctggccaagtgatatttttaaatgatataataaaaagaaaaacct

SEQ ID NO: 11171 - DNA, 80 bp, synthetic construct
  source 1..80: mol_type = other DNA
tgggacattaacacaatttgctaacttcagtttcactacaggcactatgttccgagactgatatgactgatgttttatca

SEQ ID NO: 11172 - DNA, 80 bp, synthetic construct
  source 1..80: mol_type = other DNA
ttaggatctcactctgtcacttttttggctgtataaacaccgggtcactgaaagactacatatgtctaatttctaactgt

SEQ ID NO: 11173 - DNA, 80 bp, synthetic construct
  source 1..80: mol_type = other DNA
gagttaacctgtgaaagtgaggcatcagcagtaaggggaatgacagtgaggacaatggtaaagaaatctttctccttcta

SEQ ID NO: 11174 - DNA, 80 bp, synthetic construct
  source 1..80: mol_type = other DNA
gcatagaagaaaaacattatgctatatataatcacatctaactaccttgtgtgtgaatgttttgtatctacaatggcaaa

SEQ ID NO: 11175 - DNA, 80 bp, synthetic construct
  source 1..80: mol_type = other DNA
ctcattccaccagtacaaaacaaaaaactgtaacgagaaagaactaaaatgtagaaccatttcttaagaaacatacaaca

SEQ ID NO: 11176 - DNA, 80 bp, synthetic construct
  source 1..80: mol_type = other DNA
gtcgaaaattatctttcaagggaataggtaatgatggatccaaacccaactgaggagttacgatgacctaaagaagcgta

SEQ ID NO: 11177 - DNA, 80 bp, synthetic construct
  source 1..80: mol_type = other DNA
agatggtagaacttctagatgttggtaacacagtgattttctttgccaccacagaaaagtagatccaccaagaaacaggg

SEQ ID NO: 11178 - DNA, 80 bp, synthetic construct
  source 1..80: mol_type = other DNA
aaggataggcgtgtgtgatgagaggtccttgtgggccttaagtaggaatctggattttactgaaagcaattgaacagtga

SEQ ID NO: 11179 - DNA, 80 bp, synthetic construct
  source 1..80: mol_type = other DNA
gtggtagaatgtaccagtcatattggatttagggtccgtggtaatccagtatgacttcttcttaatgtgattacatatgc

SEQ ID NO: 11180 - DNA, 80 bp, synthetic construct
  source 1..80: mol_type = other DNA
gggtggagagttctgtagatatttatcagattcacttgatccagagctgagttcaggccctgaatatctttgttaatttt

SEQ ID NO: 11181 - DNA, 80 bp, synthetic construct
  source 1..80: mol_type = other DNA
atatcctcagcaattgcttgtctgaaaaggatcttattgcttcttcacttatgaagcttagtttggccagttacgaaatt

SEQ ID NO: 11182 - DNA, 80 bp, synthetic construct
  source 1..80: mol_type = other DNA
cagagtgaacagacagcctacaaaacgggagacaatttttgcaatctatccatctgaccaaagtctaatattcagcatct

SEQ ID NO: 11183 - DNA, 80 bp, synthetic construct
  source 1..80: mol_type = other DNA
gaaaaaaaaacacttctaggcaccaagcaaaggattcaacattcagcaagcctcgaggaacaagcctggactggcatgca

SEQ ID NO: 11184 - DNA, 80 bp, synthetic construct
  source 1..80: mol_type = other DNA
ataggatgagatgagagggccaagaatatattcttagggattgactatttctttaggaagccaccaaaggaaagggatca

SEQ ID NO: 11185 - DNA, 80 bp, synthetic construct
  source 1..80: mol_type = other DNA
atagatgtggaacattctgaactaacaccagactattgggccctatggtggtgctcagatgttacttggaaagtataatg

SEQ ID NO: 11186 - DNA, 80 bp, synthetic construct
  source 1..80: mol_type = other DNA
tgctactgtattttttaggcatcagagatagagttgtgaggaagacaaggcaagatccttgacctccaaatgtttatagt

SEQ ID NO: 11187 - DNA, 80 bp, synthetic construct
  source 1..80: mol_type = other DNA
aggtggctagatgtcagattcaggatttatacattttgtagagatagcaattaagattcactgatggattggaagtggga

SEQ ID NO: 11188 - DNA, 80 bp, synthetic construct
  source 1..80: mol_type = other DNA
caatgactaagaacaattccaagcattttacaaaatatgttaactcagttaaggaatactcttagctacaagtgacagta

SEQ ID NO: 11189 - DNA, 80 bp, synthetic construct
  source 1..80: mol_type = other DNA
tagatttacatagagccaggccatttgtacttcattagatacctgccagtatagatgtctttactttaggataaatgtta

SEQ ID NO: 11190 - DNA, 80 bp, synthetic construct
  source 1..80: mol_type = other DNA
cctccaccctcaagtaggcttgactttgcttaatgggaatattttacatctcacacaaaggaggcactggtactcaaaaa

SEQ ID NO: 11191 - DNA, 80 bp, synthetic construct
  source 1..80: mol_type = other DNA
tcaagatttgatgatattcctgatattctgtcagtaataggatgcctttcccaacttaaagggcatattccattttggga

SEQ ID NO: 11192 - DNA, 80 bp, synthetic construct
  source 1..80: mol_type = other DNA
ctccacattatttttcactgcactatattttactgctgtaagcacaaagcagtagagatgttctgaacccaaggatccag

SEQ ID NO: 11193 - DNA, 80 bp, synthetic construct
  source 1..80: mol_type = other DNA
atagattttctgaagcttcataggttcttgctgagtattgtgagcaaggtaaactgaaagcagcaacacgaagaggaaag

SEQ ID NO: 11194 - DNA, 80 bp, synthetic construct
  source 1..80: mol_type = other DNA
ttgttccaggaaaggcacaacaaaaggtaattgcaggcaatagatgacactcaagaagtgaacagtggtggcttcttcca

SEQ ID NO: 11195 - DNA, 80 bp, synthetic construct
  source 1..80: mol_type = other DNA
tgtgtcatgctctgctggaaggggacccaaaaatatttccttacttgtggagtttcgccaaggacaatgtcttattgaaa

SEQ ID NO: 11196 - DNA, 80 bp, synthetic construct
  source 1..80: mol_type = other DNA
tcctacttccttcacttttcttcttttgagagtacagcccagtaaatcacttggacaagaaaactcatctcatgctttcc

SEQ ID NO: 11197 - DNA, 80 bp, synthetic construct
  source 1..80: mol_type = other DNA
ctatttggaggtgaacagtatgatttacgtaatgggaaatcatgccaaccgatcaggtttggtttaataaaatgataaat

SEQ ID NO: 11198 - DNA, 80 bp, synthetic construct
  source 1..80: mol_type = other DNA
gcacaggaattacagatgtgagccaccgtgcctggcttatatattttctttaaaaaggaagtatatactatcagccatgc

SEQ ID NO: 11199 - DNA, 80 bp, synthetic construct
  source 1..80: mol_type = other DNA
ttctgcttagaggagaggagagcaaagagtaaaagggactttgttttgcatcttggataccagctccaccacagtaggat

SEQ ID NO: 11200 - DNA, 80 bp, synthetic construct
  source 1..80: mol_type = other DNA
attccatttgtttgggagaaagtgaaaagactaacagtctctgcctggtaatccagacacttcttccagatcttatccaa

SEQ ID NO: 11201 - DNA, 80 bp, synthetic construct
  source 1..80: mol_type = other DNA
catcagagtctcttaatagcaaaaaggatcaagcagaagaaagaatgagtgagcctgaagacaggttatttgaaaataca

SEQ ID NO: 11202 - DNA, 80 bp, synthetic construct
  source 1..80: mol_type = other DNA
agatagtattggcaagccttatggtaacttcaaatagaaaaacatacaacaatacacaaaaaataaaaagcaagaaatta

SEQ ID NO: 11203 - DNA, 80 bp, synthetic construct
  source 1..80: mol_type = other DNA
agagaactaggaaagctaaagcaaaccaaactcaaaattagaagaagaaaagaaataataagaaacagagcagaaataaa

SEQ ID NO: 11204 - DNA, 80 bp, synthetic construct
  source 1..80: mol_type = other DNA
atcccagggatgcaaagatggttcaacataggcaaatcaatcaatgtgatacatcatatcaacagaacgaaggacaaaaa

SEQ ID NO: 11205 - DNA, 80 bp, synthetic construct
  source 1..80: mol_type = other DNA
caataattggtactgggaaaactgtataagcatatgcaaaagaatgaaactagacccctatctcttgccatatacaagaa

SEQ ID NO: 11206 - DNA, 80 bp, synthetic construct
  source 1..80: mol_type = other DNA
gaaataagtcaggcacagaaatacaaacatcacattctcatttatttgtgggatctaaaaatcaaaacgattgaactcag

SEQ ID NO: 11207 - DNA, 80 bp, synthetic construct
  source 1..80: mol_type = other DNA
gcaactatactgtcccacatcacatgctgtagtcacatctttaaagccagatgaattagcttaaaggttatctgttaaac

SEQ ID NO: 11208 - DNA, 80 bp, synthetic construct
  source 1..80: mol_type = other DNA
ttgtcttagaggtggaacaactagaactcccatatgctcttggtagattgtaaattatgaattggtactaacattttgga

SEQ ID NO: 11209 - DNA, 80 bp, synthetic construct
  source 1..80: mol_type = other DNA
catttcctaatccttctcccccagtaaaagaattctagctcattccttttttagcatgacagctgggcagtaaatgagtc

SEQ ID NO: 11210 - DNA, 80 bp, synthetic construct
  source 1..80: mol_type = other DNA
ttagcatggtcatttacctaaactttgttaaaatagtgaaatatttccaaagcctcctaattttttttacgccaatccta

SEQ ID NO: 11211 - DNA, 80 bp, synthetic construct
  source 1..80: mol_type = other DNA
gtgataaactatgtaattcaacagttcagaacagcttgcatgtaacctttgttaaatcaaaagtcaggtggcaacctgga

SEQ ID NO: 11212 - DNA, 80 bp, synthetic construct
  source 1..80: mol_type = other DNA
ccatgcaaacagtgcgatttcaaaagtatgtccctttctactcatatctttctcagtcatctctgcctgtcagaggccct

SEQ ID NO: 11213 - DNA, 80 bp, synthetic construct
  source 1..80: mol_type = other DNA
taagttggcatagtctgataactgtacgcaagtatagtgttgtgtgttttgcgtgttttcttctttctgtcttgtcagtt

SEQ ID NO: 11214 - DNA, 80 bp, synthetic construct
  source 1..80: mol_type = other DNA
cactgtctttcatagtggttgaactaatttacactcccaccaacagtgtaaaagtgttcctatttctccacatactctct

SEQ ID NO: 11215 - DNA, 80 bp, synthetic construct
  source 1..80: mol_type = other DNA
gaacttctttacagcaaaagaaactatcatcagagtgaacaggcaacctacagaatgggagaaaatttttgcaatctatc

SEQ ID NO: 11216 - DNA, 80 bp, synthetic construct
  source 1..80: mol_type = other DNA
ggttgattcaaggagcaaggatagagatggattggacataaggggtgatgaagtttgaattaattaacttatactaaatg

SEQ ID NO: 11217 - DNA, 80 bp, synthetic construct
  source 1..80: mol_type = other DNA
aaggatagttttaatactgcccagtacttttcagttgagtaggcatgtatatgtccaacaggcatctgaaaatacacact

SEQ ID NO: 11218 - DNA, 80 bp, synthetic construct
  source 1..80: mol_type = other DNA
ccaaaaaaaaaaaaaaagaaaagaaaagaaaagaaaaagaaaaaaaaaagaaaaacaacaacaaaaaaaaaccaaaacaa

SEQ ID NO: 11219 - DNA, 80 bp, synthetic construct
  source 1..80: mol_type = other DNA
gtgaggccctgtatctacaaaaaataaaaatcgtagccaggcatggtggtgtgcacctgtgatcccagatacacgagagg

SEQ ID NO: 11220 - DNA, 80 bp, synthetic construct
  source 1..80: mol_type = other DNA
aagctagtttttcagacttaggcagttcatgctgtaagcccgagatctcatggtcacccttgcaagagaaatatctaatt

SEQ ID NO: 11221 - DNA, 80 bp, synthetic construct
  source 1..80: mol_type = other DNA
tcccctcctttcccaaactcctggcaaccactgatctgtttatcgtggagctgtgtctcttccagaatgcatataattga

SEQ ID NO: 11222 - DNA, 80 bp, synthetic construct
  source 1..80: mol_type = other DNA
aggcgcccgccaccacacctggctaatttttttgtatttttggtggagacgaggtttcaccatgtcggtcaggctggtct

SEQ ID NO: 11223 - DNA, 80 bp, synthetic construct
  source 1..80: mol_type = other DNA
acaattagaatcatgaccatactgggtcttgaaaacatagcagtgcaatcacagccaatggctggcttggtggctggcga

SEQ ID NO: 11224 - DNA, 80 bp, synthetic construct
  source 1..80: mol_type = other DNA
caggaatgggggaaaaatgtaggcctgggtaagtacaaaaaagggaaatcgaaggagactagggagttactgtagatttt

SEQ ID NO: 11225 - DNA, 80 bp, synthetic construct
  source 1..80: mol_type = other DNA
tcattctcccagccttaatatcagccaggaatactttattcttggacttccaaagttgctatagtagtttccaaagccca

SEQ ID NO: 11226 - DNA, 80 bp, synthetic construct
  source 1..80: mol_type = other DNA
ctgttctacttactgtgcacccctgcctttctaaatataactcttctatgtagcatgtaaattaccacagaactcatctc

SEQ ID NO: 11227 - DNA, 80 bp, synthetic construct
  source 1..80: mol_type = other DNA
tacgtctgatatatgtatcacatttaatttatttcatccagtggttcttaactggggacaactttgtacctctctcccca

SEQ ID NO: 11228 - DNA, 80 bp, synthetic construct
  source 1..80: mol_type = other DNA
caaacattattttggaagcagtaaaagtaaactagaatctggcctagtcatgtcccaggacacctctttcaagtcctgaa

SEQ ID NO: 11229 - DNA, 80 bp, synthetic construct
  source 1..80: mol_type = other DNA
gcttccttttctcctactcatcctcgctcttctttttaatatacctttaaaatgatgccacagaaatggccacccaatct

SEQ ID NO: 11230 - DNA, 80 bp, synthetic construct
  source 1..80: mol_type = other DNA
agaaggagattggctgaaaaatatttggagtctcctccagccatattccttggtcagcttctatgatcctctttggagct

SEQ ID NO: 11231 - DNA, 80 bp, synthetic construct
  source 1..80: mol_type = other DNA
aacacaatgtatgcttgcttttacacagtagggttcagggattagagggttggctctttaaaaaccgtcagagacacagg

SEQ ID NO: 11232 - DNA, 80 bp, synthetic construct
  source 1..80: mol_type = other DNA
gggaattggaagcaaatgacatcacagcaggtcagagaaaaagggttgagcggcaggcacccagagtagtaggtctttgg

SEQ ID NO: 11233 - DNA, 80 bp, synthetic construct
  source 1..80: mol_type = other DNA
ttcttggcacatacaggtgccatgcctgcatatagtaagtgctcagaaaacatttcttgactgaattcagccaacaaaaa

SEQ ID NO: 11234 - DNA, 80 bp, synthetic construct
  source 1..80: mol_type = other DNA
tacaaaggctgctaagtgtgttaagagcatactcatttctgttctccaaaatatttcataaggtgctttaagaataggta

SEQ ID NO: 11235 - DNA, 80 bp, synthetic construct
  source 1..80: mol_type = other DNA
agagtcataaaagagtaaaattattatggtatgagttatagattgtattgaatatctctttatatgtctaggttttgtca

SEQ ID NO: 11236 - DNA, 80 bp, synthetic construct
  source 1..80: mol_type = other DNA
ctttagattaaaaattatattacccagactggtctcttggacttgcttccaagtgacttttgactgtatcacaaaatcaa

SEQ ID NO: 11237 - DNA, 80 bp, synthetic construct
  source 1..80: mol_type = other DNA
aggccaatatgtgttgaacaattatattgtgatatacaactgccaagcattcccgattaccatgactccatttagtcagt

SEQ ID NO: 11238 - DNA, 80 bp, synthetic construct
  source 1..80: mol_type = other DNA
gttacactagggaaatcacggttttccagttttccatttatgtgttatgggagggagtggaacttagtgtaataatattc

SEQ ID NO: 11239 - DNA, 80 bp, synthetic construct
  source 1..80: mol_type = other DNA
ttgtgtcccttctgccttagcctttgtaggatagcatgcttgctaatttcttgctcatggggtaaggaaatgaagatttt

SEQ ID NO: 11240 - DNA, 80 bp, synthetic construct
  source 1..80: mol_type = other DNA
ataatcagttcatatactgttgcagttttgtaaaagaaaagatgagctgaaagagtggccatggtggaggtgggtggggt

SEQ ID NO: 11241 - DNA, 80 bp, synthetic construct
  source 1..80: mol_type = other DNA
actgacagctgtattaagaggtgattcaagggctaaaccttagagtccagcattggttatgggtgtgacaagaaaatgaa

SEQ ID NO: 11242 - DNA, 80 bp, synthetic construct
  source 1..80: mol_type = other DNA
ttttggaatatgcatcttttaatgtgtccttcaaggcaaaggctctatcttatctatcttgtgtcttgcattttcccagg

SEQ ID NO: 11243 - DNA, 80 bp, synthetic construct
  source 1..80: mol_type = other DNA
tgcagtgcagagataaccaataacagatcataacaggtttaaatatgtgcaaggagatgtcagcagaagctttcctacat

SEQ ID NO: 11244 - DNA, 80 bp, synthetic construct
  source 1..80: mol_type = other DNA
tctatacaggccttcaaccgattggatgaagttcacctttattagtgagggcaatctgctttaaccaaagtttactgatt

SEQ ID NO: 11245 - DNA, 80 bp, synthetic construct
  source 1..80: mol_type = other DNA
aatgtcatgcagtgcataactgtatcttaaatactcaaagtatcacctttgtttgtttgtccccttgtgtgcatcatcct

SEQ ID NO: 11246 - DNA, 80 bp, synthetic construct
  source 1..80: mol_type = other DNA
tgttcaatttctgctctgttccaggcactgaacaacatgatggagataaaagataaatattacacctgccttgtcctcaa

SEQ ID NO: 11247 - DNA, 80 bp, synthetic construct
  source 1..80: mol_type = other DNA
aaggcttttgaggtagagtcttattaattccttggtaaaccttgagccaattgttgtctatgttctctgcctctgtcttg

SEQ ID NO: 11248 - DNA, 80 bp, synthetic construct
  source 1..80: mol_type = other DNA
aatagtggtttttctgtacacatagtgagaggtcattacatcatttggttgttgaaagtcataaggatgtctagcatgcg

SEQ ID NO: 11249 - DNA, 80 bp, synthetic construct
  source 1..80: mol_type = other DNA
ttaatcattcttctttctagccagttgttccagctacagttttgtggctcttgttagtggcttcattcccagatagaata

SEQ ID NO: 11250 - DNA, 80 bp, synthetic construct
  source 1..80: mol_type = other DNA
aaagtgttcttttgtgactggcttatttcacttagcattttttttcaaagattcatccctgttgtagcgtgtatcagtgc

SEQ ID NO: 11251 - DNA, 80 bp, synthetic construct
  source 1..80: mol_type = other DNA
tgagtgtttcaatttctccacatatttgcaacacttactattatctactcttaaaaattacagccatcctactgggcatg

SEQ ID NO: 11252 - DNA, 80 bp, synthetic construct
  source 1..80: mol_type = other DNA
tcaggtgactggggattcgtattcttcaagttgaaatattaccttgttgagaaagaaaccatgtgtgagacaaccatgtt

SEQ ID NO: 11253 - DNA, 80 bp, synthetic construct
  source 1..80: mol_type = other DNA
aagcaaagtggtagagctgtgctctagaagtttgggatttatgatcacaatcttttccaatgagtcccctctttcctctg

SEQ ID NO: 11254 - DNA, 80 bp, synthetic construct
  source 1..80: mol_type = other DNA
gccttagggatctctgtttgctatcccatagtgaatgattaattagtttctgttagaaatagtcagaactaggctgggtg

SEQ ID NO: 11255 - DNA, 80 bp, synthetic construct
  source 1..80: mol_type = other DNA
tggtttttttttgtatttctaagactggcttgaggtaggcatggagaattctttgatgggacataattttcttcctttct

SEQ ID NO: 11256 - DNA, 80 bp, synthetic construct
  source 1..80: mol_type = other DNA
ggagcacattttcctttttactaaatgttctacaggttcttttctttccatccacacacagtgccattaccctcattcta

SEQ ID NO: 11257 - DNA, 80 bp, synthetic construct
  source 1..80: mol_type = other DNA
gctcctctcccagctgtctgtctagcacaacccagcataccaaattttcttaaatagggaaagttgaacatggtaaaaga

SEQ ID NO: 11258 - DNA, 80 bp, synthetic construct
  source 1..80: mol_type = other DNA
ttgttctgaatggctttgctagaatatcttttctataatgaatttatcctgcttctcagatattgctaaagcactccctt

SEQ ID NO: 11259 - DNA, 80 bp, synthetic construct
  source 1..80: mol_type = other DNA
atacagacagcgcctggaattgtcagacatataccaaatcccttctgttgattctgctgacaatctatctgaaaaattgg

SEQ ID NO: 11260 - DNA, 80 bp, synthetic construct
  source 1..80: mol_type = other DNA
cttgctctctaggaatggtagtcccccccataaagaatctctcagtttcctttccaatcaaaaggttaggatccttttga

SEQ ID NO: 11261 - DNA, 80 bp, synthetic construct
  source 1..80: mol_type = other DNA
aaagaattaagctagtgggagtagcagattcacacttctaagatcaagggccagcttctattattgaacacttggtgtgt

SEQ ID NO: 11262 - DNA, 80 bp, synthetic construct
  source 1..80: mol_type = other DNA
tttggaagagtgacataccatttttggtactttgtacctctgcacccttgggaagtgaccctggcttcacatttcataac

SEQ ID NO: 11263 - DNA, 80 bp, synthetic construct
  source 1..80: mol_type = other DNA
ctcctttagagtgatttagagccatgtttacttatggtaacttgacagtaatgggaataaccactgatgaaacgtaaagc

SEQ ID NO: 11264 - DNA, 80 bp, synthetic construct
  source 1..80: mol_type = other DNA
tggccttttcatgaaatcaattccctgcacagtgatatatggcagagcattgaattctgccaaatatctggctgagtgtt

SEQ ID NO: 11265 - DNA, 80 bp, synthetic construct
  source 1..80: mol_type = other DNA
gacttgtgtttatattggtctttatgcctcagggagttaaacagtgtctcccagagaaatgccatttgtgttacattgct

SEQ ID NO: 11266 - DNA, 80 bp, synthetic construct
  source 1..80: mol_type = other DNA
gggtctaattagaaggcccctttctatgctctgcttggcttgtaaaataatttatttctctagatcccaccaacatagta

SEQ ID NO: 11267 - DNA, 80 bp, synthetic construct
  source 1..80: mol_type = other DNA
gaaagcgtgtttccatcatctcaactcctactgataaccaatggaatattggtgagtaaaggatcctgggggaagaagca

SEQ ID NO: 11268 - DNA, 80 bp, synthetic construct
  source 1..80: mol_type = other DNA
aaaaaaaaaaaaaaagactcctagcatggaagagaaactggctgttgaaaacctgaatgtgagagtcagtcaaggatagt

SEQ ID NO: 11269 - DNA, 80 bp, synthetic construct
  source 1..80: mol_type = other DNA
caaagggggtcttgttttgtaggtaaatcgttggcagcccacagagaaaatagatggagaatgtttcttttcagaccttg

SEQ ID NO: 11270 - DNA, 80 bp, synthetic construct
  source 1..80: mol_type = other DNA
cccaacaggccctggtgtatgttgttcccctctctgggtccacctgttctcaatgttcaactcccttttacgagtgagaa

SEQ ID NO: 11271 - DNA, 80 bp, synthetic construct
  source 1..80: mol_type = other DNA
atcgtaccagtcccatgctgttttggttaccgtagccttgtagtatattttgaagtctggtagcgtgatgcctccagctt

SEQ ID NO: 11272 - DNA, 80 bp, synthetic construct
  source 1..80: mol_type = other DNA
tctggacctcagtttccttaactgtacaactgagggaaactgtatagtatagctatagtacagtataccatctttaccgt

SEQ ID NO: 11273 - DNA, 80 bp, synthetic construct
  source 1..80: mol_type = other DNA
atctagatggcgattgcaatggcggttcgctgcatccatcagcccatcatctacattaggtatttctcctaatgctatcc

SEQ ID NO: 11274 - DNA, 80 bp, synthetic construct
  source 1..80: mol_type = other DNA
agcacatagaatagattctggtacatagcaagtgctctctctatatatggaactctatatgtagttggtgcaaaagtaat

SEQ ID NO: 11275 - DNA, 80 bp, synthetic construct
  source 1..80: mol_type = other DNA
accaaacctattattgctgctatttcagcaaatccaggggctttttcttataaaatatgaagaatatagcttagatttct

SEQ ID NO: 11276 - DNA, 80 bp, synthetic construct
  source 1..80: mol_type = other DNA
aaagctgactcttagaaggtgttcttgactctctacctaagtgtaaaaatacaaataaattgctttccagaaaaggtgca

SEQ ID NO: 11277 - DNA, 80 bp, synthetic construct
  source 1..80: mol_type = other DNA
gatattctgtgcttggtattgtgcatggtattaggattgttgcaaaaattgagactgacagtccctactcttacggtgct

SEQ ID NO: 11278 - DNA, 80 bp, synthetic construct
  source 1..80: mol_type = other DNA
cacacaatagaaaacagtgtagccttagaagttttccaagtgaccattctacttagaaacaaccctgctttgggatcaga

SEQ ID NO: 11279 - DNA, 80 bp, synthetic construct
  source 1..80: mol_type = other DNA
cacgctggcttacacgttggtatcaggcttcttctattattgaagtgagccattaagtgaattccatcttgatttgtgtc

SEQ ID NO: 11280 - DNA, 80 bp, synthetic construct
  source 1..80: mol_type = other DNA
gcactccagcccaagcaacaaagcaagactgtctctgaatttttgttttgttttgttttttgtttttttttttttgagac

SEQ ID NO: 11281 - DNA, 80 bp, synthetic construct
  source 1..80: mol_type = other DNA
atgctttgtctggtatgcatggtaaataatgccccttgctctctgcttcatgatcacatgtgatacttctaacatagata

SEQ ID NO: 11282 - DNA, 80 bp, synthetic construct
  source 1..80: mol_type = other DNA
gtggctatgtgagatgagagaactataatattccaggtttgtgattagtttggaaactttttaaaagtttgaatgtggtc

SEQ ID NO: 11283 - DNA, 80 bp, synthetic construct
  source 1..80: mol_type = other DNA
tttatttctccttcacttatgaagcttagtttggctggatatctctcagaccacagtgcaatcaaactagaactcaggat

SEQ ID NO: 11284 - DNA, 80 bp, synthetic construct
  source 1..80: mol_type = other DNA
atacctaatttattgagagtttttagcatgaagggttgttgaattttgtcaaaggctttttctgcatctattgagataat

SEQ ID NO: 11285 - DNA, 80 bp, synthetic construct
  source 1..80: mol_type = other DNA
aacagagatatagatcgatggaacagaacagagccctcagaaataacgccgcatatctacaactatctgatctttgacaa

SEQ ID NO: 11286 - DNA, 80 bp, synthetic construct
  source 1..80: mol_type = other DNA
gctggaggtattggatacttgaggtttagaaaatacattgtagaaaatggacaaaaacccctcaaattaagggatgaggc

SEQ ID NO: 11287 - DNA, 80 bp, synthetic construct
  source 1..80: mol_type = other DNA
gttctagtttgaaattacatcaggtcacttggtctgtgtggcctcagtttcttcatctgccatgtgaaaataataatgcc

SEQ ID NO: 11288 - DNA, 80 bp, synthetic construct
  source 1..80: mol_type = other DNA
gtatccaccgccttattttgagttggatttttatcatcctatgagccctacaaatttaaagtttttggaacagcacgtgc

SEQ ID NO: 11289 - DNA, 80 bp, synthetic construct
  source 1..80: mol_type = other DNA
tacgtaagtgaagactttgttagatatcatttggaatgtggaatctacacagttggcatatcagagaaggttgaattcag

SEQ ID NO: 11290 - DNA, 80 bp, synthetic construct
  source 1..80: mol_type = other DNA
tcaaagtcactcgagattaagcctgttactaagttatgtgcaatttagctcagtggatttcccccacttcatattgctct

SEQ ID NO: 11291 - DNA, 80 bp, synthetic construct
  source 1..80: mol_type = other DNA
taaagctgtcaagccgtgttctagataaaataagtattggacaacttgttagtctcctttccaacaacctgaacaaattt

SEQ ID NO: 11292 - DNA, 80 bp, synthetic construct
  source 1..80: mol_type = other DNA
ccctggagagagttctttgttctctcatgttctatgctgtggttcttgctttatgcaaaaagaagtaagttacttaaaac

SEQ ID NO: 11293 - DNA, 80 bp, synthetic construct
  source 1..80: mol_type = other DNA
ttacagaataactaatatgagtgaatgaatgacttacacaagtcactgcttaggataaagggcttgagtttgtcagctag

SEQ ID NO: 11294 - DNA, 80 bp, synthetic construct
  source 1..80: mol_type = other DNA
tctgtcaatattcatgcattagttgcacaaattcactttcatgggctgtagttttatgtagttggtccagggtgttattt

SEQ ID NO: 11295 - DNA, 80 bp, synthetic construct
  source 1..80: mol_type = other DNA
ggtgatgacaaggatatcagagggtctggttttctcaaactcatgataaactcatggctgggtcattcttggtgctgatt

SEQ ID NO: 11296 - DNA, 80 bp, synthetic construct
  source 1..80: mol_type = other DNA
taaacattagacctaaatagacggaattgcaatccgggttgggcacattaaactccattttcttcatcaatgtgctcaga

SEQ ID NO: 11297 - DNA, 80 bp, synthetic construct
  source 1..80: mol_type = other DNA
acgcaaatcctggaaacctactgagactcattcagtcagtatctctaagaggcaagcttgagactgtatatttaaaaagc

SEQ ID NO: 11298 - DNA, 80 bp, synthetic construct
  source 1..80: mol_type = other DNA
cactcggcaatttccctgggctgtacaaacatggtatgactctcttggagcaataaacaaaatacaggtaatgtaccata

SEQ ID NO: 11299 - DNA, 80 bp, synthetic construct
  source 1..80: mol_type = other DNA
acaaagtggtgaatctagctctgaatcatagtaagtagctctgggaatcatcttgtcttctgttagcccattgagagaga

SEQ ID NO: 11300 - DNA, 80 bp, synthetic construct
  source 1..80: mol_type = other DNA
aagacattggaatataacttaacgactacagaagtagtgatggagaatgtaacagccttctgggaggaggtcagaatttt

SEQ ID NO: 11301 - DNA, 80 bp, synthetic construct
  source 1..80: mol_type = other DNA
ctcacttacatgggttgtgtaaaggtaggaggtataaaaccagtgtcctaggtctaaatctttcttaatgtcatactttg

SEQ ID NO: 11302 - DNA, 80 bp, synthetic construct
  source 1..80: mol_type = other DNA
actctgggcaccccttgatggcatttacttatgatggtgatgcttgttaaacttcctgtttgcgacttcaacgtccatat

SEQ ID NO: 11303 - DNA, 80 bp, synthetic construct
  source 1..80: mol_type = other DNA
ttaatttagcttcagtgaaccgttctttccagattattttggcctcagaccatgacttctaagtctgccgtgcttgccac

SEQ ID NO: 11304 - DNA, 80 bp, synthetic construct
  source 1..80: mol_type = other DNA
tatgtttccaaatttcctgcgtgtacctcaaggttcttgttcatcacttcccaagcttcataaacgcactcattttagtg

SEQ ID NO: 11305 - DNA, 80 bp, synthetic construct
  source 1..80: mol_type = other DNA
aaaagtcccacttctaagcatgatactcacaacttttaggttaatagcctttgtcaccttgccatatacatctgatccag

SEQ ID NO: 11306 - DNA, 80 bp, synthetic construct
  source 1..80: mol_type = other DNA
aacgtagtgagactagtactatactcccttgcatggtaagtgagaaggctgtctgtataaaatgagggaaggactcatga

SEQ ID NO: 11307 - DNA, 80 bp, synthetic construct
  source 1..80: mol_type = other DNA
cttagttttagatcatgtcctctagaaaccgtatgctatataattatgtactataaagtaataatgtatacagtgtaatg

SEQ ID NO: 11308 - DNA, 80 bp, synthetic construct
  source 1..80: mol_type = other DNA
tcagaagtctataaaatggttccttgttcccatttgattgtcattttagctgtggtactttgtagaaatgtgagaaaaag

SEQ ID NO: 11309 - DNA, 80 bp, synthetic construct
  source 1..80: mol_type = other DNA
taataatacaatttggttgtttctctctccagttgttttcctacatacgaaacagcttttaaaacaaaatagctggaatt

SEQ ID NO: 11310 - DNA, 80 bp, synthetic construct
  source 1..80: mol_type = other DNA
tgataaagtaataacgttgttgacttttgtcactctcccctattaataatcatctaggctgcaaaaggatcatgtcttct

SEQ ID NO: 11311 - DNA, 80 bp, synthetic construct
  source 1..80: mol_type = other DNA
tggattatcagagctatattgtgtttaggtttataaagctgtactatgtgaaaatatcacttctaggtttaattttgtac

SEQ ID NO: 11312 - DNA, 80 bp, synthetic construct
  source 1..80: mol_type = other DNA
aatgtccttccctgaaatttgtaccaattcgtactcatgccatacactctaaatagagtgctgatttccccacagcatta

SEQ ID NO: 11313 - DNA, 80 bp, synthetic construct
  source 1..80: mol_type = other DNA
gggtaaaccataaagtgctcgtaaagactaaggcttatttctctgggtgagattagaggccactggagagttttaaacag

SEQ ID NO: 11314 - DNA, 80 bp, synthetic construct
  source 1..80: mol_type = other DNA
aaagaccaaatacagacaaccattgatgccttattcttttgatatactcctggagtccacttgctaatacaattgaccct

SEQ ID NO: 11315 - DNA, 80 bp, synthetic construct
  source 1..80: mol_type = other DNA
cgtggatttttgactatacagtgggttggcacccctaaccttcatgttgataaagggtcaatggtatattatttaatttt

SEQ ID NO: 11316 - DNA, 80 bp, synthetic construct
  source 1..80: mol_type = other DNA
tttttgcaactcctttattgatacttttcttcctgattaggtttctactaaaaccaaacaagctttccatgaattagctt

SEQ ID NO: 11317 - DNA, 80 bp, synthetic construct
  source 1..80: mol_type = other DNA
taagggcatagctctgtggcataaagtatactcacatagttgtgcaactatcacctccttttgatttttttttactaatt

SEQ ID NO: 11318 - DNA, 80 bp, synthetic construct
  source 1..80: mol_type = other DNA
tatataaatctttgttcactgatagtccttttgtactatcatctcttaaatgactttatactccaagaaaggctcatggg

SEQ ID NO: 11319 - DNA, 80 bp, synthetic construct
  source 1..80: mol_type = other DNA
atgccaactagaagaggtaagaaactatgtgaaaactttttgattatgcatatgaacccttcacactacccaaattatat

SEQ ID NO: 11320 - DNA, 80 bp, synthetic construct
  source 1..80: mol_type = other DNA
gttttggacttacctcaaagaggatatacttcattcctcaaaaggccttcttccaggaatagtatttcataacctggagg

SEQ ID NO: 11321 - DNA, 80 bp, synthetic construct
  source 1..80: mol_type = other DNA
tcatcaccatatttttggcctcttgaaaagaaatcctgtgcctattagcatccaattaccgttcctttgtagctaagtct

SEQ ID NO: 11322 - DNA, 80 bp, synthetic construct
  source 1..80: mol_type = other DNA
caatttacagaagttggtatatcgtgtggaagaaaacagcataagatcctgaaggtttgaactgtgggcacattggctcc

SEQ ID NO: 11323 - DNA, 80 bp, synthetic construct
  source 1..80: mol_type = other DNA
gactacaaggagaaagactaataggaaaccatttcaggaatccagatatggtcatgatggacaggaagagacaagagtta

SEQ ID NO: 11324 - DNA, 80 bp, synthetic construct
  source 1..80: mol_type = other DNA
agacaaaagtaactgaaagtgctcggttatcttgacagtcaaaatcaaaagtgtcccctattttcagtgacctaagagtt

SEQ ID NO: 11325 - DNA, 80 bp, synthetic construct
  source 1..80: mol_type = other DNA
gagatagttctgtgttgatagaaaacttgtaatgtacagccatgagtgagaagtcaggttcagattcttcaccttcagtc

SEQ ID NO: 11326 - DNA, 80 bp, synthetic construct
  source 1..80: mol_type = other DNA
ctgagaagaatttactgaaagaaaaaaatacttgggagggaaattggcaagaagtatgaaaaagcttgggagggaagtaa

SEQ ID NO: 11327 - DNA, 80 bp, synthetic construct
  source 1..80: mol_type = other DNA
tttgagccctggaacttgaaaataaatgctagctaacatctgtgaacagaacatacccatcagtactgtgctaagcacct

SEQ ID NO: 11328 - DNA, 80 bp, synthetic construct
  source 1..80: mol_type = other DNA
agaaatagatttcaataaatatttgttgagttcctagtatggaaacatcgtgtttggcaccagggatgttgcctgcaagt

SEQ ID NO: 11329 - DNA, 80 bp, synthetic construct
  source 1..80: mol_type = other DNA
aatgacttgccaggtaggaaggagtaaatttcttctcagtggataattagaagattgaatggatggacttggtcactatt

SEQ ID NO: 11330 - DNA, 80 bp, synthetic construct
  source 1..80: mol_type = other DNA
tgagggagcctgaggagaaggagcatttgaaatttcagtacagaagagaaaaggggtgacttatagaaaaaggagacaga

SEQ ID NO: 11331 - DNA, 80 bp, synthetic construct
  source 1..80: mol_type = other DNA
tctagctatagaagagtttgggaagcgtagtgcttagtgttctagcctttgtagcacaggaaagggcctggaaggaaagg

SEQ ID NO: 11332 - DNA, 80 bp, synthetic construct
  source 1..80: mol_type = other DNA
gtgatgggtaggtaagtatgaaggccaggtcctaagatctaaattacaaagcagaagacttacttaccagggagctggaa

SEQ ID NO: 11333 - DNA, 80 bp, synthetic construct
  source 1..80: mol_type = other DNA
taatctttagccaatatttctatatacagttattagtaatcatgtttgacttaggtcaacaaacaatctttcctaaaaaa

SEQ ID NO: 11334 - DNA, 80 bp, synthetic construct
  source 1..80: mol_type = other DNA
ttactttgaccctctctagtactctttatctaagtattctcaagtgctttacaatctcaaacagacccaatgtgttgtat

SEQ ID NO: 11335 - DNA, 80 bp, synthetic construct
  source 1..80: mol_type = other DNA
ttgtccctgtgtgtaaggcttctctgataagcagcacaggctctcatactgctttttaaaaaaattatgatagcatcaag

SEQ ID NO: 11336 - DNA, 80 bp, synthetic construct
  source 1..80: mol_type = other DNA
gatactgccaatttgccctttgaaatagccatacaatttatagtaccaccagccacttatgaaagttcccatttcctcaa

SEQ ID NO: 11337 - DNA, 80 bp, synthetic construct
  source 1..80: mol_type = other DNA
aggtcctggactaacacagttctatacattgcattaccattctctagagtgggatcttttgttgtagagagttttaaaat

SEQ ID NO: 11338 - DNA, 80 bp, synthetic construct
  source 1..80: mol_type = other DNA
aaaagtgcagctcagaagccagctctttcattaagttgtcctctataccctcactagattgtaagctcttgaaatgagag

SEQ ID NO: 11339 - DNA, 80 bp, synthetic construct
  source 1..80: mol_type = other DNA
ggggttaggggtgctgattccccatgcagttgaacatgttacataacataatacataaccattgttattatgtaacagga

SEQ ID NO: 11340 - DNA, 80 bp, synthetic construct
  source 1..80: mol_type = other DNA
tattattgaggagagcatttctaagggtaaaatcttgtctaatgcttgaaacatcttcattttcctgtcagtttagatct

SEQ ID NO: 11341 - DNA, 80 bp, synthetic construct
  source 1..80: mol_type = other DNA
aagatttatgcgttgttagatattagagccattaaaaaaaaaaaaaccaaagtgccaaaaaacctagcacagtgttaata

SEQ ID NO: 11342 - DNA, 80 bp, synthetic construct
  source 1..80: mol_type = other DNA
agagatttatgtgcaatgatattattggtaggtcatttttatgaggaggggtgtggatagtaaatgccagggtaaatcac

SEQ ID NO: 11343 - DNA, 80 bp, synthetic construct
  source 1..80: mol_type = other DNA
cctcaaagctgttagtccagtaatggagacagggctagaaaacaggtcattttgctctttgactaatgttactactcatg

SEQ ID NO: 11344 - DNA, 80 bp, synthetic construct
  source 1..80: mol_type = other DNA
ttcagatttcaactcagcagtgactcaggagaaaggacacttggatgcatttctttatggcatttttcccagggtacacg

SEQ ID NO: 11345 - DNA, 80 bp, synthetic construct
  source 1..80: mol_type = other DNA
ccccgctccacccttcctttatcgtccccaaagcacattatataattattatgcctttgcagcctcattggttagctccc

SEQ ID NO: 11346 - DNA, 80 bp, synthetic construct
  source 1..80: mol_type = other DNA
tcttctagaatgcttatgttttctggtcttagatttaagtctttgattcatcttgagttaatttttgtataaggtgagca

SEQ ID NO: 11347 - DNA, 80 bp, synthetic construct
  source 1..80: mol_type = other DNA
cttaatatttgattaacttcccttccctgtctcttttccttctttccataaatcttcattaattgcctgcactgagctag

SEQ ID NO: 11348 - DNA, 80 bp, synthetic construct
  source 1..80: mol_type = other DNA
ttttttcacaggccttttgttactctagatcagaaatgttgatagcaacagttccttgagggcagcagctagcatgatgc

SEQ ID NO: 11349 - DNA, 80 bp, synthetic construct
  source 1..80: mol_type = other DNA
tgcaggggtgtgaataatgttcttttagtttctcttcttaggaggtttgttcattttgggagatttcttttgaaaagagt

SEQ ID NO: 11350 - DNA, 80 bp, synthetic construct
  source 1..80: mol_type = other DNA
gcataatactggacagagaagatgtaaatatctgttagttccatcatagaccctgccactccaatgtacacaccagcttt

SEQ ID NO: 11351 - DNA, 80 bp, synthetic construct
  source 1..80: mol_type = other DNA
gatgtgagggagagaattaagaacagagtgtggggaagaaactgtgtacattttgatgggatccattatgtagctcttgc

SEQ ID NO: 11352 - DNA, 80 bp, synthetic construct
  source 1..80: mol_type = other DNA
gctgtctctgacattttacagtttggaatagtttattttctttttggtgtcctcaccaaaacccaacatcttcaagggca

SEQ ID NO: 11353 - DNA, 80 bp, synthetic construct
  source 1..80: mol_type = other DNA
aagtgttttactggtttaatatgcttagactactcatctacctcaatacttccttggagatctcctcctcagtcacacag

SEQ ID NO: 11354 - DNA, 80 bp, synthetic construct
  source 1..80: mol_type = other DNA
tatttttatgggacattttcagaactccaaaatctacagccagactttagctcaaaactcatgggatgtgattctttcga

SEQ ID NO: 11355 - DNA, 80 bp, synthetic construct
  source 1..80: mol_type = other DNA
agcctcttgataggactaactcacattctggtttgtatatcagtcttgcctgaatttagctagtgtgggcttttttttat

SEQ ID NO: 11356 - DNA, 80 bp, synthetic construct
  source 1..80: mol_type = other DNA
aatagtttctattaatggattgcatctagtgctaggtggcatatatttagtccccacaactaccctggaaggtatttaaa

SEQ ID NO: 11357 - DNA, 80 bp, synthetic construct
  source 1..80: mol_type = other DNA
ccagcagtgactacatggaacacataccttcgatatattactgtccacaagagcttaatttttgtgctaatttggtgctt

SEQ ID NO: 11358 - DNA, 80 bp, synthetic construct
  source 1..80: mol_type = other DNA
ttaggagactgagtggggaggattgcttgagcccaggggtcaagaccagcctgggcaacacagtgagacaccgtatctac

SEQ ID NO: 11359 - DNA, 80 bp, synthetic construct
  source 1..80: mol_type = other DNA
actctctgtctagctcagggtttgtaaatacaccaatggacactttgtatctagctaatctagtgaggaggtggagaact

SEQ ID NO: 11360 - DNA, 80 bp, synthetic construct
  source 1..80: mol_type = other DNA
atgcgtaatctttgtgatatgtgccaccaccaataagcaaaattgttctcttattcaaaaggttggacacagctgctcta

SEQ ID NO: 11361 - DNA, 80 bp, synthetic construct
  source 1..80: mol_type = other DNA
tgggctgttgctaacctcaattaagaaggcttgatgatatttgtaaagtgtcatcactccaccatggtccagtaacatct

SEQ ID NO: 11362 - DNA, 80 bp, synthetic construct
  source 1..80: mol_type = other DNA
tttgtctcatgcagctccatggagttgaacttatgcacctttaaaatggtatatacttaattaattaagtgttgatctgc

SEQ ID NO: 11363 - DNA, 80 bp, synthetic construct
  source 1..80: mol_type = other DNA
acattaggaagcagtttcctggttcttttgaaaacaactagagagtcttgttgttgactggaatatctgaagatcctgtt

SEQ ID NO: 11364 - DNA, 80 bp, synthetic construct
  source 1..80: mol_type = other DNA
gaaacaagggtagtttttacagatacagtgcatagaagctctgtgtacaatgaagaaaagtaggaaagtgagaaaaatgc

SEQ ID NO: 11365 - DNA, 80 bp, synthetic construct
  source 1..80: mol_type = other DNA
agtgcagcagtggtgtgatcttggctcactgcaacctctaccttctgtgttcaagcaattctggtgcctcggccacctga

SEQ ID NO: 11366 - DNA, 80 bp, synthetic construct
  source 1..80: mol_type = other DNA
ttcatttctcccaagcattatggtagtggaaagataaggttttttgtttaaatgatgaccattagttgggtgaggtgaca

SEQ ID NO: 11367 - DNA, 80 bp, synthetic construct
  source 1..80: mol_type = other DNA
gtaagaatgtgatgttggtgggactgtagcagaacaagaaggcccttatgggtcagtcatacctctcttttcaaatattt

SEQ ID NO: 11368 - DNA, 80 bp, synthetic construct
  source 1..80: mol_type = other DNA
agtgactcttctgagccttggcctcctcacctgttaagtgaagaaaagaatatttcagaagatctttgtgagaatgaaac

SEQ ID NO: 11369 - DNA, 80 bp, synthetic construct
  source 1..80: mol_type = other DNA
aaacactgatgctttcttgcagcaggggcatttgagttgagaaagggaggaaacatagattttgacaatgagagctgagg

SEQ ID NO: 11370 - DNA, 80 bp, synthetic construct
  source 1..80: mol_type = other DNA
ccttctgcctcttaccatatttgacttcatccaggtatgtaaaaataagtaccgttaagtatgtctgtattattaaaaaa

SEQ ID NO: 11371 - DNA, 80 bp, synthetic construct
  source 1..80: mol_type = other DNA
ttgcccatgttgggatgagtcattgtccgctcttgctctttccctacccctgcaaaataataatactgtatttgattgaa

SEQ ID NO: 11372 - DNA, 80 bp, synthetic construct
  source 1..80: mol_type = other DNA
gattaggcagaggtcttttatattaatttacccattttatttgtaagagagtctcatattaaggaagcataatatatgac

SEQ ID NO: 11373 - DNA, 80 bp, synthetic construct
  source 1..80: mol_type = other DNA
aaaagactccaagacgaatgcccagctttcaaaaactgtctaaccaaaataaatcctaagattcaccttcatactaaaat

SEQ ID NO: 11374 - DNA, 80 bp, synthetic construct
  source 1..80: mol_type = other DNA
cacagcaactcaaacaactggaatctgaaggtatgacagtgaatgtgcgatactcatcttgtaaaaaagctataagagct

SEQ ID NO: 11375 - DNA, 80 bp, synthetic construct
  source 1..80: mol_type = other DNA
tcatcttgttacaagcttaaaaggactatggacacttcgtgccttcggacggcagccttactttgaaactctgttccaca

SEQ ID NO: 11376 - DNA, 80 bp, synthetic construct
  source 1..80: mol_type = other DNA
tgaaataacttcttatatgtgacagtgaatactggcagagcaaatgccaaatcaatgccaaatctgtaggatcatttgat

SEQ ID NO: 11377 - DNA, 80 bp, synthetic construct
  source 1..80: mol_type = other DNA
ctaagcccctcattttcctcaagtgtaaatagacacaataatattacctattccataggtgtggggtgaatagtaaatgt

SEQ ID NO: 11378 - DNA, 80 bp, synthetic construct
  source 1..80: mol_type = other DNA
gtccggtgaaattctaagtccacttacttcccaatagcatgcaattagcaaaggtcctccttgcaaaggcacagaacaca

SEQ ID NO: 11379 - DNA, 80 bp, synthetic construct
  source 1..80: mol_type = other DNA
attgatcatcagctctatacatttcaaacataatccctcagtcagtggcttggcttatagagtcttttgatgaaaagaag

SEQ ID NO: 11380 - DNA, 80 bp, synthetic construct
  source 1..80: mol_type = other DNA
ttttttagtttgatcagctctctttagcttctgtagttcggtctttaattccattccagtatgcttttggagttgggtct

SEQ ID NO: 11381 - DNA, 80 bp, synthetic construct
  source 1..80: mol_type = other DNA
tgtttgaatatcaaagctaatatgtgagtgatttccctgccaaatagcacaagtagcctttcctgggtgtttatgggcat

SEQ ID NO: 11382 - DNA, 80 bp, synthetic construct
  source 1..80: mol_type = other DNA
tctgcctgtgttcttgctcctatattcaggagcaagtaatatgcaatacctccctctttgtgggatctttctcattagca

SEQ ID NO: 11383 - DNA, 80 bp, synthetic construct
  source 1..80: mol_type = other DNA
ctttcagtaggcttgacattttaaggcatgagtttccgttcagtatctccttaaaatatacccagggtctcaggagacta

SEQ ID NO: 11384 - DNA, 80 bp, synthetic construct
  source 1..80: mol_type = other DNA
tctttaattctccaagtgaagcagcagataaaccatccttgtttccattagctgtctaccctgttcaactgtgtgtttct

SEQ ID NO: 11385 - DNA, 80 bp, synthetic construct
  source 1..80: mol_type = other DNA
gaatggattagatcacaagttctcatcctagtagcacatgcagaatctttataaaaacacagagtagccaggtgcggtgg

SEQ ID NO: 11386 - DNA, 80 bp, synthetic construct
  source 1..80: mol_type = other DNA
tagttttgctgactcctggtctatgtcatagaatttccttttgaattgatggaccaccagcaaatgatttttgtcctgta

SEQ ID NO: 11387 - DNA, 80 bp, synthetic construct
  source 1..80: mol_type = other DNA
tggattttggggtatgatggcacatagtttgggtgttaatgcctaatcttgatgtactggcttctgaacaaccaaaagga

SEQ ID NO: 11388 - DNA, 80 bp, synthetic construct
  source 1..80: mol_type = other DNA
taacttccatctcatccaaacagcaatgaatattttgaggctgaggcgctgaggggtaaaattgcagcctggactacttg

SEQ ID NO: 11389 - DNA, 80 bp, synthetic construct
  source 1..80: mol_type = other DNA
tgctgggttctaagtggagtttacagaatgccatgatattaggaattaaggagtgtgttgccctacatcatcttttgtcc

SEQ ID NO: 11390 - DNA, 80 bp, synthetic construct
  source 1..80: mol_type = other DNA
acccactgaattgaatgactgtctgctcatatgctgtgaatgagtgcccagtcttaagattaaatcacacgttcttggct

SEQ ID NO: 11391 - DNA, 80 bp, synthetic construct
  source 1..80: mol_type = other DNA
ttaggttgtgggctttgggtccttttcacatccgttaacagtgggcttgacttcaaaggattattttcttgaatcttgaa

SEQ ID NO: 11392 - DNA, 80 bp, synthetic construct
  source 1..80: mol_type = other DNA
tcgagagaaagagaagaatcttcagtagtggttttgaggtgtggtacattttattataatataccggttatacagcattg

SEQ ID NO: 11393 - DNA, 80 bp, synthetic construct
  source 1..80: mol_type = other DNA
ggctgaacacatagaaggaacttaatatatactgatttctggaattgattcttggagacagggatggtcattatccatat

SEQ ID NO: 11394 - DNA, 80 bp, synthetic construct
  source 1..80: mol_type = other DNA
ttcagtaactattcactgcaaggcactctctaggtactttgggggaattggaaattactcacataaggctatggattgtg

SEQ ID NO: 11395 - DNA, 80 bp, synthetic construct
  source 1..80: mol_type = other DNA
cctgaggcagatttattgtggcaataacaaagcttaagtttcacagaccttcatttgcctgagccaactttgaaggccat

SEQ ID NO: 11396 - DNA, 80 bp, synthetic construct
  source 1..80: mol_type = other DNA
cagtcaggttgggggatgccaaaggaagtaatgggagacaagattggagcaagatagataagagattgtggatttttttt

SEQ ID NO: 11397 - DNA, 80 bp, synthetic construct
  source 1..80: mol_type = other DNA
caaattatcaaacctaaagagttcatggatacgtgcaatttacagatgcacagtcagaagcacagatgacaatctgggct

SEQ ID NO: 11398 - DNA, 80 bp, synthetic construct
  source 1..80: mol_type = other DNA
gaaaaagaacgccattaggtataaaggagcaatggtaaaagaccagttgcaaaaggttagggaatgggtggttactgaaa

SEQ ID NO: 11399 - DNA, 80 bp, synthetic construct
  source 1..80: mol_type = other DNA
ggattttttggtcaattattttgaatcttctacatagattatcatcatctgaacttagttttatttcttccttcccaatc

SEQ ID NO: 11400 - DNA, 80 bp, synthetic construct
  source 1..80: mol_type = other DNA
agtgatgtccccttttttgttttattgatattagcaatttgtgtcacatcttttattttgctttgttagccaggctagag

SEQ ID NO: 11401 - DNA, 80 bp, synthetic construct
  source 1..80: mol_type = other DNA
gaaagaaatatagcctctccaggtctcttttggttggtgttaaaatgacttaactttctttatcccccttacttttagtt

SEQ ID NO: 11402 - DNA, 80 bp, synthetic construct
  source 1..80: mol_type = other DNA
ataattccacagggcacagaactctagattggtgatttcttcccctcaaacccttaaatatttcattccactgccttctt

SEQ ID NO: 11403 - DNA, 80 bp, synthetic construct
  source 1..80: mol_type = other DNA
attccaacatccctgtcatatctgactgtggttctgatgcttgctctgtgttttcaaatggtgtttttttttttttgcct

SEQ ID NO: 11404 - DNA, 80 bp, synthetic construct
  source 1..80: mol_type = other DNA
cagtgacttggacccacttggaattttcttgctctcacatcatgcacactgaatctccagcaatttttcacttacagttt

SEQ ID NO: 11405 - DNA, 80 bp, synthetic construct
  source 1..80: mol_type = other DNA
cttgcctttagaacttataacagcatctcgcaaactatcacaagatgctccaaacatacttcttatgtgctgaattaaga

SEQ ID NO: 11406 - DNA, 80 bp, synthetic construct
  source 1..80: mol_type = other DNA
ccattttctatcttgataaacattggtgtaaagtagttgaatcattcagtgggtataagcagcatattctcaatactatg

SEQ ID NO: 11407 - DNA, 80 bp, synthetic construct
  source 1..80: mol_type = other DNA
tattcccctgtacctcacctgcactgggcatattcaagttgcttatacaacactttactattgtgttagaaaaatcatga

SEQ ID NO: 11408 - DNA, 80 bp, synthetic construct
  source 1..80: mol_type = other DNA
atgtaaggagaaggaaacaaccatttattcagtgccactaactgtcagccagttttttcagtggtcagttaatgactgca

SEQ ID NO: 11409 - DNA, 80 bp, synthetic construct
  source 1..80: mol_type = other DNA
ttatcagcttttttgagactactgaacactgaaggagaaatccagatcgatggtgtgtcttgggattcaataactttgca

SEQ ID NO: 11410 - DNA, 80 bp, synthetic construct
  source 1..80: mol_type = other DNA
cacttttctccctttgtgctaatggacactgaatccattccactaccatagttcttgctaatactactctactttttaca

SEQ ID NO: 11411 - DNA, 80 bp, synthetic construct
  source 1..80: mol_type = other DNA
aggaacgtatatatgcaagacatggaggaaaaccaagtgggccagagttttgaaaattctttatcttttctttctgccaa

SEQ ID NO: 11412 - DNA, 80 bp, synthetic construct
  source 1..80: mol_type = other DNA
atctatgtccacacataactcccacctcaaagatggggcatcttttgctctgggagatatcaaatgcgaccaaaacaagt

SEQ ID NO: 11413 - DNA, 80 bp, synthetic construct
  source 1..80: mol_type = other DNA
tgttttgtgctgaatcactaaatgcttgatttctgtaacaagagattgtggttccatcagtatctggattttagtctgtg

SEQ ID NO: 11414 - DNA, 80 bp, synthetic construct
  source 1..80: mol_type = other DNA
agtgatgagtctggagtaatataaggacagtaggggtggagtgctgaacttaagggaggagagaaaaataattggtatgg

SEQ ID NO: 11415 - DNA, 80 bp, synthetic construct
  source 1..80: mol_type = other DNA
tgcagacattgtcaaaaagggacgtccaaaccactgtgatatttataagcatttgggccacattttgatagaactataca

SEQ ID NO: 11416 - DNA, 80 bp, synthetic construct
  source 1..80: mol_type = other DNA
tttcatttgtaaaccagagaaaaggacttgggtgacctccaaagacctttcaaatttggagatgagtttgtggaaagttc

SEQ ID NO: 11417 - DNA, 80 bp, synthetic construct
  source 1..80: mol_type = other DNA
ccctgaggaagtgatatttaatttgaaacctaaagaaagcagttggccatgggaagaaggtagggaatgagattcccaag

SEQ ID NO: 11418 - DNA, 80 bp, synthetic construct
  source 1..80: mol_type = other DNA
ctgcccaacctttaatctttcctgagctttaaataggaaggaaaaaatggtccacaaaggatttgagccattttgctgtg

SEQ ID NO: 11419 - DNA, 80 bp, synthetic construct
  source 1..80: mol_type = other DNA
atatcagcatggaggtcctagctgacctctctagagagtttctgagacatttgacaacaactttttctttaagtcatcag

SEQ ID NO: 11420 - DNA, 80 bp, synthetic construct
  source 1..80: mol_type = other DNA
ttgggattagaaaaatgttcacaagggactccaaatattgctgtagtatttgtttcttaaaagaatgatacaaagcagac

SEQ ID NO: 11421 - DNA, 80 bp, synthetic construct
  source 1..80: mol_type = other DNA
tggctccaaccatcaggccctatcttggtccatttaggctgctaaaataaaataccaaagactgagctgcttataagcaa

SEQ ID NO: 11422 - DNA, 80 bp, synthetic construct
  source 1..80: mol_type = other DNA
cattgccctaatgtgggctctatgtggtgacctcacccctgggcctctacctgggccctgtgactccctgggttcttgaa

SEQ ID NO: 11423 - DNA, 80 bp, synthetic construct
  source 1..80: mol_type = other DNA
cccatcagattggcctttaccgtccatatttctgggaacattctgctcatgaccacttaggtattcggtaagaagatagt

SEQ ID NO: 11424 - DNA, 80 bp, synthetic construct
  source 1..80: mol_type = other DNA
gtagcactactttgtcctttcctaatcaatttgcgtcaatgaaacatgaattagaagagacctaggcgactccactatac

SEQ ID NO: 11425 - DNA, 80 bp, synthetic construct
  source 1..80: mol_type = other DNA
caggagctttgaaatgcctgtgagtgttaaacacttacccattgagtgcccaaccttaacatgcccctaataaaatgtac

SEQ ID NO: 11426 - DNA, 80 bp, synthetic construct
  source 1..80: mol_type = other DNA
taattccaggccaagaaatgctttatttctagcttggacttggcttccatgtccagtgtagaatcttatccttgctgatc

SEQ ID NO: 11427 - DNA, 80 bp, synthetic construct
  source 1..80: mol_type = other DNA
tgtctttgtttggctttctacactcactgcccaacttccccttacttcccatgattcagttatactgaatttctttggtt

SEQ ID NO: 11428 - DNA, 80 bp, synthetic construct
  source 1..80: mol_type = other DNA
ttttttttcatgtttctctgtcacaagagcaaactcttgctccataataacattccagaatacagcaatagcaaaagtca

SEQ ID NO: 11429 - DNA, 80 bp, synthetic construct
  source 1..80: mol_type = other DNA
cacagatcactaaatcagatgatctctagcaatttcctgtttgtttgttttttgcccatagtgcttatctctttgaacag

SEQ ID NO: 11430 - DNA, 80 bp, synthetic construct
  source 1..80: mol_type = other DNA
tgcaaagtctaagacagtcaaatagctttcctagtacggccttaggaacttagtatatgactggtgtgaatctagaggga

SEQ ID NO: 11431 - DNA, 80 bp, synthetic construct
  source 1..80: mol_type = other DNA
cttacagtctaacgagggaacttgcacaaatactactatcactaggtgcctggttgaatggcttaagagatgatcaggga

SEQ ID NO: 11432 - DNA, 80 bp, synthetic construct
  source 1..80: mol_type = other DNA
ggggatacatcagagtagtcccccttgtctaataaatgtgtttacatttcctgccataccagaaacccttctcaaacttt

SEQ ID NO: 11433 - DNA, 80 bp, synthetic construct
  source 1..80: mol_type = other DNA
tattttatgctatcttttgtcctcagtcatgacagagtagaagatgggaggtagcaccaaggatgatgtcatacctccat

SEQ ID NO: 11434 - DNA, 80 bp, synthetic construct
  source 1..80: mol_type = other DNA
cttcccccttgtcaacacatgatgaagcttttaaatacatgggcctaatctgatccttatgatttgcctttgtatcccat

SEQ ID NO: 11435 - DNA, 80 bp, synthetic construct
  source 1..80: mol_type = other DNA
atggatgtggtctgggacaggcctagttgtcttacagtctgatttatggtattaatgacaaagttgagaggcacatttca

SEQ ID NO: 11436 - DNA, 80 bp, synthetic construct
  source 1..80: mol_type = other DNA
aacaaagtgcggcagtacgattccatccagaaactgctgaacgagaggagcctcttccggcaagccatcagcccctccga

SEQ ID NO: 11437 - DNA, 80 bp, synthetic construct
  source 1..80: mol_type = other DNA
ttgatatgccttttcccaactccagaaagtgacaagctcacagacctttgaactagagtttagctggaaaagtatgttag

SEQ ID NO: 11438 - DNA, 80 bp, synthetic construct
  source 1..80: mol_type = other DNA
ctttcctctaatgcctggcaaccaccattttactttctgtctctgattttgactactcgaaggacctaggagtgggatca

SEQ ID NO: 11439 - DNA, 80 bp, synthetic construct
  source 1..80: mol_type = other DNA
ctttttttcttccttgttgagcttcttcatgaaatgtgcagttgctagcatgtggtggacggactgcagatccctactga

SEQ ID NO: 11440 - DNA, 80 bp, synthetic construct
  source 1..80: mol_type = other DNA
gaccagaaatcatcgtgctgtctaccctgcaatgaacacataattgacttttcctttactccctctttttacctataaaa

SEQ ID NO: 11441 - DNA, 80 bp, synthetic construct
  source 1..80: mol_type = other DNA
ggcatctgttaaggtctttggcccgtgttttgatcaggttgtgtcttgttgttgagttcctttactggatttcttttgtt

SEQ ID NO: 11442 - DNA, 80 bp, synthetic construct
  source 1..80: mol_type = other DNA
cagggaccttccatggttgggaaattgttacctattcgagtgaaaggctaataaaacccccaaggtaaatattttagtac

SEQ ID NO: 11443 - DNA, 80 bp, synthetic construct
  source 1..80: mol_type = other DNA
aaaaaccccagactcagttggtagatgggactataactggacattggagagaagtggcttgacttcagagcgacagcttg

SEQ ID NO: 11444 - DNA, 80 bp, synthetic construct
  source 1..80: mol_type = other DNA
gacagccagtgccaacaacagaaatgagtacagagcctcacatactaatgtaagtgaatctcaaagacattttatcttta

SEQ ID NO: 11445 - DNA, 80 bp, synthetic construct
  source 1..80: mol_type = other DNA
agctcacagtcaatcttatttcatctatgctccctcatgcttccctcctatattattttgtgcaaatccaaacagcatat

SEQ ID NO: 11446 - DNA, 80 bp, synthetic construct
  source 1..80: mol_type = other DNA
ttagccactacaacacagagctggggcttgaggggataagaaatgctattgacctgcacttcccagggtgatagtacagt

SEQ ID NO: 11447 - DNA, 80 bp, synthetic construct
  source 1..80: mol_type = other DNA
tcagataactacttcctagttaggttttcctctctatagagagtcaaccagccctgctgtactttcccgtgggatctgaa

SEQ ID NO: 11448 - DNA, 80 bp, synthetic construct
  source 1..80: mol_type = other DNA
aattaaagaagaatcttggaagatggggttaggtcactgatagcttgaaaggcatcccaggtgattctaatacgcagcca

SEQ ID NO: 11449 - DNA, 80 bp, synthetic construct
  source 1..80: mol_type = other DNA
aaacttcggagttttgagtgaagagtgatgtgattggaggcacattatagcagggtgactctgatgctgtactgacacca

SEQ ID NO: 11450 - DNA, 80 bp, synthetic construct
  source 1..80: mol_type = other DNA
aaatgttagagactgaggatagaccttcatgagttttttctaaaggaaaggagagaaaggggaggtaagtggatgggaaa

SEQ ID NO: 11451 - DNA, 80 bp, synthetic construct
  source 1..80: mol_type = other DNA
agaattgagagtcattccaggataccctgaatagttgagagggaaggaacgcttggaacaagagaagggatcacctttag

SEQ ID NO: 11452 - DNA, 80 bp, synthetic construct
  source 1..80: mol_type = other DNA
aatagaatgcttgcaattgatcactgatgagatgcaggtgatggtaatgacaaagtcagggtgttatatgggagtgggaa

SEQ ID NO: 11453 - DNA, 80 bp, synthetic construct
  source 1..80: mol_type = other DNA
cagaaaataatttccccataatccagctgagaaaattgcttggccttcccttaacccttccttgaaactttccgtaaaat

SEQ ID NO: 11454 - DNA, 80 bp, synthetic construct
  source 1..80: mol_type = other DNA
ttagctgggcttttcaaggtcacaagaaggaatcctatacccatcacctgcaatgataggagtttattgttcaaatagta

SEQ ID NO: 11455 - DNA, 80 bp, synthetic construct
  source 1..80: mol_type = other DNA
cacgtgctcatacaccacccctgcctccatgacagaatgtagaaaagttttcttgtgtggttctatagccaaataagtcc

SEQ ID NO: 11456 - DNA, 80 bp, synthetic construct
  source 1..80: mol_type = other DNA
atgataagatcaatgtaatttgtaacaaattacccttgggttgagtccttggagaaagctggactcatttttaaaaagag

SEQ ID NO: 11457 - DNA, 80 bp, synthetic construct
  source 1..80: mol_type = other DNA
agagcagctcaggaaatgactgctcttaagctgacaggctggcagaatattaataaatgcaaaataagcaactgtcctgc

SEQ ID NO: 11458 - DNA, 80 bp, synthetic construct
  source 1..80: mol_type = other DNA
gcacaaaatggactaagacagagtgtaactagatgtatgaggaaatgacctctctctacataggctgtctatctttggag

SEQ ID NO: 11459 - DNA, 80 bp, synthetic construct
  source 1..80: mol_type = other DNA
agtttgctggggcagagggagggtggggcggatatgggagtactttatatgtataaaattttgccatagggtaggtttta

SEQ ID NO: 11460 - DNA, 80 bp, synthetic construct
  source 1..80: mol_type = other DNA
gcttgtaaatgtatcctttgaatctctgcctccatcacatggcactctccttctgtgtggctgaatttctctcttattat

SEQ ID NO: 11461 - DNA, 80 bp, synthetic construct
  source 1..80: mol_type = other DNA
tgaatgtttgggtttagtgttctggtgggaggaactgcagatacaaagaccttgaagagagcaagttcctggtgtatttg

SEQ ID NO: 11462 - DNA, 80 bp, synthetic construct
  source 1..80: mol_type = other DNA
agagcataaatattttactgtggccttgactacaatagcaaaagtaaccaaaaataaccagaaacacctggaaacagtcc

SEQ ID NO: 11463 - DNA, 80 bp, synthetic construct
  source 1..80: mol_type = other DNA
tgttgtctactgagcagaggtagctaaacatttggactggctaagtaaggaaaatacttcccatgtcacttctgaacttt

SEQ ID NO: 11464 - DNA, 80 bp, synthetic construct
  source 1..80: mol_type = other DNA
aatcattatgtttagtcagattgctcaaaattttctgagctctgttgtgccaagtttaaggcagccggaactctcttccc

SEQ ID NO: 11465 - DNA, 80 bp, synthetic construct
  source 1..80: mol_type = other DNA
gggataagaatactatttccatatctgtcaaaaggcagaggagtgaccacatggtccttccaactttaagtgttattaca

SEQ ID NO: 11466 - DNA, 80 bp, synthetic construct
  source 1..80: mol_type = other DNA
gttggtgggaatgtaaattggttcaaccattgtggaagacaatgtgacaatttctcagagatctagaaccagaaatacca

SEQ ID NO: 11467 - DNA, 80 bp, synthetic construct
  source 1..80: mol_type = other DNA
agaggggaagaaaagaccaggtaggaaatgtgtctagctgtaagacagttccaagaaaggcctatggagtgaaaaaaacc

SEQ ID NO: 11468 - DNA, 80 bp, synthetic construct
  source 1..80: mol_type = other DNA
atgtatgaagcacaggaggagatataagaatggatttctgccatccaggagtgtgtacttaacagcaatacctatgatgc

SEQ ID NO: 11469 - DNA, 80 bp, synthetic construct
  source 1..80: mol_type = other DNA
agcaactagctatgcttagcctccttatcttcatttttaatgcgacaccgtgaactccagtcaagaaaacacatttaaga

SEQ ID NO: 11470 - DNA, 80 bp, synthetic construct
  source 1..80: mol_type = other DNA
gagggaggtttagtctctctcagatgtggtagaaacttccatgtgagaacatttgccacctcagatgagaacactttttc

SEQ ID NO: 11471 - DNA, 80 bp, synthetic construct
  source 1..80: mol_type = other DNA
accctcatacttccactacttgaccctggtagatctcatccagaatcaaagtctatcttttgctccgagtagaaaaatat

SEQ ID NO: 11472 - DNA, 80 bp, synthetic construct
  source 1..80: mol_type = other DNA
ctggaaaaagagtgggcccaaaagaaagattcctaaagtatctcattagtgccatgactagcaggcaacataagcagctc

SEQ ID NO: 11473 - DNA, 80 bp, synthetic construct
  source 1..80: mol_type = other DNA
accacaagactgacgtgactgcccagttgtgaacattgtatgaaggtttagttggcagagtaatgcttttcaagtatgtt

SEQ ID NO: 11474 - DNA, 80 bp, synthetic construct
  source 1..80: mol_type = other DNA
atttttgaactctattctgttccaggatctgtacatttgtccttatgccagtaccaccttatcttaattaccgtagtttt

SEQ ID NO: 11475 - DNA, 80 bp, synthetic construct
  source 1..80: mol_type = other DNA
ctagaatctcacgtacaatgatgactagaggaggcaaaagtggtcatctttgtcatatttctgatctcaggggcaaacat

SEQ ID NO: 11476 - DNA, 80 bp, synthetic construct
  source 1..80: mol_type = other DNA
tctgagaatatattgtttgctggctgattgcccactttccacagggccagttctatttctttgttttttgccctcctatt

SEQ ID NO: 11477 - DNA, 80 bp, synthetic construct
  source 1..80: mol_type = other DNA
aaattacaccacacagaggctgcatattacactagttccaatttcattactcacaaagccaatcttgaaaatgcccaggt

SEQ ID NO: 11478 - DNA, 80 bp, synthetic construct
  source 1..80: mol_type = other DNA
gtatttttcgtaaagacagggtttcaccatatcaaccaggctggtctagaactcctgacctcagataatccacccccctc

SEQ ID NO: 11479 - DNA, 80 bp, synthetic construct
  source 1..80: mol_type = other DNA
gagattacaggcatgagccaccatgcccaacctatttttaatttttaaaggaacctctatactgttttttataatggctg

SEQ ID NO: 11480 - DNA, 80 bp, synthetic construct
  source 1..80: mol_type = other DNA
ctggcatgtcttaatgctttattcctagtccctagcacgatattactttaatgaataagtaaggtttgaagccactctga

SEQ ID NO: 11481 - DNA, 80 bp, synthetic construct
  source 1..80: mol_type = other DNA
atggtttaaaatccaattttcataatatagttgccagcatctgtgaattattacaatttgaaaagatttggaatgccata

SEQ ID NO: 11482 - DNA, 80 bp, synthetic construct
  source 1..80: mol_type = other DNA
cctatcctggagaatgttctgtgtgtgcttgagaagaatatattctgctgttggaagaaatgttctgtatatacctatgt

SEQ ID NO: 11483 - DNA, 80 bp, synthetic construct
  source 1..80: mol_type = other DNA
tcctacatccacgatagaaacaaaagtctcaccaacagttcttgtattgactgtgagacaataaaagatgactctgacat

SEQ ID NO: 11484 - DNA, 80 bp, synthetic construct
  source 1..80: mol_type = other DNA
ttcatattttacaggagtcataatgcaaacttataagcataaatatatacatgatgctaccaaatggcaatgtaaccact

SEQ ID NO: 11485 - DNA, 80 bp, synthetic construct
  source 1..80: mol_type = other DNA
gttgttgatttctatttgccttgtattactgctgctgctgcttcttttggtgttctgggaacactgggtgactttacttc

SEQ ID NO: 11486 - DNA, 80 bp, synthetic construct
  source 1..80: mol_type = other DNA
acatgacatgactcctactaagtgacctactctgaatgcctctgaaggagttgaccttgataacttctcctcttcaaaag

SEQ ID NO: 11487 - DNA, 80 bp, synthetic construct
  source 1..80: mol_type = other DNA
aatttagcaggaaatcctcagttatctttagcagctgcctttctctctctcctcaccaacctaatccaatgttacccaca

SEQ ID NO: 11488 - DNA, 80 bp, synthetic construct
  source 1..80: mol_type = other DNA
gaaataaagtactgagaagtacccagaacaactaaaaacatgtagtttggtcagtccctggaagtgtgaggctagaatgg

SEQ ID NO: 11489 - DNA, 80 bp, synthetic construct
  source 1..80: mol_type = other DNA
ggactgtgacgagagaaggttctatggggaggagtacagagggaagtagtaaattacatgtaaaaaaggaacatgtgaaa

SEQ ID NO: 11490 - DNA, 80 bp, synthetic construct
  source 1..80: mol_type = other DNA
ggtgcctggtgacctcgggaggtgggatatcatcatcttcagaactgtagttgttactgggataccagctctgggagacc

SEQ ID NO: 11491 - DNA, 80 bp, synthetic construct
  source 1..80: mol_type = other DNA
ctgctttttggatttttccagccagggatttttgtgtcctgttgctttttattgtttaaagtgaccctccaagcctgagg

SEQ ID NO: 11492 - DNA, 80 bp, synthetic construct
  source 1..80: mol_type = other DNA
aaaaacaaagatgaatggagctgttgataaacccagtttttgagcctacagggcagcagttgaggtttctggccgttggg

SEQ ID NO: 11493 - DNA, 80 bp, synthetic construct
  source 1..80: mol_type = other DNA
accctgtctctactaaaaatacaaaacattagccgggcgtggtggtgcactcaggaggctgaggcgggataatcgcttga

SEQ ID NO: 11494 - DNA, 80 bp, synthetic construct
  source 1..80: mol_type = other DNA
caagaaccccgtaagccacataccaggccaaatttttcaagagctctttgtaagcaatggctccacaaagtcaacctgaa

SEQ ID NO: 11495 - DNA, 80 bp, synthetic construct
  source 1..80: mol_type = other DNA
aaaagaaataaagaaatgctgtcagaagcctaccccatggtacctgtcatgggccttttcattggtccctttttgttgaa

SEQ ID NO: 11496 - DNA, 80 bp, synthetic construct
  source 1..80: mol_type = other DNA
ttctccccgtgtgcagagatgagagatcgtagaaataaagacacaagacaaagagatagaagaaaagacagctgggcccg

SEQ ID NO: 11497 - DNA, 80 bp, synthetic construct
  source 1..80: mol_type = other DNA
ccattgaaataaacctaattagtttaacatctctcttataaggtcacaggacagatcctttgaggtcttccaggggccct

SEQ ID NO: 11498 - DNA, 80 bp, synthetic construct
  source 1..80: mol_type = other DNA
atgattatgaggtcaattctagccagctttgacctcataacataaaatttcttttctgcagactttcttgaggccaggag

SEQ ID NO: 11499 - DNA, 80 bp, synthetic construct
  source 1..80: mol_type = other DNA
gccaaaaagtacaaaaagttacgcttaataatgaatgtttcagcactttcttctcttcaggtattatttagatattcaat

SEQ ID NO: 11500 - DNA, 80 bp, synthetic construct
  source 1..80: mol_type = other DNA
attaaagtagcgcagagggcatgatcagcagggctccagtaagacgctcccacgggaggagcaagaacacagaacagagg

SEQ ID NO: 11501 - DNA, 80 bp, synthetic construct
  source 1..80: mol_type = other DNA
cttactgaagtcaggcccccagtcccacagaggctgggagacaggggccccatcttcaggtgttggccagaacacaggaa

SEQ ID NO: 11502 - DNA, 80 bp, synthetic construct
  source 1..80: mol_type = other DNA
gaagcagcagcagctttgttagtgtttgttcaaggcctgataggccaaggtgaggctcagccgagaaacgtgctcagagg

SEQ ID NO: 11503 - DNA, 80 bp, synthetic construct
  source 1..80: mol_type = other DNA
acgtcaccccactaggcatgtccaggccctttctgcccctccctaaaggcacccctgtcctttctgtcccctccacactg

SEQ ID NO: 11504 - DNA, 80 bp, synthetic construct
  source 1..80: mol_type = other DNA
tctgcaggttggagaaatgacagcttcttgtactgggggttatgagacagtggcaggagggggacactcccagagtgctg

SEQ ID NO: 11505 - DNA, 80 bp, synthetic construct
  source 1..80: mol_type = other DNA
gtgttctggaatagtgagaacagtgtgccccaaatggccagtggcctttccgagggtcactgcagccgcatgttggccct

SEQ ID NO: 11506 - DNA, 80 bp, synthetic construct
  source 1..80: mol_type = other DNA
ataattagtttattttttaatttcttatagagacagggtcttactatgttgcccagagtggtcctgaacgcctgggctca

SEQ ID NO: 11507 - DNA, 80 bp, synthetic construct
  source 1..80: mol_type = other DNA
ctgtctctaaagaaataaaataaaggcagatgaatgtcatctagggtgtgtccaatgtgagagagaatactgaccaggtg

SEQ ID NO: 11508 - DNA, 80 bp, synthetic construct
  source 1..80: mol_type = other DNA
caccaggtctgaccacatgtttaactttttgaagaactaccaaactgttttccacggcattcacaccagcaatgcaagag

SEQ ID NO: 11509 - DNA, 80 bp, synthetic construct
  source 1..80: mol_type = other DNA
gggctgacggggcaaaatcccagggctgggaacatccgagcagctttgagtagcacaggtgggtttctacgtggctttct

SEQ ID NO: 11510 - DNA, 80 bp, synthetic construct
  source 1..80: mol_type = other DNA
atagcagataaataatagtaaacaaagcaacaggctgtgtcataggaaatccccaccatgaagaaaggagcaaggtggaa

SEQ ID NO: 11511 - DNA, 80 bp, synthetic construct
  source 1..80: mol_type = other DNA
ggaccttggtcatcgccaggttagggtttatgttgatgattatccaaaggcaaaattgatttccacagaaataacatctg

SEQ ID NO: 11512 - DNA, 80 bp, synthetic construct
  source 1..80: mol_type = other DNA
cttgccatcactgtgccccacgaggtacactgttgtgggcggcagggctggcctttctcatctgggacatgccacgttgc

SEQ ID NO: 11513 - DNA, 80 bp, synthetic construct
  source 1..80: mol_type = other DNA
tgacggtggtgcagttccccttgaactctgttctggccaccatgggacctgcctggggaccagtcagacaggttctcctg

SEQ ID NO: 11514 - DNA, 80 bp, synthetic construct
  source 1..80: mol_type = other DNA
tcccagaaccctaaagaaaactgatgaatgcttgtatgggtgtgtaaagatggcctcctgtctgtgtgggcgtgggcact

SEQ ID NO: 11515 - DNA, 80 bp, synthetic construct
  source 1..80: mol_type = other DNA
aaagaaagcatgtgtctcctgcagatcttcctcctgaggccccatcttgtgcattcccccaacccagccccactggcgag

SEQ ID NO: 11516 - DNA, 80 bp, synthetic construct
  source 1..80: mol_type = other DNA
ttcaaaacaacaaaaaacaacaaaaacttttctggaaagatccctgtcagccttgtggagtgtggagagggctgtgggga

SEQ ID NO: 11517 - DNA, 80 bp, synthetic construct
  source 1..80: mol_type = other DNA
aaaaattttttgtagaaatggggtctccctatgttgcccagactggtctcaaactcctggcctcaagcgatcctcttgcc

SEQ ID NO: 11518 - DNA, 80 bp, synthetic construct
  source 1..80: mol_type = other DNA
ttcttgtttatgtgatgtaagcaaacccttttctgatagcatagataggcaagcatcctatgaggtttctcccgatagtg

SEQ ID NO: 11519 - DNA, 80 bp, synthetic construct
  source 1..80: mol_type = other DNA
ccagcctggtactgaaggtgccagacgtgctcctgctgaccttctgcggctccgggctgtgtcctaaatgcaaagcacac

SEQ ID NO: 11520 - DNA, 80 bp, synthetic construct
  source 1..80: mol_type = other DNA
ctgtagttgcctccctggcccatgagtgaggatgcagtgctggtttctgcccacctacacctagagctgtccccatctcc

SEQ ID NO: 11521 - DNA, 80 bp, synthetic construct
  source 1..80: mol_type = other DNA
aaaaatagacattttattacaagagtgtagagaagggagaccaatagaaggtaattgaaatacccccccctcactccagc

SEQ ID NO: 11522 - DNA, 80 bp, synthetic construct
  source 1..80: mol_type = other DNA
ggaggatcaatgcaatgattgtattaatcatatataagagcttaagagggtggacccagcctttcctctgcatctctgaa

SEQ ID NO: 11523 - DNA, 80 bp, synthetic construct
  source 1..80: mol_type = other DNA
atcaccaaatacatgaggctccaggagatagcagttgtgactgtgtcaaaccctggacagggtagaacagaagaagttag

SEQ ID NO: 11524 - DNA, 80 bp, synthetic construct
  source 1..80: mol_type = other DNA
ccccgaaattattattcaggttgactaggctaagcagttcttggtggttgtggtcatagcgccggccaaagcaaatggca

SEQ ID NO: 11525 - DNA, 80 bp, synthetic construct
  source 1..80: mol_type = other DNA
aacacattaaaataaacacataatcaaggtgtatcaccccgagtcctacccaccacacttaggaaaatcatgttctcagg

SEQ ID NO: 11526 - DNA, 80 bp, synthetic construct
  source 1..80: mol_type = other DNA
ctgttaccctggactagaggtcagtagacccaacattctagtcaaagtgatcttggactgcacattttacttttctgggg

SEQ ID NO: 11527 - DNA, 80 bp, synthetic construct
  source 1..80: mol_type = other DNA
actaaaaacactctgagcctccctttttggaggtgctagacaggtagctacctaagaagtcctggaggcaccaaaatgtt

SEQ ID NO: 11528 - DNA, 80 bp, synthetic construct
  source 1..80: mol_type = other DNA
gagcttagtctttctggtatccagctgggagccaagcacagaacacgcatcagtgtttatcaaatgactgaggaaatgaa

SEQ ID NO: 11529 - DNA, 80 bp, synthetic construct
  source 1..80: mol_type = other DNA
cctcgggtccccaaaggcctgaaaagtccaccagagccatggggctggcccttgctcgggcatgtgctgaccctggggaa

SEQ ID NO: 11530 - DNA, 80 bp, synthetic construct
  source 1..80: mol_type = other DNA
aaaagccctggaaatggggccctagcagagtcctgcaatgtggggggcctatgagtgagaaagctttcattctgcagaaa

SEQ ID NO: 11531 - DNA, 80 bp, synthetic construct
  source 1..80: mol_type = other DNA
ggaggttagtggggtcgcagacttgtgaatagacagtcttacataagagtgacatggggtataagaggggataattcatg

SEQ ID NO: 11532 - DNA, 80 bp, synthetic construct
  source 1..80: mol_type = other DNA
ggaattttaacaatgtcaagagagttagtgagcatttacttctacccaaacgttgttctagttattcctgcagtaagagg

SEQ ID NO: 11533 - DNA, 80 bp, synthetic construct
  source 1..80: mol_type = other DNA
tgtgaatggctcagagacctctctttggaaagccccactttagtgtataggtagggggaccatatatataatttaccatc

SEQ ID NO: 11534 - DNA, 80 bp, synthetic construct
  source 1..80: mol_type = other DNA
aaaaagaaataagcatcaaagttcagtttggttccttcccacctacccttcattgctttcaaagtgccctcacacttgtg

SEQ ID NO: 11535 - DNA, 80 bp, synthetic construct
  source 1..80: mol_type = other DNA
accacatccagcctaacttacattcttaaagtgtcgaatgacttctagtgtagaattgtgcaaccatcaccagaattaat

SEQ ID NO: 11536 - DNA, 80 bp, synthetic construct
  source 1..80: mol_type = other DNA
tctcccttcatcgtggcctctccctgtgcgtccctcacctgtctccagcgtccctgtcgtgattcctccctgcctctctc

SEQ ID NO: 11537 - DNA, 80 bp, synthetic construct
  source 1..80: mol_type = other DNA
tctggagggcggtgggagtttggggcacctgtctccaggtaggggagcagttggcaggttgtggtaggggcgtcacgggc

SEQ ID NO: 11538 - DNA, 80 bp, synthetic construct
  source 1..80: mol_type = other DNA
cacgtgaaaacttagatataagtttccatccaaccccactgaaatacctaaacacctggacagatgcctttaactccgtt

SEQ ID NO: 11539 - DNA, 80 bp, synthetic construct
  source 1..80: mol_type = other DNA
aaaaaaaaaaaaatcctgacaatcccaactacatcaaccactgctgttccatctactgagccctcacccacaagcacgac

SEQ ID NO: 11540 - DNA, 80 bp, synthetic construct
  source 1..80: mol_type = other DNA
gagccgatatcacagcactgccctccagcctgggtgacagaataagaccgtgtctcaaaaaaaaaaaaagaattaatttt

SEQ ID NO: 11541 - DNA, 80 bp, synthetic construct
  source 1..80: mol_type = other DNA
tgtctgttctgttatgaatggtctacctccgtgtcataggtggagctatgtcaaccaccgtgttttacctattcggacta

SEQ ID NO: 11542 - DNA, 80 bp, synthetic construct
  source 1..80: mol_type = other DNA
atagatttatttgtctagggtcacacagcagattcttcagctccctgaaaaggagataatggcacagcacagcagtcata

SEQ ID NO: 11543 - DNA, 80 bp, synthetic construct
  source 1..80: mol_type = other DNA
tgtccttcagagctgtgatgagaggaagggaaaccttacagtatgctacaaagagtagtaataatagcagctcttatttc

SEQ ID NO: 11544 - DNA, 80 bp, synthetic construct
  source 1..80: mol_type = other DNA
acacgtcaatgtccttaggtgactgggaggacttgaggcggaagttctgcatgacggtggtgaagaagagaaagagctcc

SEQ ID NO: 11545 - DNA, 80 bp, synthetic construct
  source 1..80: mol_type = other DNA
gagggggaactagtgtgccccaggtaaggggaagtggcaggcatggaggagttggggtcctctgatggaggagctttggg

SEQ ID NO: 11546 - DNA, 80 bp, synthetic construct
  source 1..80: mol_type = other DNA
acattttcaatattttaatatctaatgagactcagctgatgcctaccagctgaatgttgccctgtctctggacagcaagt

SEQ ID NO: 11547 - DNA, 80 bp, synthetic construct
  source 1..80: mol_type = other DNA
accttcttggctatgaagtcctccagcccttgcagcaactgaaaggcctgttgctgtggtcctggcaggtgtttcatcac

SEQ ID NO: 11548 - DNA, 80 bp, synthetic construct
  source 1..80: mol_type = other DNA
gggaacaatctgtctagatatttatgtgtttaaggtgttggttagggcagctgtccatgttttcaggtatttaagtgggt

SEQ ID NO: 11549 - DNA, 80 bp, synthetic construct
  source 1..80: mol_type = other DNA
gtcccctgctcaccgccagtgccccggagggcgtcgatgaggaagcccgcctcctcctggatgcgctcctcgatgcctcg

SEQ ID NO: 11550 - DNA, 80 bp, synthetic construct
  source 1..80: mol_type = other DNA
gaggaatcaggacagggacgctggagacaggtgagggatacacatggagaggccacaatgaagggagatggggagggaag

SEQ ID NO: 11551 - DNA, 80 bp, synthetic construct
  source 1..80: mol_type = other DNA
ttggtacttggggaagcttcaccaaacagaatgaggcagacttccagagtcaggggtggcacgggcatggttggtgagta

SEQ ID NO: 11552 - DNA, 80 bp, synthetic construct
  source 1..80: mol_type = other DNA
ccttttcttcatgtttttgttgttcccactgtaatgagcccactggatgtacaaagaatggctgcatatgagcatttaag

SEQ ID NO: 11553 - DNA, 80 bp, synthetic construct
  source 1..80: mol_type = other DNA
gaaacttacaatcatgatggaaggtgaaggagaagcaagtaccttcttcacaaggtggcaggaaaaagagagagagccaa

SEQ ID NO: 11554 - DNA, 80 bp, synthetic construct
  source 1..80: mol_type = other DNA
agctcctgaacaaggtgggaaacttacttttttgtggtctttttctagcatgctgcgaaggtgcataaccacatttagtt

SEQ ID NO: 11555 - DNA, 80 bp, synthetic construct
  source 1..80: mol_type = other DNA
acattttgctacagagaagaacttggcattgtccttcccaatggagtacaaggaacagtcttagaagaacttggtacggt

SEQ ID NO: 11556 - DNA, 80 bp, synthetic construct
  source 1..80: mol_type = other DNA
atctaccaagtgccagaaatatatcacctgaggtttttgttgtcttactagaattatggatttgataaaccaaatattag

SEQ ID NO: 11557 - DNA, 80 bp, synthetic construct
  source 1..80: mol_type = other DNA
ccggtaactgccactggctcagtatttacctgggttatcactgcttaccatgcctgattttatgattaattatctactta

SEQ ID NO: 11558 - DNA, 80 bp, synthetic construct
  source 1..80: mol_type = other DNA
aaatgctggtcaaagacatcctacacaattcgctgaaccttctctctaagggttttttcccaagctctgcagacgctatc

SEQ ID NO: 11559 - DNA, 80 bp, synthetic construct
  source 1..80: mol_type = other DNA
tggtgtgagatggtatctcattgtggttttgatttgcatttctctgatggccattgatgttgagcattttttcatgtgtt

SEQ ID NO: 11560 - DNA, 80 bp, synthetic construct
  source 1..80: mol_type = other DNA
ccatgccccactatttatttttgtagagatgtgtttgggggacggtctcactatgttgcctaggctggtctcgaactcct

SEQ ID NO: 11561 - DNA, 80 bp, synthetic construct
  source 1..80: mol_type = other DNA
aaaaaacccaaacagaaacaaacaaacaaacaaaattagtgatagtgatgctcagcctggggaaagcatttgtccagtgg

SEQ ID NO: 11562 - DNA, 80 bp, synthetic construct
  source 1..80: mol_type = other DNA
gttaggggaagactgtcttgtttttttttctgagcagagacaatgaaagattcaggtggaaggcactagaaggaggcagg

SEQ ID NO: 11563 - DNA, 80 bp, synthetic construct
  source 1..80: mol_type = other DNA
tggccctgtgtttgaacttcatacacataaaattatgatgcattgactcttttgtgcctagttgcttccactcaacatta

SEQ ID NO: 11564 - DNA, 80 bp, synthetic construct
  source 1..80: mol_type = other DNA
agtttctgtctccagtgatacacagaaaggaaggatgaggaaggggctttactggcccaaccagaaacggaaactaagaa

SEQ ID NO: 11565 - DNA, 80 bp, synthetic construct
  source 1..80: mol_type = other DNA
gaaacacagagagccagggaaagagagagatgccaggtgtataatgtccaagagttactcaaagaggctggatgtgatga

SEQ ID NO: 11566 - DNA, 80 bp, synthetic construct
  source 1..80: mol_type = other DNA
tctcttatcaaaatttctcaagagactctgggatgtaaatgcagaggctgcatggggaggtagagacccaggagctatag

SEQ ID NO: 11567 - DNA, 80 bp, synthetic construct
  source 1..80: mol_type = other DNA
ctgtgcccacccagggctttttaatttatataagcaattgattgaacacctactctgcccagcccctatccctgggattt

SEQ ID NO: 11568 - DNA, 80 bp, synthetic construct
  source 1..80: mol_type = other DNA
gagagagagaacgaataaggctttgggcttcatgtctattctgctcctggatgtcatttctgttttattttttttagacg

SEQ ID NO: 11569 - DNA, 80 bp, synthetic construct
  source 1..80: mol_type = other DNA
atgtctccttatttattaacctggaaatatgcctattacatattaaatttaagaatatcaagctgcagaacagtatgcat

SEQ ID NO: 11570 - DNA, 80 bp, synthetic construct
  source 1..80: mol_type = other DNA
ccaagaaaaagacagaaggatgagggaggaagatgcagaaagaggtaaatgtgagatagatcaaaggagatatagagtca

SEQ ID NO: 11571 - DNA, 80 bp, synthetic construct
  source 1..80: mol_type = other DNA
caacgcacacagtgaattcagccaccagaacctcaacctcaacacgctctcgctcttctttgctggcactgagaccacca

SEQ ID NO: 11572 - DNA, 80 bp, synthetic construct
  source 1..80: mol_type = other DNA
cactcttctgagtcttcactgtgtatcattcctctctctgtgtccatgtgtacacattttgtagcactcactcatgagtg

SEQ ID NO: 11573 - DNA, 80 bp, synthetic construct
  source 1..80: mol_type = other DNA
tgggcatgtgggaagaggatctgtaatattcattagatttcaagcagtgagaattcttgttgcttcctccctcctcccct

SEQ ID NO: 11574 - DNA, 80 bp, synthetic construct
  source 1..80: mol_type = other DNA
tggatgccaatggggcactgaaaaagactgaagcttttatccccttctccttaggtaagctggacccacaatttctttcc

SEQ ID NO: 11575 - DNA, 80 bp, synthetic construct
  source 1..80: mol_type = other DNA
actggctgaagcttggctgccctgattgtccaaggttacttgttacaagaatatactctcaagtttgtttacatgttgag

SEQ ID NO: 11576 - DNA, 80 bp, synthetic construct
  source 1..80: mol_type = other DNA
gcctgctaatttgttttaagagaggcagagatgtagggaaataaggacagagacagataagtaacaaagataatgagact

SEQ ID NO: 11577 - DNA, 80 bp, synthetic construct
  source 1..80: mol_type = other DNA
accccagaaacaaacacaaggcagtaaccaaaccttaagcctccttagcacaagccaagtgctattctaagaatttttac

SEQ ID NO: 11578 - DNA, 80 bp, synthetic construct
  source 1..80: mol_type = other DNA
tggtttcagagcagcttcctaaaagtccaccctgaattgtaggttaaaggccagtcttatgcaaatctgttgcagtggac

SEQ ID NO: 11579 - DNA, 80 bp, synthetic construct
  source 1..80: mol_type = other DNA
ttaaagtgtaaaatttagtggcgtgtggttcattcacaaagctgtacaaccaccaccatctagttccaaacattttcttt

SEQ ID NO: 11580 - DNA, 80 bp, synthetic construct
  source 1..80: mol_type = other DNA
ggcccaggttccctgagctgtgggattctgcactggtgctttggattccctgatatgttccttcaaatctgctgagaatt

SEQ ID NO: 11581 - DNA, 80 bp, synthetic construct
  source 1..80: mol_type = other DNA
aatattaattatagtcaccttgctgtccaatagaacacccgagcttattcctcctatctaagtgtaactctgtacctgtt

SEQ ID NO: 11582 - DNA, 80 bp, synthetic construct
  source 1..80: mol_type = other DNA
aggatcatatccaagaaatcattgcctagaccaatgtcatggagtttttctatatggtttctttcagtagtttttagttt

SEQ ID NO: 11583 - DNA, 80 bp, synthetic construct
  source 1..80: mol_type = other DNA
ggaaacagacaatttcacttcatcctttcctacatgaatacatcctttcctatacgaatattcctatatgaatattttct

SEQ ID NO: 11584 - DNA, 80 bp, synthetic construct
  source 1..80: mol_type = other DNA
cagcttgactaagcaggcttcaaatttggaccttctgtttatcagctgtgggacactggcagtgaatttgaaattcttta

SEQ ID NO: 11585 - DNA, 80 bp, synthetic construct
  source 1..80: mol_type = other DNA
attctccctcgtagcttctgttttctgttctgctaggaatccttttcagcaatggaaagagatggaaggagatccggcgt

SEQ ID NO: 11586 - DNA, 80 bp, synthetic construct
  source 1..80: mol_type = other DNA
tattaataactctttatcctaccttccctagttgtccattagctctgtattcagctttctttatattttccttcatcttt

SEQ ID NO: 11587 - DNA, 80 bp, synthetic construct
  source 1..80: mol_type = other DNA
tggggcaacctgatcggttgacctcaccatatctaaatggatacaaaatcctcggtgaattttaaaacaactggatttgg

SEQ ID NO: 11588 - DNA, 80 bp, synthetic construct
  source 1..80: mol_type = other DNA
agcattccctttgaaaactggcacaagacaaggatgccctctctcaccactcccgttcaacatagtgtcggaagttctgg

SEQ ID NO: 11589 - DNA, 80 bp, synthetic construct
  source 1..80: mol_type = other DNA
tagacgtaaaaccataaaaatcctagaagaaaacctaggcaataccatttaggacataggcatgggcaaggacttcatgt

SEQ ID NO: 11590 - DNA, 80 bp, synthetic construct
  source 1..80: mol_type = other DNA
gttgtggggtgggggaaggggggagggatagcattaggagatatatctaatgctaaatgacgagttaatgggtgcagcac

SEQ ID NO: 11591 - DNA, 80 bp, synthetic construct
  source 1..80: mol_type = other DNA
atgtttcagctgaaaagaagcctggcataggagcagttaactaaacagggtcccattatttaattccccatcattaccgc

SEQ ID NO: 11592 - DNA, 80 bp, synthetic construct
  source 1..80: mol_type = other DNA
atcccactttcatcctgggctgtgctccctgcaatgtgatctgctctgttattttccatgatcgatttgattataaagat

SEQ ID NO: 11593 - DNA, 80 bp, synthetic construct
  source 1..80: mol_type = other DNA
cacagcagtctgagatcaaactgcaagatggcaatgaggctgggggaggggggcctgccattactgaggcttgagtaggt

SEQ ID NO: 11594 - DNA, 80 bp, synthetic construct
  source 1..80: mol_type = other DNA
ccgatttgatcaactggaagaaagggtatcagtggtggaagatcaaattaatgaaatgaagtgagaagagaagtttagca

SEQ ID NO: 11595 - DNA, 80 bp, synthetic construct
  source 1..80: mol_type = other DNA
actgtcaacattagacagatcaaggagacagaaggttaacaaggatatccaggaactgaactcagctctgcaccaagcag

SEQ ID NO: 11596 - DNA, 80 bp, synthetic construct
  source 1..80: mol_type = other DNA
agatgcaataaaaaatgataaaggggatatcaccaccaatcccacagaaacacaaactaccatcagagaatactacaaac

SEQ ID NO: 11597 - DNA, 80 bp, synthetic construct
  source 1..80: mol_type = other DNA
aataaaagaggacacaaacaaatggaggaacatttcttgctcatgggtaggaagaatcaatatcatgaagacggccatac

SEQ ID NO: 11598 - DNA, 80 bp, synthetic construct
  source 1..80: mol_type = other DNA
acaccaattagaatggtgatcattaaaaagtcaggaaacaacaggtgctggagaggatatggagaaataggtacagtttt

SEQ ID NO: 11599 - DNA, 80 bp, synthetic construct
  source 1..80: mol_type = other DNA
cacctctaccacacagtctcagagtgtacacagttgttcccagtttcccatgattgggaaggactcaaacactatgatgg

SEQ ID NO: 11600 - DNA, 80 bp, synthetic construct
  source 1..80: mol_type = other DNA
ctggttattctagttagcaattcctctttttatcaaggttcttagttcccttgcattgagttagaacatactccttgagc

SEQ ID NO: 11601 - DNA, 80 bp, synthetic construct
  source 1..80: mol_type = other DNA
tccaggggagtgaatggttctgtctcactggaattcaggtgccactggggtatgaaaaaaagacttttgtagctagcttg

SEQ ID NO: 11602 - DNA, 80 bp, synthetic construct
  source 1..80: mol_type = other DNA
gcactccttgtcatagccttcacttactgcttaagttgagcctggatatcagccagaggtgaaagttcaggatcttctca

SEQ ID NO: 11603 - DNA, 80 bp, synthetic construct
  source 1..80: mol_type = other DNA
cccacaaagcttttctactgtttttaagttgccattttttttattcagttctcccttgtttgctataaacctttgactga

SEQ ID NO: 11604 - DNA, 80 bp, synthetic construct
  source 1..80: mol_type = other DNA
attacagttttggctgtgctgagctagcatgtcctgaactctgtctaaaggataattgtgtgattatctcaactactcac

SEQ ID NO: 11605 - DNA, 80 bp, synthetic construct
  source 1..80: mol_type = other DNA
ataagatagaaaatgcaaaatatagcatcataaattgaaggtggacatggtcatatcacacagcatatgggagagtgagg

SEQ ID NO: 11606 - DNA, 80 bp, synthetic construct
  source 1..80: mol_type = other DNA
acagagtcaaagatgctgatgaaggtgacttccatgaaattgcccatggaatgttagcaggactgctcgaataatgtgtt

SEQ ID NO: 11607 - DNA, 80 bp, synthetic construct
  source 1..80: mol_type = other DNA
ctgcagaattgctggattatacagcaactgtatgcttaatctttggagaaaccgtggctggatcaaagacctaaatgtaa

SEQ ID NO: 11608 - DNA, 80 bp, synthetic construct
  source 1..80: mol_type = other DNA
agactattcattccccattgagtgatcgtggtacatttgttgaaattcagttgactacaaacacgaggatttatttttag

SEQ ID NO: 11609 - DNA, 80 bp, synthetic construct
  source 1..80: mol_type = other DNA
acatctgttgagaggactaggtttgtcttactgtggttgattacataatattaggcatgccacaggtcacatggagatta

SEQ ID NO: 11610 - DNA, 80 bp, synthetic construct
  source 1..80: mol_type = other DNA
agataattaaaaatttgtttttatagagatagggtctcactgtgtttgcccaggctggagtggacctcctgaactcaagt

SEQ ID NO: 11611 - DNA, 80 bp, synthetic construct
  source 1..80: mol_type = other DNA
ttttccataatggttgcactaacttacattcccatcaacagtacacaagtgttcccctttttccacatcttcaccaacac

SEQ ID NO: 11612 - DNA, 80 bp, synthetic construct
  source 1..80: mol_type = other DNA
tgtccctacaagggatacgaactcatccttttttatggctgcatatattccatggtgtatatgtgccacattttcttaat

SEQ ID NO: 11613 - DNA, 80 bp, synthetic construct
  source 1..80: mol_type = other DNA
aagtagttttttccaattctgtgaagaaagtcattggtagcttgatggggatggcattgaatctataaattaccttggga

SEQ ID NO: 11614 - DNA, 80 bp, synthetic construct
  source 1..80: mol_type = other DNA
ctgttgtgtctctgtcaggctttggtattacgatgatgctggcctcatcaaatgcattagggaggattccctctttttct

SEQ ID NO: 11615 - DNA, 80 bp, synthetic construct
  source 1..80: mol_type = other DNA
tcagttttggaatacgtgcgatatggtgctgagaagaatgtaaattctgttgatttggggtggagagttctgtagatgtc

SEQ ID NO: 11616 - DNA, 80 bp, synthetic construct
  source 1..80: mol_type = other DNA
gtcttctagtagtttacagtatctggtgttatgtttaagtctttaatccatgttgagttgcttgagtatatggtgtgaga

SEQ ID NO: 11617 - DNA, 80 bp, synthetic construct
  source 1..80: mol_type = other DNA
gggaaaatccttcaactttccactattgaatatgaggttagccatgcacttgtcatatatggacttgtgttgaggctagt

SEQ ID NO: 11618 - DNA, 80 bp, synthetic construct
  source 1..80: mol_type = other DNA
actgtagctctgaagcatcctagaactaggtgcctgccatttttgatccccacgcttacaacatgaaccttcatcttgat

SEQ ID NO: 11619 - DNA, 80 bp, synthetic construct
  source 1..80: mol_type = other DNA
agtaggaatgggaaatgaactattttacattctctgccacaccgtgcaattgttgtagttttaatactgcactctgtaca

SEQ ID NO: 11620 - DNA, 80 bp, synthetic construct
  source 1..80: mol_type = other DNA
agaccactttgttgcagtttcttttttgaaatgagtagaaattttatttcactaaaagccatgtctacaaaattccattt

SEQ ID NO: 11621 - DNA, 80 bp, synthetic construct
  source 1..80: mol_type = other DNA
agtgtatagtggatattctagaaatgtcatgagatagcctgagaaaatctgtatagtctgggaagtattttaaacactta

SEQ ID NO: 11622 - DNA, 80 bp, synthetic construct
  source 1..80: mol_type = other DNA
tccacttgaattctaaggcctttagcgcctttttctatcttgttcctaaaatacagcagccaggtgtaaactccagagga

SEQ ID NO: 11623 - DNA, 80 bp, synthetic construct
  source 1..80: mol_type = other DNA
tgtttgtgggtgtgtgtctatttgttatggggtgatgatggagatataagtcctcatctttcttaccatgaggttttaga

SEQ ID NO: 11624 - DNA, 80 bp, synthetic construct
  source 1..80: mol_type = other DNA
ccaaggtaagcttgtttctcctacactacatctccatgctcttcaagtccccaaattcatagtatagtcccaatcctcta

SEQ ID NO: 11625 - DNA, 80 bp, synthetic construct
  source 1..80: mol_type = other DNA
tttccaggacagcgttgaataaatcatgatggtgggcatccttgtttcatatatgatgttcaggatgggtggagatttaa

SEQ ID NO: 11626 - DNA, 80 bp, synthetic construct
  source 1..80: mol_type = other DNA
ttgactgtaacctctctgagttcccccatgcctgcaagcctgagtaatttttgtctcaacatcttttccagtgccttcta

SEQ ID NO: 11627 - DNA, 80 bp, synthetic construct
  source 1..80: mol_type = other DNA
atatcatgtattcaattatatggtatctccccactctccacattactgggagtgttagaaaatctgtagcaactattatg

SEQ ID NO: 11628 - DNA, 80 bp, synthetic construct
  source 1..80: mol_type = other DNA
atatacgtgccattgcatcatatgtgcggtccacattttgtaagcctgtatctgctaggtctctccattgttggggttct

SEQ ID NO: 11629 - DNA, 80 bp, synthetic construct
  source 1..80: mol_type = other DNA
gggtaatcttcctaacagctccaacaggcaaggaaatatgctgtggcaaaaagcattaagtagttctgatttttaaaaaa

SEQ ID NO: 11630 - DNA, 80 bp, synthetic construct
  source 1..80: mol_type = other DNA
actgatcattaattttctattttagctatttttataagtacttgttaatcagcacagttaacttggggctaagtcatata

SEQ ID NO: 11631 - DNA, 80 bp, synthetic construct
  source 1..80: mol_type = other DNA
ctgaaagaaatcatagatgacaaaaacaaatggaaaagcattccattctcatggattggaagaatcaatactgttaaaat

SEQ ID NO: 11632 - DNA, 80 bp, synthetic construct
  source 1..80: mol_type = other DNA
catatgaaaaaatgtttcacatcactaaacatcagagaaatgcaaatcaaaaccaaaatgggataccatctcacatcagt

SEQ ID NO: 11633 - DNA, 80 bp, synthetic construct
  source 1..80: mol_type = other DNA
cttaaagtcatactgcttcttactaggtctgtctgggtgggaatgtaacttctttggacctcaattttcttatctattga

SEQ ID NO: 11634 - DNA, 80 bp, synthetic construct
  source 1..80: mol_type = other DNA
gcttttgatccctgctttggatctggcactgtatacactgagatgtcaagaactaaggccttcttttaaggatttcacgt

SEQ ID NO: 11635 - DNA, 80 bp, synthetic construct
  source 1..80: mol_type = other DNA
atcttccctgtgaatgcatttctagaaaaagactgatggaaacttgtagtgtcaaaagagcagttataacgtgggaacac

SEQ ID NO: 11636 - DNA, 80 bp, synthetic construct
  source 1..80: mol_type = other DNA
aaagtaagaaatgaaagaaaatagaatgtgaagaggctgtgctggccctcatagtgttaagcacaaaaagggagaaaggt

SEQ ID NO: 11637 - DNA, 80 bp, synthetic construct
  source 1..80: mol_type = other DNA
tgaagaaataatttatgcctgttgtaaaggaagcagctgtgggtttaggaccagcaaaagcagataagcggtagataaga

SEQ ID NO: 11638 - DNA, 80 bp, synthetic construct
  source 1..80: mol_type = other DNA
gaagccgcagaccttcgcaatgagtgttacagctcttaaaggtggcatgtctggagttgttcattcctcctggtgggttt

SEQ ID NO: 11639 - DNA, 80 bp, synthetic construct
  source 1..80: mol_type = other DNA
catttcctgtaaacactgggtggcatctcatactattcctgattggttagtgtaaaaattatactcttcccctaagaagg

SEQ ID NO: 11640 - DNA, 80 bp, synthetic construct
  source 1..80: mol_type = other DNA
tggtaggttaatttggtaaagatccagttttttgtgggaatgggggtggcaacataagcagaggttgatagatacaaagc

SEQ ID NO: 11641 - DNA, 80 bp, synthetic construct
  source 1..80: mol_type = other DNA
aaccttaacagcagtggggttagagaggattaccgagtatggtccttcccacaaagaggccatagatagggaggtagagg

SEQ ID NO: 11642 - DNA, 80 bp, synthetic construct
  source 1..80: mol_type = other DNA
gtttttgcactgagtgcaataactccataattcccttgtggtatttaatgggggtttctccagaggttaggaacttcctt

SEQ ID NO: 11643 - DNA, 80 bp, synthetic construct
  source 1..80: mol_type = other DNA
aaagtcggtgattccaaggaatgcccacaattgttttaatgtcttagggtgaggataagccagtataggctgtattcatt

SEQ ID NO: 11644 - DNA, 80 bp, synthetic construct
  source 1..80: mol_type = other DNA
ttgcctttgataaggaaaagtggtggggtcttttagcctgatttggactgggtgggcattttttgctcttccaaattgtc

SEQ ID NO: 11645 - DNA, 80 bp, synthetic construct
  source 1..80: mol_type = other DNA
ttaaggcctcctgtagccactcgaggaaagcagaaggattttcttcctttccctgagttatggtggacatcattgaataa

SEQ ID NO: 11646 - DNA, 80 bp, synthetic construct
  source 1..80: mol_type = other DNA
atgcctgattgtctctcatcggaaagacaaaactctccatggttttggtttgtttgtttctacctgcccaggaacctgca

SEQ ID NO: 11647 - DNA, 80 bp, synthetic construct
  source 1..80: mol_type = other DNA
accccggagctgaatggctttcctctctgtcaacccttggcgcagcccagaaatacaggaaaagtggaagctggttccag

SEQ ID NO: 11648 - DNA, 80 bp, synthetic construct
  source 1..80: mol_type = other DNA
agctacagacctttgcagtgagtgttacagctcataaaggtagtgaagacccaaagagtgagcagcagcaagatttattg

SEQ ID NO: 11649 - DNA, 80 bp, synthetic construct
  source 1..80: mol_type = other DNA
gacctgctgaatatgttggtgtgagggttaattgtaatctgtgtagcaattgtctgaccattgccttgaacatcataggc

SEQ ID NO: 11650 - DNA, 80 bp, synthetic construct
  source 1..80: mol_type = other DNA
actactatcttctctactgacattcttggaaacatttcaggggtggccatatctttcattatgagtcctggttgttagct

SEQ ID NO: 11651 - DNA, 80 bp, synthetic construct
  source 1..80: mol_type = other DNA
acacacacactcaacagacttccagctgttcaatgccttgctattcattcagagtacttttgactaaagtcactatttag

SEQ ID NO: 11652 - DNA, 80 bp, synthetic construct
  source 1..80: mol_type = other DNA
cctcagaaataatgccacacatctacaaccatctgatcttcaacaaacctgacaaaaacaagcaatgggaaaaagattcc

SEQ ID NO: 11653 - DNA, 80 bp, synthetic construct
  source 1..80: mol_type = other DNA
ttcaaccactgtggaagacagtgtggcgattcctcaatgctagaaccagaaattccatttgatctagcaatcccattact

SEQ ID NO: 11654 - DNA, 80 bp, synthetic construct
  source 1..80: mol_type = other DNA
agacttggtctaatcaatgtcaaatttcaaataagttaaatttgaaggatgattagagatgatgggcatttaattcctag

SEQ ID NO: 11655 - DNA, 80 bp, synthetic construct
  source 1..80: mol_type = other DNA
catcctgggctgtgctccctgcaatgtgatctgctccattattttccagaaacgtttcgattataaagatcagcaatttc

SEQ ID NO: 11656 - DNA, 80 bp, synthetic construct
  source 1..80: mol_type = other DNA
atagaaatcaatatagcagggactatctttgtagtatcaatcaggttgtgcaaactcttttaacctatgctatcatctcc

SEQ ID NO: 11657 - DNA, 80 bp, synthetic construct
  source 1..80: mol_type = other DNA
aaattgtttagataaatataatctatctgaacaataaggatgtcaggataggaaaagctctgttctgcagcttccagtga

SEQ ID NO: 11658 - DNA, 80 bp, synthetic construct
  source 1..80: mol_type = other DNA
aacaaaaatctacccaaggggaaacaaaatgcaggttttaggtgaaatggaagcaattatgaacaagttagaaaatataa

SEQ ID NO: 11659 - DNA, 80 bp, synthetic construct
  source 1..80: mol_type = other DNA
tctggtttcaaaatgtttttatcacgccacaaaaacgtattatattcgctaaataatcactccattcccccactccatca

SEQ ID NO: 11660 - DNA, 80 bp, synthetic construct
  source 1..80: mol_type = other DNA
tacataatatgaaaatatttcctcccattctgttggttgtcatttcacattcctaattatatttttgatgcacaaagttt

SEQ ID NO: 11661 - DNA, 80 bp, synthetic construct
  source 1..80: mol_type = other DNA
aaagcaaccctaaatcattgtctggcaaagagcatcgcgtaaaatcgagctgcagtcatagacaagcaagctggaagcct

SEQ ID NO: 11662 - DNA, 80 bp, synthetic construct
  source 1..80: mol_type = other DNA
ataccacattttctttatgccacacaccattggttgcttctgtgtctttgctattgtgaatagtgcagagatggacatat

SEQ ID NO: 11663 - DNA, 80 bp, synthetic construct
  source 1..80: mol_type = other DNA
gctacttgggctcttctttggtttcaaacgaattttagaatagtttttccttattctgtgaaaaatgacattggtagttt

SEQ ID NO: 11664 - DNA, 80 bp, synthetic construct
  source 1..80: mol_type = other DNA
tgttggttccaagtctttgctgttgtgagcagtgctgcaataaatatacatgtgcatgtgtctttatagtagaagggctt

SEQ ID NO: 11665 - DNA, 80 bp, synthetic construct
  source 1..80: mol_type = other DNA
gtaccatgctgtttttattacttcggccttgtaatatagtttgaagtcaggtagcatgatgcctccagctttgttctttt

SEQ ID NO: 11666 - DNA, 80 bp, synthetic construct
  source 1..80: mol_type = other DNA
ccccgggatgaagccaacttgatcgtggtggatgaagccaacttgatcgtggtggataagcttgttgatgtgctgctgga

SEQ ID NO: 11667 - DNA, 80 bp, synthetic construct
  source 1..80: mol_type = other DNA
ctgctagcttttgaatatatttgctcttgcttctctagttcttttaattgtgatgttagggtgtcaaatttagacctttc

SEQ ID NO: 11668 - DNA, 80 bp, synthetic construct
  source 1..80: mol_type = other DNA
taaggttaatattctgtgaatttgatcctgtcattatgatgttagctggttattttgcttgttagttggctcagtttctt

SEQ ID NO: 11669 - DNA, 80 bp, synthetic construct
  source 1..80: mol_type = other DNA
ttagttttccttctaatagtcaggactctcaggtgcaggcctgttggagtttgctggaggtccactccagaccctgtttg

SEQ ID NO: 11670 - DNA, 80 bp, synthetic construct
  source 1..80: mol_type = other DNA
gggaattcccccaccccttgtgcctcccaggtgaggcgatgccctgccctgcttcagctcacactccatgggctgtaccc

SEQ ID NO: 11671 - DNA, 80 bp, synthetic construct
  source 1..80: mol_type = other DNA
tatagcagcatggtttataatcttttgggtatttacccagtaatgggatggctgggtcaaatggtatttccagttctata

SEQ ID NO: 11672 - DNA, 80 bp, synthetic construct
  source 1..80: mol_type = other DNA
tcagctttctccatatggctagccagttttcccagcactatttgttaaacagggaatcctttcccatttcttgtttttgt

SEQ ID NO: 11673 - DNA, 80 bp, synthetic construct
  source 1..80: mol_type = other DNA
tttttgaagatttttgcatcgatgttcttcaggcatattggcctgaaattttttgtgtgtgtgtctctcctgggctttgg

SEQ ID NO: 11674 - DNA, 80 bp, synthetic construct
  source 1..80: mol_type = other DNA
tgttataatttctattcttttacatttgctgaggagtgctttacttccaattatgtgatcaattttagaataagcacgat

SEQ ID NO: 11675 - DNA, 80 bp, synthetic construct
  source 1..80: mol_type = other DNA
aatattggccctcactctcttttggcttgtatggtttctgctgagagaggcactgttagtctgatgggtttccctttgtg

SEQ ID NO: 11676 - DNA, 80 bp, synthetic construct
  source 1..80: mol_type = other DNA
gagtttgttggaggttcactccagacctttttgcctgggtataaccagcggaggctgcagaacagcaaatattgcagaac

SEQ ID NO: 11677 - DNA, 80 bp, synthetic construct
  source 1..80: mol_type = other DNA
tcagctcaccctccatgggctgcacccattgtccaaccagtaccaatgagatgaacaaggtaccgcagttggaagtgcag

SEQ ID NO: 11678 - DNA, 80 bp, synthetic construct
  source 1..80: mol_type = other DNA
gagagcgaaagaacaaagctttgacatcatggaaggagaccttagagggttgcttctgctggctgaggtggccagctttt

SEQ ID NO: 11679 - DNA, 80 bp, synthetic construct
  source 1..80: mol_type = other DNA
tcttctcgcttgtcatgtttctgctgagaaatccactgttactctaatgggttttcctttgtgggtaacccaacctctct

SEQ ID NO: 11680 - DNA, 80 bp, synthetic construct
  source 1..80: mol_type = other DNA
gttggtggtggcctaaacttctaatccaggtgagtggatgctttgaatgcctcatgatctgtctgagtgtgaaggagaga

SEQ ID NO: 11681 - DNA, 80 bp, synthetic construct
  source 1..80: mol_type = other DNA
ttacttttatcagctgaatgccatcatgaggctgtttgtccacattttcctccccaggtatcttagatgtctttcacgat

SEQ ID NO: 11682 - DNA, 80 bp, synthetic construct
  source 1..80: mol_type = other DNA
aagtgtgtccatagtaacacaagatgggccttataaagttggcctatcacattctttgaggtctttgtcagtcttatgtg

SEQ ID NO: 11683 - DNA, 80 bp, synthetic construct
  source 1..80: mol_type = other DNA
aagcaggatgattagcatatctataacctcaagtatttttcattcccttgtgcttgaaacattaaaaatctgctcttcta

SEQ ID NO: 11684 - DNA, 80 bp, synthetic construct
  source 1..80: mol_type = other DNA
ctgtgcttttgaagttttatccattgccaagaccaatactctgaagcatttctcctgtttttcttctagtagtttcatag

SEQ ID NO: 11685 - DNA, 80 bp, synthetic construct
  source 1..80: mol_type = other DNA
gacttattcattaattataactatttttgtaccaattagaatttccactccccttcacccactcactgtccctcccagcc

SEQ ID NO: 11686 - DNA, 80 bp, synthetic construct
  source 1..80: mol_type = other DNA
taaatctacaatcatgtaatctgcaaacagacaaaatttgattttctctcttcctgtttgaataccttttattttatttc

SEQ ID NO: 11687 - DNA, 80 bp, synthetic construct
  source 1..80: mol_type = other DNA
cttggtgagctattccttgctgcctcaatttcagaacttgttattggtctcttcacggattcgacttcttcctggtttgg

SEQ ID NO: 11688 - DNA, 80 bp, synthetic construct
  source 1..80: mol_type = other DNA
ggttaatattgtgtgtggatttaatcctgccattatgatgctagctgattattttgccttttagttgatgcagttttttt

SEQ ID NO: 11689 - DNA, 80 bp, synthetic construct
  source 1..80: mol_type = other DNA
caccttctgaagcctacttctgtcaattcatcaaattctttctctgtccagttttgtccccttgctggcaaggagttgtg

SEQ ID NO: 11690 - DNA, 80 bp, synthetic construct
  source 1..80: mol_type = other DNA
ttcaccaatcccttgggcttccaaggtgagacaacattcctccctgcttcagtttagcctccatgcactgcacctactgt

SEQ ID NO: 11691 - DNA, 80 bp, synthetic construct
  source 1..80: mol_type = other DNA
gaaaatgccgtggcctgcctctgatgtagaaggggtgctctttagatttgagcccagcaagtagaatatggctactatca

SEQ ID NO: 11692 - DNA, 80 bp, synthetic construct
  source 1..80: mol_type = other DNA
caagcatggaataagggggtaggaaataaagtttgggccagttggtctacagcatccactacaccatacagtattttttc

SEQ ID NO: 11693 - DNA, 80 bp, synthetic construct
  source 1..80: mol_type = other DNA
atttctaattctagatccctgaggaatcgccacactgacttccacaatggttgaactagtttacagtcccaccaacagtg

SEQ ID NO: 11694 - DNA, 80 bp, synthetic construct
  source 1..80: mol_type = other DNA
tgtgatgcctccagctttgttcttttggcttaggattgacttgatgatgcgggctcttttttggttccatatgaacttta

SEQ ID NO: 11695 - DNA, 80 bp, synthetic construct
  source 1..80: mol_type = other DNA
gaatcaaatagacacaataaaaaatgataaaggggatatcaccactgatcccacagaaatacaaactaccatcagagaat

SEQ ID NO: 11696 - DNA, 80 bp, synthetic construct
  source 1..80: mol_type = other DNA
ttgggaaggtgctgctagtgttctcctttctgtttctcttagagaagttccattatttaaatttctgtgcccgcagctgt

SEQ ID NO: 11697 - DNA, 80 bp, synthetic construct
  source 1..80: mol_type = other DNA
tgttccatttaggcagaagatgtacctgagacagtttctgtgaaattggtgttggataaaataagaatatttttgggggg

SEQ ID NO: 11698 - DNA, 80 bp, synthetic construct
  source 1..80: mol_type = other DNA
gcacttaagttgattccatttttttgctattgtgaatagcactacagtgaacatattggtgtgtgtgtctttttgataga

SEQ ID NO: 11699 - DNA, 80 bp, synthetic construct
  source 1..80: mol_type = other DNA
cctcaatattagtatttggaagtgccaagggtcaaatatggtagagaatgaggttgaaaaacgaggctctctctgcctag

SEQ ID NO: 11700 - DNA, 80 bp, synthetic construct
  source 1..80: mol_type = other DNA
aaagagatgtgacagattttatgagagtttccaataactaaaaaggagtttcaaacatctgctggaacatttgtaaataa

SEQ ID NO: 11701 - DNA, 80 bp, synthetic construct
  source 1..80: mol_type = other DNA
gggtcaaatggtatttccagttctagatccctgaggaatcgccacactgacttccacaatggttgaactagtttacagtc

SEQ ID NO: 11702 - DNA, 80 bp, synthetic construct
  source 1..80: mol_type = other DNA
attggtagcttgatggggatggcattgaatctgtaaattaccttgggcagtatggccattttcacaatattgattcttcc

SEQ ID NO: 11703 - DNA, 80 bp, synthetic construct
  source 1..80: mol_type = other DNA
atgatgctggcctcataaaatgagttagggaggattccctctttttctattgattggaatagttttagaaggaatggtac

SEQ ID NO: 11704 - DNA, 80 bp, synthetic construct
  source 1..80: mol_type = other DNA
tatatatttagcatagttagctcttcttgttgaattgatccctttaccattatgtaatggccttctttgtctcttttgat

SEQ ID NO: 11705 - DNA, 80 bp, synthetic construct
  source 1..80: mol_type = other DNA
cttttcacatagtcccatatttcttggaggctttgctcatttctttttattctttttactctaaacttcccttctcgcta

SEQ ID NO: 11706 - DNA, 80 bp, synthetic construct
  source 1..80: mol_type = other DNA
agactgctgtgctagcaattagtgagactccgtgggcgtaggaccctccgagccaggtgcgggatataatctcgtggtgc

SEQ ID NO: 11707 - DNA, 80 bp, synthetic construct
  source 1..80: mol_type = other DNA
gctctccatagtggtcatactaatttacattcccaccaacgttgtacaagggtccacttatctccacatcctcactagca

SEQ ID NO: 11708 - DNA, 80 bp, synthetic construct
  source 1..80: mol_type = other DNA
caccccatgtttcaattatccccacatggccttgtacttggggtgtggggattattacaattcaagatgagatttggggt

SEQ ID NO: 11709 - DNA, 80 bp, synthetic construct
  source 1..80: mol_type = other DNA
ctttgtaggaacatggatgaaattggaaatcatcattctcaagtgtttttaatgaatttttatcatgaagggatgttgaa

SEQ ID NO: 11710 - DNA, 80 bp, synthetic construct
  source 1..80: mol_type = other DNA
taggcttagggattcttagtcagctaggaaatccagctagtcctgtctctaagtcccccatctcaacatgaaaacccaag

SEQ ID NO: 11711 - DNA, 80 bp, synthetic construct
  source 1..80: mol_type = other DNA
cttggcggttcccttctattttcctttcctttcctttctgatgaccccagcagtgtaagactgccacctctttaggtttc

SEQ ID NO: 11712 - DNA, 80 bp, synthetic construct
  source 1..80: mol_type = other DNA
ggaaagccacttctgtttcaggtgtccatcttactaaatggatattgactttctgagtttccttaattagtgtatataat

SEQ ID NO: 11713 - DNA, 80 bp, synthetic construct
  source 1..80: mol_type = other DNA
tagtgacagatctggaggacagttgtccgagacaggagagtaagactgagaaggttgcaccagtgtccaggagacagtta

SEQ ID NO: 11714 - DNA, 80 bp, synthetic construct
  source 1..80: mol_type = other DNA
ttggttcattatttacccctttatctatctctttttggacggtttgtgttgaagggggatccttgttagctggggaagga

SEQ ID NO: 11715 - DNA, 80 bp, synthetic construct
  source 1..80: mol_type = other DNA
ttgcctttgcactcagaggtgagttcctttccaggctgtataaccacccatggacctctgctaatcggattacttatgct

SEQ ID NO: 11716 - DNA, 80 bp, synthetic construct
  source 1..80: mol_type = other DNA
taactatttctatctttttctttctttttctctttgactccctctttgtctctctctctgtctctctctctcttagccat

SEQ ID NO: 11717 - DNA, 80 bp, synthetic construct
  source 1..80: mol_type = other DNA
ggaagagaaccgtggaacccggcaactagtgttcaggttgattaggacaaacccaggcacttagccatgcaggaacaatg

SEQ ID NO: 11718 - DNA, 80 bp, synthetic construct
  source 1..80: mol_type = other DNA
tgggtgctccatttttggttgcatatatacttaaaattgttccatcctcttgccaagctgactgctttatcatcaattgt

SEQ ID NO: 11719 - DNA, 80 bp, synthetic construct
  source 1..80: mol_type = other DNA
agtgtctcacagtgtgtgtttttcagatttattctttcttcaagattgttctggctactcttaagtggttatatttccag

SEQ ID NO: 11720 - DNA, 80 bp, synthetic construct
  source 1..80: mol_type = other DNA
aatgtgagactgtttttattgccgttccctctccccacttttcttcttgtgatcacttagttgtatctttgaaatgcctg

SEQ ID NO: 11721 - DNA, 80 bp, synthetic construct
  source 1..80: mol_type = other DNA
ttcttcatggaacagcctatagaaaagtgcagcactgcgtggccaattctaccctctttacaaatcaggcaaatgtgttc

SEQ ID NO: 11722 - DNA, 80 bp, synthetic construct
  source 1..80: mol_type = other DNA
ttcaattcactctccagtcaagaaacaggcacataattcgggtatgttgtcatttttatctcctgtaatcaagaacagtt

SEQ ID NO: 11723 - DNA, 80 bp, synthetic construct
  source 1..80: mol_type = other DNA
ctagaagacgtcgtttgaagctcaatcatatgtttattcacaaatgccctgtgaatagacactctggccatttcccatgt

SEQ ID NO: 11724 - DNA, 80 bp, synthetic construct
  source 1..80: mol_type = other DNA
tagattctggatattagcccttcgtcagatgagtagattgcaaaaattttctcccattctgtaggttgcctattcactct

SEQ ID NO: 11725 - DNA, 80 bp, synthetic construct
  source 1..80: mol_type = other DNA
tcacaatattgattcttcctacctatgagcatggaatgttcttccatttgtttgtatcctcttttatttcattgagcagt

SEQ ID NO: 11726 - DNA, 80 bp, synthetic construct
  source 1..80: mol_type = other DNA
ttagcaagattattgtcactggccttaagctcatgcctcttattacttcgtctatctgtctggaaatggtactgctcttc

SEQ ID NO: 11727 - DNA, 80 bp, synthetic construct
  source 1..80: mol_type = other DNA
gtgatatagaaaagaacaggctgttgtgggttgggaggtagatggaaaagctgtctgcttcttgttatcttataacccaa

SEQ ID NO: 11728 - DNA, 80 bp, synthetic construct
  source 1..80: mol_type = other DNA
aataaataaataagaaataagaaattatgattctaggtgacacatgctgtctgtttcttctgccatatcaaaatacccaa

SEQ ID NO: 11729 - DNA, 80 bp, synthetic construct
  source 1..80: mol_type = other DNA
tatctactcatccctcctatgattcaccgaacagttcttgcatattctgtctgtgccagttatagagacagtgtttgtca

SEQ ID NO: 11730 - DNA, 80 bp, synthetic construct
  source 1..80: mol_type = other DNA
ctagggaaatattcagaggatcaggtattgggaggaatggatattaaatgttccacattggtgttccttttttttttttt

SEQ ID NO: 11731 - DNA, 80 bp, synthetic construct
  source 1..80: mol_type = other DNA
cagcttctcctatattgttttagttttaacattagtgggatgataattttatgctattgtcctaatataattagcctcat

SEQ ID NO: 11732 - DNA, 80 bp, synthetic construct
  source 1..80: mol_type = other DNA
tagaggtgttgacaaacacccatgggtgagataaataaaaaagttgtctagtctgtttcctcctggagactgtagtggat

SEQ ID NO: 11733 - DNA, 80 bp, synthetic construct
  source 1..80: mol_type = other DNA
tccaagcctgatattccatgacttttccttccacttttcacataatctgttctcagctctggtcatacactctcttcatc

SEQ ID NO: 11734 - DNA, 80 bp, synthetic construct
  source 1..80: mol_type = other DNA
tctgactaaattacaatgacctgtttactcttcttccctaactcaagagtgagcctctgttctcattgaaagttgtgccc

SEQ ID NO: 11735 - DNA, 80 bp, synthetic construct
  source 1..80: mol_type = other DNA
aacagataatctgatttataaagaagtccagaagtgaggagaagtagtggacatcacgtagcgccataacgttgatctat

SEQ ID NO: 11736 - DNA, 80 bp, synthetic construct
  source 1..80: mol_type = other DNA
aactttccttgattacaggaggtgaaaaggtcaacataaatgaactatatgcttgttccttgcctgtatagtaaactgca

SEQ ID NO: 11737 - DNA, 80 bp, synthetic construct
  source 1..80: mol_type = other DNA
gcagccagcattatcttgttatcaaagctctgaaaagaaaattttgaggaagaaaaattgcagaccaaaatatcttatga

SEQ ID NO: 11738 - DNA, 80 bp, synthetic construct
  source 1..80: mol_type = other DNA
acaggagtctgatcacttggaatgacatgagccttctgggggctgggattttatgaaaataccaactatctgtttcataa

SEQ ID NO: 11739 - DNA, 80 bp, synthetic construct
  source 1..80: mol_type = other DNA
tgttagagggttggaaccaaaccagcactatggaaatttcagaagtacagaaatatagtgtaagagaaacaagcttacct

SEQ ID NO: 11740 - DNA, 80 bp, synthetic construct
  source 1..80: mol_type = other DNA
tgattttctggtatgagagatgagaattttcatctccatctctattccatatatagacacacgcccacaaagttatatgt

SEQ ID NO: 11741 - DNA, 80 bp, synthetic construct
  source 1..80: mol_type = other DNA
aatgctgagtctttgaatctgaggaatagatctttctcaaaccttttttttttctgtcttcacatctcacagtttcctgg

SEQ ID NO: 11742 - DNA, 80 bp, synthetic construct
  source 1..80: mol_type = other DNA
ctgatgacacagaaatttaaagaatgagccttctctgagagaaacaaggtggaggatactggcaccatcttctcagcatt

SEQ ID NO: 11743 - DNA, 80 bp, synthetic construct
  source 1..80: mol_type = other DNA
tgggcattcacttttagcacatgaactgtagaggacacattcaaaccagaacatgaatcttcttctcttttctcctcatt

SEQ ID NO: 11744 - DNA, 80 bp, synthetic construct
  source 1..80: mol_type = other DNA
gaatgaaatatagtgaaagagaatgagttcacaaagacaagacaggtctaacaaagttgtaatccagataggcaacaggc

SEQ ID NO: 11745 - DNA, 80 bp, synthetic construct
  source 1..80: mol_type = other DNA
gtttagtgtggtaattttctcaaatgccagctgtactagcaatgtattgggtttgtgaacacactcaagaccttccgatt

SEQ ID NO: 11746 - DNA, 80 bp, synthetic construct
  source 1..80: mol_type = other DNA
gagcacagcaattatagagcataaaattagtgcagttctgttaaggcagaaaggaaaacaggcccaaaatcagctgatgc

SEQ ID NO: 11747 - DNA, 80 bp, synthetic construct
  source 1..80: mol_type = other DNA
cacccagtgcagtcacagtggtggtggatacatgagtgcttgtgtcattccatccccagtttcaattgactcagaacaga

SEQ ID NO: 11748 - DNA, 80 bp, synthetic construct
  source 1..80: mol_type = other DNA
aaaataacacagagaagaaattcacaattctatcagataaacataacgaagagactgaaataatttacaagagtcaagca

SEQ ID NO: 11749 - DNA, 80 bp, synthetic construct
  source 1..80: mol_type = other DNA
atcagattgaactcaagagaaagcatcctagtagagaaaagctcaagacccaatgacttcaatgatgaattctagcaaat

SEQ ID NO: 11750 - DNA, 80 bp, synthetic construct
  source 1..80: mol_type = other DNA
aaagtcaggaaacaacagatgctggcgatgatgcagagaaatagaaacacttttacactgttggtgggagtgtaaattac

SEQ ID NO: 11751 - DNA, 80 bp, synthetic construct
  source 1..80: mol_type = other DNA
aaaatcagggggtaaaaaaacccaagtatatctacttttactactgctattcagcatcgttcttaaggtcccagccaaaa

SEQ ID NO: 11752 - DNA, 80 bp, synthetic construct
  source 1..80: mol_type = other DNA
taaagaccagtggaataaaattgaaatccaaacataaacctaatcatctatgcccggttcattttcaacaaatgtaccaa

SEQ ID NO: 11753 - DNA, 80 bp, synthetic construct
  source 1..80: mol_type = other DNA
gaaataccactttgcactgacacaaaaaacagaaaattacaaatattggctataatatggaaaagaggaaccctcaaaca

SEQ ID NO: 11754 - DNA, 80 bp, synthetic construct
  source 1..80: mol_type = other DNA
tgtttctgtggagtgataaaaaagttttgaaagtagagaggaatggtagttgtgatgcagggcaggcgagtcccaatgtg

SEQ ID NO: 11755 - DNA, 80 bp, synthetic construct
  source 1..80: mol_type = other DNA
caatgaaaacaggattcactctcacaggttacctgataaacatcaacctccaactcctttgtgcaaattcattttaggtt

SEQ ID NO: 11756 - DNA, 80 bp, synthetic construct
  source 1..80: mol_type = other DNA
catgtccattttgaagggaaatttttatacatatatacattttttattacactttaagttctagggtatatgtgcacaaa

SEQ ID NO: 11757 - DNA, 80 bp, synthetic construct
  source 1..80: mol_type = other DNA
tttttctcccattctgtaggatgcctattcactctgatggtagtttcttttgctttgcagaagctctttagttttattag

SEQ ID NO: 11758 - DNA, 80 bp, synthetic construct
  source 1..80: mol_type = other DNA
ctgtgggtttgtcataaatagctcttattatttttagatacgtcccatcaatacctaatttattgagtgtttttagactg

SEQ ID NO: 11759 - DNA, 80 bp, synthetic construct
  source 1..80: mol_type = other DNA
ctttatcattttttattgtatctatttgagttttctctcttttcttctttattagtcttcctaatggtctatcaattttg

SEQ ID NO: 11760 - DNA, 80 bp, synthetic construct
  source 1..80: mol_type = other DNA
gctggttattttgctcgttagttgatgcagtttcttccgagccttgatggtctttacaatctgatgtttttgcagtggct

SEQ ID NO: 11761 - DNA, 80 bp, synthetic construct
  source 1..80: mol_type = other DNA
ccccatccagctttgttccgttgctggtgaggagctgcattcctttggaggaggagaggcactctgatttttagaatttt

SEQ ID NO: 11762 - DNA, 80 bp, synthetic construct
  source 1..80: mol_type = other DNA
tttctgtacctaaagattggaggctgaaaattttgaacaggaaatcaaaggtggtaattattttcttcactcatacatca

SEQ ID NO: 11763 - DNA, 80 bp, synthetic construct
  source 1..80: mol_type = other DNA
gagaaataagaactgatgaaaactgtactgagatatacctaagcaagtaaaaccatacatagtgtcattgctggccagag

SEQ ID NO: 11764 - DNA, 80 bp, synthetic construct
  source 1..80: mol_type = other DNA
gatatttctgaattttgtacataaatgtgatggtgattgttatagctgccacttatagatggcctgtgatgtgccacgca

SEQ ID NO: 11765 - DNA, 80 bp, synthetic construct
  source 1..80: mol_type = other DNA
tacaatgaccccaatgtttctgtattcacaaaatgcatcaactcactccgctatttctgacaatgacagacttagaaaga

SEQ ID NO: 11766 - DNA, 80 bp, synthetic construct
  source 1..80: mol_type = other DNA
ctcttcttattaagacagctgtgagcttgcactccaaagtttttataacactccctgctaatttagtgtgtgtctctttg

SEQ ID NO: 11767 - DNA, 80 bp, synthetic construct
  source 1..80: mol_type = other DNA
tgctccttcagtggcttgcaaaaggtaagtaaattcacctgtattttttaaataaagtatatccctagaggtacaatgtt

SEQ ID NO: 11768 - DNA, 80 bp, synthetic construct
  source 1..80: mol_type = other DNA
accctaaagaggcctagaagagccatggcaagatgagggcatttatagccctatcttatccatatggacaggtgcccccc

SEQ ID NO: 11769 - DNA, 80 bp, synthetic construct
  source 1..80: mol_type = other DNA
gctgtgaactcgtttgtagtttgagtttgcaaggcagaataatagggatgaggttagtctgtgggcagttattagggaag

SEQ ID NO: 11770 - DNA, 80 bp, synthetic construct
  source 1..80: mol_type = other DNA
aagagctaacagaggatttggtaggtgtgcaagtgcctgtttcagcatctgtcttggggatggggaggatggaaaacaga

SEQ ID NO: 11771 - DNA, 80 bp, synthetic construct
  source 1..80: mol_type = other DNA
tgccattctggccagtaatgacattctacagtttttattgcttaggcatatcttagtgtagttctcatcagcttttattt

SEQ ID NO: 11772 - DNA, 80 bp, synthetic construct
  source 1..80: mol_type = other DNA
gacaaccagtctgaccaaaatttattaggcaggaatttcctcttcctaataagcctgggagcactatgggagaccaggcc

SEQ ID NO: 11773 - DNA, 80 bp, synthetic construct
  source 1..80: mol_type = other DNA
cagccccaaaactgtttaagctgataagcaatttcagcaagacctcaggatacaaaatcaatgtgcaaaaataacaagca

SEQ ID NO: 11774 - DNA, 80 bp, synthetic construct
  source 1..80: mol_type = other DNA
tatgcagccaacaaacatatggaaaaaagcttatcaacactggtcattagagaatgcaaatcaaaactacaatgagatac

SEQ ID NO: 11775 - DNA, 80 bp, synthetic construct
  source 1..80: mol_type = other DNA
tgattagagatgagggcatttagttcctaaagaagaaaattcattttaaaaaaggtacagaagaaaaaaactccacttat

SEQ ID NO: 11776 - DNA, 80 bp, synthetic construct
  source 1..80: mol_type = other DNA
ttgaatgaaaacatcaagattttgagcagcccctggatccaggtaaggccaagatttttgcttcctgagaaaccacttat

SEQ ID NO: 11777 - DNA, 80 bp, synthetic construct
  source 1..80: mol_type = other DNA
ctataaaaaggaggtctgagtctaggaaatgattatcatctggttagaattgatcctctggtcagaattttctttctcaa

SEQ ID NO: 11778 - DNA, 80 bp, synthetic construct
  source 1..80: mol_type = other DNA
cacagccaaattctaccaggggcacaaagaggagctgacactattccttctgaaactattccaaataatagaaaaagagg

SEQ ID NO: 11779 - DNA, 80 bp, synthetic construct
  source 1..80: mol_type = other DNA
tcaattctatccccatcaagctatcattgcctttcttcacagaactagaaaaatctactttacattttatatggaacgaa

SEQ ID NO: 11780 - DNA, 80 bp, synthetic construct
  source 1..80: mol_type = other DNA
ggtggatggaagagggaaaggaagcctttattgagtgagaacaaaaatgatttgtacagataacagttggaatttagtgt

SEQ ID NO: 11781 - DNA, 80 bp, synthetic construct
  source 1..80: mol_type = other DNA
taaataatcactccattcctccaacccatcatgtaattacctctaatcttctttctgtttctatggatttgcctgttatg

SEQ ID NO: 11782 - DNA, 80 bp, synthetic construct
  source 1..80: mol_type = other DNA
ggtttatctatctttccttttgccactctggtatcaaatttataaatctattgccaaatatgaagtcatgaagatttacc

SEQ ID NO: 11783 - DNA, 80 bp, synthetic construct
  source 1..80: mol_type = other DNA
tcccccttttccgatgtccctctctttcacaagaagctgcttttttctctcctttcttctattaaactttctgctacata

SEQ ID NO: 11784 - DNA, 80 bp, synthetic construct
  source 1..80: mol_type = other DNA
tttatggctgcatagtattccatggtgtatatgtgccacattttcttaatccagtctatcattgttggacatttggcttg

SEQ ID NO: 11785 - DNA, 80 bp, synthetic construct
  source 1..80: mol_type = other DNA
cttgatggggatggtattgaatctataaattaccttgggcagtatggccattttcacgatattgattcttcctacccatg

SEQ ID NO: 11786 - DNA, 80 bp, synthetic construct
  source 1..80: mol_type = other DNA
ctcataaaatgagttagggagtattccctttttctattgattggaatagtttcagaaggaatggtaccagctcctccttg

SEQ ID NO: 11787 - DNA, 80 bp, synthetic construct
  source 1..80: mol_type = other DNA
tctattaggtctgcttggtgcagaactgagttcaattcctggatatccttgttaactttctctctcgttgatctgtctaa

SEQ ID NO: 11788 - DNA, 80 bp, synthetic construct
  source 1..80: mol_type = other DNA
taggcccatatttcttggaggctgtgttcgtttctttttattcttttttctctaaacttctcttctcacttcatttcatt

SEQ ID NO: 11789 - DNA, 80 bp, synthetic construct
  source 1..80: mol_type = other DNA
ctgcggtgggctccacctggttcgagcttcccagccgctttgtttacctactcaagctttggcaatggggggcacccctc

SEQ ID NO: 11790 - DNA, 80 bp, synthetic construct
  source 1..80: mol_type = other DNA
tctatgtctttactattgtgaatagtgcaggaatggacatactagcacgtgtcgttttggtagaacaatttgttttcctc

SEQ ID NO: 11791 - DNA, 80 bp, synthetic construct
  source 1..80: mol_type = other DNA
tttgtgttttgtaccagttacatgctctcttggttactgtagcttacagtatagtttgaagtcaatgtgaagcttcccac

SEQ ID NO: 11792 - DNA, 80 bp, synthetic construct
  source 1..80: mol_type = other DNA
tgtggtagcaggtattgttctttcacttccatatttagaactcccttaatgatctcttataaggctggtctaatggtaac

SEQ ID NO: 11793 - DNA, 80 bp, synthetic construct
  source 1..80: mol_type = other DNA
tatgagcaaaagccagctgtgactaggacaacttgatatagcacagcttgatccttgttttctgggggaacttctctgtt

SEQ ID NO: 11794 - DNA, 80 bp, synthetic construct
  source 1..80: mol_type = other DNA
catctgtagaattcttttcatcttgcaaaacagaaactttatacccatttaataataactcttggccgggcattgtagat

SEQ ID NO: 11795 - DNA, 80 bp, synthetic construct
  source 1..80: mol_type = other DNA
catttccaagggtgaataatattccgttgtatgtataaaccaaatttgcttacccatttttctgttgatgggcacttgga

SEQ ID NO: 11796 - DNA, 80 bp, synthetic construct
  source 1..80: mol_type = other DNA
tttcttttcttctttattagtctggctagcagcctattttgttaatcttttcagaaaattagctcctgtattctttgata

SEQ ID NO: 11797 - DNA, 80 bp, synthetic construct; identical to SEQ ID NO: 11688
  source 1..80: mol_type = other DNA

SEQ ID NO: 11798 - DNA, 80 bp, synthetic construct; identical to SEQ ID NO: 11689
  source 1..80: mol_type = other DNA

SEQ ID NO: 11799 - DNA, 80 bp, synthetic construct
  source 1..80: mol_type = other DNA
gctggtgttacagcaccactggggcataaaaaaacccctccagctatcttggtgtctgcccagatgaccacccagttttg

SEQ ID NO: 11800 - DNA, 80 bp, synthetic construct
  source 1..80: mol_type = other DNA
gcattggtgctgggttacaagtacagatccttgaagttgtcatagaagcatcattctagactcagggtcttttaatcatg

SEQ ID NO: 11801 - DNA, 80 bp, synthetic construct
  source 1..80: mol_type = other DNA
gtacctttctgacagaaaaatataattgcagactcttgattcaggctcacagtgtctaatgatatggccccaatttacgt

SEQ ID NO: 11802 - DNA, 80 bp, synthetic construct
  source 1..80: mol_type = other DNA
tcctaggaaaagcacaaccaaccatctgaatttactattgaaagcttggaaaacactgcagttgacttgtttggagctgg

SEQ ID NO: 11803 - DNA, 80 bp, synthetic construct
  source 1..80: mol_type = other DNA
tatgctgcagataagaaatattctttttttctcctatgtcagtatcccccattgaaatgacaataacctaattataaata

SEQ ID NO: 11804 - DNA, 80 bp, synthetic construct
  source 1..80: mol_type = other DNA
acacagcctaaccatatcagtgtatatttggtacattttccttatacaatccactgtcgatgggcacataagttgattcc

SEQ ID NO: 11805 - DNA, 80 bp, synthetic construct
  source 1..80: mol_type = other DNA
agagacacacagcagtgccagaaaaggcatgaggtgtaggctagaaagacagattaggtacacatccactccttgaattc

SEQ ID NO: 11806 - DNA, 80 bp, synthetic construct; identical to SEQ ID NO: 11700
  source 1..80: mol_type = other DNA

SEQ ID NO: 11807 - DNA, 80 bp, synthetic construct
  source 1..80: mol_type = other DNA
tatcatatagtagatcttattcatctccacctcccctccccccacactaccctttcgagtctctggtaaccatctttcta

SEQ ID NO: 11808 - DNA, 80 bp, synthetic construct
  source 1..80: mol_type = other DNA
atttttgcctagaccaatgtcctggagattttccctagtgttttcctatagtagtttcacagtttgaggtcttagactta

SEQ ID NO: 11809 - DNA, 80 bp, synthetic construct
  source 1..80: mol_type = other DNA
gaatctttaggtttttcctagtataaggttatatcatctgcacacaaggatattttgacttattcctttctaatgtggat

SEQ ID NO: 11810 - DNA, 80 bp, synthetic construct
  source 1..80: mol_type = other DNA
ttttatttatctgaatctactctttttttttttcttagtctggctaacggtttgtcaattttgtttaacttctcaaaaaa

SEQ ID NO: 11811 - DNA, 80 bp, synthetic construct
  source 1..80: mol_type = other DNA
gaaatctactttgtctgttttaaatatagtaactcatgctctttttttcatttccattggcaggtactgtctcattcaat

SEQ ID NO: 11812 - DNA, 80 bp, synthetic construct
  source 1..80: mol_type = other DNA
aacaggtcctagtgtctggcagtgtgtgttctccagatttattatctttcttcaagattggtttggctactcttaggtgc

SEQ ID NO: 11813 - DNA, 80 bp, synthetic construct
  source 1..80: mol_type = other DNA
agaagtgactttaaacaaccagctagtgtgtgaactaacagaatatgaactcacttattatcatgggaagaggtttaagc

SEQ ID NO: 11814 - DNA, 80 bp, synthetic construct
  source 1..80: mol_type = other DNA
acttggtaaggttgcaattactaatgtcatcttttgaagaagacagaattgataatttacttagagattatggggcttac

SEQ ID NO: 11815 - DNA, 80 bp, synthetic construct
  source 1..80: mol_type = other DNA
gtggcagggtggacttgtgcagggagtattttttattgatgcctaatataagacatccctgtccagtagaattttctgca

SEQ ID NO: 11816 - DNA, 80 bp, synthetic construct
  source 1..80: mol_type = other DNA
aggggcacataatgtcacatatgccattattggttatgctaagatcctcacctaataagttggaatctgccagatctttc

SEQ ID NO: 11817 - DNA, 80 bp, synthetic construct
  source 1..80: mol_type = other DNA
tcctggaagataaaactaattacattttcctcactagccatgaggaagttatctcactccagaacttcactgagtgtctt

SEQ ID NO: 11818 - DNA, 80 bp, synthetic construct
  source 1..80: mol_type = other DNA
agcacatctttccatggcagagcagaagagagagaacaatgaggaaaggctacatacctttaaacaaccagatctcatga

SEQ ID NO: 11819 - DNA, 80 bp, synthetic construct
  source 1..80: mol_type = other DNA
agacatgtgctcctgaaagtacctagaggaaaaaaatctttggctgcatattgagccagaaatacaaagggaaatacagt

SEQ ID NO: 11820 - DNA, 80 bp, synthetic construct
  source 1..80: mol_type = other DNA
cattttcccttccctgaagatctagtgaacattcgacctccattacggagagtttcctatgtttcactgtgcaaatatat

SEQ ID NO: 11821 - DNA, 80 bp, synthetic construct; identical to SEQ ID NO: 11731
  source 1..80: mol_type = other DNA

SEQ ID NO: 11822 - DNA, 80 bp, synthetic construct
  source 1..80: mol_type = other DNA
ttggaactaccacattgctttattgtacattagagcctctggctagggagcaggctggggactaggtaccccattctagc

SEQ ID NO: 11823 - DNA, 80 bp, synthetic construct
  source 1..80: mol_type = other DNA
acacccagggggacgatgtccccaaagcgctgcacctcatgaatcacggcagtggtgtagggcatgtgagcctggtcacc

SEQ ID NO: 11824 - DNA, 80 bp, synthetic construct
  source 1..80: mol_type = other DNA
ccctctctccttgcccagaggagaaacctaaaatcgaaatctctgacgtggataggaggtacagagtccttggcctctcc

SEQ ID NO: 11825 - DNA, 80 bp, synthetic construct
  source 1..80: mol_type = other DNA
cccattgggctcctgccaggtctcggcagtggccccgcccactcgtcacaagccccgccctcgtccccatgctcacacct

SEQ ID NO: 11826 - DNA, 80 bp, synthetic construct
  source 1..80: mol_type = other DNA
ctggtccagcctgtggtttcacccaccatccatgtttgcttctggtaggggagcctcagcacctctgccgccctccagga

SEQ ID NO: 11827 - DNA, 80 bp, synthetic construct
  source 1..80: mol_type = other DNA
gtggtccaagggtttatggctactgattatcctcctagagcacttctgagatgttttatgctttctacttgtgagtgtga

SEQ ID NO: 11828 - DNA, 80 bp, synthetic construct
  source 1..80: mol_type = other DNA
acgattctagtcagagaaatcaaggcaccttacctagaaatgacaagaccacatagatcttttctaaaggcgactttttt

SEQ ID NO: 11829 - DNA, 80 bp, synthetic construct
  source 1..80: mol_type = other DNA
tgtctgaacaaagatacatctacagggcaccattgtggcaccttttgtaacataaatagttggggaaaccatttgaattg

SEQ ID NO: 11830 - DNA, 80 bp, synthetic construct
  source 1..80: mol_type = other DNA
aacagcaggaacctgttcacccaaaaccaaaatgagttgtcaggtaaatcagaccttgataaaatagcagcgcctgttca

SEQ ID NO: 11831 - DNA, 80 bp, synthetic construct
  source 1..80: mol_type = other DNA
gggtgaatttgggactcgcagtttccacttcacccacttttgtgttgtttgcattcgttaaaaggagatattttacttcc

SEQ ID NO: 11832 - DNA, 80 bp, synthetic construct
  source 1..80: mol_type = other DNA
gtcattattttcaaacgaggtgttcccgtatataaaatttgatgttggttgggcatctaacagtattatggccagaggac

SEQ ID NO: 11833 - DNA, 80 bp, synthetic construct
  source 1..80: mol_type = other DNA
tgtataaatacaagtatagaatggcataactcaaaatccacaagtgatttggctggattgtaaatgacttttattttctt

SEQ ID NO: 11834 - DNA, 80 bp, synthetic construct
  source 1..80: mol_type = other DNA
ggccaccattgcgggaatcagcctttgaaacgatggccaacagcagctaataataaaccagtaatttgggatagacgagt

SEQ ID NO: 11835 - DNA, 80 bp, synthetic construct
  source 1..80: mol_type = other DNA
taaatgaactgataacgccgtcagcacggagcaggcgctgggtgtttgcgctcttgcgcgtgcgctctgtggggcgcagg

SEQ ID NO: 11836 - DNA, 80 bp, synthetic construct
  source 1..80: mol_type = other DNA
tcctgtctccagagccccgagttcagcataagcagaaagcggcctgttccctctctagggagaggagggttgcggtctgg

SEQ ID NO: 11837 - DNA, 80 bp, synthetic construct
  source 1..80: mol_type = other DNA
acggggtggttgtatcacaattagtggcatttggttttccttcttctgcattgtgggttttacttctctggggttgccaa

SEQ ID NO: 11838 - DNA, 80 bp, synthetic construct
  source 1..80: mol_type = other DNA
caggggaacagggatcatttcaaggttcctatctgggagaaaataaaaaggtttacagttagttgagataagcgtgggaa

SEQ ID NO: 11839 - DNA, 80 bp, synthetic construct
  source 1..80: mol_type = other DNA
taaacacgtgacttgtatcctaaatactgttgaaaagcaaaggaaactcaaacaggttcagacattcactatctttcgta

SEQ ID NO: 11840 - DNA, 80 bp, synthetic construct
  source 1..80: mol_type = other DNA
tcaggtttggagaaagttgttggtccaacacacacaattatgttgcatccagaaaaaagtagtaaaatatttttttccct

SEQ ID NO: 11841 - DNA, 80 bp, synthetic construct
  source 1..80: mol_type = other DNA
tgtggccgacctgttctttgcggggacagagaccaccagcacaactctgagatatgggctcctgattctcatgaaatacc

SEQ ID NO: 11842 - DNA, 80 bp, synthetic construct
  source 1..80: mol_type = other DNA
ctatgaagttatttcccccaagaaagtcgacatgtgatggatccagggtcagaccctgggcttttcttgttctttccttc

SEQ ID NO: 11843 - DNA, 80 bp, synthetic construct
  source 1..80: mol_type = other DNA
acatggaaatgtgaagggtgaaggagccaaaagtttagggaaggaatcattgtatggatctgcagtgattataagagaac

SEQ ID NO: 11844 - DNA, 80 bp, synthetic construct
  source 1..80: mol_type = other DNA
ttttggagcattttccagtaattcaaaggacctggggaaccttaagcactgcttaggatgctccataaacatcttctgcg

SEQ ID NO: 11845 - DNA, 80 bp, synthetic construct
  source 1..80: mol_type = other DNA
tggaggaaatctggaaaagagcctcagcagatagtgcctgggactgtagtgaattctaatgccaggaacaaactatcaca

SEQ ID NO: 11846 - DNA, 80 bp, synthetic construct
  source 1..80: mol_type = other DNA
tttctttgaggcacttgtcctccttcccagggcctcatcttagggattgttgtgggaagatcatacaaccaactccatac

SEQ ID NO: 11847 - DNA, 80 bp, synthetic construct
  source 1..80: mol_type = other DNA
ataacataattttcatgttattgaaaagctcttccatctaggatcacacaacttcagtgtcagaatcatattgaggtggg

SEQ ID NO: 11848 - DNA, 80 bp, synthetic construct
  source 1..80: mol_type = other DNA
gtctctgaactaaagagagctcccttggattcttggacttgtcaacccataggtgacttaaaattgagaatatccaaggg

SEQ ID NO: 11849 - DNA, 80 bp, synthetic construct
  source 1..80: mol_type = other DNA
gtctgtgagttcccttagtatttattgatcattatcaggcatttctcagagagggggatgcggcaggacaatagggtaat

SEQ ID NO: 11850 - DNA, 80 bp, synthetic construct
  source 1..80: mol_type = other DNA
aaaaaaaacttgctcatgcatgtttatagcagcacattcacaattgcaaaaatgtggaaccaacccaaatgcccacgatt

SEQ ID NO: 11851 - DNA, 80 bp, synthetic construct
  source 1..80: mol_type = other DNA
tattgccttctgttctttatccctttgaaaaggtatgttttttccctcgactatgatgataactgtctccttccatcttt

SEQ ID NO: 11852 - DNA, 80 bp, synthetic construct
  source 1..80: mol_type = other DNA
ggacataaatattcagtccttaacacaaagggggtggttgtggtggccacggtcaaatactcaggacaggaattcatggt

SEQ ID NO: 11853 - DNA, 80 bp, synthetic construct
  source 1..80: mol_type = other DNA
aacaaaccaaactacaacagaagggaatattgggcctgggagtctgactggcaaatatcttttaagtcaaggagctgtgt

SEQ ID NO: 11854 - DNA, 80 bp, synthetic construct
  source 1..80: mol_type = other DNA
gcaattggcgtgatccatggagactgaggaaaagcagggcagagtgacggcccacccagaggctgcacagggtaagggaa

SEQ ID NO: 11855 - DNA, 80 bp, synthetic construct
  source 1..80: mol_type = other DNA
aacaacatcaacaaaaaggaccccacaaaaacccaatccaaaggtcaataacatcaaatattgaaggtaggtaaacccaa

SEQ ID NO: 11856 - DNA, 80 bp, synthetic construct
  source 1..80: mol_type = other DNA
aatataggagcacctaggttcataaaacaagttcttagaaacctacaaagagactcagactcccacacaataatagtgag

SEQ ID NO: 11857 - DNA, 80 bp, synthetic construct
  source 1..80: mol_type = other DNA
atgaacattgatgcaaaactcttcaataaaataacggcaaactgaatccagcagtgcatgaaaaagcttatccaccacaa

SEQ ID NO: 11858 - DNA, 80 bp, synthetic construct
  source 1..80: mol_type = other DNA
aaatggtgctggtggctgggcacagtggctcacacctgtaatcccagcactttgggaggccaaggtgggtgtatcacgag

SEQ ID NO: 11859 - DNA, 80 bp, synthetic construct
  source 1..80: mol_type = other DNA
gacatgaacatatactttttgaaagaagacatttatgtggccaacaaacgtatgaaaaaaagatcaacatgactgatcat

SEQ ID NO: 11860 - DNA, 80 bp, synthetic construct
  source 1..80: mol_type = other DNA
tctaccgttaatggatctggcctctagcccttatgggatggggacaggaacaaaattttataaagataggagacattatt

SEQ ID NO: 11861 - DNA, 80 bp, synthetic construct
  source 1..80: mol_type = other DNA
catgattgtgctcttaggtcttagttcgaaaggaagaaattcttccactcagacaccctagtgattccactgaactgcaa

SEQ ID NO: 11862 - DNA, 80 bp, synthetic construct
  source 1..80: mol_type = other DNA
agaaccagaacagttctcccgttctgaggtattctacacacacagctggtttcttatctgaggaagaacatcctggcaga

SEQ ID NO: 11863 - DNA, 80 bp, synthetic construct
  source 1..80: mol_type = other DNA
gcattctgactcaggagatgcagactttgactcccaccattggtcttgattgggtcaacgcatttcagtgaatttgaaac

SEQ ID NO: 11864 - DNA, 80 bp, synthetic construct
  source 1..80: mol_type = other DNA
cctgacgcccacttctggggcttaccacatctcctgggccagcctcttcctcttgtgtgctctgggcttgggcagggact

SEQ ID NO: 11865 - DNA, 80 bp, synthetic construct
  source 1..80: mol_type = other DNA
ttacaacagataaacctgcaagcactgtgagtcttggctgttttctggaggatcaggtaccggtttagctctgcagctcc

SEQ ID NO: 11866 - DNA, 80 bp, synthetic construct
  source 1..80: mol_type = other DNA
tggacaaatcgatgggtggatgaaaagataatggatgaatggagagagaatggacaaatggttggctcaatgcctaaatg

SEQ ID NO: 11867 - DNA, 80 bp, synthetic construct
  source 1..80: mol_type = other DNA
ccttgttttttgctcaagatctccttcaggtgtactttctctccatgcactagaaaacagtgacacattttggcatcagg

SEQ ID NO: 11868 - DNA, 80 bp, synthetic construct
  source 1..80: mol_type = other DNA
ttaatttaaggctctgctgttgctgttgtgaataaccagtaactttggaacaagggaccctgcattctcacttggcactg

SEQ ID NO: 11869 - DNA, 80 bp, synthetic construct
  source 1..80: mol_type = other DNA
cactagatgaatcgggctcctccatggtcagcttttccctataaggtaaaattataccagatatcctctttgtaaaactc

SEQ ID NO: 11870 - DNA, 80 bp, synthetic construct
  source 1..80: mol_type = other DNA
aatcggaaactcaaaagaatacaaccatttgtcttttatctacttatgaccttgaagcaaacccccctgcttcaagttgt

SEQ ID NO: 11871 - DNA, 80 bp, synthetic construct
  source 1..80: mol_type = other DNA
cagtggtttcagaacacgtgccatgtcttcttactttccttgcccctttctttcttaacaatattacacctgaggaacag

SEQ ID NO: 11872 - DNA, 80 bp, synthetic construct
  source 1..80: mol_type = other DNA
aaacaacctctctaggaatcagtgaaaatgtacattgtgcatattagtgaaaacgaatatgtgtttaagatgagaacttt

SEQ ID NO: 11873 - DNA, 80 bp, synthetic construct
  source 1..80: mol_type = other DNA
gtactttgagactatgtcaacaaaccattctcattaagctgtgatccattcttttccattgctatttcttgaccatatat

SEQ ID NO: 11874 - DNA, 80 bp, synthetic construct
  source 1..80: mol_type = other DNA
gctacattaccccacacaagtcactaccaccatctctattgtgtgtatttttagtagcttactttctccctaagtagtac

SEQ ID NO: 11875 - DNA, 80 bp, synthetic construct
  source 1..80: mol_type = other DNA
acaaactgactatcactaaccaaccaggccagttacctcagtagtaaaatgagagaactgacttacaattttggcaaagt

SEQ ID NO: 11876 - DNA, 80 bp, synthetic construct
  source 1..80: mol_type = other DNA
gccaagatgggcacagccacatatctgacttatagacttgtgagcaataattcatgcttactgttttaagctgcagagtt

SEQ ID NO: 11877 - DNA, 80 bp, synthetic construct
  source 1..80: mol_type = other DNA
cattaggtgaagcattttttgtggaatgcagaggtcacatttctagcatttccacatggatgttgtgcaagagccaaaga

SEQ ID NO: 11878 - DNA, 80 bp, synthetic construct
  source 1..80: mol_type = other DNA
tttctccttccccttgtccctctctatctcattataaatcagctctatttctgtgtgagtgggcagcccttaaaaagaac

SEQ ID NO: 11879 - DNA, 80 bp, synthetic construct
  source 1..80: mol_type = other DNA
tgtttactacaacttacctattgagaaaggcataaaggcttcccttttcttaaactgtccattctccagaaaatggtccg

SEQ ID NO: 11880 - DNA, 80 bp, synthetic construct
  source 1..80: mol_type = other DNA
cccactacagggctcttctttcagtttctcaaacatgccattttcctacttaattcagcatcctttttaaatgctatttg

SEQ ID NO: 11881 - DNA, 80 bp, synthetic construct
  source 1..80: mol_type = other DNA
caatgggtaagctcttctgattctacttctcgagattttccccaggtatgacacactcagaggtacttagacagactgga

SEQ ID NO: 11882 - DNA, 80 bp, synthetic construct
  source 1..80: mol_type = other DNA
aaataacaagcttcttctgagtaaacttactctgagaattgaataagacattttgaaagagaccacattgtccacaaccc

SEQ ID NO: 11883 - DNA, 80 bp, synthetic construct
  source 1..80: mol_type = other DNA
tccttaggacaagaataaatgtcacttctcaagttcaagtttctacccccctaaaagatgggcttgaagatctgcttaat

SEQ ID NO: 11884 - DNA, 80 bp, synthetic construct
  source 1..80: mol_type = other DNA
tgatgttttgagatttgtgtgaccagataggactgctcccagtttctttcattggttgagtgctcacctagccaaagaga

SEQ ID NO: 11885 - DNA, 80 bp, synthetic construct
  source 1..80: mol_type = other DNA
tgataactcatgtaagtggaatcatacagtgcttatctgtttgttactagcctttttaactgagcatgaacctggatgca

SEQ ID NO: 11886 - DNA, 80 bp, synthetic construct
  source 1..80: mol_type = other DNA
gtccagggtgctgcagatgaggttttcttcatggaaacttgaagtaggattgcctgtgtgctagaaaacacaatgtttga

SEQ ID NO: 11887 - DNA, 80 bp, synthetic construct
  source 1..80: mol_type = other DNA
taactgtgttaaaggtcacgcatcccatttggtttcttcctcacctctggcctataatgttggaaagtgaaaggtacaaa

SEQ ID NO: 11888 - DNA, 80 bp, synthetic construct
  source 1..80: mol_type = other DNA
tagtctttattagaggtaaataagagggtcaaagtcagagagaaagtatgtcaggatggaagcagataccagagagaaga

SEQ ID NO: 11889 - DNA, 80 bp, synthetic construct
  source 1..80: mol_type = other DNA
ataattgaggtctgtaatttgctccaaaataattcagggacagtgggaatgtggtagtagggcatagatgcagatacagt

SEQ ID NO: 11890 - DNA, 80 bp, synthetic construct
  source 1..80: mol_type = other DNA
gaaatggacgagttggggaaggacacagagaggagagactcaagggcaacagcaatattgtttttctttttaaaaagaac

SEQ ID NO: 11891 - DNA, 80 bp, synthetic construct
  source 1..80: mol_type = other DNA
ccttctttgctccttccatgcctggccacttgacataatcaatcctgggaaaaagaaagtcaacattacagtattctgat

SEQ ID NO: 11892 - DNA, 80 bp, synthetic construct
  source 1..80: mol_type = other DNA
tccagaagcatatatacaacgctgcctgcctcactttgctgacttaaaggtattttgaattcggcatatccatgattgaa

SEQ ID NO: 11893 - DNA, 80 bp, synthetic construct
  source 1..80: mol_type = other DNA
tctattcttctgactgttccatcactcatgcctagtaccatgcttcacaaggcagataatacagtgaatggatatagaat

SEQ ID NO: 11894 - DNA, 80 bp, synthetic construct
  source 1..80: mol_type = other DNA
atggcaggaggtgagacatgttggcagcaacgctgctctgttactctttactctactgggatgtttgggtggagaaaagc

SEQ ID NO: 11895 - DNA, 80 bp, synthetic construct
  source 1..80: mol_type = other DNA
atagttaaatcgtaacagttgaatatgcacatgtccatgtgttcagaaatggaggatgtgtgtagctggaggggatcata

SEQ ID NO: 11896 - DNA, 80 bp, synthetic construct
  source 1..80: mol_type = other DNA
agttcaatcgttttcggctcttgcggaagttgctttattttttgagcctcaactccccagctataaaagggagaaaatta

SEQ ID NO: 11897 - DNA, 80 bp, synthetic construct
  source 1..80: mol_type = other DNA
aatccgaagggcttcatttcctttaggtgtttgtggcctcttctccacaatccagatgcctttgcacttacactccacca

SEQ ID NO: 11898 - DNA, 80 bp, synthetic construct
  source 1..80: mol_type = other DNA
gaggaagaagtaaaggattagtgggagaagagactgaactattgaaccatggctaccaagagatataaagtttacagaga

SEQ ID NO: 11899 - DNA, 80 bp, synthetic construct
  source 1..80: mol_type = other DNA
agaacaggctgtggagattaaattcatgttcaatttaacaggcttttatgagatgcttaagagttgccaggcaccttctg

SEQ ID NO: 11900 - DNA, 80 bp, synthetic construct
  source 1..80: mol_type = other DNA
gggagtgcttaagagtttggattttgaaattatacaaacttgtttgaatccaggttctgcttcttagtttctgtgtgatt

SEQ ID NO: 11901 - DNA, 80 bp, synthetic construct
  source 1..80: mol_type = other DNA
ttgcaaacaatcagtagaaacaggacgtgaagctagacaaccggttagaccaaaaattctcaggagtatgccttaatcct

SEQ ID NO: 11902 - DNA, 80 bp, synthetic construct
  source 1..80: mol_type = other DNA
atgagatcccagtctcagttttgtcactggctagttttgtgacattaggcaagtcatttaacccctcttttaacacctat

SEQ ID NO: 11903 - DNA, 80 bp, synthetic construct
  source 1..80: mol_type = other DNA
cttaccaagaatcaagagaacatcaattgagtgagttgacaccaacagtgagatgacacagatgttagaaatatagaata

SEQ ID NO: 11904 - DNA, 80 bp, synthetic construct
  source 1..80: mol_type = other DNA
tttcttgccagtacacctgcactaaaagaatatctaaagatagttcttcagatctgaaaggatatgataagcttgtaaca

SEQ ID NO: 11905 - DNA, 80 bp, synthetic construct
  source 1..80: mol_type = other DNA
ttattccacccaacaatagtcaaatacatattttttccagcctccatggcacatttatcaagatagactatatcttgtgt

SEQ ID NO: 11906 - DNA, 80 bp, synthetic construct
  source 1..80: mol_type = other DNA
tattacttagtgagagtgcactgcaagggaaggaggttgaagctggagggctcagttagtgtagtgggaataactcagtt

SEQ ID NO: 11907 - DNA, 80 bp, synthetic construct
  source 1..80: mol_type = other DNA
ctagttctgacaaaggccccacgccaacagtgattacaatgaccaaaaatatttacttgttggttctcattcagttctat

SEQ ID NO: 11908 - DNA, 80 bp, synthetic construct
  source 1..80: mol_type = other DNA
ggaggaaattattgagaaatgttgattctcttatcagagctcaggaggagttaatggtgctaactgggggtggtggaaat

SEQ ID NO: 11909 - DNA, 80 bp, synthetic construct
  source 1..80: mol_type = other DNA
ctatatagaaagcctacttaaggggtggaattgaataataaatacatgagacctagaaataagatttatagggtattgtt

SEQ ID NO: 11910 - DNA, 80 bp, synthetic construct
  source 1..80: mol_type = other DNA
ccaccatgcctggctgggaacaacattaatagagttataattgggttgaaaaggagcccagctggatggagctaggcacc

SEQ ID NO: 11911 - DNA, 80 bp, synthetic construct
  source 1..80: mol_type = other DNA
ctctgattagagcaagtttcatgttcatgagagcaaacctcatgccaatgcagtttctgggtccagttccaaagggtgtg

SEQ ID NO: 11912 - DNA, 80 bp, synthetic construct
  source 1..80: mol_type = other DNA
ggacataactgatgaccttcatcgtaagttgttggaattgtggatgactgtagttttcttttttctagtctatggtttgt

SEQ ID NO: 11913 - DNA, 80 bp, synthetic construct
  source 1..80: mol_type = other DNA
ttgaggataaactagtccctttctatcccaaaaatgacaaagaaggttctggttggatgtaaccagagaacacgatttca

SEQ ID NO: 11914 - DNA, 80 bp, synthetic construct
  source 1..80: mol_type = other DNA
aaccagagccagcacgttttacaaagatcttacgcttctgccagtagcaaccatttgctatgtttctttctttttctttt

SEQ ID NO: 11915 - DNA, 80 bp, synthetic construct
  source 1..80: mol_type = other DNA
tatctcaggatgtacaagaatgagagatggacaaaaagctagatgagtggtaattgattgtagtctgatggatggcatta

SEQ ID NO: 11916 - DNA, 80 bp, synthetic construct
  source 1..80: mol_type = other DNA
gtagacatggatatatttaaagcagtatgctggagtaagcccagtcctgctctctagaaccaatagttaaatattcagga

SEQ ID NO: 11917 - DNA, 80 bp, synthetic construct
  source 1..80: mol_type = other DNA
ggtgctagaagcaaaaagagaaatttcactgacagaaagtggctcctgaagtcagaagtaaatcacaagcgtggtccttg

SEQ ID NO: 11918 - DNA, 80 bp, synthetic construct
  source 1..80: mol_type = other DNA
gtctcctagaataacccaaatcataatctgaagctcaaaattaatcttgctgttcaagaaatagtaggtagtcaagatag

SEQ ID NO: 11919 - DNA, 80 bp, synthetic construct
  source 1..80: mol_type = other DNA
agagaaagaatggatccaaaaaatcaaatcttaaaagcttcttggtgttttccacaaaggggtcttgtggattgttgaga

SEQ ID NO: 11920 - DNA, 80 bp, synthetic construct
  source 1..80: mol_type = other DNA
acatatccctggtctgcccaggacaaactcagattacacctgtttttactgcataagtgtagatagcaaataataggctt

SEQ ID NO: 11921 - DNA, 80 bp, synthetic construct
  source 1..80: mol_type = other DNA
tattcaacaactatttagtgactgtctactgggtgatgggccctatgctagatgctcaatagagatttatcccagatgcc

SEQ ID NO: 11922 - DNA, 80 bp, synthetic construct
  source 1..80: mol_type = other DNA
tgaaggcttccctcctaagattaggaacaattcaaaaattcaccacatttactcaacattatactgggaagtcctagtgc

SEQ ID NO: 11923 - DNA, 80 bp, synthetic construct
  source 1..80: mol_type = other DNA
aggagggagccacatggagacagagtggatctgcatcttgatcatgctggtcattgcacaaatctactaatgatgtgata

SEQ ID NO: 11924 - DNA, 80 bp, synthetic construct
  source 1..80: mol_type = other DNA
atatgatgaaggataatgtgggccaaacaaggaagagacattgaaagacaaaagagctcttcaaagagaccatggttaga

SEQ ID NO: 11925 - DNA, 80 bp, synthetic construct
  source 1..80: mol_type = other DNA
ctagaaaatctagaagaaatagataaattcctggacacatgccccctcccaagactaaaccaggaagaagttgaatctct

SEQ ID NO: 11926 - DNA, 80 bp, synthetic construct
  source 1..80: mol_type = other DNA
ctcaccactcctattcaacatagtgtcggaagttctgaatagggcaatcaggcaagagaaagaaatggatattcaattag

SEQ ID NO: 11927 - DNA, 80 bp, synthetic construct
  source 1..80: mol_type = other DNA
aaaagcaaacaaccccatcaaaaaatgggcaaaggatatgaacagacacttctcaaaagaagacatctatgcagccaaca

SEQ ID NO: 11928 - DNA, 80 bp, synthetic construct
  source 1..80: mol_type = other DNA
tacccttctattaaaaagtcttggcttaaatttaataacaaaacagaatgaaaagttccacacttgcagataaaattaaa

SEQ ID NO: 11929 - DNA, 80 bp, synthetic construct
  source 1..80: mol_type = other DNA
caacattaaaaaaaatatttctgcaaggacacctgcccagcaactgcctgtccaaccttggtgaggcgtcacccttgtta

SEQ ID NO: 11930 - DNA, 80 bp, synthetic construct
  source 1..80: mol_type = other DNA
atgttgttgagtgagaaaatgaacgagtgacagaatgacaaagtgaactcactttccagttttccagcttaacatggaag

SEQ ID NO: 11931 - DNA, 80 bp, synthetic construct
  source 1..80: mol_type = other DNA
tcctgggaacctgcatagagcaaaaagaaaaccttctttatggcgctcacaaagtttgcacatcaagttctgagcatcag

SEQ ID NO: 11932 - DNA, 80 bp, synthetic construct
  source 1..80: mol_type = other DNA
aggtcactttgttcctttacgtctatttagtaagtggcctctccccaaatttggggattctcatcctaggtagaaagggt

SEQ ID NO: 11933 - DNA, 80 bp, synthetic construct
  source 1..80: mol_type = other DNA
aggaaaatgtagctgaaaagcatggtgtgtataaatggatccatatgcttcatatgggcttttagctaaaaggtaggggc

SEQ ID NO: 11934 - DNA, 80 bp, synthetic construct
  source 1..80: mol_type = other DNA
aagatatatgcaatcttgtcatagagttatacatttgtgcattagattcatattcctgacatgattctggaaaggtgagg

SEQ ID NO: 11935 - DNA, 80 bp, synthetic construct
  source 1..80: mol_type = other DNA
acccttcttgccactaaagatggatggggaagatgcttatttattcctttatagagctgcataagatctacaataacctc

SEQ ID NO: 11936 - DNA, 80 bp, synthetic construct
  source 1..80: mol_type = other DNA
aagcgtagtgcaaacggggaatttctcaagttgtacagtgttttgactcatacttctagcactattgtcactgagtcacc

SEQ ID NO: 11937 - DNA, 80 bp, synthetic construct
  source 1..80: mol_type = other DNA
ctttaaatgtatcacctggaacataaggtcaaggagtaaggatagccctgctctatggtagtccttcatatccaccagaa

SEQ ID NO: 11938 - DNA, 80 bp, synthetic construct
  source 1..80: mol_type = other DNA
tttgtgggctggtcattgaaatcctgctttggttatttcgttataatcatcataacctacaggtcctttaaattctccat

SEQ ID NO: 11939 - DNA, 80 bp, synthetic construct
  source 1..80: mol_type = other DNA
caggctattgcttcaaaataacatgatagtcaggaggagggtgatggtggcatttggatggggcagctaacatggattga

SEQ ID NO: 11940 - DNA, 80 bp, synthetic construct
  source 1..80: mol_type = other DNA
ttctcaggacctcagcctgcactcttataattactacagaggaaatagcaagtaacgttgaaagcaaatggaatgtggaa

SEQ ID NO: 11941 - DNA, 80 bp, synthetic construct
  source 1..80: mol_type = other DNA
attaatggggctatgaccattaccaccaaataaaatacaccaaagtcactatcacctttcaaaaagaggtcacacatctg

SEQ ID NO: 11942 - DNA, 80 bp, synthetic construct
  source 1..80: mol_type = other DNA
aaagaatcccagtttgggcagaagtctgaaaactgtggatgatatgtacctagcacttggtgttatatttgggaggcagt

SEQ ID NO: 11943 - DNA, 80 bp, synthetic construct
  source 1..80: mol_type = other DNA
gtgtttatagcaggatgatttataatcctttgggtatatacccagtaatgggatggctgggtcaaatggtatttctagtt

SEQ ID NO: 11944 - DNA, 80 bp, synthetic construct
  source 1..80: mol_type = other DNA
atgcctccggctttgttcttttggcttaggattgacttggcaatgcgggctcttttttggttccatatgaactttaaagt

SEQ ID NO: 11945 - DNA, 80 bp, synthetic construct
  source 1..80: mol_type = other DNA
tcggtttgccagtattttattgaggatttttgtatcactgttcatcagggatattggtctaaaattctcttttttggttg

SEQ ID NO: 11946 - DNA, 80 bp, synthetic construct
  source 1..80: mol_type = other DNA
acagtgtggtgttaaagtcttccattattattgtgtgggagtctaactctctttgtaagtctctaaagacttgcttcatg

SEQ ID NO: 11947 - DNA, 80 bp, synthetic construct
  source 1..80: mol_type = other DNA
gctagattggggaagttctcctggataatatcctgcagagtgttttccaacttcgttctattctccccgtcactttcagg

SEQ ID NO: 11948 - DNA, 80 bp, synthetic construct
  source 1..80: mol_type = other DNA
ttgcctgggtatcaggagtggaggctgcagaacagcggtattggtgacccgcaaatgctgctgcctgatcattcctctgg

SEQ ID NO: 11949 - DNA, 80 bp, synthetic construct
  source 1..80: mol_type = other DNA
tgagtggccagttcatataaagtgaaggaaagaacactgctggtggtttcatagccagcaaaaatgaagattattgactg

SEQ ID NO: 11950 - DNA, 80 bp, synthetic construct
  source 1..80: mol_type = other DNA
catcgaactactgaatcaaaatccaaacttgcaggagatatggtgatttgtgtgcacaacctcacttaagcagcatggat

SEQ ID NO: 11951 - DNA, 80 bp, synthetic construct
  source 1..80: mol_type = other DNA
ctttgcagtagattaaccttgcgaacacactttcaagtactgccagttaaaatcacccttactgggatagtgtgcttcct

SEQ ID NO: 11952 - DNA, 80 bp, synthetic construct
  source 1..80: mol_type = other DNA
ctgaaacaaatctagctatcatgtccaattgctttttcgcctttgccctccctgtttctcatcttctctgtcttttggat

SEQ ID NO: 11953 - DNA, 80 bp, synthetic construct
  source 1..80: mol_type = other DNA
tacataggaaacaccactacagcagtgagatcaatggcaccttctgagtctttggagtgaccaaagtaatagaattaaat

SEQ ID NO: 11954 - DNA, 80 bp, synthetic construct
  source 1..80: mol_type = other DNA
gtttgtggtggggtgttgacagctaaagtgtgtgagggctctagattgacaaaaacattttagtttacaatagtaatggt

SEQ ID NO: 11955 - DNA, 80 bp, synthetic construct
  source 1..80: mol_type = other DNA
gattggaggaaaaggaagtagtgggaaggtttaatagttcatagtttgctgatattctcagaaaaaccatgaagggattg

SEQ ID NO: 11956 - DNA, 80 bp, synthetic construct
  source 1..80: mol_type = other DNA
gcacttttcataaatcccactgggcctaaagactagagttcaacagaaacattttttctcacattagttgtggtgatctt

SEQ ID NO: 11957 - DNA, 80 bp, synthetic construct
  source 1..80: mol_type = other DNA
agaaagggataattacttttcccaacttggggctggactatcaagccagcatgcttggaactttctcttatcttccacaa

SEQ ID NO: 11958 - DNA, 80 bp, synthetic construct
  source 1..80: mol_type = other DNA
tgtgattctcaagtgtgaacttcgtagacaacaatggaatggaaaggggtaatcagagtatgtcacatccacaaataatg

SEQ ID NO: 11959 - DNA, 80 bp, synthetic construct
  source 1..80: mol_type = other DNA
gctttggtgatggatgaaggcactgacactacagatacggcacaacttgctatttttattagaggtattgatgatgaata

SEQ ID NO: 11960 - DNA, 80 bp, synthetic construct
  source 1..80: mol_type = other DNA
tattttggtatatttgcaactccattttcagtcgacatatatatgttacctggcaattttgaaatggaatgcctagagct

SEQ ID NO: 11961 - DNA, 80 bp, synthetic construct
  source 1..80: mol_type = other DNA
gctgagttttgacaatatgcctacctttccaaaatggtgttggaacatttggacagccatagtccacagaaaatgaacct

SEQ ID NO: 11962 - DNA, 80 bp, synthetic construct
  source 1..80: mol_type = other DNA
ttaccactgggcgggacaggatgaagagtacatggaaccttcctgtacattttttaggtaaccttctgtgaatatatgtt

SEQ ID NO: 11963 - DNA, 80 bp, synthetic construct
  source 1..80: mol_type = other DNA
atctagagctgtgtcatctgtctactaagtcatgttgcctgtatgggccatgccagctccacagcactccacagtcagcg

SEQ ID NO: 11964 - DNA, 80 bp, synthetic construct
  source 1..80: mol_type = other DNA
ttatcagaaccaaagtgatgtcactaattgttttttaaccctgacaaataaatcccaagaaggctatgaagagaggattc

SEQ ID NO: 11965 - DNA, 80 bp, synthetic construct
  source 1..80: mol_type = other DNA
ttccagttttctagcttaacacagaaaagatggagaaatgccacctctacacatcacacccagcaaattacaatgcgtgc

SEQ ID NO: 11966 - DNA, 80 bp, synthetic construct
  source 1..80: mol_type = other DNA
tgcaaccataagaagcaaaagaggaagctcaagcaactcacctgacgataggacaaaacatttcccaacaaaggcagagg

SEQ ID NO: 11967 - DNA, 80 bp, synthetic construct
  source 1..80: mol_type = other DNA
agtcatggagtccttatttctacagattgacaactgtgttcatggcttctattggccttatagaaatgtgggcagctttc

SEQ ID NO: 11968 - DNA, 80 bp, synthetic construct
  source 1..80: mol_type = other DNA
ttcccacttcagttccctcctttgttgtcacagccatgtcaaatcaatgacactaatctctgctcctgaactttaaacac

SEQ ID NO: 11969 - DNA, 80 bp, synthetic construct
  source 1..80: mol_type = other DNA
aaaatgttagacaatggaaaccatgttgccacaactcactgaattcctaagctttctgtgaaagaattaaaatgaggttt

SEQ ID NO: 11970 - DNA, 80 bp, synthetic construct
  source 1..80: mol_type = other DNA
tccctaaaccctcctagtcaccaaaattagaaggtggatgggagaaatgcttatttattcattcatagatctgcataaga

SEQ ID NO: 11971 - DNA, 80 bp, synthetic construct
  source 1..80: mol_type = other DNA
tacttccccagcactgatttggtcatctcctctatattaccaagtataacactctatacagaccatgagagagcacaatg

SEQ ID NO: 11972 - DNA, 80 bp, synthetic construct
  source 1..80: mol_type = other DNA
caaataatgtggaatatgaaaataatatggaaaccatctctatcttcttcctcttctatgtagaaagcctgcttaaggtg

SEQ ID NO: 11973 - DNA, 80 bp, synthetic construct
  source 1..80: mol_type = other DNA
cttgggaattgaactaggacttgaaagataagaacagaatgaggagaagaaaggaaagaagattagcagagttataattg

SEQ ID NO: 11974 - DNA, 80 bp, synthetic construct
  source 1..80: mol_type = other DNA
aaaaggcacataagtgatgagaatgactgacagaaaagtagattcctgcctcaagtcacccttatgttggtcatgaggaa

SEQ ID NO: 11975 - DNA, 80 bp, synthetic construct
  source 1..80: mol_type = other DNA
ccttttaaacataaaaagacaagcaaacgattgtacaagcccagactgtcctgtagagaggcagaatatgcttgaaccag

SEQ ID NO: 11976 - DNA, 80 bp, synthetic construct
  source 1..80: mol_type = other DNA
ccaaatatgacaaaagaaagttctggtggatgttatcagagcatgtgatttcagtgccaggcaaagttatgaaaaggata

SEQ ID NO: 11977 - DNA, 80 bp, synthetic construct
  source 1..80: mol_type = other DNA
taggtaaatcaggtcaatgtagggcatcacagtttagatgaaaagaaatctaagtggaaccttcaaatccccaggggaaa

SEQ ID NO: 11978 - DNA, 80 bp, synthetic construct
  source 1..80: mol_type = other DNA
tggcattaaaatggtataagctcttgtgattgcaagttggcccctctcttgatttttttcctgagagaagctcaggatgg

SEQ ID NO: 11979 - DNA, 80 bp, synthetic construct
  source 1..80: mol_type = other DNA
caccaaaaattgccagttaaaatcgcccttatttggatagcatggctcctgattaggtgttagatgcattaagttgctgc

SEQ ID NO: 11980 - DNA, 80 bp, synthetic construct
  source 1..80: mol_type = other DNA
atgtccacaaagattattctcctgacatttccagaacttgtcagcagctttggtgggagcactttcaaatactgcaacat

SEQ ID NO: 11981 - DNA, 80 bp, synthetic construct
  source 1..80: mol_type = other DNA
aaaactaaacatcctcctataactaccaccacgttttaccttttgtgtctctttgaggcgaccttcttttatctgtttta

SEQ ID NO: 11982 - DNA, 80 bp, synthetic construct
  source 1..80: mol_type = other DNA
ctagtggttatatacgacaacaggatttctggcagggggttgatagctaaacatgtatgaggtttctagaatgacagaag

SEQ ID NO: 11983 - DNA, 80 bp, synthetic construct
  source 1..80: mol_type = other DNA
ctgttctgagctcctagaaatatcatccttattctctatactccctgctcaagctttggaaaattccactatccccagct

SEQ ID NO: 11984 - DNA, 80 bp, synthetic construct
  source 1..80: mol_type = other DNA
aaaagactatttttaggaagctcaaattcagcagactactcctcggaaaggaactctgatcttactttctacctgtcccc

SEQ ID NO: 11985 - DNA, 80 bp, synthetic construct
  source 1..80: mol_type = other DNA
tattccatggatagaaaaaaagaagaaagagataattatttttgccagcttggatctggcctatcaagccagcatgcttg

SEQ ID NO: 11986 - DNA, 80 bp, synthetic construct
  source 1..80: mol_type = other DNA
tctacatgatgctaagagttactgtacaggtattagagtcaccagtttgttgttgatggaggaataaacacagtgatcaa

SEQ ID NO: 11987 - DNA, 80 bp, synthetic construct
  source 1..80: mol_type = other DNA
gttttgatcatgtcgggatctgtgatagccagcataggctgttgacagtcataaatactgtgtggagaaaacagagttga

SEQ ID NO: 11988 - DNA, 80 bp, synthetic construct
  source 1..80: mol_type = other DNA
agcactgtggtttctgaggacttgatgagagaagatgaaatacaaacaggcaaaaccttctccctaatgcttctagtgaa

SEQ ID NO: 11989 - DNA, 80 bp, synthetic construct
  source 1..80: mol_type = other DNA
catgcttgtgtgcctgataacaaaactatcacaaaatacttggcaaaaccaccagcttgcagaaagcccaacccaacctt

SEQ ID NO: 11990 - DNA, 80 bp, synthetic construct
  source 1..80: mol_type = other DNA
accttcctgtttctacatttcaggggtgaagttttaactatggaaaagaaggtccgaggaatgtgtatcttgggggtaca

SEQ ID NO: 11991 - DNA, 80 bp, synthetic construct
  source 1..80: mol_type = other DNA
ccacctcccctgggtcacaagtatcaccttccctgggtggcaagtaccaccttccctgggtggcaagcaccaccttccct

SEQ ID NO: 11992 - DNA, 80 bp, synthetic construct
  source 1..80: mol_type = other DNA
tccccagatgagcaggaaagagttgataccctagcccaatctcacactgacacccaccagtgccatgagccagaccttca

SEQ ID NO: 11993 - DNA, 80 bp, synthetic construct
  source 1..80: mol_type = other DNA
gactgtctgactcacatcgccactgctcctaaagttcctggagctcaaacccaatgtttcttggctgactccttcccaga

SEQ ID NO: 11994 - DNA, 80 bp, synthetic construct
  source 1..80: mol_type = other DNA
atgatttactttcttcccatccctctgcttcccacattattcaatatattgatgaccttctactctgtagtccctccttt

SEQ ID NO: 11995 - DNA, 80 bp, synthetic construct
  source 1..80: mol_type = other DNA
acctgatgcatatactttctgttccccagctcctttagcaatacccactctctgttgagtctcccacaattaccattgta

SEQ ID NO: 11996 - DNA, 80 bp, synthetic construct
  source 1..80: mol_type = other DNA
cgtacatatgtctatctgctaattggacaggtacatgtacactagtatttcttattcccaaattgaaaaaattcaatttg

SEQ ID NO: 11997 - DNA, 80 bp, synthetic construct
  source 1..80: mol_type = other DNA
ggcaactgaaaactgcaaaagaaatgaaacagccagctcctgtcttaactgattgagcaatcttacgacattccattatg

SEQ ID NO: 11998 - DNA, 80 bp, synthetic construct
  source 1..80: mol_type = other DNA
taaggttaggcacaaaggctcgaccaaagtccccagtccatgaggcacatatgacattctatttagtgaaattaaatatt

SEQ ID NO: 11999 - DNA, 80 bp, synthetic construct
  source 1..80: mol_type = other DNA
tgatggaactaagttgctctttgcaatcataagaagcaaaagaggaagctcaaaaacactcaccttacggaaggacaaag

SEQ ID NO: 12000 - DNA, 80 bp, synthetic construct
  source 1..80: mol_type = other DNA
gtgtggcacctcctccccaccctctcttgcttctgctccagtcatgtaagatctgcctgcttctttttcaccttctgcca

SEQ ID NO: 12001 - DNA, 80 bp, synthetic construct
  source 1..80: mol_type = other DNA
taggttccaaacattctgtacaaatccagtgactctgataatatgtggtaaaatacaactaagaaacagcatggaggctc

SEQ ID NO: 12002 - DNA, 80 bp, synthetic construct
  source 1..80: mol_type = other DNA
ggctcacagtcttgcttactttctagccctgagagtttaggataacctgctaagcaggtgtatttgaaatgggggtatta

SEQ ID NO: 12003 - DNA, 80 bp, synthetic construct
  source 1..80: mol_type = other DNA
cagcctgaacatcctttttgctattcaaaacagataagggaaagagaggcctgattagcaccccaagtccaaggaaacag

SEQ ID NO: 12004 - DNA, 80 bp, synthetic construct
  source 1..80: mol_type = other DNA
acacttgtctcaattattttgagtagatatctaggatggaatacaggactgtggaacagggtcttagggtaattctaggc

SEQ ID NO: 12005 - DNA, 80 bp, synthetic construct
  source 1..80: mol_type = other DNA
cctcagacacaggccgcccttacctgggccctgccgagaagggaataaaagccagaggtgacctctccttgatgttctct

SEQ ID NO: 12006 - DNA, 80 bp, synthetic construct
  source 1..80: mol_type = other DNA
gaattgttacaaagtcgcaagaataaaaatagtgtggcactgtggcaaaaatgagaaaacagacccatggaacatgaggg

SEQ ID NO: 12007 - DNA, 80 bp, synthetic construct
  source 1..80: mol_type = other DNA
cagtgcaaatgttctttgattcagcaattgcacttcagggaatttgtcctgcagagatgcttatacatgcaaggaatggt

SEQ ID NO: 12008 - DNA, 80 bp, synthetic construct
  source 1..80: mol_type = other DNA
gtgaagtaagctaggctcagaaacacaaacacacatgatcttacttatcttgggacctaaaatagtcaagctcatagaaa

SEQ ID NO: 12009 - DNA, 80 bp, synthetic construct
  source 1..80: mol_type = other DNA
tggaccctttcttttaaccacatccataattttgcttgaaatctggattttatactccaggacatgggtccaggcaaaga

SEQ ID NO: 12010 - DNA, 80 bp, synthetic construct
  source 1..80: mol_type = other DNA
tctatacttccgtatttattgcagcactattcaaaacagccaaaatatggaatcaacctaagtgcccatcaactgaatgg

SEQ ID NO: 12011 - DNA, 80 bp, synthetic construct
  source 1..80: mol_type = other DNA
aatgcagaaaaattattggttttaaaagcagaaaaatgtttctcctcctcactggactgctgtgctgggcaaaggtgtgg

SEQ ID NO: 12012 - DNA, 80 bp, synthetic construct
  source 1..80: mol_type = other DNA
agttcatttgctgaacacgtctaagtggcgttatctgtcctcacatatcatcaccaactctctcagaagcccaggtcttt

SEQ ID NO: 12013 - DNA, 80 bp, synthetic construct
  source 1..80: mol_type = other DNA
ctctgtctctctcattctctttcttgggaagaaatagaaaatgtgccaagactcataatgtagggcccctctcttaggat

SEQ ID NO: 12014 - DNA, 80 bp, synthetic construct
  source 1..80: mol_type = other DNA
cagatatagacacaggcacacacatatagactaagtcacagacttagaaacacagacacacaaatacacgtaaacataga

SEQ ID NO: 12015 - DNA, 80 bp, synthetic construct
  source 1..80: mol_type = other DNA
ggacatagacatacactgagacaaagacacaaacacagaaaaaagacaaaggcatagacgcagacacagatatacacata

SEQ ID NO: 12016 - DNA, 80 bp, synthetic construct
  source 1..80: mol_type = other DNA
tgccctcttaatcaagttcaaatcctttcatctgacatttcacatgaagctcccttctacttcttgaattcagatcccag

SEQ ID NO: 12017 - DNA, 80 bp, synthetic construct
  source 1..80: mol_type = other DNA
aagatcccagatcctgggcaagaacttactcctgacaatggctgtcaaagctgaagacacatttctgtagactgtccaag

SEQ ID NO: 12018 - DNA, 80 bp, synthetic construct
  source 1..80: mol_type = other DNA
ggataaggtaaagactccctctagacatgttgcttttgctttctataaaagcagattccctaagcttaaagctcctcttc

SEQ ID NO: 12019 - DNA, 80 bp, synthetic construct
  source 1..80: mol_type = other DNA
cacctgctatgcaccagagacgtgactccattacattactctgaccatcttttaagtagggattattatccccattttac

SEQ ID NO: 12020 - DNA, 80 bp, synthetic construct
  source 1..80: mol_type = other DNA
tcctcaggcatgacccaaatatactataacacatgcctcagacaagactcaaataatgtctcagacagttcacataggga

SEQ ID NO: 12021 - DNA, 80 bp, synthetic construct
  source 1..80: mol_type = other DNA
atccacacaccatgttccctgggctctcattcatcccattttccagatgaagagcctgaggctctgaacaataaagtcac

SEQ ID NO: 12022 - DNA, 80 bp, synthetic construct
  source 1..80: mol_type = other DNA
tctcctcttggagatccccgggacctgcagcaggagagcaacgaacttagggcagacaagctataggatggggtaaaggg

SEQ ID NO: 12023 - DNA, 80 bp, synthetic construct
  source 1..80: mol_type = other DNA
tctatctgcctacccatctatccatcaatccattttatctgtgctttcatccatccatatattcatctgtctgtctgctt

SEQ ID NO: 12024 - DNA, 80 bp, synthetic construct
  source 1..80: mol_type = other DNA
agtggccaacttttatctgggtttggcaacaggtctcattgataagagggagataagaagaagaatataagagaaaggtg

SEQ ID NO: 12025 - DNA, 80 bp, synthetic construct
  source 1..80: mol_type = other DNA
agttccctagtaagcacttagaatgggaaagagagagagagactgattaaagtccagaaaggcccagcctgaatcactgt

SEQ ID NO: 12026 - DNA, 80 bp, synthetic construct
  source 1..80: mol_type = other DNA
ccagtcagagcccgtatgtgcacagcaaaagagtggtaaccaggatctatcctatcatctcattttgttaggaacatagt

SEQ ID NO: 12027 - DNA, 80 bp, synthetic construct
  source 1..80: mol_type = other DNA
tagcctgcaaacagaaatagagggtattgatgtcactgaccacaaaggtcaacaatgtccccattttagcgttaacattt

SEQ ID NO: 12028 - DNA, 80 bp, synthetic construct
  source 1..80: mol_type = other DNA
gatgaaaaatgacatgtaagacctcagcggaagttacaggatttctatctaggagggatttcagggcagctacgtagggg

SEQ ID NO: 12029 - DNA, 80 bp, synthetic construct
  source 1..80: mol_type = other DNA
aatcccaccatgagcagtatggaatctgcccctaggttgaataaggtacacaaacttctctttttaaacatggggacatt

SEQ ID NO: 12030 - DNA, 80 bp, synthetic construct
  source 1..80: mol_type = other DNA
tcgttggtgggaaagtgcttctttctgactgtagtaaaagcctaatcaatactgaatggaagagaactctcttttggcag

SEQ ID NO: 12031 - DNA, 80 bp, synthetic construct
  source 1..80: mol_type = other DNA
tagaaaagtttagattgctcataatgaagggaatacgagtgtgaatgttatgcatttatttcactgcatgaggattttag

SEQ ID NO: 12032 - DNA, 80 bp, synthetic construct
  source 1..80: mol_type = other DNA
ctacataacttgctccaatatctcctatctgttgccaagtctgggttccagatgtgcaatatcttttgaatcctttccat

SEQ ID NO: 12033 - DNA, 80 bp, synthetic construct
  source 1..80: mol_type = other DNA
ggtctcttagtaagctttaattcatctgtgtatctcatgtggtgtatcctgtttctggagatcattgaaacacaatgggt

SEQ ID NO: 12034 - DNA, 80 bp, synthetic construct
  source 1..80: mol_type = other DNA
tgaatacccttgagtagatgtcctggaatctggagttggctgaaagatgcataaaatcagtaagtcacatatggctagtc

SEQ ID NO: 12035 - DNA, 80 bp, synthetic construct
  source 1..80: mol_type = other DNA
taagtatccttcaaaaaccaggacccagaacagcatgctgtgggcagtcactatgacttctaacccaaaaacattcaata

SEQ ID NO: 12036 - DNA, 80 bp, synthetic construct
  source 1..80: mol_type = other DNA
tacctgtctgtggccctgatcactgtattttttctatctgggatgagctcaggctttaaagtggtaatgtcttgcaagac

SEQ ID NO: 12037 - DNA, 80 bp, synthetic construct
  source 1..80: mol_type = other DNA
ttccatcagacccatttattccagacaagatacacctttccatgccataatctggtcaggaatcacatttctacaaatcc

SEQ ID NO: 12038 - DNA, 80 bp, synthetic construct
  source 1..80: mol_type = other DNA
gttctcaaggactctctagtccctggataacactgggcataaccatgcttgatgttcaaatgaaattcatagcagtttaa

SEQ ID NO: 12039 - DNA, 80 bp, synthetic construct
  source 1..80: mol_type = other DNA
caagtgcataataaatatatgttagcactacatctccatcgagattacaaacatcctgagccttggaccatgccgtgtct

SEQ ID NO: 12040 - DNA, 80 bp, synthetic construct
  source 1..80: mol_type = other DNA
gtaatcatgtagcagcaattacatggcgtgcctgggtgtgtgctaaaaaacagcaataacaaccacaataaaaggacaag

SEQ ID NO: 12041 - DNA, 80 bp, synthetic construct
  source 1..80: mol_type = other DNA
aataagaaaatacatgtgcagcttctatcttgggtctggaacacagtgggcgttggaaatgtcagctctttctcctttat

SEQ ID NO: 12042 - DNA, 80 bp, synthetic construct
  source 1..80: mol_type = other DNA
aggacagaagctgtgtatgttttatttattgccctgcagaagctcaattcctagtgcattgcttatctcatggtaggtat

SEQ ID NO: 12043 - DNA, 80 bp, synthetic construct
  source 1..80: mol_type = other DNA
gttgttactttctcagtcttcattcattcctcaaattatcacctcctggattctacttctcatcattccattgaagctgc

SEQ ID NO: 12044 - DNA, 80 bp, synthetic construct
  source 1..80: mol_type = other DNA
gatgcaatttatggtacatttttgtcactgaattataatttgagagatgaaagggatccctttaaaatgcaaatattgag

SEQ ID NO: 12045 - DNA, 80 bp, synthetic construct
  source 1..80: mol_type = other DNA
ggagattttacatttaattcaaattgattaagaagagagagaaagctgggagaattcctattgagaggtgaagccagctg

SEQ ID NO: 12046 - DNA, 80 bp, synthetic construct
  source 1..80: mol_type = other DNA
aggaatttttaagggttccagtctccagttgactgctaaagatgaatttcagtgaggtctacttgagaacacataaaagc

SEQ ID NO: 12047 - DNA, 80 bp, synthetic construct
  source 1..80: mol_type = other DNA
tcctgagacccaaataaatgtccaggctttccagaggccaaaccagagaaagtttttccaaaactttcaagtgatcacat

SEQ ID NO: 12048 - DNA, 80 bp, synthetic construct
  source 1..80: mol_type = other DNA
agacagaaggtgaaacctattgatgcttttttccccttcatcaggtttttagcatgatatagacacagttgtagtccctg

SEQ ID NO: 12049 - DNA, 80 bp, synthetic construct
  source 1..80: mol_type = other DNA
cctcagtagagtaggtaagctaaacttaaaccatgttccaattaagccgaactgcaaactgcaactgtaattcatgttag

SEQ ID NO: 12050 - DNA, 80 bp, synthetic construct
  source 1..80: mol_type = other DNA
gccatacataaattatgttacacagccttcccctggctaacatgctaagtttctaatgtgctaattggttttataattag

SEQ ID NO: 12051 - DNA, 80 bp, synthetic construct
  source 1..80: mol_type = other DNA
tcattcattattttcttacagaaaagttgtagcctgcggtaactcaaagtgagaggttttgagcgtcatgctatatttct

SEQ ID NO: 12052 - DNA, 80 bp, synthetic construct
  source 1..80: mol_type = other DNA
aaatacagtattgaatatccactctgggccaggaactgtcctgtgctacactaaaggctaaacaatttccagacagtgta

SEQ ID NO: 12053 - DNA, 80 bp, synthetic construct
  source 1..80: mol_type = other DNA
aatggaataatatttgcaaaatgcatgcctgccaatttattcccataagccttaactgcttctattgcattgtgtactgt

SEQ ID NO: 12054 - DNA, 80 bp, synthetic construct
  source 1..80: mol_type = other DNA
ggtgaggcacttcacctgtgaaaagcaggcagaacacattttgttgtgaagtgatgaagtcggatcatgaattaggaata

SEQ ID NO: 12055 - DNA, 80 bp, synthetic construct
  source 1..80: mol_type = other DNA
tacatgtcttggtgagacatttggaggaaaatcagggaaacagggttgagtttcatggttgggttggcatatagctgaaa

SEQ ID NO: 12056 - DNA, 80 bp, synthetic construct
  source 1..80: mol_type = other DNA
tttgtcagagtgtttccagaagcagttagcatttggatcagtagaccaagtaaagaaaatacgccctgagtaaagagaat

SEQ ID NO: 12057 - DNA, 80 bp, synthetic construct
  source 1..80: mol_type = other DNA
tttaacaagggagagggaaggaactgcaccatcatcatcaccttcacgaatatatcagcttattaactgatcatggctat

SEQ ID NO: 12058 - DNA, 80 bp, synthetic construct
  source 1..80: mol_type = other DNA
taatgtggcatattggaaacagcactcacttgggaattaggagatggggctctgatcttcactttgctgtcagctggttt

SEQ ID NO: 12059 - DNA, 80 bp, synthetic construct
  source 1..80: mol_type = other DNA
gacctggggcaagccacttgccctctgtaagcctcaattttcatctgtataaaacagaaataacaatgatcaccttgccc

SEQ ID NO: 12060 - DNA, 80 bp, synthetic construct
  source 1..80: mol_type = other DNA
cagtaacaaacatccataaatcagaattcatctcaaatctaggtctcccaactccaagcctagtgccactccctctacat

SEQ ID NO: 12061 - DNA, 80 bp, synthetic construct
  source 1..80: mol_type = other DNA
tgtctcctttgctgggtagtacatacaccccaaatctctctacttttcaccatttccattgatatggctctagtccaagg

SEQ ID NO: 12062 - DNA, 80 bp, synthetic construct
  source 1..80: mol_type = other DNA
tagagtgaagccagagcttcatacacaataggcacttaataggcctctttgccatcattatagaaattcttatcatcaac

SEQ ID NO: 12063 - DNA, 80 bp, synthetic construct
  source 1..80: mol_type = other DNA
ctttcccgtgatttccatagattatcatattcatgacactgtggagtgaaagcattcttctcactctctaactagaacat

SEQ ID NO: 12064 - DNA, 80 bp, synthetic construct
  source 1..80: mol_type = other DNA
ggggggattatgtgtggaattcactaatctacctggcccaataccccattagttagatttgagaaagtaagtttctaaac

SEQ ID NO: 12065 - DNA, 80 bp, synthetic construct
  source 1..80: mol_type = other DNA
tgtcaatacagcatcactacgtcatttaatggctgatggtggttatggcagccaatagtctgaggaaagcagattttccc

SEQ ID NO: 12066 - DNA, 80 bp, synthetic construct
  source 1..80: mol_type = other DNA
cttgactaccagcattggcccccatgagttcttcagtttgtcatcaacatggattctgattttattgtttgaaagttcta

SEQ ID NO: 12067 - DNA, 80 bp, synthetic construct
  source 1..80: mol_type = other DNA
ttttaacgggggggctatagtgcatcttaccaagacacaagcttaggaggtccagatataaactatagctgatgtaaaat

SEQ ID NO: 12068 - DNA, 80 bp, synthetic construct
  source 1..80: mol_type = other DNA
actgaatgccttgtaattatcaagtgtcgctcatttatctgctgctttcaactatatgtgaacgtatggatgaagaaaga

SEQ ID NO: 12069 - DNA, 80 bp, synthetic construct
  source 1..80: mol_type = other DNA
tgttttatttttccttttctttcggttcttcctaagactgaccttgctgatgcaagggggaagtgacatcccttagaggc

SEQ ID NO: 12070 - DNA, 80 bp, synthetic construct
  source 1..80: mol_type = other DNA
atgacatggaaattagcacacgagtgtcccgctttgcagcccagtcccttgatttctgtgatttgacaggaagatgatat

SEQ ID NO: 12071 - DNA, 80 bp, synthetic construct
  source 1..80: mol_type = other DNA
ctggggattttgttaatgccctttcttcatataagtttgtgtcgccttgttctcacatttgacaccaactgaaatagcct

SEQ ID NO: 12072 - DNA, 80 bp, synthetic construct
  source 1..80: mol_type = other DNA
tagaataagccagggatagaaacttaatttactctgggaatgatgctgccacaggagaatgaggtcaactccacaccaca

SEQ ID NO: 12073 - DNA, 80 bp, synthetic construct
  source 1..80: mol_type = other DNA
aatccagggtaaggaattagcccaaaggtgggcttataaacagagtcagatcctgggacttatgtgtggctgaaataaaa

SEQ ID NO: 12074 - DNA, 80 bp, synthetic construct
  source 1..80: mol_type = other DNA
cttatttcctcatatatgtacgcagataattaccacatggcattgcgaaaagtcagcctgttacatgcctgatgatacta

SEQ ID NO: 12075 - DNA, 80 bp, synthetic construct
  source 1..80: mol_type = other DNA
gttgttagcttcattacaacatctgaaatatccaatttcctctatagttgctgctgtgtttcggcagacacctttattga

SEQ ID NO: 12076 - DNA, 80 bp, synthetic construct
  source 1..80: mol_type = other DNA
tcctatttggccagctactaggcacaaaatgtttgggttcagtggatataagtccactgaggaaagttagatgctactaa

SEQ ID NO: 12077 - DNA, 80 bp, synthetic construct
  source 1..80: mol_type = other DNA
atgactttctagtacttataattattgtaactatgctgaatacttgcaaaggcctggagaatgagactcagtttactcaa

SEQ ID NO: 12078 - DNA, 80 bp, synthetic construct
  source 1..80: mol_type = other DNA
ggatgtggtattcagtggtgaatccaacctccacacatgagtatttgataaatttgctcaagtagaacttctagatgtat

SEQ ID NO: 12079 - DNA, 80 bp, synthetic construct
  source 1..80: mol_type = other DNA
tgacaaagaggaaaacagaacatggaaactacagatcaaagcctgactggacctcagtgtttatgaagaagggtagcaat

SEQ ID NO: 12080 - DNA, 80 bp, synthetic construct
  source 1..80: mol_type = other DNA
ttccatgtactgcaataacaaaccatgtatgtattgctaatcttgcacagaccaagtacatagcagtcggcactcaataa

SEQ ID NO: 12081 - DNA, 80 bp, synthetic construct
  source 1..80: mol_type = other DNA
gactgaacagaagcccttctatttcaacaatgagcagaagtctggaattgtgctatgctaactttgatgctattagggta

SEQ ID NO: 12082 - DNA, 80 bp, synthetic construct
  source 1..80: mol_type = other DNA
attatctttacacagaatgttggttttgctcacgaggattctcctggtccataccctgacatttctaaatgtccagcctt

SEQ ID NO: 12083 - DNA, 80 bp, synthetic construct
  source 1..80: mol_type = other DNA
tctattccatctccattttatctttttcactctaattcctaccatctgatcttttcctttcctttcctctcctctatcct

SEQ ID NO: 12084 - DNA, 80 bp, synthetic construct
  source 1..80: mol_type = other DNA
tcagagcaagacaactgaaatacactgagaaggtcaagagcagtggaagctgaagagataactatttgtgtgtgtgtgtg

SEQ ID NO: 12085 - DNA, 80 bp, synthetic construct
  source 1..80: mol_type = other DNA
cattaacatagctacggtacagtgtattgggttaggaaatgaatcagatggaggaaatcttcacagctccatatttctaa

SEQ ID NO: 12086 - DNA, 80 bp, synthetic construct
  source 1..80: mol_type = other DNA
ttttttctctaacttatgcaggggaatctgcttgttagtgtctttttcctttttgttgcttttaaaaattgattacctat

SEQ ID NO: 12087 - DNA, 80 bp, synthetic construct
  source 1..80: mol_type = other DNA
cagaatttggtattctcacatcgtatgtatgagcatgagttctgaaacagattgcctgagtctagctctctggtctgcta

SEQ ID NO: 12088 - DNA, 80 bp, synthetic construct
  source 1..80: mol_type = other DNA
acaaaattttcccaatatttactgccaggagcaaagtgttgtctcttaagacaaacctagacatccccttttatcagacc

SEQ ID NO: 12089 - DNA, 80 bp, synthetic construct
  source 1..80: mol_type = other DNA
ctatgaggtcagtactgttattattcctgttttaaagacgagaaaatgagaggcatgtctcatgtttagcactgggattc

SEQ ID NO: 12090 - DNA, 80 bp, synthetic construct
  source 1..80: mol_type = other DNA
aagtaaatagttcaatctgaaccaggtttattgttcatcggctggtgctgtggtactgtgccgtgcttgtgtcttttgtt

SEQ ID NO: 12091 - DNA, 80 bp, synthetic construct
  source 1..80: mol_type = other DNA
agggaacactccttccatattcactgtttataagcagagtggtcttggtgggtgcacaccttaacataaaggaagtaata

SEQ ID NO: 12092 - DNA, 80 bp, synthetic construct
  source 1..80: mol_type = other DNA
cttagttaattgggagtctctagaggagtcactcaagatagtgtttgctaattaaggcaatgcattttccagggatttgg

SEQ ID NO: 12093 - DNA, 80 bp, synthetic construct
  source 1..80: mol_type = other DNA
tttccctgtcacccatagctctaaggagaggcagagaagacactggagaaaagattatgtattgatagcccagaaaaagt

SEQ ID NO: 12094 - DNA, 80 bp, synthetic construct
  source 1..80: mol_type = other DNA
ctgccctgattgcatcaatatcacaaccatgccataagagcactacacaatcatcttttagcctcatatgcttcatcctt

SEQ ID NO: 12095 - DNA, 80 bp, synthetic construct
  source 1..80: mol_type = other DNA
gggtaggttccttttttaaatggataaatcccaagtgtctagaacagtggctgacacatggtaggaatttcagtcatctt

SEQ ID NO: 12096 - DNA, 80 bp, synthetic construct
  source 1..80: mol_type = other DNA
cagagatgttgtcagtctctttcaaacagctcattctttggaaagcatatctccgtcagatttcattcttcatacttgtt

SEQ ID NO: 12097 - DNA, 80 bp, synthetic construct
  source 1..80: mol_type = other DNA
taccagggatgtttggaacaaggtgtgttttggaattccttcttgctagaatggctatattggaatcctgtagggcatct

SEQ ID NO: 12098 - DNA, 80 bp, synthetic construct
  source 1..80: mol_type = other DNA
gcttccttaatgcagagacataggcaaatgcctttctttcagctttacgcaaagatagaagaagaatctcttacattctg

SEQ ID NO: 12099 - DNA, 80 bp, synthetic construct
  source 1..80: mol_type = other DNA
ttttgttctgcatgacagcagcctctttgttgtataataattcattccaagttcgttccaagctaccgaaactggtgaac

SEQ ID NO: 12100 - DNA, 80 bp, synthetic construct
  source 1..80: mol_type = other DNA
gaaaactaatacaatgttgacaagtagagagagtattttcacttgcccataaaaatggtccttagggagagtgaccatat

SEQ ID NO: 12101 - DNA, 80 bp, synthetic construct
  source 1..80: mol_type = other DNA
attagtagaatttcaatggcaaggaaaataaagagtcagaagaactgcatgccatgagccaatgtattgaggctgttata

SEQ ID NO: 12102 - DNA, 80 bp, synthetic construct
  source 1..80: mol_type = other DNA
acagcctgaattatggaagcctgcaactgtaacaaatgtcctgggatgaaatgtctggagccttaagctgtcatgcatga

SEQ ID NO: 12103 - DNA, 80 bp, synthetic construct
  source 1..80: mol_type = other DNA
aacagagtcttttgtacgctttgggcttgatagatattaatgaaatggaaaggtaaaggtaaatgtttcacgccctttgg

SEQ ID NO: 12104 - DNA, 80 bp, synthetic construct
  source 1..80: mol_type = other DNA
gcgtccagctgataacttttgtctttctccagtgtcattatcctagtttataacatcatcttgcaactcgatttctatag

SEQ ID NO: 12105 - DNA, 80 bp, synthetic construct
  source 1..80: mol_type = other DNA
ggcattttcttgtgggcactgggctctctctgggttctcctctgaagaagccctcttctcagatatactgtatatatgaa

SEQ ID NO: 12106 - DNA, 80 bp, synthetic construct
  source 1..80: mol_type = other DNA
tctggtactatgcaatcagctattaatacagacagaatccaaatcttcaaatccctgttctttcaattttactgttaata

SEQ ID NO: 12107 - DNA, 80 bp, synthetic construct
  source 1..80: mol_type = other DNA
atttgcagtcaatgtcagtattaaatctaggtgtaaaatgcaaaggtgcgaagtttgaatgatgcctccactttgttagg

SEQ ID NO: 12108 - DNA, 80 bp, synthetic construct
  source 1..80: mol_type = other DNA
aaagagaataacagctgcatccacactcccttccacatgatcttgttcatgagcaatatgatgacctggcatgacgtgca

SEQ ID NO: 12109 - DNA, 80 bp, synthetic construct
  source 1..80: mol_type = other DNA
ttgcaaaaatacagagccagcccaaatgcccatcaatcaatgagtggataaagaaaacgtggtaaatatacatcatggaa

SEQ ID NO: 12110 - DNA, 80 bp, synthetic construct
  source 1..80: mol_type = other DNA
tctttgcagggaacgtatatgtggcctgaatagttgagcagacagacttgggcttgctgctattaaatatgtggaatgtg

SEQ ID NO: 12111 - DNA, 80 bp, synthetic construct
  source 1..80: mol_type = other DNA
gcatttttcaacaacctctggtgatgatgctgatgttgctggtttgggtaccatgttgtgagtagcattgatctagataa

SEQ ID NO: 12112 - DNA, 80 bp, synthetic construct
  source 1..80: mol_type = other DNA
accattttttatggctacatagtattccatggtgtatatgtgccacatttttttaatccagtctatcattgttggacatt

SEQ ID NO: 12113 - DNA, 80 bp, synthetic construct
  source 1..80: mol_type = other DNA
ttattagcttaaaagtgagcagtaccaagtccaattccccagggctttttgtgcttctacaaatcatgtcaagttgctca

SEQ ID NO: 12114 - DNA, 80 bp, synthetic construct
  source 1..80: mol_type = other DNA
tgactgctctcaaaatgaagggcaatcaacagggatcagtcctgagatgatccagatattagaattagaggtcaaggatt

SEQ ID NO: 12115 - DNA, 80 bp, synthetic construct
  source 1..80: mol_type = other DNA
ttcagttactatgccgctaaataaatcctatgatttcatcttcctcccttatctccctccttccttgtcttcttctctcc

SEQ ID NO: 12116 - DNA, 80 bp, synthetic construct
  source 1..80: mol_type = other DNA
tcagtggggagcagaaagtgtacaacctaaattgtttacttcatccacaagagactgtactatgactgggattccataat

SEQ ID NO: 12117 - DNA, 80 bp, synthetic construct; identical to SEQ ID NO: 12112
  source 1..80: mol_type = other DNA

SEQ ID NO: 12118 - DNA, 80 bp, synthetic construct
  source 1..80: mol_type = other DNA
aaaactactttaaagttcatatggaaccaaaaaagagcccgcatcaccaagtcaatcctaagccaaaagaacaaagctgg

SEQ ID NO: 12119 - DNA, 80 bp, synthetic construct
  source 1..80: mol_type = other DNA
tggtattgggagtttggtttctgctttctagatagcgccttgttgctgcatcctccagagaaatgaatgctctgtcctca

SEQ ID NO: 12120 - DNA, 80 bp, synthetic construct
  source 1..80: mol_type = other DNA
aaaagttccttcagctgataaacctcttctgcaaagttttggaatacaaaattaatgcacaaaaatcacaagcattccta

SEQ ID NO: 12121 - DNA, 80 bp, synthetic construct
  source 1..80: mol_type = other DNA
caggaatgggcaaagatttcatgacgaagcttccaaaagcaattgcaacaaaagcaagaactgacaaatgggaactaatt

SEQ ID NO: 12122 - DNA, 80 bp, synthetic construct
  source 1..80: mol_type = other DNA
tactaggactagtacctgtgtgacaaaataatctgtaaaaggggcccccatgacatgagtttacctatatgacaaacctg

SEQ ID NO: 12123 - DNA, 80 bp, synthetic construct
  source 1..80: mol_type = other DNA
aaaattcctggtagaggcagacagaatgagaaaatgactatataactgagatcaaattatatccacagggagtaggatgc

SEQ ID NO: 12124 - DNA, 80 bp, synthetic construct
  source 1..80: mol_type = other DNA
gctttcatttcctgttgtctgggttcaaatctcagctgagccacttgttttatcatcagttaaagcacaggtatcaggaa

SEQ ID NO: 12125 - DNA, 80 bp, synthetic construct
  source 1..80: mol_type = other DNA
cagcagtgattctgttttgctcaagaagaataatcaaactgatgattcttcttggtgaaatattaatagttctacctact

SEQ ID NO: 12126 - DNA, 80 bp, synthetic construct
  source 1..80: mol_type = other DNA
agatcattatcctgggaattcttctttggtgcaagagtatgaggctaggtatcctctagggaacttccagggagaaatat

SEQ ID NO: 12127 - DNA, 80 bp, synthetic construct
  source 1..80: mol_type = other DNA
gacctcaggatcaggtttctccccattccctgaaggtcttctcttcttcattattctctggctgtctctatcttaaatac

SEQ ID NO: 12128 - DNA, 80 bp, synthetic construct
  source 1..80: mol_type = other DNA
aatgctgcctctgctctttccagcatgggacctaggacaacttcctaatccctccaagccttccttttctcaacaggata

SEQ ID NO: 12129 - DNA, 80 bp, synthetic construct
  source 1..80: mol_type = other DNA
tggaagttgtagactttaatggaaggtgccagggttgctaatagaatcttctcgtcacagatgaaggaaatgtaaaagcg

SEQ ID NO: 12130 - DNA, 80 bp, synthetic construct
  source 1..80: mol_type = other DNA
accaaaagacctaatcaaattttccatctttaagaagcagcttctcctttgagttgtgacaccacatccactacctactc

SEQ ID NO: 12131 - DNA, 80 bp, synthetic construct
  source 1..80: mol_type = other DNA
ggaggggcagaatgattcactatcaacatagtatcacagatagacttatcagaatcttggtgaattcattcaacagaagt

SEQ ID NO: 12132 - DNA, 80 bp, synthetic construct
  source 1..80: mol_type = other DNA
aagaaatgagaaatcagaaaagtggggggagagtggataagtgcttaacctcccacaagctgatgcctgccatcatcagc

SEQ ID NO: 12133 - DNA, 80 bp, synthetic construct
  source 1..80: mol_type = other DNA
gtaaataactcaactttagtgagagcatgtttagtgattttggaggttgccagtgggtagaaatctaaccttgagtagct

SEQ ID NO: 12134 - DNA, 80 bp, synthetic construct
  source 1..80: mol_type = other DNA
ataggcacaatggggaaataaacatcttagctgtatgttatggaaagaaaggctatgtggtagcctggagcactctgaca

SEQ ID NO: 12135 - DNA, 80 bp, synthetic construct
  source 1..80: mol_type = other DNA
tgggacctacattaagtggaaataaagacttggtaacatttagggtttgaaaggtgcccagattgatagcctgatgatgg

SEQ ID NO: 12136 - DNA, 80 bp, synthetic construct
  source 1..80: mol_type = other DNA
tttcatctgaatgtctaaactgatttggttaagtgtgagactgccaattattcagggcaactgaagatatcctcacctat

SEQ ID NO: 12137 - DNA, 80 bp, synthetic construct
  source 1..80: mol_type = other DNA
gacctgttggtactccacactcagacatggaagtggaaatccatgttctgtactatctcatcctatatctcaatgtccat

SEQ ID NO: 12138 - DNA, 80 bp, synthetic construct
  source 1..80: mol_type = other DNA
tgcaaaatagctatcatcatctcagtttgcctttacataaatggaggattgtgggatccatgtagctgttccaagctcac

SEQ ID NO: 12139 - DNA, 80 bp, synthetic construct
  source 1..80: mol_type = other DNA
agaaatgcaaatatcatctggaacttttctaacaacataatgtaactgtctggcagtcccagggagaataactgtgggga

SEQ ID NO: 12140 - DNA, 80 bp, synthetic construct
  source 1..80: mol_type = other DNA
ggtctatttctggactttctatccattacattgatctatttgtctaccctgacacccaaacacacttgcttgattactgc

SEQ ID NO: 12141 - DNA, 80 bp, synthetic construct
  source 1..80: mol_type = other DNA
tgttggctgcatgtatccacgtcgctgtgaaagcaattctttcagtgcagatactacatatattttaatttgttcctaag

SEQ ID NO: 12142 - DNA, 80 bp, synthetic construct
  source 1..80: mol_type = other DNA
ggactgtgaaagagtaaagccactttggaactctgtttggaagtttcttgtaaaacttatgcatccaccttatgactgag

SEQ ID NO: 12143 - DNA, 80 bp, synthetic construct
  source 1..80: mol_type = other DNA
tgtcattatgcttttggtaagggtcttgctgttgacatttacacatttctttggacactgctttattctctgtgttgaat

SEQ ID NO: 12144 - DNA, 80 bp, synthetic construct
  source 1..80: mol_type = other DNA
aaagtacatttagctttattccatatctttgctatcgtgaatagtgctgccataaacatatgaatgtatttttttgatgt

SEQ ID NO: 12145 - DNA, 80 bp, synthetic construct
  source 1..80: mol_type = other DNA
gtaccagtaccatgctgtttttattaccacagcctaattgtataatttgaggtcaggtaatgtgatgactccagctttga

SEQ ID NO: 12146 - DNA, 80 bp, synthetic construct
  source 1..80: mol_type = other DNA
tctaggcatattttgccaagtcaagaaggcataaaggttgctcacctgtctatctcactccttctattctggctttttcc

SEQ ID NO: 12147 - DNA, 80 bp, synthetic construct
  source 1..80: mol_type = other DNA
gtgtggggtagcaacctggaatcaaacacgttaatctgatgttctctgagaggaataaagattatagcaagtctcacatc

SEQ ID NO: 12148 - DNA, 80 bp, synthetic construct
  source 1..80: mol_type = other DNA
tgactgttcttctcaggaatttgctcttcttgcaggcacagattttaatggcttgcacagtaagtgtactaacacccaac

SEQ ID NO: 12149 - DNA, 80 bp, synthetic construct
  source 1..80: mol_type = other DNA
tgcaatgcagctacttccatttccgctcacatggcaaccacccaaatttgagacaatgattttatagatggtcataaact

SEQ ID NO: 12150 - DNA, 80 bp, synthetic construct
  source 1..80: mol_type = other DNA
gtaaatgtagtgtatatttcttggaaaatagcagttagtgagaaagctgggaccataaccgtttgagaccgggtttaacc

SEQ ID NO: 12151 - DNA, 80 bp, synthetic construct
  source 1..80: mol_type = other DNA
tcctgattctgaatggcactgcatacctagaaaagacagagcagtcaaccaagtgtcaaaccaagagataattctccaaa

SEQ ID NO: 12152 - DNA, 80 bp, synthetic construct
  source 1..80: mol_type = other DNA
gttatctccatgctgttctcgtgatgatgagtgagctctcacacaatctgatggttttataaggggcttttccccttttc

SEQ ID NO: 12153 - DNA, 80 bp, synthetic construct
  source 1..80: mol_type = other DNA
tttctatcctgttttcccagatgttgaatacctagtatatcagggtgtctggcaatggcagccaacaaagaaaaatcatg

SEQ ID NO: 12154 - DNA, 80 bp, synthetic construct
  source 1..80: mol_type = other DNA
tcacatttctaagaagtttggctcctgtaagaggaagaggcgagctggggttataggttatagggttttgcattttgctt

SEQ ID NO: 12155 - DNA, 80 bp, synthetic construct
  source 1..80: mol_type = other DNA
tagaaagtggtggcaccagaattcctggccatacaatagaatatgacctagatatagacattaacagaggaaaaactttt

SEQ ID NO: 12156 - DNA, 80 bp, synthetic construct
  source 1..80: mol_type = other DNA
actctttatcatacagggttggtgtttcacataattgggagctatactgagaatgtgaactgaacacaaaaccttaagag

SEQ ID NO: 12157 - DNA, 80 bp, synthetic construct
  source 1..80: mol_type = other DNA
gctggtttatctttcttcacagcagggcatcaggtgccattataaggatcgttgccaccattaattatttctatatgtgt

SEQ ID NO: 12158 - DNA, 80 bp, synthetic construct
  source 1..80: mol_type = other DNA
aacctcataggtattgtagaatttcacgtaatctagaatttcaagtgcctggcagaggccaaaatgggaagttttgccta

SEQ ID NO: 12159 - DNA, 80 bp, synthetic construct
  source 1..80: mol_type = other DNA
aagcatggtgacaaacaagattaaagggaatttagactttttttcagaccagcttcctcatttcagagatcaggagtcca

SEQ ID NO: 12160 - DNA, 80 bp, synthetic construct
  source 1..80: mol_type = other DNA
gacagcccctggagatacatagtaaatagggaactagatggggatgtatttgtatattcacataaaaccacaaatcttag

SEQ ID NO: 12161 - DNA, 80 bp, synthetic construct
  source 1..80: mol_type = other DNA
ataatcatcaattctccaagtattttctcaaaggcagcatatgatgggccacccactcgactactattcagaagagcatt

SEQ ID NO: 12162 - DNA, 80 bp, synthetic construct
  source 1..80: mol_type = other DNA
gtgcatgctcagcacctctcatgataaaagtggggtaagaaaaggaaactaaacatccaaacaatagctgtcagaagact

SEQ ID NO: 12163 - DNA, 80 bp, synthetic construct
  source 1..80: mol_type = other DNA
taccaatgttgaagttaatatatggtaaacacggtgcatatttatgggagggctagagaagcaaagcaataaggtttgca

SEQ ID NO: 12164 - DNA, 80 bp, synthetic construct
  source 1..80: mol_type = other DNA
atttacagaataattgggcagatagtacatagagtttcatacgcccacaccacccccaaactcggcaccttccccattat

SEQ ID NO: 12165 - DNA, 80 bp, synthetic construct
  source 1..80: mol_type = other DNA
ctggaaacttgtacttgtcttgaatcttgttgaactctcacacaatgtggttcactagaattgggtcctcacagggcatc

SEQ ID NO: 12166 - DNA, 80 bp, synthetic construct
  source 1..80: mol_type = other DNA
gacacagcaaaaagggcagagactatatttcttttggttaccattgtacacccagtacttaccacataaagatctttgcc

SEQ ID NO: 12167 - DNA, 80 bp, synthetic construct
  source 1..80: mol_type = other DNA
tattattgccattgtaaatgatttgcttcctctaatacaggtcctgcaaaaccactgcacatgcccagtaaaggccttct

SEQ ID NO: 12168 - DNA, 80 bp, synthetic construct
  source 1..80: mol_type = other DNA
gaactttccatgcagagctgttgtgaggaccaaatgagataagaattattaagtactgtttactaggaaggcctcccttg

SEQ ID NO: 12169 - DNA, 80 bp, synthetic construct
  source 1..80: mol_type = other DNA
tcaatgatgagtcgtgaaactttcctctcacctcatattcattgctacatctggtgtcatccagagttaatatccacgat

SEQ ID NO: 12170 - DNA, 80 bp, synthetic construct
  source 1..80: mol_type = other DNA
ttcaggcttgagacatgtctagaaagtaggatagaaacaaaaagatactagtgcctatctgacattttcacggaggtgtt

SEQ ID NO: 12171 - DNA, 80 bp, synthetic construct
  source 1..80: mol_type = other DNA
agagacgactccccagccagacaaggtatcctcccagtcactatcacacagtctaatttaaattctaagttaatgtaaag

SEQ ID NO: 12172 - DNA, 80 bp, synthetic construct
  source 1..80: mol_type = other DNA
atcaacctgctagggatttagactgtgtccagttttggggtattagaaacaatgctgctatgaccatctgtatgcaagtc

SEQ ID NO: 12173 - DNA, 80 bp, synthetic construct
  source 1..80: mol_type = other DNA
gtagcttcaataacaaacattcatttctcacagttttggaggctaggaagaccaagatcaaggtgtctggtgaagacttg

SEQ ID NO: 12174 - DNA, 80 bp, synthetic construct
  source 1..80: mol_type = other DNA
tatttgtttccttgtcttcttcctccttcacttgactacgtgggtgattaatggatcactgctgctttgaccaaggaata

SEQ ID NO: 12175 - DNA, 80 bp, synthetic construct
  source 1..80: mol_type = other DNA
tctccagaaggatgaacttcaaccaatgcatgacagaaggcagaagggaatagaagatacatttcctctccattttttcc

SEQ ID NO: 12176 - DNA, 80 bp, synthetic construct
  source 1..80: mol_type = other DNA
gcttaggcccatgacactccatcacgtgactggcgctaaaatataaacgttcccattttgtgtggtataagatacttgtg

SEQ ID NO: 12177 - DNA, 80 bp, synthetic construct
  source 1..80: mol_type = other DNA
aaaagtttcccctaaaagcattttacttggagaacattgatgacgtgtttttctttccaagagcaaacttttaaaatatg

SEQ ID NO: 12178 - DNA, 80 bp, synthetic construct
  source 1..80: mol_type = other DNA
tgatcatgctccctgtttagacagaggtcattcatcctaaatctggtttctgaactgtggtctagaaatcacctgaaatg

SEQ ID NO: 12179 - DNA, 80 bp, synthetic construct
  source 1..80: mol_type = other DNA
acaggtataaggtagagcaattcagctttaatttcatctcactaataagagctacccatccgcctttatacagaggttct

SEQ ID NO: 12180 - DNA, 80 bp, synthetic construct
  source 1..80: mol_type = other DNA
tagaagaaagatagtaatcatcaggtagagagagaagtcctttaaaaaggagagtggccataacccatgagtttcatttt

SEQ ID NO: 12181 - DNA, 80 bp, synthetic construct
  source 1..80: mol_type = other DNA
atatttatactgttgctctttctctggccaggaggacactcttctctcggggtctctgaatggctcaattattttatcat

SEQ ID NO: 12182 - DNA, 80 bp, synthetic construct
  source 1..80: mol_type = other DNA
actctttaccccaagtttactccaaatttcatgttatccaaaaatgtgatcaaatggatttctgtgcttcccccaagtag

SEQ ID NO: 12183 - DNA, 80 bp, synthetic construct
  source 1..80: mol_type = other DNA
gttacccatccaatcacaactcatttcaagtgacactgataaaccagaaatagaggaaaggaacaaagatatacaatgtt

SEQ ID NO: 12184 - DNA, 80 bp, synthetic construct
  source 1..80: mol_type = other DNA
gtaatatagggtgcaaaatttttatcacctaaagacacccgtcagtaaagttgaagcaatgaagcctctgtgtatattat

SEQ ID NO: 12185 - DNA, 80 bp, synthetic construct
  source 1..80: mol_type = other DNA
attggcagtcagaagcaaacttctttttttcagagtagccctcaaaaagatttcaagacctcaagagtttatgaataatt

SEQ ID NO: 12186 - DNA, 80 bp, synthetic construct
  source 1..80: mol_type = other DNA
tgtgctgtgctttagatctccagacttactcatctgacatgactgcaattttgtatccttgaactgcatctctttgtaac

SEQ ID NO: 12187 - DNA, 80 bp, synthetic construct
  source 1..80: mol_type = other DNA
ttaaaagacatatggtttgaaaatatttttccaaatccataggaagtcttttcatcttgttgattgcttccttttttgta

SEQ ID NO: 12188 - DNA, 80 bp, synthetic construct
  source 1..80: mol_type = other DNA
ttatatgtaggaaactcggaagcctccaccaaaaaacagaacagttagaataaatgtattcaataaagctgcaggataca

SEQ ID NO: 12189 - DNA, 80 bp, synthetic construct
  source 1..80: mol_type = other DNA
aaagcaataattgcccaataaaatgtaatctgaaaccctaagagacatttcagtttatcaactgtgaggtggaccctatt

SEQ ID NO: 12190 - DNA, 80 bp, synthetic construct
  source 1..80: mol_type = other DNA
atttatattactatttctacacccattacaggacttctatttctatactctagtgtatcagcaccataacctagatattt

SEQ ID NO: 12191 - DNA, 80 bp, synthetic construct
  source 1..80: mol_type = other DNA
acgaataaaaagaaatactgactagtacccaagccccagcagacattaaacactatgtatttggagtaagcccaattgca

SEQ ID NO: 12192 - DNA, 80 bp, synthetic construct
  source 1..80: mol_type = other DNA
aatagcttatgatggggcctggcataaaaagataaatttaggcaaacagatttcctctcttagcagtctgagctgtacac

SEQ ID NO: 12193 - DNA, 80 bp, synthetic construct
  source 1..80: mol_type = other DNA
atttctatgaggacacatagtactctatgtatatttacatactaggatctgcaccctgagcacacatctacacccaggac

SEQ ID NO: 12194 - DNA, 80 bp, synthetic construct
  source 1..80: mol_type = other DNA
aattcaggtgatactcaagcctggatactgttatcttccagattctttttgaagacactgctccatattcttcctttctt

SEQ ID NO: 12195 - DNA, 80 bp, synthetic construct
  source 1..80: mol_type = other DNA
actttgtttctgctagctttccttggtgtcagtctggcaggggaagtggagaatgccacctccttaatgccagatagaag

SEQ ID NO: 12196 - DNA, 80 bp, synthetic construct
  source 1..80: mol_type = other DNA
gttgtttctcgggtcttgagatccctagccaatctgccttctcttcacctttcagtcttcttatatcatcagttttacat

SEQ ID NO: 12197 - DNA, 80 bp, synthetic construct
  source 1..80: mol_type = other DNA
tgtcacataacttacattgcatttgtgagatggagatttttaaaagggacagacaaacacaatgactacctggaggacgg

SEQ ID NO: 12198 - DNA, 80 bp, synthetic construct
  source 1..80: mol_type = other DNA
atacagctatgttatgtttctttagagtacaaagcagatgttgcgaacatagactctgtaaaaaaaggcaaggtgctgat

SEQ ID NO: 12199 - DNA, 80 bp, synthetic construct
  source 1..80: mol_type = other DNA
acaaaacacacttagagaatgtatctgttacactcatagaatgcccaacaccaagtgtgaaacctattgtaaagttcgga

SEQ ID NO: 12200 - DNA, 80 bp, synthetic construct
  source 1..80: mol_type = other DNA
tggctcccacacctcaaacatcttcctctacatattactatagcattccttagttaggaatattcaatgctgacacttca

SEQ ID NO: 12201 - DNA, 80 bp, synthetic construct
  source 1..80: mol_type = other DNA
cagcatttttatggggaatagttcttaagaatgacttcatccactaagaacggtttctagaaggaaaatgaaggtatata

SEQ ID NO: 12202 - DNA, 80 bp, synthetic construct
  source 1..80: mol_type = other DNA
cacctatggctttttttttcctggttcatcagtttgtgtcctaactatatatctacgcttgactcacaaaacaccaggtc

SEQ ID NO: 12203 - DNA, 80 bp, synthetic construct
  source 1..80: mol_type = other DNA
gtttaattctgtttgtctttctccccctaatcatttgactcctctaggacagcgactgttacacaattaattgttagaac

SEQ ID NO: 12204 - DNA, 80 bp, synthetic construct
  source 1..80: mol_type = other DNA
tggattatttttgcctaagaaaactagtatcagtacagactgatgctatgagaacacagaggaagtccaaccaattaggt

SEQ ID NO: 12205 - DNA, 80 bp, synthetic construct
  source 1..80: mol_type = other DNA
ttcatactgttcacaggtatcatctctgggaaagggggtgagtcctgcagtaaagggattgaagacctttcaagtttata

SEQ ID NO: 12206 - DNA, 80 bp, synthetic construct
  source 1..80: mol_type = other DNA
atggaacttccctattccttgaatcttgatggctacttgacagcaagatgcaacagaaagacttctctgtactacaggaa

SEQ ID NO: 12207 - DNA, 80 bp, synthetic construct
  source 1..80: mol_type = other DNA
ggtggccaccacaagctacacttattaaacaactcattagtagcattttcaatactgtcatcttcagataattagcaatt

SEQ ID NO: 12208 - DNA, 80 bp, synthetic construct
  source 1..80: mol_type = other DNA
ttagactgaaataacttgagaacctattaagtaccagttgctctgctaaattattcactcgttatttatatcctcacgac

SEQ ID NO: 12209 - DNA, 80 bp, synthetic construct
  source 1..80: mol_type = other DNA
aggctgtacagcagttgatggcgttttgttctcttctttggcctgtacaactctcaaagatgtggtgtggacaaggacat

SEQ ID NO: 12210 - DNA, 80 bp, synthetic construct
  source 1..80: mol_type = other DNA
tgctatttactgccaataaaaatatttctcaggggacactaaagagaatctgtactctttatacatgtccctgtctgcag

SEQ ID NO: 12211 - DNA, 80 bp, synthetic construct
  source 1..80: mol_type = other DNA
gaggatgtgcctcaaccaaatggatgataaaaactagtagtgatttgtatagccactgagtaggcatgaatttctaatgt

SEQ ID NO: 12212 - DNA, 80 bp, synthetic construct
  source 1..80: mol_type = other DNA
gtacagaaagtgtacacaggaaaatctgaaatccatccgtgatgagaactgtaagcaaaacaagggtgagactatcctca

SEQ ID NO: 12213 - DNA, 80 bp, synthetic construct
  source 1..80: mol_type = other DNA
aggcaggaagtcagttcaatgaggggaaaaaagccattctaacaaatggtgtgagaaaagcaggatatttttaagaggaa

SEQ ID NO: 12214 - DNA, 80 bp, synthetic construct
  source 1..80: mol_type = other DNA
ttcctagatattcactcaacagtgaaaacagaactaaaaaagtatatgtacaaaaatgttcatgacagccttacccataa

SEQ ID NO: 12215 - DNA, 80 bp, synthetic construct
  source 1..80: mol_type = other DNA
cccatctccagtaaaaatacaaaatcagttggtcatggtggcaggcgcctctccagcaacttggaaggctgaggcaggag

SEQ ID NO: 12216 - DNA, 80 bp, synthetic construct
  source 1..80: mol_type = other DNA
tctgatgaaatttcaggctcttgtcaaattgaggtcattactttgtctactggcatggatatgcaggcaaattggccagt

SEQ ID NO: 12217 - DNA, 80 bp, synthetic construct
  source 1..80: mol_type = other DNA
gaaaaaaatgatgtatttcccatatccagcacaaactgaactagagaaacatattatgattgccaaaaaacgggctatca

SEQ ID NO: 12218 - DNA, 80 bp, synthetic construct
  source 1..80: mol_type = other DNA
ctttgacaaattcttaaaatactccttgtaattagagacagggtaaattggatgagaagtatatagggattctctccact

SEQ ID NO: 12219 - DNA, 80 bp, synthetic construct
  source 1..80: mol_type = other DNA
aaaatttaatttcaggttactccagaaactatggcaaccaggctgtttggcagccaaagggtgtaaaatccagattagat

SEQ ID NO: 12220 - DNA, 80 bp, synthetic construct
  source 1..80: mol_type = other DNA
ttgccgtttttttttttcagatgggaaaacaaatctagagtggctgagtaatctaaccaggggaaactggtaagtggtgg

SEQ ID NO: 12221 - DNA, 80 bp, synthetic construct
  source 1..80: mol_type = other DNA
tagctcccaagcttctctctccctcccttcctcatccttccttctctctttcttttatatttccctcttgatatggtttg

SEQ ID NO: 12222 - DNA, 80 bp, synthetic construct
  source 1..80: mol_type = other DNA
aaagagagagagagcacgtgagttatgtaaatatacatataccatatctctatatagtgtgcatatgtatatgtgtgtgt

SEQ ID NO: 12223 - DNA, 80 bp, synthetic construct
  source 1..80: mol_type = other DNA
aggagttcataattgtgatctaaaagtgatacctgcttaagttgacttttgctccttctttgtctcatatttcctcctcc

SEQ ID NO: 12224 - DNA, 80 bp, synthetic construct
  source 1..80: mol_type = other DNA
gatcaaagtattcaatcaaggttgggcagtgacttaggattagcagatgagatcaggtggcataatgggaggcaaagtca

SEQ ID NO: 12225 - DNA, 80 bp, synthetic construct
  source 1..80: mol_type = other DNA
gtaataatagaaatagtcagctaataagtactataggcattaaaacactggatgacaggtgtgaagacttcttgttataa

SEQ ID NO: 12226 - DNA, 80 bp, synthetic construct
  source 1..80: mol_type = other DNA
cacatgacaaacaagtcactggcaaaatgtctggagttctctttccatgtagcttttcgaagtagattcagaaaaggctt

SEQ ID NO: 12227 - DNA, 80 bp, synthetic construct
  source 1..80: mol_type = other DNA
accaaatattacatcctttggggagcactcctagaccatcctcaatcaccagattcctttctttttgttctctctagcat

SEQ ID NO: 12228 - DNA, 80 bp, synthetic construct
  source 1..80: mol_type = other DNA
gttctcagtgttgggttatagtgtcaatgcaagacttgagctgtgttaattcaacaagcttgatcttgattgccaaagca

SEQ ID NO: 12229 - DNA, 80 bp, synthetic construct
  source 1..80: mol_type = other DNA
atgactaaagataaaatcagatcaatgctgcaacaatgagaatcaggctgaaatggaagagccagatcatgatctagatt

SEQ ID NO: 12230 - DNA, 80 bp, synthetic construct
  source 1..80: mol_type = other DNA
tttgccttgtcccttcaattttaccccaatagatagtaatagcaagactgtcccgttcatccgtggacagtgccattatt

SEQ ID NO: 12231 - DNA, 80 bp, synthetic construct
  source 1..80: mol_type = other DNA
aatctgtgtcatttgttcctttgagttcagaagggtattaataaatgcccctaggcagcagtatccaattggcttagcat

SEQ ID NO: 12232 - DNA, 80 bp, synthetic construct
  source 1..80: mol_type = other DNA
ccttttttatagctgcatagtattccacggtgtatatgtgccacattttcttaatccagtctatcattgatagacatttg

SEQ ID NO: 12233 - DNA, 80 bp, synthetic construct
  source 1..80: mol_type = other DNA
tctcatatacaaaatatgttcattccatcccaatggctttaacccattccagcacgaactcctaagtccaaagtccagag

SEQ ID NO: 12234 - DNA, 80 bp, synthetic construct
  source 1..80: mol_type = other DNA
accctgccttcaatgtcctacctaacttgccttgaagatctcagaaatgcctccatggtcattctcccatagtcttgatg

SEQ ID NO: 12235 - DNA, 80 bp, synthetic construct
  source 1..80: mol_type = other DNA
ggagggaggggcacaattcagtacacagcgctcaatatctttccaagtaaattacttcatcagcaaatttatgataagat

SEQ ID NO: 12236 - DNA, 80 bp, synthetic construct
  source 1..80: mol_type = other DNA
caggaagatttctgctcttaatacctgcctcttttattctttccccaagtgtttattgagtgcctactactacataccag

SEQ ID NO: 12237 - DNA, 80 bp, synthetic construct
  source 1..80: mol_type = other DNA
ccctactcactactgttttgtaccttaccacatcctcaaatagctgcattctcctttctcccacttggtgaactattgaa

SEQ ID NO: 12238 - DNA, 80 bp, synthetic construct
  source 1..80: mol_type = other DNA
tttaactgagtaaacgatcatcaacctctcctaaacatgttaagaagttcatttccgtctgaattgtcctgacaaatact

SEQ ID NO: 12239 - DNA, 80 bp, synthetic construct
  source 1..80: mol_type = other DNA
tgtaaatctttgcttttgtgtgtttacctgtcatggactttaaacagtgtggagagaggactaaggaaggtggtaagcta

SEQ ID NO: 12240 - DNA, 80 bp, synthetic construct
  source 1..80: mol_type = other DNA
ttgggccatgggggcagatctctcatgaagggtgtggtaccatccctgtggtaatgcatgagttctagcaatctattatt

SEQ ID NO: 12241 - DNA, 80 bp, synthetic construct
  source 1..80: mol_type = other DNA
actgcaataggtaatggagtgaaaagtataagaatctaggattcagagggcaagaggttctactcccaattttgtcactt

SEQ ID NO: 12242 - DNA, 80 bp, synthetic construct
  source 1..80: mol_type = other DNA
tgtgacctaagtaaactaaatagcttcagcacagcaaaagaaattaccaacagcttaaacagagagcctacagaatggga

SEQ ID NO: 12243 - DNA, 80 bp, synthetic construct
  source 1..80: mol_type = other DNA
acaacagacacttgggactaccagagaaagggaggaaggaaaggaggtaagggttgaaaaacaactcactgggtactaag

SEQ ID NO: 12244 - DNA, 80 bp, synthetic construct
  source 1..80: mol_type = other DNA
tgtgattgcctagttcaccttatgtgactaactctgactaatgtgccagtgttaagtgtttactgtcaattcatctcatg

SEQ ID NO: 12245 - DNA, 80 bp, synthetic construct
  source 1..80: mol_type = other DNA
agaaacaaagttttctgttatgtagtaatgatgcaaagggctagagaaatctataaccctgaattctgacagtgcagata

SEQ ID NO: 12246 - DNA, 80 bp, synthetic construct
  source 1..80: mol_type = other DNA
ttgagacaggaaactgaaagcaaggaaatgaaatgaaagtctgcatattgaaagctgggactaccattcatccactgatc

SEQ ID NO: 12247 - DNA, 80 bp, synthetic construct
  source 1..80: mol_type = other DNA
tagggggagcaggggcctggataggttagtcaatgaatacaaagttatagttaggaagaaacatttctgttgtttcatta

SEQ ID NO: 12248 - DNA, 80 bp, synthetic construct
  source 1..80: mol_type = other DNA
taagtcccagaaaaataagtaaatatactaagggtgagaaatgtatgggatccagaaatagagggtttaacacacataag

SEQ ID NO: 12249 - DNA, 80 bp, synthetic construct
  source 1..80: mol_type = other DNA
aagctttcctttaccattttctctttttttcagagatgcagaggttgtttaatattaggaaatacattaatattatttta

SEQ ID NO: 12250 - DNA, 80 bp, synthetic construct
  source 1..80: mol_type = other DNA
aattggtttaaataatctgttatgtatgtcctttttcacctttcatctaggtgaaaaagttgcttagtgattttttcctg

SEQ ID NO: 12251 - DNA, 80 bp, synthetic construct
  source 1..80: mol_type = other DNA
ctttttcatattggatacagttatatagtatattatgttaataatgttcataatattaagccatctttgcattcctggaa

SEQ ID NO: 12252 - DNA, 80 bp, synthetic construct
  source 1..80: mol_type = other DNA
aacaagagcaatcctgcttgccttaaagtaggtataaaagtgccaagtgcttcatttctctatttttatctattcgtagt

SEQ ID NO: 12253 - DNA, 80 bp, synthetic construct
  source 1..80: mol_type = other DNA
cattcttaaagaaaagaattttcaacccagaatttcatatccagccaaactaagcttcataagtgaaggagaaataaaat

SEQ ID NO: 12254 - DNA, 80 bp, synthetic construct
  source 1..80: mol_type = other DNA
cccatctttgtggttttatctacttttggtctttgatgatggtgatgtacagatgggtttttggtgtggatgtcctttct

SEQ ID NO: 12255 - DNA, 80 bp, synthetic construct
  source 1..80: mol_type = other DNA
gtagatcttcctccatccttttattttgagcctatgtgtgtctctgcacgtgagatgggtttcctgaatacagcacactg

SEQ ID NO: 12256 - DNA, 80 bp, synthetic construct
  source 1..80: mol_type = other DNA
ttggccttaacaaacatctactgaattagatgctctaattccaagaatctgtgtatttgaaaagctcctcaggtgactat

SEQ ID NO: 12257 - DNA, 80 bp, synthetic construct
  source 1..80: mol_type = other DNA
gcatctgccttgaaaagtacatatgtttctttgtgttatttctcagtatattaatatgagaaatgcatgaagcacagagg

SEQ ID NO: 12258 - DNA, 80 bp, synthetic construct
  source 1..80: mol_type = other DNA
agatgtttataatccaaacaggtcagtcatcaaccgaatgtgctaaatgaactgagactaattaggaacattccttggac

SEQ ID NO: 12259 - DNA, 80 bp, synthetic construct
  source 1..80: mol_type = other DNA
cattttggagaaagatctgagtatgaacccagactatgacatatcctggttatgtaaactctggcaagtttcttaagtat

SEQ ID NO: 12260 - DNA, 80 bp, synthetic construct
  source 1..80: mol_type = other DNA
ggttcttctgtctcaactcctctgtttcaacagtctttcccttactttcgaaaaaaagcatatttttcattgatctcaaa

SEQ ID NO: 12261 - DNA, 80 bp, synthetic construct
  source 1..80: mol_type = other DNA
gggattatgtcttttgctagcacttgaacttactgctaaaattctcaggtcaactaaaatgagtgaggagtatatggttt

SEQ ID NO: 12262 - DNA, 80 bp, synthetic construct
  source 1..80: mol_type = other DNA
atactaatctttcttcatctactgttctcaaagtgtggttcccagatcggtagcaaaagcatcatctggaacttgttagc

SEQ ID NO: 12263 - DNA, 80 bp, synthetic construct
  source 1..80: mol_type = other DNA
actgtgacatggtgaactgtttctgaagcttacagagatgtgtagttctaaattaaacagccactgacgtgtacctacac

SEQ ID NO: 12264 - DNA, 80 bp, synthetic construct
  source 1..80: mol_type = other DNA
atgaatatggcagctgagtcccagatgaaaaattatgcatctcataaactgctattctgctgaaatgtcaagccaaggca

SEQ ID NO: 12265 - DNA, 80 bp, synthetic construct
  source 1..80: mol_type = other DNA
gtgggttacactggatttgtgtttacgtaatgcccagtagcacagtgtatgctgccaagttattattgcattctaacaat

SEQ ID NO: 12266 - DNA, 80 bp, synthetic construct
  source 1..80: mol_type = other DNA
aaaacttcaaatgaattcaccccattgaaaaatgcttgaatactgtttctcccgaagcacctgtaaatgaataaaggtta

SEQ ID NO: 12267 - DNA, 80 bp, synthetic construct
  source 1..80: mol_type = other DNA
agtgaggtcctaatttgctctcttgatgtaacttttaagctacagcaggtagaagttatctttctatagtcttattgact

SEQ ID NO: 12268 - DNA, 80 bp, synthetic construct
  source 1..80: mol_type = other DNA
tcctttaaaatgttagggattttttgttgtttaaaatgaaagttctacccaggcttacctaagcttatagcccaagtgaa

SEQ ID NO: 12269 - DNA, 80 bp, synthetic construct
  source 1..80: mol_type = other DNA
caggaccttgagattaaaacctctctttctttttcaaattcaagcgtatgctgatgagaaagagcgtgcaaaggtgtgag

SEQ ID NO: 12270 - DNA, 80 bp, synthetic construct
  source 1..80: mol_type = other DNA
tatttggtgttattttccaggtaatttacaatgtctttgcaagtcagggtgcaatttccctgggatggaacacaagcacg

SEQ ID NO: 12271 - DNA, 80 bp, synthetic construct
  source 1..80: mol_type = other DNA
tgatcaaaatgtgtactggaacaacagcaaagctggagacgtgcaagacaaatccaacttgacaatgagctacatgatat

SEQ ID NO: 12272 - DNA, 80 bp, synthetic construct
  source 1..80: mol_type = other DNA
tgagatttgtaatgttataacctttagaaagaaccttctcacttaggtttaatgtgtcttgatccatcatcctgtattac

SEQ ID NO: 12273 - DNA, 80 bp, synthetic construct
  source 1..80: mol_type = other DNA
gtaaagttgacggtgttcacatatatttttctcatcttcatacttaggcaagccagctgctgactaatcatcacagccaa

SEQ ID NO: 12274 - DNA, 80 bp, synthetic construct
  source 1..80: mol_type = other DNA
gctttctaaaggcattaatgcttctccctgaacatgatttgcaatctctgtcacagtagttgcttgtcttgtgtgtgtgt

SEQ ID NO: 12275 - DNA, 80 bp, synthetic construct
  source 1..80: mol_type = other DNA
tcatatgacatgccaagaggtggctagaattttcattacatccatgtttctgatggaaagaactggggcccagaagatca

SEQ ID NO: 12276 - DNA, 80 bp, synthetic construct
  source 1..80: mol_type = other DNA
tgctgagactgagaattaggctggaggagcaattaagtggaaataagtataagaaaatttttgagggtaatggaaatgtt

SEQ ID NO: 12277 - DNA, 80 bp, synthetic construct
  source 1..80: mol_type = other DNA
tatagggagcttttgaggtgttggagatgttctatttcttgacctggtggtcacatggtgtgcacattatgagttgttaa

SEQ ID NO: 12278 - DNA, 80 bp, synthetic construct
  source 1..80: mol_type = other DNA
agaaagtggcattgtaggtaatgtgggttctacccttttggcaaatatttattgaccatgaggcactacaaattttccgt

SEQ ID NO: 12279 - DNA, 80 bp, synthetic construct
  source 1..80: mol_type = other DNA
catgacaaatccttccatctcacttcagcataggatggattagtaaatgactgcctctttagtgctcctataatgtttct

SEQ ID NO: 12280 - DNA, 80 bp, synthetic construct
  source 1..80: mol_type = other DNA
ccagctcacttctttactctcaaatggcagtgttaattgtagagatcagccctgaaagctgttcaaatttcagatctcct

SEQ ID NO: 12281 - DNA, 80 bp, synthetic construct
  source 1..80: mol_type = other DNA
ccagtgaatgatagcaaaactgtagtacaagggtctagctatttccggtgaatgtgggactcctctaataggcacttttt

SEQ ID NO: 12282 - DNA, 80 bp, synthetic construct
  source 1..80: mol_type = other DNA
ctcattccaattctttgtctcttacagatgcaatcaatgacaaaccctttaaaacatcactgagaggctgggcacattgg

SEQ ID NO: 12283 - DNA, 80 bp, synthetic construct
  source 1..80: mol_type = other DNA
tcttcacaggcaaacaaaaaactcttcgagagccatacattggccatatttcgcagtaattaggacacctccaaatcttc

SEQ ID NO: 12284 - DNA, 80 bp, synthetic construct
  source 1..80: mol_type = other DNA
aactgcaatcccttggcaatgaatggttccgactaaggagaactcatccataacaagttggtatagttctttaaagaatt

SEQ ID NO: 12285 - DNA, 80 bp, synthetic construct
  source 1..80: mol_type = other DNA
ttcaaagaacatctttatttctgccttcatttcgttatgtacccagtagtcattcaggagcaggttgttcagtttccatg

SEQ ID NO: 12286 - DNA, 80 bp, synthetic construct
  source 1..80: mol_type = other DNA
atatccttgatgaacattgatgcaaaaatcctcaataaaatactggcaaaccgaatccagcagcacatcaaaaagcttat

SEQ ID NO: 12287 - DNA, 80 bp, synthetic construct
  source 1..80: mol_type = other DNA
aaataatgccgcatatctacaactatctgatctttgacaaacctgagaaaaacaagcaatggggaaaggattccctattt

SEQ ID NO: 12288 - DNA, 80 bp, synthetic construct
  source 1..80: mol_type = other DNA
agatcacatggacacaggaagaggaatatcacactctggggactgtggtggggtggggggaggggggagggatagcattg

SEQ ID NO: 12289 - DNA, 80 bp, synthetic construct
  source 1..80: mol_type = other DNA
ggtgtgtctgtgtaaaaagagagttctctattttaatctttcaggtgtcaaggaaaggaaacatggcgaggttaccccat

SEQ ID NO: 12290 - DNA, 80 bp, synthetic construct
  source 1..80: mol_type = other DNA
ttcccttcctatttgcaggaaatttaaatcatatgaagcattggtaggacacaggaactatccccatttcgcaagtcttt

SEQ ID NO: 12291 - DNA, 80 bp, synthetic construct
  source 1..80: mol_type = other DNA
tatcccaactcaactttacagaagtgcctgaagcctacattgttgataaaacagttgatgaagttttcatgggggaaaaa

SEQ ID NO: 12292 - DNA, 80 bp, synthetic construct
  source 1..80: mol_type = other DNA
cagtgaaggtgattgtagtttggaatcttgagggattcacaaaatcactggctggagtagagcctatggaaaaatgtatg

SEQ ID NO: 12293 - DNA, 80 bp, synthetic construct
  source 1..80: mol_type = other DNA
acttatgggaatgtagttatagacacctaataagatggaaggcagattgcaaggggttaagaaattaatatttgcaaaca

SEQ ID NO: 12294 - DNA, 80 bp, synthetic construct
  source 1..80: mol_type = other DNA
tgttgagattatttccaggttttgttataaataacatggcactaaatctcttctaataggtggtgctcatacattgcctt

SEQ ID NO: 12295 - DNA, 80 bp, synthetic construct
  source 1..80: mol_type = other DNA
tatgtttaactcccaggccagagtttattaatgttgtttcctccatccacaatatccatcccattcatatcacacacact

SEQ ID NO: 12296 - DNA, 80 bp, synthetic construct
  source 1..80: mol_type = other DNA
acaagcatattcaaaataaagtatatgtctctttgggatgtaatcagcattacaaatgtacactgctaacattctttatt

SEQ ID NO: 12297 - DNA, 80 bp, synthetic construct
  source 1..80: mol_type = other DNA
attcattcactccacaaatatgtattcaactgctactctatctgccagagctcgacagtaataagacaaagctacttttc

SEQ ID NO: 12298 - DNA, 80 bp, synthetic construct
  source 1..80: mol_type = other DNA
caggagttcagagccagcctacgtaacaaagacctcttctctacagaaaaagaggaaattaaaaagttagtcaggcgtgg

SEQ ID NO: 12299 - DNA, 80 bp, synthetic construct
  source 1..80: mol_type = other DNA
agctgcttctctacaatgaggcacacatcctgtctattcctgtagtctctgagctagttctgcttctgttttacaattta

SEQ ID NO: 12300 - DNA, 80 bp, synthetic construct
  source 1..80: mol_type = other DNA
ttaatatgtaattctgtaagaaacttgaatcatgcagtgagggtatgtgaatgactcacatggctaagaatgagttgaac

SEQ ID NO: 12301 - DNA, 80 bp, synthetic construct
  source 1..80: mol_type = other DNA
tttttaagtacagtttttgaaagttgatgggtcctagccaaaaaagagaagttctggataaatttgatggtgactcagac

SEQ ID NO: 12302 - DNA, 80 bp, synthetic construct
  source 1..80: mol_type = other DNA
aacgacagaatgcctgtcactgtgacaaacttctagagaaaatatttcctgtgtttttcatcatgctttcctttgcagcc

SEQ ID NO: 12303 - DNA, 80 bp, synthetic construct
  source 1..80: mol_type = other DNA
ccccatagccctctgcattaccttttccactcagccaattcaacagataggtatcaaaataactctaaatttcttgcatt

SEQ ID NO: 12304 - DNA, 80 bp, synthetic construct
  source 1..80: mol_type = other DNA
acttaggaacaaggtgaaaatggaacagcagagggtagaaactgaagtggtcacagagatgggattgaatggaaaaatac

SEQ ID NO: 12305 - DNA, 80 bp, synthetic construct
  source 1..80: mol_type = other DNA
ctcattcacctaggcctcctaagacagccctctgatttccactgttctaagacagaacaccttcaaacgagatcttagct

SEQ ID NO: 12306 - DNA, 80 bp, synthetic construct
  source 1..80: mol_type = other DNA
gagggtaggggtgatgcaataggtaggacaaaatgctacaagtttttatattttagaaggaactttgtcccccttggacc

SEQ ID NO: 12307 - DNA, 80 bp, synthetic construct
  source 1..80: mol_type = other DNA
ataacagaataaaaattctgttgaagaaaggcttgtgccttttgactgaatgggctcactaagactcagacaggattaat

SEQ ID NO: 12308 - DNA, 80 bp, synthetic construct
  source 1..80: mol_type = other DNA
tatcaaacaagaaaagacatatagggaaaaagtgggaaatgatataaaaacacaacgatggccaggcatggtggctctgc

SEQ ID NO: 12309 - DNA, 80 bp, synthetic construct
  source 1..80: mol_type = other DNA
acacaggatatacataggaacccatggaattttcatctctctaagttcttttactgaacagagaccacaccattaaagag

SEQ ID NO: 12310 - DNA, 80 bp, synthetic construct
  source 1..80: mol_type = other DNA
ttactaaggctttttctttctagaaaatcactgaaacattcttattacttcatacagcttcacagtgctaagcaaagtcg

SEQ ID NO: 12311 - DNA, 80 bp, synthetic construct
  source 1..80: mol_type = other DNA
cttgtatgtgtgtgtttaattgtcccagctatcttctatgaactgagaaaggccttcttttgtttgaatgtgacagatca

SEQ ID NO: 12312 - DNA, 80 bp, synthetic construct
  source 1..80: mol_type = other DNA
cttgctagtaaccattctaaggaattctagaagtagggcagtatgattccaaataaatatggtttattttttgaatagac

SEQ ID NO: 12313 - DNA, 80 bp, synthetic construct
  source 1..80: mol_type = other DNA
gacattagtgttaaagatgagatggaatcatgcttcccattctatttgtcattgcttttcttcactcaacaaaatgggct

SEQ ID NO: 12314 - DNA, 80 bp, synthetic construct
  source 1..80: mol_type = other DNA
tctcttctaccataaatgggcatttggttgtttctagtttttaaattattactatatcttctcttaagtggttgctcgat

SEQ ID NO: 12315 - DNA, 80 bp, synthetic construct
  source 1..80: mol_type = other DNA
atgacatgatgttttctttcggttaagccaacctggatttactgagataagctccatgttgtcatgccatattcatcttt

SEQ ID NO: 12316 - DNA, 80 bp, synthetic construct
  source 1..80: mol_type = other DNA
tcatggatgttaagaaggcattgtcacaattaaggtttttgagaaaatcctttccaagaggatgttttccatcaacaaac

SEQ ID NO: 12317 - DNA, 80 bp, synthetic construct
  source 1..80: mol_type = other DNA
ttgctcaacttttctatcctgcagtttcctgatctagaaagtacgaataatagtacactagctcagagagttgtttgagg

SEQ ID NO: 12318 - DNA, 80 bp, synthetic construct
  source 1..80: mol_type = other DNA
aaacagaaagacaaagttaatttttaagcaaaattcagtgagagaaaccagtctcagagctgaagaccactcctcttgta

SEQ ID NO: 12319 - DNA, 80 bp, synthetic construct
  source 1..80: mol_type = other DNA
accgatactgtgtgcttttaaaaatgagtgtgtcatgtcaaagacttgtaaaatgggagcagtgccttaccaaggctgag

SEQ ID NO: 12320 - DNA, 80 bp, synthetic construct
  source 1..80: mol_type = other DNA
aatggagaattagcaaacacgatagggagagaaacaaaatcaaacgtgtttcaggagaaacaggattagaaaagagaatg

SEQ ID NO: 12321 - DNA, 80 bp, synthetic construct
  source 1..80: mol_type = other DNA
ttttttttccccttccctactttgtgggatgatgtttgattgttttttattgccatcagcattggcactcctccggacac

SEQ ID NO: 12322 - DNA, 80 bp, synthetic construct
  source 1..80: mol_type = other DNA
aagacacctcggtggggttttttcccccttttaaagcctttcctaaataataaacttctgtccagagcagtttcttaatc

SEQ ID NO: 12323 - DNA, 80 bp, synthetic construct
  source 1..80: mol_type = other DNA
tggatacaacccttgcttatataggacaacagatgtgtaaaaggaagtcacagtcagctgttttgacatctttcatcctc

SEQ ID NO: 12324 - DNA, 80 bp, synthetic construct
  source 1..80: mol_type = other DNA
agcaattttgaaatgtacaataaatggttatttactatattcaccatgttttacaatatatctcatagtaaaaagaaccc

SEQ ID NO: 12325 - DNA, 80 bp, synthetic construct
  source 1..80: mol_type = other DNA
tttatggcccaaaaatattttcttcaaatccatgggttgcttcttcactctgttaattgtttcctttgctgtgcagaagc

SEQ ID NO: 12326 - DNA, 80 bp, synthetic construct
  source 1..80: mol_type = other DNA
actcctctttgtacctctggtagaattcggctgtgaatctgtctggtcctggactttttttggttggtaggctattaatt

SEQ ID NO: 12327 - DNA, 80 bp, synthetic construct
  source 1..80: mol_type = other DNA
acctatctatgaggactttcaaaactgaatagacccagtagcaacaaatagggagaaaggggcaaaaactcaagcaatca

SEQ ID NO: 12328 - DNA, 80 bp, synthetic construct
  source 1..80: mol_type = other DNA
tccaccagttcttccaatattctaggccagtcagatcacgtaactagaccctcccttttcctgccaatattcatttctta

SEQ ID NO: 12329 - DNA, 80 bp, synthetic construct
  source 1..80: mol_type = other DNA
tgaatatggctaacatcagattttagtcacttttgcagaagcttataccacacagtcatttctcatgtttcttcatggaa

SEQ ID NO: 12330 - DNA, 80 bp, synthetic construct
  source 1..80: mol_type = other DNA
gacttttcagctgttttggttttaaaaaagtgtcttcatattgtctcctccacagacatctatgggggtctgatccaagc

SEQ ID NO: 12331 - DNA, 80 bp, synthetic construct
  source 1..80: mol_type = other DNA
aattgtatgcaaaaaggtatagtagggagtagccagggcaatgcgttgacttttcctgcttgaccagaaactttgatacg

SEQ ID NO: 12332 - DNA, 80 bp, synthetic construct
  source 1..80: mol_type = other DNA
caaaggcctactcgaggtctattcagtactagcctgaactgggtaagaaggttctgcaggatggaagtaaaatatgtaat

SEQ ID NO: 12333 - DNA, 80 bp, synthetic construct
  source 1..80: mol_type = other DNA
tattttcacctttgcttaagcatcagggttattgacaccgttaactaaaatggaagcgcagcctccagtataaaagacca

SEQ ID NO: 12334 - DNA, 80 bp, synthetic construct
  source 1..80: mol_type = other DNA
gctgaggtgttttaagatttgatatgaagctttgttttgcaggaatacacaatgcaatttcccaaggtcagcttgagatt

SEQ ID NO: 12335 - DNA, 80 bp, synthetic construct
  source 1..80: mol_type = other DNA
taagacacttaatggctgagtaaattcagatgtgctcatatagcaaaagcctactccaaaaaataaactcaggtgggact

SEQ ID NO: 12336 - DNA, 80 bp, synthetic construct
  source 1..80: mol_type = other DNA
gggcctctgagtttaattcaaatcaatttgatgacttgagagaaaaaaaaaaaggtggggacctactaagtacaagatcc

SEQ ID NO: 12337 - DNA, 80 bp, synthetic construct
  source 1..80: mol_type = other DNA
ccagggcatctgctccagaatcctttaaacaagaaaggaaaatgaaagaaaaggcaaagctttatttatataccaatagg

SEQ ID NO: 12338 - DNA, 80 bp, synthetic construct
  source 1..80: mol_type = other DNA
atttcaagaccagccaggcaacacagtgaaaccccatctctaccaaaatacaaaagattagctgggtgtggcggcctgtg

SEQ ID NO: 12339 - DNA, 80 bp, synthetic construct
  source 1..80: mol_type = other DNA
agtgtcaactgtggataatatgacctgtctcaaaaccatgtcatgcggtaattaccagcttagtgaaaagattgtatagt

SEQ ID NO: 12340 - DNA, 80 bp, synthetic construct
  source 1..80: mol_type = other DNA
acatatacaaatgcccactcaccaaacacacctggcaaggcctttgaaatgtgtatccaagcctcaaaaacagacaatgc

SEQ ID NO: 12341 - DNA, 80 bp, synthetic construct
  source 1..80: mol_type = other DNA
ctatccatccaaatagacctctgacttgtccttcctctgccttgatatgaaaatgatttaagataactcacctggtccta

SEQ ID NO: 12342 - DNA, 80 bp, synthetic construct
  source 1..80: mol_type = other DNA
ccagattcaggtaaagaaactgataggaaactggcttgttagtgttttagtgttttattttggccccgccaggaatagtg

SEQ ID NO: 12343 - DNA, 80 bp, synthetic construct
  source 1..80: mol_type = other DNA
aggcaggcagggcaggggccaagtagcacttaatggtcaagttaagggttctgaaattaggaaagatggaaagaatttgg

SEQ ID NO: 12344 - DNA, 80 bp, synthetic construct
  source 1..80: mol_type = other DNA
gctcagtttggcatatatctgattgctccctattactcatctttgttttggctagccagggactttatacatagtaggtg

SEQ ID NO: 12345 - DNA, 80 bp, synthetic construct
  source 1..80: mol_type = other DNA
ctgctctcctatggagagattttgcagactgttttgattgaacaaaaggcataccttttcctcccttctttctttttttt

SEQ ID NO: 12346 - DNA, 80 bp, synthetic construct
  source 1..80: mol_type = other DNA
tattatggaaaacctgctgactagtgttccattcaggagcattctgtcccgctcttttatgcatgtctgtattcaaacta

SEQ ID NO: 12347 - DNA, 80 bp, synthetic construct
  source 1..80: mol_type = other DNA
taatggagactgtatagagtagtaattaccaatgcctcctctgaaactaggatgtccaggttagaaccctgactctgtca

SEQ ID NO: 12348 - DNA, 80 bp, synthetic construct
  source 1..80: mol_type = other DNA
caggcagtgtgactgagcaagagtctgtgcttttaacgactaggttttgctagcccaaagcacatacttgatacacgtaa

SEQ ID NO: 12349 - DNA, 80 bp, synthetic construct
  source 1..80: mol_type = other DNA
gtcaccagaggtttaggagcaaggggttgcattatcagctaacccttttaagaagattaagtagaaatggataccataag

SEQ ID NO: 12350 - DNA, 80 bp, synthetic construct
  source 1..80: mol_type = other DNA
taacataacaaaataatcccccaattcacattctcatgcaactatgaagtggctgctcaatcagcacagtcacagcatgt

SEQ ID NO: 12351 - DNA, 80 bp, synthetic construct
  source 1..80: mol_type = other DNA
cacttttaaggctgggtgcctcactaacatatctgcatatttaaactaataaataccacactttggcttaaggaaattct

SEQ ID NO: 12352 - DNA, 80 bp, synthetic construct
  source 1..80: mol_type = other DNA
cattattgaatgaagagatagtgaaacccagatgctacacagtatttgaactttgtcttcccccatcctacagtttatgt

SEQ ID NO: 12353 - DNA, 80 bp, synthetic construct
  source 1..80: mol_type = other DNA
gtctgattatgttgaaataatgtggctttcataatatccacggagatacagagaagtggatagttctgaggttctagttg

SEQ ID NO: 12354 - DNA, 80 bp, synthetic construct
  source 1..80: mol_type = other DNA
ttacactagtgaaaatgatttgggaaagagaaagaagctcttgagaagggaagaggggatgatgaatcgagagtacaagt

SEQ ID NO: 12355 - DNA, 80 bp, synthetic construct
  source 1..80: mol_type = other DNA
gtatctcaaaggtgaaaaacaatgtgcagatgcttatttggcaaaaaaaaaaaaagtagtgctatatggcttccattgtc

SEQ ID NO: 12356 - DNA, 80 bp, synthetic construct
  source 1..80: mol_type = other DNA
gtttctgtccccaatatgcttaggaactgatctccccaaggttaacagtgacctcaccaaatatattatatacttttcag

SEQ ID NO: 12357 - DNA, 80 bp, synthetic construct
  source 1..80: mol_type = other DNA
tgagaagtactgctctagtttattttccaaatatctccaggttcctcattgtgactacattaagatcctcaccatttctt

SEQ ID NO: 12358 - DNA, 80 bp, synthetic construct
  source 1..80: mol_type = other DNA
cacatccttaggctccacttctcattattgttctcttgctatttctctaatctgtagtgacttcctccactgaagtcttg

SEQ ID NO: 12359 - DNA, 80 bp, synthetic construct
  source 1..80: mol_type = other DNA
aataaacatatgtgtgtatgtgtctttatagcagcatgatttataatcctttgggtatatactcagtaatgggatcactg

SEQ ID NO: 12360 - DNA, 80 bp, synthetic construct
  source 1..80: mol_type = other DNA
acacacagtatttatcaattaagttttccatattcaacgggtgttcgtggcacctgaaagcacttaacaataatatcaaa

SEQ ID NO: 12361 - DNA, 80 bp, synthetic construct
  source 1..80: mol_type = other DNA
aatcaatagcaaaggcagggattaagctcaggtcttttgattccaagttcctctctactacatcaagactataccatatt

SEQ ID NO: 12362 - DNA, 80 bp, synthetic construct
  source 1..80: mol_type = other DNA
tatgatcttcgccagtgagttatttcactacagctctgcataccatctaagctagaccagcagatggaactgcctaagaa

SEQ ID NO: 12363 - DNA, 80 bp, synthetic construct
  source 1..80: mol_type = other DNA
ttcaagcttcctccatgttttcatggcttgatatttataccattttagcactaaataatatatcactgtctgtatgtacc

SEQ ID NO: 12364 - DNA, 80 bp, synthetic construct
  source 1..80: mol_type = other DNA
ttctccacatcctctccagcacctgttgtttcctgactttttaatgatggccattctaactggtgtgagatggtatctca

SEQ ID NO: 12365 - DNA, 80 bp, synthetic construct
  source 1..80: mol_type = other DNA
tggccattttcacgatatttattcttcctgtccatgagcatggaatgttcttccatttgtttgtatcctcttttattatg

SEQ ID NO: 12366 - DNA, 80 bp, synthetic construct
  source 1..80: mol_type = other DNA
ttaaatgagttagggaggattccctttttttctgttgattggaatagtttcagaaggaatagtaccagctccttcttgca

SEQ ID NO: 12367 - DNA, 80 bp, synthetic construct
  source 1..80: mol_type = other DNA
ttttaagtgttctttgtgtattttggataaccgtactttctccaatgcatcttttacaaatattttctcccagtcggtgg

SEQ ID NO: 12368 - DNA, 80 bp, synthetic construct
  source 1..80: mol_type = other DNA
ctgggtcttctagcatgcctttaaactttagaatcagtttgttaatgcccacaacacaacttgcggggatttctactgtg

SEQ ID NO: 12369 - DNA, 80 bp, synthetic construct
  source 1..80: mol_type = other DNA
tcaacttctgagattttcaacttacaatgagtggagttatctagacatatcccattgtaagtcgaggagtgtagtgaatg

SEQ ID NO: 12370 - DNA, 80 bp, synthetic construct
  source 1..80: mol_type = other DNA
gatatattttgttagcggtgtctaatttaattccattgtgttctcagatcagagactttatgatttctgtccttttaaaa

SEQ ID NO: 12371 - DNA, 80 bp, synthetic construct
  source 1..80: mol_type = other DNA
cttataataaaaaaatcatatcctccctcctgtccattgtgtcactgctgtcattcattggacttatatataggtataca

SEQ ID NO: 12372 - DNA, 80 bp, synthetic construct
  source 1..80: mol_type = other DNA
gaattttctctaatactcactttgagaagtttgtcaagcttctctagataaatctcacaatatccttggtgtcccctatg

SEQ ID NO: 12373 - DNA, 80 bp, synthetic construct
  source 1..80: mol_type = other DNA
cgttttacttgttaagatggagtggcaacttccaagtaccttacatgtgtaaccggaaacaagctatcatatatttttat

SEQ ID NO: 12374 - DNA, 80 bp, synthetic construct
  source 1..80: mol_type = other DNA
ggagacacaacaacgattccattaaactgcaagttaagattgccacctggccattttgggctacctctcagtcaacagtc

SEQ ID NO: 12375 - DNA, 80 bp, synthetic construct
  source 1..80: mol_type = other DNA
ggttcatgttgacaaggggtggacttgtgatagttaaaattgagtgtcaactggattggattgcaacgtattgttcctaa

SEQ ID NO: 12376 - DNA, 80 bp, synthetic construct
  source 1..80: mol_type = other DNA
ctgctcaaccttatatattcttccccagacatacacatggtgttcttccacatcttctttaagcctctgctcaaatgtca

SEQ ID NO: 12377 - DNA, 80 bp, synthetic construct
  source 1..80: mol_type = other DNA
tatgctcctttgatctttctgtagtgtcacattgtgagcatattatatttgtgaattaatgcagtttaaaaaagaagtag

SEQ ID NO: 12378 - DNA, 80 bp, synthetic construct
  source 1..80: mol_type = other DNA
aggacctttttcaaagtgattggaacctttctggtatagacgttaaacagcataatgaatgtgttggcatttgtttctta

SEQ ID NO: 12379 - DNA, 80 bp, synthetic construct
  source 1..80: mol_type = other DNA
gtatggacaattaagttttaggaaaaaagtgtacgactacagttttgggtcattaaatgcatcctgttttgagagttgct

SEQ ID NO: 12380 - DNA, 80 bp, synthetic construct
  source 1..80: mol_type = other DNA
gtcacccaatccatcttctccctactaaagaactattcactacattatagcattaaatgtttccatcagtatgctttaag

SEQ ID NO: 12381 - DNA, 80 bp, synthetic construct
  source 1..80: mol_type = other DNA
gtgccatttttctgatgtgcatcagagggggctcagaatagaaaattcatttgggtttttaactataaatgtaggaagct

SEQ ID NO: 12382 - DNA, 80 bp, synthetic construct
  source 1..80: mol_type = other DNA
gattacaggccaccgtgcccagctagtttttgtatttttgggtagaggtggggtttcacatgttggccaggttggtctca

SEQ ID NO: 12383 - DNA, 80 bp, synthetic construct
  source 1..80: mol_type = other DNA
atttgggataggtaaaggaaatgtatccagtgactgtgtatggtgctatatccttccagaatcaatgactgagaaaatgt

SEQ ID NO: 12384 - DNA, 80 bp, synthetic construct
  source 1..80: mol_type = other DNA
atttaaaaatgaacatatttccctaaaccctacaagagaggccatataatctagtaaaagagcatgggctttcacattta

SEQ ID NO: 12385 - DNA, 80 bp, synthetic construct
  source 1..80: mol_type = other DNA
accctttctgggttgccttaataaaaagatcccttattttgataaagacaagctatgcagaatatcttgacattactgat

SEQ ID NO: 12386 - DNA, 80 bp, synthetic construct
  source 1..80: mol_type = other DNA
gactttttcttatctaagtgcttcctagacaacccaatggatatcccacaggcaccagaaactccattatgcaaaaccaa

SEQ ID NO: 12387 - DNA, 80 bp, synthetic construct
  source 1..80: mol_type = other DNA
aataaatgttatgtaaccacttacaaagatatagccttgtgcaggaaaaccacaagggacagtagaggacactgggagtg

SEQ ID NO: 12388 - DNA, 80 bp, synthetic construct
  source 1..80: mol_type = other DNA
gtctgctattctcccatctgtattcagcactcaggcagtacagagccatttgtagttcccggttgtgaaatattttctca

SEQ ID NO: 12389 - DNA, 80 bp, synthetic construct
  source 1..80: mol_type = other DNA
ctattatctctggtggaaaattctcagcttcaaagactccatggcaagagcattaggaagaatgtttccaaaaactgata

SEQ ID NO: 12390 - DNA, 80 bp, synthetic construct
  source 1..80: mol_type = other DNA
tccctgagcacctactatggaccaggaattggactagattctgagaatacagtattcaagaaaacatatatgacacttgc

SEQ ID NO: 12391 - DNA, 80 bp, synthetic construct
  source 1..80: mol_type = other DNA
acccgaatgagttaatgcattgtcctaaagctctaatttacaaccaggaagaatttggggcattgagaggcagattgaat

SEQ ID NO: 12392 - DNA, 80 bp, synthetic construct
  source 1..80: mol_type = other DNA
cactgttcaggcaagacacagaagcacagtgtgaaaacaagacctgctagaatatgaaagaagcatcctttactcccata

SEQ ID NO: 12393 - DNA, 80 bp, synthetic construct
  source 1..80: mol_type = other DNA
gactctgccctagaaaacctagggtatatgatgactatgcttagggtatcgcattataaaatactgataaacttttttta

SEQ ID NO: 12394 - DNA, 80 bp, synthetic construct
  source 1..80: mol_type = other DNA
agagcagaaaggaggtacgaggcaagaggtcatgaaattgttaaaagtacacgtggtgggagatatagagataaggactt

SEQ ID NO: 12395 - DNA, 80 bp, synthetic construct
  source 1..80: mol_type = other DNA
gtgctctagaaaagaggagagttaattcttgttgggtggtaactgattagagaatattaaccttaagcaatgatgcatga

SEQ ID NO: 12396 - DNA, 80 bp, synthetic construct
  source 1..80: mol_type = other DNA
attcacctctggaatgatctcatatattttccaagcatgagatcccactggtttctcttatgtgcaattcaaagatgcct

SEQ ID NO: 12397 - DNA, 80 bp, synthetic construct
  source 1..80: mol_type = other DNA
agagtttgagctcattatttagaagtaaccgggagatcctatgctagtaggcagctaagactaagaaattcaatcagcca

SEQ ID NO: 12398 - DNA, 80 bp, synthetic construct
  source 1..80: mol_type = other DNA
tttggaggtcaggaaatatgattaggtatatggtacatttaaccgttgtgtatataggagagattgaaaactctgaggtt

SEQ ID NO: 12399 - DNA, 80 bp, synthetic construct
  source 1..80: mol_type = other DNA
ttaataaaatactatgatgcacataaaagagaagcagttgaactgtgctaagcatggggcttggccctaggaacactgcg

SEQ ID NO: 12400 - DNA, 80 bp, synthetic construct
  source 1..80: mol_type = other DNA
atattattgaggcactaaaacctagcaatgtgattgagaatgactggagtctggcataggggcctgcttttaaaatgatg

SEQ ID NO: 12401 - DNA, 80 bp, synthetic construct
  source 1..80: mol_type = other DNA
tttttagagccctctcccacacccatactgctttccatagtgcctatgctaatttactatgtcttcaacttcactgattc

SEQ ID NO: 12402 - DNA, 80 bp, synthetic construct
  source 1..80: mol_type = other DNA
ctttacaattttaactggtgtctctacagtgacatcttcctttcaccatttctccagggagcaaagcagtcatgagtttc

SEQ ID NO: 12403 - DNA, 80 bp, synthetic construct
  source 1..80: mol_type = other DNA
attccagcctttaattgtgttcatttcctatattaagacatctccccacccatactttgtaacccaagagccataactaa

SEQ ID NO: 12404 - DNA, 80 bp, synthetic construct
  source 1..80: mol_type = other DNA
tcttagcagaacagtggggactgtgtggtcagatgttctgtgttcaatttgaaattctatcacttactatttaaaaacta

SEQ ID NO: 12405 - DNA, 80 bp, synthetic construct
  source 1..80: mol_type = other DNA
caataaagaggatgctttcaagtaaatatcttagaagacctcagggggaaaatgtgaaattagttctttgtgaaaaataa

SEQ ID NO: 12406 - DNA, 80 bp, synthetic construct
  source 1..80: mol_type = other DNA
ccatgactcagtatcaaagtgagaatgatcaaaatgctagagggtgttaattgactggtaacttgaagagttgggtaggg

SEQ ID NO: 12407 - DNA, 80 bp, synthetic construct
  source 1..80: mol_type = other DNA
acaatttgtttatcttttcagttgttgatgaaaatatgagttagtcccaggttttttgttgttgttgttgttacaaataa

SEQ ID NO: 12408 - DNA, 80 bp, synthetic construct
  source 1..80: mol_type = other DNA
acaagccaatcttatatccttcaaccttgtcaaactcactgattacctaaagtattctgacagggccaaatctaggatag

SEQ ID NO: 12409 - DNA, 80 bp, synthetic construct
  source 1..80: mol_type = other DNA
actatgctactttcaaatattaaccctatctggagttcctatctggagttccttgtactctttctctaattgtggtatca

SEQ ID NO: 12410 - DNA, 80 bp, synthetic construct
  source 1..80: mol_type = other DNA
attatttaatggttaggtttaactcttatcatctatatactatatggattctatttgtctcatctcttttttactcctct

SEQ ID NO: 12411 - DNA, 80 bp, synthetic construct
  source 1..80: mol_type = other DNA
tcagtacttttaagatgttgcccctctgtctcatagcttagattgtttctgacaattaatcacactagtaactgttacat

SEQ ID NO: 12412 - DNA, 80 bp, synthetic construct
  source 1..80: mol_type = other DNA
gaattctctttatgtagctctctgctttctgtactttatcttgtgaattctagcctcctcaactcagggcctggggcaag

SEQ ID NO: 12413 - DNA, 80 bp, synthetic construct
  source 1..80: mol_type = other DNA
gactctaagccctctgcctttagctcctagactacaactctagaaaaacagaattttgttaggataagtgggcatggatg

SEQ ID NO: 12414 - DNA, 80 bp, synthetic construct
  source 1..80: mol_type = other DNA
tagacagctacatccttgcaaagcattaagagctgggcataaaatatccttagctgggattaacagcaaaacaatgcttg

SEQ ID NO: 12415 - DNA, 80 bp, synthetic construct
  source 1..80: mol_type = other DNA
ccaaacagaatagagagctactggacataggttcttaaccggcggtccagaaactctttatagaatacagaaatccataa

SEQ ID NO: 12416 - DNA, 80 bp, synthetic construct
  source 1..80: mol_type = other DNA
cttgaagtttctgtctctggttttggccagaaacctgcttcctagcccacaggtagtaatattttctaagtattactcct

SEQ ID NO: 12417 - DNA, 80 bp, synthetic construct
  source 1..80: mol_type = other DNA
taacaaagccatcatttccttttctatcttcactacctgattcactgctgaagccctaccttctgcttcctactttaact

SEQ ID NO: 12418 - DNA, 80 bp, synthetic construct
  source 1..80: mol_type = other DNA
actatgtctcttctttctactcaactgtagaatcacaaggcaagggtttcatctcagctttcttgtccacttactgtcat

SEQ ID NO: 12419 - DNA, 80 bp, synthetic construct
  source 1..80: mol_type = other DNA
caagttcaaattctagcttcaccatatattaggtgtgtaacgattgatatggtatttaatcgctgtgtgcctcagtttcc

SEQ ID NO: 12420 - DNA, 80 bp, synthetic construct
  source 1..80: mol_type = other DNA
taggaagtgggagagggaggtgggagggatagggacaataaatgaatgacattaaggatcaccctaatcagactattgaa

SEQ ID NO: 12421 - DNA, 80 bp, synthetic construct
  source 1..80: mol_type = other DNA
tctggaaagtcagcctttagttcagtgacactttgacaccaatatgcagccgttttctcactgatgagctcaatattcag

SEQ ID NO: 12422 - DNA, 80 bp, synthetic construct
  source 1..80: mol_type = other DNA
gaggaaaggtcatttagttaaggatttatcagaattagtcatttaagtacccctcctcaccatcttgtcacttttagtaa

SEQ ID NO: 12423 - DNA, 80 bp, synthetic construct
  source 1..80: mol_type = other DNA
gtcaagtgccctggtactgtgttggtgagcaaataatggggcatctggttttgatgaccattttttaattcattggtctg

SEQ ID NO: 12424 - DNA, 80 bp, synthetic construct
  source 1..80: mol_type = other DNA
tgatgactccctgacagaaagcatgcttgaacttcatctcactgcagcttctaagaccttcctggttgctagttcttaac

SEQ ID NO: 12425 - DNA, 80 bp, synthetic construct
  source 1..80: mol_type = other DNA
gtcctttataacttctcaaattacagatgcctactgttgtagaatgggttaactatctgaaaggaatttgttagcatcat

SEQ ID NO: 12426 - DNA, 80 bp, synthetic construct
  source 1..80: mol_type = other DNA
ataaaatttgcaaagtgaatcatggctacatataccatagtggatgaattttataaacatcttgttgaatgaaaagggca

SEQ ID NO: 12427 - DNA, 80 bp, synthetic construct
  source 1..80: mol_type = other DNA
tagtagcttatataacgacagtactcaatatctgaattagtgacagaatttgcccttttgtcatcaggaacttcagacct

SEQ ID NO: 12428 - DNA, 80 bp, synthetic construct
  source 1..80: mol_type = other DNA
taagctgcattagttagtcatcccttgtttaatgaactatgtctggcaggataaaattaattaggattcacacagatgct

SEQ ID NO: 12429 - DNA, 80 bp, synthetic construct
  source 1..80: mol_type = other DNA
accttctcatctgccgatccggataaccatcactctgtcacagagaagttgtaggatagtaaatgaagcaatacagcaca

SEQ ID NO: 12430 - DNA, 80 bp, synthetic construct
  source 1..80: mol_type = other DNA
gcgtcagtttcagctttagcaatcaaggaggtaagtctcttctaagaatcttaacctgtgtgagccccaaaatttaaact

SEQ ID NO: 12431 - DNA, 80 bp, synthetic construct
  source 1..80: mol_type = other DNA
aacaaggtaaaggaaaaatcaaattgcagttcacaagaagcaaatggagagaactaggagaggcaccatttccaaagata

SEQ ID NO: 12432 - DNA, 80 bp, synthetic construct
  source 1..80: mol_type = other DNA
atttcagattggagatactgctatctgaaacccttggcacaaatttatgatttagaggcattggggctcaaaaaaacgac

SEQ ID NO: 12433 - DNA, 80 bp, synthetic construct
  source 1..80: mol_type = other DNA
tgggacactttatctgcatataaggcaacctttgttttcagttcagttccttctttcacccttctattgcttgtgctgcc

SEQ ID NO: 12434 - DNA, 80 bp, synthetic construct
  source 1..80: mol_type = other DNA
gagacaatcatgttatacctgaaaggtgatccatatggccctcacagggtaaggtttcagaagttaaaatcaaaaccaaa

SEQ ID NO: 12435 - DNA, 80 bp, synthetic construct
  source 1..80: mol_type = other DNA
ttgatataatttggctgtgtcttcacccaaatctcatcttgaattctcgaatgttgagggagggacccggtgggagataa

SEQ ID NO: 12436 - DNA, 80 bp, synthetic construct
  source 1..80: mol_type = other DNA
gcagcaaagcattcaagaggtgacttgggtggtgttaaaggcactcagttttaaaagaaaaacagagcataaaagcttag

SEQ ID NO: 12437 - DNA, 80 bp, synthetic construct
  source 1..80: mol_type = other DNA
ctggatgtcggacatgcagtcaaaggagatcattttggaactttttaagatttgactgccctgctggatttcagacttgc

SEQ ID NO: 12438 - DNA, 80 bp, synthetic construct
  source 1..80: mol_type = other DNA
gtgtaaaaccaagctgtagctcgattatcttgggcacaagtcgtcaagccctactgaggctgtgtcatgggcaggctctt

SEQ ID NO: 12439 - DNA, 80 bp, synthetic construct
  source 1..80: mol_type = other DNA
atataccaaagaactctaacattttacagaaaacaggttattgagatagagaaagaaccccctttaggggcctgcagtgg

SEQ ID NO: 12440 - DNA, 80 bp, synthetic construct
  source 1..80: mol_type = other DNA
tgccatatcccaatgctttagggatatctgaacccacaatgggcactgaacaagatttttctggagtgcaaaagaaggga

SEQ ID NO: 12441 - DNA, 80 bp, synthetic construct
  source 1..80: mol_type = other DNA
cagagggtgagctgaaacaccgttttgattttcctgctaagttttaaggatgaaggatgaatgattcagtttcttaaggt

SEQ ID NO: 12442 - DNA, 80 bp, synthetic construct
  source 1..80: mol_type = other DNA
tataagcatcactgtttcatattagctatacagaagagtatgttgaaattcattcattagcatattgataagtttctgct

SEQ ID NO: 12443 - DNA, 80 bp, synthetic construct
  source 1..80: mol_type = other DNA
aatatgtgcaatataatactgatgtatactttatctttggtgaatggatgctgggtgtttcagaggttgtatatagctgt

SEQ ID NO: 12444 - DNA, 80 bp, synthetic construct
  source 1..80: mol_type = other DNA
acatgtaacttggggtctaaaactgcaaccacacaactacaagatagagacagtagagtttatcagctgaaaacattaat

SEQ ID NO: 12445 - DNA, 80 bp, synthetic construct
  source 1..80: mol_type = other DNA
gcaaattggggaatacagtaagcagatgatggccagtaagcctgtaagttcacttccaactgatactttgtatttgtgtg

SEQ ID NO: 12446 - DNA, 80 bp, synthetic construct
  source 1..80: mol_type = other DNA
agttccaatcaccaggggaatgcaatcaaagtcacaatgagctatcaccccacaccaatttggatggctagtatcaaaaa

SEQ ID NO: 12447 - DNA, 80 bp, synthetic construct
  source 1..80: mol_type = other DNA
ctaactaaacatatgaaaacataccaaagatatatttacaattagatacagatcaggtgttctgtcagacatatttcaca

SEQ ID NO: 12448 - DNA, 80 bp, synthetic construct
  source 1..80: mol_type = other DNA
atggttatgttacaagaagaaactgtaagaccaatggagcaaaacagcagggcaatgattgcggcatcatttttgtgggc

SEQ ID NO: 12449 - DNA, 80 bp, synthetic construct
  source 1..80: mol_type = other DNA
gaaaattaaagctagattcctaaccctgaggggagtcatgggctagcaaggtaacaaagagtaaatagatcccagagccg

SEQ ID NO: 12450 - DNA, 80 bp, synthetic construct
  source 1..80: mol_type = other DNA
tacccacagtagaacttcagtcaatattggagtcaacatttcaacaatgttcacagcatcttcactaggagctgattcta

SEQ ID NO: 12451 - DNA, 80 bp, synthetic construct
  source 1..80: mol_type = other DNA
tcttaatgaaacctagaatggtaaatacttcccattcaccactaaatgttttcaactgactatgctcagattcattagag

SEQ ID NO: 12452 - DNA, 80 bp, synthetic construct
  source 1..80: mol_type = other DNA
cctttgacttaagagagtgttgtgctgatttggtctatccagacaactaaaactttccctatagcagcaatcaggctgtt

SEQ ID NO: 12453 - DNA, 80 bp, synthetic construct
  source 1..80: mol_type = other DNA
ttgcctatccaacatccattcctatatttgttcttactaatgggatcctgatattatttagggggcaatgtgtccaattt

SEQ ID NO: 12454 - DNA, 80 bp, synthetic construct
  source 1..80: mol_type = other DNA
atgtaatatgaaaaactgatttgttaaagattactatcttctatgtataaaagtactccttaaaatgataaaggcaaata

SEQ ID NO: 12455 - DNA, 80 bp, synthetic construct
  source 1..80: mol_type = other DNA
aagtatctttttttagattacttttactaaagtagatgcattatcttctcctatgggagtggagaagaaaggtctattac

SEQ ID NO: 12456 - DNA, 80 bp, synthetic construct
  source 1..80: mol_type = other DNA
tacgagtagccattaaagagaacagttagcatttctgtgttgattgtggatactgagaataggccagttacttttgtaca

SEQ ID NO: 12457 - DNA, 80 bp, synthetic construct
  source 1..80: mol_type = other DNA
ggctgaaagaggcttcaagcagcattgggctagctagcttgcctgcccttctctcttctgccatataaggacacagaaag

SEQ ID NO: 12458 - DNA, 80 bp, synthetic construct
  source 1..80: mol_type = other DNA
tcactctagaattttctaggatcttcctaaatccatgtttagaaatctgaagatggtaaatattggtgcgggtctttctt

SEQ ID NO: 12459 - DNA, 80 bp, synthetic construct
  source 1..80: mol_type = other DNA
gcaattttcatgcctcagcctccagagtagctgggactacaggagtgcaccacgatgcctggttaatttttctatgttta

SEQ ID NO: 12460 - DNA, 80 bp, synthetic construct
  source 1..80: mol_type = other DNA
acagaacttaagccatggagattatgggtagagagtatagaatttatatcacataaatcagtataagatgttggtgtttt

SEQ ID NO: 12461 - DNA, 80 bp, synthetic construct
  source 1..80: mol_type = other DNA
caatggagaattatacaccagtggaaacaaagacaaagaaatatctttatattctattaatgagtgacctccaggatatt

SEQ ID NO: 12462 - DNA, 80 bp, synthetic construct
  source 1..80: mol_type = other DNA
gtgactacaaaaggttatgtgagggttgcttgtgatgatagaactgttctttatcttggctgtggtggtaaatacatgaa

SEQ ID NO: 12463 - DNA, 80 bp, synthetic construct
  source 1..80: mol_type = other DNA
gggcttgcctgacctgcatcatcaccactatttgagtacaaaaaatgtagttgaagagacaacccatagctttgttaaac

SEQ ID NO: 12464 - DNA, 80 bp, synthetic construct
  source 1..80: mol_type = other DNA
acaccaaataaacaacaatgtgttcctggttgcgcaagtcactaacccttttgtgactcagcttccttcctgtaaagtgt

SEQ ID NO: 12465 - DNA, 80 bp, synthetic construct
  source 1..80: mol_type = other DNA
gaagatggctacacctttcactaaatacttattttactacatttgctcttctgcagtaagctactgatttgctatttttc

SEQ ID NO: 12466 - DNA, 80 bp, synthetic construct
  source 1..80: mol_type = other DNA
tttggaaaggcatttacaagttggtttaaatgttacagggcttattatggatacatctcatgtattctgcggcaggtttc

SEQ ID NO: 12467 - DNA, 80 bp, synthetic construct
  source 1..80: mol_type = other DNA
acagaatgagcatgcacaataaatcatgaagagcacagtctgcaaatatatgtttcaagttcaagcagcaatgatctgct

SEQ ID NO: 12468 - DNA, 80 bp, synthetic construct
  source 1..80: mol_type = other DNA
gggaggtggagaaaacaaaacaatgattgtcaatgaatagccaaacatggtcccatgagctatgggactcaaaagggaga

SEQ ID NO: 12469 - DNA, 80 bp, synthetic construct
  source 1..80: mol_type = other DNA
tttaagcctgggcaacatggcaagaccccaaatctatgaaaaatacaaaaattagccaggcatagtgtcacactcctgta

SEQ ID NO: 12470 - DNA, 80 bp, synthetic construct
  source 1..80: mol_type = other DNA
ctttctcctgcagataagcaggagagagagagatgtcaaaacatactttggggagatacagttggatgaaaatatgtaga

SEQ ID NO: 12471 - DNA, 80 bp, synthetic construct
  source 1..80: mol_type = other DNA
ttcctctccactctatcctcaacatccaagcacattgcctagaaataatttgtcaatgaacatgttcatctgctctcact

SEQ ID NO: 12472 - DNA, 80 bp, synthetic construct
  source 1..80: mol_type = other DNA
ctataaaaatacaatgctaagggggccaagtatgtggtttaagagcactctattgccatccaaatgaatttgaacaaatc

SEQ ID NO: 12473 - DNA, 80 bp, synthetic construct
  source 1..80: mol_type = other DNA
ctcaataggtaaatccatagagatagaaaatacattactggattccagaggctgcgggatgtggggaatggggagtaact

SEQ ID NO: 12474 - DNA, 80 bp, synthetic construct
  source 1..80: mol_type = other DNA
aagttgagtggatcaaaatatagatgggttggagttacagcactgacctctatctgatttttctccctcaggagatatat

SEQ ID NO: 12475 - DNA, 80 bp, synthetic construct
  source 1..80: mol_type = other DNA
ttcttacaaattaaactacaggcaaaatccagttgcatgacaaaactgcataaacagtaaaatgaaaatgctctcattac

SEQ ID NO: 12476 - DNA, 80 bp, synthetic construct
  source 1..80: mol_type = other DNA
tcagacacaaattccacaagactgctgtgcaagcgtaccctaattaaccatcagcttaattagacaatttactgtgtaat

SEQ ID NO: 12477 - DNA, 80 bp, synthetic construct
  source 1..80: mol_type = other DNA
tcctacaaacactgataaaaagtgctctggggtagggaagcgttttttagttttctttgagtcagctacgaagaaatcac

SEQ ID NO: 12478 - DNA, 80 bp, synthetic construct
  source 1..80: mol_type = other DNA
agaagcagcaagactcttttaggaagctggtatactattctgtgagaaatgatgggggctgtgatgtgggtggtaccagt

SEQ ID NO: 12479 - DNA, 80 bp, synthetic construct
  source 1..80: mol_type = other DNA
tcagtctgcaaggcactctatgatgctcctactcaacctttctttcttctctccccaatgtatggcttgacttctattgc

SEQ ID NO: 12480 - DNA, 80 bp, synthetic construct
  source 1..80: mol_type = other DNA
tcaatagcttcctaggagtttcctagagagcaagctatgaccaaagattcaaaagcaccatagggaagagttcccaagtg

SEQ ID NO: 12481 - DNA, 80 bp, synthetic construct
  source 1..80: mol_type = other DNA
gagacattatgctgcatcttacatatgctcggttctctcatgaccgtgactatccgtgtgctatcccttctccctagaat

SEQ ID NO: 12482 - DNA, 80 bp, synthetic construct
  source 1..80: mol_type = other DNA
aaaaaggaaactgaataagaggtactttccattacaagttagattcatctaccagctaacccagatcaaaattgtacacg

SEQ ID NO: 12483 - DNA, 80 bp, synthetic construct
  source 1..80: mol_type = other DNA
agctaggtgataaactattagtatacagaagtcatctcagttttcagcatgttaaaagtctcccagataaaaagcttaca

SEQ ID NO: 12484 - DNA, 80 bp, synthetic construct
  source 1..80: mol_type = other DNA
tccaagagcatggcaatttcatatggtgataagtgcagtgaagaaaaaaacaaccaatgtaatgtgggatggagagcctg

SEQ ID NO: 12485 - DNA, 80 bp, synthetic construct
  source 1..80: mol_type = other DNA
cataacaaaatataaaacatgtggccctggctttggcattgtgaggcaggcagagccttgaaaaaccaagagtaagatct

SEQ ID NO: 12486 - DNA, 80 bp, synthetic construct
  source 1..80: mol_type = other DNA
aaggagcataaatggaccctgattctccatccctggagcaagaggccctgaaaatatgtgccaaactgaatttcaaaatt

SEQ ID NO: 12487 - DNA, 80 bp, synthetic construct
  source 1..80: mol_type = other DNA
gaactgatcatgcgtgctgagcccaaattgccaacccacatgactatagtcaaatagataactgttgtcttaagtcctgg

SEQ ID NO: 12488 - DNA, 80 bp, synthetic construct
  source 1..80: mol_type = other DNA
ggttacatttcttctctcaggactaccaatacatgcagttagaagttaggccagccgatttttacgtatcttcttaatat

SEQ ID NO: 12489 - DNA, 80 bp, synthetic construct
  source 1..80: mol_type = other DNA
tgtgaacacaggtcaaggggttattttatgtgaagtccaaaccatttctaatattccctcttaaacagatcacttctctg

SEQ ID NO: 12490 - DNA, 80 bp, synthetic construct
  source 1..80: mol_type = other DNA
gaaccagataaggaaacaaaaaaagtagacctctatgaggcaaacggactactctgcaaaatcacgtatggaaaataatc

SEQ ID NO: 12491 - DNA, 80 bp, synthetic construct
  source 1..80: mol_type = other DNA
ctgtcagagtaagacagccttaatgttttagccataataatgccagctattgatcctagtaagaggaaaaagagagaatg

SEQ ID NO: 12492 - DNA, 80 bp, synthetic construct
  source 1..80: mol_type = other DNA
cctgccccttcttccatgggacagaaaggaaggaaagaaactaaagattaatgtgtaatgataggtcttgtcaaatagtt

SEQ ID NO: 12493 - DNA, 80 bp, synthetic construct
  source 1..80: mol_type = other DNA
agcacatggcacactgaaacatcatacataggtgcttgctaaatgttgtctctttttctgactggggaggttattaaaga

SEQ ID NO: 12494 - DNA, 80 bp, synthetic construct
  source 1..80: mol_type = other DNA
ttttctcctggtcccactaaccagcctctttgtacttaatttatgaaaccttgcttgatggtattttcttagctttgtgt

SEQ ID NO: 12495 - DNA, 80 bp, synthetic construct
  source 1..80: mol_type = other DNA
caatctccaaactcagatttccaagagacatcaaggcctttggatgtagatgctttgctcttacactttaacctcaactc

SEQ ID NO: 12496 - DNA, 80 bp, synthetic construct
  source 1..80: mol_type = other DNA
actctaaaacccattaagtgaagctcaaagtaaagagcctgccctttagtttcctccatagagtgtcctgaatcaacttt

SEQ ID NO: 12497 - DNA, 80 bp, synthetic construct
  source 1..80: mol_type = other DNA
tcaactgattcattcaagcatatacttcttgggacatttccttactaccacctatacacttttctgaagtagttacctct

SEQ ID NO: 12498 - DNA, 80 bp, synthetic construct
  source 1..80: mol_type = other DNA
gtgttcttatttctccatatcctctccagcatgtgttgtttcctgacttttaagttatcgccatgctaactggcgtgaga

SEQ ID NO: 12499 - DNA, 80 bp, synthetic construct
  source 1..80: mol_type = other DNA
aaatatgctgctactcagctgtcatcatagtcggctgtacatgttaattttctcttcaaaaacaagctccttgaggacag

SEQ ID NO: 12500 - DNA, 80 bp, synthetic construct
  source 1..80: mol_type = other DNA
tttttgccatttccctccctcccttcccattgtaaagcaagaatcattttataacctggacatcaccatgacctctttga

SEQ ID NO: 12501 - DNA, 80 bp, synthetic construct
  source 1..80: mol_type = other DNA
acagcgagttatgtttgtatttcacataagaaagaattttgaaatagagttgtccattaggggtagggtctgtcctggga

SEQ ID NO: 12502 - DNA, 80 bp, synthetic construct
  source 1..80: mol_type = other DNA
ctacagccttgcccatttcaatgaatggcaactgtatccttccaatacctttggccaaaaaccttacaatcatttgtgcc

SEQ ID NO: 12503 - DNA, 80 bp, synthetic construct
  source 1..80: mol_type = other DNA
tccctactggaattctgacttccaatttagaatgaactcctttggtgggaagtaatgaattggcctcagatacttatcat

SEQ ID NO: 12504 - DNA, 80 bp, synthetic construct
  source 1..80: mol_type = other DNA
ctctcatctgctaataaagtgtcagctctgacaagcatcaacacattgtccaaatgttaaggtctactgtaaaaatagga

SEQ ID NO: 12505 - DNA, 80 bp, synthetic construct
  source 1..80: mol_type = other DNA
gtggggtcatggaattatagcagagacatttggatgtgtaatgattatgttgttgggaaaaagtaactcacatggtaagt

SEQ ID NO: 12506 - DNA, 80 bp, synthetic construct
  source 1..80: mol_type = other DNA
aaactcctcctccttcaacaaaaaataactattcctccccagttttcccccatttactttatgacactaccatccatcaa

SEQ ID NO: 12507 - DNA, 80 bp, synthetic construct
  source 1..80: mol_type = other DNA
ctttttcttttttccctttttctttctttcctttccttttctttttctctctcttctctctcccttccctcctgtcttcc

SEQ ID NO: 12508 - DNA, 80 bp, synthetic construct
  source 1..80: mol_type = other DNA
caccgcgcctggccattatccatttatctatcagtagacatttaggttatatcttggctattgtgaataatgttgcagtg

SEQ ID NO: 12509 - DNA, 80 bp, synthetic construct
  source 1..80: mol_type = other DNA
ccccgctatgcattcttgactttcgtattgaaagtcattgtatatgttgtatagttgactgtacatgacatggctgtagg

SEQ ID NO: 12510 - DNA, 80 bp, synthetic construct
  source 1..80: mol_type = other DNA
tttgtttgtggtgtctttgtctggatttggtaacagtgtgatgctggcctcataaaatgagtatggaagtatttactctt

SEQ ID NO: 12511 - DNA, 80 bp, synthetic construct
  source 1..80: mol_type = other DNA
acaagatgtcaatgactaaagtaataaaaacatggtgaccagctcagggtggtgcctgacagcaaatccatgtaacataa

SEQ ID NO: 12512 - DNA, 80 bp, synthetic construct
  source 1..80: mol_type = other DNA
gaaaagaacagtagaaccgagaacagaaaaacttgggttctacccccagcattgccattaactagttttaacaccttaag

SEQ ID NO: 12513 - DNA, 80 bp, synthetic construct
  source 1..80: mol_type = other DNA
agattttgggtgttttgttttattgtgctacattgccattagacccagcagaccccatgcattagagcgctgaaaatttg

SEQ ID NO: 12514 - DNA, 80 bp, synthetic construct
  source 1..80: mol_type = other DNA
atcctgacccagtggaaaaacttagcatggaaacagcatttagccatgacatacttcaatattattttttggaggctatc

SEQ ID NO: 12515 - DNA, 80 bp, synthetic construct
  source 1..80: mol_type = other DNA
cctggtgagactgtaaggtcgaataagctgcctcaaaacctgcaaagggtaacggaaatactctaatattaagcctgtgc

SEQ ID NO: 12516 - DNA, 80 bp, synthetic construct
  source 1..80: mol_type = other DNA
aaattagatgaaattaatgtcatgattaaaaaggaaactgaaacctttaaaaaatatacgttgagggcattgaagaaatg

SEQ ID NO: 12517 - DNA, 80 bp, synthetic construct
  source 1..80: mol_type = other DNA
gtatttcacataagctaccattaagctgaaaaacactgcagagaaactgaagatacttgtgcttcatgagcttacagggt

SEQ ID NO: 12518 - DNA, 80 bp, synthetic construct
  source 1..80: mol_type = other DNA
tttgcaaccaaatctgtctatatgctaatactagaacaaagtaagtgctccgccttctgaatgctgtgtgagtggataaa

SEQ ID NO: 12519 - DNA, 80 bp, synthetic construct
  source 1..80: mol_type = other DNA
ccgtcacccatatttgtctattggcaagttctcagaacctagtccatttgagtttttatggaaagttcattacataggca

SEQ ID NO: 12520 - DNA, 80 bp, synthetic construct
  source 1..80: mol_type = other DNA
tcaaaccactgaaatgactgcaggacaaacataaaaatctggaaaattgcattgtatgattctcgaaggtcttgtaccac

SEQ ID NO: 12521 - DNA, 80 bp, synthetic construct
  source 1..80: mol_type = other DNA
ttgttgtttgtgatgtccttgctgattccacatcctaatacccacatccagatggaatcagtcattgtctcttccaggtt

SEQ ID NO: 12522 - DNA, 80 bp, synthetic construct
  source 1..80: mol_type = other DNA
cctgtccaaggtaacatgattggaaagtgttggaactggatctgatgtcttctctgtagttcagagagcccaaatttata

SEQ ID NO: 12523 - DNA, 80 bp, synthetic construct
  source 1..80: mol_type = other DNA
attcaggagaaatcttggtatgcttggggacattcaaatcagcatctcaaagctaagaagtttggcctttaccttgagtg

SEQ ID NO: 12524 - DNA, 80 bp, synthetic construct
  source 1..80: mol_type = other DNA
tcatctcttatcccttgattccactttcatttcttaaaggagctagcaggctgctcagtaagatttctggtcaatcaaaa

SEQ ID NO: 12525 - DNA, 80 bp, synthetic construct
  source 1..80: mol_type = other DNA
atcacagtaggatccttagttacagtgctggttaagttgacaaggcaaacaatggctgaagtatttgaaaaggagcagtc

SEQ ID NO: 12526 - DNA, 80 bp, synthetic construct
  source 1..80: mol_type = other DNA
agcctggaaattatcagtatactgtgtttctgagatcagactcctatatgggtttggatcagattaaaccattgaagttg

SEQ ID NO: 12527 - DNA, 80 bp, synthetic construct
  source 1..80: mol_type = other DNA
atttggcatctccctagatgctatttcctgaatcaaagctttgtctctttgcaaaatccacaggctcctttctctctctt

SEQ ID NO: 12528 - DNA, 80 bp, synthetic construct
  source 1..80: mol_type = other DNA
aaaaattagctgggtgtggtggcatgaacctatagtcccagctactcaggggctgaggcataagaattgcttgaacccag

SEQ ID NO: 12529 - DNA, 80 bp, synthetic construct
  source 1..80: mol_type = other DNA
tgatggcaaatgcctacctgtacgtatttgtgaatgtaccaagaagcttgctttccatcattcaccgattccactgtagt

SEQ ID NO: 12530 - DNA, 80 bp, synthetic construct
  source 1..80: mol_type = other DNA
gagaaagggttgagtaagagaagaaatgaagaaaggtggacaacaccctatttgatggagtaaactgagtaagccagtgt

SEQ ID NO: 12531 - DNA, 80 bp, synthetic construct
  source 1..80: mol_type = other DNA
tcattctatgcttgagcaaggtaggaataattccttagttatctctgagtcccacaacataaattagagtcaaagacatg

SEQ ID NO: 12532 - DNA, 80 bp, synthetic construct
  source 1..80: mol_type = other DNA
atgcaaaaaatgtacatagaacaattcactttaacactccacctgtcacaaactcggtccataagtagtcaggaaatgtt

SEQ ID NO: 12533 - DNA, 80 bp, synthetic construct
  source 1..80: mol_type = other DNA
aataaaactcagaagcaaatcttctgttctgtctttacccagcttggaaggagtgaaagcataagtgaatgaaaaatgta

SEQ ID NO: 12534 - DNA, 80 bp, synthetic construct
  source 1..80: mol_type = other DNA
cagatgcagattgccaaggtcaattaaactgatgtagctgtgctgtcacatatgtaaaagagaaacccacaagcatatga

SEQ ID NO: 12535 - DNA, 80 bp, synthetic construct
  source 1..80: mol_type = other DNA
atgaaagtatggtctccacggtcaccaaattctgtgaccttagtcttcagctcttttgcctttctgtagcatccaacagt

SEQ ID NO: 12536 - DNA, 80 bp, synthetic construct
  source 1..80: mol_type = other DNA
tccacatctgcatttgactccaaagcttcactaaacctcttttcactgatatgattaattggttccaggtcgccaagtcc

SEQ ID NO: 12537 - DNA, 80 bp, synthetic construct
  source 1..80: mol_type = other DNA
cagttctagatccctgaggaattgccacactgacttccacaatggttgaactagtttacagtcccaccaacagtgtaaaa

SEQ ID NO: 12538 - DNA, 80 bp, synthetic construct
  source 1..80: mol_type = other DNA
gatctctagtacatggcaggcatactgctggatatttccatagaatatcttattagatcacaaaagaacccttgaaggtg

SEQ ID NO: 12539 - DNA, 80 bp, synthetic construct
  source 1..80: mol_type = other DNA
tcatttccacttcctaaactgaccaacaaaccaattcagaattaaaatagtccaagcacttcaccttgatctgcttatgt

SEQ ID NO: 12540 - DNA, 80 bp, synthetic construct
  source 1..80: mol_type = other DNA
ttattgagcgctttcatcagcatgtagctggctctaggctaggcactgtatatactatctctttggatcctcacaaaata

SEQ ID NO: 12541 - DNA, 80 bp, synthetic construct
  source 1..80: mol_type = other DNA
ttggtctctcatgtattacatcctgctgcaggcaccgtagtaaaccacagataagagacccatccttgtgtgttgtaaat

SEQ ID NO: 12542 - DNA, 80 bp, synthetic construct
  source 1..80: mol_type = other DNA
tttcattcaaccatttattcatctcttcactcattcatccatttggtgaatatttattgagttaaggactgtgctggatc

SEQ ID NO: 12543 - DNA, 80 bp, synthetic construct
  source 1..80: mol_type = other DNA
attaatccacatactgttaggcaggatccccaaatggatgttaacattaatactggtttcctcctccaacaatggcagta

SEQ ID NO: 12544 - DNA, 80 bp, synthetic construct
  source 1..80: mol_type = other DNA
ttcccattttctaccttctttccctaacaaaacttgttacatgccactgctctacttcttgtatgtaatcttcaatttga

SEQ ID NO: 12545 - DNA, 80 bp, synthetic construct
  source 1..80: mol_type = other DNA
tggtagagagagtaccatggaataaaactgtcccttcatgtcataacctccttaaaatatttaccatcaggaaatcaaca

SEQ ID NO: 12546 - DNA, 80 bp, synthetic construct
  source 1..80: mol_type = other DNA
actgaaaatgttactgggtcagcttctcataacggcatttactgtgtgggatcataccctgtgactgaataaccacctaa

SEQ ID NO: 12547 - DNA, 80 bp, synthetic construct
  source 1..80: mol_type = other DNA
tgactgtaaaatgactatttaatctaacagtgcggtgttgagcaaattgcataatctccctgtggcttccctcccttcca

SEQ ID NO: 12548 - DNA, 80 bp, synthetic construct
  source 1..80: mol_type = other DNA
ctttatttttgatatgagaaattacgtaagctgaaggtcataaagagtggttagttgttcaaagaaaattttgccaccag

SEQ ID NO: 12549 - DNA, 80 bp, synthetic construct
  source 1..80: mol_type = other DNA
tgtggtgcaacatgatgctgagtccctcaccattcatcctaacatcttccttcccaaaacatgggtttttaatcttagtt

SEQ ID NO: 12550 - DNA, 80 bp, synthetic construct
  source 1..80: mol_type = other DNA
tctaggatattcatactatagtcatcccccttacagcatgaggaccatgaagaacaggtagactaagtaactcattaaga

SEQ ID NO: 12551 - DNA, 80 bp, synthetic construct
  source 1..80: mol_type = other DNA
tacagtctatctagaacaacaaaatcccaagttaatgtgacgtgatatggagtcgtacattcttagagggaatagaggag

SEQ ID NO: 12552 - DNA, 80 bp, synthetic construct
  source 1..80: mol_type = other DNA
atataaggccatttgctgatgttctcaagtgttgagaagtggaagctttataccatagtataagataacattggtacatt

SEQ ID NO: 12553 - DNA, 80 bp, synthetic construct
  source 1..80: mol_type = other DNA
agaaaatatactaaggactgaaaggatgtcactgcatttggcatgcagttcactgaagtctgggcaaagtgaggttgaaa

SEQ ID NO: 12554 - DNA, 80 bp, synthetic construct
  source 1..80: mol_type = other DNA
tttccttcctgaattcagttaaataaataaactatactctgactgtgtctacataccacataaatgtctagataaaaagt

SEQ ID NO: 12555 - DNA, 80 bp, synthetic construct
  source 1..80: mol_type = other DNA
atgccatccaggtgaaaatgacagacatttaaactttctaatttgataattctgacatctgaagtgatgatctggcacaa

SEQ ID NO: 12556 - DNA, 80 bp, synthetic construct
  source 1..80: mol_type = other DNA
gactcagggagtcttgaattggagttgtaatgtggacgtttatagatcacggcatcataaggtatttctcaagttttaag

SEQ ID NO: 12557 - DNA, 80 bp, synthetic construct
  source 1..80: mol_type = other DNA
ttaaaccagactgcgcaggcccattttcagagtttctaactttggagggttaagtggggactgaggatttgcatgtctaa

SEQ ID NO: 12558 - DNA, 80 bp, synthetic construct
  source 1..80: mol_type = other DNA
ggtggcccaataacaaaggttagtaaaaggcagcacaaagacaaaccttagactcctctttagttttctacaaaataaaa

SEQ ID NO: 12559 - DNA, 80 bp, synthetic construct
  source 1..80: mol_type = other DNA
atggcatgagcactggaccccacagagattcatctgcatttttgcttttgaaactttggagattttcttcactcactagt

SEQ ID NO: 12560 - DNA, 80 bp, synthetic construct
  source 1..80: mol_type = other DNA
ctgtgcattatgtgtaccccttcaggaactgtaagtaataaaatctttatttccatcttgagcctgtcccaatcattgaa

SEQ ID NO: 12561 - DNA, 80 bp, synthetic construct
  source 1..80: mol_type = other DNA
ctttgtgggaagaggagactcaagcttcccagtctaagctcatttacaggtactataaaatcatgaaatataggaaccac

SEQ ID NO: 12562 - DNA, 80 bp, synthetic construct
  source 1..80: mol_type = other DNA
aaaaagcaaatggtgttcctcatcagttgtcaagttatgctgctatcagaaaacatggaccaaattgacctgtggtctaa

SEQ ID NO: 12563 - DNA, 80 bp, synthetic construct
  source 1..80: mol_type = other DNA
atcactgttaaattattggatgtaccagaaacattcagagccatgtggtaagagcacgctctatgcataaatctaaccaa

SEQ ID NO: 12564 - DNA, 80 bp, synthetic construct
  source 1..80: mol_type = other DNA
aaaaaaaaaaaaattggccaagttaggaatctttgtcatgtgtaaaggcagtgtacttgaatggcacataaatgggcatt

SEQ ID NO: 12565 - DNA, 80 bp, synthetic construct
  source 1..80: mol_type = other DNA
gttaccaaggacatgaaggagggtaaaggaagaggcatcaaactcggcccattcacacttgatctcatattctttaattt

SEQ ID NO: 12566 - DNA, 80 bp, synthetic construct
  source 1..80: mol_type = other DNA
tgatgacgttttcttaaacctaacacctattttcttcatcttaggttttgatggattcaagcctccctggcagctgttgg

SEQ ID NO: 12567 - DNA, 80 bp, synthetic construct
  source 1..80: mol_type = other DNA
tgaacaggcaacctacagaatgggagaaaatttttgcaacctactcatctgacaaagggctaatatccagaatctacaat

SEQ ID NO: 12568 - DNA, 80 bp, synthetic construct
  source 1..80: mol_type = other DNA
aaagagaaattaaattggtagggaactaaggaagccttcaagagaaaatgacatttggagcagaccttgaaggatgagtt

SEQ ID NO: 12569 - DNA, 80 bp, synthetic construct
  source 1..80: mol_type = other DNA
ttaggttggaagtgaaaaaaacccacaaaagatccttgaatggaaagccaaatctcaccaagtgggaaaggaacaggaca

SEQ ID NO: 12570 - DNA, 80 bp, synthetic construct
  source 1..80: mol_type = other DNA
tcaagaaccaagtgctccaactgtaattcctttttgactattccattctaccttttcatactacactgaagtttcacaac

SEQ ID NO: 12571 - DNA, 80 bp, synthetic construct
  source 1..80: mol_type = other DNA
ctataggtcatgccacaaaaatgatctattatggggtatgctgtgtggtggtggaaaaaaatcaggtaaaaggcacattc

SEQ ID NO: 12572 - DNA, 80 bp, synthetic construct
  source 1..80: mol_type = other DNA
gtattaatgctttcttagccaagatggaaagtacctccacacagcacactgtttgtgactctaattagacagctggaaag

SEQ ID NO: 12573 - DNA, 80 bp, synthetic construct
  source 1..80: mol_type = other DNA
actcagagaatgagaattagactgcaccatcagacatatacatgttgacatgcctaatggtgaggcattttactgacaaa

SEQ ID NO: 12574 - DNA, 80 bp, synthetic construct
  source 1..80: mol_type = other DNA
agacccatttgagttctactaagctctactgcaggcaggttacctattatctcaaggatctgttgcttctcaacactttg

SEQ ID NO: 12575 - DNA, 80 bp, synthetic construct
  source 1..80: mol_type = other DNA
tgggtatcttctgtcactaggtacaaattccatgagggcatgaaattctaactggtttgctgactgttgtatctaagttg

SEQ ID NO: 12576 - DNA, 80 bp, synthetic construct
  source 1..80: mol_type = other DNA
aatagcattaaaatttgagaagtgtgtagtacatgtaaatagccgatacctcacccaagactactcaccagtcactggta

SEQ ID NO: 12577 - DNA, 80 bp, synthetic construct
  source 1..80: mol_type = other DNA
cagggacagctcttatattaacaaagccttttctgaagacgatgaacacacggcgagctccacaacgtagagcagatgtt

SEQ ID NO: 12578 - DNA, 80 bp, synthetic construct
  source 1..80: mol_type = other DNA
ttggaagattttgtatttgggacactctgtaattttcaaatacaagctaggtgcactatgaccttcctcagaaagggttt

SEQ ID NO: 12579 - DNA, 80 bp, synthetic construct
  source 1..80: mol_type = other DNA
catctttattgggttctggcaaacctaagtaatcaaatttataaaatatcattagcaggaggaggggcttttcctattag

SEQ ID NO: 12580 - DNA, 80 bp, synthetic construct
  source 1..80: mol_type = other DNA
aaaagaaaaagacaacagaacgaatatttgagaaatatggtataagattgtaatcaaaatacagtcttaaatgaacctgc

SEQ ID NO: 12581 - DNA, 80 bp, synthetic construct
  source 1..80: mol_type = other DNA
catgtggatactttgatagtctatgctaatcatagtgctgtgggatgatcagaagcagggattttgtcactagacagact

SEQ ID NO: 12582 - DNA, 80 bp, synthetic construct
  source 1..80: mol_type = other DNA
ttaagtgaaatatgaaagaaaatgaaacttgcaaatagtcatctatcaaaggaagacttctctgagagtaggtggcatat

SEQ ID NO: 12583 - DNA, 80 bp, synthetic construct
  source 1..80: mol_type = other DNA
tgtaagaagcagcgccaatttctaacgtggacactggttgtagagtctatgttatgagttcaaaatggctgcctttttca

SEQ ID NO: 12584 - DNA, 80 bp, synthetic construct
  source 1..80: mol_type = other DNA
acaaaaacaaatggacaatgctctagtatactgaactctacaggaacaccaattcttattatttcacacaggtgcttttt

SEQ ID NO: 12585 - DNA, 80 bp, synthetic construct
  source 1..80: mol_type = other DNA
tcattctatagactacaatgaactccagctacatgtgcatcaaaacaaggaaagtattaacagcaagataaagtccactc

SEQ ID NO: 12586 - DNA, 80 bp, synthetic construct
  source 1..80: mol_type = other DNA
tcacttaaagatcactcaaaggatttatgtcttacttctaagggacaatagtgccatatgggttatcattctaggatcta

SEQ ID NO: 12587 - DNA, 80 bp, synthetic construct
  source 1..80: mol_type = other DNA
atcatgtctatattaggatctgttgcatcttttcttctatctataggacattatgacacaatgagaacaacaaacccttt

SEQ ID NO: 12588 - DNA, 80 bp, synthetic construct
  source 1..80: mol_type = other DNA
catactctattgaactgcacagtaggaaacagcattaaagctgccaccataaacacacattccgtagaaggaagaagacc

SEQ ID NO: 12589 - DNA, 80 bp, synthetic construct
  source 1..80: mol_type = other DNA
tagctgctggaatttgttttctacatctatgtgattttctccaggcatatatgtgaaacgatggagagctgctcagttca

SEQ ID NO: 12590 - DNA, 80 bp, synthetic construct
  source 1..80: mol_type = other DNA
ggctcacacttttcatgacattctcctaggatcctgtgactcaaaaataattaaagaatcacatttccccactctagcat

SEQ ID NO: 12591 - DNA, 80 bp, synthetic construct
  source 1..80: mol_type = other DNA
tttggatctggaaaccagcttgatgttttaagaatcatgaggacaatcagttggaaatacaaatcctaggtattaattta

SEQ ID NO: 12592 - DNA, 80 bp, synthetic construct
  source 1..80: mol_type = other DNA
aggaaaacttctcttcttcttcttaaccaggattactagtaacctccactaacatggcattgcagggggtatccatagct

SEQ ID NO: 12593 - DNA, 80 bp, synthetic construct
  source 1..80: mol_type = other DNA
tgagccaactcagaagaagaaaggggaaaactctataatagccacatggggaagtattctagtggcaatgttggacaagt

SEQ ID NO: 12594 - DNA, 80 bp, synthetic construct
  source 1..80: mol_type = other DNA
tcccactactaggtgaagaatctatagcaacagttcatggtggattaattagggagatcaaatagaaattctcagttgct

SEQ ID NO: 12595 - DNA, 80 bp, synthetic construct
  source 1..80: mol_type = other DNA
tggactaggtatccttatgctcatttacagatgacaaactgaggttcaaggcagtaaaaaaagctttctataatctcaca

SEQ ID NO: 12596 - DNA, 80 bp, synthetic construct
  source 1..80: mol_type = other DNA
gctatcttcgtggacatatgatcaaataactacagaaacagactccatagtgatttcagtacatgatttcagatggaatc

SEQ ID NO: 12597 - DNA, 80 bp, synthetic construct
  source 1..80: mol_type = other DNA
acatgggaattatgggagctataagatgagagttgggtggggacagagaatttcatttgggtgataaaccgtatcagtga

SEQ ID NO: 12598 - DNA, 80 bp, synthetic construct
  source 1..80: mol_type = other DNA
aggattaatctcagaaatgttggtgcatgcctaatgctgtggcttttaatcttttcacacaagtgggtctaaaatacttg

SEQ ID NO: 12599 - DNA, 80 bp, synthetic construct
  source 1..80: mol_type = other DNA
tacataaactattgggtggtttcactcacaaaaagtccttaaatgcgacatctagaaatctggggcatactgagtgtgct

SEQ ID NO: 12600 - DNA, 80 bp, synthetic construct
  source 1..80: mol_type = other DNA
aaagttttatgacagggtgtatcaaacagaatccctacaaaaaataaatgtcacacttaaattaggataacccgagattt

SEQ ID NO: 12601 - DNA, 80 bp, synthetic construct
  source 1..80: mol_type = other DNA
actatgagatgatcattgattcaaaatatattcatagagcacttactatgagctagacactatgctgggtgtcgggaatc

SEQ ID NO: 12602 - DNA, 80 bp, synthetic construct
  source 1..80: mol_type = other DNA
cctttgcctggcttccatttaccttgatccttatgaagcatatgatacgttaactcctctgagaagactgacagaccact

SEQ ID NO: 12603 - DNA, 80 bp, synthetic construct
  source 1..80: mol_type = other DNA
ctcctaaaattaaggctatgaaagttttatttctttttttttgagacggagtctccctctgttgccgggctggagtgcag

SEQ ID NO: 12604 - DNA, 80 bp, synthetic construct
  source 1..80: mol_type = other DNA
aacaagacttgtcaaatcattgctaccaagcaaggtctgcacatctgcagcatcagcaccatgtgagaaatgcagaaact

SEQ ID NO: 12605 - DNA, 80 bp, synthetic construct
  source 1..80: mol_type = other DNA
ggtgagctcaccacataaaatcgaaggcagtgtagatagaagaaataataatgcaccagaaacatccaggatgcaatctt

SEQ ID NO: 12606 - DNA, 80 bp, synthetic construct
  source 1..80: mol_type = other DNA
ttaaatccgcatccacccttttatcaatgcaagggaaacaccggttacaaagttaatgttaacgaccattgcttctattt

SEQ ID NO: 12607 - DNA, 80 bp, synthetic construct
  source 1..80: mol_type = other DNA
aaggcacccactctcacatttagatttcttactggcaacatctcataggttattaaccatctgccctcttaaaattaact

SEQ ID NO: 12608 - DNA, 80 bp, synthetic construct
  source 1..80: mol_type = other DNA
taaatgtaaataagaagaaaaggatagagagaggctacaatggtctacgtggtgatgaattagagtggaagacatcagta

SEQ ID NO: 12609 - DNA, 80 bp, synthetic construct
  source 1..80: mol_type = other DNA
accaaaaaaaagcataagaagacatggccactaaatataacttgggatcttggatagactctaggtaaaaccgaccctgg

SEQ ID NO: 12610 - DNA, 80 bp, synthetic construct
  source 1..80: mol_type = other DNA
aagtgaatggagttagtccaaggatattggcaatgaccagtgactcaagaagcaaaggaatgctctcaagaatcatgacc

SEQ ID NO: 12611 - DNA, 80 bp, synthetic construct
  source 1..80: mol_type = other DNA
tgggcaagggatctaaatagacatttctcaaaagatgacatacaaatggcctagaatatatgaaaattatcctcaatatc

SEQ ID NO: 12612 - DNA, 80 bp, synthetic construct
  source 1..80: mol_type = other DNA
aaagggtaaaatctcagaccataagtgtgtgcttttttcttttttttgagttatactgcacagcacagtgaatatagtta

SEQ ID NO: 12613 - DNA, 80 bp, synthetic construct
  source 1..80: mol_type = other DNA
tgtgacatcactgacatagactggacaaatgaaagaaaaggtcacgtgggctttggcagatgatgaatctgtcaatacaa

SEQ ID NO: 12614 - DNA, 80 bp, synthetic construct
  source 1..80: mol_type = other DNA
ccacaagggaactaactagagcttaaatagactgaaatacctttccatggtgtcttagttccggcttctatgtcaaagtg

SEQ ID NO: 12615 - DNA, 80 bp, synthetic construct
  source 1..80: mol_type = other DNA
agcaaaaagacaattgcatggacaaagataatgatagtaggaatgaaagggcaggttcctatttcagagacattgaggca

SEQ ID NO: 12616 - DNA, 80 bp, synthetic construct
  source 1..80: mol_type = other DNA
tttagaactagataccttgagttcaaatcccagcctctacatgctaaataaaagaacccagactcataatgatggggctt

SEQ ID NO: 12617 - DNA, 80 bp, synthetic construct
  source 1..80: mol_type = other DNA
aacataactgacactctcacttcttgcagttaactcaaaggtccctccacagacaggccatttctgataatcctatttaa

SEQ ID NO: 12618 - DNA, 80 bp, synthetic construct
  source 1..80: mol_type = other DNA
cctcagagcttagtgttttgtcagcttcaagctgttttggagaaagtgttggcttatttctcagctgtagcattgactta

SEQ ID NO: 12619 - DNA, 80 bp, synthetic construct
  source 1..80: mol_type = other DNA
ctagcaagtagcattttgcaatcataagtgcttatgtgaacccaatctgagaaatgatttatgttgacaaaagagtaaga

SEQ ID NO: 12620 - DNA, 80 bp, synthetic construct
  source 1..80: mol_type = other DNA
taagccaaataatgaccccaatcttacttctgacttccccaagttcaactgattgaaatgttgtgcaaataagcaaccat

SEQ ID NO: 12621 - DNA, 80 bp, synthetic construct
  source 1..80: mol_type = other DNA
acctagagagagtgggagggcatagacacagcctcttcactattaatcaaaccaaatcatcaacgattttagacatcact

SEQ ID NO: 12622 - DNA, 80 bp, synthetic construct
  source 1..80: mol_type = other DNA
agacctgataagaactagagtcctgaaggaacaggtgaagaaactgctaaaccactaaataggaaggacagtttatagat

SEQ ID NO: 12623 - DNA, 80 bp, synthetic construct
  source 1..80: mol_type = other DNA
catttaattgtgggaattccattcccaaaaggctgaacctgtttccagggcctttgtgaggcacagtctattccttagtg

SEQ ID NO: 12624 - DNA, 80 bp, synthetic construct
  source 1..80: mol_type = other DNA
gagccactgcacccagccatagtccctcataatttctattaaaaaaaaatcactaagccaggctcacttagcatcatttt

SEQ ID NO: 12625 - DNA, 80 bp, synthetic construct
  source 1..80: mol_type = other DNA
tgattcactgtgtgggaacccactcaggtccccagagttggtataagaaattaaattgaaggtatttgagattcaaccaa

SEQ ID NO: 12626 - DNA, 80 bp, synthetic construct
  source 1..80: mol_type = other DNA
tctgaaaggatggaatagagaacagataaaccaagaccttttgttgacaaggtctcttttgcttgaagggtgcgctaaat

SEQ ID NO: 12627 - DNA, 80 bp, synthetic construct
  source 1..80: mol_type = other DNA
agagagcaagagagaaaggaggaagtgtcgggctcttcttaaaaaccaggtctcatgtgaacttacagggtgagaactca

SEQ ID NO: 12628 - DNA, 80 bp, synthetic construct
  source 1..80: mol_type = other DNA
ggtctcattaaaaacaagaccccaatcttataaatagtctatgaagctgggtccttcagcgttataagggtgtgtgtatg

SEQ ID NO: 12629 - DNA, 80 bp, synthetic construct
  source 1..80: mol_type = other DNA
actgcaaactccgcctcccaggttcaagcagttctcctgcctcagcctcctgcgtaactgggattagaggcacttgctac

SEQ ID NO: 12630 - DNA, 80 bp, synthetic construct
  source 1..80: mol_type = other DNA
ctggtgcaaagtacaggactgagaacttcttttggagacatatataatgagcacatataaaggtgcagaggaaaggaagg

SEQ ID NO: 12631 - DNA, 80 bp, synthetic construct
  source 1..80: mol_type = other DNA
cttcatagaaaaaaaaattgttaaatttcatatggaactaaaaaagagtaagtatagccaagaaaacattaagcatgaag

SEQ ID NO: 12632 - DNA, 80 bp, synthetic construct
  source 1..80: mol_type = other DNA
catctgacaaagggctaatatccagaaactacaaggaacttaaacaaatttataagaaataagcaaacaaccccatcaaa

SEQ ID NO: 12633 - DNA, 80 bp, synthetic construct
  source 1..80: mol_type = other DNA
tcactgcaatggttttctacacagaagtcttctactgagaaccacagaaaacatctgtattgaatgctatgtctgtatat

SEQ ID NO: 12634 - DNA, 80 bp, synthetic construct
  source 1..80: mol_type = other DNA
gtgtctatttccttgtaccctcgtcaacaatttgtcagtgtgatagataaaatggtaggtcagggagtgttgagttacac

SEQ ID NO: 12635 - DNA, 80 bp, synthetic construct
  source 1..80: mol_type = other DNA
atacatattctgttccagtgcagtgcagaatcctcctgaagtactccaattatgcatatgttgaatctgctttgattgtt

SEQ ID NO: 12636 - DNA, 80 bp, synthetic construct
  source 1..80: mol_type = other DNA
gtagttattgcctgatttcatcagctctggaagctcctaaattacatcagaatataccacttgtatttgttttctgattt

SEQ ID NO: 12637 - DNA, 80 bp, synthetic construct
  source 1..80: mol_type = other DNA
gcagagtctcttctagtttttcccaactcatacatctgatattttgccaattactgatgactcaactctgccctttctct

SEQ ID NO: 12638 - DNA, 80 bp, synthetic construct
  source 1..80: mol_type = other DNA
ataatcacttggaatggaagactcttagaaactatgtataagcatacggctactgttacctcatttcagtcagagaagat

SEQ ID NO: 12639 - DNA, 80 bp, synthetic construct
  source 1..80: mol_type = other DNA
gtaggaagttccaaaaagtaatgatgaaagacactcttatttttaagccatgaccattcctggaagaaaacagaaactgg

SEQ ID NO: 12640 - DNA, 80 bp, synthetic construct
  source 1..80: mol_type = other DNA
gatctggagaggagcttgctcataattacaacacccaacttcacaaaagggcattttagaggcaagttaaacaaacagat

SEQ ID NO: 12641 - DNA, 80 bp, synthetic construct
  source 1..80: mol_type = other DNA
acttcttgcagatgttttcacccgctgcaaggctgccgttcattaatcaaacattatcattttctatcagtgcccagtgt

SEQ ID NO: 12642 - DNA, 80 bp, synthetic construct
  source 1..80: mol_type = other DNA
tatcattactgattattcacaatctgtctcccattaaggtatagtgctaataactttacacatggatatggcccccttcc

SEQ ID NO: 12643 - DNA, 80 bp, synthetic construct
  source 1..80: mol_type = other DNA
actttatctgccagtgatgatcctgcttcaatttttctatctaacatactcccacccctccagattaaagactcaacccc

SEQ ID NO: 12644 - DNA, 80 bp, synthetic construct
  source 1..80: mol_type = other DNA
cagaatcagatctctgttgaagtctgaactttgtatctagcagtgatcaatattgtgcgtgtgctctccatacatgtgca

SEQ ID NO: 12645 - DNA, 80 bp, synthetic construct
  source 1..80: mol_type = other DNA
gaggcctcacaatcagcagcagatgaaaagtatgtcttacatggtggtggcaagagagaatgagaacaaagagaaaaggg

SEQ ID NO: 12646 - DNA, 80 bp, synthetic construct
  source 1..80: mol_type = other DNA
actgctgcagaagactctgcctccaccccgccccaaccaagggaaacaaaaactttaaaaactgtacacatttgatataa

SEQ ID NO: 12647 - DNA, 80 bp, synthetic construct
  source 1..80: mol_type = other DNA
ttatgatacttctccagtctggttaaggatttagctttcttgggtctgctaagtccaacctcatgtagccatctgctttt

SEQ ID NO: 12648 - DNA, 80 bp, synthetic construct
  source 1..80: mol_type = other DNA
accatccatcttcttgtagtcataaatatatctgataaaagatgattccctaacaaaggaaccacgggcgtctagaaata

SEQ ID NO: 12649 - DNA, 80 bp, synthetic construct
  source 1..80: mol_type = other DNA
cacataaatttaaaacatcgtgtaattcgaacagcttcttactagtggtttattttttaatgttctcattaaagttcctg

SEQ ID NO: 12650 - DNA, 80 bp, synthetic construct
  source 1..80: mol_type = other DNA
acccaatgaatctctgatctttgtgaagtcaagaaaaatgttttccccttcattgaatgcgtaataacaggtacctagac

SEQ ID NO: 12651 - DNA, 80 bp, synthetic construct
  source 1..80: mol_type = other DNA
gttcaataaaggtatcatccctagttgttccctctgttaaaataaaatgctttatttattctttgcttccttccacccca

SEQ ID NO: 12652 - DNA, 80 bp, synthetic construct
  source 1..80: mol_type = other DNA
tccccctcattttcttgtgtgtataccaattagcctacaatggtagagaccatatgttcaattattcggcattatggaaa

SEQ ID NO: 12653 - DNA, 80 bp, synthetic construct
  source 1..80: mol_type = other DNA
cggctccagctcactgcaacctccgcctcccaggttcacgccattctcctgtctcaatctccctagtagctgggactaca

SEQ ID NO: 12654 - DNA, 80 bp, synthetic construct
  source 1..80: mol_type = other DNA
taccaaatctacctctcctgcccacacttctcatattatttccccagaactaatcaggtacacctaagagcttcctggat

SEQ ID NO: 12655 - DNA, 80 bp, synthetic construct
  source 1..80: mol_type = other DNA
tgtctgtctcccccaaaactgtaagcctcttgataacaaggtcacattaatcacagatcaggaacttggtatttactgaa

SEQ ID NO: 12656 - DNA, 80 bp, synthetic construct
  source 1..80: mol_type = other DNA
tttagggaattttgcttctcatataactcgttgattttaggctgctttctgatcctacagaaacaagggtcttcgagtga

SEQ ID NO: 12657 - DNA, 80 bp, synthetic construct
  source 1..80: mol_type = other DNA
tccactgtactgccctgagcaccttgaataaaaggaactatgctctggatggctttttgttatttcctggctgaagtcaa

SEQ ID NO: 12658 - DNA, 80 bp, synthetic construct
  source 1..80: mol_type = other DNA
ctatctcttctgctacctatgttgttgttcttaaattccacaaacagatgcatgcatgcaaaacaagtcaggttctatta

SEQ ID NO: 12659 - DNA, 80 bp, synthetic construct
  source 1..80: mol_type = other DNA
cacatatggatgtgtggccaaaagagatgaaatcaaggactcaaagaaatatctgtataacctatgtttgtgggagcatt

SEQ ID NO: 12660 - DNA, 80 bp, synthetic construct
  source 1..80: mol_type = other DNA
aatacctgactgtgatacaatctccaaagacaaaagaagggctattttttcctgtaaaatggaaacttaaccagggagaa

SEQ ID NO: 12661 - DNA, 80 bp, synthetic construct
  source 1..80: mol_type = other DNA
tgcctagtttcctccaacttgcatcaatccctgccatttccatgccattttccttttctcttactaacccctcttttctt

SEQ ID NO: 12662 - DNA, 80 bp, synthetic construct
  source 1..80: mol_type = other DNA
tacccatagtatatgttcactaataaccccttccaggttcaaatgataattatctcccacaaaaaatgtaactggcagcc

SEQ ID NO: 12663 - DNA, 80 bp, synthetic construct
  source 1..80: mol_type = other DNA
tctgatattcagcacagtaatgtaatacttgacataattataaggcatcaaagtaggaatgacttaagagtggctttgag

SEQ ID NO: 12664 - DNA, 80 bp, synthetic construct
  source 1..80: mol_type = other DNA
acatctattttatctccttctggggctttgcatgaactcattaagtaatgatttaatgaactctcagctggaattctatt

SEQ ID NO: 12665 - DNA, 80 bp, synthetic construct
  source 1..80: mol_type = other DNA
taaaaatacgtataaagttcctactatgtacccgccactttgctaggcaccaaacatctgtcaatgaagaaagcagacag

SEQ ID NO: 12666 - DNA, 80 bp, synthetic construct
  source 1..80: mol_type = other DNA
gagtggtggtagcaagaagtaagttcaaggaaaatcttttgggtggacacaagtaaagcacttggtgttgaaaaagacta

SEQ ID NO: 12667 - DNA, 80 bp, synthetic construct
  source 1..80: mol_type = other DNA
tgaacgtgcaagcacacacatcaaacacacatacacacaggtgaaaaacatttttcacaaaataacacttgccctaacca

SEQ ID NO: 12668 - DNA, 80 bp, synthetic construct
  source 1..80: mol_type = other DNA
tgtgtcaaatactaatgatgatgcacacctgtaacagagactttcatttctatcctctctcaatatctgtcatccccttt

SEQ ID NO: 12669 - DNA, 80 bp, synthetic construct
  source 1..80: mol_type = other DNA
cagcacataaatatgaaaggactctacattctaaatgctgtattcacacctcagtgcagagtcaaatggagacaactgta

SEQ ID NO: 12670 - DNA, 80 bp, synthetic construct
  source 1..80: mol_type = other DNA
tcaggcattagttacagattctcataaggagcatgcaacttagatccttcgcatgcccagttcacaatagagtttgcact

SEQ ID NO: 12671 - DNA, 80 bp, synthetic construct
  source 1..80: mol_type = other DNA
ttttcttcctagagattctcactggtgatgatggtgtggtgaaagaatgggaagataaacatcttgccgaaatctctcca

SEQ ID NO: 12672 - DNA, 80 bp, synthetic construct
  source 1..80: mol_type = other DNA
gcactggttcttcagtaatactgatacttggaaacataagagtgggtacttacagggtgaggtaaaaaatggagcctgac

SEQ ID NO: 12673 - DNA, 80 bp, synthetic construct
  source 1..80: mol_type = other DNA
ccccttgaaagtaaaagacaaatagagctgcatctcacatttcctgccatatagaaggaagcacaatgcctggtaggttt

SEQ ID NO: 12674 - DNA, 80 bp, synthetic construct
  source 1..80: mol_type = other DNA
aatagaatattagcaaactgagtaagtatgccattttcaaagttgagcactggaatgccatgccaatgaattaattggtg

SEQ ID NO: 12675 - DNA, 80 bp, synthetic construct
  source 1..80: mol_type = other DNA
tattccagcagttctgaatgtcatataccctgagccaaagttccatctaatagtctcttagggatttgatgaaaactttc

SEQ ID NO: 12676 - DNA, 80 bp, synthetic construct
  source 1..80: mol_type = other DNA
aattctgagttgcattacaaaaaaaggtataaataaacatcagctaagaagccatttctcctaaagggaatacccaattt

SEQ ID NO: 12677 - DNA, 80 bp, synthetic construct
  source 1..80: mol_type = other DNA
atccgggagctggttttttgaaaaaaaaatatatatatatatacacacacaccaataggtagactaatgaagaaaaaaga

SEQ ID NO: 12678 - DNA, 80 bp, synthetic construct
  source 1..80: mol_type = other DNA
caaaagacagaaataaagagtattcaaataggaaaagaggaagtcgaactgcctgtttgcagatgacatgatcccatatc

SEQ ID NO: 12679 - DNA, 80 bp, synthetic construct
  source 1..80: mol_type = other DNA
gaaaatctaggaaataccattcaggacataggcacgggcaaagatttcatcatgaaaacatcaaaagcacctgcacaaaa

SEQ ID NO: 12680 - DNA, 80 bp, synthetic construct
  source 1..80: mol_type = other DNA
agatacatgcaggtgtatgttcactgcagcattattcacaatagcaaagacatggaatcaaccaaaatgcccatcaataa

SEQ ID NO: 12681 - DNA, 80 bp, synthetic construct
  source 1..80: mol_type = other DNA
aaattcaaaaacctcaatgaagcagaaatttttctagaaatatattggcaaaattgatacgagaataaaatcagtggaaa

SEQ ID NO: 12682 - DNA, 80 bp, synthetic construct
  source 1..80: mol_type = other DNA
gcttattaaactactaagtatacaggactggagttcaaaagaaggatggctctacatggttctagtcctggcatactact

SEQ ID NO: 12683 - DNA, 80 bp, synthetic construct
  source 1..80: mol_type = other DNA
atatatttcttggcactcagtatattgcctactactgcaccttgatgagttttcaaataagagtaatgggtatgctctaa

SEQ ID NO: 12684 - DNA, 80 bp, synthetic construct
  source 1..80: mol_type = other DNA
atttgtttcttacagacaattaatcacatgcaggcatgccagatgagaactattgattgcccttttccaggctagtggca

SEQ ID NO: 12685 - DNA, 80 bp, synthetic construct
  source 1..80: mol_type = other DNA
cttctgtgaaagcaatgagtattccaaaagttcagtcattaaaaaacaattctattgtatattaatgcctattgcctgca

SEQ ID NO: 12686 - DNA, 80 bp, synthetic construct
  source 1..80: mol_type = other DNA
ggcatagggcagggataaaaatctcttaagccaacttgtgaactccagccacattacctcaaggtaacaagaatgtgcca

SEQ ID NO: 12687 - DNA, 80 bp, synthetic construct
  source 1..80: mol_type = other DNA
cacttagcacagtgttaaacgaataagtgtgagagaatccatttcccagcatctcctgaagcaaatcagagaaatatgaa

SEQ ID NO: 12688 - DNA, 80 bp, synthetic construct
  source 1..80: mol_type = other DNA
cccataggcgacatatgcctccactcttgtgatactacagattccaatatgtgaaaagttgatttggaatagataaaatg

SEQ ID NO: 12689 - DNA, 80 bp, synthetic construct
  source 1..80: mol_type = other DNA
aaagtggaattgccaggatattaaagagtagcccagataatccccattttggtgatgccatcctctgagatggtaaactc

SEQ ID NO: 12690 - DNA, 80 bp, synthetic construct
  source 1..80: mol_type = other DNA
agaggtaaagcaaagggcagcattggcctcactatcctaacaataacatcataatccttatatattaatttataagagaa

SEQ ID NO: 12691 - DNA, 80 bp, synthetic construct
  source 1..80: mol_type = other DNA
gttacaaatagggttggttccattttaggccttttgtgaaaatgcaatcaagtggcaaacagatttttcctagtttacca

SEQ ID NO: 12692 - DNA, 80 bp, synthetic construct
  source 1..80: mol_type = other DNA
attccatggatctaggttttccacatcactaatatccaggattttcagttatatctccattaaaagaaatattcacaggg

SEQ ID NO: 12693 - DNA, 80 bp, synthetic construct
  source 1..80: mol_type = other DNA
tagatgaggagttatggctaactttcagtctttcctttctagagtcatgcctcctctaggaaacactcatggggcacatt

SEQ ID NO: 12694 - DNA, 80 bp, synthetic construct
  source 1..80: mol_type = other DNA
gtaaatagccaacctagccttgagtcaactcagccctggatttaaatgacagtgatcagtcctcactgttatctatgtac

SEQ ID NO: 12695 - DNA, 80 bp, synthetic construct
  source 1..80: mol_type = other DNA
gttatttatgctatccaatggattggctcacacagttgcttgcatttaataggtcaaagcagtaactttctctcctggaa

SEQ ID NO: 12696 - DNA, 80 bp, synthetic construct
  source 1..80: mol_type = other DNA
tgtgctcagcattcactcataagcaagaaataggttagttctgaaacgcctagcatatctgaacaaattctagctaatgg

SEQ ID NO: 12697 - DNA, 80 bp, synthetic construct
  source 1..80: mol_type = other DNA
tctcatttcacctagtgttcaaattccatgagacagaatgtatctaaactcatagtgtccaagacggaatccactagcca

SEQ ID NO: 12698 - DNA, 80 bp, synthetic construct
  source 1..80: mol_type = other DNA
attattaggtccagttacttacagtatcaaattcctaagagattttttcttagaatatagttccctattgtttcataatg

SEQ ID NO: 12699 - DNA, 80 bp, synthetic construct
  source 1..80: mol_type = other DNA
tctccagcacctgttgtttcctgactttttaatgatcgccattctaactggtgtgagatggtatctcattgtggttttga

SEQ ID NO: 12700 - DNA, 80 bp, synthetic construct
  source 1..80: mol_type = other DNA
agcatcatacacaatagtttctttcactgtcctaaaaatcttcttaatctccatatgcatccctctctcaccttctcccc

SEQ ID NO: 12701 - DNA, 80 bp, synthetic construct
  source 1..80: mol_type = other DNA
ctcactcataggtgggaattgaacaatgagatcacatggacacaggaaggggaatatcacactctggggactgttgtggg

SEQ ID NO: 12702 - DNA, 80 bp, synthetic construct
  source 1..80: mol_type = other DNA
tactgcagctttacagtaagtcttaaaatcaggtagtccgagtcctccaactttgttgttctatattatgttggttaatc

SEQ ID NO: 12703 - DNA, 80 bp, synthetic construct
  source 1..80: mol_type = other DNA
gatatgcttaaacaaagtagtaaaagtcaccaaggaaaacagttctaccttagtgataatgaagaattatctgcaagtga

SEQ ID NO: 12704 - DNA, 80 bp, synthetic construct
  source 1..80: mol_type = other DNA
gaatgcctgaatgaagaaattgctatttgtgcatccaaaagtaagtttcctgaaattacataccttctaggagatgcttc

SEQ ID NO: 12705 - DNA, 80 bp, synthetic construct
  source 1..80: mol_type = other DNA
tccaaaatcatatgctcaggacacttacattagcccacagataggcaaaataatctaccacaaagcctgttataagataa

SEQ ID NO: 12706 - DNA, 80 bp, synthetic construct
  source 1..80: mol_type = other DNA
tatcttgaagttctgattctcattatccttagtattgcacaatattaccacaaccctgtgtctaggtgaagacctttcat

SEQ ID NO: 12707 - DNA, 80 bp, synthetic construct
  source 1..80: mol_type = other DNA
ttatcttagaccactccccagcagaagttagcagagaataacctagtccccatgtttttataccatttctggcccaaaag

SEQ ID NO: 12708 - DNA, 80 bp, synthetic construct
  source 1..80: mol_type = other DNA
ttgtcaaactgtatcataaatgtgctaggtttattcctaaatttatttgtataccagctttcacaaaatcatacttaggc

SEQ ID NO: 12709 - DNA, 80 bp, synthetic construct
  source 1..80: mol_type = other DNA
tgaaaattaaaccactagctttgtattccagatttgcctctcactacatgtgaggttgtggaagttaattaatttcctgg

SEQ ID NO: 12710 - DNA, 80 bp, synthetic construct
  source 1..80: mol_type = other DNA
ccaatcaatgttagtttgattaactgaatccttacctagtgggctcttactacactgggtattcacataagccagtttgc

SEQ ID NO: 12711 - DNA, 80 bp, synthetic construct
  source 1..80: mol_type = other DNA
tagagaatccagggtgggtgtgttatatccctagatccctccatcaccacacatatgacacaatgtacaaagaataaact

SEQ ID NO: 12712 - DNA, 80 bp, synthetic construct
  source 1..80: mol_type = other DNA
catcctcccacccaccatttctcttccccctaagtccacaaagtctattgtatcattcttatgcttttgtgtcctcacaa

SEQ ID NO: 12713 - DNA, 80 bp, synthetic construct
  source 1..80: mol_type = other DNA
taatccagtatattcctgaaaattcagaattgaggtggtaattttaagtataaattttccagctctcattcattttgaca

SEQ ID NO: 12714 - DNA, 80 bp, synthetic construct
  source 1..80: mol_type = other DNA
aaaaaaagcagctggcctcctgattctacataaggctatgcatcatgtgatttattccttttccactatggtccctccaa

SEQ ID NO: 12715 - DNA, 80 bp, synthetic construct
  source 1..80: mol_type = other DNA
cagagggacagtgttcccagagaaaagaattaaaaccatgtgagagtttccagaggaataatgtatttccctgtctctct

SEQ ID NO: 12716 - DNA, 80 bp, synthetic construct
  source 1..80: mol_type = other DNA
taaggagagcttcagggaaaataatctgttacagaagatagtcttttcataagagggtctccttgccatacttccacata

SEQ ID NO: 12717 - DNA, 80 bp, synthetic construct
  source 1..80: mol_type = other DNA
tgtataagatgcataggtttcaatactactatcaggaaccatcaattaaaacttagcagagtatttgacacataggaata

SEQ ID NO: 12718 - DNA, 80 bp, synthetic construct
  source 1..80: mol_type = other DNA
acgttgcttccatgaaaagcctcagacataagtacagattcctagtgattacagaatactgatgataacaaaaaggaaca

SEQ ID NO: 12719 - DNA, 80 bp, synthetic construct
  source 1..80: mol_type = other DNA
tacctcattaacaaatacagaataaagatagtaaaatctgagtcaagggcatttgaggctgccatggcttaatcggtgaa

SEQ ID NO: 12720 - DNA, 80 bp, synthetic construct
  source 1..80: mol_type = other DNA
tgttttagttcaagtctcagttggaaggcctgagaaccagttaagttttagttttagttctagtccaagagtaggggaga

SEQ ID NO: 12721 - DNA, 80 bp, synthetic construct
  source 1..80: mol_type = other DNA
taagaatgaagctagaggactaacacttcctgatttcaaaaattactgcaaagctaacataatcaagatagtatggtact

SEQ ID NO: 12722 - DNA, 80 bp, synthetic construct
  source 1..80: mol_type = other DNA
agcaaacatatttagttcctgctgaagcccactgatctcttcacttagtaaaagcaactgagcaggtcatcattgttaga

SEQ ID NO: 12723 - DNA, 80 bp, synthetic construct
  source 1..80: mol_type = other DNA
catcagagtaagaagtcatttcaggttaaggtgtccagaaacagcattaaatgggtaacagtcaaaatgattctggctgt

SEQ ID NO: 12724 - DNA, 80 bp, synthetic construct
  source 1..80: mol_type = other DNA
gcaggtgttgaattttctattagtccttggggtatttaaagcatgtctataggcacgacatgtgccacttaggtgagtta

SEQ ID NO: 12725 - DNA, 80 bp, synthetic construct
  source 1..80: mol_type = other DNA
gataacgtttttattgatcctgagatatttaactggaacaaaaacacaggcacatacaagcacgtgcacacatacacaca

SEQ ID NO: 12726 - DNA, 80 bp, synthetic construct
  source 1..80: mol_type = other DNA
ccccatgagttagtcaaaataacttagtctatgtgtgcacatgtattcaattcattattcatcaaatatgtgagagcgct

SEQ ID NO: 12727 - DNA, 80 bp, synthetic construct
  source 1..80: mol_type = other DNA
agaaagaaaaagatgaaatactattttatttagtgtgtagtagagtttctacaatttgcttcaaagaggatacttttcta

SEQ ID NO: 12728 - DNA, 80 bp, synthetic construct
  source 1..80: mol_type = other DNA
ttgctgggtttcaaatttcttttctatacaatgagatgcctagttcaattacattttcttttggtctatattctgttaca

SEQ ID NO: 12729 - DNA, 80 bp, synthetic construct
  source 1..80: mol_type = other DNA
gtgatattttaacaataataccccagtcctttgtctttaactctagtaaatttagtattccacaatttgccagattcaag

SEQ ID NO: 12730 - DNA, 80 bp, synthetic construct
  source 1..80: mol_type = other DNA
atcaaagttctttccttcctgctgagtaacacaggggtttacttttcaacttcaacaatttgatgagagaaaactggtat

SEQ ID NO: 12731 - DNA, 80 bp, synthetic construct
  source 1..80: mol_type = other DNA
aaatagcttttaagtcatgaataggcatgtccaaggactgaaaataacaaggcagtaagtagaccagagaaatcagtggg

SEQ ID NO: 12732 - DNA, 80 bp, synthetic construct
  source 1..80: mol_type = other DNA
ttgaaaagattaataaaaagctggcagattagaaaaaaagcacaaaaaactcttagaaatgaaagatataattgtagctc

SEQ ID NO: 12733 - DNA, 80 bp, synthetic construct
  source 1..80: mol_type = other DNA
atgacacaaaccaacccataatacataggccaaaattggcaggtcatctgtaatgaaaactggcacgagttcagaattac

SEQ ID NO: 12734 - DNA, 80 bp, synthetic construct
  source 1..80: mol_type = other DNA
aactgaaaggcaaactggaaagcagaaagcaccaaatctattggttacatttctgcttttctgctttgtaacagctgtaa

SEQ ID NO: 12735 - DNA, 80 bp, synthetic construct
  source 1..80: mol_type = other DNA
tacattgtacacagctggtaaatatctaaaaagctgcaggctttaaagaacaacagtctttgaccttttatgattgctac

SEQ ID NO: 12736 - DNA, 80 bp, synthetic construct
  source 1..80: mol_type = other DNA
tttatactacaactctgtaagatagatgctacctttccttcataagtgaaagtaaggaggtaattacccccagtttcaca

SEQ ID NO: 12737 - DNA, 80 bp, synthetic construct
  source 1..80: mol_type = other DNA
atatcaagattagttggacagctcttctgacacggggcatctgcacatttcaggcatctaggaaataaaataactatgtt

SEQ ID NO: 12738 - DNA, 80 bp, synthetic construct
  source 1..80: mol_type = other DNA
aaggagccattgaagcatttattgtgactatttgctcagtcccacttccttcactcttctacagatgttaacctgcatat

SEQ ID NO: 12739 - DNA, 80 bp, synthetic construct
  source 1..80: mol_type = other DNA
cattctccaagaatttcactgagcatgaatcctacattgctcagtgacaaaggtgactagctagttcattttctatacac

SEQ ID NO: 12740 - DNA, 80 bp, synthetic construct
  source 1..80: mol_type = other DNA
gcatcaggctgccattaatcccacttatcactctgacagctcagtaattacactactgctatagccaggtagtcctaata

SEQ ID NO: 12741 - DNA, 80 bp, synthetic construct
  source 1..80: mol_type = other DNA
gacaccaaaaatattatagtgagtaatgaaacaagcggcatttcattcttcacacatctgagaacagatgcctgcttctt

SEQ ID NO: 12742 - DNA, 80 bp, synthetic construct
  source 1..80: mol_type = other DNA
ggcagctatgataacatcaatgaaaataactgaatttttaatgctgtgcaccatttgccttttaaccacacctgtgatgt

SEQ ID NO: 12743 - DNA, 80 bp, synthetic construct
  source 1..80: mol_type = other DNA
agaaggaaagtgacttgtcctaaatcttcctcagagtttatggcaagcttttctaactcaatccattgcctattctagtc

SEQ ID NO: 12744 - DNA, 80 bp, synthetic construct
  source 1..80: mol_type = other DNA
tgaaaattatgggattgaatgaaattactgtaggttgcagcatgaaggaaaagtgtcccaattctgactactctctgtta

SEQ ID NO: 12745 - DNA, 80 bp, synthetic construct
  source 1..80: mol_type = other DNA
ggagaaccagagacgccttcttagatagagaaacttatgctgaaagttgaggaacaggtaggttttgaccatgtagagat

SEQ ID NO: 12746 - DNA, 80 bp, synthetic construct
  source 1..80: mol_type = other DNA
aaatatttctcatgttccagggtaaggcagcaaatttccgtgacaaaataggctatccatgtacaaatatggtctatctt

SEQ ID NO: 12747 - DNA, 80 bp, synthetic construct
  source 1..80: mol_type = other DNA
tactaacagtttttattatagcttttctattgcactgtaatcttatttcacctggaccatttccccactagcatcataaa

SEQ ID NO: 12748 - DNA, 80 bp, synthetic construct
  source 1..80: mol_type = other DNA
gctaccataaaaaagggctgaggtggatgaaaagaatactgagtgacaatgcaagtgctggaggcactcattcattaagc

SEQ ID NO: 12749 - DNA, 80 bp, synthetic construct
  source 1..80: mol_type = other DNA
caggcctgtgccaccacatccagctaatttttgtatttttattagagactttcaccacgttggccgggctggtgtcgaac

SEQ ID NO: 12750 - DNA, 80 bp, synthetic construct
  source 1..80: mol_type = other DNA
tcattttcaaactgtgcattccacatgctcttccctttcctgaagagccacacttcaagtcttcatccgaactcagctca

SEQ ID NO: 12751 - DNA, 80 bp, synthetic construct
  source 1..80: mol_type = other DNA
gcctgtggggatcatcatttcatttctgcaatagttctcataatgatagccagtaatcccagagaacttgagaaagtttc

SEQ ID NO: 12752 - DNA, 80 bp, synthetic construct
  source 1..80: mol_type = other DNA
tccactatgctcctaatgaaatgcataagagcactgacaatgctgtcacagtacgtggcatgctccattaatttaagaaa

SEQ ID NO: 12753 - DNA, 80 bp, synthetic construct
  source 1..80: mol_type = other DNA
agctctctgcccaaccacatttaattcacccccactgtaaacaaatcatcccttctttcaactgatctctcttcttttat

SEQ ID NO: 12754 - DNA, 80 bp, synthetic construct
  source 1..80: mol_type = other DNA
gattataatgaaagcagcagccataccacaaagccaaacataaactgatctccatagataccccatttgcacgatgagtt

SEQ ID NO: 12755 - DNA, 80 bp, synthetic construct
  source 1..80: mol_type = other DNA
tgtatccccaaatatcctgataggtctcaagaggacattcattcattcaacgaatattgtttgagtacctgttaggtcca

SEQ ID NO: 12756 - DNA, 80 bp, synthetic construct
  source 1..80: mol_type = other DNA
cctgagaaatggagcgcctgcccctttttgattatctcattcatagacatctcccatcacaaaatacttcagtcataggg

SEQ ID NO: 12757 - DNA, 80 bp, synthetic construct
  source 1..80: mol_type = other DNA
catcctaccaaaacaaagctttgctgcattggtgttcagaaatatttcactaaatatcttaaagttctaagagcccaagg

SEQ ID NO: 12758 - DNA, 80 bp, synthetic construct
  source 1..80: mol_type = other DNA
tcggaagagttaggataacagatacctgagagagggtagctggaatgaaattctagtctgtattggaactcagttttact

SEQ ID NO: 12759 - DNA, 80 bp, synthetic construct
  source 1..80: mol_type = other DNA
actgatcttcccatgcaaggggttagaacaacactgaaagtcgtgctaattaggataatataaaaccgtatgccaaagag

SEQ ID NO: 12760 - DNA, 80 bp, synthetic construct
  source 1..80: mol_type = other DNA
gatggagctgaaggccattatcctaggcaaacacacacaggaaaagaaaatcaaatactacatgctatcacttataagtg

SEQ ID NO: 12761 - DNA, 80 bp, synthetic construct
  source 1..80: mol_type = other DNA
cctccaatttgttttaagcatagcagccataacattttcaaagaactgtcaaatcaagctcacactcccgaaatagggta

SEQ ID NO: 12762 - DNA, 80 bp, synthetic construct
  source 1..80: mol_type = other DNA
cttcatactagcttaattagtatgcatttattgtgtgtgaaaacatcctcaaggattttcgttttcttccagtcaggtca

SEQ ID NO: 12763 - DNA, 80 bp, synthetic construct
  source 1..80: mol_type = other DNA
cttctccctgtagactgaaaattatttgaaagcgatgttaattttaatttatattatatctctcatcctgtgaacagtgc

SEQ ID NO: 12764 - DNA, 80 bp, synthetic construct
  source 1..80: mol_type = other DNA
gccactgggttgggagtggtttgatctacaacaacagctagttgatgaaagactgtgtctacaagtacaataatatgtaa

SEQ ID NO: 12765 - DNA, 80 bp, synthetic construct
  source 1..80: mol_type = other DNA
tgatcaaattaaggctgtggccgtaaaaccctttgttaacacctctgaaagaattaagtggtgcccaacaggggaaagga

SEQ ID NO: 12766 - DNA, 80 bp, synthetic construct
  source 1..80: mol_type = other DNA
gccacatcagaacttcatgtagtataggagaccctggaattaacatgatgttagaactggattcaatttctgggtttgga

SEQ ID NO: 12767 - DNA, 80 bp, synthetic construct
  source 1..80: mol_type = other DNA
cgtgtcctgaatgtgcccttgccagagtttatttcaacgtgaattgattctaaatacacttttttgcaagcattgcccaa

SEQ ID NO: 12768 - DNA, 80 bp, synthetic construct
  source 1..80: mol_type = other DNA
ctattgacagaatatcccagattctttacaaactatttagaaattgctgggtttgcctagatttccattaagtagcagta

SEQ ID NO: 12769 - DNA, 80 bp, synthetic construct
  source 1..80: mol_type = other DNA
tgatattaaaaagccattcaatgaaagatctgagaggaagggcattttggcagaaggaactgcaaatgcaaagggccagt

SEQ ID NO: 12770 - DNA, 80 bp, synthetic construct
  source 1..80: mol_type = other DNA
gtggtggcatgcgccagggggtagtggaggttgcagtgagccgcactccagtctaggtgacagaacgagactttgtctca

SEQ ID NO: 12771 - DNA, 80 bp, synthetic construct
  source 1..80: mol_type = other DNA
agttaacaacagcagtattccacctctcatcctatcttctctccacagaaaactgtagagaagccacttgaatttggaga

SEQ ID NO: 12772 - DNA, 80 bp, synthetic construct
  source 1..80: mol_type = other DNA
tattagtaaataagtttaattcatatttactaatgatacaggagaagggcagggaagtgctggcagagaagggcattgtc

SEQ ID NO: 12773 - DNA, 80 bp, synthetic construct
  source 1..80: mol_type = other DNA
aggagagtatgaatgcaaaactgtaggatctgccactcttccaaaacactgccacctctctctctttcctgtgagtaaaa

SEQ ID NO: 12774 - DNA, 80 bp, synthetic construct
  source 1..80: mol_type = other DNA
atgtccaaatcatcatcaatgatttgctagaaatagcatcctcaaaggtcacctcactgcatgccaaactggagtaggga

SEQ ID NO: 12775 - DNA, 80 bp, synthetic construct
  source 1..80: mol_type = other DNA
atcccacattgggtcatcatttatcctgaatattactgagtttgtctcacattactgtatcttaatttacatttagaatt

SEQ ID NO: 12776 - DNA, 80 bp, synthetic construct
  source 1..80: mol_type = other DNA
tccttccttggtcttaggcagtctacgttttggagcacaacaatttggagcacaacaaaaataggaaacctgcttaaagt

SEQ ID NO: 12777 - DNA, 80 bp, synthetic construct
  source 1..80: mol_type = other DNA
acatgctttttggttttttgttctagcttgactgtgtggtgaagtagccattatgtactaacctgtcatgtggcaaataa

SEQ ID NO: 12778 - DNA, 80 bp, synthetic construct
  source 1..80: mol_type = other DNA
agagctcaaactagctaaggaaccacttggttcaacaagctctctttctatactgatggttagcattgaaacatactgcc

SEQ ID NO: 12779 - DNA, 80 bp, synthetic construct
  source 1..80: mol_type = other DNA
tcttctctatggatccagtgattcatgtttgtaatgggttctctgtttccctttttgcattagttgctaaagtacttaca

SEQ ID NO: 12780 - DNA, 80 bp, synthetic construct
  source 1..80: mol_type = other DNA
gcaagtagtactctacaaaacctcattctgtcccttcttttaactgaaaagaagccagatggaaacatgcaacttgtcaa

SEQ ID NO: 12781 - DNA, 80 bp, synthetic construct
  source 1..80: mol_type = other DNA
ctcatatttagagtgtaagcattaccatttctgagatgccccagggaatgttttgatttgctcatccattcttgtatgtc

SEQ ID NO: 12782 - DNA, 80 bp, synthetic construct
  source 1..80: mol_type = other DNA
ggcgcagagctaccagcctaaaccacctctgttatcttcatttctctacagatttgcctttctttcaaacccactatccc

SEQ ID NO: 12783 - DNA, 80 bp, synthetic construct
  source 1..80: mol_type = other DNA
aagatgacttacaccacagaaaatcagatgtgctttatcgggtttggcaagtagggactgctttcccagggagatgtttc

SEQ ID NO: 12784 - DNA, 80 bp, synthetic construct
  source 1..80: mol_type = other DNA
gggagacatgacgattcctgctaattgccattcattacctctccaaacaacagtgtttccttagatataagccatgcttt

SEQ ID NO: 12785 - DNA, 80 bp, synthetic construct
  source 1..80: mol_type = other DNA
aagagaaaaacatagcagcatagcaaaatatacttgcattttgtataagcttcaaacaccacaaagtccattgaacgttt

SEQ ID NO: 12786 - DNA, 80 bp, synthetic construct
  source 1..80: mol_type = other DNA
atggattcttttaacgtacagatgaaaacaagtgtgatatgtaaaaatgtggacatttgtgacgtgtaattggccttcac

SEQ ID NO: 12787 - DNA, 80 bp, synthetic construct
  source 1..80: mol_type = other DNA
aacttctagactagttagccattgcttcatattttatgctttatttctctggctttgaggaaaaaaaaccacaggtcact

SEQ ID NO: 12788 - DNA, 80 bp, synthetic construct
  source 1..80: mol_type = other DNA
caagatttagtaataaagcttcctctagaaaaatcacacggtagtagagaggtagacaggttaaattgccattgcaacac

SEQ ID NO: 12789 - DNA, 80 bp, synthetic construct
  source 1..80: mol_type = other DNA
tcccaaagtgctgggaacaagctgtttaatgcaaacacctgtggctgaataaaaccttaacccaagaaataacctgcact

SEQ ID NO: 12790 - DNA, 80 bp, synthetic construct
  source 1..80: mol_type = other DNA
ataaatatgtcttcttagatatacctcctgaaagactccgtgtccacaaatcactcagctcccttcctcaaatcaaaatg

SEQ ID NO: 12791 - DNA, 80 bp, synthetic construct
  source 1..80: mol_type = other DNA
gtaaaaacagtgtggttattttctgtgttctcaccatttggatattatttcttactctcttcacatctctttttcactca

SEQ ID NO: 12792 - DNA, 80 bp, synthetic construct
  source 1..80: mol_type = other DNA
ccatgtgtaaattttttgaaggagtaatttgcatttttggtaacacagaatgtctccagagaagccatgcttaagtctag

SEQ ID NO: 12793 - DNA, 80 bp, synthetic construct
  source 1..80: mol_type = other DNA
tgatgaaactaagcctcaatcacatcaaaacgcccataaaatttcatgaaaataagagaatgacacttcatcttagttct

SEQ ID NO: 12794 - DNA, 80 bp, synthetic construct
  source 1..80: mol_type = other DNA
aattttgttaagatggtgattcacctcaaattgatatatcaagtcaacacagccccaatcaaaatcctagcagatgcttt

SEQ ID NO: 12795 - DNA, 80 bp, synthetic construct
  source 1..80: mol_type = other DNA
caacctcagccttcccaaattttgggattacaggcataagccaccaggcaaggccaaaagacattcttaagagaatgaaa

SEQ ID NO: 12796 - DNA, 80 bp, synthetic construct
  source 1..80: mol_type = other DNA
aatgggatgagcacagagtccagttaaagtcatacttctttatgtaaagttaccagtgttgggtaacttcaaaatgggtg

SEQ ID NO: 12797 - DNA, 80 bp, synthetic construct
  source 1..80: mol_type = other DNA
aagctaagttgttttccttgtcctaagcaacacagctaattagggaagttaatttttctccactgcttttaatcacatta

SEQ ID NO: 12798 - DNA, 80 bp, synthetic construct
  source 1..80: mol_type = other DNA
acccctggaaaaactacatggcttaccaaaagaggtctctctgttcactgtccattatctgttgactgaactagttcaaa

SEQ ID NO: 12799 - DNA, 80 bp, synthetic construct
  source 1..80: mol_type = other DNA
gtctttatttggcatatcatagatttctgtcaaccaaaacaactaactctggggaacataacgttctgacaacttcagaa

SEQ ID NO: 12800 - DNA, 80 bp, synthetic construct
  source 1..80: mol_type = other DNA
ctttctatggcaaggaaacgagtcctgtatagtcttgtaattcatctccctccaccaaacttcatccacactgacttctt

SEQ ID NO: 12801 - DNA, 80 bp, synthetic construct
  source 1..80: mol_type = other DNA
acttgttcaattcccccattagtagtgatatttatgctcctcaggatctctgtgtagcaaagtcctttagcgaaggcaca

SEQ ID NO: 12802 - DNA, 80 bp, synthetic construct
  source 1..80: mol_type = other DNA
actagattccatctccttccaccttctgtagagtcaaatgcttttaactttcatctcttctgttgtttcttggagcctcc

SEQ ID NO: 12803 - DNA, 80 bp, synthetic construct
  source 1..80: mol_type = other DNA
caatttagcttctgttcctactcctcaaatggatacagcttatgtcactaattatggccctgccacgagcttatatttta

SEQ ID NO: 12804 - DNA, 80 bp, synthetic construct
  source 1..80: mol_type = other DNA
gaacatatgaacataagccttaattaagacaaatctttcttctgcctgaataagaactgccaaaatgtcagagggcaaga

SEQ ID NO: 12805 - DNA, 80 bp, synthetic construct
  source 1..80: mol_type = other DNA
tgtctttaaaataattcccatttgcagttacatttcaaactgccgatttgacgcaccagtcaggaggaatgccacgactc

SEQ ID NO: 12806 - DNA, 80 bp, synthetic construct
  source 1..80: mol_type = other DNA
acgcttgtgagtagtgaaacaattgaaaggaattaaacataatcatgcaaattacttcccataatataaagtcctaaaac

SEQ ID NO: 12807 - DNA, 80 bp, synthetic construct
  source 1..80: mol_type = other DNA
acagacttgagagacactgatacacacagtggataagagccaaagaatagaacatgaacatagagtgagaacaggaccag

SEQ ID NO: 12808 - DNA, 80 bp, synthetic construct
  source 1..80: mol_type = other DNA
gcataaaatgtaaactgtcagacctgaaagaaaaaaactgaccaaattcaaatcatagttggagattttagcaaccctct

SEQ ID NO: 12809 - DNA, 80 bp, synthetic construct
  source 1..80: mol_type = other DNA
ctcactctcctaaaaatcctctgtgcctcacctattcatctcttcatcttaaacccctggcaacccctcatattttcact

SEQ ID NO: 12810 - DNA, 80 bp, synthetic construct
  source 1..80: mol_type = other DNA
atttctgggctctgtattccagctcattgatcgtgtctatcctttcaataacaccacattgccttgactactgcagcttt

SEQ ID NO: 12811 - DNA, 80 bp, synthetic construct
  source 1..80: mol_type = other DNA
atttatttcttcccaaactgtacacctttattttcttttctttctcatcacattagctagtgctgccagtatgatgccaa

SEQ ID NO: 12812 - DNA, 80 bp, synthetic construct
  source 1..80: mol_type = other DNA
aactacaagacaaatcagtggtcacagggagatgcaggatagctgaggtaccatgtagtatacacaatatcacagaatta

SEQ ID NO: 12813 - DNA, 80 bp, synthetic construct
  source 1..80: mol_type = other DNA
aaaagaagcatcaacgggaaataaaaagggcacttacccatctcgcttaatacaacagatgtgaagagaaaacagcatca

SEQ ID NO: 12814 - DNA, 80 bp, synthetic construct
  source 1..80: mol_type = other DNA
ctaaaccaggtgtaagagtatctccacaaatgttcaatgccactgtgccttcaatggccttacactataattcttaaact

SEQ ID NO: 12815 - DNA, 80 bp, synthetic construct
  source 1..80: mol_type = other DNA
tatatagctgtgactattttcagattttcctttacccactgcttcttccccactggttttgctttaatcttccctcatga

SEQ ID NO: 12816 - DNA, 80 bp, synthetic construct
  source 1..80: mol_type = other DNA
acaatagactttcattttggtggaatgccccatacaaggaacaactttcagactgcagttaatggtagtgactggctcga

SEQ ID NO: 12817 - DNA, 80 bp, synthetic construct
  source 1..80: mol_type = other DNA
aagacggttggtcagaagctttgtgagcaaggctgaaagaggttagacatatggttaatgagtcagaggaagatcacaaa

SEQ ID NO: 12818 - DNA, 80 bp, synthetic construct
  source 1..80: mol_type = other DNA
catactgaagtggctaagtcaagtgtctcattgaagtgtaaagctgaagtttttttaggggagacatcaaaagtagagat

SEQ ID NO: 12819 - DNA, 80 bp, synthetic construct
  source 1..80: mol_type = other DNA
gagagagagagtaattacacaagggaaacttttgaaaagactagaggaaatgggatccagatcacaagtgaaggtgttgg

SEQ ID NO: 12820 - DNA, 80 bp, synthetic construct
  source 1..80: mol_type = other DNA
aaatttcttctaatggacttaagtcatgtttgctctcaaccaggggtctgcaaactacaacacaagggctaaatccagat

SEQ ID NO: 12821 - DNA, 80 bp, synthetic construct
  source 1..80: mol_type = other DNA
aaaatgataagcattctagagtaacgacttagctctgcacttttctttggtagcaaaacaaaagctgcatcccttctttc

SEQ ID NO: 12822 - DNA, 80 bp, synthetic construct
  source 1..80: mol_type = other DNA
taaattatatttgggccatttgagcagtgagattggaaactgagtgtcaaatcttgctttcactcactcctaaagtgaat

SEQ ID NO: 12823 - DNA, 80 bp, synthetic construct
  source 1..80: mol_type = other DNA
actccaaatgctgtcacagtgcaagttttccttgactgcaaagaggagattttatagagaaatatatccatacatataca

SEQ ID NO: 12824 - DNA, 80 bp, synthetic construct
  source 1..80: mol_type = other DNA
accttttctcaagttattcaattcaagtaccttccaattgcatatatctattacccatagccctctactgcctgtgagac

SEQ ID NO: 12825 - DNA, 80 bp, synthetic construct
  source 1..80: mol_type = other DNA
tcagaaatgctgtataagatttccacacccatggcactacaatagactatgtagaagttggacaagatatacagcttcta

SEQ ID NO: 12826 - DNA, 80 bp, synthetic construct
  source 1..80: mol_type = other DNA
gctattccatctctagcactcaaaaacttcccaccaaactgcattagcagcaataagcaagagattggtgtattttttgt

SEQ ID NO: 12827 - DNA, 80 bp, synthetic construct
  source 1..80: mol_type = other DNA
tgatttcttcacctacttgttagcgtatcatctcttcccccatctcaatctcaaaagtcacttctatattccactggact

SEQ ID NO: 12828 - DNA, 80 bp, synthetic construct
  source 1..80: mol_type = other DNA
attggtctagatgtctctaagagccacagaaaaacggccaggaattccattcccctgtccttttcttcttaggcacatta

SEQ ID NO: 12829 - DNA, 80 bp, synthetic construct
  source 1..80: mol_type = other DNA
tctcttttctgttctaagctcatagaaatagtaaaacctaaataaataaggaggtacccaagatggtgaaaggcccccca

SEQ ID NO: 12830 - DNA, 80 bp, synthetic construct
  source 1..80: mol_type = other DNA
cacttaaattatccagactactgctttgtctcatagaatgggtggttggcaagttattccaggcaggtaatacttgtttt

SEQ ID NO: 12831 - DNA, 80 bp, synthetic construct
  source 1..80: mol_type = other DNA
gaagtggcttcaaaatgagggcagcttctattaaatttaattactttctcctgctgcttgcatggtaaaaggaaggttac

SEQ ID NO: 12832 - DNA, 80 bp, synthetic construct
  source 1..80: mol_type = other DNA
aacatttacattttttactgtgcactgaggcttaacatttatgcagcttcaaaaccaaagtacagcctcaagggaagtct

SEQ ID NO: 12833 - DNA, 80 bp, synthetic construct
  source 1..80: mol_type = other DNA
atgaatcttttggcaccctagatttcttatggaatttactagtatttagttgataaaataactagatttagtgtattact

SEQ ID NO: 12834 - DNA, 80 bp, synthetic construct
  source 1..80: mol_type = other DNA
acacataattttttgtttgtttctttttggccctgaaattcctcatcagcttcctcctctttgccaatcctactgcaatc

SEQ ID NO: 12835 - DNA, 80 bp, synthetic construct
  source 1..80: mol_type = other DNA
cacactgagcgctcagtgatgccaggaattgaagacagccaaatttctgatttagctgaaataccgtgtttcagagtacc

SEQ ID NO: 12836 - DNA, 80 bp, synthetic construct
  source 1..80: mol_type = other DNA
tgtaagttagtataggactgtcccagaatacgatttcagtggtaagtatcacataggggacttactttacaggataggaa

SEQ ID NO: 12837 - DNA, 80 bp, synthetic construct
  source 1..80: mol_type = other DNA
agccagactcaaactcctcgcgagtccgcttctaaagagtaaactgcataagtgaatataataaagttctgaataggcct

SEQ ID NO: 12838 - DNA, 80 bp, synthetic construct
  source 1..80: mol_type = other DNA
aaggctaaggtaataaaattggctctagcctcagaccttaccattactgtctacaggctaagtccttaggcaagttaatt

SEQ ID NO: 12839 - DNA, 80 bp, synthetic construct
  source 1..80: mol_type = other DNA
aaaaaagccaattcaatagggtaactgttataaggtaaataggcctcacatccattgccatgtattagtgatatatcagc

SEQ ID NO: 12840 - DNA, 80 bp, synthetic construct
  source 1..80: mol_type = other DNA
tgttcttacaaaaatgcttaacatctcaatctgcaaatagtccttcataaaatgaaggtatcaatgaagatgatgaaagt

SEQ ID NO: 12841 - DNA, 80 bp, synthetic construct
  source 1..80: mol_type = other DNA
ctatttagatggtatggctgtgtaatgcagtgcatgatgtactgtaataacaccacccagtgtgtgtaagattaaagtta

SEQ ID NO: 12842 - DNA, 80 bp, synthetic construct
  source 1..80: mol_type = other DNA
tctttaattagattccactctctgttgtttcaagactccataaacgggtgtcttatgtaccagctgctaaagcaggagtt

SEQ ID NO: 12843 - DNA, 80 bp, synthetic construct
  source 1..80: mol_type = other DNA
gaatagaattctaaggcacccactattttttattccaacagcacagacacttgaaacacagatgtctgaaatacatatca

SEQ ID NO: 12844 - DNA, 80 bp, synthetic construct
  source 1..80: mol_type = other DNA
ttaacataaacttttcaatcacatcaaatgaacagggccaatgctagaacaacagggactataggaactagaatccgtga

SEQ ID NO: 12845 - DNA, 80 bp, synthetic construct
  source 1..80: mol_type = other DNA
agagcttagttgcctgaaactttgccagtgctagacattattaatctcctacatatgccagttggagactgaaaagcatt

SEQ ID NO: 12846 - DNA, 80 bp, synthetic construct
  source 1..80: mol_type = other DNA
aatggagttatgtgcacaaatgatgtgaaatccatgaaaggcagaagcatgaggggatttcactgcatctaggcctggcc

SEQ ID NO: 12847 - DNA, 80 bp, synthetic construct
  source 1..80: mol_type = other DNA
attttacaagcagtgaaaaaggaaactgatggcatctctccccacatgactgtatgcaatcttcaatgctatgacagctc

SEQ ID NO: 12848 - DNA, 80 bp, synthetic construct
  source 1..80: mol_type = other DNA
agagcttaattttcaaatggtctttcaaaggaagatcatactaggtggcattcaagttgattttctctctcactaatata

SEQ ID NO: 12849 - DNA, 80 bp, synthetic construct
  source 1..80: mol_type = other DNA
tcatcatcctgacttctcttaagtctcaatttatacagacgcctatctcagaaaacctactcagggtctcaatttccctt

SEQ ID NO: 12850 - DNA, 80 bp, synthetic construct
  source 1..80: mol_type = other DNA
aatacatattttggttttcatccctgttttctggcacacagctcctataagctttgtaatctcagaagtcgtaagtgtct

SEQ ID NO: 12851 - DNA, 80 bp, synthetic construct
  source 1..80: mol_type = other DNA
agggacttcctgaagcatgagggctggactgtcagttccaggtggagtccctggagttagaacttacagtgctttttctg

SEQ ID NO: 12852 - DNA, 80 bp, synthetic construct
  source 1..80: mol_type = other DNA
aaggcgttgttgaacacagaggtttccggctggtgaagtgacacctcaaggatcacgtgacactgggatggtggcacaac

SEQ ID NO: 12853 - DNA, 80 bp, synthetic construct
  source 1..80: mol_type = other DNA
cccacttacactttggaacttttacctaagaatcagtcatttatttccaacggattgccatgaatttagaactggactat

SEQ ID NO: 12854 - DNA, 80 bp, synthetic construct
  source 1..80: mol_type = other DNA
tacattgtaggggtgggctgcgagctaatacagcatttgaatgcaagtccaaatatgtaaattaaaaataaggttaaact

SEQ ID NO: 12855 - DNA, 80 bp, synthetic construct
  source 1..80: mol_type = other DNA
cacacttataaaggaaagattatgttgtataattaagtataagcagaatctccctctgcatggcaccattaaccagcatc

SEQ ID NO: 12856 - DNA, 80 bp, synthetic construct
  source 1..80: mol_type = other DNA
agcctagatgtgaaccttagaagtttggcaccagaaccagcacactccaagcactccacaaataagaactgtattatctt

SEQ ID NO: 12857 - DNA, 80 bp, synthetic construct
  source 1..80: mol_type = other DNA
ttctggagtagaatccggttttaaatatctaaaatatcagcctcagaatgccagagtgactgaatagaaggaaaaatgag

SEQ ID NO: 12858 - DNA, 80 bp, synthetic construct
  source 1..80: mol_type = other DNA
atgatatttaaccctagtcctccaaactcagcaaataccaggccaacttttgaaatttctaccttggctaatggtgacag

SEQ ID NO: 12859 - DNA, 80 bp, synthetic construct
  source 1..80: mol_type = other DNA
aatgaggaaactgaggactagacagttgaagtaacctcctcaacatcacagagctggtagttttccaaaattcagttttc

SEQ ID NO: 12860 - DNA, 80 bp, synthetic construct
  source 1..80: mol_type = other DNA
gcacttgggcatgtgtcaagttgtttctcttgttttactgtagcattctgtaggtctccctcctgcactaaacattatga

SEQ ID NO: 12861 - DNA, 80 bp, synthetic construct
  source 1..80: mol_type = other DNA
tggagcaaagacagagatgtgcaagattctctgataaatttagaaacacaagagatttctgcaaaggaattcatgaaaat

SEQ ID NO: 12862 - DNA, 80 bp, synthetic construct
  source 1..80: mol_type = other DNA
aatccaacgcagtttatgcttcccaacagagaacccatgaatgctttatgggtatgacaagaccttgatcccatcagcta

SEQ ID NO: 12863 - DNA, 80 bp, synthetic construct
  source 1..80: mol_type = other DNA
ttgaaagacacttcggataaaaattccaatcttcagggaaacacagagctgctttcacaagaagctgaagagtggaaaag

SEQ ID NO: 12864 - DNA, 80 bp, synthetic construct
  source 1..80: mol_type = other DNA
tggagtttctggttcaggttctggtgctctgaatctatcctatcattcattctgttaaacggcagctattacaaagggat

SEQ ID NO: 12865 - DNA, 80 bp, synthetic construct
  source 1..80: mol_type = other DNA
gcttgtgcaatctaacactatctccaggtaaataatgttagtctgactaggaagagactcaactggtgtctactgcttgg

SEQ ID NO: 12866 - DNA, 80 bp, synthetic construct
  source 1..80: mol_type = other DNA
tgactagtcccattaacattggctgtaatcagaattttgtcagggaaatcttcagttaagatgcttgaaactcaaacttt

SEQ ID NO: 12867 - DNA, 80 bp, synthetic construct
  source 1..80: mol_type = other DNA
aagtcaacaggctccagcaagacaagcaacgacaaggattcctttctctaagtctctttagtatactagtatgcaaaacc

SEQ ID NO: 12868 - DNA, 80 bp, synthetic construct
  source 1..80: mol_type = other DNA
caaatctttaagttaaaaataaaatataaccagtgacattctcagtgcacaacgacattccatacaaatgacaaaccaga

SEQ ID NO: 12869 - DNA, 80 bp, synthetic construct
  source 1..80: mol_type = other DNA
taaaacataacaaatgatgcagaaacagtaagctgagtatagcaaaagaagatgctccttaactcaggaagaaaaaaaga

SEQ ID NO: 12870 - DNA, 80 bp, synthetic construct
  source 1..80: mol_type = other DNA
tcaaacatacactaaggagaaacaagccagacacaagctgagaaatccaattaaagagaaaagcatagagaaaaaatata

SEQ ID NO: 12871 - DNA, 80 bp, synthetic construct
  source 1..80: mol_type = other DNA
aggccacagattcagaggttaccctcccctttctttgataaagaaatgccatatgatcatcagaatatgaaaaaattaca

SEQ ID NO: 12872 - DNA, 80 bp, synthetic construct
  source 1..80: mol_type = other DNA
ggtgacattggactaaagctaatttatataaaaccctggaatacagaccagcctaatttggcaagagcactcactgattt

SEQ ID NO: 12873 - DNA, 80 bp, synthetic construct
  source 1..80: mol_type = other DNA
cagaggaggtgaaagccacattatggtggctttaagagtaagatatgagagcctggcatttctagagaatggatagtgtt

SEQ ID NO: 12874 - DNA, 80 bp, synthetic construct
  source 1..80: mol_type = other DNA
gcaacagcaattctgatcgaaccatgccctaaatgtctctgcctaaaaccccaggtttttaaaagaagcctaatacaaac

SEQ ID NO: 12875 - DNA, 80 bp, synthetic construct
  source 1..80: mol_type = other DNA
aggagtaataaggaatgctggatgatgaatgttacatatgatgttgcgtgttaggaaaattcacactgagtagctagcat

SEQ ID NO: 12876 - DNA, 80 bp, synthetic construct
  source 1..80: mol_type = other DNA
catccaaaacgtaaaggaaaaggttcagttgtgtgtttgcaggtgacatggtcttatgtatagaaaacccgaaagccaac

SEQ ID NO: 12877 - DNA, 80 bp, synthetic construct
  source 1..80: mol_type = other DNA
gtagagacgatttcagtttgggcatgtgtctctgagtcagagctgattatattataccctactgcctcacacaacttaat

SEQ ID NO: 12878 - DNA, 80 bp, synthetic construct
  source 1..80: mol_type = other DNA
caacaaactgcagaaagagctctttgctctttgctctctccctatctgcctaaaagcagacataaatttccttttgtgaa

SEQ ID NO: 12879 - DNA, 80 bp, synthetic construct
  source 1..80: mol_type = other DNA
atttcctacattggaaatcacagcactttatttaaggaaatcagtttggccaagtgagctctatggagtgcagcctgcac

SEQ ID NO: 12880 - DNA, 80 bp, synthetic construct
  source 1..80: mol_type = other DNA
gacaatacaaacctctatcctatgataaaaattctccaagaccaaggcatcatgttgaggctttttggagaagggagaaa

SEQ ID NO: 12881 - DNA, 80 bp, synthetic construct
  source 1..80: mol_type = other DNA
ttgggttccactgcctgccctcataaaaacccaacctcaaagataaggaagctgtgaagggaaaatttttcttcttttgc

SEQ ID NO: 12882 - DNA, 80 bp, synthetic construct
  source 1..80: mol_type = other DNA
tcagctgtaactcccatggaaggctgtactgacgaaacttgatcgtgaaatgaggttaacacctgtgcaaatgcccactt

SEQ ID NO: 12883 - DNA, 80 bp, synthetic construct
  source 1..80: mol_type = other DNA
tactgttacagagtacagcactgtgtcacacagctaaatcctttgttagatgcactccctacatcatagaacttcagaaa

SEQ ID NO: 12884 - DNA, 80 bp, synthetic construct
  source 1..80: mol_type = other DNA
cacatctaccaacaacattaataaaaattggagaacatttgcttcggtcaaaatattttctgccttctctctgtacatgc

SEQ ID NO: 12885 - DNA, 80 bp, synthetic construct
  source 1..80: mol_type = other DNA
acaggaaaattgtttttaaaatgtatgtatgccatttatgtttacataatttacttgcagaactagttgaatacggggtt

SEQ ID NO: 12886 - DNA, 80 bp, synthetic construct
  source 1..80: mol_type = other DNA
cagtctttatgaggtggttgtagttttgctaccatcccttcccattccacctagaaatttatacctattaggcagagaag

SEQ ID NO: 12887 - DNA, 80 bp, synthetic construct
  source 1..80: mol_type = other DNA
taaaagaggtcacgtgacttgcatgcctgagtttctagttggatatctgcatgctctatacaaacactgcatttttcaca

SEQ ID NO: 12888 - DNA, 80 bp, synthetic construct
  source 1..80: mol_type = other DNA
agagaccttgcctcccatcttttcattaaatccatggtccacactgaaagctagactgattcacctaaaggcaaatatga

SEQ ID NO: 12889 - DNA, 80 bp, synthetic construct
  source 1..80: mol_type = other DNA
tataaacatgtttgccagtttaaatcccctactgaagtcagaatttccaattagtactagaagaatattaaactaccaag

SEQ ID NO: 12890 - DNA, 80 bp, synthetic construct
  source 1..80: mol_type = other DNA
aggagatgtcagtgaggtaagaagaaaactttttcgtatctcatcagttactggttactggctagctagtggggataaaa

SEQ ID NO: 12891 - DNA, 80 bp, synthetic construct
  source 1..80: mol_type = other DNA
agggtatgtcctaatccaatatagccgatgtccttatttggacacacgcacacccaaagtgaaaaactcagggagaagac

SEQ ID NO: 12892 - DNA, 80 bp, synthetic construct
  source 1..80: mol_type = other DNA
ggcttgtaagtggcctattccttgaacaatctgaatcacactggtttccttttagagacctctactagaagcatcatgat

SEQ ID NO: 12893 - DNA, 80 bp, synthetic construct
  source 1..80: mol_type = other DNA
gtctaatttcttggccgaagtggaacacagagttgcatgagtttgtgttcgaggatttaaagccaggatactctaaagac

SEQ ID NO: 12894 - DNA, 80 bp, synthetic construct
  source 1..80: mol_type = other DNA
ataccattatttcaccagagaggaggaaacatggtagtagcacatgcttctgtctaaccaaattaacattattacctacc

SEQ ID NO: 12895 - DNA, 80 bp, synthetic construct
  source 1..80: mol_type = other DNA
gcaattcctactagatttaaccaaatccaagatcaccttccaaatctagattccatgattctttaaaaattattgggtca

SEQ ID NO: 12896 - DNA, 80 bp, synthetic construct
  source 1..80: mol_type = other DNA
tacatgaaaatctgctaaaactggtaaaaggagtgaaggtctatggcatttgaagtataacccacaccacttcagtccag

SEQ ID NO: 12897 - DNA, 80 bp, synthetic construct
  source 1..80: mol_type = other DNA
aatgactgcacatatccaaggctgcaccctgtgagaatgacatcagcggttcacacagaggaaaatgtacatccctaaat

SEQ ID NO: 12898 - DNA, 80 bp, synthetic construct
  source 1..80: mol_type = other DNA
tgagaactaatacacacttcaaagcagccattacaaggaaagtatgatgacaatgtcttagagagtacagaatatccata

SEQ ID NO: 12899 - DNA, 80 bp, synthetic construct
  source 1..80: mol_type = other DNA
aaataaaaagtgaaaaaaataaaattaaaggaagttcttcaggcagaaagtaagtaaccataacttactattcacacgaa

SEQ ID NO: 12900 - DNA, 80 bp, synthetic construct
  source 1..80: mol_type = other DNA
ggctggcggattagggagaaatgagatggctactataaaaaggataagtgatttctttttgggtgaagaaacctgattat

SEQ ID NO: 12901 - DNA, 80 bp, synthetic construct
  source 1..80: mol_type = other DNA
attcaatggatcttgggtaaaaataaattggattgtgcaaaatggttaccaaggatttggcttaataatatcccaaatga

SEQ ID NO: 12902 - DNA, 80 bp, synthetic construct
  source 1..80: mol_type = other DNA
ttaggcctaaaacattggagcttcagtattattcaagagcttgaattccaattgcaggaagctacttgaccaacatgtcc

SEQ ID NO: 12903 - DNA, 80 bp, synthetic construct
  source 1..80: mol_type = other DNA
cttgagatacaatcaaccttagagtctgaaaatttcagaaacccatggtaatcagtcctggtcaaagacttacatttacc

SEQ ID NO: 12904 - DNA, 80 bp, synthetic construct
  source 1..80: mol_type = other DNA
aactcatgggtctttggtcccaacatgtttaggtaaatttacattacatttccttcccaggaagggcatgtcagatgaaa

SEQ ID NO: 12905 - DNA, 80 bp, synthetic construct
  source 1..80: mol_type = other DNA
tggaagtatgcaaatactattaatattgggcatcaacttaaagtcacctttagcctaagagttcaaatggtaccatgttg

SEQ ID NO: 12906 - DNA, 80 bp, synthetic construct
  source 1..80: mol_type = other DNA
attatcatatctattttttgagaaggatcagagtagagcaaggagctgaggagttggggaattgggtgagttgaggagtt

SEQ ID NO: 12907 - DNA, 80 bp, synthetic construct
  source 1..80: mol_type = other DNA
atgatgtgcatgttacccaacattctttgtgcattgttaggttttacttctccccgtctcatatttaagtgactttattt

SEQ ID NO: 12908 - DNA, 80 bp, synthetic construct
  source 1..80: mol_type = other DNA
gctttatctttgttcttctgtatccagtacacctgtttttttcctctagccgctctgaagataaactctttatcactagt

SEQ ID NO: 12909 - DNA, 80 bp, synthetic construct
  source 1..80: mol_type = other DNA
tgagtgctagttccgtcggactgttctttacgcagccatgggtcattttcccacatgcgtatactaatcattactctgtg

SEQ ID NO: 12910 - DNA, 80 bp, synthetic construct
  source 1..80: mol_type = other DNA
atctgctttttctctggtggtctgaaccttgaataactgaagtcagtcacacagcactatatgtatacatgactaacacg

SEQ ID NO: 12911 - DNA, 80 bp, synthetic construct
  source 1..80: mol_type = other DNA
ttttaaggagtctcattaaagggagaggtataccttgtttttcctgttcttctctgcttttggagctctagctgctaact

SEQ ID NO: 12912 - DNA, 80 bp, synthetic construct
  source 1..80: mol_type = other DNA
tccctcctatcaagccgcagtagataacacatttctgtgctcccaagatacaccatgcaaaacaccctatctctattaat

SEQ ID NO: 12913 - DNA, 80 bp, synthetic construct
  source 1..80: mol_type = other DNA
tgtattccaattgaaatccacatagtctaaaattctctgcttatatgcctgtctgccccactagcctttcagcttactga

SEQ ID NO: 12914 - DNA, 80 bp, synthetic construct
  source 1..80: mol_type = other DNA
tttcaatctaaataactgcaataacttccaggtgtttagaaagaggtacctcccaacactacatagttccacgctttctt

SEQ ID NO: 12915 - DNA, 80 bp, synthetic construct
  source 1..80: mol_type = other DNA
taaaaagctgcctttccaagactgctaggcaaatggccaacaacaacattttaactgtccaaaaatctgacggctgaata

SEQ ID NO: 12916 - DNA, 80 bp, synthetic construct
  source 1..80: mol_type = other DNA
caaaaccacttctgggaaaactactcattctctgggtatctcccatgtacttgtgaaatatatatgttaatcagcttgtt

SEQ ID NO: 12917 - DNA, 80 bp, synthetic construct
  source 1..80: mol_type = other DNA
cctgtggattagacgccattcataccttgcttcatttacacatgtgaaggactccttgaagaaccgaatattaaacatct

SEQ ID NO: 12918 - DNA, 80 bp, synthetic construct
  source 1..80: mol_type = other DNA
cgttgtaactgagcacttctcatgaactgtaacttttacagcctgtggtgcaactgcaaaacttgcaagaatttcttttt

SEQ ID NO: 12919 - DNA, 80 bp, synthetic construct
  source 1..80: mol_type = other DNA
acaaatgttagttatccccagtctcatttattcctaatatcaaagtatctgaggtcctcccctgcttcctcctccctccc

SEQ ID NO: 12920 - DNA, 80 bp, synthetic construct
  source 1..80: mol_type = other DNA
gcctggctgtcctttcttatgtatcttcccatcatatttcctctgtgttctactccctataactcagtgcttctgtcatc

SEQ ID NO: 12921 - DNA, 80 bp, synthetic construct
  source 1..80: mol_type = other DNA
acttttacagcctgttttcctctcaccctcagttggtaatcctgcctcatactcttattgagaaaattaaaaccatccat

SEQ ID NO: 12922 - DNA, 80 bp, synthetic construct
  source 1..80: mol_type = other DNA
tacagggaggccttctctgactaccatgtgaaaaaagaccctactagccattctgcatcacattttcttggtttattttt

SEQ ID NO: 12923 - DNA, 80 bp, synthetic construct
  source 1..80: mol_type = other DNA
ggatgcttaagttttgtttcttactgtccagtcttggaatgaaaggggtgatgggcactaattttcatgagctacataca

SEQ ID NO: 12924 - DNA, 80 bp, synthetic construct
  source 1..80: mol_type = other DNA
gttgaagcatgcaaacgagaacggcagaaccaaaatgcactatatatcattgagccaacactctcaagtgtatttccagc

SEQ ID NO: 12925 - DNA, 80 bp, synthetic construct
  source 1..80: mol_type = other DNA
gtatgtaaatcgaggagccaatatctcagcatttccttaatatgaacacacaccaggtcacatttccaaacaatttcacc

SEQ ID NO: 12926 - DNA, 80 bp, synthetic construct
  source 1..80: mol_type = other DNA
gaagtggccctcagggattaattattgatgaagagatttttcttcaaagtggctcagtcaagagtgcctcaaggggacat

SEQ ID NO: 12927 - DNA, 80 bp, synthetic construct
  source 1..80: mol_type = other DNA
taactcctccctttctcatagattctaacagacttcaataccactagttgattactagagcaaaaacaaattcttgccaa

SEQ ID NO: 12928 - DNA, 80 bp, synthetic construct
  source 1..80: mol_type = other DNA
cagctgagaggcagaaaaataaattggccaatcctccattttgatctcctctttagctgtattgaagcctggattatatc

SEQ ID NO: 12929 - DNA, 80 bp, synthetic construct
  source 1..80: mol_type = other DNA
ccttaaaactacaggaagctaccattagaatcagtgactcctcaaatcagataatcagacacatttctactatccagcta

SEQ ID NO: 12930 - DNA, 80 bp, synthetic construct
  source 1..80: mol_type = other DNA
ttctcattatccttgccggtggaggggaacaaggtcttgaacaaaagagtactgtttcaaaataattctcatttcctttc

SEQ ID NO: 12931 - DNA, 80 bp, synthetic construct
  source 1..80: mol_type = other DNA
ctcccagcccagggatattccagctatggagtttggtgatctgattgttttccatgttcctaaccgtcaaatcctgatgt

SEQ ID NO: 12932 - DNA, 80 bp, synthetic construct
  source 1..80: mol_type = other DNA
agcagataacacaccattctgaaattaaagagccaaaagccacccatcctaagtcaactccgatatcttaaatcaatact

SEQ ID NO: 12933 - DNA, 80 bp, synthetic construct
  source 1..80: mol_type = other DNA
tgactagaggcgactgctacagctgacacacagatgttttatttctatgcttcacctttgcaaatagcaggattcagcta

SEQ ID NO: 12934 - DNA, 80 bp, synthetic construct
  source 1..80: mol_type = other DNA
cagtccgcgctccaagcaacaacttgcactttttcttttcttccacagaaaccccgcgagatgtagatacattgtttgag

SEQ ID NO: 12935 - DNA, 80 bp, synthetic construct
  source 1..80: mol_type = other DNA
agcaagtaagaaaatgtgatgcctgcttgtaagataaaagaaaaataggacagaataactagggtatgggtaccttgcgt

SEQ ID NO: 12936 - DNA, 80 bp, synthetic construct
  source 1..80: mol_type = other DNA
actgaagcataagagaccaagaacacttggtgattgaatgaacagagtacattcgtttatacactgggcagttcatttta

SEQ ID NO: 12937 - DNA, 80 bp, synthetic construct
  source 1..80: mol_type = other DNA
tatgatggcgtttgtcaagctgtccctccatctggaagcacagtgaaatatcaggtgttccacattaattttttgtaggc

SEQ ID NO: 12938 - DNA, 80 bp, synthetic construct
  source 1..80: mol_type = other DNA
ttcccacgttctagaaaaatgtcattaatgcatgattgcctatgaaagattttgggtaaaatgcagtgtaaggggaaagt

SEQ ID NO: 12939 - DNA, 80 bp, synthetic construct
  source 1..80: mol_type = other DNA
ttcattcattcttatcactgataattatgtgccgaacacatgctaggttcagtggaaaacactagaggtaccgtgatgag

SEQ ID NO: 12940 - DNA, 80 bp, synthetic construct
  source 1..80: mol_type = other DNA
ccactacccctacccctacactacccctacactgtaagatccttgataatttttaatgggtcttatctttttatcctcca

SEQ ID NO: 12941 - DNA, 80 bp, synthetic construct
  source 1..80: mol_type = other DNA
gttcattctgaagttgttcatgcaaaaataaaatagcatatatgccctataacaggtgactgatagataactgattatta

SEQ ID NO: 12942 - DNA, 80 bp, synthetic construct
  source 1..80: mol_type = other DNA
actccaactccacccacagagatttttccacttgctcttccctctgtctgcattgatattccacactaggtatttcaaca

SEQ ID NO: 12943 - DNA, 80 bp, synthetic construct
  source 1..80: mol_type = other DNA
gaaacacatttctcattcttgtcttaacaactcacttgacaatatttgataaatacagtcatttgtgcaaaggaccttgg

SEQ ID NO: 12944 - DNA, 80 bp, synthetic construct
  source 1..80: mol_type = other DNA
atgaatgactagagtatatggacagagccaccttcccatctgtactagctttaactaccattgattgctgtgttgcatcc

SEQ ID NO: 12945 - DNA, 80 bp, synthetic construct
  source 1..80: mol_type = other DNA
atccatgcctacgcgatgagttgtatcacagattttgacagaaatataatgtgttaaatactttgtcatcttcctctcat

SEQ ID NO: 12946 - DNA, 80 bp, synthetic construct
  source 1..80: mol_type = other DNA
gtcatctccattttactccagcttataccacgtcagccactgtggctttactatttatccagcatattaattctaagctc

SEQ ID NO: 12947 - DNA, 80 bp, synthetic construct
  source 1..80: mol_type = other DNA
gattggggggtgggaattgggtctcacattttttattttaggaatataaagactcgaaatccaagcagcagcttgtcctt

SEQ ID NO: 12948 - DNA, 80 bp, synthetic construct
  source 1..80: mol_type = other DNA
gtaggaggacactgtggtagccagaagaataaatatcaatgtccccataactcttttgaaactcctcagtccttattctc

SEQ ID NO: 12949 - DNA, 80 bp, synthetic construct
  source 1..80: mol_type = other DNA
ttttccccatgagtaaaacgatgagactgagtaacaaaaatagccaccatttattgagagattatgttatgccacacact

SEQ ID NO: 12950 - DNA, 80 bp, synthetic construct
  source 1..80: mol_type = other DNA
aggactaataaggacagagttagggtagtagctttcagggatgtgaggtttgaaccccttggtttaaaattgaaagaaaa

SEQ ID NO: 12951 - DNA, 80 bp, synthetic construct
  source 1..80: mol_type = other DNA
tattcgctggtccatctgcatgagtacaagaagcttctgtttcctaaagaaaagactctcaaagcgttgtgttctctctc

SEQ ID NO: 12952 - DNA, 80 bp, synthetic construct
  source 1..80: mol_type = other DNA
ccagtttccaagaaggaagacttgccactgtgtttctaatgagtcattttttaatcatgctgcccatcaagcaaagacag

SEQ ID NO: 12953 - DNA, 80 bp, synthetic construct
  source 1..80: mol_type = other DNA
cattaactaagttcctaccttactcaggtttccttggcttttacctaatagttttcactcgtgcaggatcccaccagtgt

SEQ ID NO: 12954 - DNA, 80 bp, synthetic construct
  source 1..80: mol_type = other DNA
tgagagctttttcatttggctccagtgtccctttgatatgcctccttcactcatcattatgtgtctgtgtttgtgtctct

SEQ ID NO: 12955 - DNA, 80 bp, synthetic construct
  source 1..80: mol_type = other DNA
atttcatccacttgtagtagagttagattcttctgtcacacgttgccttccatcatgggatttcttaatctcctatatga

SEQ ID NO: 12956 - DNA, 80 bp, synthetic construct
  source 1..80: mol_type = other DNA
aactctttgaggagttccccaactatttttgaaagcagcagtactattttagattccctccagcaatgtttgagagttgc

SEQ ID NO: 12957 - DNA, 80 bp, synthetic construct
  source 1..80: mol_type = other DNA
aggtacggacagggtggaatttgaaggaggtgttaaagttcccactttactctgaagttattcattataagctgttagga

SEQ ID NO: 12958 - DNA, 80 bp, synthetic construct
  source 1..80: mol_type = other DNA
cagaagtgaccagcagcaagacaagcagaagaatcagttgctgagtccagcacagactgcaaaattgtaaacaaattaaa

SEQ ID NO: 12959 - DNA, 80 bp, synthetic construct
  source 1..80: mol_type = other DNA
aaaagaacaacaaaaacattctagtggaggaagccgccatcttagaagggtacacaggatttggtttataatcacactgg

SEQ ID NO: 12960 - DNA, 80 bp, synthetic construct
  source 1..80: mol_type = other DNA
atggccagagttagtgcgagaaaagcagatccataaggtctgttcaatttatatttctaggaggatgagctgggtttgga

SEQ ID NO: 12961 - DNA, 80 bp, synthetic construct
  source 1..80: mol_type = other DNA
gaagaaatacgtagccacaaacttcaactgagtaaagaatgaatcaaataagaagcatggtgaatgtttctaaaatgcaa

SEQ ID NO: 12962 - DNA, 80 bp, synthetic construct
  source 1..80: mol_type = other DNA
tatcctctcaaattgaaggtaagaattttctaggcagcataagaaattatgctaaaatgagttccctctgtgcatgtgag

SEQ ID NO: 12963 - DNA, 80 bp, synthetic construct
  source 1..80: mol_type = other DNA
tgtatagtcttattacaaagccaggcatccacccatagagagtaaactctggtatcatctgctttgttccaaatatgtgt

SEQ ID NO: 12964 - DNA, 80 bp, synthetic construct
  source 1..80: mol_type = other DNA
tcagtagaattcactaatagaatccaattctttaatagatacagagctacttcttcttgagtgagctttggaggtttctg

SEQ ID NO: 12965 - DNA, 80 bp, synthetic construct
  source 1..80: mol_type = other DNA
tgaagattcaggcaaatcatactcagatctgggttttcaaaccagataatctgcttctaagcatcttgctcttcacacta

SEQ ID NO: 12966 - DNA, 80 bp, synthetic construct
  source 1..80: mol_type = other DNA
ggatttgctgcaggaaccagaaaaaaatactatcagaatacaattagcactcacggaagtacacaagaaagcattatttt

SEQ ID NO: 12967 - DNA, 80 bp, synthetic construct
  source 1..80: mol_type = other DNA
tgacagtatggtccagagtctgtcatttaccactacaataaaagcaggaagtagagcacacagggatgatttaacttttt

SEQ ID NO: 12968 - DNA, 80 bp, synthetic construct
  source 1..80: mol_type = other DNA
caaaagtataattacggaaggtttaaaaccggtaaaatattgccaaacctaactccaaagaaaattgaatgctttaatga

SEQ ID NO: 12969 - DNA, 80 bp, synthetic construct
  source 1..80: mol_type = other DNA
tttgaaaaatggttgcatctatgtggaagggaacttatctatgcagaaatttctctcatgtttcagtacaaaccatattg

SEQ ID NO: 12970 - DNA, 80 bp, synthetic construct
  source 1..80: mol_type = other DNA
aagatttcagggcactgtttttcagtttaaagcaaaattcagctaattgctagcagtacagatcagagtccagtgcctag

SEQ ID NO: 12971 - DNA, 80 bp, synthetic construct
  source 1..80: mol_type = other DNA
attttggatgcagacacagtctaagacaagctcttagactgatcatagttttttcctgaggatatttgccaattctggtt

SEQ ID NO: 12972 - DNA, 80 bp, synthetic construct
  source 1..80: mol_type = other DNA
tctaaaagaagactagacagtagaacagaggataataaactggaaaatgagttaatgaaatcaggcaaactgaagtacag

SEQ ID NO: 12973 - DNA, 80 bp, synthetic construct
  source 1..80: mol_type = other DNA
aagaagctaggtattacattaatgtgagacaaactagatttttaagactagttaaatttctagagaaatgctgataaaac

SEQ ID NO: 12974 - DNA, 80 bp, synthetic construct
  source 1..80: mol_type = other DNA
gatcaagtaaaataagagaaaagccacttgccaatatcgggaacaaaataggtctgtaggtcctgtctgttgcagaaaga

SEQ ID NO: 12975 - DNA, 80 bp, synthetic construct
  source 1..80: mol_type = other DNA
attgaaaatgagacaaaagtgtctggaggtctcaactagtgcagaaaggcatgaaaaaagaagtgaaagggagaaggatg

SEQ ID NO: 12976 - DNA, 80 bp, synthetic construct
  source 1..80: mol_type = other DNA
tacctcatgccatacagagaagtaaatctcagaagaattgtaggccaaaatattaaaatgaaaacaaagagattaagaat

SEQ ID NO: 12977 - DNA, 80 bp, synthetic construct
  source 1..80: mol_type = other DNA
gtaattctggggtgctggtaatgttctagtttttggtctggaagctgggtacacaagcatgtttactttgtaaaaattca

SEQ ID NO: 12978 - DNA, 80 bp, synthetic construct
  source 1..80: mol_type = other DNA
agattttaaatagaaggagagagatttgggctataagataatgaccctaaccttgtagcatttacctctgaattgcccgt

SEQ ID NO: 12979 - DNA, 80 bp, synthetic construct
  source 1..80: mol_type = other DNA
gtctgttgccttggttccagtttcattatcttagccatcaaatggacgtgttgagattgttttacttgattccaagctta

SEQ ID NO: 12980 - DNA, 80 bp, synthetic construct
  source 1..80: mol_type = other DNA
tttccaaagttcaagaatttccacttgtacccacaactttataacatacaatgctattctcaacccccttccactgagca

SEQ ID NO: 12981 - DNA, 80 bp, synthetic construct
  source 1..80: mol_type = other DNA
gcatatggtggcattaatgctaaatgaatagactttaaccaataaaagggagaaaacagaggggggcagaaaataaatgt

SEQ ID NO: 12982 - DNA, 80 bp, synthetic construct
  source 1..80: mol_type = other DNA
aaaacgaacaaattacagctatgtgcaacaacatgatgaacctaagaaacacagtcttgagtgagaaaagcatgttgcag

SEQ ID NO: 12983 - DNA, 80 bp, synthetic construct
  source 1..80: mol_type = other DNA
tgtatactgttacataccccggtcctcaacctgcaaaccattagtatagtcagcacacagagcgacaatgtaagtgataa

SEQ ID NO: 12984 - DNA, 80 bp, synthetic construct
  source 1..80: mol_type = other DNA
atcacaattgcatctcttgtccattcacagaagttgggagtggaaaggctgttaaggataggtaactgacagtatctgtt

SEQ ID NO: 12985 - DNA, 80 bp, synthetic construct
  source 1..80: mol_type = other DNA
aaacacttacacaaacaaggaagtaaattacacttttgttcaaagccatcacagaagccataaaattcctccctgtgcat

SEQ ID NO: 12986 - DNA, 80 bp, synthetic construct
  source 1..80: mol_type = other DNA
aggactttaccttccaatccttgtccctgcactaaaatctaccacttttctttccttcaaagtaaaatgcccacaagggg

SEQ ID NO: 12987 - DNA, 80 bp, synthetic construct
  source 1..80: mol_type = other DNA
agtaatatttaaccttgagattatagggtcaactctagttccaccgaagtatgatctctggggcacgtgggagagtcctc

SEQ ID NO: 12988 - DNA, 80 bp, synthetic construct
  source 1..80: mol_type = other DNA
aggaagattcaacattatagtgttttaagttggggaaagtccttgctctacataggttttaagtgatcaaggttcctctc

SEQ ID NO: 12989 - DNA, 80 bp, synthetic construct
  source 1..80: mol_type = other DNA
caatgagatcacatggacacaggaaggggaacatcacactctggggactgttgtggggtggggggaggggggagggatag

SEQ ID NO: 12990 - DNA, 80 bp, synthetic construct
  source 1..80: mol_type = other DNA
aaggacttacatttcaattcaacttcagtagtttttttttctctactagaaaattacttagatccttaaaatatttttaa

SEQ ID NO: 12991 - DNA, 80 bp, synthetic construct
  source 1..80: mol_type = other DNA
tacttttcagatgaaaaaaaaatccctttaggttcataaaggttaggaaacttgcccaaagtccagtggtgttctggtaa

SEQ ID NO: 12992 - DNA, 80 bp, synthetic construct
  source 1..80: mol_type = other DNA
ttcttaccttatggcacaactttcacattttgacttgttggttcttcagcattctggtttgagcaagtaagaagatggat

SEQ ID NO: 12993 - DNA, 80 bp, synthetic construct
  source 1..80: mol_type = other DNA
accagcaatagaagcaatatggaactctgaatcaggaaatacagccagcagtgaattcgaattaaatagtggttagttat

SEQ ID NO: 12994 - DNA, 80 bp, synthetic construct
  source 1..80: mol_type = other DNA
aatggggatgatcagtttttgcataaaactttagactgtagtaaagtctgtttctctcaaaattctgggttacattttat

SEQ ID NO: 12995 - DNA, 80 bp, synthetic construct
  source 1..80: mol_type = other DNA
acagatctatccaacatcccttctctcctgtgattcaagcacattttctcttatttctatgacctactggctcagtaaga

SEQ ID NO: 12996 - DNA, 80 bp, synthetic construct
  source 1..80: mol_type = other DNA
atctgtatcttaggacattcaaagaaaatgatgtttcatgccttgggctaaggggtactgggggtaattctagaattcta

SEQ ID NO: 12997 - DNA, 80 bp, synthetic construct
  source 1..80: mol_type = other DNA
gtagttcaattatattactaaaaaataatggttagcagcatattgggggtgggtggggagttggtctttcagtgcagata

SEQ ID NO: 12998 - DNA, 80 bp, synthetic construct
  source 1..80: mol_type = other DNA
aatcaaaggaaaatatccagaaagagtttacagtgtcctctacagcgtttccctgagcagtgtagatgttaaaagaattt

SEQ ID NO: 12999 - DNA, 80 bp, synthetic construct
  source 1..80: mol_type = other DNA
tctagaccaacattaaataagactataagcacaaagtgagaatccagaggaggatgcagatgtaaggaatactgttgagg

SEQ ID NO: 13000 - DNA, 80 bp, synthetic construct
  source 1..80: mol_type = other DNA
tgattattaacagtattgattatctggaaccctggtaagaccttcaaggtcattacggattttaaatcctctaactatgc

SEQ ID NO: 13001 - DNA, 80 bp, synthetic construct
  source 1..80: mol_type = other DNA
actgcccacctcattaaactgttgtagggattaataagttgtgggtgctggaaagaaatggaatcttaccaaatctccca

SEQ ID NO: 13002 - DNA, 80 bp, synthetic construct
  source 1..80: mol_type = other DNA
tggtgggtaatataatcaagtcacaaagcaaaggaaagactgacagtcccagtccctatactggtgtatactgagtacga

SEQ ID NO: 13003 - DNA, 80 bp, synthetic construct
  source 1..80: mol_type = other DNA
ctcatgatgtccaaatcactatctttgttctgaatttctcaagctccaggcctatttatccaactctactagacacctgc

SEQ ID NO: 13004 - DNA, 80 bp, synthetic construct
  source 1..80: mol_type = other DNA
tttccccagtgtttcctatatgctgaacactgaacaatcatacctactagagctggtgagctctgattcatgtggcattt

SEQ ID NO: 13005 - DNA, 80 bp, synthetic construct
  source 1..80: mol_type = other DNA
ctgaattgcctttggggccattttttcctctccttgaaaaatagtgcaggttcacagccaaataagcaaatcagcccatc

SEQ ID NO: 13006 - DNA, 80 bp, synthetic construct
  source 1..80: mol_type = other DNA
aagtagatttcactctgaagcctcttctgttttctcataggtggttgttatctcactgtgtactcacatgacctctttgt

SEQ ID NO: 13007 - DNA, 80 bp, synthetic construct
  source 1..80: mol_type = other DNA
gaagtgcctagaatgtggcaggaactctgtagatggcaaaacaaaaattaattcatgtagaacccttcttattaatgtat

SEQ ID NO: 13008 - DNA, 80 bp, synthetic construct
  source 1..80: mol_type = other DNA
aaattgtatagaaaaaaggatcctcaaccactgcactatgagagtaggaggggtgctcttattttcctggctcttcgtca

SEQ ID NO: 13009 - DNA, 80 bp, synthetic construct
  source 1..80: mol_type = other DNA
accgcgcccagcctactaatgccaacacttttgataaaatgttgaactgaggttattataaactcacctttcaatttctc

SEQ ID NO: 13010 - DNA, 80 bp, synthetic construct
  source 1..80: mol_type = other DNA
aggggaaataagacccattttcatgtcagctgagttttaagttgccattaaagtgataatataaagggaaaataaacgga

SEQ ID NO: 13011 - DNA, 80 bp, synthetic construct
  source 1..80: mol_type = other DNA
tcattatctaggtagccctactacccagtaaacagcctggaaaatagtatgttctcaataaatgtttacagtaatggatt

SEQ ID NO: 13012 - DNA, 80 bp, synthetic construct
  source 1..80: mol_type = other DNA
aatggtctcattttccctaattttaattttacctcttagagtatgcctagaattgttaaaatggttacgcttggtttctt

SEQ ID NO: 13013 - DNA, 80 bp, synthetic construct
  source 1..80: mol_type = other DNA
tagaagggagtaaatggagttatttgggtcataaatacatcagtggagagagggccttagaagttccctcattttaaggc

SEQ ID NO: 13014 - DNA, 80 bp, synthetic construct
  source 1..80: mol_type = other DNA
tcctggaaggtgactcgtcaaagttttattagtttggtgcatggatagtgatgttacagagtctaggccccaggggctct

SEQ ID NO: 13015 - DNA, 80 bp, synthetic construct
  source 1..80: mol_type = other DNA
gttgacatagcccagccacgtgaaggcgctgtacaggacaggcgggatgttgcagtcacagtgtatgttcaggatgtgtg

SEQ ID NO: 13016 - DNA, 80 bp, synthetic construct
  source 1..80: mol_type = other DNA
tggttttctagacttctattgaaaaatcctgctttatggacagggatgcttttcatttagattgggggccactccccaac

SEQ ID NO: 13017 - DNA, 80 bp, synthetic construct
  source 1..80: mol_type = other DNA
ttgccattgggcatggtctggatctcaaagatcttggcaatcttggggtggtctttggcatgcccattcttctctggttt

SEQ ID NO: 13018 - DNA, 80 bp, synthetic construct
  source 1..80: mol_type = other DNA
tggcacctgcctcataaacagcttcttagagtcctgcccttgcagtgcaggtgaaggcaggacaccagacctggattttg

SEQ ID NO: 13019 - DNA, 80 bp, synthetic construct
  source 1..80: mol_type = other DNA
ggcaagggggaaggctggaatgagacaaaaagtggtgggtatgacgaggaacacaaggacctggttttttatggagcacc

SEQ ID NO: 13020 - DNA, 80 bp, synthetic construct
  source 1..80: mol_type = other DNA
aacgcaactagatgtttaaggctgcctggtcatcttagatatacacaaacgcacagcagataccagagtattaaaaacac

SEQ ID NO: 13021 - DNA, 80 bp, synthetic construct
  source 1..80: mol_type = other DNA
cctgagggctgcagcttcattacaaaaatactattgtcaggagtggatggaagcccagtagcctccgccatcccatgttc

SEQ ID NO: 13022 - DNA, 80 bp, synthetic construct
  source 1..80: mol_type = other DNA
caaggacataaaatgcataaccagatactgcagctccaggccacaggtgtcatcaatgtaggtttctagaaaatgaaact

SEQ ID NO: 13023 - DNA, 80 bp, synthetic construct
  source 1..80: mol_type = other DNA
tcccagatacataagaccacttattgccaattactgtgctagaagaaagacagccaacttatacggagggcctcaacttt

SEQ ID NO: 13024 - DNA, 80 bp, synthetic construct
  source 1..80: mol_type = other DNA
ccatgaaacagagaagaaatttctgctccttcttatacccagagaacgaaagaaggcagatctgggctagtgctcgagga

SEQ ID NO: 13025 - DNA, 80 bp, synthetic construct
  source 1..80: mol_type = other DNA
actcaagaaaatgcattggtggccactgtccataagacatctactgtgggcattgcactttatctcatgtatcgttctta

SEQ ID NO: 13026 - DNA, 80 bp, synthetic construct
  source 1..80: mol_type = other DNA
gtaagacctcggagtgctcagtcagtgctgactgagtgaatgaataactctgagatatttgttcatcttctcaatctcct

SEQ ID NO: 13027 - DNA, 80 bp, synthetic construct
  source 1..80: mol_type = other DNA
gacatttacacagtgctcactgtgagccatgtatcattctaatcacttttcatacatcaactaattcgatcctcaacaat

SEQ ID NO: 13028 - DNA, 80 bp, synthetic construct
  source 1..80: mol_type = other DNA
tccctgtgacctgggtgaagaaaggcaacttctccaaagcttctatttcctattttgtttttgttttaatttaattttat

SEQ ID NO: 13029 - DNA, 80 bp, synthetic construct
  source 1..80: mol_type = other DNA
ctttacaaatggtagttgggattattaaggaaacaatctacccatttcgtaaggagaaaaagtaagcccagagtgaagga

SEQ ID NO: 13030 - DNA, 80 bp, synthetic construct
  source 1..80: mol_type = other DNA
cttgcagaggtctccaggaagaagaccaactcctggcatttaataatgagaattttccaactcgggattttaaggtttac

SEQ ID NO: 13031 - DNA, 80 bp, synthetic construct
  source 1..80: mol_type = other DNA
catcaaacagcaaacaattctgtttggccaaaaatgtagggtatggcagtaacgttgaggataattaaactgcagggaca

SEQ ID NO: 13032 - DNA, 80 bp, synthetic construct
  source 1..80: mol_type = other DNA
ttccaggtactttgctactgcaaattgaaaaccaccaattgatgccatttgggatgaatgtggtgccatgtccaatcaat

SEQ ID NO: 13033 - DNA, 80 bp, synthetic construct
  source 1..80: mol_type = other DNA
tttttttcactggggtgtagacatcacaagagttacaacatgtcttgctcattcctcctcttgttcttggaatgaacaaa

SEQ ID NO: 13034 - DNA, 80 bp, synthetic construct
  source 1..80: mol_type = other DNA
atgtgtgtggctggggcgtttgtggagaacttcctggaggagggaggatgtaaactgggatttaatttttttttaataga

SEQ ID NO: 13035 - DNA, 80 bp, synthetic construct
  source 1..80: mol_type = other DNA
aaacatggcaaatgcctaaatacctgtaacccctataagtaccttggtacagggctatctttttgtctgtttgcttgttt

SEQ ID NO: 13036 - DNA, 80 bp, synthetic construct
  source 1..80: mol_type = other DNA
tatatcactaggaaagaaaaaaatgccatccaaccccagtagagctccaagatgtcatccattgtaaaatgcattctgat

SEQ ID NO: 13037 - DNA, 80 bp, synthetic construct
  source 1..80: mol_type = other DNA
gcccctgggcatgcataaaagcttacaaaactccaaatcacaatccccagtcaacaagaacttagtgagcaccaaataca

SEQ ID NO: 13038 - DNA, 80 bp, synthetic construct
  source 1..80: mol_type = other DNA
tcaatctgttaggacagcctgggatccaggaagaaagctggcaggtcctgggagaacagagaggattttctctgatcctc

SEQ ID NO: 13039 - DNA, 80 bp, synthetic construct
  source 1..80: mol_type = other DNA
agggaaaaggagagagttactgaataacacttttatgttctctggccgaggaggcaacctcagcagatggcagaggaaat

SEQ ID NO: 13040 - DNA, 80 bp, synthetic construct
  source 1..80: mol_type = other DNA
atagaagctagccttcggcactttctcaatttcctgtcaccaaatccataaacttacaggcacaggcagccacatgcacc

SEQ ID NO: 13041 - DNA, 80 bp, synthetic construct
  source 1..80: mol_type = other DNA
ccaagggagccatccccccccatcagcaccagccagagactaccaagcatccacagtgagtgagctgagtgcagctgaga

SEQ ID NO: 13042 - DNA, 80 bp, synthetic construct
  source 1..80: mol_type = other DNA
tatttggcagaaaattgttcttctttattaaaagacattcctgttcataaaaacagagagaaggcccagtccaaataata

SEQ ID NO: 13043 - DNA, 80 bp, synthetic construct
  source 1..80: mol_type = other DNA
gaaaacagatgggtgcaagccaggcttcaaggtatctttctgatcaagttctcttattatgaacactggcttccttttct

SEQ ID NO: 13044 - DNA, 80 bp, synthetic construct
  source 1..80: mol_type = other DNA
aaaggaacttctcatataattatatgagggaagaattatatgagccttataaagagggaagttgaggtccaggccatagc

SEQ ID NO: 13045 - DNA, 80 bp, synthetic construct
  source 1..80: mol_type = other DNA
taaagtccttttggggtgtgtcatgcagatttgcaacaaccctgagccttccctctaaatctttgagaaaaaagaagtcc

SEQ ID NO: 13046 - DNA, 80 bp, synthetic construct
  source 1..80: mol_type = other DNA
acagtctctgagagagagaaggcactcagttgttcctattttaatggtagctaacctggaaaaatatagaatattgactt

SEQ ID NO: 13047 - DNA, 80 bp, synthetic construct
  source 1..80: mol_type = other DNA
agttcttttccaggccataaacttttcttttaacctttctttgcaagggctgttttccaagcactccctctctttctgtc

SEQ ID NO: 13048 - DNA, 80 bp, synthetic construct
  source 1..80: mol_type = other DNA
tgctgtcttcctacaatgagccacatgccataagccccaacttatgggcagaccataacatggaatcaacccattctgtt

SEQ ID NO: 13049 - DNA, 80 bp, synthetic construct
  source 1..80: mol_type = other DNA
ctaagtttgtgccccgtgttttataatagttagcaggggtaactgagttgctattatgttgctgagctacaaaggctgtg

SEQ ID NO: 13050 - DNA, 80 bp, synthetic construct
  source 1..80: mol_type = other DNA
attgctcatctgaggccacctcctccgagaagccttctgtgatctatttttgggcaaattatttattcctcttcaatttc

SEQ ID NO: 13051 - DNA, 80 bp, synthetic construct
  source 1..80: mol_type = other DNA
tatgcaaatgagataactgaaaattcttaaaatctaagcgtctacactatatcattttgtaagtttaagtctttgctgtg

SEQ ID NO: 13052 - DNA, 80 bp, synthetic construct
  source 1..80: mol_type = other DNA
cagatttttggcagaagcaaaggctctgggagtctagcaaaaataagacagcagaaaaatattaaagcaagactgcaaaa

SEQ ID NO: 13053 - DNA, 80 bp, synthetic construct
  source 1..80: mol_type = other DNA
aaggggcaggaggcagagaagcagaaaaggaggagaggggaattaatatctgtcaattgatccatttttcgtagccatca

SEQ ID NO: 13054 - DNA, 80 bp, synthetic construct
  source 1..80: mol_type = other DNA
gcaatgaggcaccccctactaacattaacatactgcaaatgcaagatgggatatttggaaatagtttacccatgttgctg

SEQ ID NO: 13055 - DNA, 80 bp, synthetic construct
  source 1..80: mol_type = other DNA
cagcacctgcagaggatgcgagccagccagcaaattcactactcaccttgcatatgaacgaacaaacacacacgggtttg

SEQ ID NO: 13056 - DNA, 80 bp, synthetic construct
  source 1..80: mol_type = other DNA
caatatttttccttctgaaggaggtggcatctcagtaattgcaacgtgatgctctcttgacagcagtattaatcacctgt

SEQ ID NO: 13057 - DNA, 80 bp, synthetic construct
  source 1..80: mol_type = other DNA
agccagttaagctgtgattttaagctggagtaacagttgaagagagtgcagaaatggtctgaatacctagcaagtggata

SEQ ID NO: 13058 - DNA, 80 bp, synthetic construct
  source 1..80: mol_type = other DNA
ggcttctctatttgcacaagattactcagctagttagtagcaaaggcaggatcagaactcacatctcaacattctgcctc

SEQ ID NO: 13059 - DNA, 80 bp, synthetic construct
  source 1..80: mol_type = other DNA
ggtaacatgtgagtgatttccatccagtagagaagattgtccaaagccttatgattttgttgccctgtgagacattaagt

SEQ ID NO: 13060 - DNA, 80 bp, synthetic construct
  source 1..80: mol_type = other DNA
ggagaaagggcaatgttgtctgacagccaaggggccggtggatcctttatgtaaataacttgaaaaataaatacacaaga

SEQ ID NO: 13061 - DNA, 80 bp, synthetic construct
  source 1..80: mol_type = other DNA
gtatgttgagtgaggatactgatgcctggtataccatacgcactcagtccgtgttaactattttaactgagaaagctttg

SEQ ID NO: 13062 - DNA, 80 bp, synthetic construct
  source 1..80: mol_type = other DNA
ggaaggaaactagtattaacagagaacctggcacatcccaaatactgggaaagacattttatatatggacagtggtgtgc

SEQ ID NO: 13063 - DNA, 80 bp, synthetic construct
  source 1..80: mol_type = other DNA
atagagatccaagaagtaaacccatgcatctatagtcaatcaattctcaacaaaaaggccaagaacacacagtgagaaaa

SEQ ID NO: 13064 - DNA, 80 bp, synthetic construct
  source 1..80: mol_type = other DNA
tagagaaaagggaacacttataaaccgttggtggaaatataaattaacatagccattttggagaataatatgcaggttcc

SEQ ID NO: 13065 - DNA, 80 bp, synthetic construct
  source 1..80: mol_type = other DNA
tgttgaatgagtatagagcttcagtgtttcaagacgagaaagttctggagatctattttacaataacataaatattctta

SEQ ID NO: 13066 - DNA, 80 bp, synthetic construct
  source 1..80: mol_type = other DNA
tatgaatgaaaatttgtctaagttctccaccttctgcgagagctgcccctgagctctgtccgcacagcaaaatccagacc

SEQ ID NO: 13067 - DNA, 80 bp, synthetic construct
  source 1..80: mol_type = other DNA
gtacatcctctttacaaatgttcagggtctactatgcactaaacaccaagggcaagatcttatgtgaggtcattatcgac

SEQ ID NO: 13068 - DNA, 80 bp, synthetic construct
  source 1..80: mol_type = other DNA
ctccataaagacccatctgagtccattttccttagaaagaaagccgagcagtgagaactaaaaaaggtggatctcctgga

SEQ ID NO: 13069 - DNA, 80 bp, synthetic construct
  source 1..80: mol_type = other DNA
acctgttgcttaagagctccctggctccttttctagacagaagaatgttcagaggcactgcctgggggccctctgccctg

SEQ ID NO: 13070 - DNA, 80 bp, synthetic construct
  source 1..80: mol_type = other DNA
agggagcagcagtaaaatgacttctggaaacacaccctgggcacagtcaagcaggggttgttactattattactattacc

SEQ ID NO: 13071 - DNA, 80 bp, synthetic construct
  source 1..80: mol_type = other DNA
aagctcagaaggtgacctcatttggaagtggtctttgcagacattattagttaaggataagataggttcattctggatta

SEQ ID NO: 13072 - DNA, 80 bp, synthetic construct
  source 1..80: mol_type = other DNA
ttacttccctctccaagtacaattttctcattcatgtgtagagttagtgtaggtccctttctttacagccttgacaatct

SEQ ID NO: 13073 - DNA, 80 bp, synthetic construct
  source 1..80: mol_type = other DNA
tcataaagactctgttcctttcaggtgcccaccaaccatttatgcccactctatctctctttgtcactgccatccataca

SEQ ID NO: 13074 - DNA, 80 bp, synthetic construct
  source 1..80: mol_type = other DNA
tcctaggtactctgcctccagtcttgaatcttctataatcagttcccccacatagcagcctctgtgattttttttttttt

SEQ ID NO: 13075 - DNA, 80 bp, synthetic construct
  source 1..80: mol_type = other DNA
gtgctttgtggaaagataggttcaaactgttactgcgtttggagggtcttgggtataatcatgcttatctgtacctttta

SEQ ID NO: 13076 - DNA, 80 bp, synthetic construct
  source 1..80: mol_type = other DNA
ctgggaccctggaagttagtttctgcttgtcaacacatgtctcttattgaccctgccataaatgagtgaaagagttgaaa

SEQ ID NO: 13077 - DNA, 80 bp, synthetic construct
  source 1..80: mol_type = other DNA
catgaaaagctatcaccaggataacttatgcctcttcctagctcatgtggtgtaagatggaaatgaattcagctgcacct

SEQ ID NO: 13078 - DNA, 80 bp, synthetic construct
  source 1..80: mol_type = other DNA
gctaatcagctcattttttaaaggcagctctcatgagtcactcctgtgtctgtccaggatcccaggccatcccgccctca

SEQ ID NO: 13079 - DNA, 80 bp, synthetic construct
  source 1..80: mol_type = other DNA
aaacagtctggttttgaatctttgtctcacacatgaaacgtgtgaccttgtgcaaaccacttacctttctaagcctatgc

SEQ ID NO: 13080 - DNA, 80 bp, synthetic construct
  source 1..80: mol_type = other DNA
ttacaggtgacatcagattatgacaaaattgcccaaactacactaagctgatacctatattcaatgcatatttaacatca

SEQ ID NO: 13081 - DNA, 80 bp, synthetic construct
  source 1..80: mol_type = other DNA
aaggccagagataacattagtctactgctcaaattggtaaataagcaatttgtgcatccttagtggctccatggtatatt

SEQ ID NO: 13082 - DNA, 80 bp, synthetic construct
  source 1..80: mol_type = other DNA
agtgctatcttcacagccacacttttttgttaacactaaaatgtaacttttacttgcaggggagatggaaaccattctct

SEQ ID NO: 13083 - DNA, 80 bp, synthetic construct
  source 1..80: mol_type = other DNA
tttttaaccagcttctcagggaattcattaaaaagaaaaaaacccttagagaaatgctgcccggacttctacaacaaatc

SEQ ID NO: 13084 - DNA, 80 bp, synthetic construct
  source 1..80: mol_type = other DNA
tagtggggtgtcaggtggggcaacagtgacttgctcagacagcttccttgtggctgagagcaagcgcctgtccccacgga

SEQ ID NO: 13085 - DNA, 80 bp, synthetic construct
  source 1..80: mol_type = other DNA
tcgcccgccgctccatccggccggtgcttaccttcaagccatagggcgcccgggggcagagacggcgccggctgcttgag

SEQ ID NO: 13086 - DNA, 80 bp, synthetic construct
  source 1..80: mol_type = other DNA
ccggcccctctccaggtccccgcgatcctcgttccccagtgtggagtcgcagcctcgacctgggagctgggagaactcgt

SEQ ID NO: 13087 - DNA, 80 bp, synthetic construct
  source 1..80: mol_type = other DNA
ggctcacagcaaacttctcctcaaaacccggagactttctttcttggatgtctctttttgctgtttgaagaatttgagcc

SEQ ID NO: 13088 - DNA, 80 bp, synthetic construct
  source 1..80: mol_type = other DNA
catcacttttctccctccattggtgttctcattctttgatgttacttgtttgaacaccactattagtagttggagatttg

SEQ ID NO: 13089 - DNA, 80 bp, synthetic construct
  source 1..80: mol_type = other DNA
aatatgctagatattctgggctaaaggttgaagggggggtgagttttaagggtttctgctcttgcttccagattgctttc

SEQ ID NO: 13090 - DNA, 80 bp, synthetic construct
  source 1..80: mol_type = other DNA
ttcaaagttttagaatatggttcacccacatgttgcttccctgtaaatataatttttaaaaccagattctgggccgggca

SEQ ID NO: 13091 - DNA, 80 bp, synthetic construct
  source 1..80: mol_type = other DNA
atttgacatttcaatccctgaaggccctgaagttcagtatcaaatgactggtcctgtggactgagcatctgtgaattgca

SEQ ID NO: 13092 - DNA, 80 bp, synthetic construct
  source 1..80: mol_type = other DNA
gattttgtcctgtgtgaaagagaagtgactgtgaactgacatgctgtgtttggtgttttagaaagatggctgcagcagcg

SEQ ID NO: 13093 - DNA, 80 bp, synthetic construct
  source 1..80: mol_type = other DNA
atcagtatttctggggaatggagcctggcacacacacatttcttaaagctcccttggcaattctgaggagtggattacat

SEQ ID NO: 13094 - DNA, 80 bp, synthetic construct
  source 1..80: mol_type = other DNA
cagattttgagaactgctgatatactccaggcacatcgcatgctgggatctagatacaccaagggaacaaaataactgca

SEQ ID NO: 13095 - DNA, 80 bp, synthetic construct
  source 1..80: mol_type = other DNA
attttattttataagcagaaatgtgatatctgacgattttaccactacatgcttgcaggccagtgcacagcagatgacgt

SEQ ID NO: 13096 - DNA, 80 bp, synthetic construct
  source 1..80: mol_type = other DNA
tcagaaaccttatccttatagatgtttcttgatttttttaatttctggtgacatttatgagtgagaatagtgtattgccc

SEQ ID NO: 13097 - DNA, 80 bp, synthetic construct
  source 1..80: mol_type = other DNA
acctcatagtttacacaatgccttaacattcttctctctcagcctcctacaaccccacaggattgggatagctttccaga

SEQ ID NO: 13098 - DNA, 80 bp, synthetic construct
  source 1..80: mol_type = other DNA
tagagaggattgccaggagaacacatcgatttttcaggcctgtgatgacgtatctcttgttgaataagtaaacccttcca

SEQ ID NO: 13099 - DNA, 80 bp, synthetic construct
  source 1..80: mol_type = other DNA
cattcctctgacttaatattgagaagacattgggcactctttttcctcccacacttgtcttctttcactaggtgacaagg

SEQ ID NO: 13100 - DNA, 80 bp, synthetic construct
  source 1..80: mol_type = other DNA
ccagtgccaagtgttcaaagcccttagaatcacaatgctcttaaagcaaagtcttcaacaatgcttgaaaacttccactg

SEQ ID NO: 13101 - DNA, 80 bp, synthetic construct
  source 1..80: mol_type = other DNA
tcacttcagaaaccctgatgatttcttcctgtgctctttttaccttaggacttttactatgacgactgtgactggcccat

SEQ ID NO: 13102 - DNA, 80 bp, synthetic construct
  source 1..80: mol_type = other DNA
atttgatctggaattaactgagctactgcaggaattgcttgattcactgatgactggtgttgagccagtacacacccaca

SEQ ID NO: 13103 - DNA, 80 bp, synthetic construct
  source 1..80: mol_type = other DNA
aaaatggccgagtgtggtggctcacacctgtaatcccagcactttgggaggccaaggcaggtggatcacttggatcactt

SEQ ID NO: 13104 - DNA, 80 bp, synthetic construct
  source 1..80: mol_type = other DNA
cacctgaatccccagccatttggtagagaagatagaaaacctacagaggaggctaagattttattagaaaattcagcttc

SEQ ID NO: 13105 - DNA, 80 bp, synthetic construct
  source 1..80: mol_type = other DNA
cagatccccattctttccatcccattctcccaagcaagaatttacctaatgtggtttgcgagaatttaagagctggaaag

SEQ ID NO: 13106 - DNA, 80 bp, synthetic construct
  source 1..80: mol_type = other DNA
gctgtccctatactggagtcctaaaacacttacgactgcagatagggggaggtttttcaaaaccttggtctgaaaagcca

SEQ ID NO: 13107 - DNA, 80 bp, synthetic construct
  source 1..80: mol_type = other DNA
cgtattttactaagggcatcagtaaggctttctatgacctgctccttcaatgcttggttgacatttggggagcaaagata

SEQ ID NO: 13108 - DNA, 80 bp, synthetic construct
  source 1..80: mol_type = other DNA
agaaatggggtcctctttgagtttcctctgtgccgatacctttctctttgttaaaacagctaattaaacactgaagcagt

SEQ ID NO: 13109 - DNA, 80 bp, synthetic construct
  source 1..80: mol_type = other DNA
tcacagcagtagaggactctgtaaatttaatctgtgtgtctcctgtaaataagtgcattagcagtacacaggtggtgtca

SEQ ID NO: 13110 - DNA, 80 bp, synthetic construct
  source 1..80: mol_type = other DNA
gtccaaaggagtgaataggccttatctgaaacaggtgagcgtgacaagtgttttcttacttattttacttttcagataat

SEQ ID NO: 13111 - DNA, 80 bp, synthetic construct
  source 1..80: mol_type = other DNA
atgtgcacgaggtcgttataaagctcgaaaatatgggctcaccaaccaggtgatttttttaattatccaaccagaagaca

SEQ ID NO: 13112 - DNA, 80 bp, synthetic construct
  source 1..80: mol_type = other DNA
atacagaggaatccccagcccagaatgttaatagttctaaggttgagaaacccaaggttaagccaagtcaacttatctat

SEQ ID NO: 13113 - DNA, 80 bp, synthetic construct
  source 1..80: mol_type = other DNA
caagtgaacagtaaatgtatgcctgtttctgctttatgggactttgaaataatgttgtttgtgccaaggttttagattac

SEQ ID NO: 13114 - DNA, 80 bp, synthetic construct
  source 1..80: mol_type = other DNA
atgacaggttttttgttcttagtaaaagaccccagttttctcacttgtgaacagaaggggttagacttcatgacagctaa

SEQ ID NO: 13115 - DNA, 80 bp, synthetic construct
  source 1..80: mol_type = other DNA
tactatgggtagtatctgtggggaggttctcagaaacatgtcgcatgctcttttagaaccttaaagtattcctagtctcc

SEQ ID NO: 13116 - DNA, 80 bp, synthetic construct
  source 1..80: mol_type = other DNA
cttgtaaaagttaccggtacgatagggccattccaacaaagctgtaaagtggtgataacacagtcataaagaagaggaga

SEQ ID NO: 13117 - DNA, 80 bp, synthetic construct
  source 1..80: mol_type = other DNA
ggtttgttttcagttaggaattagggatatttataagaatatctttaaatgacacatgccttgctctgggacgaggcatc

SEQ ID NO: 13118 - DNA, 80 bp, synthetic construct
  source 1..80: mol_type = other DNA
ggtgcacttcaataactggaagcacagatgccctacagcagcatcaaagatggcactctaaactactttcaatcctttaa

SEQ ID NO: 13119 - DNA, 80 bp, synthetic construct
  source 1..80: mol_type = other DNA
cattctttaaaattggtccctgatctagactctagcctgagaatcatctttaagttcagaatttccactcatgacctcac

SEQ ID NO: 13120 - DNA, 80 bp, synthetic construct
  source 1..80: mol_type = other DNA
tcatctctaccagatgaactctcatttcttctttcaaaaaataaaaaacccaaaaaacccagagatcccaactgtcctgg

SEQ ID NO: 13121 - DNA, 80 bp, synthetic construct
  source 1..80: mol_type = other DNA
tcttctttcatcaagttagggtaccaacctttaaagactgccagtccaaggttaaaggaaacttttcaagagcagtccaa

SEQ ID NO: 13122 - DNA, 80 bp, synthetic construct
  source 1..80: mol_type = other DNA
tgtgactgagaaaggtgaaggagccgttctgaaaaagaagaaggcaggagctcgcacagctcttgactcatcttgacttc

SEQ ID NO: 13123 - DNA, 80 bp, synthetic construct
  source 1..80: mol_type = other DNA
gggtgtttcctaggaggacatccgattcccagccattcctttcagtgaatcacctgagctcacattcttttttcttttat

SEQ ID NO: 13124 - DNA, 80 bp, synthetic construct
  source 1..80: mol_type = other DNA
gcagcactaagttaagcttgcctggaaaacatcacttgaagctggaaaaccacttttaacacagcgggaaaagctatttg

SEQ ID NO: 13125 - DNA, 80 bp, synthetic construct
  source 1..80: mol_type = other DNA
atcgctgttctaacgtgcagatctggtcatgttaccagccttttaggtggtcttctttggctttctctatctaaagttca

SEQ ID NO: 13126 - DNA, 80 bp, synthetic construct
  source 1..80: mol_type = other DNA
tttgctctgtgattcattcgttccacaacacttcaccaattaaagagagggtacaaaaggtgaacatccttggctcccag

SEQ ID NO: 13127 - DNA, 80 bp, synthetic construct
  source 1..80: mol_type = other DNA
aactcagacaaacggtcagaagcttacagggaggccaattttggatcaactttaagaagaattttttaaaagctagagca

SEQ ID NO: 13128 - DNA, 80 bp, synthetic construct
  source 1..80: mol_type = other DNA
ctagactgtgagatctgtgacactgaagcactaagttcatctcacaaaagcaacgtgctctttttaaatggttgatcaaa

SEQ ID NO: 13129 - DNA, 80 bp, synthetic construct
  source 1..80: mol_type = other DNA
tgaaataaatggggaaaaatctgaattgtaatcctttttctgttggacctggtgttggggtttcacacttgtgggtgaat

SEQ ID NO: 13130 - DNA, 80 bp, synthetic construct
  source 1..80: mol_type = other DNA
tttcttatgcgttacatcgtccttataagaaagcagtcattctcaccgagatgtgctgagcagatactggacatgttctg

SEQ ID NO: 13131 - DNA, 80 bp, synthetic construct
  source 1..80: mol_type = other DNA
tatccttcttcagtatggccaaagtgagtttctcattattttacctccccttcaggaaatgacttttcatcttgtgtttt

SEQ ID NO: 13132 - DNA, 80 bp, synthetic construct
  source 1..80: mol_type = other DNA
ctcacacctcttgccctgcatgcatttctttgctctgattaaacgagcattttataagccacatttgctgtgtgaaaggc

SEQ ID NO: 13133 - DNA, 80 bp, synthetic construct
  source 1..80: mol_type = other DNA
tgttctgaattctcagtttccttttttcccctccccagttctttgaaaatatcagaaacggacttgtggcatctttgaaa

SEQ ID NO: 13134 - DNA, 80 bp, synthetic construct
  source 1..80: mol_type = other DNA
gtgctgatgtgattgaaacgatgtggaattctctggacagagatagaattatggaggggttagtgtgtgtgtttaagatt

SEQ ID NO: 13135 - DNA, 80 bp, synthetic construct
  source 1..80: mol_type = other DNA
ctgttgttctcagagcagcttgtgttgccttgttaaggagaatatgttagtatccagacatccagaaaggatcctttact

SEQ ID NO: 13136 - DNA, 80 bp, synthetic construct
  source 1..80: mol_type = other DNA
ctgcacaagtgagctgcgcagggtgagtctaaagggttaatgcactttcaaaagcctctaatttgttattccagaagagt

SEQ ID NO: 13137 - DNA, 80 bp, synthetic construct
  source 1..80: mol_type = other DNA
taacgaattatctttcgcacatcacagaggcatctcttttcactgtcgagtttggtttgcttggttacaaaaagggcagt

SEQ ID NO: 13138 - DNA, 80 bp, synthetic construct
  source 1..80: mol_type = other DNA
cagaagaaaccctcaaggtggttgtgtctgcaggaaagtgctgtcgtctcctgcaatgctttcaagactattcagaagca

SEQ ID NO: 13139 - DNA, 80 bp, synthetic construct
  source 1..80: mol_type = other DNA
tcttatttcctgatatcttgagtttacttggacgtagagttttccttgactatggttatttctggtagtagcagctccag

SEQ ID NO: 13140 - DNA, 80 bp, synthetic construct
  source 1..80: mol_type = other DNA
accatttcttcagagaaaagtcatgatactcaagtcttcttacaaagcagtttgaggctttgagtaccagactgattaca

SEQ ID NO: 13141 - DNA, 80 bp, synthetic construct
  source 1..80: mol_type = other DNA
tgcatctaagaaaactcagagggaatatgctatctatcttttccgagcaatgaaagctctgggttttttccttgcttttc

SEQ ID NO: 13142 - DNA, 80 bp, synthetic construct
  source 1..80: mol_type = other DNA
ggcagatcctaggagaatcttatttaatccaagctttgtaaagttttgctttattccatggcaacatgggtatacacatc

SEQ ID NO: 13143 - DNA, 80 bp, synthetic construct
  source 1..80: mol_type = other DNA
cttggaatccagctctcatttcgtatgtgacctgcagggaagtaagttaaatgcacacgttttatcaagttcaaatgcaa

SEQ ID NO: 13144 - DNA, 80 bp, synthetic construct
  source 1..80: mol_type = other DNA
cacatttcactacttttagataaggaattctcaggctttgctatatctgactgctcttggaggctgagcttttggctaac

SEQ ID NO: 13145 - DNA, 80 bp, synthetic construct
  source 1..80: mol_type = other DNA
ttctggagtcccctgaatctcgttcctgttcttttgcaccctgttaattacatagagacattcacagctcttctgacctt

SEQ ID NO: 13146 - DNA, 80 bp, synthetic construct
  source 1..80: mol_type = other DNA
tttttccttatggtagttgaagaataatgcttaacctgtcattctaattaccaagcacggtgttctctttggaagatcat

SEQ ID NO: 13147 - DNA, 80 bp, synthetic construct
  source 1..80: mol_type = other DNA
atttaccaatctgaatttccccctagattaggtcacaggaacattgcagctgatgtacagctatgttcctcctgaaactt

SEQ ID NO: 13148 - DNA, 80 bp, synthetic construct
  source 1..80: mol_type = other DNA
cctattatcatctaggtgattttcaatgctcattgcaatgaaacctacttattgtgcatggcacccacccccactgagga

SEQ ID NO: 13149 - DNA, 80 bp, synthetic construct
  source 1..80: mol_type = other DNA
tgatataattaaatgacagaaatgtttacttccaagtggaactaagccagggtaactcagggtagggcagctgcttgcac

SEQ ID NO: 13150 - DNA, 80 bp, synthetic construct
  source 1..80: mol_type = other DNA
cctcctccttccctctgagctggtcccccgtggggaactgctgcccagactgacctgcgtccttccgcacgtgcaggaaa

SEQ ID NO: 13151 - DNA, 80 bp, synthetic construct
  source 1..80: mol_type = other DNA
tgtgcgtgctgaaggtgtggtgagaagcacttacaaaaagaaatggactgtgttaggattgcacattttactttgtttct

SEQ ID NO: 13152 - DNA, 80 bp, synthetic construct
  source 1..80: mol_type = other DNA
gtttgagaagtctgcaccaaagtatgtcctgtggttttcccttaggtcatcttcaacaagtttcatagtattttgtttag

SEQ ID NO: 13153 - DNA, 80 bp, synthetic construct
  source 1..80: mol_type = other DNA
ttttggcagggttccttgcagatcagaatggaaatgattaacagggcaattatcaatcatggacttttggcggcagaagg

SEQ ID NO: 13154 - DNA, 80 bp, synthetic construct
  source 1..80: mol_type = other DNA
ttagtggatcagtgatcaaaccaaagttatttgatcttaccaagtgatatcaggatgagaaagctgttagagtgtcagat

SEQ ID NO: 13155 - DNA, 80 bp, synthetic construct
  source 1..80: mol_type = other DNA
gaatcagggcccactctataccagtaagacctcatttcaactccattacatcttcaaaaaccccattctcaaataaggtt

SEQ ID NO: 13156 - DNA, 80 bp, synthetic construct
  source 1..80: mol_type = other DNA
attactttgatgagtcaagaagtaacatcctgggaatgattggccagtttaaatgagtgcctcaggtttttggaatacaa

SEQ ID NO: 13157 - DNA, 80 bp, synthetic construct
  source 1..80: mol_type = other DNA
taaagggcttttattaggaagaggaatttggcatattggattttgccttcagagaagtggagtcctgagatgctcttagc

SEQ ID NO: 13158 - DNA, 80 bp, synthetic construct
  source 1..80: mol_type = other DNA
ttttacacattaaatcagctcgttctcacatcagctcttttaaaaataaggaaatgaggagccacagtggcccaactgat

SEQ ID NO: 13159 - DNA, 80 bp, synthetic construct
  source 1..80: mol_type = other DNA
aagtcatttttcagggtcattcaggaagtcatccagagttataatggcccattatctactggtcagagtttacttaggct

SEQ ID NO: 13160 - DNA, 80 bp, synthetic construct
  source 1..80: mol_type = other DNA
aataagagagtcggcattttcttgcacattctttgtgatgttgtgatgagttggaaacttcccgattgggtttattagag

SEQ ID NO: 13161 - DNA, 80 bp, synthetic construct
  source 1..80: mol_type = other DNA
tgcaaattagatgcctggcacatgcttgtgttaaggtaataattcattacaatacaaattacaggggagttcctctgggc

SEQ ID NO: 13162 - DNA, 80 bp, synthetic construct
  source 1..80: mol_type = other DNA
aaatgtgttttccattgtggtttgtctgaaacatgatccaaaagtcagacccacctctcacctttccctaacctgccgga

SEQ ID NO: 13163 - DNA, 80 bp, synthetic construct
  source 1..80: mol_type = other DNA
ctcttaaaaaataccgtactaaaccctgattgaaaatcagagctcagacatacagcctgagatgccaaaaaatggccagg

SEQ ID NO: 13164 - DNA, 80 bp, synthetic construct
  source 1..80: mol_type = other DNA
aggcttcctggttaccttccagagagtaaggccagggagagttgaataagttgagaaatgtcatgtcgaagctattggtg

SEQ ID NO: 13165 - DNA, 80 bp, synthetic construct
  source 1..80: mol_type = other DNA
aaaccggccctcccttccttttgcatttggtctgaaaattcaattagatgctgagtcctacaatgtatttgagaagccca

SEQ ID NO: 13166 - DNA, 80 bp, synthetic construct
  source 1..80: mol_type = other DNA
aaactcagcctatgtttgtcttgatttccttaactgacatctagaagaaaatatgagctcaggggtccgctgggttcctt

SEQ ID NO: 13167 - DNA, 80 bp, synthetic construct
  source 1..80: mol_type = other DNA
atctgtggaagtgagtttccactgactgatgaggagaaaaatgaattggcttcacccagcatccagcttcttatcctggg

SEQ ID NO: 13168 - DNA, 80 bp, synthetic construct
  source 1..80: mol_type = other DNA
ctagaaagacccaaaacaatttaacagaaacattttggaccattttggaccttggcagttaggccccagtgcagcagcgg

SEQ ID NO: 13169 - DNA, 80 bp, synthetic construct
  source 1..80: mol_type = other DNA
gtgcagataaggtaatattagctagttcaggaggagaaagagataaagataaagtaatattagctagttcaggaggagtg

SEQ ID NO: 13170 - DNA, 80 bp, synthetic construct
  source 1..80: mol_type = other DNA
gctggagccagggaagggcacagggtccctcctggagtcatgggaggtgcagccgaggttctatattaaaatacagaggc

SEQ ID NO: 13171 - DNA, 80 bp, synthetic construct
  source 1..80: mol_type = other DNA
tggagcatgttgtgcccaactagggacagcgcagatagattctgtaatttgcctaacaatgtctataggatgatcccatt

SEQ ID NO: 13172 - DNA, 80 bp, synthetic construct
  source 1..80: mol_type = other DNA
caacaaagtagttgaaatagtatgtgaaccagtaaaccctaaaaggtgtccagtgttgtctgtgagctaattaagtgatt

SEQ ID NO: 13173 - DNA, 80 bp, synthetic construct
  source 1..80: mol_type = other DNA
tctaggatctgattcctgaggaatcacaatgtggatttcacaatcacttccagtgtcttttgccaacctctgtgaacaga

SEQ ID NO: 13174 - DNA, 80 bp, synthetic construct
  source 1..80: mol_type = other DNA
tctgaggtgggtgggaggccctcgagggagaaatgtctgcaggaaattcttcccctacgagaggtctgttttctaagtta

SEQ ID NO: 13175 - DNA, 80 bp, synthetic construct
  source 1..80: mol_type = other DNA
cgctctatttactgaattaccgtgaggatgtggagcgaggctgagttctgtattttaacaccattttaattctcacctac

SEQ ID NO: 13176 - DNA, 80 bp, synthetic construct
  source 1..80: mol_type = other DNA
atgtctaactcaactctgctttaaaagcagctaacacattgctctttgcatattgttcactcactaagttgaactggact

SEQ ID NO: 13177 - DNA, 80 bp, synthetic construct
  source 1..80: mol_type = other DNA
cagtgtgtgtcctctctgagcaaatctgaattgtgtgcttaatacatggaaagggatttgggagggttgctttttaaact

SEQ ID NO: 13178 - DNA, 80 bp, synthetic construct
  source 1..80: mol_type = other DNA
ccagaagggtagaagttcctgtgctcatattaagaaacagcaatgtcaatcgaggcccaactcaaatccaatttatagga

SEQ ID NO: 13179 - DNA, 80 bp, synthetic construct
  source 1..80: mol_type = other DNA
aattccagggataggaatattaatagcaagctttttgcctgatatagtcactttatgctgcaggggtgcccctttataaa

SEQ ID NO: 13180 - DNA, 80 bp, synthetic construct
  source 1..80: mol_type = other DNA
gtggagaatgtgacaaaattttaagcataacatgagaagggctgacacacatagatttctgtgtgcttacttgaaaacaa

SEQ ID NO: 13181 - DNA, 80 bp, synthetic construct
  source 1..80: mol_type = other DNA
agaaaagatagaagcagcagcatattttggcagcatctggtttattggaactcaaacgttctgattgtgcatacagacta

SEQ ID NO: 13182 - DNA, 80 bp, synthetic construct
  source 1..80: mol_type = other DNA
ttattttttgcacaagtgcctatatgctatatagagtttgcccactctgcattatcttccccctgttcccccgttatctg

SEQ ID NO: 13183 - DNA, 80 bp, synthetic construct
  source 1..80: mol_type = other DNA
ctcaacacaggctgggcaagttgctgttcttttggagcttacatcttagtggggaaagagaaatgcctatgtaaacatat

SEQ ID NO: 13184 - DNA, 80 bp, synthetic construct
  source 1..80: mol_type = other DNA
gtaattcaaagccttcctcgctttcccatgtgagtcattgctagtcagaatattacctttgcagagaggcttaattccaa

SEQ ID NO: 13185 - DNA, 80 bp, synthetic construct
  source 1..80: mol_type = other DNA
gaagtagaatttcaaatattgcttttcatgctttatttgggaccgattttagccccgctctcctttctcttgccattcgc

SEQ ID NO: 13186 - DNA, 80 bp, synthetic construct
  source 1..80: mol_type = other DNA
aataaaatcctatagaaatgaattcctggacttgatatgtagcaagctggcattggctcgggagtgagtgggctcagtta

SEQ ID NO: 13187 - DNA, 80 bp, synthetic construct
  source 1..80: mol_type = other DNA
catttggagtcaaaacaaacagatgattagctggggtggtcactttcaatcaagagttttcacatcgcctagacatggcc

SEQ ID NO: 13188 - DNA, 80 bp, synthetic construct
  source 1..80: mol_type = other DNA
ccaggggagcagcgattcctgtatgttgtagaaagtttttcaaaagtcaccttggaaagaggttttgttccttaaccttc

SEQ ID NO: 13189 - DNA, 80 bp, synthetic construct
  source 1..80: mol_type = other DNA
gtgactctaacttgtggccagggtgggaagcactgctccacagaggtgccaaaaccaggttccttcctgtgttctcacat

SEQ ID NO: 13190 - DNA, 80 bp, synthetic construct
  source 1..80: mol_type = other DNA
gggattacaggcattatattattctttaaattcacatgagaatttagtatggcttcaaaaaataccataagttaaaatat

SEQ ID NO: 13191 - DNA, 80 bp, synthetic construct
  source 1..80: mol_type = other DNA
gctttccccatgctgggaatcgaaagattctcctaggaaaagaaaggcttgacaacatcgattcaaaaagggcatgcatt

SEQ ID NO: 13192 - DNA, 80 bp, synthetic construct
  source 1..80: mol_type = other DNA
tgtgctgcaaaattgtatttcttgcattccataactgggcagttccatcataggagaataccacactgcgttcgtccatt

SEQ ID NO: 13193 - DNA, 80 bp, synthetic construct
  source 1..80: mol_type = other DNA
tgacacagtcagggctgcggaaaagcattggtaaagtgtatatttgaggcttcagaagtttgaaaaggctagatttccta

SEQ ID NO: 13194 - DNA, 80 bp, synthetic construct
  source 1..80: mol_type = other DNA
ctgaaatgctcccccaaatcttcccattcagtgttttctcagtagcaaactcgtgggaaaattggttattttacttaaaa

SEQ ID NO: 13195 - DNA, 80 bp, synthetic construct
  source 1..80: mol_type = other DNA
gggaagagagtctcactgtgtatcttctcctgtttaaagcctgaatttgttcagaatgtaatatctctgtttagccactc

SEQ ID NO: 13196 - DNA, 80 bp, synthetic construct
  source 1..80: mol_type = other DNA
gagggctaatatgtgactatctccacttcctggtaccctgtgtgaataacttcacttactaaagggatgttgagcaactt

SEQ ID NO: 13197 - DNA, 80 bp, synthetic construct
  source 1..80: mol_type = other DNA
gatatcatatggcgtttcagtggcattgtgtgttacccttcttaggtaacagctcagccattagaagaatgtcctacaca

SEQ ID NO: 13198 - DNA, 80 bp, synthetic construct
  source 1..80: mol_type = other DNA
tagataatctttgtgcaacaagtcaattcactgaagagatctgctctctaggagcctctgtgaccccaccataactggga

SEQ ID NO: 13199 - DNA, 80 bp, synthetic construct
  source 1..80: mol_type = other DNA
cagacctttcctggtacaacatagtacgtttcagattaactcaaggtattgtggtgatattgcggtcaaagccaggtgat

SEQ ID NO: 13200 - DNA, 80 bp, synthetic construct
  source 1..80: mol_type = other DNA
gtgcatgtgtgtgcaagtaagtgtgtatacgtgtgtgggcatgtattgtgtacatgtatgtgtgttttatgcatctgttt

SEQ ID NO: 13201 - DNA, 80 bp, synthetic construct
  source 1..80: mol_type = other DNA
ttttgcaaagttcagcatacatgagcgtcacctgggaaccttaataaagtgcagatgttgattcagcaaatctgggatgc

SEQ ID NO: 13202 - DNA, 80 bp, synthetic construct
  source 1..80: mol_type = other DNA
gttcctcttcatttgaatctgtcagtggcttctcagtgcctttcaaatgaaatctaaagtccttacaagccttgcagcag

SEQ ID NO: 13203 - DNA, 80 bp, synthetic construct
  source 1..80: mol_type = other DNA
gagaaatgctcctgcactgcctctgattaactgctttcctagaagtcacacatataaaagggatttaattctagtgggat

SEQ ID NO: 13204 - DNA, 80 bp, synthetic construct
  source 1..80: mol_type = other DNA
aaataatacgctttgaatggctgttcaacagcatagaaattagctgagtagaaggcactcatatagccattaggaccaat

SEQ ID NO: 13205 - DNA, 80 bp, synthetic construct
  source 1..80: mol_type = other DNA
cgacgtgtgttctgtgactcacccctgcaagttatttgtgtgtattcccttgcatagtaattaataatgaagcaaagcat

SEQ ID NO: 13206 - DNA, 80 bp, synthetic construct
  source 1..80: mol_type = other DNA
agctgatgatgaaataggaagagcttagcactaagaaaatccttttggagtttggccttgggggaaaatgaatcactcca

SEQ ID NO: 13207 - DNA, 80 bp, synthetic construct
  source 1..80: mol_type = other DNA
agttgttagtgatttttgagtcagtttttccttgtcaacgaccccaggaatgagtttgggattacagggtagccagggaa

SEQ ID NO: 13208 - DNA, 80 bp, synthetic construct
  source 1..80: mol_type = other DNA
ctggctgcatcgttctgctgacaacatgacatgtttctataacttgaaaaaagcaagcagtggactgctcattggtaaaa

SEQ ID NO: 13209 - DNA, 80 bp, synthetic construct
  source 1..80: mol_type = other DNA
gaaaaattttaaaagaacatttaaaccatcttgggctaggggtggatatgcaccaccccacggaagccaaacaaaatctc

SEQ ID NO: 13210 - DNA, 80 bp, synthetic construct
  source 1..80: mol_type = other DNA
ccatgcttggtattcacatgacttctagggcgacagctcaaccagcaaataaacagcttcatatgggaaatattactcag

SEQ ID NO: 13211 - DNA, 80 bp, synthetic construct
  source 1..80: mol_type = other DNA
tgagtaagcaaaagtctcagcgcagagattagacaagtagaatgctggcccgagaggaggcgtttactcaccctctgtct

SEQ ID NO: 13212 - DNA, 80 bp, synthetic construct
  source 1..80: mol_type = other DNA
agattgcaatagttgctgccatgtgaagcctcagtgtcatgctccatatttagagagatctatgatttctgaggcccttt

SEQ ID NO: 13213 - DNA, 80 bp, synthetic construct
  source 1..80: mol_type = other DNA
aaactatgaagagtaaataagaaaaacacccagaaatttaccattcagaaaaggtcattgttaacaacacggtgtatctt

SEQ ID NO: 13214 - DNA, 80 bp, synthetic construct
  source 1..80: mol_type = other DNA
tttttatcttttcttgggttagttgatgtctgatatgttactttcttgcgatgccaggcaatggctgggagccagagctc

SEQ ID NO: 13215 - DNA, 80 bp, synthetic construct
  source 1..80: mol_type = other DNA
tgacagttagggtttcgatcatgacaggaattcagattactccagcatgtgcatttgttaaagctcatcaaatgctacac

SEQ ID NO: 13216 - DNA, 80 bp, synthetic construct
  source 1..80: mol_type = other DNA
catttgagtaagtccatatgcagatccaaacatctcagtttagacaataacttaagacaatatagagtggctgacatccc

SEQ ID NO: 13217 - DNA, 80 bp, synthetic construct
  source 1..80: mol_type = other DNA
atgctgctgtctccttttgggtatgtgacaggggaaagcctcagaagaaacaaccttatgtgttttcttttgatacttta

SEQ ID NO: 13218 - DNA, 80 bp, synthetic construct
  source 1..80: mol_type = other DNA
atgttattgtcacaacctggtacctacatcagtgctgacatctttaagaaccttagaattgggaaatcagtttagcccta

SEQ ID NO: 13219 - DNA, 80 bp, synthetic construct
  source 1..80: mol_type = other DNA
aatctccagccagttaggtttttaatttacacttttgtccctgattttaggtgtagtgttgtgtacactactgcccagtg

SEQ ID NO: 13220 - DNA, 80 bp, synthetic construct
  source 1..80: mol_type = other DNA
ttcatgtgatatctgtctttttcttccagtttgccaaggcacgagtaacaagctcacgcagttgggcacttttgaagatc

SEQ ID NO: 13221 - DNA, 80 bp, synthetic construct
  source 1..80: mol_type = other DNA
ccttagcagtcttatctaactatgatgcaaataaaaccggactgaaggagctgcccatgagaaatttacagggtgagagg

SEQ ID NO: 13222 - DNA, 80 bp, synthetic construct
  source 1..80: mol_type = other DNA
ggtgaaggcgtcattaggtcggatttcagggctaattgaatgtatattgccttcacaccatggcaaagtcgaaaatctgt

SEQ ID NO: 13223 - DNA, 80 bp, synthetic construct
  source 1..80: mol_type = other DNA
ttaagtgactgtaggaacaggcctcagcagctccttccacttccttggtatgattgttttttaaaccaaggctgggattg

SEQ ID NO: 13224 - DNA, 80 bp, synthetic construct
  source 1..80: mol_type = other DNA
cagcacttgcacagggttttgtacacataagtcattctgtcaatgttcatgtttaatgtcatcagtggaacactcccact

SEQ ID NO: 13225 - DNA, 80 bp, synthetic construct
  source 1..80: mol_type = other DNA
tctcagcaacatgtcgatggacttccagaaccacctgggcagctgtaagtgtcgcatacacactatctctgcctccagct

SEQ ID NO: 13226 - DNA, 80 bp, synthetic construct
  source 1..80: mol_type = other DNA
aagttacaatgtcagtggcattatacatccacatgggtgtgtggccatcaccaccgtccacacacagaactcttttatct

SEQ ID NO: 13227 - DNA, 80 bp, synthetic construct
  source 1..80: mol_type = other DNA
tttaaaaaggaattaggtatgttgggttagtcgcattggagagtgcaaattcaccatcgacctgatacctgaaatttcct

SEQ ID NO: 13228 - DNA, 80 bp, synthetic construct
  source 1..80: mol_type = other DNA
atagaaaaagaaagcatcacaccttcctttgcaaagtatttgggttccttttgcttttaaacacctgggtcagctggggt

SEQ ID NO: 13229 - DNA, 80 bp, synthetic construct
  source 1..80: mol_type = other DNA
cttggtggtattctggcttcacagtcacatgggagatcaatcgtcagcttttctgtttgaaatctaaattcttcctgact

SEQ ID NO: 13230 - DNA, 80 bp, synthetic construct
  source 1..80: mol_type = other DNA
aaagagttactttattacagggtcagatgtgaaccagtaggtgaaggacagtcttgcaaatctcaccgcatgcagttaat

SEQ ID NO: 13231 - DNA, 80 bp, synthetic construct
  source 1..80: mol_type = other DNA
atgtggtttcgttggaagcaaatgtgtcttcactttttcatgaaaaagtctgcaagtgctctgcgacatccctgggaaat

SEQ ID NO: 13232 - DNA, 80 bp, synthetic construct
  source 1..80: mol_type = other DNA
agctggtgtgacgaagcccttcctaagactaaatccagagcactctgtggtttcagagaagattcctaaattccagagtt

SEQ ID NO: 13233 - DNA, 80 bp, synthetic construct
  source 1..80: mol_type = other DNA
cgcaaattccgagacgaagccacgtgcaaggacacctgccccccactcatgctctacaaccccaccacgtaccagatgga

SEQ ID NO: 13234 - DNA, 80 bp, synthetic construct
  source 1..80: mol_type = other DNA
aaatgtgccacagtgatgacacagatatatctttgagatagggcttaacagagctttaaaatccataggaaaacacttcg

SEQ ID NO: 13235 - DNA, 80 bp, synthetic construct
  source 1..80: mol_type = other DNA
acatatcgtttctttaaaacagaagataaagctgtaaagctaggttaggcaatgggaaggcactgaaggttgtgacgggg

SEQ ID NO: 13236 - DNA, 80 bp, synthetic construct
  source 1..80: mol_type = other DNA
aaaatctgcctttttaactggtagagattggtgatcaataatcaccctgttgtttgtttcagtgactccttcacacatac

SEQ ID NO: 13237 - DNA, 80 bp, synthetic construct
  source 1..80: mol_type = other DNA
ggcaggaccaagcaacagtaagttgaccacagccaaagcctggtagattacatttgcctttttagttggaaattaggctt

SEQ ID NO: 13238 - DNA, 80 bp, synthetic construct
  source 1..80: mol_type = other DNA
atactgtgcaacattaaagagaataagagtgcgtgaaatatgcattgcctcccataaactcccttggctctgaatctctg

SEQ ID NO: 13239 - DNA, 80 bp, synthetic construct
  source 1..80: mol_type = other DNA
gatatacacattggaccacccaatagcatcctagtgtcatgttggatggtgaagaaaatgccacagttactgctttcagg

SEQ ID NO: 13240 - DNA, 80 bp, synthetic construct
  source 1..80: mol_type = other DNA
ttagttgtaggtcactctctgctcatttcagcctgtaaagactacagctacacacatacacacacagaggaatggaatga

SEQ ID NO: 13241 - DNA, 80 bp, synthetic construct
  source 1..80: mol_type = other DNA
gccgtgggagcacagaaaacatggagtcccatctggtttaattgatgccattgccaaaggggaggactcacggcaccccc

SEQ ID NO: 13242 - DNA, 80 bp, synthetic construct
  source 1..80: mol_type = other DNA
ctttgaacgacaaatgaggacaaaacataaataggaaagtaaaactgaaggatagaggccaaggccatgttttagaagat

SEQ ID NO: 13243 - DNA, 80 bp, synthetic construct
  source 1..80: mol_type = other DNA
actgacaaacagccgtacatctgttctgtcttttcaatcaaacatcagcttcttgcttaacattgatgtgtacatcttga

SEQ ID NO: 13244 - DNA, 80 bp, synthetic construct
  source 1..80: mol_type = other DNA
cctggtttcccccatccctgacctagtcagcattgctttatcgctttcatcaaacatcctcaaattcttaacattagctt

SEQ ID NO: 13245 - DNA, 80 bp, synthetic construct
  source 1..80: mol_type = other DNA
gagtcccaatgcttttatttgagttttgcaaggttattccaagttttacaaatagaaggtagcgtatgactcagtccttg

SEQ ID NO: 13246 - DNA, 80 bp, synthetic construct
  source 1..80: mol_type = other DNA
caggggcttttgcgtttctctccagatttctaaggttaacatggggattagctgttttgcaatgaataaaaggtaacatt

SEQ ID NO: 13247 - DNA, 80 bp, synthetic construct
  source 1..80: mol_type = other DNA
agtgatgatggtgttgatggtggtgaggaggtgagagtcacaatgttggtggtgttggtggtggtggtggtgaggaggtg

SEQ ID NO: 13248 - DNA, 80 bp, synthetic construct
  source 1..80: mol_type = other DNA
gatgatggtggtgaggacgtgggagtaacaacagtggcagtgacggtgattgagacatgatgatgatttgtcaactttct

SEQ ID NO: 13249 - DNA, 80 bp, synthetic construct
  source 1..80: mol_type = other DNA
tctaatgtctttctattttttcccaggtcctaataaatcttcactgtctgactttagtctcccactaaaactgcatttcc

SEQ ID NO: 13250 - DNA, 80 bp, synthetic construct
  source 1..80: mol_type = other DNA
ttaaataacatgctatagctgcttgagttcatactcaatagtcatttctgcagagttaccgagggcctcatcagcgtcag

SEQ ID NO: 13251 - DNA, 80 bp, synthetic construct
  source 1..80: mol_type = other DNA
ctttctccaggccaggaaatgagagtctcaaagccatgttattctgcctttttaaactatcatcctgtaatcaaagtaat

SEQ ID NO: 13252 - DNA, 80 bp, synthetic construct
  source 1..80: mol_type = other DNA
aatgagaaaaatgtatatttctctttcacttcctacagatgcactgggccaggtcttgaaggctgtccaacgaatgggta

SEQ ID NO: 13253 - DNA, 80 bp, synthetic construct
  source 1..80: mol_type = other DNA
accatgtctccacctggaaaccagtcatggccattccttcttacatctgctcttttccatctttttcttctcctcctgtt

SEQ ID NO: 13254 - DNA, 80 bp, synthetic construct
  source 1..80: mol_type = other DNA
ttagatacataattgtattatgatgcagaaagaatctctgaatgtgcagttatacccagttggtgacatgttggtacatc

SEQ ID NO: 13255 - DNA, 80 bp, synthetic construct
  source 1..80: mol_type = other DNA
tccagtgtttttcccaagttattgagaggaaatcttttataaccacagtaatcagtggtcctgtgagaccaattcacaga

SEQ ID NO: 13256 - DNA, 80 bp, synthetic construct
  source 1..80: mol_type = other DNA
tctgctctagaccctgctcatctccacatcctaaatgttcactttctatgtctttccctttctagctctagtgggtataa

SEQ ID NO: 13257 - DNA, 80 bp, synthetic construct
  source 1..80: mol_type = other DNA
cacttacaatctctggcccctcacctgtgctgtgtaggaaaatctttgtgcacaatttgcttccttaattcattttttat

SEQ ID NO: 13258 - DNA, 80 bp, synthetic construct
  source 1..80: mol_type = other DNA
aataaaagaaataaaagaaagctcagtttggcctcctgcttgtcctgtctcctcatcccctcttccccctccatcatttt

SEQ ID NO: 13259 - DNA, 80 bp, synthetic construct
  source 1..80: mol_type = other DNA
tgcgaggccctgcagcagatgggctgctcaaactgctctggtttgcagatttttcttccctctcaaatgaatacaatatg

SEQ ID NO: 13260 - DNA, 80 bp, synthetic construct
  source 1..80: mol_type = other DNA
tctttgaccttcatgacttcagtacagttcaaccctgacagttttgaagtaggtatgtgcctagatctgccctagtccct

SEQ ID NO: 13261 - DNA, 80 bp, synthetic construct
  source 1..80: mol_type = other DNA
gtaatcaggagatgctgtagatgggaggatgtctgtaggttacacacaaatgctgtgccactttatatcaggggcttgag

SEQ ID NO: 13262 - DNA, 80 bp, synthetic construct
  source 1..80: mol_type = other DNA
ctacaggccctcatgatattttaaaacacagcatcctcaaccttgaggcggaggtcttcataacaaagatactatcagtt

SEQ ID NO: 13263 - DNA, 80 bp, synthetic construct
  source 1..80: mol_type = other DNA
ctgatgtctctgttcttatttctctggaattctttgtgaatactgtggtgatttgtagtggagaaggaatattgcttccc

SEQ ID NO: 13264 - DNA, 80 bp, synthetic construct
  source 1..80: mol_type = other DNA
tttgtttcccaagactgccacaacaaatcatcaccaacttggtagctcaacatagcacagctttattccctcctggctct

SEQ ID NO: 13265 - DNA, 80 bp, synthetic construct
  source 1..80: mol_type = other DNA
acctggttttagtttcttcttagcacatattgccccagaatatctggttggtttatggcttacttgagtttgtgcctacc

SEQ ID NO: 13266 - DNA, 80 bp, synthetic construct
  source 1..80: mol_type = other DNA
ccttttacattacgggcagttaacgctttgtctctgttagatttgctttttagttcacaagagaaacctcattcctctgt

SEQ ID NO: 13267 - DNA, 80 bp, synthetic construct
  source 1..80: mol_type = other DNA
cacctaatgcagattacagtctcacagaattgagtgttcaggcagacactgatgtggttctgtagtacagcaaacaatat

SEQ ID NO: 13268 - DNA, 80 bp, synthetic construct
  source 1..80: mol_type = other DNA
cgtattccacaaagggtcgcagctaaacttaacctaatgatcactttagtatatcactaaaaagacaaagctcacagtgc

SEQ ID NO: 13269 - DNA, 80 bp, synthetic construct
  source 1..80: mol_type = other DNA
ctgtctaggaataggacattctgacactttcctgcctcttccgaggtctagcacttactctatgcctgcctgggaaggtg

SEQ ID NO: 13270 - DNA, 80 bp, synthetic construct
  source 1..80: mol_type = other DNA
aacaaaaataaatattttaatttcaattaaagtgagggtctcggagaagaagcaggaactgagtttcctgagaggccccg

SEQ ID NO: 13271 - DNA, 80 bp, synthetic construct
  source 1..80: mol_type = other DNA
caggccgttttaaaaatgtgcccagtataccaaaatctccgctaagcatttaaagaggcagaatgaaagttagcagtggt

SEQ ID NO: 13272 - DNA, 80 bp, synthetic construct
  source 1..80: mol_type = other DNA
tcttttccaaaagagaaaaacattaaaggcctcacaaacggcgcccaaagactaattctgcatagcatctttgcgagacc

SEQ ID NO: 13273 - DNA, 80 bp, synthetic construct
  source 1..80: mol_type = other DNA
tgctcttctttgtcctcatatacgagcacctctggacttaaaacttgaggaactggatggagaaaagttaatggtcagca

SEQ ID NO: 13274 - DNA, 80 bp, synthetic construct
  source 1..80: mol_type = other DNA
attgggaaaggtcacagctgccttggtggtccactgctgtcaaggacacctaaggaacaggaaaggccccatgcggaccc

SEQ ID NO: 13275 - DNA, 80 bp, synthetic construct
  source 1..80: mol_type = other DNA
ttaggaaacggctctccctgcaaagtccaaccaaactttaacgttaaccaaaccattaatgttgccatgaatttgaagtg

SEQ ID NO: 13276 - DNA, 80 bp, synthetic construct
  source 1..80: mol_type = other DNA
tctgctgatgcattgttatttacagccattttcagaatgtatctcctctccacgagggaactgcagggtcctgccccaag

SEQ ID NO: 13277 - DNA, 80 bp, synthetic construct
  source 1..80: mol_type = other DNA
attattcaatttaataaattaggggcctagtgtgttgtaccaaggagctaaaaagagagaactcgcaacaccttccagcc

SEQ ID NO: 13278 - DNA, 80 bp, synthetic construct
  source 1..80: mol_type = other DNA
caataattgaactaatttacattcccaccaacagtgtaaaagcattcctttttctccacaacctcaccagcatgtgttgg

SEQ ID NO: 13279 - DNA, 80 bp, synthetic construct
  source 1..80: mol_type = other DNA
tagtgtgataggagtaacattgaatctataaaatactttgggcagtatagtcattttaatgatattgattctttctatcc

SEQ ID NO: 13280 - DNA, 80 bp, synthetic construct
  source 1..80: mol_type = other DNA
atgagttaaggaagagtccctccttctcaatttttttggaatagtttcagtaggaatggtaccagctttttttgtacatc

SEQ ID NO: 13281 - DNA, 80 bp, synthetic construct
  source 1..80: mol_type = other DNA
ctttgcatccctggagaaatgtcatcacattacttaaggcaggcacacaaatccagaaacatctgtaaataccccttcaa

SEQ ID NO: 13282 - DNA, 80 bp, synthetic construct
  source 1..80: mol_type = other DNA
atgctgtggatggaaaataaatgtgatccctcaagaggcatgaggatttccaggcagtagccatacctccaaattgttta

SEQ ID NO: 13283 - DNA, 80 bp, synthetic construct
  source 1..80: mol_type = other DNA
ggcagccgatccacctatctccttccataacacaggaataccaaaaccaagctcacaggattgtctcaaagattcaataa

SEQ ID NO: 13284 - DNA, 80 bp, synthetic construct
  source 1..80: mol_type = other DNA
gacaaaaattaaacaccttcacaatataccctccatgaggcacaccacctgcattcaggaaaagtggatgagatgtggta

SEQ ID NO: 13285 - DNA, 80 bp, synthetic construct
  source 1..80: mol_type = other DNA
acccaccagggtgcagactctcaggcctgcccaacctactaatcagaaccagcatctcaaggagatctcgggtgattttt

SEQ ID NO: 13286 - DNA, 80 bp, synthetic construct
  source 1..80: mol_type = other DNA
acacacatatatacacacatacaccatgcatacatacacaccacacatacatacagacacaccacacacacgtacacaca

SEQ ID NO: 13287 - DNA, 80 bp, synthetic construct
  source 1..80: mol_type = other DNA
cacatatgtatgcacacatacacaccaacaccacacagacaccacacatgcataaacatatagacatatacacaccacac

SEQ ID NO: 13288 - DNA, 80 bp, synthetic construct
  source 1..80: mol_type = other DNA
ctaccagcaggacttctttcccaaggaagccaagccaaatggcatctttaagggctccacagctgaaaatgcagaatacc

SEQ ID NO: 13289 - DNA, 80 bp, synthetic construct
  source 1..80: mol_type = other DNA
gaaactcagtatgctgcccctgtcttgctgtcatgaaatcagcaagagaggatgacacatcaaataataactcggattcc

SEQ ID NO: 13290 - DNA, 80 bp, synthetic construct
  source 1..80: mol_type = other DNA
tctgtgtgtgccctgtaacctgactggttaacagcagtcctttgtaaacagtgttttaaactctcctagtcaatatccac

SEQ ID NO: 13291 - DNA, 80 bp, synthetic construct
  source 1..80: mol_type = other DNA
tcaggacatgcagaaatatttcagtcagaactgggaaacagaaggacctacattctgctgtcacttatgtgtcaagaagc

SEQ ID NO: 13292 - DNA, 80 bp, synthetic construct
  source 1..80: mol_type = other DNA
aaaagaatcatctgtggagcttcaaaagaaggggcctggagtctctgcagaccaattcaacccaaatctcgggggctctt

SEQ ID NO: 13293 - DNA, 80 bp, synthetic construct
  source 1..80: mol_type = other DNA
taggaaattttaaaagatgatggaaagcacatttagcttggtctgaggcaggttctgttggggcagtgttaatggaaagg

SEQ ID NO: 13294 - DNA, 80 bp, synthetic construct
  source 1..80: mol_type = other DNA
acctgaacagagtttccatgaaggttctccaagcactagaagggagagtgtctaaacaatggttgaaaagcaaaggaaat

SEQ ID NO: 13295 - DNA, 80 bp, synthetic construct
  source 1..80: mol_type = other DNA
aatccagggctgtaaaatcatcagtatggttctgcactgagatcggagagaagtaatatttctaggaaaattaggaaccc

SEQ ID NO: 13296 - DNA, 80 bp, synthetic construct
  source 1..80: mol_type = other DNA
atataacatgaatagtgtcccctggagttgaccacccaactgatactgactgagaagctgaaatgaacaaaacaacccct

SEQ ID NO: 13297 - DNA, 80 bp, synthetic construct
  source 1..80: mol_type = other DNA
aaaagaaaaagaaaattccaattttgaaggcctcatcctatattatgtcaaacatactgaaatgcagtaacgccccacat

SEQ ID NO: 13298 - DNA, 80 bp, synthetic construct
  source 1..80: mol_type = other DNA
ttgagtcctcctgtgtatcagccattgtactcatgggggaaaaaaaagacaaagcatatgttaatagtagagtgtgctgg

SEQ ID NO: 13299 - DNA, 80 bp, synthetic construct
  source 1..80: mol_type = other DNA
tcaatagggaatgaattatattaatggagggagagccatacaatggaaggctgaacagaaattaataggaatggggcaga

SEQ ID NO: 13300 - DNA, 80 bp, synthetic construct
  source 1..80: mol_type = other DNA
ttttatttttgtacctttaaaagtgtgtaccgtctgtgtatataatcagttaaaaacaaagaaaagctgagtgtggtggc

SEQ ID NO: 13301 - DNA, 80 bp, synthetic construct
  source 1..80: mol_type = other DNA
aggtcaggagtctcaattaaaaaataaataggccgggcacagtggctcatgcccataatcccagcactttgggaggccga

SEQ ID NO: 13302 - DNA, 80 bp, synthetic construct
  source 1..80: mol_type = other DNA
ggtgggttcagtgaatgaaaccatcagaaacgaattgtcccctgaaatcaagactttgtgattgccatagttgtatgctt

SEQ ID NO: 13303 - DNA, 80 bp, synthetic construct
  source 1..80: mol_type = other DNA
caagtgctcatcaagggccacccctaggaaggaccaattttcctatcagaagcttctaagttatcctcctttggcccaaa

SEQ ID NO: 13304 - DNA, 80 bp, synthetic construct
  source 1..80: mol_type = other DNA
cttgagggtaatgggtgaagccaaatctgccatggctcagttcccagctcagctctgtgaccttgggaaagttcctttag

SEQ ID NO: 13305 - DNA, 80 bp, synthetic construct
  source 1..80: mol_type = other DNA
tcgaatgtttgtgacagcggtccaaggaataagttaattttacattatcactctggatacctgtacaaaactccacctta

SEQ ID NO: 13306 - DNA, 80 bp, synthetic construct
  source 1..80: mol_type = other DNA
caactgagaccagagatgctcagtcacttgcccaaggtgacatgactgatatggaatagagtcaagattttttttttttt

SEQ ID NO: 13307 - DNA, 80 bp, synthetic construct
  source 1..80: mol_type = other DNA
atagaatgtggttgagaagtggaattaagcaggctaatagaaggcaaggggcaaagaagaaaccttgaatgcattgggtg

SEQ ID NO: 13308 - DNA, 80 bp, synthetic construct
  source 1..80: mol_type = other DNA
gagggacgcacccaggcctgcgcgaagagagggagaaagtgaagctgggagttgccactcccagacttgttggaatgcag

SEQ ID NO: 13309 - DNA, 80 bp, synthetic construct
  source 1..80: mol_type = other DNA
tggggtgtaaagtgggagagttcccagagaaggaagctaagaaataaggccagatgggagcctagggagggctgcgttgt

SEQ ID NO: 13310 - DNA, 80 bp, synthetic construct
  source 1..80: mol_type = other DNA
tctgggctttgtgttgccaaacagcagtctctctgctgacttggggacacaggctgaactctgtcctctgcaggaactcc

SEQ ID NO: 13311 - DNA, 80 bp, synthetic construct
  source 1..80: mol_type = other DNA
gtccagggaatttttggactctgaagaggaggcattaagaggtggttagagtcttattccagccaacaataatgggttga

SEQ ID NO: 13312 - DNA, 80 bp, synthetic construct
  source 1..80: mol_type = other DNA
ccaagtttaggtcagtaaatattcaccaagttgcaggtactgcagggcatagagatgaatccgatttagcttctgccctg

SEQ ID NO: 13313 - DNA, 80 bp, synthetic construct
  source 1..80: mol_type = other DNA
aaccgttctcagggtaccaattttaccacctgtctgcaaacactttaagattcttaatcagactcaaattggccacaaat

SEQ ID NO: 13314 - DNA, 80 bp, synthetic construct
  source 1..80: mol_type = other DNA
agggcgttattttgggcctggcctgccacccccagctcctgtttctcttgggagtctgttgggggaggaagtgtggggaa

SEQ ID NO: 13315 - DNA, 80 bp, synthetic construct
  source 1..80: mol_type = other DNA
tccagaagattcatgattcgtcatcgcctctcttgggggatttttacccctttgccctgagttgtgcctttgggacaaag

SEQ ID NO: 13316 - DNA, 80 bp, synthetic construct
  source 1..80: mol_type = other DNA
tctcagtttccctatctgtatattgggagcagttgtgaagctcagaagagaaatgtctgtgaaaaggttatgaacaggag

SEQ ID NO: 13317 - DNA, 80 bp, synthetic construct
  source 1..80: mol_type = other DNA
aagatctccaagtactggggaaccccagggaggccctggggggtggcagtgttcctatttcagccccactctgcttcccc

SEQ ID NO: 13318 - DNA, 80 bp, synthetic construct
  source 1..80: mol_type = other DNA
cccagctctgctaccaggacacgattttgtggaaggacatcttccacaagaacaaccagctggctctcacactgatagac

SEQ ID NO: 13319 - DNA, 80 bp, synthetic construct
  source 1..80: mol_type = other DNA
tgccctattgcccctggcacaccagggcaaaacagcacagtgaaagccagccacctgtccccccaggcctgcctccactt

SEQ ID NO: 13320 - DNA, 80 bp, synthetic construct
  source 1..80: mol_type = other DNA
caggctggagtgcagtggtgcaattttggctcactgcaacctctgccttccgcattcaagcaattcttgtgcctcagact

SEQ ID NO: 13321 - DNA, 80 bp, synthetic construct
  source 1..80: mol_type = other DNA
cctgatctccttagacaactacctttctacggacgtgggatcctgcaccctcgtctgccccctgcacaaccaagaggtga

SEQ ID NO: 13322 - DNA, 80 bp, synthetic construct
  source 1..80: mol_type = other DNA
caaaagaagccagagacaagattccatactgtctgatcccctttatgtgaggctctgaaccgaaaaaaccactctgtggt

SEQ ID NO: 13323 - DNA, 80 bp, synthetic construct
  source 1..80: mol_type = other DNA
aaaaaattccctttcacacttcctttacctccactcccctttccagagggggccatggttaacagtgtgtgtgttcacct

SEQ ID NO: 13324 - DNA, 80 bp, synthetic construct
  source 1..80: mol_type = other DNA
aagatttctagatcaaaggatataaatactgttttgatagatgttgccgaactaaggcctgggctttgaagcccaggatg

SEQ ID NO: 13325 - DNA, 80 bp, synthetic construct
  source 1..80: mol_type = other DNA
ctgcccgtctctgtgcacccttcttgactcagcacagctctggctggcttggcctcttggcatggcttctctagctgggt

SEQ ID NO: 13326 - DNA, 80 bp, synthetic construct
  source 1..80: mol_type = other DNA
ggcttggcacagtgaagcacgggaaaggctttctacagagcagtgactgttgttactcgctgttacaccttaggtaatgc

SEQ ID NO: 13327 - DNA, 80 bp, synthetic construct
  source 1..80: mol_type = other DNA
cgggaacgtgctaccttgcctggctaatttttgtatttttagtacataggatttcaccatgttggccaggctggtctcga

SEQ ID NO: 13328 - DNA, 80 bp, synthetic construct
  source 1..80: mol_type = other DNA
ccccctagtgggaatacagtgctggcaatgtttatcacaaggatatattcatgcatttcaatttaaagacaactaaatga

SEQ ID NO: 13329 - DNA, 80 bp, synthetic construct
  source 1..80: mol_type = other DNA
acttgatgccttgtgagggacacaggcaaagttcaattccttggaagtcaagggagactgagaagagtacagctgcagca

SEQ ID NO: 13330 - DNA, 80 bp, synthetic construct
  source 1..80: mol_type = other DNA
gctatctttttattgagtgattgagacagggtcttgctctcttgtccagtcttgaatgtggtggtgtaatcacaggctca

SEQ ID NO: 13331 - DNA, 80 bp, synthetic construct
  source 1..80: mol_type = other DNA
gtggaaattttggctagaacatcaaaatcatcaggtgtacattcctgtacccatgcagcagtcagaatctctgggggtgg

SEQ ID NO: 13332 - DNA, 80 bp, synthetic construct
  source 1..80: mol_type = other DNA
tcttaaatgcattttcagtttcaacttagaattggtttatcaggacgtagccccttggtgttgaggggcatgtgtattaa

SEQ ID NO: 13333 - DNA, 80 bp, synthetic construct
  source 1..80: mol_type = other DNA
gacaagtaatgatctcctggaaggcaggtaggatccagcccacgctcttctcactcatatcctcctctttctgcccaggg

SEQ ID NO: 13334 - DNA, 80 bp, synthetic construct
  source 1..80: mol_type = other DNA
ccccatatgtctcccgccttctgggcatctgcctgacatccacggtgcagctggtgacacagcttatgccctatggctgc

SEQ ID NO: 13335 - DNA, 80 bp, synthetic construct
  source 1..80: mol_type = other DNA
tgtgtgggagctgatgacttttggggccaaaccttacgatgggatcccagcccgggagatccctgacctgctggaaaagg

SEQ ID NO: 13336 - DNA, 80 bp, synthetic construct
  source 1..80: mol_type = other DNA
aaaagaaaaaaaaaattaaaagggaaactagaagagatgccaaaggttctggctgaagaccccagagtctggtgctactt

SEQ ID NO: 13337 - DNA, 80 bp, synthetic construct
  source 1..80: mol_type = other DNA
cactagggctggagccctctgaagaggaggcccccaggtctccactggcaccctccgaaggggctggctccgatgtattt

SEQ ID NO: 13338 - DNA, 80 bp, synthetic construct
  source 1..80: mol_type = other DNA
aaagccttagggaagctggcctgagaggggaagcggccctaagggagtgtctaagaacaaaagcgacccattcagagact

SEQ ID NO: 13339 - DNA, 80 bp, synthetic construct
  source 1..80: mol_type = other DNA
acattcccagactggacgtataaaaacacacactagttagcattagtgtttgtagcgccactttactgccaatagctgac

SEQ ID NO: 13340 - DNA, 80 bp, synthetic construct
  source 1..80: mol_type = other DNA
ttttaccatgtgccaggcactgcgggcactttacataaagcagccaatgtcagaactagaaagcgggagagctgggattc

SEQ ID NO: 13341 - DNA, 80 bp, synthetic construct
  source 1..80: mol_type = other DNA
gccccaggcggccagcttagggaagaagtcaggagctcagggctggaaagagaatggctgcttctctcttccaatatagg

SEQ ID NO: 13342 - DNA, 80 bp, synthetic construct
  source 1..80: mol_type = other DNA
ctctttcagtctcggtgtgtgtgttggaggaactcccctatcctcaaatattcttctccttttggaaacaaaagtaggaa

SEQ ID NO: 13343 - DNA, 80 bp, synthetic construct
  source 1..80: mol_type = other DNA
gctttgatgatgtcacattccccttctagctttaggtgtcactgaaccaaacaggaacccaaacccccagctgctctgac

SEQ ID NO: 13344 - DNA, 80 bp, synthetic construct
  source 1..80: mol_type = other DNA
catttgttaaattacgtactcaacagacattttacaaagttcctgctacgtgccaggcactatatcaggtgctggggatt

SEQ ID NO: 13345 - DNA, 80 bp, synthetic construct
  source 1..80: mol_type = other DNA
caggttcaggattgtggacctgcatgagctgggaggtgggggatagacaactttgcagggagagaggaaataagtcccca

SEQ ID NO: 13346 - DNA, 80 bp, synthetic construct
  source 1..80: mol_type = other DNA
cattattatttccttggtgtgttaagtagctatagccaccccttccctgaggcagaccacaataagcatttctttttccc

SEQ ID NO: 13347 - DNA, 80 bp, synthetic construct
  source 1..80: mol_type = other DNA
ttggtcttatagcaagtttatcccaacaaaaacagctactatttactccccaacccccatacacacgcacacacattgat

SEQ ID NO: 13348 - DNA, 80 bp, synthetic construct
  source 1..80: mol_type = other DNA
aaggccctgagcaagcaccaggacttcaactcagctgtgcagctggtggagaacttctgccgcaacccagacggggatga

SEQ ID NO: 13349 - DNA, 80 bp, synthetic construct
  source 1..80: mol_type = other DNA
tgagcatccaggatcccaccaactccacacagcagccacatgagatgggttgtttacttctttttttttgtttcttagat

SEQ ID NO: 13350 - DNA, 80 bp, synthetic construct
  source 1..80: mol_type = other DNA
agcttggatctgggccccggaggcagctctgcccagctgggttcttagacctgggattgttacttctagggctggtgtag

SEQ ID NO: 13351 - DNA, 80 bp, synthetic construct
  source 1..80: mol_type = other DNA
tgtctcccagaccccaagggcaggcagtttcctgctccttgctgggtgaacctgcagcttctccatttctttcttggggt

SEQ ID NO: 13352 - DNA, 80 bp, synthetic construct
  source 1..80: mol_type = other DNA
atgggagggttaaatgaagtagtatatattaatgtacttggcatagtatcagtcaccagtgagctcagatagcagcaaga

SEQ ID NO: 13353 - DNA, 80 bp, synthetic construct
  source 1..80: mol_type = other DNA
taggggaggagcaccgcaggctgggggcatggcaggcactaaggccctgaggtgggagcactcttggcttgtctggggag

SEQ ID NO: 13354 - DNA, 80 bp, synthetic construct
  source 1..80: mol_type = other DNA
aaaagcgtgtttctcacccaggattcaatgaaggatctttctttgtcttctatgaccttgacatgtctgatgagtgcagt

SEQ ID NO: 13355 - DNA, 80 bp, synthetic construct
  source 1..80: mol_type = other DNA
ctaattctgtcattccttctacatttgttagttactttattgctttccttcctttcattctatcagtgtggacttaagga

SEQ ID NO: 13356 - DNA, 80 bp, synthetic construct
  source 1..80: mol_type = other DNA
atactagaatatagtttcaaaatcctccatccataacactattaaaaccaatcctatggctgggctcagcccactgcaac

SEQ ID NO: 13357 - DNA, 80 bp, synthetic construct
  source 1..80: mol_type = other DNA
tagctggttccacaggtgcgtgcctggctagtatttgtattatataatttttttgtgaattgtctcttcatggttttttg

SEQ ID NO: 13358 - DNA, 80 bp, synthetic construct
  source 1..80: mol_type = other DNA
tttattattttccaaatggctaactagctgtctctaaaccctttattaaaaattattggccaagtgcggtagctcacacc

SEQ ID NO: 13359 - DNA, 80 bp, synthetic construct
  source 1..80: mol_type = other DNA
ctggcaacagagcgagactctatctcaaaatcaatcaatcaatcaatcaatctttgaactagtgatttgagatttcacct

SEQ ID NO: 13360 - DNA, 80 bp, synthetic construct
  source 1..80: mol_type = other DNA
gagtaaattagttaatggcttgccggttttctcaaaacaaatatctagggatttgatttatgaaattattaggcctatta

SEQ ID NO: 13361 - DNA, 80 bp, synthetic construct
  source 1..80: mol_type = other DNA
ccggctaatttttttttttcgagacagagtcttgttctgtcgctcaggcggtagtgcagtggtgcaatcccggctcactg

SEQ ID NO: 13362 - DNA, 80 bp, synthetic construct
  source 1..80: mol_type = other DNA
tgaaggggcgtggctgggctatgagctatgctcctgagcacagacggctgttctctttcaaggttacaagcctgatgaag

SEQ ID NO: 13363 - DNA, 80 bp, synthetic construct
  source 1..80: mol_type = other DNA
tttcagagtagagaagcccaggactagctgcgtaatttgtggggctcattgaaaaatggaaatgtcgaattccttcttaa

SEQ ID NO: 13364 - DNA, 80 bp, synthetic construct
  source 1..80: mol_type = other DNA
ccatgctctgttttacaggtctgagctttccagtaggtgaaattatgttttgaaactgtgtgccatgtagtaccagctag

SEQ ID NO: 13365 - DNA, 80 bp, synthetic construct
  source 1..80: mol_type = other DNA
aacacagcgtaaaatacattgcccattctaaatggtttgaggtcttaaagagtctcttccaggggtttttgaatgttcaa

SEQ ID NO: 13366 - DNA, 80 bp, synthetic construct
  source 1..80: mol_type = other DNA
tgtaccttatatcctcaactaaagtgtataactttcccccttccatcatcagcaagttccccaaggtttacacacaccag

SEQ ID NO: 13367 - DNA, 80 bp, synthetic construct
  source 1..80: mol_type = other DNA
ggttatctgggaaataattggatagcattctctctctatttcacctgttttacaaaacacaacttctctttccccctgtt

SEQ ID NO: 13368 - DNA, 80 bp, synthetic construct
  source 1..80: mol_type = other DNA
aggaaaaatctagaccagatgctttgctccttgctactgtaacattctgtgattccatattgggccagaatgagtttcaa

SEQ ID NO: 13369 - DNA, 80 bp, synthetic construct
  source 1..80: mol_type = other DNA
gacaaagttatagtcaaagctatcaagtccacagacatcctggactcttggacctaggattttaatctgcagaaacagat

SEQ ID NO: 13370 - DNA, 80 bp, synthetic construct
  source 1..80: mol_type = other DNA
gtttcaacccttagagggtaattcgagttatgtaccctttggaatttttccaaggtgtaatttgaatatcataggcagca

SEQ ID NO: 13371 - DNA, 80 bp, synthetic construct
  source 1..80: mol_type = other DNA
aagtggggcctggatcagccaagccttagatttattgcttcattcttttacctcagaatgccaggcagatattattttct

SEQ ID NO: 13372 - DNA, 80 bp, synthetic construct
  source 1..80: mol_type = other DNA
aagggtaggtctgttataggctcgagttggagagatcctaatatatctagccacaataggtgggtcaaactgattctctt

SEQ ID NO: 13373 - DNA, 80 bp, synthetic construct
  source 1..80: mol_type = other DNA
gctgtgccctaccccttttcctgacagagcaatgtcagaaaaagccaactttttaaaacagaagattggagcaggtatcg

SEQ ID NO: 13374 - DNA, 80 bp, synthetic construct
  source 1..80: mol_type = other DNA
aggttattggtataataatggcaggcagactccttgcattcagacttctttggggaagggaatagagaggaggagaagag

SEQ ID NO: 13375 - DNA, 80 bp, synthetic construct
  source 1..80: mol_type = other DNA
acaaaccatcacattccttgtgctgttccctttgaagatctgccagttgatctggttggaactgtaagctacatagaact

SEQ ID NO: 13376 - DNA, 80 bp, synthetic construct
  source 1..80: mol_type = other DNA
ataagaccctgtgaatctggctgaaatactacatgtgtggtcaaacccagaaaagatgactgaggagagttttggaaatg

SEQ ID NO: 13377 - DNA, 80 bp, synthetic construct
  source 1..80: mol_type = other DNA
taaactgattttcttctgcttttatcttaaattatgctattttacaacattaggtaccatccatggccaggtgcagtggc

SEQ ID NO: 13378 - DNA, 80 bp, synthetic construct
  source 1..80: mol_type = other DNA
atgttacaaattaactcacatacaatacagcttcacagtcctaattatcaaagtgacctcgaatgacatcattgggcttc

SEQ ID NO: 13379 - DNA, 80 bp, synthetic construct
  source 1..80: mol_type = other DNA
aaaccaataagaaccctctttttttccctgctcttaatcaaaccagtccatttggacttctgtgcctgcatctgaggcag

SEQ ID NO: 13380 - DNA, 80 bp, synthetic construct
  source 1..80: mol_type = other DNA
ttgaaatcaattaaaaatctgttgacacagagagggcgagtggtaaggaaatatggggcaacccactcaacacccatgtt

SEQ ID NO: 13381 - DNA, 80 bp, synthetic construct
  source 1..80: mol_type = other DNA
gtgaccacccaaatgctctcttgccactattctcctattacctgggtacctagtttcttatctcattttgttctcatatg

SEQ ID NO: 13382 - DNA, 80 bp, synthetic construct
  source 1..80: mol_type = other DNA
tccttatgtagtattcctttttggcagattaggaggggacctatcaagcctgagtgaatatctttttcctggaaaaacag

SEQ ID NO: 13383 - DNA, 80 bp, synthetic construct
  source 1..80: mol_type = other DNA
cccgactcttccatttggtggacttcagattacgaggttaggggaatgagaaaaactttcaatgaaagtacctactgggt

SEQ ID NO: 13384 - DNA, 80 bp, synthetic construct
  source 1..80: mol_type = other DNA
gaacctggtgagaaatgaggctagaaaaggagcaggttggggccagatggtaaaggacttaaatgccatatgagaagtct

SEQ ID NO: 13385 - DNA, 80 bp, synthetic construct
  source 1..80: mol_type = other DNA
ctgagagcgaaatcaagaacgaaatcccattaaacatagccacacacacatacaaaatacctaggaaaacatctaaccaa

SEQ ID NO: 13386 - DNA, 80 bp, synthetic construct
  source 1..80: mol_type = other DNA
cttagaatgtaaattagccactgtggaaagaagtttgggggtttctcaaagaatttgaaacagaactactattttaaggg

SEQ ID NO: 13387 - DNA, 80 bp, synthetic construct
  source 1..80: mol_type = other DNA
ttcacagtagcaaagacatggaatcaatctaggtgcccatcagtggtggactacataaagaaaatatggtacatatgcac

SEQ ID NO: 13388 - DNA, 80 bp, synthetic construct
  source 1..80: mol_type = other DNA
aatattgtgttaaattatcgttcatcttgaaaaaggatcccctaatcataaaagagaatattgcctcccatagcttcatg

SEQ ID NO: 13389 - DNA, 80 bp, synthetic construct
  source 1..80: mol_type = other DNA
ttaatcctggaaaacaaacaaatcacctatagctctcttgccacctgcacctttacaaccctctggtgcttgtggaaatt

SEQ ID NO: 13390 - DNA, 80 bp, synthetic construct
  source 1..80: mol_type = other DNA
ttggggctatcaggtgacaatggtcagattaattagaaggtcacacttatgaaagtcactggatgggtgaatgttttgta

SEQ ID NO: 13391 - DNA, 80 bp, synthetic construct
  source 1..80: mol_type = other DNA
agtggttaacaaagggatacagaggtggagcattgagaaaatggtcaaaagataaaattcagttagaagaaataaattta

SEQ ID NO: 13392 - DNA, 80 bp, synthetic construct
  source 1..80: mol_type = other DNA
acattatttccatctagttcattggctcagtctaggactgaagcatgtcgaattctcccactgactctcacatttcccaa

SEQ ID NO: 13393 - DNA, 80 bp, synthetic construct
  source 1..80: mol_type = other DNA
gaaaaagaacaggccaacttgcaataggggaaccacactgttcttagtataatttgcccacaattatccccctgaattgt

SEQ ID NO: 13394 - DNA, 80 bp, synthetic construct
  source 1..80: mol_type = other DNA
agatctgtctcaccaaggtctggagaaagtgtcatctggtcgaggtctggggtaaggggaatttgactgagatctgcaaa

SEQ ID NO: 13395 - DNA, 80 bp, synthetic construct
  source 1..80: mol_type = other DNA
agtctactctttcctccatcctgtcttacttgtagagatttatgtctaactctaggaaactttgggtggccactctgctt

SEQ ID NO: 13396 - DNA, 80 bp, synthetic construct
  source 1..80: mol_type = other DNA
ggtaatcatagtcagcatcactctcttcatcttcaggttctaaacgatcatgcattttccgtgtagccatgactgtagat

SEQ ID NO: 13397 - DNA, 80 bp, synthetic construct
  source 1..80: mol_type = other DNA
aggacttgcattccagtctgacaaactccaaagctgttgctgaagcagcctttaaggcactgtacctgatgattgaagat

SEQ ID NO: 13398 - DNA, 80 bp, synthetic construct
  source 1..80: mol_type = other DNA
catgttaatttggttgtgtcaaagcagtgattatccaagataagctttatctagtctaacatgtgactagaagatcaaac

SEQ ID NO: 13399 - DNA, 80 bp, synthetic construct
  source 1..80: mol_type = other DNA
gattcactgccaaaaggaagttatgcaaagaaagctgagagtaattttctgtttgaattatttgacctggcacctgtcag

SEQ ID NO: 13400 - DNA, 80 bp, synthetic construct
  source 1..80: mol_type = other DNA
agcaatagggaaaggattctctattccataaatggttctgggaaaactggctagccgtaggcagaaaattgaaactggac

SEQ ID NO: 13401 - DNA, 80 bp, synthetic construct
  source 1..80: mol_type = other DNA
attaaaaagtcaaaaactaacagatgttggcaaggttgtggagaaaaaggaacacttatacactcttggtgggagtgtaa

SEQ ID NO: 13402 - DNA, 80 bp, synthetic construct
  source 1..80: mol_type = other DNA
ttaacattgcagcaaattatctacaccactgagttctcagaaaccaaagtgacatagttcttggaactactgaagccata

SEQ ID NO: 13403 - DNA, 80 bp, synthetic construct
  source 1..80: mol_type = other DNA
ctcagaaattcagtatctttgttcacattcttctgtatactttagtctcaacagagatgggccataatctgggtccaatt

SEQ ID NO: 13404 - DNA, 80 bp, synthetic construct
  source 1..80: mol_type = other DNA
tatgacactaataaaagacaccatattttgttaccactaagagacaaaactcctgaagtgagaagggtttggctgtgatt

SEQ ID NO: 13405 - DNA, 80 bp, synthetic construct
  source 1..80: mol_type = other DNA
tccccttcccctgcccggtagattttttaggacactgtctttgaagtcatcttctcagctaggttcagtggctcaaacct

SEQ ID NO: 13406 - DNA, 80 bp, synthetic construct
  source 1..80: mol_type = other DNA
ccccgtattctatcccaattacatagactccttgttttatgcctttataacttgagaaactgtctcagatcctttgtatt

SEQ ID NO: 13407 - DNA, 80 bp, synthetic construct
  source 1..80: mol_type = other DNA
gactgaaaagcaacctccttcacccatcttttgtagctactgggataaatactttgggagcagaaacatgaaccactttt

SEQ ID NO: 13408 - DNA, 80 bp, synthetic construct
  source 1..80: mol_type = other DNA
atcattttatgaatttatttttcccagtggaaagcactgactgttgccaaacactcctggattcctatctcagttctgtc

SEQ ID NO: 13409 - DNA, 80 bp, synthetic construct
  source 1..80: mol_type = other DNA
aatacatgtgtccccttgagagctgtgaacttacatttcaccccaaacatctaggaccctatggaatgtgtcttgaacct

SEQ ID NO: 13410 - DNA, 80 bp, synthetic construct
  source 1..80: mol_type = other DNA
aaagcaaaaatgtgtagtagaacaatcagttattttgtttacacgataccacataacgtgggttgatttattttcccacc

SEQ ID NO: 13411 - DNA, 80 bp, synthetic construct
  source 1..80: mol_type = other DNA
agaaagagggagagacacaggccaaaataagcattcagtcaagtactctgtgatcaaacattcactcaccaagtgtattg

SEQ ID NO: 13412 - DNA, 80 bp, synthetic construct
  source 1..80: mol_type = other DNA
cactaggaggctttggtggaagcgtttatccatgccaaagaaatgcttatattgagttcagcaattaacatatctgtgtt

SEQ ID NO: 13413 - DNA, 80 bp, synthetic construct
  source 1..80: mol_type = other DNA
tcttaacgattgctatgattttgccttctcataagtgcccaaatgcaaatggaaagagaaaatattctagatgccactga

SEQ ID NO: 13414 - DNA, 80 bp, synthetic construct
  source 1..80: mol_type = other DNA
acatgttttcagtagcactgcagatagaagacgctcattagctttcctggatagcaaagagtttagggcaagcaatcaac

SEQ ID NO: 13415 - DNA, 80 bp, synthetic construct
  source 1..80: mol_type = other DNA
caggtgtttttttctcttgtcaaacaatgatctggtctccgtgccgtcttcctctgcttgatgtacaagaagttaccaag

SEQ ID NO: 13416 - DNA, 80 bp, synthetic construct
  source 1..80: mol_type = other DNA
gtccatcccctgaaacttagatgtcttactttgtactttgtgcacccaaagacacatcattaacacctccatgtatattg

SEQ ID NO: 13417 - DNA, 80 bp, synthetic construct
  source 1..80: mol_type = other DNA
ttacccagtcttatagctatagttccaatcaagatagagaagagttccatcattccaaaacatttcttcatgccatttgt

SEQ ID NO: 13418 - DNA, 80 bp, synthetic construct
  source 1..80: mol_type = other DNA
tccagcaacttgatagtgatgtggcttggtgtggttttcttcatgttccttcttcttagttttgtcaaacatcttgaatc

SEQ ID NO: 13419 - DNA, 80 bp, synthetic construct
  source 1..80: mol_type = other DNA
ctcagtactttcctcacatgtatgtgcagatcagtattcaacttgacaaaacctctctgtagattctctagagctctttc

SEQ ID NO: 13420 - DNA, 80 bp, synthetic construct
  source 1..80: mol_type = other DNA
gcctagagtgctcttcctcccgtcttccttttgataaatatgtgctcatcattcagacatcaccttgaatatctgttcac

SEQ ID NO: 13421 - DNA, 80 bp, synthetic construct
  source 1..80: mol_type = other DNA
tctgtgaaagattacaaaagagctttggtaacaaagcacaaacaggactgataaggagagttgccctctcaggtcagaac

SEQ ID NO: 13422 - DNA, 80 bp, synthetic construct
  source 1..80: mol_type = other DNA
gtaagatagaaattggtgattttcttagtttgggttgctgttaacaaagtaccctggattgagtggcttataaacaacgg

SEQ ID NO: 13423 - DNA, 80 bp, synthetic construct
  source 1..80: mol_type = other DNA
agtttagttcagtaatgattaatatcatcatgatcatgaccatcatcatccactaggttccaggctctgtgctaaatgcc

SEQ ID NO: 13424 - DNA, 80 bp, synthetic construct
  source 1..80: mol_type = other DNA
ttaagctctaaactgaaaagaagagaaatggacagggacaactattgtgctagagcacaagaagtccttgttcagctgct

SEQ ID NO: 13425 - DNA, 80 bp, synthetic construct
  source 1..80: mol_type = other DNA
ccgtttgtccattctgtcaaaaagggttatccagagttctcttatgttctgttgtggtttctcaagccagtgtaatacta

SEQ ID NO: 13426 - DNA, 80 bp, synthetic construct
  source 1..80: mol_type = other DNA
ttgatattttgaggtttctcccccttcttctttacattgctgaacttctgatgcagtcgtctagaagcctcataagtagg

SEQ ID NO: 13427 - DNA, 80 bp, synthetic construct
  source 1..80: mol_type = other DNA
tgattattgccatcattgtcatcattatttatagagagcttatccgatcccaggaaccatgtttagtactctacctaagt

SEQ ID NO: 13428 - DNA, 80 bp, synthetic construct
  source 1..80: mol_type = other DNA
agagtgattgctaccattcctcctggtcctgaggctgactcacttattttcaatctagaaggttttagcagctcattaac

SEQ ID NO: 13429 - DNA, 80 bp, synthetic construct
  source 1..80: mol_type = other DNA
atagctgctgtgtagagaatagtctgtgtagggacaagaatggaagcagagagattaggcagtataggaaagagactgca

SEQ ID NO: 13430 - DNA, 80 bp, synthetic construct
  source 1..80: mol_type = other DNA
atcacctagggtcttaataagaggcagatttccaaatatcacctcagcctcaatgaatctgagttctggaggtgaaactt

SEQ ID NO: 13431 - DNA, 80 bp, synthetic construct
  source 1..80: mol_type = other DNA
tcccgaggaattaatcctttaactgaggtccaaaggcagagaggaaaagggatggccaaagacattctaaaaagttagag

SEQ ID NO: 13432 - DNA, 80 bp, synthetic construct
  source 1..80: mol_type = other DNA
cagaaggaatgcagctctgccaacaccttgattttagcccaataaaacccattttggacttctcatctgcagatatataa

SEQ ID NO: 13433 - DNA, 80 bp, synthetic construct
  source 1..80: mol_type = other DNA
catggctaaatggttttcaagctgctctttagctcctccaacagccagatggcctaaaacccttctaaccctctcctcag

SEQ ID NO: 13434 - DNA, 80 bp, synthetic construct
  source 1..80: mol_type = other DNA
gtacaaataacacaggactagtctggggaatgggagaggccacatagttaatggcagtgttcaaatccagatcttctcag

SEQ ID NO: 13435 - DNA, 80 bp, synthetic construct
  source 1..80: mol_type = other DNA
cctcaacaccctgccatctggtcttgtcccactattccataacaaagggaccatattttgacccttatattaatagcatt

SEQ ID NO: 13436 - DNA, 80 bp, synthetic construct
  source 1..80: mol_type = other DNA
tgtggtccaactgtgctgatccagttatggttccacaaatataccatactctcacctccaaacttttaaacattctgtgc

SEQ ID NO: 13437 - DNA, 80 bp, synthetic construct
  source 1..80: mol_type = other DNA
agaaggtagggattaattcaaggtactggggatgtatagaagagggaagatttaattctgctggtattgagggggtgtca

SEQ ID NO: 13438 - DNA, 80 bp, synthetic construct
  source 1..80: mol_type = other DNA
ctcattaaactagaccataatctccatgaacccaggatatgagactgtcttgtccactattgcatccacaatgcctattt

SEQ ID NO: 13439 - DNA, 80 bp, synthetic construct
  source 1..80: mol_type = other DNA
atggggtaaaagccctgggattcatattggaaacaaacaaatgaaaaaactgttttggaaagagtcagtaacttgtccaa

SEQ ID NO: 13440 - DNA, 80 bp, synthetic construct
  source 1..80: mol_type = other DNA
cattggtgctgagggaaaggggaaaagtagaaggttaaagcgtggaagttgaatatgaattaaatgaactcttagcattc

SEQ ID NO: 13441 - DNA, 80 bp, synthetic construct
  source 1..80: mol_type = other DNA
gttgatattcacctagtgagtatcatagctctaggggcaggacaagttagaacaagttcttagtttaagcagccagatat

SEQ ID NO: 13442 - DNA, 80 bp, synthetic construct
  source 1..80: mol_type = other DNA
taggagtctcataaaaatactatacaactaaaaatctggaacaggagtttgcaggaagggctaatgagggagcaagtgcc

SEQ ID NO: 13443 - DNA, 80 bp, synthetic construct
  source 1..80: mol_type = other DNA
ccagctgcaatgagctctagaggctgtgggtggcagcgtcctcctcccctgcagttcttgcaaacggcagcagcagcctc

SEQ ID NO: 13444 - DNA, 80 bp, synthetic construct
  source 1..80: mol_type = other DNA
gagaatgcataagggatagaaacaaaaatagagggccgaagcctctgccaggcagaagacactgagttctcagcaaagag

SEQ ID NO: 13445 - DNA, 80 bp, synthetic construct
  source 1..80: mol_type = other DNA
gttcaagcaattctcctgcctcagtctcctaagtagctgggattacaggtgcctgccatcatacccagctaatttttata

SEQ ID NO: 13446 - DNA, 80 bp, synthetic construct
  source 1..80: mol_type = other DNA
taaagggcagctagactccacagaaaccatgttgaagattcctgtgcaggaagggggtgataaaatgcagaaacctgacc

SEQ ID NO: 13447 - DNA, 80 bp, synthetic construct
  source 1..80: mol_type = other DNA
ttgggaggccaagtgtagggaaaagagagatcagactgtcactgtgtctacgtagaaagggaagacataagagactccat

SEQ ID NO: 13448 - DNA, 80 bp, synthetic construct
  source 1..80: mol_type = other DNA
catccaggcatagtaccttcccttgaacttaattatgacatagattcttttgctcacgttttttgctgaccttctcctta

SEQ ID NO: 13449 - DNA, 80 bp, synthetic construct
  source 1..80: mol_type = other DNA
acttgaacagttaggttgtacaagaaaggacttgacagttccctttctgatgtcctccaagacatgggttccatttatat

SEQ ID NO: 13450 - DNA, 80 bp, synthetic construct
  source 1..80: mol_type = other DNA
tggcttttcaatggtatatgggaatgagctgcttggtcagctggataaatgtactgtcagcctcaggactgcctgcattc

SEQ ID NO: 13451 - DNA, 80 bp, synthetic construct
  source 1..80: mol_type = other DNA
acagtgaaacaactatttacgtagtacttatattgtattagatactataagttatctagagatgattagattatttcaag

SEQ ID NO: 13452 - DNA, 80 bp, synthetic construct
  source 1..80: mol_type = other DNA
cacccaatgtctacttaggtgagctgcacattgacctctttagctcgttattccttcttgcatctcagattgttccatct

SEQ ID NO: 13453 - DNA, 80 bp, synthetic construct
  source 1..80: mol_type = other DNA
tttctcttgcaatgttgtttcctggtgcgcccggttatctctgatgatgtgcttgccctcatgctttaaaaagtacctgt

SEQ ID NO: 13454 - DNA, 80 bp, synthetic construct
  source 1..80: mol_type = other DNA
caggcatgtgccaacatgcccggctaatttttgtattattgtagaaacagggtttcatcatgttgctctgctggtctgga

SEQ ID NO: 13455 - DNA, 80 bp, synthetic construct
  source 1..80: mol_type = other DNA
agtgaactgagatcgcgccactgcactcctgcacgccagcctggcgaaagagcaagagtctgtctcaaaaaaaaaaaaaa

SEQ ID NO: 13456 - DNA, 80 bp, synthetic construct
  source 1..80: mol_type = other DNA
actctgtctcaaaaaacaaaaacaaaaacaaacaaaaaacccggtaaattgcggggccgagtgcagtggctcacgcctgt

SEQ ID NO: 13457 - DNA, 80 bp, synthetic construct
  source 1..80: mol_type = other DNA
ttgttccctgccctggaacctaccctgcttagccttaccacaccccatcagcccccagcccaacccgactctcagccttg

SEQ ID NO: 13458 - DNA, 80 bp, synthetic construct
  source 1..80: mol_type = other DNA
tctcctgggagttcctgatgtggccttatttggaaataggaggtctgcagatgtcgctgagttaggacatagaagtcaca

SEQ ID NO: 13459 - DNA, 80 bp, synthetic construct
  source 1..80: mol_type = other DNA
cccactcaggagtgagacccagtggccaataagctctgggacagacgaatgggcgccctcctccttccttctgttgggct

SEQ ID NO: 13460 - DNA, 80 bp, synthetic construct
  source 1..80: mol_type = other DNA
cccggcttcttggtcatcatcttggtgtacacggcctcgttgggctgcacgcggatcaccagctcgttgcgcttgcactg

SEQ ID NO: 13461 - DNA, 80 bp, synthetic construct
  source 1..80: mol_type = other DNA
catggtgatgctatcactgaatcataaaaccgtggggtgcttggctgtgtaggggtccagccctttccagcccggtctga

SEQ ID NO: 13462 - DNA, 80 bp, synthetic construct
  source 1..80: mol_type = other DNA
ggggagcagggggaggaggcatccaagccatggcttcctcattggttttgaaaatgagaagaggacctttgctttactac

SEQ ID NO: 13463 - DNA, 80 bp, synthetic construct
  source 1..80: mol_type = other DNA
gaagtcagtgtccccgtcccacactgggttcagccccatcttagcagctctgcacatccagagggagggaggccaaagca

SEQ ID NO: 13464 - DNA, 80 bp, synthetic construct
  source 1..80: mol_type = other DNA
tgagacgtgacctcaagtgcttacattagcaaaaaagagtggttcaaaaataaggagctaagcattccacttaagaagtg

SEQ ID NO: 13465 - DNA, 80 bp, synthetic construct
  source 1..80: mol_type = other DNA
aatcttcctacagaaacaaccccctggcatagagagtgttgccagtgggttctaccaaaatgcaagcacaagagaattcc

SEQ ID NO: 13466 - DNA, 80 bp, synthetic construct
  source 1..80: mol_type = other DNA
agtgtttcagaaatcacctattcacgctaaaactcttagcagagggggaatgcaagggaacttcactaacttgataaagg

SEQ ID NO: 13467 - DNA, 80 bp, synthetic construct
  source 1..80: mol_type = other DNA
cacttgaattaacatgtgacccggcaaactgtgcattcatacaacggatactactcagcaacactgggaaatctcagcat

SEQ ID NO: 13468 - DNA, 80 bp, synthetic construct
  source 1..80: mol_type = other DNA
cagcctggcaaacatggtgaaaccccgtctctactaaaaatacaggccaggcgcggtggctcatgcctgtaatcctagca

SEQ ID NO: 13469 - DNA, 80 bp, synthetic construct
  source 1..80: mol_type = other DNA
ggaaagaaccacagcctgcaaatacctctaagcctcactcaaagcaggtcatgtttgctcatgaccaaattccggaagac

SEQ ID NO: 13470 - DNA, 80 bp, synthetic construct
  source 1..80: mol_type = other DNA
ttgggggagtgccaacatcatcatgacacagcaagaatcttatcagaccaatggggaagtcagcccagaaatgttctgag

SEQ ID NO: 13471 - DNA, 80 bp, synthetic construct
  source 1..80: mol_type = other DNA
atttctgctttgaaagcctcaggttgtcactctcagaacagaggagagcaaaggggaaccctactgatttcaacaaaaca

SEQ ID NO: 13472 - DNA, 80 bp, synthetic construct
  source 1..80: mol_type = other DNA
tgttattttttttttttttttgagatggagtctcactctgtcacccaggctggaatgcagtgttgcgatttctgctcact

SEQ ID NO: 13473 - DNA, 80 bp, synthetic construct
  source 1..80: mol_type = other DNA
aatgagcagagagattcttgagtgcatccagggttaaaagtgaaaactgagaccacgtgtaatttgagatgaagcccttg

SEQ ID NO: 13474 - DNA, 80 bp, synthetic construct
  source 1..80: mol_type = other DNA
gcactagcaggagcgggaggaggagctcaacttagcagagcctgtggggccctgcaacaattagttggaaaagctgaggc

SEQ ID NO: 13475 - DNA, 80 bp, synthetic construct
  source 1..80: mol_type = other DNA
tcaggggctcaagagaggaggtgcggggtataaagggattggttaagaccctctcgattctgctcggttctcaagcacaa

SEQ ID NO: 13476 - DNA, 80 bp, synthetic construct
  source 1..80: mol_type = other DNA
taccgagcttccgcgggcctgcagagcctggcggactcagacttctctccggagcgggatgcggccctaccgcggcctca

SEQ ID NO: 13477 - DNA, 80 bp, synthetic construct
  source 1..80: mol_type = other DNA
agctgggacagggggttcaaggcactgagagcacctgtgtctctttccctggctcccttgagctgagcaaagtgagggga

SEQ ID NO: 13478 - DNA, 80 bp, synthetic construct
  source 1..80: mol_type = other DNA
aggatggagagggaactttagtaccgggagagaggcagagactctaggagaaagtcccagctgcagggagtcagggcatc

SEQ ID NO: 13479 - DNA, 80 bp, synthetic construct
  source 1..80: mol_type = other DNA
cctcttgcctcctccttgtggaaagaacggctgggttcccccaggcatgcagccggggtgcctggggcaccctccttccc

SEQ ID NO: 13480 - DNA, 80 bp, synthetic construct
  source 1..80: mol_type = other DNA
tgggtaaattatgggaaggaaggaaggaatcaatgtaacattgtattgactgcgtactccgtttgtttcgctcagtcagt

SEQ ID NO: 13481 - DNA, 80 bp, synthetic construct
  source 1..80: mol_type = other DNA
gcgctgacagattggatgcagcagatgaaggagccggaagtgtcagagataactttgagatttccagtgctggagaccag

SEQ ID NO: 13482 - DNA, 80 bp, synthetic construct
  source 1..80: mol_type = other DNA
attgctgcctcgatttccgccctataaacaaaggcatagagtaaactctacttcacggagctcccagttgagtgtgatag

SEQ ID NO: 13483 - DNA, 80 bp, synthetic construct
  source 1..80: mol_type = other DNA
tctacggaatagtgtctctagcaaggctggtgaaaggatggggatttgggaggcagcaaagctatatatattttttttaa

SEQ ID NO: 13484 - DNA, 80 bp, synthetic construct
  source 1..80: mol_type = other DNA
gttacagcagcccaaatgcactatgataataaccttaagtttattatacccattttacagatgaggaagctgagattcag

SEQ ID NO: 13485 - DNA, 80 bp, synthetic construct
  source 1..80: mol_type = other DNA
agcgacataaagcattgaggagaccctctcctgagctgccgagtctgagcactgattagtgctcaggtgagacaggactt

SEQ ID NO: 13486 - DNA, 80 bp, synthetic construct
  source 1..80: mol_type = other DNA
aaacctgagagacaggagggcagttaaaattattgtcccagactctcagaatttcagtaactagccgaaagccacatagt

SEQ ID NO: 13487 - DNA, 80 bp, synthetic construct
  source 1..80: mol_type = other DNA
gcgtagggaatgtgctcagtcaatgcaagtgacttctaaacataccaggaggttttaccttagactgagccaaattgatt

SEQ ID NO: 13488 - DNA, 80 bp, synthetic construct
  source 1..80: mol_type = other DNA
cagagtaggcaactagatggaggaagctcaccagtttatttgtgctaaaatagcatcagccgactctcctttgaaacgta

SEQ ID NO: 13489 - DNA, 80 bp, synthetic construct
  source 1..80: mol_type = other DNA
tttctgcattctttccccaacaaccagaacagcactgggtgctcagtatgcgtttagtgggtgaacggctgctttggtga

SEQ ID NO: 13490 - DNA, 80 bp, synthetic construct
  source 1..80: mol_type = other DNA
gccacagggtaccatggctttgtcaagtcagattgagtctagccgtctcatttcacaagtgagggcattgaggttcagag

SEQ ID NO: 13491 - DNA, 80 bp, synthetic construct
  source 1..80: mol_type = other DNA
agcaataaaatggggacaatgaaaaacctaatctcacagggttggggaagagcaaataagataccacctgtgaaagggct

SEQ ID NO: 13492 - DNA, 80 bp, synthetic construct
  source 1..80: mol_type = other DNA
aagttcgtttttaaagtgcttatcacagtcaggttataaatggctaaagggcggtcacttgacagtgtccaagaggaaac

SEQ ID NO: 13493 - DNA, 80 bp, synthetic construct
  source 1..80: mol_type = other DNA
tttatcctggccctcagcagggacacatgcgttgtgaatagagtgagctcatcaacaaacaagtccttttattttatttt

SEQ ID NO: 13494 - DNA, 80 bp, synthetic construct
  source 1..80: mol_type = other DNA
tgctagcatgagaacaacacgggaaagacctgcctccatgattcaatgacctcccaccagtttcctcccacgacacatgg

SEQ ID NO: 13495 - DNA, 80 bp, synthetic construct
  source 1..80: mol_type = other DNA
aagtacacttgcttttaggtgctttcacatccagcatctcatttaatctctccaacaaaggtgctttcacatccagcatc

SEQ ID NO: 13496 - DNA, 80 bp, synthetic construct
  source 1..80: mol_type = other DNA
tgcactctggtccagtttggtgagtcgttagtctgcacagtaaaatttgtcagaaagcacatttgccaacagaggcagct

SEQ ID NO: 13497 - DNA, 80 bp, synthetic construct
  source 1..80: mol_type = other DNA
aaactcagagcttgttgtgcctggttcatgcatgtttgtttatggaaggagaaatgacattttccttccccacatcctcc

SEQ ID NO: 13498 - DNA, 80 bp, synthetic construct
  source 1..80: mol_type = other DNA
aaattaataatattgtaactgttaattgaatgtccattgattgcctgtcagaggtttgatttaatctgtcctcctccctc

SEQ ID NO: 13499 - DNA, 80 bp, synthetic construct
  source 1..80: mol_type = other DNA
atactgcacactcactaagcattgggcagagttctgagggctttccttgtattatctagcttagtccttataacaaccct

SEQ ID NO: 13500 - DNA, 80 bp, synthetic construct
  source 1..80: mol_type = other DNA
aaacagaaatagcttgaccagatttattttcaaaaataaaaataatcactctggctgtaatgtggaggatggtggccctg

SEQ ID NO: 13501 - DNA, 80 bp, synthetic construct
  source 1..80: mol_type = other DNA
gggtttgctgatttccacggtgtaaataccatggtcaattttaagttgccaacgtgatgtcactaaatgcggagctggga

SEQ ID NO: 13502 - DNA, 80 bp, synthetic construct
  source 1..80: mol_type = other DNA
ggttctacatcccccacctcacaggactgtagcgaggattaaatgagttaaaatgcatgaaacacttactacctgagcac

SEQ ID NO: 13503 - DNA, 80 bp, synthetic construct
  source 1..80: mol_type = other DNA
gattgggggggcctggagagaggtcacatttatctgtttatttattcaggtactcgcttagtcacgtgacagatattaac

SEQ ID NO: 13504 - DNA, 80 bp, synthetic construct
  source 1..80: mol_type = other DNA
cttaggaagcttcaaaatcaaatctaccatccttaatagggatgtctccttctctttattgggcatgaacagaaggcaga

SEQ ID NO: 13505 - DNA, 80 bp, synthetic construct
  source 1..80: mol_type = other DNA
tccgtgagttagaatcaattttcacattagtaatgaaattgcatgtattgcattagccattatcattggcttcctggccg

SEQ ID NO: 13506 - DNA, 80 bp, synthetic construct
  source 1..80: mol_type = other DNA
atccacttcgtaataggtcacaaaaggaaccacttgtgcgaacatgatcttatttgcttttcacaaccacatgatgaaaa

SEQ ID NO: 13507 - DNA, 80 bp, synthetic construct
  source 1..80: mol_type = other DNA
gctgggcctaggtttattgagcatgtatataaatgacaagaaaggtgctcacaaggtgactgccaggtttgcaggaggct

SEQ ID NO: 13508 - DNA, 80 bp, synthetic construct
  source 1..80: mol_type = other DNA
atccatcccctcagagcagagctgattgacccctcctttgagccagcatcacactttgaacagttatattggagcactta

SEQ ID NO: 13509 - DNA, 80 bp, synthetic construct
  source 1..80: mol_type = other DNA
aatccacacatatgtggtcaactaatcttcatcagaggcacaagaatacacagtgaagaaggacagtctcttcaataaat

SEQ ID NO: 13510 - DNA, 80 bp, synthetic construct
  source 1..80: mol_type = other DNA
tatggaaaacagtatggggtgggaggagggataggagcggaaaaaactattgagtactaggcttagtacctgggtgatga

SEQ ID NO: 13511 - DNA, 80 bp, synthetic construct
  source 1..80: mol_type = other DNA
ccatagctaacaatactgtgttctatacttagaatttgcagagaggatggatctgatagtaagcgttcttaccatagaca

SEQ ID NO: 13512 - DNA, 80 bp, synthetic construct
  source 1..80: mol_type = other DNA
aaggctggataaggagggttagaaagaatcaacagagattcttcagtggattcattgaagccatatttgtccttttccac

SEQ ID NO: 13513 - DNA, 80 bp, synthetic construct
  source 1..80: mol_type = other DNA
cttgtgtgaaacaacagtggcaatggattttgaatgaaagggaggagaactgttgattgagtttcacctgccctggaatc

SEQ ID NO: 13514 - DNA, 80 bp, synthetic construct
  source 1..80: mol_type = other DNA
tcaggcccagaactgggcatgaaatggaaatgcaagatgatgattcataattttgctagagaaaccaaatacggctttgc

SEQ ID NO: 13515 - DNA, 80 bp, synthetic construct
  source 1..80: mol_type = other DNA
accagaggagccaagcagggaaggcttcttgtttccagacattcagggattttttttttttgtcctgacataaacacttg

SEQ ID NO: 13516 - DNA, 80 bp, synthetic construct
  source 1..80: mol_type = other DNA
acagccttgctgagggattcagacttcctcttctaagcactgggttttaagagagtgaatggcccgacatgatccttttg

SEQ ID NO: 13517 - DNA, 80 bp, synthetic construct
  source 1..80: mol_type = other DNA
gacaggggacacaatggaatcctcaaggaggacagagcccctagggaccaaggaatcaactgaacggccaggctgctgcc

SEQ ID NO: 13518 - DNA, 80 bp, synthetic construct
  source 1..80: mol_type = other DNA
agggctggagatgtaatctgggagtcatcggtgtttaagaggaaaggaagaggcaatgtaggaggggatacagatattga

SEQ ID NO: 13519 - DNA, 80 bp, synthetic construct
  source 1..80: mol_type = other DNA
caaaaattagctgggcgtggtggtgggcgcctttagtcccaactgctcgggaggctgaggcaggagaatcgattgaacct

SEQ ID NO: 13520 - DNA, 80 bp, synthetic construct
  source 1..80: mol_type = other DNA
ctgtgttggggattgttgggatggagagcagaggaaaaacaatttgagggctttccccaacaccttgttttctgatggat

SEQ ID NO: 13521 - DNA, 80 bp, synthetic construct
  source 1..80: mol_type = other DNA
caaaagggatttaaagtctctgaacttgcaggaacttgacctgggcctggaaaaatgagaaactggttcattttccaaga

SEQ ID NO: 13522 - DNA, 80 bp, synthetic construct
  source 1..80: mol_type = other DNA
tttatgttctaaaaccgctctggatagatgctggtagcaattaactatctttagctgtgaaagcccatgcagcatctcct

SEQ ID NO: 13523 - DNA, 80 bp, synthetic construct
  source 1..80: mol_type = other DNA
ctttttgctggctgtccaaaagcaaaacccagcaagtggcttcctgtttatgcattaggtctgggagctctcattactgg

SEQ ID NO: 13524 - DNA, 80 bp, synthetic construct
  source 1..80: mol_type = other DNA
tttctaatggtttacttacatgttagactgtcggctacttgaaaccagttcttctcatggaaatgcattttcaggaggtg

SEQ ID NO: 13525 - DNA, 80 bp, synthetic construct
  source 1..80: mol_type = other DNA
tttaaaactgtgctccataggttcataattacagtaatccatctcctctccgttccttccttaattgtgactggcagtca

SEQ ID NO: 13526 - DNA, 80 bp, synthetic construct
  source 1..80: mol_type = other DNA
ttgctggtgataacatcaagaagtaatcgggccgggcgcggtggctcacgcctgtaatcccagcactttgggaggccgag

SEQ ID NO: 13527 - DNA, 80 bp, synthetic construct
  source 1..80: mol_type = other DNA
cttactcttttttttgctctggctcattaccagtgaatgttggttttacccagactgctgagatccttgataaggcctca

SEQ ID NO: 13528 - DNA, 80 bp, synthetic construct
  source 1..80: mol_type = other DNA
tactcagggtcattattataaacaccagctactacctgtgcactaatagacacttctggggcaagtaggtgattctgttt

SEQ ID NO: 13529 - DNA, 80 bp, synthetic construct
  source 1..80: mol_type = other DNA
ggcacacacaagagacagtatgatagtaagagtcaaattgaggttctaatttcagctcctccattcattagttgagtggt

SEQ ID NO: 13530 - DNA, 80 bp, synthetic construct
  source 1..80: mol_type = other DNA
caccttcagtcttagctgtttctttttcctgccttctcctccagtcatatatctggatctgactgctgcacgctacacag

SEQ ID NO: 13531 - DNA, 80 bp, synthetic construct
  source 1..80: mol_type = other DNA
gctggggagatttacacaaaagggaacaggttgagatcctctggtggtggtagggcagtgctagtgagaaatgtgtgcag

SEQ ID NO: 13532 - DNA, 80 bp, synthetic construct
  source 1..80: mol_type = other DNA
tatatttttggtccctgggaaggaagtagggtggacagcagccttaactttctggagcaaaatgtgaacttttgagagct

SEQ ID NO: 13533 - DNA, 80 bp, synthetic construct
  source 1..80: mol_type = other DNA
gccgcatgctaatcagggggcgcccgcccccgctttgcccgtggccctcctttcccgattccccgacgtttcgggaggag

SEQ ID NO: 13534 - DNA, 80 bp, synthetic construct
  source 1..80: mol_type = other DNA
tccctgtgttggctaaaggaatataaagcgttttacagatccaatattgtacgaggtacaacagaacacagccgagtgag

SEQ ID NO: 13535 - DNA, 80 bp, synthetic construct
  source 1..80: mol_type = other DNA
gaggccgtttagtgaacagttgtagctctatgagctgtaagggatttccagagatcttctgatctaggcaagatattctt

SEQ ID NO: 13536 - DNA, 80 bp, synthetic construct
  source 1..80: mol_type = other DNA
tgtgccactacgcccagctaattttaattttttggtagaaatgggatctctctgtattgcccaggttggtcttgaactcc

SEQ ID NO: 13537 - DNA, 80 bp, synthetic construct
  source 1..80: mol_type = other DNA
tcacaacctcttaaggggatgcagtcaaatgttgccttataataagacagtttctcctggtatcctgcctgagttgagtt

SEQ ID NO: 13538 - DNA, 80 bp, synthetic construct
  source 1..80: mol_type = other DNA
ccagcatggagaggaaatgagcaaagcccttctgttaaaaaaagaagacaaaaatatgtaatacaaccccaggctccagt

SEQ ID NO: 13539 - DNA, 80 bp, synthetic construct
  source 1..80: mol_type = other DNA
attctagtctcattagttgtgctttttgggattaaggccaggacccatttccatagcaaaggagttacatagaactctcc

SEQ ID NO: 13540 - DNA, 80 bp, synthetic construct
  source 1..80: mol_type = other DNA
cccagccaattttctgtttatggtaatgaggatttagtctcttatactaccatcccatctgacaccttcccctcatatgt

SEQ ID NO: 13541 - DNA, 80 bp, synthetic construct
  source 1..80: mol_type = other DNA
tccttttgcttaggttagtccctcatcttgctggaagattttgattttttaggaaagctgattggtggcaggaccctcct

SEQ ID NO: 13542 - DNA, 80 bp, synthetic construct
  source 1..80: mol_type = other DNA
tgggaagttttccaggtagagtgggagcaaaatggcaattcatgccagaagtcatgcataaataaaatccactgataatt

SEQ ID NO: 13543 - DNA, 80 bp, synthetic construct
  source 1..80: mol_type = other DNA
aacatgatgctaaagatgtttaatcagactcttcacagcttccaagagctgggccatgatgaaaaagaccttggcacgtg

SEQ ID NO: 13544 - DNA, 80 bp, synthetic construct
  source 1..80: mol_type = other DNA
cccaaagagggaatggtggagggatgatcataacaataatagccaaaatagcaaacaagtcacagtaccagaggctgtgg

SEQ ID NO: 13545 - DNA, 80 bp, synthetic construct
  source 1..80: mol_type = other DNA
cgggtcctctcaccatctatcttccaggcctcctccaccccacagaacattttgcaagaaatgcaaagagctttctttcc

SEQ ID NO: 13546 - DNA, 80 bp, synthetic construct
  source 1..80: mol_type = other DNA
tctgattattgaatgtgtcgcctaattgcagctataaaaaggaatagtccatcttccccatgaaagcccattgctggctg

SEQ ID NO: 13547 - DNA, 80 bp, synthetic construct
  source 1..80: mol_type = other DNA
tccaggtggttaatatttgaataatcctgaaggtcatatggcatgtttctttcaaggaaagattctgtcctcaccttggt

SEQ ID NO: 13548 - DNA, 80 bp, synthetic construct
  source 1..80: mol_type = other DNA
ctttcctttcagcagagtgagttggacagttgaaggaagtgagttggtaaaggggtagtggcaattgtgtgtctgtgtgt

SEQ ID NO: 13549 - DNA, 80 bp, synthetic construct
  source 1..80: mol_type = other DNA
acaaggctgcatgatggtggagtggggacagccagccataaacaaggatgattgggaagtgacagcacacgacaaaataa

SEQ ID NO: 13550 - DNA, 80 bp, synthetic construct
  source 1..80: mol_type = other DNA
tattgctggatagtattccattgtgcagaaatgccagtttgtttattcatttacccgttgaaggacgtttggattgtttt

SEQ ID NO: 13551 - DNA, 80 bp, synthetic construct
  source 1..80: mol_type = other DNA
cttaggtgtgggttctatatggtaagtgtatgtttagcttcctaagaagctgccaacctgatctctgtggtggctgtgcc

SEQ ID NO: 13552 - DNA, 80 bp, synthetic construct
  source 1..80: mol_type = other DNA
cttttttttttctgaatagttcatcatgtactgttttatttcagtgagtggaagatttttctttttttcttttttttttg

SEQ ID NO: 13553 - DNA, 80 bp, synthetic construct
  source 1..80: mol_type = other DNA
tttttaatgaggttgtttggtttttgcttgttaatttaagttccttatagattctggatattagacctttgttggataca

SEQ ID NO: 13554 - DNA, 80 bp, synthetic construct
  source 1..80: mol_type = other DNA
tgctctggctaagacttctagaactatgttaataggagtggtgagagtagccatccttgtcttgttctagtactgcaggg

SEQ ID NO: 13555 - DNA, 80 bp, synthetic construct
  source 1..80: mol_type = other DNA
aattttttggaatagattcagtaagactttccgtcttttttaaggttgaataatattccattgtatgtttataccccact

SEQ ID NO: 13556 - DNA, 80 bp, synthetic construct
  source 1..80: mol_type = other DNA
cttcctctagatacgtttttgagataaggattgacaaggtgtgattttggatgtggaacatgaaggagggggaggaacta

SEQ ID NO: 13557 - DNA, 80 bp, synthetic construct
  source 1..80: mol_type = other DNA
taatcagaccctgtcaggaatacagatgtgatgctgtttcttcgctctgtctgaaattgctttgtaataacagtaggagt

SEQ ID NO: 13558 - DNA, 80 bp, synthetic construct
  source 1..80: mol_type = other DNA
attattatcatgatgtctccagaatggagttctaggtaggaatgggcatgttaaggtgcttggaccagtaacttgtgagg

SEQ ID NO: 13559 - DNA, 80 bp, synthetic construct
  source 1..80: mol_type = other DNA
ggtctttccttggctaatttttgagtaggttttcagcagggacttactgcgatccagactggtcaggaaagcctgacagc

SEQ ID NO: 13560 - DNA, 80 bp, synthetic construct
  source 1..80: mol_type = other DNA
tttcttcctaggagaagtcaaaatcctaccttggccaccatctaaatgccaagggcttttctagagagggcttgacagat

SEQ ID NO: 13561 - DNA, 80 bp, synthetic construct
  source 1..80: mol_type = other DNA
tgaattcattctgcctgggcagaacatttcctcccagccacaggctttgtctgaattggaatgaaattgtcttgcagaat

SEQ ID NO: 13562 - DNA, 80 bp, synthetic construct
  source 1..80: mol_type = other DNA
cctcttggtgtcttcccactagccatagcactaataaggttagaatttaatgtaaaagcgtgttgtaagggttaactgta

SEQ ID NO: 13563 - DNA, 80 bp, synthetic construct
  source 1..80: mol_type = other DNA
gattgtacctgtttttctttaatgacgaaccctgagaacaagaacgaagcttgctgtgctagtttcccagttgattctct

SEQ ID NO: 13564 - DNA, 80 bp, synthetic construct
  source 1..80: mol_type = other DNA
aaaaaaaaaaaaaagccgcctgcagttgtacctcttcttctgttccatttctgctcccttttgtagccaaacaactcaga

SEQ ID NO: 13565 - DNA, 80 bp, synthetic construct
  source 1..80: mol_type = other DNA
ccaaatctgtttctacctctttccccatctcagtaaatggcacaattgtccaccagtttacaagaccaaaagaatgggag

SEQ ID NO: 13566 - DNA, 80 bp, synthetic construct
  source 1..80: mol_type = other DNA
ctgtttcctcccatcttccatgtcagcagaagcctgattttgttcagatatagggtacttttcttccatgaaagaggtgg

SEQ ID NO: 13567 - DNA, 80 bp, synthetic construct
  source 1..80: mol_type = other DNA
ttcctgaccttatcctctgctgcttgatgacctctcacagtttctactttagccacatggaatggtggtttctagaatgt

SEQ ID NO: 13568 - DNA, 80 bp, synthetic construct
  source 1..80: mol_type = other DNA
gtatgtctatgcctttatgtctatgtgtctacgttgaagtctatatgtaagtctctatgcctaagcctctgtctctctat

SEQ ID NO: 13569 - DNA, 80 bp, synthetic construct
  source 1..80: mol_type = other DNA
gtctgatttcctaatacagtgcagcattcgaatttttctctaagcatctgaaagcgaaagggaaattgtgactgtggatg

SEQ ID NO: 13570 - DNA, 80 bp, synthetic construct
  source 1..80: mol_type = other DNA
gtggttaactcccaccatatgacaaatctccccaaaacttagtggctcaagacaatgaacttgactattattgatggctc

SEQ ID NO: 13571 - DNA, 80 bp, synthetic construct
  source 1..80: mol_type = other DNA
tcccttttgaattgatccttgttctcacaactagtcattacctttcatgattgttattaatatttccctggaccagctgc

SEQ ID NO: 13572 - DNA, 80 bp, synthetic construct
  source 1..80: mol_type = other DNA
aagagagtaagaggttttatgggagtttttcccccctctgtcttaaaaaaaaagaaaactagagttttcctgcgaattaa

SEQ ID NO: 13573 - DNA, 80 bp, synthetic construct
  source 1..80: mol_type = other DNA
ttcaggaggctgagtgggaggatcacttgagcctggggagatggaagctgtagtgagccggatcgtgccactgcactcta

SEQ ID NO: 13574 - DNA, 80 bp, synthetic construct
  source 1..80: mol_type = other DNA
tgaaggataaagaagctgggtgagcttcttatatagttttctggtacagtgggctaagcggcttctttttaaatggggaa

SEQ ID NO: 13575 - DNA, 80 bp, synthetic construct
  source 1..80: mol_type = other DNA
ctaatttttttatgttttgtagagataaggtctcactatgttgcctaggttggtctcgaactcctggcctcaaacagtct

SEQ ID NO: 13576 - DNA, 80 bp, synthetic construct
  source 1..80: mol_type = other DNA
accccttgatggggcttaactccttggttttcatttggggggaaggtttggcaatatctgaggacatttttgttgccaca

SEQ ID NO: 13577 - DNA, 80 bp, synthetic construct
  source 1..80: mol_type = other DNA
cccaaatctgcctctttgtcagagtcatccagagagctttaataagagaaaacaatgtgtatggccagaccttgcctcag

SEQ ID NO: 13578 - DNA, 80 bp, synthetic construct
  source 1..80: mol_type = other DNA
taaataagacaaatactacttacagcatggggtctttgcgaggatgacatcaagaagcagtgtgacagccatcagcaagt

SEQ ID NO: 13579 - DNA, 80 bp, synthetic construct
  source 1..80: mol_type = other DNA
agggagagttatttacatagcgctgtaaacatttgtggaaggaaagacaaggtctctgccagacatctctagattccgca

SEQ ID NO: 13580 - DNA, 80 bp, synthetic construct
  source 1..80: mol_type = other DNA
accacacgttgggtggaaatgccattcagatagaaagaatttgggggagtggccatttgggggcagaaaggggatgacaa

SEQ ID NO: 13581 - DNA, 80 bp, synthetic construct
  source 1..80: mol_type = other DNA
gaaatctgggaggcggagtgcaaggaatacttgctaagactcaaaatcactaggctaagaggacacatttacaaaggctc

SEQ ID NO: 13582 - DNA, 80 bp, synthetic construct
  source 1..80: mol_type = other DNA
aggcaggtgggggtgaagtcgaagacagttctgggcttgcatctgtttcagacttttttttttttagagctgtttgtttt

SEQ ID NO: 13583 - DNA, 80 bp, synthetic construct
  source 1..80: mol_type = other DNA
tttcctcttctacacttggttttcctgtccctcctttcctcggctctctccactaacctgctgtgtgatcttggacatgt

SEQ ID NO: 13584 - DNA, 80 bp, synthetic construct
  source 1..80: mol_type = other DNA
attcttgctacaggttatgcctagtgagtcacaagcctgggtgcaagcaaaacatgttgattggaaactctctgaccagg

SEQ ID NO: 13585 - DNA, 80 bp, synthetic construct
  source 1..80: mol_type = other DNA
cagtgcgtgtgaacctgctagcttctgatttcttaagatgaatcctgagttcttttgtgcagtgcagggagtgctgtgct

SEQ ID NO: 13586 - DNA, 80 bp, synthetic construct
  source 1..80: mol_type = other DNA
aacccgagtgtgtgtgtgagaaaaaagcatttctaatcagtgaccctcgtattaagcagggttctgtgtgtgagtggtgg

SEQ ID NO: 13587 - DNA, 80 bp, synthetic construct
  source 1..80: mol_type = other DNA
ctgataatccttctggcaaagttgccagccctactatagcctagaaaagaggaatctgtgaactcaaagacatgctgttc

SEQ ID NO: 13588 - DNA, 80 bp, synthetic construct
  source 1..80: mol_type = other DNA
atgccagctaccctacggttctaggagcatttttgcaatttttatttcttggaagacactggcagtgatctgatttatta

SEQ ID NO: 13589 - DNA, 80 bp, synthetic construct
  source 1..80: mol_type = other DNA
tgatttcagtctcactcattgcttatgtgtccccctacttctcttctctgggcctagcgtcctcatctgctaagtgatgg

SEQ ID NO: 13590 - DNA, 80 bp, synthetic construct
  source 1..80: mol_type = other DNA
tacgtcaagaccttgagggagcacacagatttcagatatgggagtgggctgctcagattttacaagataacccttttgtc

SEQ ID NO: 13591 - DNA, 80 bp, synthetic construct
  source 1..80: mol_type = other DNA
cttgtgagatctggtcatttaaaagtgtgtagcacctcccccactcttcctcctgctccggctgtgtgaagtgctcactc

SEQ ID NO: 13592 - DNA, 80 bp, synthetic construct
  source 1..80: mol_type = other DNA
taaatgacttaaagctggaacttatatttaaaagaggagaagagcatgaaactggaaagtttgcagcctggtcgtgtggt

SEQ ID NO: 13593 - DNA, 80 bp, synthetic construct
  source 1..80: mol_type = other DNA
agctcatgtggaattgtaatacccggtgttggagggggatcctggtgggaggtgattggattgtggaggtggatttccct

SEQ ID NO: 13594 - DNA, 80 bp, synthetic construct
  source 1..80: mol_type = other DNA
tccattttgttcttatgaaattctactttgcttcctcaggaactttagtagtttcccagagttctttttctgccccagct

SEQ ID NO: 13595 - DNA, 80 bp, synthetic construct
  source 1..80: mol_type = other DNA
aataataggatagtgtaagcttgtttagtgcaaggaaactcgttgtaacagaaaccccctcccagctcatcaacttgcag

SEQ ID NO: 13596 - DNA, 80 bp, synthetic construct
  source 1..80: mol_type = other DNA
gagacacttatctgggtagtttgacttcaaagccatgcctttaaccactgggcagacttttctcatgtttttgagcaaga

SEQ ID NO: 13597 - DNA, 80 bp, synthetic construct
  source 1..80: mol_type = other DNA
caagtagctggggctacactcagctaattttttatttttatttttttgtagagtatggggtcttgttatgtttgccaggc

SEQ ID NO: 13598 - DNA, 80 bp, synthetic construct
  source 1..80: mol_type = other DNA
taaacatctcatcacactactttaacctctcaccaagggctcttgaggtccccttggggtttggcaggggccaccccaat

SEQ ID NO: 13599 - DNA, 80 bp, synthetic construct
  source 1..80: mol_type = other DNA
gagagacctagagaagatgaaacgcacctggtatgaaaattatagactagcaatcatgcgcctcattttaaataaacatg

SEQ ID NO: 13600 - DNA, 80 bp, synthetic construct
  source 1..80: mol_type = other DNA
ccagtccctcttctattcagaatctacttctgataagggacctgaccaacatttgaagaaatataaaaggccaacttcat

SEQ ID NO: 13601 - DNA, 80 bp, synthetic construct
  source 1..80: mol_type = other DNA
cacatatcaagggctttgtagggcaaacagatgaaaacaattgtcttatgatctaccctaaagaaacatggcttgatgtg

SEQ ID NO: 13602 - DNA, 80 bp, synthetic construct
  source 1..80: mol_type = other DNA
aaagagctgctcccatctggctgcatcctccccttttccagcatgaaatcattcttcaagtcataacatatttcctgagg

SEQ ID NO: 13603 - DNA, 80 bp, synthetic construct
  source 1..80: mol_type = other DNA
gtggggcagagggacttctccagtgagggtgagaaacctcatgctcagttctctgttttttcttataccgtgaaaaataa

SEQ ID NO: 13604 - DNA, 80 bp, synthetic construct
  source 1..80: mol_type = other DNA
caggcttctggccaatccctgtccccaagcagaggaagctagagcgcctccaccaggtgtgaattgaacccaacttccct

SEQ ID NO: 13605 - DNA, 80 bp, synthetic construct
  source 1..80: mol_type = other DNA
tagtctacttcaaaactactttttttgttccttttgtgcaacaccattggatgcggatgttggacagtgtgatgtgttgg

SEQ ID NO: 13606 - DNA, 80 bp, synthetic construct
  source 1..80: mol_type = other DNA
ttttaaagatgactcttgccttgaactcctaattttctcataatttagggctgattattaggattgcctcatgggcttgt

SEQ ID NO: 13607 - DNA, 80 bp, synthetic construct
  source 1..80: mol_type = other DNA
ctacgacatccacctcatagatttataaggctgaattgagataatgagtaaagaacgtagctcagggtggggttctgctt

SEQ ID NO: 13608 - DNA, 80 bp, synthetic construct
  source 1..80: mol_type = other DNA
ttatcattttgggcatatttaaagtacttaaatggccatgtcaggctttcagagccctgtaaatcagagacacagtgagt

SEQ ID NO: 13609 - DNA, 80 bp, synthetic construct
  source 1..80: mol_type = other DNA
cctttctgaacctcatttctaaaatggggctctttagacctgccttccagtgtgtgtgcagattaagcacgataatatat

SEQ ID NO: 13610 - DNA, 80 bp, synthetic construct
  source 1..80: mol_type = other DNA
actcagaaggggacagatgtttgaataattcttggaaacatgctgcaaccacccaaggtgcactgagtcagctatgcaaa

SEQ ID NO: 13611 - DNA, 80 bp, synthetic construct
  source 1..80: mol_type = other DNA
ccccaaggcatccgctatcctgacttccatagataacgttttgcctcttttcaaactctgtgagcgtggacttcttcaat

SEQ ID NO: 13612 - DNA, 80 bp, synthetic construct
  source 1..80: mol_type = other DNA
agagagagagaaccatgaacacatatttttccagacgccaggtgggggtggggagaaagtcagacaggcagggagcgggt

SEQ ID NO: 13613 - DNA, 80 bp, synthetic construct
  source 1..80: mol_type = other DNA
gggcccctttgcctacagaaccatacctctcccaccctgacttatcttgttcctagagtgatggcatctaagccctcagc

SEQ ID NO: 13614 - DNA, 80 bp, synthetic construct
  source 1..80: mol_type = other DNA
cttctaaagcggcacggtgagcaagggcctgcctttttcagggattagaactattttttctgtgccctaatatcatttct

SEQ ID NO: 13615 - DNA, 80 bp, synthetic construct
  source 1..80: mol_type = other DNA
tggatgtcccagactccagacctaaaccctctaaaactcttttcaaattgcagtcagagtgacctttccataagaaattc

SEQ ID NO: 13616 - DNA, 80 bp, synthetic construct
  source 1..80: mol_type = other DNA
cttttaaccataacaaggagggagaactgtttcctgccttctttacatgttgtgcattgttgtggtccagaaatgataaa

SEQ ID NO: 13617 - DNA, 80 bp, synthetic construct
  source 1..80: mol_type = other DNA
gcatttgtaaactgtcatggcgctgatgggagtgtcttttaacatgctaatgcattataataggcatataatgagcagtg

SEQ ID NO: 13618 - DNA, 80 bp, synthetic construct
  source 1..80: mol_type = other DNA
ctcacctcatctgtttgctgtcagaacattgcaaataggaagcttctcatgctgcctctgtctctgaattattataacat

SEQ ID NO: 13619 - DNA, 80 bp, synthetic construct
  source 1..80: mol_type = other DNA
gtttgcaacttggctcatcgctcattagctttgtgatccttggcaaattacttaaccgctctgagtttccggctcttcat

SEQ ID NO: 13620 - DNA, 80 bp, synthetic construct
  source 1..80: mol_type = other DNA
tttgcttccaggcaacgggaatgtggtaccgttgtgaattatatttattgataacttaactatgtgccagctactgtgtg

SEQ ID NO: 13621 - DNA, 80 bp, synthetic construct
  source 1..80: mol_type = other DNA
gcccctggaaagaatgtcttgtgtcatattagttttcctttcacatgcaacggtatgtggaatggatgttgagtgtgtag

SEQ ID NO: 13622 - DNA, 80 bp, synthetic construct
  source 1..80: mol_type = other DNA
tagttgactttgggggtccaactgattgtcgattaaggcatttgagaggcttaatccattggctgtcacaaagtactcaa

SEQ ID NO: 13623 - DNA, 80 bp, synthetic construct
  source 1..80: mol_type = other DNA
tcctacccaacgcatagctgcttggaaattttcttttccagtttgtgggaaaatgtctgtgctctgatgttccagtggaa

SEQ ID NO: 13624 - DNA, 80 bp, synthetic construct
  source 1..80: mol_type = other DNA
cctgtgactatagaccagagggggctgagccttcagcctctggacttctaaaccaggggccggagactagcctgactttg

SEQ ID NO: 13625 - DNA, 80 bp, synthetic construct
  source 1..80: mol_type = other DNA
atgcaaacaatagagaacacttgagaatgaaaagcaagtctacttccttctccgactggagtcctgtatcccctctctgg

SEQ ID NO: 13626 - DNA, 80 bp, synthetic construct
  source 1..80: mol_type = other DNA
tcccaaacacccagagagatgcctagcagaggagagagggttatatttatctggaggtgattaaaatgctgtccttaaaa

SEQ ID NO: 13627 - DNA, 80 bp, synthetic construct
  source 1..80: mol_type = other DNA
tggccgcaaaagcactttactcacctgcaaagtaattctacttccatgatctcattgaatcctattaacaacccagtaag

SEQ ID NO: 13628 - DNA, 80 bp, synthetic construct
  source 1..80: mol_type = other DNA
cattaggggtctgaaatctgtgtgaaatgtagagaggaaacaagacttgtaattcctcattcctcttgctccttattgcc

SEQ ID NO: 13629 - DNA, 80 bp, synthetic construct
  source 1..80: mol_type = other DNA
agcagagaagttcacatccatttttttttttgaggagcctggagcatcaggaagagtaatcaagatcttgttgcccacag

SEQ ID NO: 13630 - DNA, 80 bp, synthetic construct
  source 1..80: mol_type = other DNA
cctgcatgggtagagaaatcgtacctagattgtaaattcctcctcttcagtgacaccaaataccactcacatgtaaatac

SEQ ID NO: 13631 - DNA, 80 bp, synthetic construct
  source 1..80: mol_type = other DNA
ttgcatatggttagacacatacttcaatttgaacccagcactgctgtttttgttgcgtgagcttggataagttactgagc

SEQ ID NO: 13632 - DNA, 80 bp, synthetic construct
  source 1..80: mol_type = other DNA
ccaaactgggaatttatttcatattggccccgtctgtttatttattcattcagccgatattattggagcacctactatgt

SEQ ID NO: 13633 - DNA, 80 bp, synthetic construct
  source 1..80: mol_type = other DNA
ccccaaatgtctttgtgttttttggtgaagaatctgaaagcttcatctttctgctctgtagcagttaagatagaaaagct

SEQ ID NO: 13634 - DNA, 80 bp, synthetic construct
  source 1..80: mol_type = other DNA
tcactcagttcctcaggcctgcacgaactgcgtgtagttctgtcatcaaataaaatttacacagggtaatctgacaccta

SEQ ID NO: 13635 - DNA, 80 bp, synthetic construct
  source 1..80: mol_type = other DNA
ccctaaccatgaaactggacttccaacagcacagagtggtttggtctatttttacactttatatagacagaattattctg

SEQ ID NO: 13636 - DNA, 80 bp, synthetic construct
  source 1..80: mol_type = other DNA
tctgttcaagcctttgcccattttcctattggattgtctgtctaggggttggaggacgaaactttttttttttttttttt

SEQ ID NO: 13637 - DNA, 80 bp, synthetic construct
  source 1..80: mol_type = other DNA
gttatagtacttttacatgtgaggacactgagccgagacacagaggggaccttgtgaaggccacacaactggcaagtgga

SEQ ID NO: 13638 - DNA, 80 bp, synthetic construct
  source 1..80: mol_type = other DNA
actgtgccctccctgagtgtggctggggtgaacatgcaggtggtggtggtggaggcagctgacaggtgaccactccgatc

SEQ ID NO: 13639 - DNA, 80 bp, synthetic construct
  source 1..80: mol_type = other DNA
gcttcgttttaccttgtgggcacagtttttcatgcaaatgcagaggagctgattggaatcagaaatgtggacaggtgacc

SEQ ID NO: 13640 - DNA, 80 bp, synthetic construct
  source 1..80: mol_type = other DNA
gctttttaaaatctcccaatccttatggatggaaagttgctaattacatggactccagaggggatgtggagtagcgcagg

SEQ ID NO: 13641 - DNA, 80 bp, synthetic construct
  source 1..80: mol_type = other DNA
atcaccttcaatagtatgtgaaggttatattctcctacagtttcctccattcctgttcagaaaacatttcagacattagc

SEQ ID NO: 13642 - DNA, 80 bp, synthetic construct
  source 1..80: mol_type = other DNA
atcaaaataataactcccattctttgcctggcactgggctaagtattccccatatctcacccagtttcattggaccaaac

SEQ ID NO: 13643 - DNA, 80 bp, synthetic construct
  source 1..80: mol_type = other DNA
acagtagtgggcttagtaaatgtttgctaaatgaattcactgtggcaagatctgaattttgagctgacccgtcagtttgc

SEQ ID NO: 13644 - DNA, 80 bp, synthetic construct
  source 1..80: mol_type = other DNA
atggtttgtggtgtatagcgtgttcttacacacatgttaattcactttccccggtgacctgcaaggcaggttgaagtgag

SEQ ID NO: 13645 - DNA, 80 bp, synthetic construct
  source 1..80: mol_type = other DNA
cccatttggctccaatcctttggataagccaggtaggacataagaaccctgctaattcttttgttctgttgatgtagacc

SEQ ID NO: 13646 - DNA, 80 bp, synthetic construct
  source 1..80: mol_type = other DNA
ggtaggtaggtaggtaagcagacagacagagaaagaggtaggcagacagagagataggtaggcagatgaaagaaataaga

SEQ ID NO: 13647 - DNA, 80 bp, synthetic construct
  source 1..80: mol_type = other DNA
tcacccttcctcatttctccaccaaatcttgtctcttctcttcttttaaaccctgctttaaattcaccttgttctgggag

SEQ ID NO: 13648 - DNA, 80 bp, synthetic construct
  source 1..80: mol_type = other DNA
catgcctgcttctcctactgtctactcatttcataaatggtaatgccattctatctctgtggacataggctccaaacctt

SEQ ID NO: 13649 - DNA, 80 bp, synthetic construct
  source 1..80: mol_type = other DNA
tgacactttctgtccttctctgcttcctttttcttttttttatttttatttttattatactttaagttctgggatacatg

SEQ ID NO: 13650 - DNA, 80 bp, synthetic construct
  source 1..80: mol_type = other DNA
catttattaaatacagaatcctttcctcgttgcttgtttttgccaggtttgtcaaaggtgagatggttgtagacgtatgt

SEQ ID NO: 13651 - DNA, 80 bp, synthetic construct
  source 1..80: mol_type = other DNA
ctgagatgacaggcttttctaaatatataatcatgtcatctgcaaacagagataatttgatttcctctcttcctatttga

SEQ ID NO: 13652 - DNA, 80 bp, synthetic construct
  source 1..80: mol_type = other DNA
gtcctgaggcaaatcttgttcctatttggaggaagcccaagccagcagtttaatgactcagcatcaacctgagttttgac

SEQ ID NO: 13653 - DNA, 80 bp, synthetic construct
  source 1..80: mol_type = other DNA
gtgacacaggtgggggagggaatgccagttatctagcaacagttataaatttcccttagcggcagggatctaacaacatg

SEQ ID NO: 13654 - DNA, 80 bp, synthetic construct
  source 1..80: mol_type = other DNA
tgtgcctgaatcccacttactagctaagtgcttgtaggcaaattactcatccattctcacactcaattttccatctttgg

SEQ ID NO: 13655 - DNA, 80 bp, synthetic construct
  source 1..80: mol_type = other DNA
acatggcagagaagatcaaaaggggaggcagatatgtgcaaagagggaaaaacctgacgggtgtcttgactttctaacaa

SEQ ID NO: 13656 - DNA, 80 bp, synthetic construct
  source 1..80: mol_type = other DNA
ccttccagaagggcacagatctatgtgtgctttaagaagcaatgtgatgtaggagagtactgctatgtgtgaagaatgag

SEQ ID NO: 13657 - DNA, 80 bp, synthetic construct
  source 1..80: mol_type = other DNA
ttgagagagaggaactaacttaaaatggaaccacagggttagtgctaaaggcaccgttaggttaaaattgagagctgagg

SEQ ID NO: 13658 - DNA, 80 bp, synthetic construct
  source 1..80: mol_type = other DNA
cctaaagggagagaagagtttgagataagagttgggacttctggagctagaaatatctagctttataataacagcagcat

SEQ ID NO: 13659 - DNA, 80 bp, synthetic construct
  source 1..80: mol_type = other DNA
ctcttcttctcaccttgcctgcccagcagaattttattcaccattcaaggccttgcttatatatgacctcctcctctgaa

SEQ ID NO: 13660 - DNA, 80 bp, synthetic construct
  source 1..80: mol_type = other DNA
ttttcagttacggcaaaatatatcatgggcagccactgacctttagaaggaggactgtgtgtgcttggcccagcatcaca

SEQ ID NO: 13661 - DNA, 80 bp, synthetic construct
  source 1..80: mol_type = other DNA
agcataatgcctgctctttcagcagctgttaattagttgcagatgatgagataattcataaaaattagcaatgatttcct

SEQ ID NO: 13662 - DNA, 80 bp, synthetic construct
  source 1..80: mol_type = other DNA
acttttccacctctgtcactacacttagaaggcttttgttccaagtgtctgcctggtgaatgcttactcgttctctaaaa

SEQ ID NO: 13663 - DNA, 80 bp, synthetic construct
  source 1..80: mol_type = other DNA
caggactaaagtatagaccagacttaaccagccaagacattgtaactggaagtaaagagtggaaagctgtgaagtttgtg

SEQ ID NO: 13664 - DNA, 80 bp, synthetic construct
  source 1..80: mol_type = other DNA
gcagactctaaatatatggtaaagagcctaggtgcaggagaattcaccctttctttaccagagtagtcaaggaaagcttt

SEQ ID NO: 13665 - DNA, 80 bp, synthetic construct
  source 1..80: mol_type = other DNA
gggactaggatgggacttggaagttaatatttttaataggtacccccagatgatgccatcagacaagtgttcaaagctct

SEQ ID NO: 13666 - DNA, 80 bp, synthetic construct
  source 1..80: mol_type = other DNA
taagcacacggtatctttcctaaaaactgaaagttccttttaggccaggctcatggccttacaatagttgtattccccag

SEQ ID NO: 13667 - DNA, 80 bp, synthetic construct
  source 1..80: mol_type = other DNA
ttgggtcttttcactcttgggttctagtgctttttccactttaccatactgctttaatgaacctccagcgctttaagatg

SEQ ID NO: 13668 - DNA, 80 bp, synthetic construct
  source 1..80: mol_type = other DNA
cagtaactgtatcctctcccatccttcttgctccagcaggtcaatggtgccttgaaacagatgattgttatatttcttct

SEQ ID NO: 13669 - DNA, 80 bp, synthetic construct
  source 1..80: mol_type = other DNA
ttagggtttctcttatttatgaaataccaactccttagtgtgcagtatcccttccatgatccagccatacccaccctcct

SEQ ID NO: 13670 - DNA, 80 bp, synthetic construct
  source 1..80: mol_type = other DNA
tgagaaggactgtaaaagtgatttatggttgggtaggagatctgtgcaaacaggttaggaaaatgctcagagtcagcttc

SEQ ID NO: 13671 - DNA, 80 bp, synthetic construct
  source 1..80: mol_type = other DNA
ttgcatgtttctcattttatctcggcatctactgttttcaattcacctaccctaaacttcgccttttctgggaatggtct

SEQ ID NO: 13672 - DNA, 80 bp, synthetic construct
  source 1..80: mol_type = other DNA
agtcctttgctgcgcctgattaggtcttcggtgagcaataccctcctatgatgtgcatgtggttggattgcactgaacac

SEQ ID NO: 13673 - DNA, 80 bp, synthetic construct
  source 1..80: mol_type = other DNA
atttttagtagagatgggttttcaccatgttggccaggctggtcttgaactctggatctcaggtcatccacccaccttgg

SEQ ID NO: 13674 - DNA, 80 bp, synthetic construct
  source 1..80: mol_type = other DNA
tctgagacaagggcgtcaccttttctgtcttaagacagaaaattgtcttagcaccattttctgtcagcccaattgccttt

SEQ ID NO: 13675 - DNA, 80 bp, synthetic construct
  source 1..80: mol_type = other DNA
cttcatcacaggaacctgattatttccttttccccttcagagcatttaggaaggtattaaaaaaagaatcccgagcctca

SEQ ID NO: 13676 - DNA, 80 bp, synthetic construct
  source 1..80: mol_type = other DNA
tgaggctgaggtcctgttttgagctgcagcaacagtaggctgacacccctatgaccaaggtgagatgcagtgtcattagc

SEQ ID NO: 13677 - DNA, 80 bp, synthetic construct
  source 1..80: mol_type = other DNA
agcccagaacaggtccagccccttcattttccagaagataaactgcgctatgggcaaagatatgactgttgtggggcagc

SEQ ID NO: 13678 - DNA, 80 bp, synthetic construct
  source 1..80: mol_type = other DNA
atttgtattcctttagcacagtggatggccagaggaaaggtagcttctgaggctccaaatgagctagcaatgggctgcag

SEQ ID NO: 13679 - DNA, 80 bp, synthetic construct
  source 1..80: mol_type = other DNA
tgcagtatctttaagttctttacacagggcacacttttcccctcccactaccatctcttagtaatgttcacaataccctt

SEQ ID NO: 13680 - DNA, 80 bp, synthetic construct
  source 1..80: mol_type = other DNA
acatgtaagtaaagacttcaaggaaatgagagaagagctgcacacatgtttggggaagaagatattggagagagggaaca

SEQ ID NO: 13681 - DNA, 80 bp, synthetic construct
  source 1..80: mol_type = other DNA
tacagatgtgagccatcgcagccggccatattactgcatttttactgtaccttttctatattttggtgtgtttatataca

SEQ ID NO: 13682 - DNA, 80 bp, synthetic construct
  source 1..80: mol_type = other DNA
gggtgagtagtatgccattgtgtacacataccacatcctctttatccactcatccgttgatagacacttaggttgtttct

SEQ ID NO: 13683 - DNA, 80 bp, synthetic construct
  source 1..80: mol_type = other DNA
ttaccttggtacttacgagggtagagttggcatttgctgcagtagggaaggaggttgggctggtttaggggtaagaggtg

SEQ ID NO: 13684 - DNA, 80 bp, synthetic construct
  source 1..80: mol_type = other DNA
tccttttaggggagtatttgtagtgctttgcccaatttaagatgaagaaaatgaggtgcaaaaaagcaacatagctgcct

SEQ ID NO: 13685 - DNA, 80 bp, synthetic construct
  source 1..80: mol_type = other DNA
tatgtcctgtttcctatacatggtaggtacaggatggggtggtataaagagcactcgtcttgatcatctttggtagcact

SEQ ID NO: 13686 - DNA, 80 bp, synthetic construct
  source 1..80: mol_type = other DNA
tagactgttctttccctagtgaatagtcttagcactcttgccaaagattaattggccatagatgtttcagttttttctgg

SEQ ID NO: 13687 - DNA, 80 bp, synthetic construct
  source 1..80: mol_type = other DNA
gcaaatttgcagaatttgtttattagctctagtagtgttcgtggattctctgggattttctggaggccccagcatctcag

SEQ ID NO: 13688 - DNA, 80 bp, synthetic construct
  source 1..80: mol_type = other DNA
tcacctaagacatataggtagtctgctgcatgcagtatcaaagcaatatgtgaggttgagagaagggagcgtatgaccaa

SEQ ID NO: 13689 - DNA, 80 bp, synthetic construct
  source 1..80: mol_type = other DNA
taaaatcaattctgaactctgtcccccagcagatcctgcacatttgtgtgtctacacatggatctataaatccatgtggc

SEQ ID NO: 13690 - DNA, 80 bp, synthetic construct
  source 1..80: mol_type = other DNA
tgtgagagaccatttgtgagaaaaatacatcccctcccacctctagctcagctccacagaggtccctaatgaataatcct

SEQ ID NO: 13691 - DNA, 80 bp, synthetic construct
  source 1..80: mol_type = other DNA
aaaggtcagtttgataggagtactggagaattggtgccatctggttttgcaatgtgggattttaataataaccctagttt

SEQ ID NO: 13692 - DNA, 80 bp, synthetic construct
  source 1..80: mol_type = other DNA
catttttacaatagaacaattctataatttgccagatgagaaagctgagatgagctgggccgagtcaccgggaggttagg

SEQ ID NO: 13693 - DNA, 80 bp, synthetic construct
  source 1..80: mol_type = other DNA
gttccttttaagggcaacagtgggtgagagtagaatgagcatttcaagagcagagcaaaggcattaaaccttgggtctta

SEQ ID NO: 13694 - DNA, 80 bp, synthetic construct
  source 1..80: mol_type = other DNA
gtaaccattttcagctcctttaggcaaatctccctcaaacttagtcattttttgccttccagaggcagtgtcaacagagg

SEQ ID NO: 13695 - DNA, 80 bp, synthetic construct
  source 1..80: mol_type = other DNA
gttgcacttttttataagcagcagtttgccacagctggctcatgtcaagcgtgtggttctaaaaacaaatgaaaaaacaa

SEQ ID NO: 13696 - DNA, 80 bp, synthetic construct
  source 1..80: mol_type = other DNA
ggggttttggagaaaggaaagtgctagtgcgtgtgattattgcaagccagagtaaagatgaggggctttcagaaggaaag

SEQ ID NO: 13697 - DNA, 80 bp, synthetic construct
  source 1..80: mol_type = other DNA
gagagttacaggcaaggagggacatgatcagatttctattttggagagactcctttagctgcagagtggcaaatgcatgg

SEQ ID NO: 13698 - DNA, 80 bp, synthetic construct
  source 1..80: mol_type = other DNA
aatttaatttaaatgaattaaacatattcttcctgagccccttcttggtggaaagcacagtggattccaggtgggggaag

SEQ ID NO: 13699 - DNA, 80 bp, synthetic construct
  source 1..80: mol_type = other DNA
tccaggagagacagccttttccagctgccaccgctctgctcatcagagtgctaaggatggatccacaggagagggtggtt

SEQ ID NO: 13700 - DNA, 80 bp, synthetic construct
  source 1..80: mol_type = other DNA
ttgaaaagattccgaaaagaattaagtcagtgccatggttttccccttaagtgtctgtctagacacaacacctgattcca

SEQ ID NO: 13701 - DNA, 80 bp, synthetic construct
  source 1..80: mol_type = other DNA
ccctgtttttaagaacaagagttattaaccataggaatggtttgctaagaaagaaggtggccctcccctttctagaataa

SEQ ID NO: 13702 - DNA, 80 bp, synthetic construct
  source 1..80: mol_type = other DNA
taggtatttgctaaggcacttctaccgcagagcatttttctctccacattagctgctgctgttatccatttgacagagaa

SEQ ID NO: 13703 - DNA, 80 bp, synthetic construct
  source 1..80: mol_type = other DNA
tagggaggaatagggagggaggtagatttaagagtttagctatattttaagaagttaagggtgcaacatggcttggaggg

SEQ ID NO: 13704 - DNA, 80 bp, synthetic construct
  source 1..80: mol_type = other DNA
caataaaggaaatagttgggctataggctctggattggttggtttgttctcagaaaatgcccttgtgtacctatctctag

SEQ ID NO: 13705 - DNA, 80 bp, synthetic construct
  source 1..80: mol_type = other DNA
tggaatttctttctctaggcaacaccagcaggccccctggctacacgttgctcttccttcatttgcatgtataccaagtg

SEQ ID NO: 13706 - DNA, 80 bp, synthetic construct
  source 1..80: mol_type = other DNA
tgatttgcccacatgaagtcccatgtaaagtttctcacataccatgtttgcctctaaaacagggccagttagtgtgcctg

SEQ ID NO: 13707 - DNA, 80 bp, synthetic construct
  source 1..80: mol_type = other DNA
acccagcctgttcgtttttaatactggatagtattccactgttcaaatggactacaatgtatctatccattcaccagtta

SEQ ID NO: 13708 - DNA, 80 bp, synthetic construct
  source 1..80: mol_type = other DNA
ttaggttggtggctggtaattttaggaaaatgttcatgttccagaacttgctatggcccagggcttagttctgttaccaa

SEQ ID NO: 13709 - DNA, 80 bp, synthetic construct
  source 1..80: mol_type = other DNA
tatgtagggtcttgtaagccatagtggaggttggaatgttattgtttgcagtagaaagcctttgggatctgttaaacatg

SEQ ID NO: 13710 - DNA, 80 bp, synthetic construct
  source 1..80: mol_type = other DNA
ttggggaggggaacagaaccaggaaatctcagaaaggaagccaccagaaatttttttaaacgctatataaaacaacagaa

SEQ ID NO: 13711 - DNA, 80 bp, synthetic construct
  source 1..80: mol_type = other DNA
ggtttgagagaaaaatgacaaatattgaagataggcaatgaagatccaatatgtgaacaataggcatccctgtgaagcaa

SEQ ID NO: 13712 - DNA, 80 bp, synthetic construct
  source 1..80: mol_type = other DNA
ctattctattgcaccaattaactatccccactttctccccacttccccactacccttcctagcctctggtaaccatcctt

SEQ ID NO: 13713 - DNA, 80 bp, synthetic construct
  source 1..80: mol_type = other DNA
ttcactaggtggggcacggtgtctcatgcctgtaatcctagcacttctggaggctgaggtgggtgtaccacttgagctca

SEQ ID NO: 13714 - DNA, 80 bp, synthetic construct
  source 1..80: mol_type = other DNA
attttgaatgaaattactttttgatttctttttcaggttgttcagtgctggcatatagaaatactactgattttatatgt

SEQ ID NO: 13715 - DNA, 80 bp, synthetic construct
  source 1..80: mol_type = other DNA
attctttgtttcagttccatttatatgtgctctgatctttatttctattaattttgggttcagtttgctcttggttttct

SEQ ID NO: 13716 - DNA, 80 bp, synthetic construct
  source 1..80: mol_type = other DNA
ctaataatatttgctttatatagctgggtgctcaagtgttgggtgcatatgtatttacaattgttatatccttttgttga

SEQ ID NO: 13717 - DNA, 80 bp, synthetic construct
  source 1..80: mol_type = other DNA
ttttattggttcattgtttagtctttctccctttttttttttttttttttgagatggagtcttgctctgtcacccaggct

SEQ ID NO: 13718 - DNA, 80 bp, synthetic construct
  source 1..80: mol_type = other DNA
caataactcaggtttgcccttttgaagctactttctagatcttgtaggcatgtttcattcttttttctcctctgtctgtg

SEQ ID NO: 13719 - DNA, 80 bp, synthetic construct
  source 1..80: mol_type = other DNA
atggggagttctgccagaccactgctaatgttcccttaaggcgcaaggacatctcagtcagcttgtggtgaatactgcca

SEQ ID NO: 13720 - DNA, 80 bp, synthetic construct
  source 1..80: mol_type = other DNA
ctaagcccagcacagcatcagaactagcctaagacattttacactgttttggtaatcataatttactggtagtggtatta

SEQ ID NO: 13721 - DNA, 80 bp, synthetic construct
  source 1..80: mol_type = other DNA
agcaccaatagctgctaatactaaaaacagagcaaaaagcaggcattgtgtgttcctaatgaagtgcatagctttggcta

SEQ ID NO: 13722 - DNA, 80 bp, synthetic construct
  source 1..80: mol_type = other DNA
caagatggagtaaatgccttaactgctcaatgctgcttgcagactagagtgagcatagattacccatggactttggtgca

SEQ ID NO: 13723 - DNA, 80 bp, synthetic construct
  source 1..80: mol_type = other DNA
agagccaaaaagttgaagcagagaagtttcacagcagggctggatactctcttcagagcagcctggcaatataaaaagag

SEQ ID NO: 13724 - DNA, 80 bp, synthetic construct
  source 1..80: mol_type = other DNA
tttaatcagatgtttggcatcacataggtgtagattgactctccttcccttctgagcctactctccacttcaagaatttt

SEQ ID NO: 13725 - DNA, 80 bp, synthetic construct
  source 1..80: mol_type = other DNA
tctgcataatgctttattatgggccctctcctgggtcattctcaccttaccatagagacgaggcatgtttatttggtttt

SEQ ID NO: 13726 - DNA, 80 bp, synthetic construct
  source 1..80: mol_type = other DNA
ctgcagcaatatggggacacagaggaacaaatatgatctgggaatttggagactgggctcacatctcaggaattaaggaa

SEQ ID NO: 13727 - DNA, 80 bp, synthetic construct
  source 1..80: mol_type = other DNA
catatacaccatggaatactgtgcagccataaaaagaatgagattggctgggcatggtggctcacacctataatcccagc

SEQ ID NO: 13728 - DNA, 80 bp, synthetic construct
  source 1..80: mol_type = other DNA
cattactgcctggggtattgttgcaaagatggtgtgttgaaggatttggcacaaagttcagcacatacaaagtctcatag

SEQ ID NO: 13729 - DNA, 80 bp, synthetic construct
  source 1..80: mol_type = other DNA
agaagaggtggcatttgtataaaaagactcacgaggagatttatgtggaagttagtgctggaaaaagcaacagttctatg

SEQ ID NO: 13730 - DNA, 80 bp, synthetic construct
  source 1..80: mol_type = other DNA
ttggtgattttgcttatttaggggccaggatgaagactgagaaagagatagagcttgttttggactgtagaacatttagc

SEQ ID NO: 13731 - DNA, 80 bp, synthetic construct
  source 1..80: mol_type = other DNA
ctgcttacccaaaagggggaattaaggctccatttctattcagccacaatccattcccagaaatcaagaaatattcatga

SEQ ID NO: 13732 - DNA, 80 bp, synthetic construct
  source 1..80: mol_type = other DNA
gtgatggaaaaagtccaaaaccccataaacggattaccctagatgtaaagtcaggagtgttaaggtagtttgaggctgat

SEQ ID NO: 13733 - DNA, 80 bp, synthetic construct
  source 1..80: mol_type = other DNA
ccacctcccatctccttccaccccctgccaagcacttttaatttgcttggaataattgattctgtcttcttcttgcacct

SEQ ID NO: 13734 - DNA, 80 bp, synthetic construct
  source 1..80: mol_type = other DNA
gtctcctcaaaaatagtggtgctacagccacaaagccaagtcaaatgaattagaagtgggaacccattaactttttgatc

SEQ ID NO: 13735 - DNA, 80 bp, synthetic construct
  source 1..80: mol_type = other DNA
gaaggactgatgggctcagcggtgggcggggggaagtttcagaatcattttaaaatttacttttatgctattaatttttt

SEQ ID NO: 13736 - DNA, 80 bp, synthetic construct
  source 1..80: mol_type = other DNA
ctcatcacagatgaggaagtgaaactcggataaattaaattcagatcacacagtgggttagtggttgtgtcaggatttga

SEQ ID NO: 13737 - DNA, 80 bp, synthetic construct
  source 1..80: mol_type = other DNA
caggtttctgggcccaggttctggaggaagcagacaagtcagacacacagtcggacagccacctggatgcaataaaagca

SEQ ID NO: 13738 - DNA, 80 bp, synthetic construct
  source 1..80: mol_type = other DNA
cacctgttgtcactgtttgcacagctgaggcatgaagcatagcagtgattagtgacccacagtgggtttctaagcctgtt

SEQ ID NO: 13739 - DNA, 80 bp, synthetic construct
  source 1..80: mol_type = other DNA
tcaaacaggtcaggagagactagaacctaattctacctttgtcactcattggctgagcggcctcagacaagcaatttaag

SEQ ID NO: 13740 - DNA, 80 bp, synthetic construct
  source 1..80: mol_type = other DNA
ctggcccttggacatttcatttaaatggaatcagacaatgtgtggccttttgtgtctggcattcttcacatggcataatg

SEQ ID NO: 13741 - DNA, 80 bp, synthetic construct
  source 1..80: mol_type = other DNA
taatggcagagccaggtgctcagggagccctggggaaggaagagctaactgtttaaaaagcatttactcggtggctcaca

SEQ ID NO: 13742 - DNA, 80 bp, synthetic construct
  source 1..80: mol_type = other DNA
cctacagggaaggaaactgggctgccttaaaagcctagtatcctaaagaaaacccctctcttgtttgtggttgttcttta

SEQ ID NO: 13743 - DNA, 80 bp, synthetic construct
  source 1..80: mol_type = other DNA
actccctgaaagcagcctctagggagataaaaatgtcaagggccactgggcagcataagtgaggttgtgtctgctgggcc

SEQ ID NO: 13744 - DNA, 80 bp, synthetic construct
  source 1..80: mol_type = other DNA
ggcttcttcatgctctgcctctacgtttgtcttttcccaaaggccctaagccagtaggtttcataaacttttttttcttt

SEQ ID NO: 13745 - DNA, 80 bp, synthetic construct
  source 1..80: mol_type = other DNA
aacacataataatagataagtgatgtgtgttacaaaagagagagtcaagggtactgtggacagggatggtgcatagcaca

SEQ ID NO: 13746 - DNA, 80 bp, synthetic construct
  source 1..80: mol_type = other DNA
acgttaggtctctaaacgtgttcatcctacatacctgccattttgtattcttagacttatgtctccctattgtttcttct

SEQ ID NO: 13747 - DNA, 80 bp, synthetic construct
  source 1..80: mol_type = other DNA
cttaagtatcaaaaggatggtcttgtaaaatgtatttggacgtattccctctagctgtattttttggaagagtttaagaa

SEQ ID NO: 13748 - DNA, 80 bp, synthetic construct
  source 1..80: mol_type = other DNA
catgggtgcaatagggaagcaaaggaattgaatgatcctcctatatagtcaaggcatggcatacaaaacatacacacaaa

SEQ ID NO: 13749 - DNA, 80 bp, synthetic construct
  source 1..80: mol_type = other DNA
attcgtatcctataaagcaagtcccagataattgccttgctctttctaccatgtgattatacagctggatgtgctaccta

SEQ ID NO: 13750 - DNA, 80 bp, synthetic construct
  source 1..80: mol_type = other DNA
tcagtggaatccaggacctattatacaagacaatggaagaatgacccataagacatttcagggatcatcagcacttatct

SEQ ID NO: 13751 - DNA, 80 bp, synthetic construct
  source 1..80: mol_type = other DNA
gagaaatgagaacattttatattgtggggagaaggagagaagggaagatgaagttttgggagagagggcatgggaagaaa

SEQ ID NO: 13752 - DNA, 80 bp, synthetic construct
  source 1..80: mol_type = other DNA
ctgctggtccaagaattaccaagttaaaacatttgtatagaaagtggtcacaggctggtaatgctcctgaagtttctgac

SEQ ID NO: 13753 - DNA, 80 bp, synthetic construct
  source 1..80: mol_type = other DNA
atataaaaaataccttcatctagactggtgtttggccaaacattcaggcactgtagcctaacccaggtccttatagtctg

SEQ ID NO: 13754 - DNA, 80 bp, synthetic construct
  source 1..80: mol_type = other DNA
tactatttggaaatgcttactacgtgtatggaacaaagaaaaagagaatttacagtgtactgattaggatggggcagcga

SEQ ID NO: 13755 - DNA, 80 bp, synthetic construct
  source 1..80: mol_type = other DNA
tctgttattgttgtgcagacgtggctgcaatgtcctctgattagttcatgaattaagtggagggaagcagtaaaactgac

SEQ ID NO: 13756 - DNA, 80 bp, synthetic construct
  source 1..80: mol_type = other DNA
agtcttccctcccattctaaaaacaccgacgcgggtttcttcaaagtttatctttgagataaagtccaggtccctttcaa

SEQ ID NO: 13757 - DNA, 80 bp, synthetic construct
  source 1..80: mol_type = other DNA
tctaacaaacttccagaggcactaggacgctgactgggggagaaacacgagagaagataaatttgttttgtggattaaag

SEQ ID NO: 13758 - DNA, 80 bp, synthetic construct
  source 1..80: mol_type = other DNA
cctcagttgtgggttcattccttcatgattgaggggcaggactgcgagaaagatgtgattgactggacatgatttcctgt

SEQ ID NO: 13759 - DNA, 80 bp, synthetic construct
  source 1..80: mol_type = other DNA
actctaatctcctagattatcatgagatacaaatgagacacatgtgtgaatgtgctttgtaaactctttgggcattttaa

SEQ ID NO: 13760 - DNA, 80 bp, synthetic construct
  source 1..80: mol_type = other DNA
gccactgcacctggccacattatccgtttttatagtggctgtaccattttacattcccaccagcaaagcacaagggttcc

SEQ ID NO: 13761 - DNA, 80 bp, synthetic construct
  source 1..80: mol_type = other DNA
ctttctctttgtagtacttttttgctgcctgaaattatcctgcatttatttccttacatgtgtgctgtctgcctcctcag

SEQ ID NO: 13762 - DNA, 80 bp, synthetic construct
  source 1..80: mol_type = other DNA
tgcttactaccttcacattggggacccctgaaatttgaaaagagacacattcaaaccgtcgccctagcgatgctgctgaa

SEQ ID NO: 13763 - DNA, 80 bp, synthetic construct
  source 1..80: mol_type = other DNA
tggtaagtgatatttctttcccctcgtccctctatgcattttgaatattctgacaacagtcaactaagcatctctttcag

SEQ ID NO: 13764 - DNA, 80 bp, synthetic construct
  source 1..80: mol_type = other DNA
aagaccctcagtggtcctatggcttagggtcaccctgtctagaatcagggatgtaacatgatggagattgacagatgggt

SEQ ID NO: 13765 - DNA, 80 bp, synthetic construct
  source 1..80: mol_type = other DNA
ctaattgtgggagtgtgaaagatgaagggatagaccaaaaggtgaaccttgtgaaagtccgagagttagctcatatcagg

SEQ ID NO: 13766 - DNA, 80 bp, synthetic construct
  source 1..80: mol_type = other DNA
cttccttatctttgtcagtcttgctagtggaagatgaagatgagacctttcctcttttccgagaaaatagatgccatcca

SEQ ID NO: 13767 - DNA, 80 bp, synthetic construct
  source 1..80: mol_type = other DNA
ttgaaattaattttttaatttcacctatttcttttgatgttattttattttattttattttattttatttattttatttt

SEQ ID NO: 13768 - DNA, 80 bp, synthetic construct
  source 1..80: mol_type = other DNA
agtgtggtctgagctaggtggccatgcgtctgtgtcaaacatagggtgtcatatgagtaaaaggaaaaaaaggagaaggc

SEQ ID NO: 13769 - DNA, 80 bp, synthetic construct
  source 1..80: mol_type = other DNA
ccctcactacctgtctcatttctctttcctggactattaaaataaccctcaagctgatcttcccaactcgtatttctgtt

SEQ ID NO: 13770 - DNA, 80 bp, synthetic construct
  source 1..80: mol_type = other DNA
tgggaatggggtatgagaatgagggttattaggtaggatttggacatgggttttaaaaaacagctgagtacgttccagga

SEQ ID NO: 13771 - DNA, 80 bp, synthetic construct
  source 1..80: mol_type = other DNA
cccagtgactaataatgttggacatattttcacgtgcttacttgccacctgtacaacttctttggtgaaatgtctattcg

SEQ ID NO: 13772 - DNA, 80 bp, synthetic construct
  source 1..80: mol_type = other DNA
aggaaaaccagataagagttaagaggttgcagttaagtcgttgagatgaaaggaccgaagtagggtggtggtgttaagac

SEQ ID NO: 13773 - DNA, 80 bp, synthetic construct
  source 1..80: mol_type = other DNA
agaacatggcatggggtgaagtcagcaaatgttgagtagtcatttgagaagcctggcttgcattgaaagtgacagagaag

SEQ ID NO: 13774 - DNA, 80 bp, synthetic construct
  source 1..80: mol_type = other DNA
cagaatttctatattgaagccccaccccctaagacatcagaatgtgactctatttggtgttgaggtaagaaagttaaaac

SEQ ID NO: 13775 - DNA, 80 bp, synthetic construct
  source 1..80: mol_type = other DNA
actctccagtaaaacctctttattttaccccttaaaagggtaagagttaccgaagtgcatggaaatcttcagcagcgagg

SEQ ID NO: 13776 - DNA, 80 bp, synthetic construct
  source 1..80: mol_type = other DNA
aaaattaatttgggatggggagtttgggaagattcaaaggaaagagggattactctgggtttttttaagtacagccatct

SEQ ID NO: 13777 - DNA, 80 bp, synthetic construct
  source 1..80: mol_type = other DNA
ctagcattgacacaagcatgggacaagaatatggagaggagtttggggggcggagaagggcacaatcaaggggctcccct

SEQ ID NO: 13778 - DNA, 80 bp, synthetic construct
  source 1..80: mol_type = other DNA
tatttcccacgtactcattttccctctgtctcaaggtgtgtgcagtgatgctctgtgagctgactgtatgctgttacatg

SEQ ID NO: 13779 - DNA, 80 bp, synthetic construct
  source 1..80: mol_type = other DNA
tctcgtgcctcatcctccccagtagctgggattacacgcacacaccaccattcctgggtaatttttttgtatttttagta

SEQ ID NO: 13780 - DNA, 80 bp, synthetic construct
  source 1..80: mol_type = other DNA
acttgttgcagagattaagtgagatagagtccactaagtggttatgctgacattgtagcttaatgtaaagcttgtgtgtc

SEQ ID NO: 13781 - DNA, 80 bp, synthetic construct
  source 1..80: mol_type = other DNA
gccccatgcatggccaacctgagtaaatgacatttaacttttattattcaatgaagttatgcatgtaaataaatccacaa

SEQ ID NO: 13782 - DNA, 80 bp, synthetic construct
  source 1..80: mol_type = other DNA
catgagccatgcgtccagccacacttagcataatgtttttaggttcattcctattgtagcatgtatcagtacctgttatt

SEQ ID NO: 13783 - DNA, 80 bp, synthetic construct
  source 1..80: mol_type = other DNA
tatcttagtgaatcctcacaccaaccctgtgaggttgtcctactctttctaatgttcagtgaggaaaagaggttcagaga

SEQ ID NO: 13784 - DNA, 80 bp, synthetic construct
  source 1..80: mol_type = other DNA
cattgcttcatatattgattcattcatgttctggacattttgtccacaagttcctgaatgaaatctcgtgtgtgataaga

SEQ ID NO: 13785 - DNA, 80 bp, synthetic construct
  source 1..80: mol_type = other DNA
catatggagcccctactatgcgctgggtactgcttttaattctcacctaagtgttaagtgttatcacctccactttagaa

SEQ ID NO: 13786 - DNA, 80 bp, synthetic construct
  source 1..80: mol_type = other DNA
gggccaaaatagtccctcatttattcattcggtcagtaagtgtttagtgagtgcctattatattttattctaggccatgg

SEQ ID NO: 13787 - DNA, 80 bp, synthetic construct
  source 1..80: mol_type = other DNA
tgtgtggtataaaaattcagagcatgggttttagaaccagactgaccagcattaaatcctgggtctcccatgtattagct

SEQ ID NO: 13788 - DNA, 80 bp, synthetic construct
  source 1..80: mol_type = other DNA
aatggttatttcaagaatcaaagattatgaagtgtaaagaagctaacgatgctggaagccagaggtcagccccctcgtct

SEQ ID NO: 13789 - DNA, 80 bp, synthetic construct
  source 1..80: mol_type = other DNA
agttcaacagagtcagttgaagttggcttaaggaaaaaaaagtaagaagccagaagagaaaggcatacaaatagtgatga

SEQ ID NO: 13790 - DNA, 80 bp, synthetic construct
  source 1..80: mol_type = other DNA
taaatgttacttagtagtagtagaattcatatagtgactcctccctctcagggttgttgtagagattcaggtggcacatg

SEQ ID NO: 13791 - DNA, 80 bp, synthetic construct
  source 1..80: mol_type = other DNA
accctttataaatgatttccatctctactgagcagggcacccttcatagggaacgaaagaccagttcccagatcccagga

SEQ ID NO: 13792 - DNA, 80 bp, synthetic construct
  source 1..80: mol_type = other DNA
agaatttattttcaggagaaactttcctttcttgggaaccaacatcaccaggctgcttgggacagaagctggccaggaat

SEQ ID NO: 13793 - DNA, 80 bp, synthetic construct
  source 1..80: mol_type = other DNA
atacatgctcattatagaaagtagtgaaatgaaaaaagggaagacaataactcagtgttccagtggccaaggcaatctac

SEQ ID NO: 13794 - DNA, 80 bp, synthetic construct
  source 1..80: mol_type = other DNA
cacactccgatctacgttttaggactataatttgccccaccgtttaaagaatggattggaaatgaagaatcctggagaca

SEQ ID NO: 13795 - DNA, 80 bp, synthetic construct
  source 1..80: mol_type = other DNA
ccagagaactggaggagaatccagattgcacggtgttaggaaattctaaagaacaatgcaatcagaacaagtgctgcaga

SEQ ID NO: 13796 - DNA, 80 bp, synthetic construct
  source 1..80: mol_type = other DNA
ctaggccagggaaattgctctgcctgactcctaatacaagtaggaagaaaatacatatggagttaagccttgagttttgc

SEQ ID NO: 13797 - DNA, 80 bp, synthetic construct
  source 1..80: mol_type = other DNA
gaaggtctaaggagaaggtggtgtcagaactgatcccggacaggtgagcgagtgttcagtccaggagggaaaggccagat

SEQ ID NO: 13798 - DNA, 80 bp, synthetic construct
  source 1..80: mol_type = other DNA
atcattaataacaacaacataaatacaaatacagaagcagtgggcttgccctgctccaggatgtttgcatggaggggtct

SEQ ID NO: 13799 - DNA, 80 bp, synthetic construct
  source 1..80: mol_type = other DNA
tttaagtgccgcgatcctagtcctggtcgcgttggtcctgctcctccagtagctgggcctctctctgtaggctgtaccct

SEQ ID NO: 13800 - DNA, 80 bp, synthetic construct
  source 1..80: mol_type = other DNA
tcagattatgcatttattttaatgttttatgaggctgaactgccttatgctgattctcccctgctccagggaaaagcaat

SEQ ID NO: 13801 - DNA, 80 bp, synthetic construct
  source 1..80: mol_type = other DNA
ccttcccctctatcttgcccatttgtgaccttttcctttcaaggtctgtttgttattcactttagacagagtggatggga

SEQ ID NO: 13802 - DNA, 80 bp, synthetic construct
  source 1..80: mol_type = other DNA
ctcttctcttagtcccagggtagcgatttttctctttctgccgtctctgctctgatgtattaactacaaataaaatattc

SEQ ID NO: 13803 - DNA, 80 bp, synthetic construct
  source 1..80: mol_type = other DNA
taggttacaaggagactggccaaccgccaagcctttttgcatctgcaaactcaattcccacattctcagcttcattgtca

SEQ ID NO: 13804 - DNA, 80 bp, synthetic construct
  source 1..80: mol_type = other DNA
gatgcagagaaaatagggcccttgccactgatctgagaaggcccagagtggtttatgctaagtgtcaaatgtgcaatgtg

SEQ ID NO: 13805 - DNA, 80 bp, synthetic construct
  source 1..80: mol_type = other DNA
aaaaaaaaaagacagtaaaatgataattgaggtacactggagttctccagcagggcttccatgaaaggggtttggcaaga

SEQ ID NO: 13806 - DNA, 80 bp, synthetic construct
  source 1..80: mol_type = other DNA
tctttcaaataagtttgaccatgagccaaaaaagaatgctgatcttacagcctgaaggatgttcccacttcaaggaacac

SEQ ID NO: 13807 - DNA, 80 bp, synthetic construct
  source 1..80: mol_type = other DNA
ttccttattaatgcagggctgagagatactgtgagtagaattaggagcagaatctaattctattttccagccatgaaaat

SEQ ID NO: 13808 - DNA, 80 bp, synthetic construct
  source 1..80: mol_type = other DNA
acggagtcttgctctgttgcccaggctgaagtgcaatggtgcgatctctgctcactgcaacctctgcttcctgggttcaa

SEQ ID NO: 13809 - DNA, 80 bp, synthetic construct
  source 1..80: mol_type = other DNA
tcccatgtaacaagacgataataatgtctattgaggtaattggatgggaaagtaactgggcccagaacacgataccacat

SEQ ID NO: 13810 - DNA, 80 bp, synthetic construct
  source 1..80: mol_type = other DNA
atgggcacctggcagggggaaggggaaggtttaggtttaggacactatgtgccatattgaattcatactatctcattaaa

SEQ ID NO: 13811 - DNA, 80 bp, synthetic construct
  source 1..80: mol_type = other DNA
taaaggtgaggagaatgacaattcgaaaatgccaaactgccctgaaaactcttaatactctcaatgtaactaaaccacac

SEQ ID NO: 13812 - DNA, 80 bp, synthetic construct
  source 1..80: mol_type = other DNA
gggatggggaatgatgctgttctttgtttaaaggacagcagaactctccaaggggtagcaggctgggaattgattggaat

SEQ ID NO: 13813 - DNA, 80 bp, synthetic construct
  source 1..80: mol_type = other DNA
gttctcatcctcctttgcccattctacagatgaagaatggagctttgaagaggttagacaacttctcaaggtcacttagc

SEQ ID NO: 13814 - DNA, 80 bp, synthetic construct
  source 1..80: mol_type = other DNA
ctggggattataatactttatgggattgtcgtgaggacttacatgagataagccatgtaaaatgtttcgcacattaactg

SEQ ID NO: 13815 - DNA, 80 bp, synthetic construct
  source 1..80: mol_type = other DNA
gaggtgatggactcagaagtgttcttttattttagatgggatcattgaagcccaaagaggctgagaaacctgctcaggtt

SEQ ID NO: 13816 - DNA, 80 bp, synthetic construct
  source 1..80: mol_type = other DNA
agaaatggttccgtagtttaacaacaggaccatcacaccagtgtgtactgctgaatgccagctctgtctttagtcctgac

SEQ ID NO: 13817 - DNA, 80 bp, synthetic construct
  source 1..80: mol_type = other DNA
tcctctgttttctcttatgcctggagccatgatcaatgaagtcattaagggtagaaaagctccaccaagtttcacgagag

SEQ ID NO: 13818 - DNA, 80 bp, synthetic construct
  source 1..80: mol_type = other DNA
gcttttgaaggaagctctgcctgtagtgtagtgatcattattagcaaatggttctgctcgatgcctcagggctgtctttc

SEQ ID NO: 13819 - DNA, 80 bp, synthetic construct
  source 1..80: mol_type = other DNA
caaaaaaagaagctcacaaaattatttgagttccttgggagatgaacactatgtaagaggaaaaatgtaatcatccttgg

SEQ ID NO: 13820 - DNA, 80 bp, synthetic construct
  source 1..80: mol_type = other DNA
atttccctaaaagtcattttggtttcagtaatgtctggctatatccatgggagtatgttgtgtacaagaacaccagctac

SEQ ID NO: 13821 - DNA, 80 bp, synthetic construct
  source 1..80: mol_type = other DNA
agaatgaggatttggggaatctaatgcctccattcaaatgccgctagctacataaagcgaattctgggctgtagtgtgat

SEQ ID NO: 13822 - DNA, 80 bp, synthetic construct
  source 1..80: mol_type = other DNA
ttatgctcactgtgagcctttggttgagtcgcagtgactctctgaaccacagttttctcattttaaaaatggggacataa

SEQ ID NO: 13823 - DNA, 80 bp, synthetic construct
  source 1..80: mol_type = other DNA
tctgcattctccagtcccttctccccaatacagatgccagctgggttttcattcttatttcttctttctctgaatccctt

SEQ ID NO: 13824 - DNA, 80 bp, synthetic construct
  source 1..80: mol_type = other DNA
ctgtggattctgtcagttgattacccatcacaagaattgggacaaaattatccatcacgaatcgaacttctaaaccatca

SEQ ID NO: 13825 - DNA, 80 bp, synthetic construct
  source 1..80: mol_type = other DNA
cctgtggtaacctccatgttattttcttctcagtgagtttgcctattctagctaggtgcctcatagaagtggaattatac

SEQ ID NO: 13826 - DNA, 80 bp, synthetic construct
  source 1..80: mol_type = other DNA
gaagaagcaagaccacgtgactgaagttgagagtcctggtgattaagaagctttataatgagggaaagtagctgatgaat

SEQ ID NO: 13827 - DNA, 80 bp, synthetic construct
  source 1..80: mol_type = other DNA
tggttgatgccgtaagagaagagatgaaggaggaagctcaatttgagctaataaatctggagggattatccagcaactaa

SEQ ID NO: 13828 - DNA, 80 bp, synthetic construct
  source 1..80: mol_type = other DNA
gtgctaataagtgcttcacagttttttcccatttaaacctcacgacaactctagcaggagacacagttttatccctgttt

SEQ ID NO: 13829 - DNA, 80 bp, synthetic construct
  source 1..80: mol_type = other DNA
tgtttttgtagcattcatctcaagtgggaatccatttttctacgctaacctttccaccagactttgagcttcataaaagc

SEQ ID NO: 13830 - DNA, 80 bp, synthetic construct
  source 1..80: mol_type = other DNA
gacctcagtttcctgatttactgcctctagctttccaaaactctacagctgttatcagaaacatttcagttggcctctca

SEQ ID NO: 13831 - DNA, 80 bp, synthetic construct
  source 1..80: mol_type = other DNA
aaaatgctaccatcaactacactgagtcagcaaacatctattaagtgcctgctgtgtggtgggagaaacaaggactagga

SEQ ID NO: 13832 - DNA, 80 bp, synthetic construct
  source 1..80: mol_type = other DNA
aaatccagttcgtgccaaggtgctaatgtccatgacaacattaaattcttttggattgttgagagcatctaactaaatct

SEQ ID NO: 13833 - DNA, 80 bp, synthetic construct
  source 1..80: mol_type = other DNA
gggcagggcttacctcctatgctctgttcacctttctttttgtcagcatttataggtggccgctctttcctcagtacttc

SEQ ID NO: 13834 - DNA, 80 bp, synthetic construct
  source 1..80: mol_type = other DNA
tctatgcccatgtgccttggtgagtgggtgcatcagactgtgcatataaaatacatcaaactgaaataagaacaagaccc

SEQ ID NO: 13835 - DNA, 80 bp, synthetic construct
  source 1..80: mol_type = other DNA
aacctccctgtagtccagtttctctcttagttcatatctccttggcttcctcttctgcaaacagccagtgaaaactcttt

SEQ ID NO: 13836 - DNA, 80 bp, synthetic construct
  source 1..80: mol_type = other DNA
cattaggagtagcaattgctgttattattaagcaatccagcttctccatcctcagcatcaggcttcactccatgtcaaag

SEQ ID NO: 13837 - DNA, 80 bp, synthetic construct
  source 1..80: mol_type = other DNA
tcgctcatcttcctaaacaactccttgtacccctggtgggatggtggagctgggggtgcctgggatctctacgtgcctga

SEQ ID NO: 13838 - DNA, 80 bp, synthetic construct
  source 1..80: mol_type = other DNA
gcaccagagtgaacactgataatgtaagtgcatttctttcaaatggcatctagtccttggagaggtagctttgaacaaac

SEQ ID NO: 13839 - DNA, 80 bp, synthetic construct
  source 1..80: mol_type = other DNA
ggagggaagcagatccaagtggcaagataaggagttcaagttaaagagcgatacggtcttaaggatatcttcctcctttt

SEQ ID NO: 13840 - DNA, 80 bp, synthetic construct
  source 1..80: mol_type = other DNA
agattggtttttggaatgtgggctttcagagaggaacatctaggtcaaaatacccaaagacagtgtatgatttaaaatgc

SEQ ID NO: 13841 - DNA, 80 bp, synthetic construct
  source 1..80: mol_type = other DNA
ttcttgtgattattcatggttggaagatctggaacttcaactaaaggcttctctctcaacacaaatagccagaccaagca

SEQ ID NO: 13842 - DNA, 80 bp, synthetic construct
  source 1..80: mol_type = other DNA
agagacatttaagagatagatttgacagaattggcagttgactgggtgtggagttaagaaataagggagttgaggctgtc

SEQ ID NO: 13843 - DNA, 80 bp, synthetic construct
  source 1..80: mol_type = other DNA
tgaccttcaactatagctatttggacccttacataccattgtatacacaaagatttgcacacatgtatgcacacatgcac

SEQ ID NO: 13844 - DNA, 80 bp, synthetic construct
  source 1..80: mol_type = other DNA
agcggaaactgggtgaactttaatcccttccattcctgaaatgtgttcgttttatgaaatatctctctccgcaaaatgtc

SEQ ID NO: 13845 - DNA, 80 bp, synthetic construct
  source 1..80: mol_type = other DNA
gtaattaactcattcattcttactccgcccagaacatgcatttgaagggaatacctttctaacttgtggaactgaagagg

SEQ ID NO: 13846 - DNA, 80 bp, synthetic construct
  source 1..80: mol_type = other DNA
tctctggcatgtcctttttcccctaatgggaatgtggcaggatccaaaatacacttaaaccttatccaaatccactctgt

SEQ ID NO: 13847 - DNA, 80 bp, synthetic construct
  source 1..80: mol_type = other DNA
catgataaatgcttaaatgtgtatcaagtgaatgaaaaaattagtggtaaatgaaggcaccaccctacccgcaaaccttc

SEQ ID NO: 13848 - DNA, 80 bp, synthetic construct
  source 1..80: mol_type = other DNA
agaatgtggtacccagatatgctttaccaaagtccatccctcacttcaccccttcctaactacattcttatttctgatgc

SEQ ID NO: 13849 - DNA, 80 bp, synthetic construct
  source 1..80: mol_type = other DNA
gactaggattatgtggctttttatgccctgtcctagccccattatacacaatattttatttttaaaagccccatgaggca

SEQ ID NO: 13850 - DNA, 80 bp, synthetic construct
  source 1..80: mol_type = other DNA
gtgagtcaggcggaatgatgagttacagatagaaagaagtggaaaagcattaggtctaggagatggcaatggaattgggt

SEQ ID NO: 13851 - DNA, 80 bp, synthetic construct
  source 1..80: mol_type = other DNA
gtcccaggctctatttcctcattctctctaagggtatcttcctttgcattgatgctcacattggccacgagcagacagat

SEQ ID NO: 13852 - DNA, 80 bp, synthetic construct
  source 1..80: mol_type = other DNA
attcttatggtgatggcagaagggcagcaaagcaagtggaaacgcaaagacctcttagtcctaggctcccagaaaggcac

SEQ ID NO: 13853 - DNA, 80 bp, synthetic construct
  source 1..80: mol_type = other DNA
ggcatatgttactctcatggaagcggaggaaagcccctgagttcttcctgcagaggtcggggaaggcttgcccgaaaaga

SEQ ID NO: 13854 - DNA, 80 bp, synthetic construct
  source 1..80: mol_type = other DNA
tctccgtaaccttcttttctgtttctctctctccacacgatgttccctgctctttcttcactcttggcactttcttctct

SEQ ID NO: 13855 - DNA, 80 bp, synthetic construct
  source 1..80: mol_type = other DNA
acagctccctgagtcagaactgattcatcttaatttatacagagccttgcattcccctaaacaatttgcaaacagctcaa

SEQ ID NO: 13856 - DNA, 80 bp, synthetic construct
  source 1..80: mol_type = other DNA
gtgactgtgaggagagagctgcaggcacaagggttgggaggtgaattctcagagcagtttgaaggatccaggtgagaagc

SEQ ID NO: 13857 - DNA, 80 bp, synthetic construct
  source 1..80: mol_type = other DNA
cttttaggagacaggaaactttcctgagaagcaagcccctcattccaggcctcagttcatggctcattgtttcagtgggg

SEQ ID NO: 13858 - DNA, 80 bp, synthetic construct
  source 1..80: mol_type = other DNA
ccagttgatttttgtatttatactagagatggggtttcaccgtgttggcaagggtggtctcgaacctctgacctcaaagt

SEQ ID NO: 13859 - DNA, 80 bp, synthetic construct
  source 1..80: mol_type = other DNA
ttggactggaacagacaaactttgttgactgttttgctctgtaattgccttttaaagagattatccagagctggctcacc

SEQ ID NO: 13860 - DNA, 80 bp, synthetic construct
  source 1..80: mol_type = other DNA
ctgtgcagaatatagagattaaggtcctgtgtgttccctgccctgagaagcttgcattttaatagggaagatgaaaatgt

SEQ ID NO: 13861 - DNA, 80 bp, synthetic construct
  source 1..80: mol_type = other DNA
tatttccctttcttttgctttctcttttcttcctccattcctcttattttctccctcccctccctttcttcctctacacc

SEQ ID NO: 13862 - DNA, 80 bp, synthetic construct
  source 1..80: mol_type = other DNA
tgaggatctctaccctacacagaagacttctgtcagagaagcctgctgcagcacagtgtcttggactttgcatttagagt

SEQ ID NO: 13863 - DNA, 80 bp, synthetic construct
  source 1..80: mol_type = other DNA
ttctgagatcttcctccatcagaagaaacagagatctgaaagggatctgacttttgaagtgtctcttgaagatctcccac

SEQ ID NO: 13864 - DNA, 80 bp, synthetic construct
  source 1..80: mol_type = other DNA
ggacccagagagatctacctctaaagtctaagttcttaaccattacaacaaattatgcatcagaatcaccttggaaatgc

SEQ ID NO: 13865 - DNA, 80 bp, synthetic construct
  source 1..80: mol_type = other DNA
atgtgccagactgtcttctaggtataagttttttaagatggagaaagtggctgcttttgtggagcctgtattctagtagg

SEQ ID NO: 13866 - DNA, 80 bp, synthetic construct
  source 1..80: mol_type = other DNA
caggcctcacagctatgaattccagtttagtaaaactggatgtattccaggaatccgcataattttaaccagctccgaga

SEQ ID NO: 13867 - DNA, 80 bp, synthetic construct
  source 1..80: mol_type = other DNA
ttctcattggggcttggtttcattctctctcttcctgtctggatgagtgactatttaaagctggttttgattgtttagaa

SEQ ID NO: 13868 - DNA, 80 bp, synthetic construct
  source 1..80: mol_type = other DNA
ccggctctactgacatagtagctaacatttgttgtcacctacatgatgtgctgtgctgagtggtgtaagtatgtatttaa

SEQ ID NO: 13869 - DNA, 80 bp, synthetic construct
  source 1..80: mol_type = other DNA
gggaatgtaagattcatgaatcatggttccctcaagagctcataatcttttggggaaggcaaaaactgcagccaggtctt

SEQ ID NO: 13870 - DNA, 80 bp, synthetic construct
  source 1..80: mol_type = other DNA
tgctgcactcctgagtcatgtaaaggcagctgcatttcttatcgtggccctgtgcagctgagaactctggaaaatagctt

SEQ ID NO: 13871 - DNA, 80 bp, synthetic construct
  source 1..80: mol_type = other DNA
gtgctccgtttatgtgctccctctactgtagccttttcacactattattcagtgctgggggctccctgagccagctgaga

SEQ ID NO: 13872 - DNA, 80 bp, synthetic construct
  source 1..80: mol_type = other DNA
gactgcagaagcttattcacacatcagccggcaaacaaattagagctacttaaattttcaagctgggggctgcttttggg

SEQ ID NO: 13873 - DNA, 80 bp, synthetic construct
  source 1..80: mol_type = other DNA
atcgcagaaagctcagaagttgcatcctcccctgccctccagcatgctactgacttcagtgtcctgagttccagaaggac

SEQ ID NO: 13874 - DNA, 80 bp, synthetic construct
  source 1..80: mol_type = other DNA
tgagctaggtgggaagtctattaagttcatacaagcatcatacaggggtggcatttttagtcagagctgactagggtgga

SEQ ID NO: 13875 - DNA, 80 bp, synthetic construct
  source 1..80: mol_type = other DNA
ccacgaataatggaatcacctgtagtgagtttcagccaagagagaagaccaggaatgagcaaatgtatgagtagctgaag

SEQ ID NO: 13876 - DNA, 80 bp, synthetic construct
  source 1..80: mol_type = other DNA
ggccacaaacgggaatttattcacgcatccagccaatatgtagtaagtgccaatttcatgctaggtattgggcatatgat

SEQ ID NO: 13877 - DNA, 80 bp, synthetic construct
  source 1..80: mol_type = other DNA
tatctatctagtagcataacagacctgcctgggtttgaatctgcattaactatggagctttgggcaagaaacccaacctc

SEQ ID NO: 13878 - DNA, 80 bp, synthetic construct
  source 1..80: mol_type = other DNA
attggagatattagatttaaatgcagtaagcgtttactccctcgtgccaaggtgttcaccacggaggctaatattacaaa

SEQ ID NO: 13879 - DNA, 80 bp, synthetic construct
  source 1..80: mol_type = other DNA
gggagctatttttatcttataggtagcaaaatcaacttcccaagaccatgtagtaagttggagggtggaacttgaaccca

SEQ ID NO: 13880 - DNA, 80 bp, synthetic construct
  source 1..80: mol_type = other DNA
aatgtacataaaatatgaaatgttatagtgctgcgtgcacacccacagatgcaggcaaagatgtgaggaaatccctcgag

SEQ ID NO: 13881 - DNA, 80 bp, synthetic construct
  source 1..80: mol_type = other DNA
ataaatatttagactttgcaggtcacatggctctgagcaaatcagcttttgtagatgaaagcagtcacagtgcacgaatg

SEQ ID NO: 13882 - DNA, 80 bp, synthetic construct
  source 1..80: mol_type = other DNA
tggccctccacatttcagtaaccccaagggtagcactgtatcaaggcacagtgtaataactggcttcgtaatgataacac

SEQ ID NO: 13883 - DNA, 80 bp, synthetic construct
  source 1..80: mol_type = other DNA
tctttttttttccccccaggagagccagtttgtaaacatttcctaactgagcatgggcgggcactgaagcactgttaatc

SEQ ID NO: 13884 - DNA, 80 bp, synthetic construct
  source 1..80: mol_type = other DNA
ctgcaattagattgcactgggtaatagctgccaagccgctttgttggatctgatgagtttattaatttcttgggggctaa

SEQ ID NO: 13885 - DNA, 80 bp, synthetic construct
  source 1..80: mol_type = other DNA
taaaacagaaacacatgtaactactcgaaagggttgatgggagaattcagagatgataggcttgacacatctaacacatc

SEQ ID NO: 13886 - DNA, 80 bp, synthetic construct
  source 1..80: mol_type = other DNA
cggcgagaaagggtgaaacatgtctttactgttgctggaaattccataaaagaacccagagcccagttctgcggaataga

SEQ ID NO: 13887 - DNA, 80 bp, synthetic construct
  source 1..80: mol_type = other DNA
tctaccaaaaatacaaaaattagctggggatggtggcaggcacctgtaatcccagctactcgggaggcagaggttgcaat

SEQ ID NO: 13888 - DNA, 80 bp, synthetic construct
  source 1..80: mol_type = other DNA
ttcattcctgatttatttctccattttcctctcccacctctcccccacatctttattcctttcttccctgactgttacag

SEQ ID NO: 13889 - DNA, 80 bp, synthetic construct
  source 1..80: mol_type = other DNA
ttttttatttgattctcctctattcagtaattgccaagttcaccctcccttccctgtccccctgccatgtgccaggtgct

SEQ ID NO: 13890 - DNA, 80 bp, synthetic construct
  source 1..80: mol_type = other DNA
tgaaaggtacaggttttcctgagaaatagacactggtaagaaagggaagaggcataagccagaaaagtgggttgggtcca

SEQ ID NO: 13891 - DNA, 80 bp, synthetic construct
  source 1..80: mol_type = other DNA
attgctgggacctccttcccgctgtcttcttagtctctaaaaatcttctggatctgtcctcttctatccatccgcaaagc

SEQ ID NO: 13892 - DNA, 80 bp, synthetic construct
  source 1..80: mol_type = other DNA
actggtgtgtgaggtgacatttaacaacatggtaagtacaactcaaacaactattagccttggttcttttcttgcgcgtg

SEQ ID NO: 13893 - DNA, 80 bp, synthetic construct
  source 1..80: mol_type = other DNA
tggaaggcaggctgaccgttcctatctcattgacgtgacagtggactcatccagaatcagaatcacgtcaccttccactc

SEQ ID NO: 13894 - DNA, 80 bp, synthetic construct
  source 1..80: mol_type = other DNA
atcctctatcttccaatttcctcctccttgacgctaagatcatgttcccctgattttcagccttcctggctgcttctgtg

SEQ ID NO: 13895 - DNA, 80 bp, synthetic construct
  source 1..80: mol_type = other DNA
tccttggactgcagttgcacatgtacctgttcttacctagcctgcttattgcagacatccttatatctctgataatgccc

SEQ ID NO: 13896 - DNA, 80 bp, synthetic construct
  source 1..80: mol_type = other DNA
agagcatgaggttgtgctgcacgctcatgaaccctccatttgttcagtcaatcattcatgcatttgtcatttatttgtcc

SEQ ID NO: 13897 - DNA, 80 bp, synthetic construct
  source 1..80: mol_type = other DNA
tcctctttaaacacaccttttagctggttgttagtcccactttacaaatgagcaatcgagcccagaaagcttgagtgact

SEQ ID NO: 13898 - DNA, 80 bp, synthetic construct
  source 1..80: mol_type = other DNA
ggactcatagacatgcagccacacaccgagtgacttgaacagtcagaatcttagaattcaccccagatctttcaagcaaa

SEQ ID NO: 13899 - DNA, 80 bp, synthetic construct
  source 1..80: mol_type = other DNA
attttatcctttccaccccttcccccacagctctagtgttcatctgcaaaggatttttttggtaaagatttaaaataaca

SEQ ID NO: 13900 - DNA, 80 bp, synthetic construct
  source 1..80: mol_type = other DNA
cttagggacaccaggctgtctctcaatgccccttttcttgttcaagaagtatatgtttgctagtacaaagaataaaatta

SEQ ID NO: 13901 - DNA, 80 bp, synthetic construct
  source 1..80: mol_type = other DNA
gtttataaattgcttagtctgtagtatcctgttacaacagcggaaagcatacagagaccatgggcttagacacacggccg

SEQ ID NO: 13902 - DNA, 80 bp, synthetic construct
  source 1..80: mol_type = other DNA
aggggagccgggaagaaggctttcactgttgcaagagatggtgagaaccaaaagtagcttgggagttagaagaaggtaca

SEQ ID NO: 13903 - DNA, 80 bp, synthetic construct
  source 1..80: mol_type = other DNA
tctgggaggagagagaggatgcatttagctttggaaatggtaagtttgaggtgccttttggatatctacttagagacgtt

SEQ ID NO: 13904 - DNA, 80 bp, synthetic construct
  source 1..80: mol_type = other DNA
ttttagagctaagcaaactgaggtttcaaagaacaaaatgaaccactgccagttagtggcagaggtctggtgaaacttag

SEQ ID NO: 13905 - DNA, 80 bp, synthetic construct
  source 1..80: mol_type = other DNA
ttctgttataattcaaccattcattcattcatcaaagtgcgtgctgtctgacaagcaccgcttggatatgaggaattgcc

SEQ ID NO: 13906 - DNA, 80 bp, synthetic construct
  source 1..80: mol_type = other DNA
atctttataaactatgtccagagcgctagtgggagctgtctaagagcaggtggtttgtttgttttattcaaagaggggag

SEQ ID NO: 13907 - DNA, 80 bp, synthetic construct
  source 1..80: mol_type = other DNA
agctctacactcatgagttaatttgatccttacatgacccatgagacaggaattattactctgttccacagatgagggca

SEQ ID NO: 13908 - DNA, 80 bp, synthetic construct
  source 1..80: mol_type = other DNA
gtacaatgtcttatgcatcttgacatccttatgcacctaacacagtgcctgaaacacggtgaagtggtaacataggtaat

SEQ ID NO: 13909 - DNA, 80 bp, synthetic construct
  source 1..80: mol_type = other DNA
cagatttgaaacagacttcagaattttccccgcccatcctcagatccctgtgctggttattttccatggaaggagttgcc

SEQ ID NO: 13910 - DNA, 80 bp, synthetic construct
  source 1..80: mol_type = other DNA
ttcacacagtttttactttcatagagttcacatcctgtatacataggacctccatgtatggtttgtgcaggttaagacat

SEQ ID NO: 13911 - DNA, 80 bp, synthetic construct
  source 1..80: mol_type = other DNA
agatgagtaatattagatctttggtgtaaactttagagcagcggttctcaaagtattgtccttgaacgagtagcatcagc

SEQ ID NO: 13912 - DNA, 80 bp, synthetic construct
  source 1..80: mol_type = other DNA
atcctactggggagaggcccagcagccttccaaggttatatgcgctgttccaacctactctcttcttgccctcacatatt

SEQ ID NO: 13913 - DNA, 80 bp, synthetic construct
  source 1..80: mol_type = other DNA
ctgtctaaaaccaccttgcttattatgggactatgtgtttattgactgtctccgctcactagaatgtaagtttcctgagg

SEQ ID NO: 13914 - DNA, 80 bp, synthetic construct
  source 1..80: mol_type = other DNA
tcagaaaactgaggctctgaggtcaactaacttgttcaagatcacgtggctgggaagtggtagaattaggattcaaattc

SEQ ID NO: 13915 - DNA, 80 bp, synthetic construct
  source 1..80: mol_type = other DNA
atggagacaagatgccagaatcaggaacagcttaatagaagaatagcaacgaacacttactgagcacttgccccatgcta

SEQ ID NO: 13916 - DNA, 80 bp, synthetic construct
  source 1..80: mol_type = other DNA
ctgttaagctgtttgtgccagacgaggaatctagactcttcttcatccaaatgagaatgaaaatccatgaaaacatccag

SEQ ID NO: 13917 - DNA, 80 bp, synthetic construct
  source 1..80: mol_type = other DNA
agttggtggtactttattttacccaacaaaaacagtcctaataacaggcccgtgaatctcaccattcctaattacagggc

SEQ ID NO: 13918 - DNA, 80 bp, synthetic construct
  source 1..80: mol_type = other DNA
gattcgacatgtaaattgttggtcaatcttcagaaagtcaggtgtgatggtggtggtagtagtgatgtgaggaagtgaaa

SEQ ID NO: 13919 - DNA, 80 bp, synthetic construct
  source 1..80: mol_type = other DNA
gacaaaggtcactccttcctgaagatggcactctagacaatcaacaggtaaactggtaaataaacaagacaatttcaggt

SEQ ID NO: 13920 - DNA, 80 bp, synthetic construct
  source 1..80: mol_type = other DNA
agaggttaacaggtatcagcagactgttaaagaggtccatggcataaaaaaatattaagaaggcaggccaggcatggtgg

SEQ ID NO: 13921 - DNA, 80 bp, synthetic construct
  source 1..80: mol_type = other DNA
tcttgagtcagcttggacctctgtgccgcataatttcacctgcaaatgaactgccagccccttctttccttagcgctggt

SEQ ID NO: 13922 - DNA, 80 bp, synthetic construct
  source 1..80: mol_type = other DNA
gaaagccgcccgcaggtaaactgatcaaaagacaggaagtgagcagataatctaatttgaaatgggctgagatacagatg

SEQ ID NO: 13923 - DNA, 80 bp, synthetic construct
  source 1..80: mol_type = other DNA
tccaggcatcctgtactaatacaaggaaatttatagtatatgccatggtgggtggcatgagcattgccttctctctttgg

SEQ ID NO: 13924 - DNA, 80 bp, synthetic construct
  source 1..80: mol_type = other DNA
ccctttcttgcctcccttcaatctttttcttcactagagccgattgaatgtgctgcatattcagcatgcagactctgaag

SEQ ID NO: 13925 - DNA, 80 bp, synthetic construct
  source 1..80: mol_type = other DNA
tacttgttcgcctcctctattggttgtaaattttttgctgtcagagactgtgcctgtatttgttcaccatagtattccag

SEQ ID NO: 13926 - DNA, 80 bp, synthetic construct
  source 1..80: mol_type = other DNA
tgcctgcctccaaacatgcccacaactcatcataaggtctccataagcccttgctaagatgatcctcattgtcaagttca

SEQ ID NO: 13927 - DNA, 80 bp, synthetic construct
  source 1..80: mol_type = other DNA
cagagcgagactccgtctcaaaaaaaaaaaaaaaaaaaaaaaaaaaggtcagcgtcatggtgctagggcactgctgagtg

SEQ ID NO: 13928 - DNA, 80 bp, synthetic construct
  source 1..80: mol_type = other DNA
ttttccatcccccctgggttacgattttagacctgccttccccagatggccccttcctgaatttctttccctaaaatcaa

SEQ ID NO: 13929 - DNA, 80 bp, synthetic construct
  source 1..80: mol_type = other DNA
gttaaaaaacaaatcctacgtagccttacattttacttattttcttcaaaaaggaatgggttgtgtatgggggggtgggt

SEQ ID NO: 13930 - DNA, 80 bp, synthetic construct
  source 1..80: mol_type = other DNA
cccaggaggcagaggagcagaagggcttggatgagttgtcattgtacatgcccctcagcctcccacaccagtgattcctg

SEQ ID NO: 13931 - DNA, 80 bp, synthetic construct
  source 1..80: mol_type = other DNA
gatgtgtctccacagggacatatggaattgttttggcataatgtcacagttggccaacttttatcgacttgtaaaatgat

SEQ ID NO: 13932 - DNA, 80 bp, synthetic construct
  source 1..80: mol_type = other DNA
tcttttgcatcaactgatcgaccagcattagaaaatgtcaatcattgtaggctcgtctgagatacagcgcccaggtcata

SEQ ID NO: 13933 - DNA, 80 bp, synthetic construct
  source 1..80: mol_type = other DNA
tccagcatttttacttttcattgtagccccttcagcaaagtttcttacacaccataagcagtcagtggagttttgtcaac

SEQ ID NO: 13934 - DNA, 80 bp, synthetic construct
  source 1..80: mol_type = other DNA
tgaagggatggaaaagtcatgcttgtgggctttccagtaaaaattacttctgcctctctgaatagcgatgaccaagaatg

SEQ ID NO: 13935 - DNA, 80 bp, synthetic construct
  source 1..80: mol_type = other DNA
aaggtgcagccatgctagattaggctggactctaatccaatgtctgacgtccttataaaaagaagggaatttgaacacag

SEQ ID NO: 13936 - DNA, 80 bp, synthetic construct
  source 1..80: mol_type = other DNA
tggtcctcaagatggttctttgggggaaagggggcaggtatgataattcccaatttatagacatggaaactgaagtcatg

SEQ ID NO: 13937 - DNA, 80 bp, synthetic construct
  source 1..80: mol_type = other DNA
ttcgtgaagaaggaattctgccttaagtctatcacatagaaatcctgcctgagtttctaggctgcctgccttttggactt

SEQ ID NO: 13938 - DNA, 80 bp, synthetic construct
  source 1..80: mol_type = other DNA
ctgggtataatctctgtttctgttcaggcatccttaggaccaaaataagaatgttttgctctttttaccacctactccct

SEQ ID NO: 13939 - DNA, 80 bp, synthetic construct
  source 1..80: mol_type = other DNA
gggcaaggcatttcttgtccattactggatccccatcaaaaggccacagtcattataagcattcactaagaaacagcaga

SEQ ID NO: 13940 - DNA, 80 bp, synthetic construct
  source 1..80: mol_type = other DNA
aacctgagattctattagggaaccttacagggccagtattctaggcagcaggacaagtgacccaaattcttttttacctt

SEQ ID NO: 13941 - DNA, 80 bp, synthetic construct
  source 1..80: mol_type = other DNA
ttgacatcttcaaggagattgggtatatgtgtaagatggtggtttgttgactcacgtctcctaatttataaagcacttcc

SEQ ID NO: 13942 - DNA, 80 bp, synthetic construct
  source 1..80: mol_type = other DNA
tgaagaagctcaaggtgtgttaacattattttagtaattctcacggcccctcttcatgtggattaaggtgctccattcat

SEQ ID NO: 13943 - DNA, 80 bp, synthetic construct
  source 1..80: mol_type = other DNA
tgaaaagtggctgtagccagatagcattcttccccaaagcatctttaacatgtgtcactgtaagagagaaagtatagtat

SEQ ID NO: 13944 - DNA, 80 bp, synthetic construct
  source 1..80: mol_type = other DNA
taaataatgtttaagagtactctaagggggtgtgtaggttgagagtttgctggcattggggagaaggcgtgggattaatt

SEQ ID NO: 13945 - DNA, 80 bp, synthetic construct
  source 1..80: mol_type = other DNA
gtgtgatgttctctgttttataactttggtctctaggaatttttcccacagctgtgcatcattccttatcacccataacc

SEQ ID NO: 13946 - DNA, 80 bp, synthetic construct
  source 1..80: mol_type = other DNA
gtaaaaatgacatgccttgatagtgacagtaggttgcgccatgactgatacaattttgagcttaaacgcttacctgttca

SEQ ID NO: 13947 - DNA, 80 bp, synthetic construct
  source 1..80: mol_type = other DNA
ggactgttttgaggttgacgggggaaggtctcactgtgtgagatcaccctgcaaacaaaacccagagactccggttgtat

SEQ ID NO: 13948 - DNA, 80 bp, synthetic construct
  source 1..80: mol_type = other DNA
gaagatgactctcattaagcactgtgcatttggctgccctggcatcagtcattgccacaaaggatctgccacaaagtgcc

SEQ ID NO: 13949 - DNA, 80 bp, synthetic construct
  source 1..80: mol_type = other DNA
caagatcaggaaggtctttggggcccacaagatgcagccaaaaaaagacaggccttgctgacaacctggtcattttcaaa

SEQ ID NO: 13950 - DNA, 80 bp, synthetic construct
  source 1..80: mol_type = other DNA
cacacaaacaatactggagtctagggtattctgtcttaaggtagtgattttcaaacatggttctatggactgcaaaggct

SEQ ID NO: 13951 - DNA, 80 bp, synthetic construct
  source 1..80: mol_type = other DNA
gagtggaactcaagcagcagcattctttttttttttttgaaaggctctggggaggtctgaaacacagacagggagagcct

SEQ ID NO: 13952 - DNA, 80 bp, synthetic construct
  source 1..80: mol_type = other DNA
tgtggcactagtgtatgttccttttctcccacaggttgacgccctacgagtggtacagcccacacccatgtgcccagggc

SEQ ID NO: 13953 - DNA, 80 bp, synthetic construct
  source 1..80: mol_type = other DNA
tagcctagagaggcaagtttgcagaacacaactttttgatcctctcttaaaaatctgctgtgggtttggctgtcatagca

SEQ ID NO: 13954 - DNA, 80 bp, synthetic construct
  source 1..80: mol_type = other DNA
tcacccagagcacgtgatagaaaacaccatgtcgctggagagaatgccagtttgacaactgaaaatgccctttgacacag

SEQ ID NO: 13955 - DNA, 80 bp, synthetic construct
  source 1..80: mol_type = other DNA
gtggcaagttgccaagttctgtgtgttaatcactatgcattcatcgtcagtgtctctatgatggataaagccccatgaac

SEQ ID NO: 13956 - DNA, 80 bp, synthetic construct
  source 1..80: mol_type = other DNA
tatcactgtgttacttggcaggttgcttcacttctctgagcctcaatttcctcacctgtaaaattgggataagaattttg

SEQ ID NO: 13957 - DNA, 80 bp, synthetic construct
  source 1..80: mol_type = other DNA
caagattcatacatgaatgactgaagtttgaggaacaccagcttaagacgaactggcttcactgattccagacttgatag

SEQ ID NO: 13958 - DNA, 80 bp, synthetic construct
  source 1..80: mol_type = other DNA
cctcatctttctataaaaggtatcaaaggcacaactccctcctctgccattacacagtgacagtgaacatcttgtgttga

SEQ ID NO: 13959 - DNA, 80 bp, synthetic construct
  source 1..80: mol_type = other DNA
aggagacggccatgattagatggaatgctttcaaattatttgtggatttcactgatccatctatggtaggtcggtgtggg

SEQ ID NO: 13960 - DNA, 80 bp, synthetic construct
  source 1..80: mol_type = other DNA
aatatggttcatctctgaactctgtaaattatggcactaggagttctgtgaactgtgaactggaggcttcactctgggta

SEQ ID NO: 13961 - DNA, 80 bp, synthetic construct
  source 1..80: mol_type = other DNA
agttcattgatgagtcaggatttaggtccagctgggagtatgcccaggagatacaagcatgtatatcattcttaagtgga

SEQ ID NO: 13962 - DNA, 80 bp, synthetic construct
  source 1..80: mol_type = other DNA
ctgggacattgagctttccgtggtttcacttaagcctgtttttgtaatgaaatctaaattctagaaccaaagctccttga

SEQ ID NO: 13963 - DNA, 80 bp, synthetic construct
  source 1..80: mol_type = other DNA
atcttggggtgtttggccatgggctggacctgccagtcagcatggagagaagggaagcagaaaagcctgagaacactgcg

SEQ ID NO: 13964 - DNA, 80 bp, synthetic construct
  source 1..80: mol_type = other DNA
ctttttaaaaatgcaaactcgatggcagcattccccccacaaacctcccaatggtttcccatcccactgggaataaaatt

SEQ ID NO: 13965 - DNA, 80 bp, synthetic construct
  source 1..80: mol_type = other DNA
ttcagcacattagttagcagcactgagccctcattcctttatctgtaaaatgagttcagtaagtaacacactgtagggct

SEQ ID NO: 13966 - DNA, 80 bp, synthetic construct
  source 1..80: mol_type = other DNA
agttggatgattgtcagcatatgttaatgttgctctatgataacaatgagttaaaggatggcaggaaagagcgccgtctc

SEQ ID NO: 13967 - DNA, 80 bp, synthetic construct
  source 1..80: mol_type = other DNA
tctttccagttccccttttcctccctgaaccctaaatccagccccaggacctcttgctttgtgtacttagtcatgtgtat

SEQ ID NO: 13968 - DNA, 80 bp, synthetic construct
  source 1..80: mol_type = other DNA
tgagcaagcatctcaaagtcctcctgactttggaggaggaaaagtctggaaagccttatcttatgattgtttcctttcaa

SEQ ID NO: 13969 - DNA, 80 bp, synthetic construct
  source 1..80: mol_type = other DNA
cttggcggcattcatggtcccaggggatagttattgcctcaggagaaatcaagtcaaattattggctttaagttccaaaa

SEQ ID NO: 13970 - DNA, 80 bp, synthetic construct
  source 1..80: mol_type = other DNA
cttaactccagacaaagatattggaaatctaagtggactacggcataagaccagacacctatccccaccccaatacaatg

SEQ ID NO: 13971 - DNA, 80 bp, synthetic construct
  source 1..80: mol_type = other DNA
gtcaaacttactatggtatataattcgttgttcaagggatttggaaaaacacgaccaacatgacccaaagatctcttccc

SEQ ID NO: 13972 - DNA, 80 bp, synthetic construct
  source 1..80: mol_type = other DNA
aatgaaacggcagatcctgtggaaaactggagattacaaaaaggaacaggctccattccaagctgtttcattttcttctg

SEQ ID NO: 13973 - DNA, 80 bp, synthetic construct
  source 1..80: mol_type = other DNA
aatcatcgattcaaacatgcgatgtcatgttctgaaggacagaaggggattttataagctgagctgtaactcacacgtag

SEQ ID NO: 13974 - DNA, 80 bp, synthetic construct
  source 1..80: mol_type = other DNA
agttctgaaatagaaagtgcttgaaagccatatggttccaagaatccatgttcttgtccaatgctcttgatgagccagtg

SEQ ID NO: 13975 - DNA, 80 bp, synthetic construct
  source 1..80: mol_type = other DNA
tctgccagcaatctattcttgcttcctctttccaataacttcctcaaggcacgaatggtatacaagccttgcttctatga

SEQ ID NO: 13976 - DNA, 80 bp, synthetic construct
  source 1..80: mol_type = other DNA
aagtggcaggaggaatagggagaagggtaagaaactgaaaaatatttaggaggcaaaatcagcaggacttggtaatagcc

SEQ ID NO: 13977 - DNA, 80 bp, synthetic construct
  source 1..80: mol_type = other DNA
tttagaaggtcttaaaataattctgatgtagaccactctcaaaaagctcggccatggaaggagagagaagtgttggatta

SEQ ID NO: 13978 - DNA, 80 bp, synthetic construct
  source 1..80: mol_type = other DNA
gtacattcccttttaagtgtccctttttcatcccctacttcttgtggctcttgatgctcccagagtgaaaactttctacc

SEQ ID NO: 13979 - DNA, 80 bp, synthetic construct
  source 1..80: mol_type = other DNA
tcagatgtgcaagcattcctgaaaaacacgggacacaagagaccctcctggatgaaagatgccttttgatttctgattgt

SEQ ID NO: 13980 - DNA, 80 bp, synthetic construct
  source 1..80: mol_type = other DNA
tcaaggactgggtgtctacatgtcaagtagatgcatgggtgtctacttgagcatctaccatactcaagttcttgtttgaa

SEQ ID NO: 13981 - DNA, 80 bp, synthetic construct
  source 1..80: mol_type = other DNA
aactctgaatcttcctaaaaacctttcctaattggcactgggaaaatatctcacagcaggacaaacagtgcccctggaag

SEQ ID NO: 13982 - DNA, 80 bp, synthetic construct
  source 1..80: mol_type = other DNA
tactggctttttccttttgcccaccccttaaaaggtggtggtcttatttattccctaagacctagttcaggtgttccctt

SEQ ID NO: 13983 - DNA, 80 bp, synthetic construct
  source 1..80: mol_type = other DNA
gcgacagaggaagactcttgtctaaaaaaaaccaaaaacaaacaaacaaacaaaaatgcaggcccatctatattcttttt

SEQ ID NO: 13984 - DNA, 80 bp, synthetic construct
  source 1..80: mol_type = other DNA
acatggtggccttttcaaatacttgagagactgacatgtggtggaggaattatttatttagtaggcttcaaggtccaaac

SEQ ID NO: 13985 - DNA, 80 bp, synthetic construct
  source 1..80: mol_type = other DNA
ctagtcaggggccaatgtaccctccgtctagttcttacagaaaaaaaaaaaattaaacagggaagtttttcttttctgga

SEQ ID NO: 13986 - DNA, 80 bp, synthetic construct
  source 1..80: mol_type = other DNA
tgagtcgtaacctcagcttgagcagtagccctcccaccttgtatgactttaggtaaagcatttaacttctcttccatcta

SEQ ID NO: 13987 - DNA, 80 bp, synthetic construct
  source 1..80: mol_type = other DNA
cctactgtcagatcacatttggggcgggaagggtggttttttaaaaaaactcgtttttatgagcaggctatcttgatcaa

SEQ ID NO: 13988 - DNA, 80 bp, synthetic construct
  source 1..80: mol_type = other DNA
cagcctgggaactactctgggcgagaaccttccgataatgattgtagggcaatgttatttttaacatagctgcttggttt

SEQ ID NO: 13989 - DNA, 80 bp, synthetic construct
  source 1..80: mol_type = other DNA
ttcttcacaccccgtcactcttacggaattgctgatttcctctatttccttgcgtgatggagcagctctgctcggactgt

SEQ ID NO: 13990 - DNA, 80 bp, synthetic construct
  source 1..80: mol_type = other DNA
cacggcactccagcctgggtgacagagcgagactccgtctcgaaaaaaaaaaaaaagaaagttttaattttttccctgaa

SEQ ID NO: 13991 - DNA, 80 bp, synthetic construct
  source 1..80: mol_type = other DNA
ttgaacagactaagatggtctaaacagaagattgttagagccttttcctttcaggaatgttggcagatgatgctgcactg

SEQ ID NO: 13992 - DNA, 80 bp, synthetic construct
  source 1..80: mol_type = other DNA
tttaacaccgtcttatctcttggagaaattgaaaacaaatgcagagaggaatacgtaatacgtgcatttaatgtgggttt

SEQ ID NO: 13993 - DNA, 80 bp, synthetic construct
  source 1..80: mol_type = other DNA
tttatttatctgattttgcctcatgaatttcatgattcttatcctgggagagagcaccaattggctggcttggctctggc

SEQ ID NO: 13994 - DNA, 80 bp, synthetic construct
  source 1..80: mol_type = other DNA
ggtttttgtggagatggggtctcactatgttgcccaggctagtctggaacccctggactcaagtgatcctaccctcccac

SEQ ID NO: 13995 - DNA, 80 bp, synthetic construct
  source 1..80: mol_type = other DNA
tttggctttattaaagctcctcaaaaaactctagaattagggctttcttaagttactttttagcagaaacatttacggta

SEQ ID NO: 13996 - DNA, 80 bp, synthetic construct
  source 1..80: mol_type = other DNA
aataccctatctccaaataagatcactgtctgagggttaggggctaactggggaatagaactctaacataaacgtttttt

SEQ ID NO: 13997 - DNA, 80 bp, synthetic construct
  source 1..80: mol_type = other DNA
tcatatgtggcgggggcggagggggagtcctgtgtttagaggtgcacagtgtgtgcgctgctgtgtgtgtgtgttattta

SEQ ID NO: 13998 - DNA, 80 bp, synthetic construct
  source 1..80: mol_type = other DNA
cagagtggtcctattaaaatttaagccagattgtgtcggcccctcctctgaactctcttcatggcttcccagacagctca

SEQ ID NO: 13999 - DNA, 80 bp, synthetic construct
  source 1..80: mol_type = other DNA
tggaagtgggtacacccgtttttggttgttttttattctgatagttttggggaaacagttggtgttctggttgcatggaa

SEQ ID NO: 14000 - DNA, 80 bp, synthetic construct
  source 1..80: mol_type = other DNA
ccacaggtttctggagcagtgcagagctttgcagacccacttctacggatttaagtttgtgggcttgaaggttgtttcaa

SEQ ID NO: 14001 - DNA, 80 bp, synthetic construct
  source 1..80: mol_type = other DNA
tcctttgatgatatgtttgcttccagccagttccatgtgccagtagttgcacccaccgttctttcctagacacattctca

SEQ ID NO: 14002 - DNA, 80 bp, synthetic construct
  source 1..80: mol_type = other DNA
tgctagaccatctgtttacccagggttttttattaggttaatatttccctctagatactgacatctgtatcagttaaact

SEQ ID NO: 14003 - DNA, 80 bp, synthetic construct
  source 1..80: mol_type = other DNA
agaaaaatatctctgaatttaatgaatgaattagggagtaagcaaagaggattataatttgggatgcacagccatggcga

SEQ ID NO: 14004 - DNA, 80 bp, synthetic construct
  source 1..80: mol_type = other DNA
caaattacctgggtgtggtggcaggcgcctgcaatcccagctattctggaggctaaagtgggagaatcacctgaacccag

SEQ ID NO: 14005 - DNA, 80 bp, synthetic construct
  source 1..80: mol_type = other DNA
gggcctggtacctttctatacaagttatcctatttaatctccacaacaagcctactagatgctgagatctcaatgtgcaa

SEQ ID NO: 14006 - DNA, 80 bp, synthetic construct
  source 1..80: mol_type = other DNA
ctaagtctcggctccccaaggggccacagctcttatctcctctcttctctccttctcatcacccacaacgtggtgagttg

SEQ ID NO: 14007 - DNA, 80 bp, synthetic construct
  source 1..80: mol_type = other DNA
agccaggctgccatgtttcttgctagttacttgagtagtgtaaagttgggagaagccagggaacaagagaaagcagagat

SEQ ID NO: 14008 - DNA, 80 bp, synthetic construct
  source 1..80: mol_type = other DNA
ccagcctaagccattatgttctcctggataaaattcagtaaaattttagctgcccagaaggcttgagattgaagatgctc

SEQ ID NO: 14009 - DNA, 80 bp, synthetic construct
  source 1..80: mol_type = other DNA
cttctaaatggcagagctagtgacagattgcttcccttgggaattttatacttcatcaagcagctttccagataagacaa

SEQ ID NO: 14010 - DNA, 80 bp, synthetic construct
  source 1..80: mol_type = other DNA
gccactatgcccgctccccattagaaacattttttacaagtaatatatatactcattgttctatacattactgaagaaaa

SEQ ID NO: 14011 - DNA, 80 bp, synthetic construct
  source 1..80: mol_type = other DNA
atcaatttacctttctgtcaacagtatgtaacaaactttctttgtgatgcctttgctaatactggttgttgtcagtattt

SEQ ID NO: 14012 - DNA, 80 bp, synthetic construct
  source 1..80: mol_type = other DNA
ttataaaaattagtttcaggtggtataaaggagctagtatttccctcattgttgtaacccccccattgttttaactccac

SEQ ID NO: 14013 - DNA, 80 bp, synthetic construct
  source 1..80: mol_type = other DNA
agcagttcgagactagcctggccaacatggtgaaacctgtttctactaaaattacaaaaattgggccaggcgccatgact

SEQ ID NO: 14014 - DNA, 80 bp, synthetic construct
  source 1..80: mol_type = other DNA
agaggcacattgaattcttggatgcagtggtgagcagtttatctccatattgagcaaccacccaatcttatgcttttgaa

SEQ ID NO: 14015 - DNA, 80 bp, synthetic construct
  source 1..80: mol_type = other DNA
caactggccaatgctcttaacttaaaaacgctttaacccagaagcatatggaagggataaagtttgtgtaagaagaatga

SEQ ID NO: 14016 - DNA, 80 bp, synthetic construct
  source 1..80: mol_type = other DNA
tgggggatggaaccctgggtgtaagttctcatgtagtgggtaatgtttgccaagctgctgtattttaagaatttagggac

SEQ ID NO: 14017 - DNA, 80 bp, synthetic construct
  source 1..80: mol_type = other DNA
gacttgctttctcttccattaattgcatgccacacagtatccagaactcccagcactgaagtttgtttgtttgtttttga

SEQ ID NO: 14018 - DNA, 80 bp, synthetic construct
  source 1..80: mol_type = other DNA
acccagcttaactgttctttcttttcttccatctctccaatcaggcagaatatgaagttgccgatgatgaggaccgaagt

SEQ ID NO: 14019 - DNA, 80 bp, synthetic construct
  source 1..80: mol_type = other DNA
ttctgttagaagtcctcaattctgggcagggccctatattgtaaggatggaaggagaaaaggaacaacagggatagcaaa

SEQ ID NO: 14020 - DNA, 80 bp, synthetic construct
  source 1..80: mol_type = other DNA
ggtgtgattcagaccctaatgagttttctaccccagcctccagccttacagattactctctcaaacacagctgttacaac

SEQ ID NO: 14021 - DNA, 80 bp, synthetic construct
  source 1..80: mol_type = other DNA
gtgttagtttgctaaggataatggcctccagctccatccatgttcttgcaaagaacatgatcgttctcttttttacggct

SEQ ID NO: 14022 - DNA, 80 bp, synthetic construct
  source 1..80: mol_type = other DNA
actacagagtgagaatataagttatggtgtccagtatatggcatttatggatacttggcatcagtctagggaccactagc

SEQ ID NO: 14023 - DNA, 80 bp, synthetic construct
  source 1..80: mol_type = other DNA
gcaagaccgtgtgttcattcttgcatttctttatccagtcactcagacattgttagtttttcttagttttcctctcaggg

SEQ ID NO: 14024 - DNA, 80 bp, synthetic construct
  source 1..80: mol_type = other DNA
ttgtgcaccctcaccacttctgttcaactagggtcaactgtaagttccattgtactggaggttctagacagggcaattag

SEQ ID NO: 14025 - DNA, 80 bp, synthetic construct
  source 1..80: mol_type = other DNA
tcaagggacgtggactataacattctttaaaaagaatgtagttggaggactcgcactcctcaatttcaaaacttagtaca

SEQ ID NO: 14026 - DNA, 80 bp, synthetic construct
  source 1..80: mol_type = other DNA
atagccacatgcagagaatcacacggaagccctacctcattccataaacaaaacattaatgccaaatccatcaaaggcct

SEQ ID NO: 14027 - DNA, 80 bp, synthetic construct
  source 1..80: mol_type = other DNA
gaatattttgtcttgttttctgctgtgtccagtgcctggaacaatgcatatttgtggagcaaatgagtgaatgaacaaac

SEQ ID NO: 14028 - DNA, 80 bp, synthetic construct
  source 1..80: mol_type = other DNA
gccaccacgcccgcccgagaccatagttattgaaatgcctcaaatgtattagataatttaaatggcagctactaatcatg

SEQ ID NO: 14029 - DNA, 80 bp, synthetic construct
  source 1..80: mol_type = other DNA
aggtgggcagatcagttgagctcaggagttcaagaccagcctgggcaacgtggtgaaacactgtctctacaaacaataca

SEQ ID NO: 14030 - DNA, 80 bp, synthetic construct
  source 1..80: mol_type = other DNA
atttatccattcatccacagacacctgggttgttttttgctatggtgaattatgctgcaatgaacatgggtgtgcagata

SEQ ID NO: 14031 - DNA, 80 bp, synthetic construct
  source 1..80: mol_type = other DNA
ctaggtaagtggttcatgctgagccctgcatatattatctatgactaaccccaaaacagacagctttcaggaggtttctc

SEQ ID NO: 14032 - DNA, 80 bp, synthetic construct
  source 1..80: mol_type = other DNA
tgctctgagagcaagcagatgacatatgcattgtgtttaaaaagatcgctctgggtgcaacttagaggttaaagagaggg

SEQ ID NO: 14033 - DNA, 80 bp, synthetic construct
  source 1..80: mol_type = other DNA
agaacccttccctctgtccctcagccccctcctctgaaaatggattagagtaaatggattagagtaaatgtagactaaag

SEQ ID NO: 14034 - DNA, 80 bp, synthetic construct
  source 1..80: mol_type = other DNA
acaacaaataacaaaacaataataaatacttggaagtattaatgcacttacccgctcacagtaactgtatgaaataggca

SEQ ID NO: 14035 - DNA, 80 bp, synthetic construct
  source 1..80: mol_type = other DNA
gaaaataaaacttagcttagatttttagtgctagaataggatgcaatgggtgggacctggcagttaaaccctgctcagcc

SEQ ID NO: 14036 - DNA, 80 bp, synthetic construct
  source 1..80: mol_type = other DNA
catgctgtttttgaggcgctgggtataaacatctttgaggttcttttttcaaaggatggcacaacgtatatacgtcatct

SEQ ID NO: 14037 - DNA, 80 bp, synthetic construct
  source 1..80: mol_type = other DNA
acttacgtaaccctactctgtttggacacgtatgtacctcatacctacatcaaaaggtgtttggaaatgtgtcaatttgg

SEQ ID NO: 14038 - DNA, 80 bp, synthetic construct
  source 1..80: mol_type = other DNA
ctgctcccatattacaattcaaaggaaaagccactagcattgccttgaagttaattagaaagctgacctaggaggcagca

SEQ ID NO: 14039 - DNA, 80 bp, synthetic construct
  source 1..80: mol_type = other DNA
gtgctagcacttcctccagtgggcttgagagagcaaacctagttggttttattttgtcaacagtaattctttcgcttatg

SEQ ID NO: 14040 - DNA, 80 bp, synthetic construct
  source 1..80: mol_type = other DNA
cacagaggcacggggaccagaacctgaggctcatgatactattttttccacttttgtatgttggaaatttttcatgacat

SEQ ID NO: 14041 - DNA, 80 bp, synthetic construct
  source 1..80: mol_type = other DNA
gtgcaaagtagattcgtagtaagtgtctcctcttagtcttcactgtgcattgtttgattcatagcacttttgtcagccga

SEQ ID NO: 14042 - DNA, 80 bp, synthetic construct
  source 1..80: mol_type = other DNA
ttttttagagatgagatctctggccaggcgcggtggctcacacctgtaatcccaccacttagggaggccaaggagggtgg

SEQ ID NO: 14043 - DNA, 80 bp, synthetic construct
  source 1..80: mol_type = other DNA
atagcacagtgtgtgtatatgatatgtcactctcatgtgcaattacttgaaaatctgtaataaaatgggcttatctggga

SEQ ID NO: 14044 - DNA, 80 bp, synthetic construct
  source 1..80: mol_type = other DNA
gggtggctgagacaggagaattgcttgaactcagaagacggaggttgcagtgagcccagattgcgccattgtactccagc

SEQ ID NO: 14045 - DNA, 80 bp, synthetic construct
  source 1..80: mol_type = other DNA
ggagagaaagtaagggatccttactaattcaagggccagtgagaattccttgtggtttaattctgtggtctgttgcatgc

SEQ ID NO: 14046 - DNA, 80 bp, synthetic construct
  source 1..80: mol_type = other DNA
agaccctgtctcttaaaaaataactctaggcaaagaactgacaaaaatgtgcaagacttctacactgagaactgtaaaat

SEQ ID NO: 14047 - DNA, 80 bp, synthetic construct
  source 1..80: mol_type = other DNA
atgatcccaagtatcttggtgaagtttcgccacttcttcgcttagctgtagaaagttctctcttttggctacacagctgc

SEQ ID NO: 14048 - DNA, 80 bp, synthetic construct
  source 1..80: mol_type = other DNA
gaagcagaagtttgttttttactggttaagttgatcaaataaaggtggtgctactcatgtaagcataagaagagcccatt

SEQ ID NO: 14049 - DNA, 80 bp, synthetic construct
  source 1..80: mol_type = other DNA
tcagggacttgaggacccttggattttgatatccaagggaaaggggcctgctgtgggacctgatggtgtctcccttgtca

SEQ ID NO: 14050 - DNA, 80 bp, synthetic construct
  source 1..80: mol_type = other DNA
ctgtttgctttccttcctactgggctgcatatttaatcactgaaatgtcttcaaatctgtataactatgcaaagaagttc

SEQ ID NO: 14051 - DNA, 80 bp, synthetic construct
  source 1..80: mol_type = other DNA
acccacctcttgctttattcttttttatttccattcccctctaaactttgtcatgttgcccctggtgctgtcctcttgtc

SEQ ID NO: 14052 - DNA, 80 bp, synthetic construct
  source 1..80: mol_type = other DNA
ctcacttactgagttgttaaaaggcttaacaagggtaggtagaacgtgctctgtatgcaaagtggagcaatctccaagct

SEQ ID NO: 14053 - DNA, 80 bp, synthetic construct
  source 1..80: mol_type = other DNA
caaaaccagtaaaatatttctttgcagttcttttagtcattagcaaaagttctttggttctagggttgttcactcaaatt

SEQ ID NO: 14054 - DNA, 80 bp, synthetic construct
  source 1..80: mol_type = other DNA
tatgtggttccaaagataacaccgcaaaatagagtgtatcgtaagatgtctagattccatccctgaccatccccaagtaa

SEQ ID NO: 14055 - DNA, 80 bp, synthetic construct
  source 1..80: mol_type = other DNA
gaaaagaaaagaaaatgaaatgtggattattgaaagaatgcatctgtacaaggggaggaaactgagacatgatagtacat

SEQ ID NO: 14056 - DNA, 80 bp, synthetic construct
  source 1..80: mol_type = other DNA
caagtggtggcctatgattaaagggcttcctgatcaatagccaggcaaaaatcgaattttcctgctgctagtgaaaatgc

SEQ ID NO: 14057 - DNA, 80 bp, synthetic construct
  source 1..80: mol_type = other DNA
ttccctagaccaccatttcccttgtgaatgtgactctgtggcaattcagctcatcttggatgaatcatacaaatgtttaa

SEQ ID NO: 14058 - DNA, 80 bp, synthetic construct
  source 1..80: mol_type = other DNA
taagtcaggctctgtagaggctgggaaatggcacttctcactcattctagttgttttcactggcagctataacaaaaaaa

SEQ ID NO: 14059 - DNA, 80 bp, synthetic construct
  source 1..80: mol_type = other DNA
actgtgttaccacccctcactgcccagacactcaatcagtgagggaaactctctttgttacttactttaaaccagtattt

SEQ ID NO: 14060 - DNA, 80 bp, synthetic construct
  source 1..80: mol_type = other DNA
atcctgaaggcaggtggtggagaagacttcaggctgactccaagatgggctggagggaagggggcactcgctggagccaa

SEQ ID NO: 14061 - DNA, 80 bp, synthetic construct
  source 1..80: mol_type = other DNA
tgttaaataatggagtcttcctcccacaggacactgacagggctgcaagaatgtataaatatgtaccagaaatggagtct

SEQ ID NO: 14062 - DNA, 80 bp, synthetic construct
  source 1..80: mol_type = other DNA
ttctcagtcaggaggctggaagtcctagatcaagatgcctgcagatttggtgttggtgagggctgctctctgcttcaaag

SEQ ID NO: 14063 - DNA, 80 bp, synthetic construct
  source 1..80: mol_type = other DNA
tccgttttaaattaacaaagcatgcaaagaataaacgcattgagcaactgttactgagcgcctgctctggctaggtgctg

SEQ ID NO: 14064 - DNA, 80 bp, synthetic construct
  source 1..80: mol_type = other DNA
tgattaatttttttaacttaaggaataacatagccgaccccttatttattgatagctcaaaggcgaaaccttcgcccccc

SEQ ID NO: 14065 - DNA, 80 bp, synthetic construct
  source 1..80: mol_type = other DNA
aatcagcaggtacagttagcatgtggcttttgctcatggtgcctgtcctacctggttcttcttccctcccccgtcacccc

SEQ ID NO: 14066 - DNA, 80 bp, synthetic construct
  source 1..80: mol_type = other DNA
tgccctgcatccctgacctctgtttgcaatccattttgcactacggaaaggagaagggcatggcctcaggaggggtgtgt

SEQ ID NO: 14067 - DNA, 80 bp, synthetic construct
  source 1..80: mol_type = other DNA
aaaaagattgtataagacttttgaccacaggactagaccatgggcaagccaaggaccatatcagcagctgtccagaagca

SEQ ID NO: 14068 - DNA, 80 bp, synthetic construct
  source 1..80: mol_type = other DNA
tgactgccaaggtgaaaacctggtactttttctgtttgcgatggctcctacaggcagttttatacagtctgagagccaca

SEQ ID NO: 14069 - DNA, 80 bp, synthetic construct
  source 1..80: mol_type = other DNA
agctttaggtgggaaatatctcaaagtggcatttcccatggctgtctttcctctgagaactaagggttaggtgtgaacta

SEQ ID NO: 14070 - DNA, 80 bp, synthetic construct
  source 1..80: mol_type = other DNA
gaccctggcgccaggaaggagcatgtgttagcgtctcgtcccacctggaattgtaataaatacatctaaataaaacatgc

SEQ ID NO: 14071 - DNA, 80 bp, synthetic construct
  source 1..80: mol_type = other DNA
atgtttcttagggaaatcccgtcgtgtggaaggaagccttttaaaggcaaagtcagatgttgaggaattagccttttcat

SEQ ID NO: 14072 - DNA, 80 bp, synthetic construct
  source 1..80: mol_type = other DNA
tgggaataaatttttaggagaggcttgttacttggtgacttcaggttctaaggcctgagctgtgtgtgtgtgtgtggttt

SEQ ID NO: 14073 - DNA, 80 bp, synthetic construct
  source 1..80: mol_type = other DNA
aagtgcttccagtttcttttggctgggcctttattagagacttgagcccatatatcctaattagtgtggacacttttaga

SEQ ID NO: 14074 - DNA, 80 bp, synthetic construct
  source 1..80: mol_type = other DNA
gaaaaggtagaggtatgggttcaagattttgaaccacggaaatgtattttggggcctgtttatttgtcctgggtctcatg

SEQ ID NO: 14075 - DNA, 80 bp, synthetic construct
  source 1..80: mol_type = other DNA
gaaaaaccatcagataaatgcccacaaggctctcatctttcagtagcttagctgctgcttgtcagattctaaactccaaa

SEQ ID NO: 14076 - DNA, 80 bp, synthetic construct
  source 1..80: mol_type = other DNA
aggtgacacattgagaagataattaggaatttcctcaatcatacagccctcagcacccatttctcacatcaaaatagaat

SEQ ID NO: 14077 - DNA, 80 bp, synthetic construct
  source 1..80: mol_type = other DNA
ctggaagaagcatttcattttgtgaaaactgtgctgcttttaaaagagaaagtccttacttcctgactggacccttcccc

SEQ ID NO: 14078 - DNA, 80 bp, synthetic construct
  source 1..80: mol_type = other DNA
aaatggaaaccattaaaaacaatggcaagaagaccctttggttgaggaatgacaagatccaagaggaaaactggtgtgcc

SEQ ID NO: 14079 - DNA, 80 bp, synthetic construct
  source 1..80: mol_type = other DNA
aagctaccatatcctcccccaccccctttttcaatatcttgttgggaaatttgcctaaattgagcaactgactttcctga

SEQ ID NO: 14080 - DNA, 80 bp, synthetic construct
  source 1..80: mol_type = other DNA
ggtgaaaacccatctctactaaaaatacaaaattacctggatgtggtggtgggtgcctataataatcccagctacttggg

SEQ ID NO: 14081 - DNA, 80 bp, synthetic construct
  source 1..80: mol_type = other DNA
catacataagtgcctgtacacacataagcacatgtgtacgtatgtggtatgatcgcctgtggaggcccattacctgtact

SEQ ID NO: 14082 - DNA, 80 bp, synthetic construct
  source 1..80: mol_type = other DNA
ggtgttcaaaaatatttccagaatgaatgactgatgctacacagcttgagtatccctaactgaagaatctgaaatccaaa

SEQ ID NO: 14083 - DNA, 80 bp, synthetic construct
  source 1..80: mol_type = other DNA
gatggtgaagaagagagccgagaaagtgatatcctcaagaaatggccttggggtcacaatagatggtacattaggatacg

SEQ ID NO: 14084 - DNA, 80 bp, synthetic construct
  source 1..80: mol_type = other DNA
gcaaaatataaattaaggaaggagaaacccgatttccttggttggttccatgggttacggaggtgagggctagtcttcag

SEQ ID NO: 14085 - DNA, 80 bp, synthetic construct
  source 1..80: mol_type = other DNA
gtcagcatgtaggtgaacgttttcccaaatctctgtatatgcacatacgaacatctagatagaactttacacaaaatggg

SEQ ID NO: 14086 - DNA, 80 bp, synthetic construct
  source 1..80: mol_type = other DNA
gccaatccattgcttcgtttttcgtgtttgagagcttttgcgtttcattgtacattgtacaattctagggagccattgtt

SEQ ID NO: 14087 - DNA, 80 bp, synthetic construct
  source 1..80: mol_type = other DNA
tgaagcagcagcttttggggatagcctgtatttttaaaacaggaggttctgaggatgaaccaggcgtgggaactgctgct

SEQ ID NO: 14088 - DNA, 80 bp, synthetic construct
  source 1..80: mol_type = other DNA
aagtaacagacataaccaaccttaggataggatttattagcaggtgggaatgatgttgttgctaacatctggcaaagctc

SEQ ID NO: 14089 - DNA, 80 bp, synthetic construct
  source 1..80: mol_type = other DNA
atttgtagtagaaataaacaggaaaaaaacccgccactgctaattgaactgattctcgcaatccaagaaaggcaaatgca

SEQ ID NO: 14090 - DNA, 80 bp, synthetic construct
  source 1..80: mol_type = other DNA
caggcatgcaccactgtgcccggctaatttttgtatttttttttctttttttttttgagatggagtctcgctctgtcacc

SEQ ID NO: 14091 - DNA, 80 bp, synthetic construct
  source 1..80: mol_type = other DNA
tcactgccaccttggcctcctgggctcaagtggttttcctgcctccgcctcccaagtagctgggattatatgcgcccgcc

SEQ ID NO: 14092 - DNA, 80 bp, synthetic construct
  source 1..80: mol_type = other DNA
ttggtaatatagacatcaaaagccttaaaattgggtaacccttgaccttgaagttccacgtctaagattttatcttaagg

SEQ ID NO: 14093 - DNA, 80 bp, synthetic construct
  source 1..80: mol_type = other DNA
attaaggctagatgccttaacgcatctagcatactgttttgactccgctagatgatgacatgtctttgtctttcaaatgc

SEQ ID NO: 14094 - DNA, 80 bp, synthetic construct
  source 1..80: mol_type = other DNA
tttcaccacggtccaatgcattaggtttcattgtcttttgcacatgacaaatctgacaggctaaggacacattcaggtag

SEQ ID NO: 14095 - DNA, 80 bp, synthetic construct
  source 1..80: mol_type = other DNA
aaagagccactgagagtttttcagcagaggaggctcaaaaactacctgtacttgaagacaccagatctggcagcagaagc

SEQ ID NO: 14096 - DNA, 80 bp, synthetic construct
  source 1..80: mol_type = other DNA
aactcaacatcactaatcattaaggaagtgcaaatcaaaaccacaatgaggtattatctcaccgcagttaaaatggccat

SEQ ID NO: 14097 - DNA, 80 bp, synthetic construct
  source 1..80: mol_type = other DNA
agacgtgacttgctcctacttgtctcccaccatgattatgaggcttccccagccatgtgaaactgaaagtccaatgaaac

SEQ ID NO: 14098 - DNA, 80 bp, synthetic construct
  source 1..80: mol_type = other DNA
gaacgtgtgacttgccacttacagtcaaaggatcctgactcattcagggttaaaagtcacatccttaggggatacctgcc

SEQ ID NO: 14099 - DNA, 80 bp, synthetic construct
  source 1..80: mol_type = other DNA
gagtctgtgcttttttaaccaccacgttcctcacgttggtgttgacaaaaaatattactaaaagtagttcattcttactc

SEQ ID NO: 14100 - DNA, 80 bp, synthetic construct
  source 1..80: mol_type = other DNA
tttctaaatctggctttcatcagtggtgatgttcttcatgtgtagatttatactagggaaacaaatcaggagggggaaca

SEQ ID NO: 14101 - DNA, 80 bp, synthetic construct
  source 1..80: mol_type = other DNA
cttgtgcagatattaacggtgccaaatagtgccagggcccaggttgcagtgggctccttattgtcctgtaatctcagcac

SEQ ID NO: 14102 - DNA, 80 bp, synthetic construct
  source 1..80: mol_type = other DNA
attccagtctcttccttttaccacaggccacaatagttcctcttgtctcatatcaagtcccctttactcatttatatcac

SEQ ID NO: 14103 - DNA, 80 bp, synthetic construct
  source 1..80: mol_type = other DNA
caagtgcgctgggaaatgcccaagtttcagcttgaatgatgctgtttacatgttcttacaggaaagactattatgggcca

SEQ ID NO: 14104 - DNA, 80 bp, synthetic construct
  source 1..80: mol_type = other DNA
tctaaatgacatgtgcaaccttcagagcctgactccttgctggaaagagagaaaggaggttttgttactgagaagcttat

SEQ ID NO: 14105 - DNA, 80 bp, synthetic construct
  source 1..80: mol_type = other DNA
cccctaataagccccggtgtgtgatgttcccctccctttgtccatgtgttgttattgttcagctctcacttatgaatgtt

SEQ ID NO: 14106 - DNA, 80 bp, synthetic construct
  source 1..80: mol_type = other DNA
ggagcagttttgaaaggcaaaaggaccatgactgaatgctgcatatctagaacatccaggaatgcagatgcccaggccaa

SEQ ID NO: 14107 - DNA, 80 bp, synthetic construct
  source 1..80: mol_type = other DNA
gctgtggaaagagttgatggtagtgttgtatataattgtgaaaattggcatagtggtgggcacataggggatgttcattc

SEQ ID NO: 14108 - DNA, 80 bp, synthetic construct
  source 1..80: mol_type = other DNA
gaggaaattgaatcatggggatggtttccaccttgctgttcttgtgaactatcttgtgatagtgagtgagttctcatgag

SEQ ID NO: 14109 - DNA, 80 bp, synthetic construct
  source 1..80: mol_type = other DNA
cggcatgttaggtggccaggtcgagtttgtcccatctgatgggttatgtacctattaaaataatatagaatcatgaaaaa

SEQ ID NO: 14110 - DNA, 80 bp, synthetic construct
  source 1..80: mol_type = other DNA
atttggcccacaggccttatcttgccatccccttgatataaacatgactgaaaaatttatattctaatagaccataagac

SEQ ID NO: 14111 - DNA, 80 bp, synthetic construct
  source 1..80: mol_type = other DNA
gtggcgtgttcgtgcaatggaatactatccagccttattaaaaaggaaatcctgccatagccacaacatgtatgaacttg

SEQ ID NO: 14112 - DNA, 80 bp, synthetic construct
  source 1..80: mol_type = other DNA
caagaaaaaagtctatatgtgttcagtacagacggctttttttttccccctcaagagttttcagttggagggtggttgaa

SEQ ID NO: 14113 - DNA, 80 bp, synthetic construct
  source 1..80: mol_type = other DNA
actctgagaacattccattagaataagatacgtttaataagagcaatggaaaatggtaaacctgacttggggaaagggaa

SEQ ID NO: 14114 - DNA, 80 bp, synthetic construct
  source 1..80: mol_type = other DNA
caaattataggggcacatatatatacagacaatcatgaaagtcccccccaccctgcctggctgctgacatttggtgataa

SEQ ID NO: 14115 - DNA, 80 bp, synthetic construct
  source 1..80: mol_type = other DNA
ggcaagttactaatctctccatgtctcaactttcttttctttaaaatggagatactagctgggcgcggtggctcatgcct

SEQ ID NO: 14116 - DNA, 80 bp, synthetic construct
  source 1..80: mol_type = other DNA
atgtcacagatacctggcagtgggcttaaagatgaagggtcttaacaaattgccttccagaatggccccactaagtcatg

SEQ ID NO: 14117 - DNA, 80 bp, synthetic construct
  source 1..80: mol_type = other DNA
acaccacatattccatccacactttttccttaagtcagcaccttgatgactggatcagagctacacacaaaattggaagt

SEQ ID NO: 14118 - DNA, 80 bp, synthetic construct
  source 1..80: mol_type = other DNA
gtttatggcatcaccaatgcctttctgtgatgcctgagcttttcaagaacatactcagaactttgtcttaagcctgtctt

SEQ ID NO: 14119 - DNA, 80 bp, synthetic construct
  source 1..80: mol_type = other DNA
ttgtgcaaatagtgtcttccttctggtcctcatgtttctcgtaaagctgacttccaactagaacagtctacctttctatt

SEQ ID NO: 14120 - DNA, 80 bp, synthetic construct
  source 1..80: mol_type = other DNA
ttgaaggacaagcaaggaagattggagcatctgtgaactatctccagttcagcattgcattagaaaaggaattacatcag

SEQ ID NO: 14121 - DNA, 80 bp, synthetic construct
  source 1..80: mol_type = other DNA
cttgtaattctaagcgcctttgaaaaatgctttcagaatcatccagtacttgagttgtagggggcctgaaaggtcatctt

SEQ ID NO: 14122 - DNA, 80 bp, synthetic construct
  source 1..80: mol_type = other DNA
aaaaaaagaaggaaaaacagagtagagcaggaagctctgtgtatgtatgcgcaggtaaggtcgtcaggtgggaggaggcc

SEQ ID NO: 14123 - DNA, 80 bp, synthetic construct
  source 1..80: mol_type = other DNA
ggaatgacacaggagctggcttgggctatatagtctctcactttgctgaacttccatttcctagtaagtaacttggatat

SEQ ID NO: 14124 - DNA, 80 bp, synthetic construct
  source 1..80: mol_type = other DNA
ccactgatgctaccttcgttttaacttcagttacagcctcctgctgtcccttgagttctttggggagtgttcttattttt

SEQ ID NO: 14125 - DNA, 80 bp, synthetic construct
  source 1..80: mol_type = other DNA
ttgtaactgtgtacaccacgtagttagtacacatggtgtcatgtaactaccaccacaatcaggagtactttcatcacccc

SEQ ID NO: 14126 - DNA, 80 bp, synthetic construct
  source 1..80: mol_type = other DNA
gaagtctggcccaggtgcaacagtgacagggcactcttcccaggtgatagcggttccttccatcctctttccatgacact

SEQ ID NO: 14127 - DNA, 80 bp, synthetic construct
  source 1..80: mol_type = other DNA
tgttctgtatattatggtagctactagccatgtgtggccattgagtgcttgaagtgtggcttgtgctaccaaggaactga

SEQ ID NO: 14128 - DNA, 80 bp, synthetic construct
  source 1..80: mol_type = other DNA
aaggtcagcaggtaaacaagtgaacaaaggtctctggttttcctaggcagaggaccctgcggccttccgcagcgtttgtg

SEQ ID NO: 14129 - DNA, 80 bp, synthetic construct
  source 1..80: mol_type = other DNA
gctggagaccagcccggccaacacagcgaaaccccgtctccaccaaaaaaatacaaaaaccagtcaggcgtggcggcgcg

SEQ ID NO: 14130 - DNA, 80 bp, synthetic construct
  source 1..80: mol_type = other DNA
aagtgtgagtttctgaagtcagagccaaatagggttctgtgcagcctgaagattatatatgaatgtttttaactttgggt

SEQ ID NO: 14131 - DNA, 80 bp, synthetic construct
  source 1..80: mol_type = other DNA
cattgtattaacagactttggttaatatttaagcatggaatctcacttgtgtgtgtgtgcatgtgtaaaacatctcttgg

SEQ ID NO: 14132 - DNA, 80 bp, synthetic construct
  source 1..80: mol_type = other DNA
tttgcaacttgtttctgtgtaattttgcagcctggttctgctcagttccagcaaggtgactgtcattaggcagatctctt

SEQ ID NO: 14133 - DNA, 80 bp, synthetic construct
  source 1..80: mol_type = other DNA
ctcatcttaacctgtattgccaggaacccagcagccttcccacatgaatcaagttcatgtttgttatctcaaagtgctcc

SEQ ID NO: 14134 - DNA, 80 bp, synthetic construct
  source 1..80: mol_type = other DNA
ttcagctgaacctaaggctaccaggagacagagggcatctgtggcctcccccagaaggctgtcctgaggttgtgcccatt

SEQ ID NO: 14135 - DNA, 80 bp, synthetic construct
  source 1..80: mol_type = other DNA
tgctttttcttattgcttctgctgatttcccactaggcttggatttggccatttgctggggttgggtgggtgggggggaa

SEQ ID NO: 14136 - DNA, 80 bp, synthetic construct
  source 1..80: mol_type = other DNA
tacatgctgcctcataggaaatggggtcccctgaggagaaggacaaaagcagacaattcctgaggacaagaggaagagga

SEQ ID NO: 14137 - DNA, 80 bp, synthetic construct
  source 1..80: mol_type = other DNA
aaaatgggtacgataatagggttgttgagatttggcaggtgataaatgctgaccaagtgtttgctgttgcagtagttgtt

SEQ ID NO: 14138 - DNA, 80 bp, synthetic construct
  source 1..80: mol_type = other DNA
agatggagtgagactccatcttaaaaaaaaaaaaaaaaaaaaaaagttgctgagttggctctccaagcctctttctcaga

SEQ ID NO: 14139 - DNA, 80 bp, synthetic construct
  source 1..80: mol_type = other DNA
ttttcagcagtttctcctgagaggtgtgaagctgagagttaagtagggttttgtaggtgtaacaataggcattttccttc

SEQ ID NO: 14140 - DNA, 80 bp, synthetic construct
  source 1..80: mol_type = other DNA
cttctttgtttagctctagtaaacagacatttagcatatacagatctgcacacttgacaaagaggaatttggagccctgg

SEQ ID NO: 14141 - DNA, 80 bp, synthetic construct
  source 1..80: mol_type = other DNA
aagaaactgagtggatgagatctctatttcatggggtcgttgcgagcattaagtgtgctagtgtttgtgaagagcttggg

SEQ ID NO: 14142 - DNA, 80 bp, synthetic construct
  source 1..80: mol_type = other DNA
gagctgcaggctacgtgtgacgtttaaaacatattctacataaactcatccatgatctattcatggtgtaatggatgtct

SEQ ID NO: 14143 - DNA, 80 bp, synthetic construct
  source 1..80: mol_type = other DNA
gtggtttccctcatggtacagaaacataaaccatacttgtttttgagatgtctgaccctgacaagactgggaaatagagc

SEQ ID NO: 14144 - DNA, 80 bp, synthetic construct
  source 1..80: mol_type = other DNA
cttggagacagcaattttgcaaagcagtaagaacctgggatttgaattatggtttagccacaagctagcttcctaagcac

SEQ ID NO: 14145 - DNA, 80 bp, synthetic construct
  source 1..80: mol_type = other DNA
gagctgggatacgctgggttttgattgtaaaggcatgcagctcagactctgttgtaaatggtgagtttttctttttttta

SEQ ID NO: 14146 - DNA, 80 bp, synthetic construct
  source 1..80: mol_type = other DNA
gtgaaatcagagagtgtttttggttttcttgaagctgcctttgacattttagcaacacagctgggagggtaaggtagaaa

SEQ ID NO: 14147 - DNA, 80 bp, synthetic construct
  source 1..80: mol_type = other DNA
ggacccaggaatccgtactctttcaaaaccactttattgagtgtaattgacagacagtaagccacacatatttaaagaat

SEQ ID NO: 14148 - DNA, 80 bp, synthetic construct
  source 1..80: mol_type = other DNA
ttcctctccctcctcttttcttcttagcccttccacctatcactcattcattgccccttcctaggttctgtattcatttg

SEQ ID NO: 14149 - DNA, 80 bp, synthetic construct
  source 1..80: mol_type = other DNA
acacaggaatttgggggcatacaattctgcttatcacaggtgctgagccctgagtgcagtgcttatgatagaaagatgag

SEQ ID NO: 14150 - DNA, 80 bp, synthetic construct
  source 1..80: mol_type = other DNA
cagggacaaattatgcttagtaatggattatcccaaacatgctttgtctgagtgtcctgaggccatggtgacaaaaagtt

SEQ ID NO: 14151 - DNA, 80 bp, synthetic construct
  source 1..80: mol_type = other DNA
gaaaaaattgctcctcccggctgctcccaaagcagttcttgtgggtctggccagggacccccctaaccctactttactaa

SEQ ID NO: 14152 - DNA, 80 bp, synthetic construct
  source 1..80: mol_type = other DNA
gccactgtcgctttctgtgtgatctccccatgccagtgtgccctgctgtgatttgccttttcacacagcacctcttcctt

SEQ ID NO: 14153 - DNA, 80 bp, synthetic construct
  source 1..80: mol_type = other DNA
agtcacaaggtaatgctaggatttataggaaatattaattcatagtgtgctcagtctgggtggacctgtgatgggacggg

SEQ ID NO: 14154 - DNA, 80 bp, synthetic construct
  source 1..80: mol_type = other DNA
caaagcctaaattggggataactctggcaagagaatgtttcaaggttcatctttgtgtccccagagcctggcatgtcata

SEQ ID NO: 14155 - DNA, 80 bp, synthetic construct
  source 1..80: mol_type = other DNA
gagcccagaacaggtacgatgtgttcctcatgaaaggttatgaggtttcagacataacagaggttctgaggatgcaaaga

SEQ ID NO: 14156 - DNA, 80 bp, synthetic construct
  source 1..80: mol_type = other DNA
gacacggtaaaaggagcggtggcaggcaaaaacttttaacaacaacagtaaaacctgttttataaaagccatatccgtgg

SEQ ID NO: 14157 - DNA, 80 bp, synthetic construct
  source 1..80: mol_type = other DNA
gcctctgttgactctgcttttcaatttgctataatttgaagggaaaaggttgttctggagtggctggcaggaataatgaa

SEQ ID NO: 14158 - DNA, 80 bp, synthetic construct
  source 1..80: mol_type = other DNA
gtagaaattatatttccatctctggggcttagctcaactgatatctcacctcttaaattgttttggccttcctctggcaa

SEQ ID NO: 14159 - DNA, 80 bp, synthetic construct
  source 1..80: mol_type = other DNA
cttgcttgttgtagttctagtgtctggttcagggtctagcaaatagtaggtgcttaacaagtaggtatcgactgggtggc

SEQ ID NO: 14160 - DNA, 80 bp, synthetic construct
  source 1..80: mol_type = other DNA
ttttgaagacttaggactggaccagctaagggctgtaaacaagcatttccctcccttggcaggaagtgcttaatgtcttt

SEQ ID NO: 14161 - DNA, 80 bp, synthetic construct
  source 1..80: mol_type = other DNA
ttgctgacatcgtgacgattttaaagctgcatctgaccatttccttttcacaaagtggttctcacttctgcctctagaag

SEQ ID NO: 14162 - DNA, 80 bp, synthetic construct
  source 1..80: mol_type = other DNA
tcctttggatttgcggtatcaccaattcggcaggagatgcagtgaagctacacccagctagacccatttagctacaccca

SEQ ID NO: 14163 - DNA, 80 bp, synthetic construct
  source 1..80: mol_type = other DNA
tttggggtctttcagataatttaaaaaaacccaataccctaaacctccccaaacctaattctcaccctcagggcctaagt

SEQ ID NO: 14164 - DNA, 80 bp, synthetic construct
  source 1..80: mol_type = other DNA
agatgctaagctctaccatgggatagttgtaaaaccttgaatgcaaagcttgaatacaattgaggagcagagatggggta

SEQ ID NO: 14165 - DNA, 80 bp, synthetic construct
  source 1..80: mol_type = other DNA
gagcatatttcagaacctgtcctagtctcaatttcttggtaaggtgagactataaccacttttaatgggtccacaaggcc

SEQ ID NO: 14166 - DNA, 80 bp, synthetic construct
  source 1..80: mol_type = other DNA
gctctccaatggcagaacagggtagtcttgacagagaccatgtggtctgcaaagacaaagcctctttatagaaaaagtct

SEQ ID NO: 14167 - DNA, 80 bp, synthetic construct
  source 1..80: mol_type = other DNA
ttacaaatggtttaaacaatagcaaatgtttatcatcccacattagaagaagtctggagctaggtggccccaggacgagc

SEQ ID NO: 14168 - DNA, 80 bp, synthetic construct
  source 1..80: mol_type = other DNA
ggcatattatggagtttttcctcctaaaatcagttttgcggccctcatagaacaacccttgaggggggttgtatatataa

SEQ ID NO: 14169 - DNA, 80 bp, synthetic construct
  source 1..80: mol_type = other DNA
aacacaaaacagactaagcagacttctgggttgaactcaatggaaacttcttgttctaaccttatgatctctgagcagca

SEQ ID NO: 14170 - DNA, 80 bp, synthetic construct
  source 1..80: mol_type = other DNA
tctgccagggtgttctcggcatctcaaacttagcattttcgataggttttattgctagtgttgtttttgttctctctgaa

SEQ ID NO: 14171 - DNA, 80 bp, synthetic construct
  source 1..80: mol_type = other DNA
atctttcataccaggagagacagtaaaatcctgggtttcctttgtggagccttaagttcatctaactcagtagtttccaa

SEQ ID NO: 14172 - DNA, 80 bp, synthetic construct
  source 1..80: mol_type = other DNA
gtatattgggggtgtggtggatggcataggggataactcagtctaatgaaagacatcaatgtgccattgggaaaggacag

SEQ ID NO: 14173 - DNA, 80 bp, synthetic construct
  source 1..80: mol_type = other DNA
catagacatactgctggatggtttttcataaagtgatgaagtgcataccctgtggaaccctagtcaagaagcacgtcatc

SEQ ID NO: 14174 - DNA, 80 bp, synthetic construct
  source 1..80: mol_type = other DNA
atgaaatctttctgcttttgtagtgccaggtggtacaagcagagttgcactttctgctgaggagacttgatttcttatga

SEQ ID NO: 14175 - DNA, 80 bp, synthetic construct
  source 1..80: mol_type = other DNA
ggtgacagcacctgctccccttctccatccctgaaggaagacagcttagaggttgatggatcgaatatcttgcattttag

SEQ ID NO: 14176 - DNA, 80 bp, synthetic construct
  source 1..80: mol_type = other DNA
agaacctgggctttatcttgactgtgtttaatgactcagcacaaatctagagacatgaccaagaggcagctttgagcagc

SEQ ID NO: 14177 - DNA, 80 bp, synthetic construct
  source 1..80: mol_type = other DNA
tttccatctctccctgcagtttttcttttgctgacacctgtttctgaaaaatcttgggtgtctggctgtggggagctgca

SEQ ID NO: 14178 - DNA, 80 bp, synthetic construct
  source 1..80: mol_type = other DNA
gaagacctaacctacgtgtctctcaacaggagagtggatggaggaattattttgacaaaacctgtgggtatgcaggttta

SEQ ID NO: 14179 - DNA, 80 bp, synthetic construct
  source 1..80: mol_type = other DNA
ccgaatatggattttggtgtccctagtcaagatttgttctgctgacttctcctggggaaagaggtgtcacgtctgcctga

SEQ ID NO: 14180 - DNA, 80 bp, synthetic construct
  source 1..80: mol_type = other DNA
ctgaggggtaacaacctcatcttgccaacagagccctccttggccatttcacaattcaagaagcattttctaggaagcct

SEQ ID NO: 14181 - DNA, 80 bp, synthetic construct
  source 1..80: mol_type = other DNA
ccccaagtgcttgaagggaaaggtgaacacagtcgggatgacaaagttaggaggcgtgtgtttttcttcccggtgacgtt

SEQ ID NO: 14182 - DNA, 80 bp, synthetic construct
  source 1..80: mol_type = other DNA
tgaccctatgtgagatcaagagtcagggcagagtaatggcgacagctcacatttactgagtgctaaccacaatctcactt

SEQ ID NO: 14183 - DNA, 80 bp, synthetic construct
  source 1..80: mol_type = other DNA
cagttctgctacttcttgggaaaagacatttttaagaagatcaatagtgttgcaagaggactaggggtctgctttctcct

SEQ ID NO: 14184 - DNA, 80 bp, synthetic construct
  source 1..80: mol_type = other DNA
atacccactcacatgaagtctgcattccaacgggagatgagacagagcctggcaggaagcaatgagcagaataactcaga

SEQ ID NO: 14185 - DNA, 80 bp, synthetic construct
  source 1..80: mol_type = other DNA
tttatgggaatacagccatgctcatttgtctacatactgtctctgtgacccagagaccctatctggccctttgcagaaaa

SEQ ID NO: 14186 - DNA, 80 bp, synthetic construct
  source 1..80: mol_type = other DNA
agtggtggtggcaatggctacatttagtggcacctatgaggtgctaggtattttgcatatggtgctaatccttaacagag

SEQ ID NO: 14187 - DNA, 80 bp, synthetic construct
  source 1..80: mol_type = other DNA
acatttcagacactcatagctgagaactgtggcacagggaactttctggggtcaggagaactgtgtctttgctccccagt

SEQ ID NO: 14188 - DNA, 80 bp, synthetic construct
  source 1..80: mol_type = other DNA
gggttggagaaagtaccctacaggctgaggtcacctcaatacacttggctggagtcatgttgcttctgaaaaggcttgag

SEQ ID NO: 14189 - DNA, 80 bp, synthetic construct
  source 1..80: mol_type = other DNA
tcatagtcgaaagaccccgcttcatgacatagtttgggtttctaacaaatgtggtcccctgcattagcataatgctgact

SEQ ID NO: 14190 - DNA, 80 bp, synthetic construct
  source 1..80: mol_type = other DNA
agactacctctcaggaaccagggacaaaagccagtcagattctttattatacagtgacaagttggggcctatgcaaagac

SEQ ID NO: 14191 - DNA, 80 bp, synthetic construct
  source 1..80: mol_type = other DNA
tttcagtcaacttttccaagcgtgtgtgtgtctcttcaggtcctttttagaagacgtagacagggcagaaataacaagtc

SEQ ID NO: 14192 - DNA, 80 bp, synthetic construct
  source 1..80: mol_type = other DNA
tctccacaccggttcatttcagcccctgccttgaaaacacaaacaccactctcagaaacagcaaaggcaacaagaataac

SEQ ID NO: 14193 - DNA, 80 bp, synthetic construct
  source 1..80: mol_type = other DNA
ttctccatgcaacctctcctacctgcctggctacaaccccagctgtcttgctcatctttgctctttgatgcatggaatga

SEQ ID NO: 14194 - DNA, 80 bp, synthetic construct
  source 1..80: mol_type = other DNA
tggcacgtagaggttgaatgagtccatgaaaatgtgctgcatgcgttgagagaatggatctgtaagctgatgtgcagttc

SEQ ID NO: 14195 - DNA, 80 bp, synthetic construct
  source 1..80: mol_type = other DNA
aacaccacacatttagtatcttaccgttctggagatcggaagtctgacgcactctcagtgagttaaagtcaaggcatcag

SEQ ID NO: 14196 - DNA, 80 bp, synthetic construct
  source 1..80: mol_type = other DNA
ccttggcctgcacccactagctgccagtagcacctctccacccagtggtgacaattaaaaatgtctccagacattgccaa

SEQ ID NO: 14197 - DNA, 80 bp, synthetic construct
  source 1..80: mol_type = other DNA
gtccttaatgcagctgactcgttcacctaaataatggttaaactggtacattttatgttatgcatattttgccatatgca

SEQ ID NO: 14198 - DNA, 80 bp, synthetic construct
  source 1..80: mol_type = other DNA
tctttgatcctctgagaatttctcttgtattcagggcacccaaaatggtggtttacagagagaatagcaagagccagggc

SEQ ID NO: 14199 - DNA, 80 bp, synthetic construct
  source 1..80: mol_type = other DNA
tatgaccttgctttccaggatagcttggatgacagttaagaatccccagttctgtgcctacttttaaacacatgctacct

SEQ ID NO: 14200 - DNA, 80 bp, synthetic construct
  source 1..80: mol_type = other DNA
ctagcctccagctggggaaggagactctccacagaaagcaagaggacaaaacgagggccatgaggggccatgggcacctg

SEQ ID NO: 14201 - DNA, 80 bp, synthetic construct
  source 1..80: mol_type = other DNA
taacttctcccctttcttcctggagcctgtgggtcctgccctcagggggcagcccaggctttgggagctgagagtcaggt

SEQ ID NO: 14202 - DNA, 80 bp, synthetic construct
  source 1..80: mol_type = other DNA
ctctgctggccacatgacaagttactttatcctgctgagcctgtttccccagctgtaacactgtctgtgaacccagtcat

SEQ ID NO: 14203 - DNA, 80 bp, synthetic construct
  source 1..80: mol_type = other DNA
cagccagatgtgaaggccacttcctcagagaagcctcttttgactcctgaatttaaatgagctccagaccagagtctctc

SEQ ID NO: 14204 - DNA, 80 bp, synthetic construct
  source 1..80: mol_type = other DNA
gcagaaaagcttttgctggcatagctggttactgtagaactgtcccgtttctgctatggttcacacgccagcaacgcaga

SEQ ID NO: 14205 - DNA, 80 bp, synthetic construct
  source 1..80: mol_type = other DNA
agcactttgggaggctgaagcaggcagattacctgaagtcaggagttagagaccagcctggccaacacggggaaacccta

SEQ ID NO: 14206 - DNA, 80 bp, synthetic construct
  source 1..80: mol_type = other DNA
tctgccttcagccctgccctggacagtcatagaccatctctacctagcagccagggtgatttttgaaaaatgaaaactgg

SEQ ID NO: 14207 - DNA, 80 bp, synthetic construct
  source 1..80: mol_type = other DNA
atagtgctgtttatttaatgttcttacccataactccgtctgaagccatcttttcgtttacttgtgtattttctgtctcc

SEQ ID NO: 14208 - DNA, 80 bp, synthetic construct
  source 1..80: mol_type = other DNA
gagcatgggagaccaactgaaattaagatgagatgacaaatcaagaaagttccacagggtatggagcaggttgctgagct

SEQ ID NO: 14209 - DNA, 80 bp, synthetic construct
  source 1..80: mol_type = other DNA
ttgattattccactgtttggcaatatttctgtaggaactgtccaaaagctatataataaatcaaggccccctccccaccc

SEQ ID NO: 14210 - DNA, 80 bp, synthetic construct
  source 1..80: mol_type = other DNA
ctgcgcccagcctgcgcatgttctttaaaccagacactggctaacagatacttgttaagctcctcctctgtgctaggcat

SEQ ID NO: 14211 - DNA, 80 bp, synthetic construct
  source 1..80: mol_type = other DNA
tccttgaaaggacgtgtgtcatctagaagcctgcagccccgagtcctaacaatggttacccccagggaaggcgtgaaggt

SEQ ID NO: 14212 - DNA, 80 bp, synthetic construct
  source 1..80: mol_type = other DNA
ggctgtagactcatcagccctatccctgtcttcaccttcactcggtcttctacctgtgtgaatgtctgtctctaagtttc

SEQ ID NO: 14213 - DNA, 80 bp, synthetic construct
  source 1..80: mol_type = other DNA
cacaggaatgtctgtgggaggagcaattgttttccaggccatgttgcagctttttcaatctccctgtttgttattggtta

SEQ ID NO: 14214 - DNA, 80 bp, synthetic construct
  source 1..80: mol_type = other DNA
gagatgctaggaaaacacttttaatggtctctgcctagactctgtttacggaatttatttgccagagctcaggccattca

SEQ ID NO: 14215 - DNA, 80 bp, synthetic construct
  source 1..80: mol_type = other DNA
aaggaagatgtaaaatcctgaagcattttgagtactgctttgttttttttctttcctgtttgacgattgatgctgaacca

SEQ ID NO: 14216 - DNA, 80 bp, synthetic construct
  source 1..80: mol_type = other DNA
gtcttcttgggggaactgtgaccctttctcgtaaagctgttctgtctctgatcctggtgaacatcaccagcttcctctag

SEQ ID NO: 14217 - DNA, 80 bp, synthetic construct
  source 1..80: mol_type = other DNA
tggaaatgtggactgagaacagctgtcgcatgtcagttccgaagtagccgcttttatcagaaacggtttagagagagatt

SEQ ID NO: 14218 - DNA, 80 bp, synthetic construct
  source 1..80: mol_type = other DNA
tctttatttactgactctcggcagacttagaggtcctgaaaggcaccccccaacgccctcatctcattcatccttctgcc

SEQ ID NO: 14219 - DNA, 80 bp, synthetic construct
  source 1..80: mol_type = other DNA
ggcttccaggctatatgagatgcagttcctccttctccaaattcttattaacccactgtgtacggcgtttctcaagtatc

SEQ ID NO: 14220 - DNA, 80 bp, synthetic construct
  source 1..80: mol_type = other DNA
gagcttcccacccctggcagtcccctgccctcctcccttggccagccagccacaagacccacccttccttccttccttcc

SEQ ID NO: 14221 - DNA, 80 bp, synthetic construct
  source 1..80: mol_type = other DNA
aatagcgtgttttccaagttatggtgtcaaatctctgctcttctatttaggagctgtttgactttttttttttttttaaa

SEQ ID NO: 14222 - DNA, 80 bp, synthetic construct
  source 1..80: mol_type = other DNA
gcccgtgtggagggtattgcatagaatctttctcctaggaactgacggaagtaagtcttacggagattagactgatttgc

SEQ ID NO: 14223 - DNA, 80 bp, synthetic construct
  source 1..80: mol_type = other DNA
ggcaatggggtgttgtggagagtgtcccaggctggaaccagatggcctgaattctaccacagtccccacttaccagccct

SEQ ID NO: 14224 - DNA, 80 bp, synthetic construct
  source 1..80: mol_type = other DNA
agcgctgttgctttgctcttctccatccttgtccaaaaaaggagttcgctccattaagaggtataaataggagtgctggg

SEQ ID NO: 14225 - DNA, 80 bp, synthetic construct
  source 1..80: mol_type = other DNA
ccaccacttcctacgcttgaggaaggaagaggaggaaggcctcctatcatcctcagaaccaccacctgcctttggtggtt

SEQ ID NO: 14226 - DNA, 80 bp, synthetic construct
  source 1..80: mol_type = other DNA
tcacagctcacattttatttggaatctggtgttttcagaatgtcaccacctcttgctttgcgtttcccgatggaaacatt

SEQ ID NO: 14227 - DNA, 80 bp, synthetic construct
  source 1..80: mol_type = other DNA
tatgtctttatcaagcagagtgaggatggactaagacactattataggtggtaggtaaaaaccatgacagcagctcatga

SEQ ID NO: 14228 - DNA, 80 bp, synthetic construct
  source 1..80: mol_type = other DNA
atgatccaagatggcagatagagctccagccacaatattcttgttccaaagaagtagaaaaagataagagggaaagggta

SEQ ID NO: 14229 - DNA, 80 bp, synthetic construct
  source 1..80: mol_type = other DNA
ctgggatttgggttcatgtgggtatgaaatgcccttttcactttttgggaattgggatgctagaccatggaaagaatgtt

SEQ ID NO: 14230 - DNA, 80 bp, synthetic construct
  source 1..80: mol_type = other DNA
ctcatagtgtacattagatctctagacttatcctacataactgcaactttgtgccctacatctccttttttttttttttt

SEQ ID NO: 14231 - DNA, 80 bp, synthetic construct
  source 1..80: mol_type = other DNA
tagttgttatactgtattgtttagggaataatgacaaaaaaatacaaagtctgtacatgttcagtgcagacacaacaatc

SEQ ID NO: 14232 - DNA, 80 bp, synthetic construct
  source 1..80: mol_type = other DNA
aagaaccctgatctggaggatcaagactgggtcatgcatacattgcattagacagcgacacctaatgaacaacaatggta

SEQ ID NO: 14233 - DNA, 80 bp, synthetic construct
  source 1..80: mol_type = other DNA
tcaaagaaggcagggaatgtctttgcccaccaaagaacagcatgtgtgtgaggcccatgctagggaagaaaaaattctta

SEQ ID NO: 14234 - DNA, 80 bp, synthetic construct
  source 1..80: mol_type = other DNA
cccggctggtttccccattgtgcagtggggagggagaaaggggccagcttgcctgagttcctggagcacgagtgagagtc

SEQ ID NO: 14235 - DNA, 80 bp, synthetic construct
  source 1..80: mol_type = other DNA
acatatgaatttggggacaacacagttcagttcataacacaccctgagccccctccactgtttggagtcccctaggtcac

SEQ ID NO: 14236 - DNA, 80 bp, synthetic construct
  source 1..80: mol_type = other DNA
tgctgtgggagggtaatttttgttaagatgaactaagttgggactgcatctcacacagtggcctttgtataaattcgctt

SEQ ID NO: 14237 - DNA, 80 bp, synthetic construct
  source 1..80: mol_type = other DNA
gagtgggaagagcctgtgtgagtggaaggagcctgtgtgagtgggaaaagtctgtatgagtgggaggagcctgtgtgaga

SEQ ID NO: 14238 - DNA, 80 bp, synthetic construct
  source 1..80: mol_type = other DNA
cagaccaggacttgtgctccaattctatgttgaaggtgagggaagaagttaattaagcaatcagccaagcggatttcaaa

SEQ ID NO: 14239 - DNA, 80 bp, synthetic construct
  source 1..80: mol_type = other DNA
cattctgcatttcaggtcaccaccttgagatacgaacacgtgcttttgagatttggggaccttaattcctctgggaaact

SEQ ID NO: 14240 - DNA, 80 bp, synthetic construct
  source 1..80: mol_type = other DNA
aggagctgtgctaagtgccttgattgatctgtaccttctagataggtcatactattattatttctattctaggaccaggg

SEQ ID NO: 14241 - DNA, 80 bp, synthetic construct
  source 1..80: mol_type = other DNA
ttcagggtatccttttggctcccagggcttaaccccaagattgaaggacatctgtgagctttgcttccagaatggaaatt

SEQ ID NO: 14242 - DNA, 80 bp, synthetic construct
  source 1..80: mol_type = other DNA
gcaagcagtggtattgcatgctgacaaattgattgtgctcttttacttagataaaaatgaaaatgcatgaggcatgttgc

SEQ ID NO: 14243 - DNA, 80 bp, synthetic construct
  source 1..80: mol_type = other DNA
tgtgaaatgcaattccaacaccctattaaagccaagcatttacttctggaccccggggactttaagacacacccttaagg

SEQ ID NO: 14244 - DNA, 80 bp, synthetic construct
  source 1..80: mol_type = other DNA
gcctggtacgcaggaagcacctcattcatgtcagttgctattgtttccattattgttattataatacatcaggtggcaaa

SEQ ID NO: 14245 - DNA, 80 bp, synthetic construct
  source 1..80: mol_type = other DNA
tttcctgaaatgaaagccagggctccttggcgcccctcagagccccaggcctctgcgaaatgctgcctttaaactcatgc

SEQ ID NO: 14246 - DNA, 80 bp, synthetic construct
  source 1..80: mol_type = other DNA
tggcctccctgtcacagtgatctgtttgttggtttgttcaatcattcattcattttagataaacacctgtgctcctgcct

SEQ ID NO: 14247 - DNA, 80 bp, synthetic construct
  source 1..80: mol_type = other DNA
ctttgcccattcccactgcaaggagatatctaaattgtttgccttttttgtccttggtgatagaggtcactgccggactc

SEQ ID NO: 14248 - DNA, 80 bp, synthetic construct
  source 1..80: mol_type = other DNA
agttaaataaaataaaataaaccttcagttggtggagagatggttccaggcatccctttggacacccccctccttccacc

SEQ ID NO: 14249 - DNA, 80 bp, synthetic construct
  source 1..80: mol_type = other DNA
gctttggtgctaatggagagtcaaggttcctttttcaccagctacctcctatctcctttctcagtcatcggagaagtaaa

SEQ ID NO: 14250 - DNA, 80 bp, synthetic construct
  source 1..80: mol_type = other DNA
aggcttattactcagcaccaataaattgcaagggactgaaacccaactcaaactaacttaagggttagaggaagtctgtt

SEQ ID NO: 14251 - DNA, 80 bp, synthetic construct
  source 1..80: mol_type = other DNA
ctcccaggtggaatattttgagagttactgaaatgtgacacagacaggaagttcgcacatgctgttggggaaatgaaaat

SEQ ID NO: 14252 - DNA, 80 bp, synthetic construct
  source 1..80: mol_type = other DNA
tgcatgtgtcttagcatgtggattttcagccagttacattcattaccaaggaagtgtacttgctggtacagtttggatat

SEQ ID NO: 14253 - DNA, 80 bp, synthetic construct
  source 1..80: mol_type = other DNA
gttatgtggcttctctttccagtgttatccatgaatgtgcctccctctcacactggccagtgagcaaactgctaaggaca

SEQ ID NO: 14254 - DNA, 80 bp, synthetic construct
  source 1..80: mol_type = other DNA
aagagagtttgttgagtgaatgaaggacccaaaatagcaaagttagaatggctggatgatttgtggatacttaggggccg

SEQ ID NO: 14255 - DNA, 80 bp, synthetic construct
  source 1..80: mol_type = other DNA
ttccaagctggatttcaacaacattgccagcttctgttgaaacagatccgaaagggtccactccaagcatgtatcgtaga

SEQ ID NO: 14256 - DNA, 80 bp, synthetic construct
  source 1..80: mol_type = other DNA
ttgacattttattactgtcatttgagatcttgtctgttcacccacacacactcctgctgacctctccaatctgagtccaa

SEQ ID NO: 14257 - DNA, 80 bp, synthetic construct
  source 1..80: mol_type = other DNA
tccctaaaggaaagggagatggaacagaccaaattatcacatccataacgatgagaaatggggtttattaatgtgccagc

SEQ ID NO: 14258 - DNA, 80 bp, synthetic construct
  source 1..80: mol_type = other DNA
tagtgcctaactggaaaagtcagggttttcataatttgaagcatcctaagactgggcttttctccagttgggcaaaaatg

SEQ ID NO: 14259 - DNA, 80 bp, synthetic construct
  source 1..80: mol_type = other DNA
gggttagaagactgaggaataaactcactgcttacaaaactcccactacagactttgattaggaatgcaaaattgtctga

SEQ ID NO: 14260 - DNA, 80 bp, synthetic construct
  source 1..80: mol_type = other DNA
aaagtcagtaagtcccaaatgcactcaggactttctcccaggaccccaaagctaccagccctgagacattacctgttcca

SEQ ID NO: 14261 - DNA, 80 bp, synthetic construct
  source 1..80: mol_type = other DNA
gtatttgtttgaactggtctggctaaggtccacacgttgtgatctgttgatgttttcttgactctaggctcccccataac

SEQ ID NO: 14262 - DNA, 80 bp, synthetic construct
  source 1..80: mol_type = other DNA
ctgtctgatatgacgcagggttctgggctcatcttgtactagatccattgtttctcagaggagctgtgattccttttact

SEQ ID NO: 14263 - DNA, 80 bp, synthetic construct
  source 1..80: mol_type = other DNA
aaacaactggagcaggttaaaggaggttgggagtttggatatggggaggctggttgtatcatgaagtaggatggtcagca

SEQ ID NO: 14264 - DNA, 80 bp, synthetic construct
  source 1..80: mol_type = other DNA
gtgtggaaggtgtattctctgatggattggggatgagagaagagttaaggaagacttcaaagttttgacctgaacaaatg

SEQ ID NO: 14265 - DNA, 80 bp, synthetic construct
  source 1..80: mol_type = other DNA
agctgttttttggaaaggaaatgtgagtctggctcctgtgtcagcacgtcaaatgctcttcacatctaccctaatgaagc

SEQ ID NO: 14266 - DNA, 80 bp, synthetic construct
  source 1..80: mol_type = other DNA
atttactagactgcagggggagtttggcctttggtgttggttatcaagggtcttccaggaacctgagaaagacttttctc

SEQ ID NO: 14267 - DNA, 80 bp, synthetic construct
  source 1..80: mol_type = other DNA
acaggcatgagccactgaggcccacacagtattagttcacctcaaaatatagtggcttgaaacaacagtcaacctttatt

SEQ ID NO: 14268 - DNA, 80 bp, synthetic construct
  source 1..80: mol_type = other DNA
tgcctgaccatttgaaattttattgtgaaatgatccactctgcctcactgggggctaagtattctgcttctcttgtttat

SEQ ID NO: 14269 - DNA, 80 bp, synthetic construct
  source 1..80: mol_type = other DNA
gcagcagaactgccctttataaaaccatcagatcgggccaggtgcagtggctcagcctgtaatcctgtaatcccagcact

SEQ ID NO: 14270 - DNA, 80 bp, synthetic construct
  source 1..80: mol_type = other DNA
actttcattctccacccaatgtggacaggagtccattcttccctcccttctcaggttccatcccatctattgccctaagt

SEQ ID NO: 14271 - DNA, 80 bp, synthetic construct
  source 1..80: mol_type = other DNA
tttctaaacctagggccggcttctttgaaaacgtggcaggttcttaaaagcatctgaaggaaatgtgtcttcatagccag

SEQ ID NO: 14272 - DNA, 80 bp, synthetic construct
  source 1..80: mol_type = other DNA
gtaaaattctgggttgttggcacactcttacttgctgcttacgtttgctggttaagctggtttaagctttctcccaccag

SEQ ID NO: 14273 - DNA, 80 bp, synthetic construct
  source 1..80: mol_type = other DNA
tgtgctgtattggaacctcttagacccttagtttcttcatctgcaaatcgggactaataatacctaccatgtagatataa

SEQ ID NO: 14274 - DNA, 80 bp, synthetic construct
  source 1..80: mol_type = other DNA
gccaccttaaagcatctcaggaattcatctctcgagtcaaatcatcaagaagtgcccagtccctcaaggctcatcttgat

SEQ ID NO: 14275 - DNA, 80 bp, synthetic construct
  source 1..80: mol_type = other DNA
tttccttcctcttttgaaatagctgtacttttggacagaggctgacaaatccttgggtggtggattttgaaatggttata

SEQ ID NO: 14276 - DNA, 80 bp, synthetic construct
  source 1..80: mol_type = other DNA
ttaggcagaatatgaagttactccagatgaaaaactgggagagaaagggaaggaaattatgaccaagtacctcaccccaa

SEQ ID NO: 14277 - DNA, 80 bp, synthetic construct
  source 1..80: mol_type = other DNA
cagtggttctgcccacttggtcaagccacattccctccctgggcctctgtttccctttcttaaaagtggccttcctgtca

SEQ ID NO: 14278 - DNA, 80 bp, synthetic construct
  source 1..80: mol_type = other DNA
agattgccctatttacagacaggccactgaggccacagagctgaatagcgtgagaggccactctgctgaaggggtcttca

SEQ ID NO: 14279 - DNA, 80 bp, synthetic construct
  source 1..80: mol_type = other DNA
gccttgggtcagctgtttccctacaataaactttgcactgctttcccagttcttcccataacagcttgctctggagcctc

SEQ ID NO: 14280 - DNA, 80 bp, synthetic construct
  source 1..80: mol_type = other DNA
ctagcatctgatgcgtagaggccatggatgccgttgaacattctagagtgcacatggcagcttcctacccagagttacct

SEQ ID NO: 14281 - DNA, 80 bp, synthetic construct
  source 1..80: mol_type = other DNA
gctcacatcctgaggtgtctgccatcttaaaattgctggaagccaggatagaaagcccctgcctaagcaatgcctatgcc

SEQ ID NO: 14282 - DNA, 80 bp, synthetic construct
  source 1..80: mol_type = other DNA
gagggatgaaggaggcacagaagcttttaagtgcttgacccagaagcaacactcatcacttcctctcgcagtccatggcc

SEQ ID NO: 14283 - DNA, 80 bp, synthetic construct
  source 1..80: mol_type = other DNA
aatcttataaccatcactgctttctgattccagggcattttatcaccccaagaagaaactgttgtacctgttagcagtca

SEQ ID NO: 14284 - DNA, 80 bp, synthetic construct
  source 1..80: mol_type = other DNA
ttcccaccagcagggttccagttttgccaaaacctcatcaacacttgctattttctgtgttttttattttatccatctta

SEQ ID NO: 14285 - DNA, 80 bp, synthetic construct
  source 1..80: mol_type = other DNA
acttcctggcagctccccaagatgggtattagtgtacccattttacagatcaggtaactgagatttgggaagagaagagg

SEQ ID NO: 14286 - DNA, 80 bp, synthetic construct
  source 1..80: mol_type = other DNA
aaattaagattaaatccaagctagatactctattgtctgcctgaggttctgagcctgaaggctttgtccttgtcatttta

SEQ ID NO: 14287 - DNA, 80 bp, synthetic construct
  source 1..80: mol_type = other DNA
acttcatattccatgttttgctaagtcctcatcacagccatataaaataacaagaagtggaggctcactcaggatgggcg

SEQ ID NO: 14288 - DNA, 80 bp, synthetic construct
  source 1..80: mol_type = other DNA
cctatgtagtagacactattgtccttgttttacccaggcagtcagagttctttagctcataatggtaaaacaggggaatt

SEQ ID NO: 14289 - DNA, 80 bp, synthetic construct
  source 1..80: mol_type = other DNA
cgtgggagggagggagtagggagttgctgcttaacaggtacagagtgtctgttgggatgataaatatttttggaacaaga

SEQ ID NO: 14290 - DNA, 80 bp, synthetic construct
  source 1..80: mol_type = other DNA
ctcgtaggagattcctgccccctgccccccaacccctttattttgcagcccgaagggatgaagtcttcactggagaaaaa

SEQ ID NO: 14291 - DNA, 80 bp, synthetic construct
  source 1..80: mol_type = other DNA
tgatcctcagtgcaaccctaccatctgaaaggggtctagaaaagtgtcagttctgccattaggaaaagtgaattcatcca

SEQ ID NO: 14292 - DNA, 80 bp, synthetic construct
  source 1..80: mol_type = other DNA
tgagaaggagaaaagaaatcacaacaaattactgagggcttggagattcatatccttttcatctgtgacctcaatttccc

SEQ ID NO: 14293 - DNA, 80 bp, synthetic construct
  source 1..80: mol_type = other DNA
tctctggttgtgaccgtatgagcatgtttaattgcaagccagggtttagggttggaacagcccccattcgccccaccacc

SEQ ID NO: 14294 - DNA, 80 bp, synthetic construct
  source 1..80: mol_type = other DNA
atctgtgaccccggaacagtaagcccccacctcacagtgttgttctggagagcaacaggagtaaaaatttatgagaaaac

SEQ ID NO: 14295 - DNA, 80 bp, synthetic construct
  source 1..80: mol_type = other DNA
tacttaacttctgagcctatttctgcgcctgtgaagtgaggacagtaagaataataaaacctatcttaagaagatcaaac

SEQ ID NO: 14296 - DNA, 80 bp, synthetic construct
  source 1..80: mol_type = other DNA
atcttagatgtggttatgtcagaagcaggtcctaaagaactgggtggggtttggacatgccatgaaggggtgggaaggaa

SEQ ID NO: 14297 - DNA, 80 bp, synthetic construct
  source 1..80: mol_type = other DNA
ttaatacagggagatgctttgggaaccagagcctcaaacatctggagtttcgcactgatgcaggaaatgatgtcccttcc

SEQ ID NO: 14298 - DNA, 80 bp, synthetic construct
  source 1..80: mol_type = other DNA
gtgtctgaaatactccagatcattcctgcttcaggttaagcacagatggcgcctgtgaagcggcagttgacctgggaggg

SEQ ID NO: 14299 - DNA, 80 bp, synthetic construct
  source 1..80: mol_type = other DNA
tccaggtgaagggggcttttatacagaagaaccagctcacagagcaggcagagtgcccccagcttcaaggttacctctgt

SEQ ID NO: 14300 - DNA, 80 bp, synthetic construct
  source 1..80: mol_type = other DNA
ggccttgaggccctcacgcttggatttctgtatggttagacattcaaggggcatctttgatgggggaagcgtggcacccc

SEQ ID NO: 14301 - DNA, 80 bp, synthetic construct
  source 1..80: mol_type = other DNA
agttcagttggctgtccctgcctgcaggtaggagggtcaaattctgctttgccccttattccgtcttctataaagccttt

SEQ ID NO: 14302 - DNA, 80 bp, synthetic construct
  source 1..80: mol_type = other DNA
ttcatcttttaattctacccctgcccagcaccaggctgtgcctgtggtgggtaagggtgggtccttcctaggtggaaaca

SEQ ID NO: 14303 - DNA, 80 bp, synthetic construct
  source 1..80: mol_type = other DNA
ggatttggacattcagaaccgtggggaacagaaaacaagccactgattccattcaccaaggacaggccagctgctgcctc

SEQ ID NO: 14304 - DNA, 80 bp, synthetic construct
  source 1..80: mol_type = other DNA
gcttttattgatttgctccaagagaaactcctattcctgattgtcttcctgacaagagtgaggctgagcagttaagacca

SEQ ID NO: 14305 - DNA, 80 bp, synthetic construct
  source 1..80: mol_type = other DNA
ctgacagcttcagccaagttataccaactgtttgtatacttcccacgaagagaaaaagatatcaaggtgccaagtccaaa

SEQ ID NO: 14306 - DNA, 80 bp, synthetic construct
  source 1..80: mol_type = other DNA
accagtgaattccaatgcatgcataaaaaaactcccagtggctttgctagtccaagaccagatccagagctgcggttctg

SEQ ID NO: 14307 - DNA, 80 bp, synthetic construct
  source 1..80: mol_type = other DNA
aagagctgccatattccttggaatagttgcacatccttgatttaatccagtgccctgttgatggatattgagttggttct

SEQ ID NO: 14308 - DNA, 80 bp, synthetic construct
  source 1..80: mol_type = other DNA
cccttccctgcctgcttccagaaatccagcagaaaacccttggctctgcggccatggatgggtggtttctctccacctga

SEQ ID NO: 14309 - DNA, 80 bp, synthetic construct
  source 1..80: mol_type = other DNA
tcatcagcatcactgctgttatcaatatcccaccgccatcatcagcatcaccgccatcatcagtatcaccgccatcaaca

SEQ ID NO: 14310 - DNA, 80 bp, synthetic construct
  source 1..80: mol_type = other DNA
tgctgttatcaatatcccactgccatcaacagcattactgctatcatcagtatcatcgccaccgtcagcatcactgccat

SEQ ID NO: 14311 - DNA, 80 bp, synthetic construct
  source 1..80: mol_type = other DNA
aaatggagaaattatcctttttactctgtggcctgattgcaaagaaggcattaagtttttggagcctgtagggcaggacc

SEQ ID NO: 14312 - DNA, 80 bp, synthetic construct
  source 1..80: mol_type = other DNA
atgtcataaatggctttggctcattaaaacgaggagttggaagacgcgaggtgatcattacttccaatccgatcttggca

SEQ ID NO: 14313 - DNA, 80 bp, synthetic construct
  source 1..80: mol_type = other DNA
tcacgtttttaattgaaagttcttacattcaagtcacctttcctgtcccttctaaatcaacctaaagggttggcccacgg

SEQ ID NO: 14314 - DNA, 80 bp, synthetic construct
  source 1..80: mol_type = other DNA
acgggtaaaatgtatgcctgcaagcgcttggagaagaagaggatcaaaaagaggaaaggggagtccatggccctcaatga

SEQ ID NO: 14315 - DNA, 80 bp, synthetic construct
  source 1..80: mol_type = other DNA
agttagtttcaggggaggctgggaaatgtgaagtgcatggatatttggtcagctctaatatcttctgctacacactgtta

SEQ ID NO: 14316 - DNA, 80 bp, synthetic construct
  source 1..80: mol_type = other DNA
gctcagggaagaggatcatgtgattcacaaagctgggtggcacgtctttaagggccttcagttacgatggctgcaccttc

SEQ ID NO: 14317 - DNA, 80 bp, synthetic construct
  source 1..80: mol_type = other DNA
ttataaaaccatcagatctcatgagacttattcactactatgagaacagtataggagaaactgcccacaattcaattatc

SEQ ID NO: 14318 - DNA, 80 bp, synthetic construct
  source 1..80: mol_type = other DNA
gcttccaccatggctcgagcactgcattggcccctttcagccacggatggagcagctgggactcagggcactgggcacca

SEQ ID NO: 14319 - DNA, 80 bp, synthetic construct
  source 1..80: mol_type = other DNA
ccaaagccccactgcccctccagctcacccttacttggccctgtgagaatggctcccatacccaaaagggcaagtgagcc

SEQ ID NO: 14320 - DNA, 80 bp, synthetic construct
  source 1..80: mol_type = other DNA
tctgggaatcagccctggtcagcaccaggggaggatgcagagtcagacagactttccactccaggaagctggggcctccg

SEQ ID NO: 14321 - DNA, 80 bp, synthetic construct
  source 1..80: mol_type = other DNA
attagtagtagatctcatttctaatcagtcctttggaagcaggggttttgacatctggagtgggtcgctacagtcatact

SEQ ID NO: 14322 - DNA, 80 bp, synthetic construct
  source 1..80: mol_type = other DNA
cccatggcttaactgagttgcacacactctcctcttggctgttcttttacccatagagaagaccttttcctataaaagca

SEQ ID NO: 14323 - DNA, 80 bp, synthetic construct
  source 1..80: mol_type = other DNA
agatctgaaacctgaaaacatcctgttagatgattatggtaagtcttttcctactcggtagctgaggtgagcattgcaac

SEQ ID NO: 14324 - DNA, 80 bp, synthetic construct
  source 1..80: mol_type = other DNA
cctttgatctgactagatcttcccacctgcacagagaagggcaaggcagcatctctgtgcccatttaacagatgacaaaa

SEQ ID NO: 14325 - DNA, 80 bp, synthetic construct
  source 1..80: mol_type = other DNA
gccggggagctgcttcccaaatcgttttataattttttccccttaagcaaattgttgcataatgccagaagaacctcaca

SEQ ID NO: 14326 - DNA, 80 bp, synthetic construct
  source 1..80: mol_type = other DNA
gtactgacagcagctgcacaggaggtgtgccttgtctctggtgctagagggtccttttcagattgcatgacatttggcaa

SEQ ID NO: 14327 - DNA, 80 bp, synthetic construct
  source 1..80: mol_type = other DNA
tggagacggaggaggtgtactcccacaagttctccgaggaggccaagtccatctgcaagatggtgagctcctggtggcca

SEQ ID NO: 14328 - DNA, 80 bp, synthetic construct
  source 1..80: mol_type = other DNA
ggagcacccagctccacaattgccagcccacagacttcctctcctctccctggagccacagatgtaccccgtatcccatg

SEQ ID NO: 14329 - DNA, 80 bp, synthetic construct
  source 1..80: mol_type = other DNA
cgtgggtacaaaaccactgtcctctggaagcctctggccttgctgcggcttcccttacaaatgatctttggtcttgggag

SEQ ID NO: 14330 - DNA, 80 bp, synthetic construct
  source 1..80: mol_type = other DNA
ctgcacacggtttttcaaaagaagtaaatggtaggttcattgccaagatttagaaatgaggagatttcatgtaataacct

SEQ ID NO: 14331 - DNA, 80 bp, synthetic construct
  source 1..80: mol_type = other DNA
tatacccctccccctacccacaccttgaaagcctatttgtcctgcaagactcaacttaaatacctcttccccgtgcagct

SEQ ID NO: 14332 - DNA, 80 bp, synthetic construct
  source 1..80: mol_type = other DNA
gctgcagaggtcaagagacaccccttcttcaggaacatgaacttcaagcgcttagaagccgggatgttggaccctccctt

SEQ ID NO: 14333 - DNA, 80 bp, synthetic construct
  source 1..80: mol_type = other DNA
cctgagtggaggcaggtggggaccgtccttggaactctggcaccccctatacatggggattccctggtcctctgggacag

SEQ ID NO: 14334 - DNA, 80 bp, synthetic construct
  source 1..80: mol_type = other DNA
tagagccagggttgagagtcactattatgggaagtgccacatgcaaggagtgtgttgtttgttgtttgtttttagtgcca

SEQ ID NO: 14335 - DNA, 80 bp, synthetic construct
  source 1..80: mol_type = other DNA
ggtcagcaaaggttgcaggccctggagtgcgaagccgctgtgagctggggactttgccttttccccactggccctcccca

SEQ ID NO: 14336 - DNA, 80 bp, synthetic construct
  source 1..80: mol_type = other DNA
ctccagaggctctgggaagcctccccacaccaaccttgaactcttagagggcagggtccacccaggttcatctctgccct

SEQ ID NO: 14337 - DNA, 80 bp, synthetic construct
  source 1..80: mol_type = other DNA
ggacgtgctggacatcgagcagttctccactgtgaagggcgtcaatctggaccacacagacgacgacttctactccaagt

SEQ ID NO: 14338 - DNA, 80 bp, synthetic construct
  source 1..80: mol_type = other DNA
agatgcagcaacacgccatcccccagtcgtgagagcccataaaggagccagacattgctgaatgtcctcaggggcacagt

SEQ ID NO: 14339 - DNA, 80 bp, synthetic construct
  source 1..80: mol_type = other DNA
aaggtggatattataggaggggccgcctccaccctgattggaggttctgttaattccatagctcttcccaggtacctgtg

SEQ ID NO: 14340 - DNA, 80 bp, synthetic construct
  source 1..80: mol_type = other DNA
atgaaagtgagactttgagggtgtatattttctgtgcagccactgttaagccatgtgttccaaggcattttagcggggag

SEQ ID NO: 14341 - DNA, 80 bp, synthetic construct
  source 1..80: mol_type = other DNA
aaagtgcagactcgcaggttccaccccaaaccacagaatgggaatgcctgggagcccacccctgctgtgggctctcagcg

SEQ ID NO: 14342 - DNA, 80 bp, synthetic construct
  source 1..80: mol_type = other DNA
agcagcctctttttattcctgaaaggcaatgccctgtccgtttgcagtagagaatccccagggagcaagaaagatgacag

SEQ ID NO: 14343 - DNA, 80 bp, synthetic construct
  source 1..80: mol_type = other DNA
cgttcactgacttcgtgactttgaggtgagacatgggatctctcagaagcgtctctgcatctgcatttcaggagatgagc

SEQ ID NO: 14344 - DNA, 80 bp, synthetic construct
  source 1..80: mol_type = other DNA
tttggaagtgacatcgctgtgtggattatgaatacagagagctgccatcttcctgatcacaatagaccacgattgcaaag

SEQ ID NO: 14345 - DNA, 80 bp, synthetic construct
  source 1..80: mol_type = other DNA
gggacgagggcgcaggggagggaagtgcgaagcagctgcgggacggactctagggaccgttcctcttcagggctgcccgc

SEQ ID NO: 14346 - DNA, 80 bp, synthetic construct
  source 1..80: mol_type = other DNA
taaacagtccttccatgatgttctgtgtccacctgcattcgttcatgtgacagtattcttatttcagtcctgccatgagc

SEQ ID NO: 14347 - DNA, 80 bp, synthetic construct
  source 1..80: mol_type = other DNA
catctcattcctctctgccttctgatcagtttagatagggtctggcactcagtcagagtctaataaatgctgatgtatcc

SEQ ID NO: 14348 - DNA, 80 bp, synthetic construct
  source 1..80: mol_type = other DNA
gtattgagtactggtttcatgccacgaaccgtgcccagcacattatacctattgtgtgaaatttgaattttataacattc

SEQ ID NO: 14349 - DNA, 80 bp, synthetic construct
  source 1..80: mol_type = other DNA
agtagcatgctgattttactcctattcaccgaccttctctgcatgaggcagggagtgaggcacagtgggagatgtataga

SEQ ID NO: 14350 - DNA, 80 bp, synthetic construct
  source 1..80: mol_type = other DNA
actttcatccaggttttactgagacattgggtgagtgtgttcagagcccctttgttctgctggaggtcccttctgtgtct

SEQ ID NO: 14351 - DNA, 80 bp, synthetic construct
  source 1..80: mol_type = other DNA
tggaagtaaagcctcaaccacatttgctgtgtgtcttgtcttatttgctcctggccatctacccagactgtctgtctgtc

SEQ ID NO: 14352 - DNA, 80 bp, synthetic construct
  source 1..80: mol_type = other DNA
cagccaaaccatatcagctggggatagaattctatgatgaaaaccttcagacctctaatagatttactcgctcttttcta

SEQ ID NO: 14353 - DNA, 80 bp, synthetic construct
  source 1..80: mol_type = other DNA
aaacccctaagatcctactgtatccccactagaatggctgatattgaaaggaccgacaattgttggtgatttatggagta

SEQ ID NO: 14354 - DNA, 80 bp, synthetic construct
  source 1..80: mol_type = other DNA
aaagcatgcacatatgtcttacattatttgtgtgcttgtgttggtttgctttccctcataatatgtcaatgtcatgaagg

SEQ ID NO: 14355 - DNA, 80 bp, synthetic construct
  source 1..80: mol_type = other DNA
tataacagataatttgattgctctccagagacaataacttaatttatggtgccaccagcaaggtacagtacacggacctt

SEQ ID NO: 14356 - DNA, 80 bp, synthetic construct
  source 1..80: mol_type = other DNA
ttgtggcagtcaaggctttttctcccataggcacaatgtaattaattgtgattttgttcttggtttcctgtggcataatg

SEQ ID NO: 14357 - DNA, 80 bp, synthetic construct
  source 1..80: mol_type = other DNA
cattacaagttggcagtgactcgtagcaactttctacacacccttctcagtcagggtggataccttttgaaaataagttc

SEQ ID NO: 14358 - DNA, 80 bp, synthetic construct
  source 1..80: mol_type = other DNA
atgtcccctgaggggcaaaatcaccttcacttgaatcacatccagtggtgtgctggatggatactagcattaaaaatatt

SEQ ID NO: 14359 - DNA, 80 bp, synthetic construct
  source 1..80: mol_type = other DNA
actattacatataacaagcaaattggttaaagtttcaatatttctcttaaggtaacttattgcttccacttctgtttcca

SEQ ID NO: 14360 - DNA, 80 bp, synthetic construct
  source 1..80: mol_type = other DNA
aaaacacgaagatgtgtcctgattttcaaaatctctcccctgaagttcccacctgatatgtagttggagatgggcaaata

SEQ ID NO: 14361 - DNA, 80 bp, synthetic construct
  source 1..80: mol_type = other DNA
aaaatggcctttgttgcaggaagtcagggaccccgaatggagggaccggctggagctgcagcagaggaacataaattgca

SEQ ID NO: 14362 - DNA, 80 bp, synthetic construct
  source 1..80: mol_type = other DNA
cggctccctgatgattggtgaattttctatgtattgtctcgggtaactatgggtcacatggagtctaaatattatgctta

SEQ ID NO: 14363 - DNA, 80 bp, synthetic construct
  source 1..80: mol_type = other DNA
ttctatgccaactccatctcatgtgcctgctcttgaaacttccatgcaatgcttattacgccagaacaaagaaacaagtg

SEQ ID NO: 14364 - DNA, 80 bp, synthetic construct
  source 1..80: mol_type = other DNA
ctcaacaaacatggccaaatgctcctgctactgtttgccctcattgtcgtaaaggtaaacactgggcaagtacttgccac

SEQ ID NO: 14365 - DNA, 80 bp, synthetic construct
  source 1..80: mol_type = other DNA
ttcctggcttaaacatcccactaacatgggactagtaagggttggaaaagctgatgaagttcaccaaagcacatttatct

SEQ ID NO: 14366 - DNA, 80 bp, synthetic construct
  source 1..80: mol_type = other DNA
tcggacatgcaactcgttgtatccatctagaaactcaagtctgggctgcttatcttctggagagattagctacaggaaaa

SEQ ID NO: 14367 - DNA, 80 bp, synthetic construct
  source 1..80: mol_type = other DNA
ctcgagaaggaatctggatactgtgtgccggaccagccaaagaatcctgtgtcaaaaccgagagaacgaataagccttca

SEQ ID NO: 14368 - DNA, 80 bp, synthetic construct
  source 1..80: mol_type = other DNA
ggaaggaggaggtggtgaccgtggagacgtggcaggagggctcactcaaagcctcctgcgtaagtgaccatgcccgggca

SEQ ID NO: 14369 - DNA, 80 bp, synthetic construct
  source 1..80: mol_type = other DNA
cttcttgtgccctcaccccccttacccctcaggtggcttgggctgaccccttcttgggtcagggtgcaggggctgggtca

SEQ ID NO: 14370 - DNA, 80 bp, synthetic construct
  source 1..80: mol_type = other DNA
ccccaattcctccagcctgctcccgctggctgagtccctggcccccctgccctgcagatctccttcgctgactacaacct

SEQ ID NO: 14371 - DNA, 80 bp, synthetic construct
  source 1..80: mol_type = other DNA
ttgtctgggaaagtgcaacttagtagctttgtgagtcctgttgtaatgcttttggacacatttatacattaaggggccaa

SEQ ID NO: 14372 - DNA, 80 bp, synthetic construct
  source 1..80: mol_type = other DNA
ggccttgtagatctgtgtgttccggtcccaatactccggcccctcctgctctatccacggcgcccgcggctcctctctcg

SEQ ID NO: 14373 - DNA, 80 bp, synthetic construct
  source 1..80: mol_type = other DNA
gacacaattaagggataaaatctctgaaggagtgacgggaagacgatccctcgaatactgatgagtggttccctttgaca

SEQ ID NO: 14374 - DNA, 80 bp, synthetic construct
  source 1..80: mol_type = other DNA
acttactcttttgtaaagcacctgttaaaatgaaggacagatttatcaccttgattacggcggtgatgggacctgatccc

SEQ ID NO: 14375 - DNA, 80 bp, synthetic construct
  source 1..80: mol_type = other DNA
ggtgtctccatctctgtctcaacttcatggtgcactgagctgtaacttcttccttccctattaaaattagaaccttagta

SEQ ID NO: 14376 - DNA, 80 bp, synthetic construct
  source 1..80: mol_type = other DNA
gaagcagggccatgagatcttagaggaacctcctagtcttggacccaaaaggaatttccagaagtatgactacagaccca

SEQ ID NO: 14377 - DNA, 80 bp, synthetic construct
  source 1..80: mol_type = other DNA
ctgatctgagtggaggtaaagtgactcagaagtgctggaatcagagccccaaacacactgagtgtgaggcagagaacaag

SEQ ID NO: 14378 - DNA, 80 bp, synthetic construct; identical to SEQ ID NO: 14372
  source 1..80: mol_type = other DNA

SEQ ID NO: 14379 - DNA, 80 bp, synthetic construct
  source 1..80: mol_type = other DNA
acactgtctgcctgagtcctggacaaggatctgtctgtggaaaccagggagagacccccaggctgcgcccagccccttcc

SEQ ID NO: 14380 - DNA, 80 bp, synthetic construct
  source 1..80: mol_type = other DNA
ccatatctgttctccccacagtgctcagcagtcctgctaatgtgactcaggtcatgtcatttcttcacttgcaatggttg

SEQ ID NO: 14381 - DNA, 80 bp, synthetic construct
  source 1..80: mol_type = other DNA
attcatttttgttgctgagcagctgctgagtattgctggaatcccagcttattcattggtttctctgcctccagttgata

SEQ ID NO: 14382 - DNA, 80 bp, synthetic construct
  source 1..80: mol_type = other DNA
atgcctggtccttctattggtttcttatttcattttcttgccatgttgcactgatttggatgcctcttaggtgtttaaac

SEQ ID NO: 14383 - DNA, 80 bp, synthetic construct
  source 1..80: mol_type = other DNA
ccatagaatactatacagccataaaaaagaatgagattacgtcctttgcaggaacatggatggagctggaggccattatt

SEQ ID NO: 14384 - DNA, 80 bp, synthetic construct
  source 1..80: mol_type = other DNA
tcgtgggacttacaacctatatagatatattacatataatatctataccataaaagatggacattttatagaggataaat

SEQ ID NO: 14385 - DNA, 80 bp, synthetic construct
  source 1..80: mol_type = other DNA
ccaggtattggggaggctgagatgggaagatcccttgggcttatggattcaagtctgtagtgagctgtgatcgcatcact

SEQ ID NO: 14386 - DNA, 80 bp, synthetic construct
  source 1..80: mol_type = other DNA
aactactttccaaatgccccaaatctggccataacctattattatttttaagagaagggaatcttactatggtggccagg

SEQ ID NO: 14387 - DNA, 80 bp, synthetic construct
  source 1..80: mol_type = other DNA
ggcttcaccatgttgcccaagctgatctcaaggtatctgcctgtctctgcctcccaaaatgctgagccactgtattacag

SEQ ID NO: 14388 - DNA, 80 bp, synthetic construct
  source 1..80: mol_type = other DNA
taaggagctttcggtatttcccactagtgaaacttctcagttggagggtatgtgcatcttcatctttaagaaatactacc

SEQ ID NO: 14389 - DNA, 80 bp, synthetic construct
  source 1..80: mol_type = other DNA
ttaattctatcctttgaaggtcgattcttcccaggaatggagaaccaggtcttcctacacaaaatcaccagattctgttt

SEQ ID NO: 14390 - DNA, 80 bp, synthetic construct
  source 1..80: mol_type = other DNA
ttctggaaggttctcaggtctttatttgctctctcaacttctaggaattgacttatttaattaatccatcaacgcttcat

SEQ ID NO: 14391 - DNA, 80 bp, synthetic construct
  source 1..80: mol_type = other DNA
cttgaaactcccagtgggacaagaaaacccagaccccgctcttcaccccttccctacctgagctcttcctcctacacatc

SEQ ID NO: 14392 - DNA, 80 bp, synthetic construct
  source 1..80: mol_type = other DNA
actcagaaaagctggaatcaaaccttcagacacattgagtgtgaggcagagaacaaggcctgagagaaaggtcagcagcc

SEQ ID NO: 14393 - DNA, 80 bp, synthetic construct
  source 1..80: mol_type = other DNA
gtcgaaccgcacgaactgcgtgtcgtccacgtagcccactgagatgaagcggggctctccgcggccgggccgggacacgg

SEQ ID NO: 14394 - DNA, 80 bp, synthetic construct
  source 1..80: mol_type = other DNA
tttaaaattatcttcattccccaccctgagtttccctgtgtgagtccagaacatctcctgaatataaagaagcagggttt

SEQ ID NO: 14395 - DNA, 80 bp, synthetic construct
  source 1..80: mol_type = other DNA
ctgctgcctccctgtggctggtgtaatattatggcatctatgatccattgtttttctctcaggatactctcaggatattt

SEQ ID NO: 14396 - DNA, 80 bp, synthetic construct
  source 1..80: mol_type = other DNA
ctgtaaactagttcaaccattgtactctcaggacatttctagtccaaatttacaccaacactctgagaggaaggactgca

SEQ ID NO: 14397 - DNA, 80 bp, synthetic construct
  source 1..80: mol_type = other DNA
tgggatgagggacagtgttgggagccaccaaggaaacccagaggtgggggagcagagagcagaagggggcatgtgatgct

SEQ ID NO: 14398 - DNA, 80 bp, synthetic construct
  source 1..80: mol_type = other DNA
aagatactcaaacagaaacaaacatgtgccgtgtcactgataattctgtgtagacacacacctgccagacactgctcatg

SEQ ID NO: 14399 - DNA, 80 bp, synthetic construct
  source 1..80: mol_type = other DNA
aatatatttctacatctcctacatgcaaaacaacaggagcaagttgaggaattctcaagaaactggtcgagaagagagag

SEQ ID NO: 14400 - DNA, 80 bp, synthetic construct
  source 1..80: mol_type = other DNA
gccgggcggaaaggggactttgggttggggattcatggggggagcccatctggagcttgtcaggggagcgagcgcgggga

SEQ ID NO: 14401 - DNA, 80 bp, synthetic construct
  source 1..80: mol_type = other DNA
ctggaccttttttctagaaagaggaaaaaaatgaagggaggaggaggaggaagctggggagatcacacctttgattttct

SEQ ID NO: 14402 - DNA, 80 bp, synthetic construct
  source 1..80: mol_type = other DNA
aagaatattgagcaagatgcctctcgtggaatgttctgggaccttaaaacagatacccaagtattccccctgatttcatg

SEQ ID NO: 14403 - DNA, 80 bp, synthetic construct
  source 1..80: mol_type = other DNA
atgaccaccatgcctggccttttctgctttctgaggaggaaaaaggtactggtggcagagatccaaaagaaaagttgcca

SEQ ID NO: 14404 - DNA, 80 bp, synthetic construct
  source 1..80: mol_type = other DNA
agaaggacaatctcaaattctatttcattatttttcttccacgctcctagtccagcctagggtgaatgtttccccctcca

SEQ ID NO: 14405 - DNA, 80 bp, synthetic construct
  source 1..80: mol_type = other DNA
tggctctttctgaatttcctcttagcaagctttttccgctgcactgtcctcatcccgatatgctgcatcaggctccagaa

SEQ ID NO: 14406 - DNA, 80 bp, synthetic construct
  source 1..80: mol_type = other DNA
atactgctgccaagaagttgctctgaagtcagtttctatcattctgctctttgattcaaagcactgtttctctcactggg

SEQ ID NO: 14407 - DNA, 80 bp, synthetic construct
  source 1..80: mol_type = other DNA
tacacacaatcagtgcacagcagctctcttatacatccagttgatgccttcagtctccctggcttcttacaagcatcttc

SEQ ID NO: 14408 - DNA, 80 bp, synthetic construct
  source 1..80: mol_type = other DNA
ttgaggtacatcagtcattggagttgaagagcagagattcaaaggaaagttggaactggagctttaaaggagatgtgaag

SEQ ID NO: 14409 - DNA, 80 bp, synthetic construct
  source 1..80: mol_type = other DNA
taaactaacaaatacccagatatccaggtttggctcatgttacacgtccaaagtaagtcatgcaggaagctctgctcatc

SEQ ID NO: 14410 - DNA, 80 bp, synthetic construct
  source 1..80: mol_type = other DNA
ggtgttcacagagagagaaatatagtagatagaattaatacagtttcaaattatgtactttcctgctgttgggtggagtg

SEQ ID NO: 14411 - DNA, 80 bp, synthetic construct
  source 1..80: mol_type = other DNA
ggtgctgttaaaagtcctgtaacacacatgacagcctcccacaaaaaaaaaacattatcctctggctcaaaatattaata

SEQ ID NO: 14412 - DNA, 80 bp, synthetic construct
  source 1..80: mol_type = other DNA
tgtatgtcttcttttgagaagtgtccgttcatgccctttgcccacttttttatggagttgttcgtttttttcttgtacat

SEQ ID NO: 14413 - DNA, 80 bp, synthetic construct
  source 1..80: mol_type = other DNA
atctatacaaagaatgtttacaatatgtacattaggactggggagttcctgggaggagaatcaatcactgctggacatga

SEQ ID NO: 14414 - DNA, 80 bp, synthetic construct
  source 1..80: mol_type = other DNA
cattaattttatgattgtgagaggccatgtgactggatatcagcatacaggactttgtatcagaatatgagcttggcagt

SEQ ID NO: 14415 - DNA, 80 bp, synthetic construct
  source 1..80: mol_type = other DNA
agaaaataaccttaaggctcaggagttttgagtagcttgcccaaggtgatgcagctgataaaatgaaaagcagcatggaa

SEQ ID NO: 14416 - DNA, 80 bp, synthetic construct
  source 1..80: mol_type = other DNA
gtgaaaccccatctctactaaaaatacaaaaaattagccgggcgtggtggcaggtgcctgtagtcccagctacttgcagt

SEQ ID NO: 14417 - DNA, 80 bp, synthetic construct
  source 1..80: mol_type = other DNA
aaaactcaccatgagaatcatgcagcccctcagtaagagattgttggaaccaaagaagtagaaccacgagaatacatata

SEQ ID NO: 14418 - DNA, 80 bp, synthetic construct
  source 1..80: mol_type = other DNA
agtgctgagaatctcagaaggccatttatcaaggacagagtgattctaaatagaagctccattaacttacggtttctatc

SEQ ID NO: 14419 - DNA, 80 bp, synthetic construct
  source 1..80: mol_type = other DNA
agacatgcacacaccagagaagattccaatttaatgtcctccctttattcatagaacaattcctcaagtccactctgagt

SEQ ID NO: 14420 - DNA, 80 bp, synthetic construct
  source 1..80: mol_type = other DNA
ttatgaagtgtcattctcaaatttccctgaacaacttttgaagcttttcggatgtctccggtggtagatcttggggtcat

SEQ ID NO: 14421 - DNA, 80 bp, synthetic construct
  source 1..80: mol_type = other DNA
gaaggaagaaaggaagcacagattaattatttggtctcttactctcctctgcctttgtcgtccatctctttccacctctc

SEQ ID NO: 14422 - DNA, 80 bp, synthetic construct
  source 1..80: mol_type = other DNA
gttggaggtcataatgtggtcaaaaacatgttgatgagaggactcagctacaaagttgttaacttaagcagaaacctcaa

SEQ ID NO: 14423 - DNA, 80 bp, synthetic construct
  source 1..80: mol_type = other DNA
aagatctctgtgtagagtgtcctattctgagccagtcctgagaggaaaggaagtataatcaatttgttattaaccaatga

SEQ ID NO: 14424 - DNA, 80 bp, synthetic construct
  source 1..80: mol_type = other DNA
cagcaaatttggaggttttgacccgcagggtgcactgagaaacatggctgtggcaaaacacaacttgaacatcatgatta

SEQ ID NO: 14425 - DNA, 80 bp, synthetic construct
  source 1..80: mol_type = other DNA
gttcagaacttcctgccttttactcctatatccaaaaacttgttttccacacttcatgggtttcttttctgtctctcttt

SEQ ID NO: 14426 - DNA, 80 bp, synthetic construct
  source 1..80: mol_type = other DNA
ccctcaattcaggcaacaatgaaattaatggataccgtctgcccttggcccagaattgttatagcaaaaattttagaacc

SEQ ID NO: 14427 - DNA, 80 bp, synthetic construct
  source 1..80: mol_type = other DNA
actctcacagaggaaatgggtcagcagcgacctcatggctctaaacagctatgaaatccatgaggatatttctaaccatg

SEQ ID NO: 14428 - DNA, 80 bp, synthetic construct
  source 1..80: mol_type = other DNA
gtaagttcataaattatagcaaatgtaccactcagatgggagatgttgctaatgggggaggctatgcatgtgtgggagca

SEQ ID NO: 14429 - DNA, 80 bp, synthetic construct
  source 1..80: mol_type = other DNA
atcagctaaaaatgtagggcctactatcaatagggttacagatctacctgcctgatttaaaatcatgcaattcttaaaca

SEQ ID NO: 14430 - DNA, 80 bp, synthetic construct
  source 1..80: mol_type = other DNA
gtatgaggcaatcagaaaaactgacaccgactgtattaaggaattatctaattttagtgtggtaatgagattgctgttat

SEQ ID NO: 14431 - DNA, 80 bp, synthetic construct
  source 1..80: mol_type = other DNA
tcaggtaatgtttttcatgtgcttctcttgagcagtctgaggaaagaatagaaacagaaaccccttgggacctgagtaga

SEQ ID NO: 14432 - DNA, 80 bp, synthetic construct
  source 1..80: mol_type = other DNA
atttcacaagaagatgccaccaaagttaaggcttggttctggggaacaatgtctggagattcctagaaactggcaaactt

SEQ ID NO: 14433 - DNA, 80 bp, synthetic construct
  source 1..80: mol_type = other DNA
gccaataggtccttggatacagtgaataggtgagagagtggggaagcaaatctctgctcttcaagaactcatccataacc

SEQ ID NO: 14434 - DNA, 80 bp, synthetic construct
  source 1..80: mol_type = other DNA
tctcattttctttttttccttaatttctttttaacgcacaagtgagtttaattactagctgtctaccctactccatttcc

SEQ ID NO: 14435 - DNA, 80 bp, synthetic construct
  source 1..80: mol_type = other DNA
tgaagtggatagtgatgggggggaggggataacctaggccaaaagcaacctgaaactatttttatccaataatttaatag

SEQ ID NO: 14436 - DNA, 80 bp, synthetic construct
  source 1..80: mol_type = other DNA
tggaatgaactgggctcagatttcagagacctcgcccccatcgcccctcccggcacagaaactcggggtctcggccaagg

SEQ ID NO: 14437 - DNA, 80 bp, synthetic construct
  source 1..80: mol_type = other DNA
tgaagctcctggatacctcagagataaagttatccacataaatctgagagttcaacggaatgacgagataggtccaggaa

SEQ ID NO: 14438 - DNA, 80 bp, synthetic construct
  source 1..80: mol_type = other DNA
catagctttctttcccaagagagaggaaatgttgatgaaagattgtgtccaagatcatagagatcaccatcccccatacc

SEQ ID NO: 14439 - DNA, 80 bp, synthetic construct
  source 1..80: mol_type = other DNA
tatcaggttaatatgtggaacaagaaaacaagccaaaaaaaaaaaattgatacccacccctgctggtaaatgattcttca

SEQ ID NO: 14440 - DNA, 80 bp, synthetic construct
  source 1..80: mol_type = other DNA
taggcagagagacctgaaggtgccctcaatgtccttcctcagcccctacatcagtgcgcctcaaaatagaggtctctaat

SEQ ID NO: 14441 - DNA, 80 bp, synthetic construct
  source 1..80: mol_type = other DNA
ctgttgtaaagatgtactgtagaaaagtattcttcacccagcgtgacccccacagaaggtgtcaggtagacttgaaataa

SEQ ID NO: 14442 - DNA, 80 bp, synthetic construct
  source 1..80: mol_type = other DNA
actctcccagtgtagctttctcttttcatgttcattattcccttggtgttggttattctcaatgtcaatcataacagaac

SEQ ID NO: 14443 - DNA, 80 bp, synthetic construct
  source 1..80: mol_type = other DNA
gccgagttctatctgaatcctgaccaatcaggcgagtttatgtttgactttgatggtgatgagattttccatgtggatat

SEQ ID NO: 14444 - DNA, 80 bp, synthetic construct
  source 1..80: mol_type = other DNA
cctcttctcaagcactggggtatggaccaacactcaatctcctttatttcaaggtttcctcctatgatgcttgtgtgaaa

SEQ ID NO: 14445 - DNA, 80 bp, synthetic construct
  source 1..80: mol_type = other DNA
gtagtatgagaaactctaaaaaaaggtaaagcatggttgcttattatgttcagttggagagtagggtatacagttagttc

SEQ ID NO: 14446 - DNA, 80 bp, synthetic construct
  source 1..80: mol_type = other DNA
aactccatctttgagaaacatttaataatgtaatgtgtttgtcatacagggtgaatacagatgcacgggaggccatacgg

SEQ ID NO: 14447 - DNA, 80 bp, synthetic construct
  source 1..80: mol_type = other DNA
tattttacagagtgcgaattggtccattttacaaacatccagctagccacagagaacctattggtgtgtttttacaaagc

SEQ ID NO: 14448 - DNA, 80 bp, synthetic construct
  source 1..80: mol_type = other DNA
ggaaagaaaggctttattcagggccactcatatactgagaactaacctcagcaaagccatagttcctcctccagaaaagc

SEQ ID NO: 14449 - DNA, 80 bp, synthetic construct
  source 1..80: mol_type = other DNA
aaagagggacagtctctcccgcctggcaggcgagactgcttctccaggaggtacaggtgtttctagaaacacctacaggg

SEQ ID NO: 14450 - DNA, 80 bp, synthetic construct
  source 1..80: mol_type = other DNA
aaaacaatgactgaagatagccttcagtttatgaggtcagaaagcttctcactccattccactgtgagggcactcatcac

SEQ ID NO: 14451 - DNA, 80 bp, synthetic construct
  source 1..80: mol_type = other DNA
aaacacacaatttcaacttctggtgaatgtcataataaaggtcaacaaacgggaaagtgaggtgagttgtgtcacaaata

SEQ ID NO: 14452 - DNA, 80 bp, synthetic construct
  source 1..80: mol_type = other DNA
gcgctggaaccttaaccggccccacccgcaacgcccaccacctgcagcccaggagctcatcctccgtcttcctgaggcga

SEQ ID NO: 14453 - DNA, 80 bp, synthetic construct
  source 1..80: mol_type = other DNA
aatgcatttaataatagcgtaatcctcacaggattaccgttaagtgtaaaattaaatgatgacacttcttagcactgatc

SEQ ID NO: 14454 - DNA, 80 bp, synthetic construct
  source 1..80: mol_type = other DNA
ttagtggtactcaccacaattggcctctcccttctccttgaaaataatctattttcctggacttacacacatgatgttct

SEQ ID NO: 14455 - DNA, 80 bp, synthetic construct
  source 1..80: mol_type = other DNA
aatttaatttttttttactgtggacatcagagcctataatgatgaggctcctgaattcctctctgtgtcctaccctcatc

SEQ ID NO: 14456 - DNA, 80 bp, synthetic construct
  source 1..80: mol_type = other DNA
cctgaggagggaggatcacttgagcataagtggcagaggttgcagtgagcctcgatcacaccactgagctatagactggg

SEQ ID NO: 14457 - DNA, 80 bp, synthetic construct
  source 1..80: mol_type = other DNA
gaagtgctgtatggggaatttattttagaatccttatttctaaatcctctaaagaccctgaggacatgtgatgcaaaggt

SEQ ID NO: 14458 - DNA, 80 bp, synthetic construct
  source 1..80: mol_type = other DNA
ctttctttaatccagtagacaatgagaaacgctgatttgggtctatggcataataggaagtagtatgccacatactgcat

SEQ ID NO: 14459 - DNA, 80 bp, synthetic construct
  source 1..80: mol_type = other DNA
gcagcccccaggcgattggctagacaatcgaacgatcctctcttattggtcgaaggctcgtccagctccgagcgtgcgta

SEQ ID NO: 14460 - DNA, 80 bp, synthetic construct
  source 1..80: mol_type = other DNA
aggttacagcattaacatgaaaattgtcgggtatgtgggataaccatttcaagataagagtgtgagtatgcgtgcatgca

SEQ ID NO: 14461 - DNA, 80 bp, synthetic construct
  source 1..80: mol_type = other DNA
aaaacatccttttctgcagttggccatggtaggtggcttctgtagcagattggattgacatttaagaattatccattctt

SEQ ID NO: 14462 - DNA, 80 bp, synthetic construct
  source 1..80: mol_type = other DNA
taaaacaatgaatctgattgacataatgaggaataatctgagctgaagagtttttttttcagggaaagagggttagaaat

SEQ ID NO: 14463 - DNA, 80 bp, synthetic construct
  source 1..80: mol_type = other DNA
aacagtttgaaaactgtttagctagtggtgtggtatgtctgaaatgtagagaacatggagtgatgcagtgagagatgaca

SEQ ID NO: 14464 - DNA, 80 bp, synthetic construct
  source 1..80: mol_type = other DNA
aaatgtgaatagctgtttctcacttgtgttttctgcttgattgctcttctacttgcaaggcttaggtaataaggtcgaga

SEQ ID NO: 14465 - DNA, 80 bp, synthetic construct
  source 1..80: mol_type = other DNA
gtattttggaacttacctcaaatttctgcttacatggaatgcactggaaatgctcttattttgctttgtctttacaaatg

SEQ ID NO: 14466 - DNA, 80 bp, synthetic construct
  source 1..80: mol_type = other DNA
ttaggatgttttgagcagtgacattataattctgacaataacacgatgcatagccatcctgtatatttacttccagttcc

SEQ ID NO: 14467 - DNA, 80 bp, synthetic construct
  source 1..80: mol_type = other DNA
cttgtagtttattaatcatctaatgttggactgttaggttatgtaattttttttattaataacaacactgtgatgaatgt

SEQ ID NO: 14468 - DNA, 80 bp, synthetic construct
  source 1..80: mol_type = other DNA
atttttgggtaaataagagtattttcctagtgaaacacatcagagagcagaacaagatctaatggaagagaaacccaggg

SEQ ID NO: 14469 - DNA, 80 bp, synthetic construct
  source 1..80: mol_type = other DNA
tcaaaggaatattcctaacaaatatcttattcagtggaaagggaatcagggcactatatgttcttttttaaaaatttggc

SEQ ID NO: 14470 - DNA, 80 bp, synthetic construct
  source 1..80: mol_type = other DNA
tatatctggcctgtttgctttggtggaaacttagcagcaggttactgatttatttttcactcctgccatcctctctttgt

SEQ ID NO: 14471 - DNA, 80 bp, synthetic construct
  source 1..80: mol_type = other DNA
ggtgaaaatgtacttgtttgattttattcaagcaaaagaatatatgagaaggggattcgccaggaagtaatagttgggcc

SEQ ID NO: 14472 - DNA, 80 bp, synthetic construct
  source 1..80: mol_type = other DNA
gttttatattatactcaagtttatttgtaaagtgagggagaaggatttggtggtcatctaaggtctcttctagcctctat

SEQ ID NO: 14473 - DNA, 80 bp, synthetic construct
  source 1..80: mol_type = other DNA
acctaaacagaatcaataccttctaatgtcacactgacttaatttgtagctttctcgggaaagccgcgagggtcgtccaa

SEQ ID NO: 14474 - DNA, 80 bp, synthetic construct
  source 1..80: mol_type = other DNA
tgatttcttgaacagttgaggttataaaacccttagtggctgaaacagataccccaaacagagctacatttgtggttggt

SEQ ID NO: 14475 - DNA, 80 bp, synthetic construct
  source 1..80: mol_type = other DNA
tctgcctacatgaccatatgaatctactcatgctttcatgcaaataatcatgttccatccatgtctgcttaatatggttc

SEQ ID NO: 14476 - DNA, 80 bp, synthetic construct
  source 1..80: mol_type = other DNA
ctaatattagtgtttgcaaagaagatccttgaataaacccacaaaatggaattactggtaccagttttgtggagggtggt

SEQ ID NO: 14477 - DNA, 80 bp, synthetic construct
  source 1..80: mol_type = other DNA
gtggtacctatttatgtgtaggtagcaaagaactgggcagatggtagacagggatgggatgaagactttttgttatatct

SEQ ID NO: 14478 - DNA, 80 bp, synthetic construct
  source 1..80: mol_type = other DNA
gcatttactatatagattttcatttggtgcctgactttaccttttaggtgatgggagcttgttgtgagaatgttattgga

SEQ ID NO: 14479 - DNA, 80 bp, synthetic construct
  source 1..80: mol_type = other DNA
taaagtagcataatcaacacaaatgataaccatagtatagttcaagctaacacatttgtttttatgtgaactgtgtaagt

SEQ ID NO: 14480 - DNA, 80 bp, synthetic construct
  source 1..80: mol_type = other DNA
cacagtgagatgctatctctacaaacaataaaaaaaaatagttgtgcatagtggcacacacctgtggtcctcgctacacg

SEQ ID NO: 14481 - DNA, 80 bp, synthetic construct
  source 1..80: mol_type = other DNA
atgttctgtacatatatcccagaacttaaaaaagagttctggggatttgttgcatggcagtgtgaatatacttaccactg

SEQ ID NO: 14482 - DNA, 80 bp, synthetic construct
  source 1..80: mol_type = other DNA
tatgggacagtgttttccatcaaagatgactgttgtaccttgcccatctgtctgtgtgtatcatccataggaacaaactt

SEQ ID NO: 14483 - DNA, 80 bp, synthetic construct
  source 1..80: mol_type = other DNA
tcttggaaagttagtgcttccagtggagtctagttctattctgatgccattacagttgccctgtttttagttgatttagt

SEQ ID NO: 14484 - DNA, 80 bp, synthetic construct
  source 1..80: mol_type = other DNA
ggaaaaaagttttgatgaaattcttgaagttcatggtgatcagtgcaattgaccttctccctcactcctgccagttgaaa

SEQ ID NO: 14485 - DNA, 80 bp, synthetic construct
  source 1..80: mol_type = other DNA
ctttgatggacccacgaacgctcttagctttctcagggggtcagcagagttattgaatcttaattttttttaatgtacaa

SEQ ID NO: 14486 - DNA, 80 bp, synthetic construct
  source 1..80: mol_type = other DNA
tgattagttcagatttatcatctcaactagacatcttttggatagtgagagtgggagggctagttaaggagaagaggggc

SEQ ID NO: 14487 - DNA, 80 bp, synthetic construct
  source 1..80: mol_type = other DNA
ttgaatgaatggttttacaaaactgtttattcagtagcacaaggttgggaaacacctggggagagaccgagtgttggcta

SEQ ID NO: 14488 - DNA, 80 bp, synthetic construct
  source 1..80: mol_type = other DNA
cacttaggtgtgagtctgtttaaaaagccatagtagtcagaaaattgccagactaaacaaagggcccaaaggtaccattt

SEQ ID NO: 14489 - DNA, 80 bp, synthetic construct
  source 1..80: mol_type = other DNA
gcagccttggtactagcagcatattatacattctatctttgaaacagtgaaccatctttcaacatatctatgaggacata

SEQ ID NO: 14490 - DNA, 80 bp, synthetic construct
  source 1..80: mol_type = other DNA
tccttgcgtctcagcctcccctgtagctgggaccacagttgtgtgccacaaggatcagataattttttgattttttttgt

SEQ ID NO: 14491 - DNA, 80 bp, synthetic construct
  source 1..80: mol_type = other DNA
ttttgtagcattgaaccccgcttttcattgacagaataaaatgaggcatacagatatgatcgttggttccactagacttg

SEQ ID NO: 14492 - DNA, 80 bp, synthetic construct
  source 1..80: mol_type = other DNA
caaagaactctgagggaggaagctgaaagaagctaatttggcccgtgtgccaagatcacttacacacaaagtagcttctt

SEQ ID NO: 14493 - DNA, 80 bp, synthetic construct
  source 1..80: mol_type = other DNA
tttttaacatacacacaactaacaaaccaaaaaccaaacccagtacagtgaactcgtcacccagcttcaaagattatcag

SEQ ID NO: 14494 - DNA, 80 bp, synthetic construct
  source 1..80: mol_type = other DNA
gcacactcagaattgtagaacaaagagtgttgtggttactgcttctgaccgtctttagagtctaatacatggtctcacac

SEQ ID NO: 14495 - DNA, 80 bp, synthetic construct
  source 1..80: mol_type = other DNA
tacaaggtcttcttagacagcacagttgctcattgattagaaaggatgctttgttcaaccatttgagacatccctggatt

SEQ ID NO: 14496 - DNA, 80 bp, synthetic construct
  source 1..80: mol_type = other DNA
tacaagaggatgtggtaagaggttacacgcagagctgttctgtctggaagggggatattaatttggaagtggagaatcaa

SEQ ID NO: 14497 - DNA, 80 bp, synthetic construct
  source 1..80: mol_type = other DNA
ttccttctaatctatgtatggtgtgttgacaaggcagatgtacataaaaatgagagctacacaaacatgtcagttaccca

SEQ ID NO: 14498 - DNA, 80 bp, synthetic construct
  source 1..80: mol_type = other DNA
acaaactctctctctctctccaccacccccaccagtgattttctgtaccttgattttgtttttgcattctttcatctcaa

SEQ ID NO: 14499 - DNA, 80 bp, synthetic construct
  source 1..80: mol_type = other DNA
taatgagtggatattacactatctacccctagcaggtgctcttttctaggctgcatatttagcaacgtgctcatgagtaa

SEQ ID NO: 14500 - DNA, 80 bp, synthetic construct
  source 1..80: mol_type = other DNA
tcatatatgtcttctctcagtagcttgcttggtatacagtagtcctcccttaagcttgctttccctttccatagcttcgg

SEQ ID NO: 14501 - DNA, 80 bp, synthetic construct
  source 1..80: mol_type = other DNA
caatctaaacggctactgggaggtacagagacttacttttcatttttgccctggaccaattttgatgactttcctttccc

SEQ ID NO: 14502 - DNA, 80 bp, synthetic construct
  source 1..80: mol_type = other DNA
agacttgcgtttattcctgtctgttctgactcatatcctggatctaggcccgttatttttcacaaagtgtctttcaggta

SEQ ID NO: 14503 - DNA, 80 bp, synthetic construct
  source 1..80: mol_type = other DNA
aggagcaagtgcacacattgcttatcacttaccagaagcattgagcaggtcctctatctatgatagcaatcagttttgtt

SEQ ID NO: 14504 - DNA, 80 bp, synthetic construct
  source 1..80: mol_type = other DNA
tcctgcagagcaagaatgtttcccagaatggctgataatggtctcctcagtgaaaattgaatgacctcttgactgtggat

SEQ ID NO: 14505 - DNA, 80 bp, synthetic construct
  source 1..80: mol_type = other DNA
aagggtgttgcttggtaaactggatagtgcctgagggcaatcaagttcaatataataagaaacaaaacacattgtgcaag

SEQ ID NO: 14506 - DNA, 80 bp, synthetic construct
  source 1..80: mol_type = other DNA
tttcacagttaatgagtcaaggtagaactgttaagctctctgtgtaagtttaataggtaaaaagtgggggaaaaccccac

SEQ ID NO: 14507 - DNA, 80 bp, synthetic construct
  source 1..80: mol_type = other DNA
tatccagatacacagcttaaaaacttaggagtctctttccattatcctgcctttgcaaaagactcaccagcattctaata

SEQ ID NO: 14508 - DNA, 80 bp, synthetic construct
  source 1..80: mol_type = other DNA
ttaccttagttatcttggcaagggcaagaaattgcccaaatatagatcatttgggggctaacaattctgacaaagtaggg

SEQ ID NO: 14509 - DNA, 80 bp, synthetic construct
  source 1..80: mol_type = other DNA
tttttcaggaaagaggtaattatcccaatactctgcaacacaaaaaagattctgaatcactgagcctgggtgtacaaaca

SEQ ID NO: 14510 - DNA, 80 bp, synthetic construct
  source 1..80: mol_type = other DNA
cattttgtaatcagcagaataatggtccccaaagatgcctacgcctaactcctggatgctgtgaatatgttgtgttatat

SEQ ID NO: 14511 - DNA, 80 bp, synthetic construct
  source 1..80: mol_type = other DNA
aagccctgatttctttccttggcctgtccacatacaagctatgggtgtaatgaacttttgttttcccataaacattttaa

SEQ ID NO: 14512 - DNA, 80 bp, synthetic construct
  source 1..80: mol_type = other DNA
tttctgggctacatttctttcccatatatggacttcatgaccgtctattttcccagaggttttttgcagtttttatgcta

SEQ ID NO: 14513 - DNA, 80 bp, synthetic construct
  source 1..80: mol_type = other DNA
ttttatagccaggacttcaaatagtgactttgagcctatatcagaacaaaatatcattatccccagccctggctctgaca

SEQ ID NO: 14514 - DNA, 80 bp, synthetic construct
  source 1..80: mol_type = other DNA
gcaggtgaggaccttgctacaaaaattttaggaccgagaaaagtaagtactgctcccccaaaaattcaatctcaaaatta

SEQ ID NO: 14515 - DNA, 80 bp, synthetic construct
  source 1..80: mol_type = other DNA
taaatggatgtaagtcttgggtataccttaaagacgatgacagtgaaagtcagcaaatccttccccagtaggctttaact

SEQ ID NO: 14516 - DNA, 80 bp, synthetic construct
  source 1..80: mol_type = other DNA
cctttgataagggctctaatctcattcctgagagctctgccttcatgatttaaccacctctcaaaggactcacctccaaa

SEQ ID NO: 14517 - DNA, 80 bp, synthetic construct
  source 1..80: mol_type = other DNA
gtgggaaggggacgattcagttttagacatactgatttggatatacataaagtatagccaagcagagctgcttggaaaac

SEQ ID NO: 14518 - DNA, 80 bp, synthetic construct
  source 1..80: mol_type = other DNA
agggatctctctttcccaaataatcagatatctaaaatcttgtgttgaagagaagtacctataatttgcccaagccttca

SEQ ID NO: 14519 - DNA, 80 bp, synthetic construct
  source 1..80: mol_type = other DNA
ttactcattcttctatttgcccttttcgaggaattctcagaattctcctcaacccacaacttaaggcctaatacctggcc

SEQ ID NO: 14520 - DNA, 80 bp, synthetic construct
  source 1..80: mol_type = other DNA
aagtcataaacggaaagcagctagattcagaggggaatgaggagaaaagctcagaggcaagaaaaggagaagaaataaga

SEQ ID NO: 14521 - DNA, 80 bp, synthetic construct
  source 1..80: mol_type = other DNA
aacaaattagctgtggacctcaataaccactgtccaagtttgtaaaacagagaacgagatatgagtaagttccttgccag

SEQ ID NO: 14522 - DNA, 80 bp, synthetic construct
  source 1..80: mol_type = other DNA
aatcctcaagatacctcaaggagctccactcgctgatattctttctggtataacactagttaccattctttctggtataa

SEQ ID NO: 14523 - DNA, 80 bp, synthetic construct
  source 1..80: mol_type = other DNA
cccattactgaatatatacccaaaggaatataaattattctgttataaagacacatgcacacatatattcattgcagcac

SEQ ID NO: 14524 - DNA, 80 bp, synthetic construct
  source 1..80: mol_type = other DNA
agaatgcctatgtaataggatgcatctgtttggctgtataaaagagtgagattcgtctttgcaatccctcagtggattcc

SEQ ID NO: 14525 - DNA, 80 bp, synthetic construct
  source 1..80: mol_type = other DNA
accagccatgtgtgtactgaccactgaaaatgtggctggtgtgacagagcagttgaatgttaaatttaagttgataaaat

SEQ ID NO: 14526 - DNA, 80 bp, synthetic construct
  source 1..80: mol_type = other DNA
atttaacaaatattgagttaggtactgtgttaggaactggggagtcatcagtgaactagactaaaaacttctaccctcat

SEQ ID NO: 14527 - DNA, 80 bp, synthetic construct
  source 1..80: mol_type = other DNA
agttacccttaaaatgcctactatgtgctaggtgccaaatacttacttacatttaaaggctgacgctgactgatttcctt

SEQ ID NO: 14528 - DNA, 80 bp, synthetic construct
  source 1..80: mol_type = other DNA
acataacatttaaataatctgaaagctcagcatccctggatgtgcaaagctgccagagctgggtcagagagtcaagctga

SEQ ID NO: 14529 - DNA, 80 bp, synthetic construct
  source 1..80: mol_type = other DNA
cacttctcacatactatgatggctataacaaacacaaggaaaatattgttgaggacttggagaaatcagaacccttgtac

SEQ ID NO: 14530 - DNA, 80 bp, synthetic construct
  source 1..80: mol_type = other DNA
taatggtcaagactagaaacagaattggaagaatagttaacagattgtggtataccaatatgagagaataacttgcaggt

SEQ ID NO: 14531 - DNA, 80 bp, synthetic construct
  source 1..80: mol_type = other DNA
aacctcttttggtccatcagttctcttttggtctaattttattgccaaactattacaggctgctgaaccactgatcaggc

SEQ ID NO: 14532 - DNA, 80 bp, synthetic construct
  source 1..80: mol_type = other DNA
caaataagacatagcccctgtccttgagaggttataaaatctagcatgctgtattgcatggtttatttgaccactctgta

SEQ ID NO: 14533 - DNA, 80 bp, synthetic construct
  source 1..80: mol_type = other DNA
ccgcacccggccactgccattgtttcctgactttgcctagaaaagttagccttcagagacaaattctcattcaaaggtga

SEQ ID NO: 14534 - DNA, 80 bp, synthetic construct
  source 1..80: mol_type = other DNA
ggagttctgaaggccataaccagaatctaaaagaagttcattcccctgaggaaaattccctattaacactgttcccataa

SEQ ID NO: 14535 - DNA, 80 bp, synthetic construct
  source 1..80: mol_type = other DNA
ctgtgcctaaggtggaaatagtagacttaaaaccacagtgcttgaagcacagccaataaatgaggatcaactctctttat

SEQ ID NO: 14536 - DNA, 80 bp, synthetic construct
  source 1..80: mol_type = other DNA
ttttgaaaatgtttccgattaaaaacatagctccctgttcatccaggactccaaagtggctctccaaaagtaatccaaaa

SEQ ID NO: 14537 - DNA, 80 bp, synthetic construct
  source 1..80: mol_type = other DNA
gtgtccctgcaggtgaatggatccaggaaaatgggttcctattacattcattttaaataagtgagcttattggaatttga

SEQ ID NO: 14538 - DNA, 80 bp, synthetic construct
  source 1..80: mol_type = other DNA
tacctggataggcattttctattacatagtttgtactcaagatgaagtacattttctgctttgctttccattccttgcac

SEQ ID NO: 14539 - DNA, 80 bp, synthetic construct
  source 1..80: mol_type = other DNA
aagaaaaggacccagcagaagcaagaataaaaaatgagaaggtagagaatgggtctctggagaatattaccatttaagga

SEQ ID NO: 14540 - DNA, 80 bp, synthetic construct
  source 1..80: mol_type = other DNA
acagtggcaatcaaaggctgtaaaaaggacctaaacagaaaaatctgaaaaaatccactacctggcacagtggctcatgc

SEQ ID NO: 14541 - DNA, 80 bp, synthetic construct
  source 1..80: mol_type = other DNA
catgaaggggcagcatgcagatgttattcctctgctttaaatagccagaagcaacacaagtaccctgtcccttctcttct

SEQ ID NO: 14542 - DNA, 80 bp, synthetic construct
  source 1..80: mol_type = other DNA
tggaggcaatttcacttcttccccctaggagagaaagtgaaaagatagagaaaccaaaggagacttggactaattcaagt

SEQ ID NO: 14543 - DNA, 80 bp, synthetic construct
  source 1..80: mol_type = other DNA
atgcaattccaagtatagtagtttttgggaaattagaggctgagttttgaaactcacaagcaagtgaaaatggtcaggga

SEQ ID NO: 14544 - DNA, 80 bp, synthetic construct
  source 1..80: mol_type = other DNA
acacaaaactacaatgagattttatcattttctctgtccttcaaagcttcctgaaacatctgcactgtctaggaaggcag

SEQ ID NO: 14545 - DNA, 80 bp, synthetic construct
  source 1..80: mol_type = other DNA
gttataacagctgcattatggatcatctgaaacactttggaataaaaatatttgtgacaggccgggtgaagtggctcacg

SEQ ID NO: 14546 - DNA, 80 bp, synthetic construct
  source 1..80: mol_type = other DNA
aatgattgagtaaaataaagatgactggactacaagcactatgatgccatggcagttgatcagatgactgagatggctac

SEQ ID NO: 14547 - DNA, 80 bp, synthetic construct
  source 1..80: mol_type = other DNA
tgacttgcttttaaagatctattctgccactaggttatttagaaattattggaaaacttgtgaattgggactcagggtaa

SEQ ID NO: 14548 - DNA, 80 bp, synthetic construct
  source 1..80: mol_type = other DNA
ttagcagtagtcttacgatgttgaggatatgaaacttgaagctcagagctcctcaaaatggagaacacgtcaggctttca

SEQ ID NO: 14549 - DNA, 80 bp, synthetic construct
  source 1..80: mol_type = other DNA
agatgggtcttaggcagattagaagtagctgatgagaggactagtaacagaagaagaaaagtcagtaaagctatctcaag

SEQ ID NO: 14550 - DNA, 80 bp, synthetic construct
  source 1..80: mol_type = other DNA
tctagaggaaattcttcaggaatgaggaacccaggcaaaatcatgaaaatgaagaaagcaataaacagcaacaggggtta

SEQ ID NO: 14551 - DNA, 80 bp, synthetic construct
  source 1..80: mol_type = other DNA
acagaaacactagaagaaaactcaagagaatatttgtgctgagtctctgtaggtccttcattagatctgcctttttcctt

SEQ ID NO: 14552 - DNA, 80 bp, synthetic construct
  source 1..80: mol_type = other DNA
tggaaagagcatgggctttggactcagattgacccatattgactcctgattataagtgatatcatcctgtgcaactgagt

SEQ ID NO: 14553 - DNA, 80 bp, synthetic construct
  source 1..80: mol_type = other DNA
attattccaatgctgtggataagctcactcaagcccttgatttcaagcggtggaatctcatagtctctcatattagcgga

SEQ ID NO: 14554 - DNA, 80 bp, synthetic construct
  source 1..80: mol_type = other DNA
ctttcctgaagcgaatctgataattatgatgttgtaacatatcttgcaccacccaaaacagtagattgaggatgtcaggt

SEQ ID NO: 14555 - DNA, 80 bp, synthetic construct
  source 1..80: mol_type = other DNA
atgtgtagggagagctgaagacaagggtgaagaaaaataaagaaaggtgtccttgctctgagctttgttttagggaggca

SEQ ID NO: 14556 - DNA, 80 bp, synthetic construct
  source 1..80: mol_type = other DNA
cgggatgccggggaaagggcaggcaaattaaatgaaatcattccggtgtggcatttaaatggtcaagtgaaggctggact

SEQ ID NO: 14557 - DNA, 80 bp, synthetic construct
  source 1..80: mol_type = other DNA
attctgcagctttttctctagggacactgccatgatgacgagtatgtttccagcaatagttagaataatcactacggctg

SEQ ID NO: 14558 - DNA, 80 bp, synthetic construct
  source 1..80: mol_type = other DNA
aagtaaagattagcagacaactttcctccctggaaattctcattgaaatgattacatgttggccaagcatgatttcaaac

SEQ ID NO: 14559 - DNA, 80 bp, synthetic construct
  source 1..80: mol_type = other DNA
tagttagttaggggccaacgaagaagaaagaagacgcgattagtgcagagatgctggaggtggtcagttactaagctaga

SEQ ID NO: 14560 - DNA, 80 bp, synthetic construct
  source 1..80: mol_type = other DNA
atgagaacaggttgccgttcctgatgtcacataaagttcgtcattgcaaaacgtgtctgtgtgtctgtttcttttctgcg

SEQ ID NO: 14561 - DNA, 80 bp, synthetic construct
  source 1..80: mol_type = other DNA
tctcctgatcctcctggggagggaagaaaatatttgtttcatcaacatgatttctttcctaatagcgtctatcatctaca

SEQ ID NO: 14562 - DNA, 80 bp, synthetic construct
  source 1..80: mol_type = other DNA
gaagctccagactatttgtccagtattattaaggagcatcttaccacctcactttcatagcaatggaatacctcacaaaa

SEQ ID NO: 14563 - DNA, 80 bp, synthetic construct
  source 1..80: mol_type = other DNA
atggaattttaattctgtttttgtctcctacctggcatctctacttcaacctcgctattcattcctcttctcagctgtgg

SEQ ID NO: 14564 - DNA, 80 bp, synthetic construct
  source 1..80: mol_type = other DNA
gtaaatgtgaggatattaatggacaatgtccattaatcctcgatatgctgcttggcaaggcaatgagacagacatgcaac

SEQ ID NO: 14565 - DNA, 80 bp, synthetic construct
  source 1..80: mol_type = other DNA
atggtgggcagactaagccaatttttcggaaaaaagctaaaactacaaagaatattgtgctaaggcttgagtgcactgat

SEQ ID NO: 14566 - DNA, 80 bp, synthetic construct
  source 1..80: mol_type = other DNA
caaactgagttctgcacccattttgcggtatgggttgatggctcagaaagaagcgcaagttttctttttaaaatagcaat

SEQ ID NO: 14567 - DNA, 80 bp, synthetic construct
  source 1..80: mol_type = other DNA
gctctccaaagtattatttaagttagcaagggcagattctttagtttggaggattattacccacctctcactgggtaact

SEQ ID NO: 14568 - DNA, 80 bp, synthetic construct
  source 1..80: mol_type = other DNA
atactttactttgggtaagtgccattttcagaaaggcagccaaatttgtacaaacatagtggatattctgagtctcttga

SEQ ID NO: 14569 - DNA, 80 bp, synthetic construct
  source 1..80: mol_type = other DNA
tttagaggcaggcctggtgttaaaggttttacatgcatcacgtcacttttaaatttgagtcttatctttcctactggatt

SEQ ID NO: 14570 - DNA, 80 bp, synthetic construct
  source 1..80: mol_type = other DNA
agttacttaactatttgataggacagataacactctcctgcattttcagaaacgattaagccatatcttatagttaatct

SEQ ID NO: 14571 - DNA, 80 bp, synthetic construct
  source 1..80: mol_type = other DNA
tctcatatatcccttcatttgattttcaacataacttcgacttagttagggccagtattactacattgattacacaaatg

SEQ ID NO: 14572 - DNA, 80 bp, synthetic construct
  source 1..80: mol_type = other DNA
atgacttctctcttactttcatgactattagccctatccctttcacatttcctgtaatagccagaacccagataacagag

SEQ ID NO: 14573 - DNA, 80 bp, synthetic construct
  source 1..80: mol_type = other DNA
agatcttaacttgtggtactccagcctgctcttgatctgtctgagtaatcgtgtagatttctatcacatcatcatcatca

SEQ ID NO: 14574 - DNA, 80 bp, synthetic construct
  source 1..80: mol_type = other DNA
attcaataattgttaagattctgctctgggcaagacatttgactgagtacttcagggcttcccagaagaggaaacaatac

SEQ ID NO: 14575 - DNA, 80 bp, synthetic construct
  source 1..80: mol_type = other DNA
atttgcttcaggtcatacagctaattattggcaaaactgcagagagaacttaaatttcctaactctgaaatcaggttctt

SEQ ID NO: 14576 - DNA, 80 bp, synthetic construct
  source 1..80: mol_type = other DNA
aaaccagtgaccttcatgtggtttttaaggacaatgtctctgtgaactacagactatgtgaaagatgaaatcataacatg

SEQ ID NO: 14577 - DNA, 80 bp, synthetic construct
  source 1..80: mol_type = other DNA
caggagacatcaatcatatatcgccttctacaaatcaggaatgtgtgtattttcaaatatctcagtttgtttttagaggt

SEQ ID NO: 14578 - DNA, 80 bp, synthetic construct
  source 1..80: mol_type = other DNA
agcaacatggctgttatttcacctgggtgcaagtgggctgagtccgaaaagagagtcagtgaagggagatgagggtgggg

SEQ ID NO: 14579 - DNA, 80 bp, synthetic construct
  source 1..80: mol_type = other DNA
cattctacttttcttgaagacggaggaccataagggatataaaggtttcactgaatactaagagcccgaaaaactgcttg

SEQ ID NO: 14580 - DNA, 80 bp, synthetic construct
  source 1..80: mol_type = other DNA
tgaccactcgaaccatgcctaggaaggaaaggagttgttgttttgtagaaggtgctggggtttgagagatcattcggaca

SEQ ID NO: 14581 - DNA, 80 bp, synthetic construct
  source 1..80: mol_type = other DNA
tgtggagtgggtagcctccgtattgattaagaaggtaatcacttaccttccactgtgagagttacccgaagctcggcatc

SEQ ID NO: 14582 - DNA, 80 bp, synthetic construct
  source 1..80: mol_type = other DNA
ggaagattagacagactcagcaatgcttggggttggtactgaggggacaggcgggagggaaagaaggaagatttgggacg

SEQ ID NO: 14583 - DNA, 80 bp, synthetic construct
  source 1..80: mol_type = other DNA
aagtaagggattgggggttcttgccccatagaaaagcgggacttgccactaagggtgaaggagaaggggttggggtactt

SEQ ID NO: 14584 - DNA, 80 bp, synthetic construct
  source 1..80: mol_type = other DNA
aggtgtggagtttcttcttcttggccatttattggatacttaaagacttgacattttcctcaccaaagaagtcactagga

SEQ ID NO: 14585 - DNA, 80 bp, synthetic construct
  source 1..80: mol_type = other DNA
cacttttattatgtaaaagtaatgtattcccccaatggattttataacaatacagtcagtccctcttgcaaaggggactt

SEQ ID NO: 14586 - DNA, 80 bp, synthetic construct
  source 1..80: mol_type = other DNA
taaaattgcctgtcattctaattagctctgaatacttctcttgcaacagtggtgtggcataacacattagtaggaacttt

SEQ ID NO: 14587 - DNA, 80 bp, synthetic construct
  source 1..80: mol_type = other DNA
ggatggaattgttttatgttttcatcacagtggcaattacacgggtgtaaacattcatcaaaagtggtcaaactctacat

SEQ ID NO: 14588 - DNA, 80 bp, synthetic construct
  source 1..80: mol_type = other DNA
aatggaatggcatggtgtttggattaatatgtacggcaaggttatggtcaggcacatctatgttttctatctagagtcac

SEQ ID NO: 14589 - DNA, 80 bp, synthetic construct
  source 1..80: mol_type = other DNA
gttaatgtgatcatgtgttcttgcatagtcatttcaataaatctgtgctgtaaaagagacaaaaaatgttggttcaaatt

SEQ ID NO: 14590 - DNA, 80 bp, synthetic construct
  source 1..80: mol_type = other DNA
gcaactgatgctcttacaataattgatacagaaatggtgattttcaaatgttgtttcctcttccagcgtctaatattgtt

SEQ ID NO: 14591 - DNA, 80 bp, synthetic construct
  source 1..80: mol_type = other DNA
cttttcagccattcattatatgtgaatggtatacctactctgtgtggcaccttacttatggagttcttactgcatttttc

SEQ ID NO: 14592 - DNA, 80 bp, synthetic construct
  source 1..80: mol_type = other DNA
gtaggaaatctagctgttgttttctatgataaattttagaaaacatagctagctcttcaaaatactctcaatggatgcac

SEQ ID NO: 14593 - DNA, 80 bp, synthetic construct
  source 1..80: mol_type = other DNA
agattcaagtttgcttgcagatgttttcaatgcgttggtgaaataggttaacctggacatgcaggtaagtttctactctc

SEQ ID NO: 14594 - DNA, 80 bp, synthetic construct
  source 1..80: mol_type = other DNA
ctgtaaatagaagagtaccaagagttttattgtaatgtgtatacatctacagcctgatattctttgggttgttttttttt

SEQ ID NO: 14595 - DNA, 80 bp, synthetic construct
  source 1..80: mol_type = other DNA
ttttatctttcaattatgtggtcttgtgttactataaataaatgcaagttcaattaacagaatctgttttcaatatgagt

SEQ ID NO: 14596 - DNA, 80 bp, synthetic construct
  source 1..80: mol_type = other DNA
acagcatttctagaagagaggtactcaatcaggaatgcattttagtaaatgaacatacacatttaaagcacaggaaaacc

SEQ ID NO: 14597 - DNA, 80 bp, synthetic construct
  source 1..80: mol_type = other DNA
ttcctttcagagattgccactgtgtagatctaagtacagttgtccacttagttctctcataacaagcctttagagatgct

SEQ ID NO: 14598 - DNA, 80 bp, synthetic construct
  source 1..80: mol_type = other DNA
ctgttcgattgcagaggatatttttctaccttcccccaagtggcagctgtaaatattgcagcctggtgaaaaatgagaag

SEQ ID NO: 14599 - DNA, 80 bp, synthetic construct
  source 1..80: mol_type = other DNA
gctaaaagattgatgattttaagacagcatgatgagtgctagactagtgcagtcagtctggggaggaatctgagttctgc

SEQ ID NO: 14600 - DNA, 80 bp, synthetic construct
  source 1..80: mol_type = other DNA
gggagaaagtatagaaatgactgaggaaaccaggaaaaactgcacttgaaaggccaaggctctttgaaagtgactacaaa

SEQ ID NO: 14601 - DNA, 80 bp, synthetic construct
  source 1..80: mol_type = other DNA
gcctactttatttatccagatctcctccaaaataggcaatacatctgccagtagatgtggcttacctataacccctggta

SEQ ID NO: 14602 - DNA, 80 bp, synthetic construct
  source 1..80: mol_type = other DNA
tagaaaatgacttttttcaagtgcctgtgatcaggaggttaagagagtttatggctgaaatattcagcatacacatcaaa

SEQ ID NO: 14603 - DNA, 80 bp, synthetic construct
  source 1..80: mol_type = other DNA
ctagctcggggaaagaaagccctgatgtcaaattaggggaaaaaaaatgaagaaagggcaagattagcatgcattgtaat

SEQ ID NO: 14604 - DNA, 80 bp, synthetic construct
  source 1..80: mol_type = other DNA
gctggttattaaaaagatcctggcatctttctccctctctcttttgcttcctctctcaccatgtgatctttgcacatgcc

SEQ ID NO: 14605 - DNA, 80 bp, synthetic construct
  source 1..80: mol_type = other DNA
ctttgtctcatagttttgatgctttgtgctaattattatacctgtaacaaacatcccttgccaccaggtggctacagagt

SEQ ID NO: 14606 - DNA, 80 bp, synthetic construct
  source 1..80: mol_type = other DNA
atggagaactattatgtgatcagcactatgccaggaattactggggttgcagaaaagtattggccaagatatctgacctt

SEQ ID NO: 14607 - DNA, 80 bp, synthetic construct
  source 1..80: mol_type = other DNA
gctcctcttaaatttcagtcctccaaataaacaaacacattgaccagtatttgttgcaactagtagttggcaagtacgta

SEQ ID NO: 14608 - DNA, 80 bp, synthetic construct
  source 1..80: mol_type = other DNA
acagggaggacaggcaagaaagtaatgggacattttatacctattgtaagaaccaagcatttgtgggaacgtgaaccaac

SEQ ID NO: 14609 - DNA, 80 bp, synthetic construct
  source 1..80: mol_type = other DNA
aactaatgtcaggtagtggactagactctttgcaagttatttcttccaattctcacagcagtcaatgaagtagttattac

SEQ ID NO: 14610 - DNA, 80 bp, synthetic construct
  source 1..80: mol_type = other DNA
actagctgtgaagcttttagcaatttacattaacccctcttagactcagtgtcctagtccataaaataaggttgacacta

SEQ ID NO: 14611 - DNA, 80 bp, synthetic construct
  source 1..80: mol_type = other DNA
tgttaaaattatggatggtaaacttgccttcctaggaaatgtattgaggggggactcccacaaaaaggacatggccctca

SEQ ID NO: 14612 - DNA, 80 bp, synthetic construct
  source 1..80: mol_type = other DNA
tcttggggctcatcttagaggtccatgtggataggtcagaatctgtcaacattatgtctttttctcagcatttttcctaa

SEQ ID NO: 14613 - DNA, 80 bp, synthetic construct
  source 1..80: mol_type = other DNA
agagagatggtaggtaaatgctataaaattttagctattagtcattagttctataaatttattagttgtgtatgaatcta

SEQ ID NO: 14614 - DNA, 80 bp, synthetic construct
  source 1..80: mol_type = other DNA
tgtctctaccaaaactacaaaaaattagaagggcacggtggcacatgcctgttgtcccaactactagggaggctgaggtg

SEQ ID NO: 14615 - DNA, 80 bp, synthetic construct
  source 1..80: mol_type = other DNA
gagggattgaactggattcatccattcatcagtttttttatgatgagattactttgtgcaagacactccactaaggacta

SEQ ID NO: 14616 - DNA, 80 bp, synthetic construct
  source 1..80: mol_type = other DNA
gattttcacattgatattgatggtcatgaagctagcagtagggaattaaatggagagaactcaagactttatcaagacaa

SEQ ID NO: 14617 - DNA, 80 bp, synthetic construct
  source 1..80: mol_type = other DNA
aaataagagcatgatccaaattctgtgcctcatcccagaactttcagagattattgacaccttacagagtcattgtaaag

SEQ ID NO: 14618 - DNA, 80 bp, synthetic construct
  source 1..80: mol_type = other DNA
cagaggtatgagatgttatataaccaagatctttaggttagcaagcatatagatcaaatatgttgtaaatggaatccttg

SEQ ID NO: 14619 - DNA, 80 bp, synthetic construct
  source 1..80: mol_type = other DNA
tcaatgcattgaggactctcagatcagtgggactgtgaaattttaaactcctcaaggtagaacacagtggtaatgttttg

SEQ ID NO: 14620 - DNA, 80 bp, synthetic construct
  source 1..80: mol_type = other DNA
actttgccaatcacatcttatcatttgccacactgcaggtagagatttatccacattttgatcttataagactcaaatct

SEQ ID NO: 14621 - DNA, 80 bp, synthetic construct
  source 1..80: mol_type = other DNA
ttcttaaacttgaataaaatgtttattcgtagtagattttctgctttagcagatgccactggattctgttgacatataaa

SEQ ID NO: 14622 - DNA, 80 bp, synthetic construct
  source 1..80: mol_type = other DNA
taattcctattactgtgccttatatgaaaaaatatgcaatctaagaggagggaattgccataaattaaaactttgagtgt

SEQ ID NO: 14623 - DNA, 80 bp, synthetic construct
  source 1..80: mol_type = other DNA
ttattgtttgcaagagccatgaaatctaggttattgatttgtgtcttaggggaaatgggagtagcaatattgattacttt

SEQ ID NO: 14624 - DNA, 80 bp, synthetic construct
  source 1..80: mol_type = other DNA
ttgtgtgtttgcctaagtaaatagagtgttcaaagattgatgtagctactggtagataagtgtgagtttgccttgtttta

SEQ ID NO: 14625 - DNA, 80 bp, synthetic construct
  source 1..80: mol_type = other DNA
tggctgaggatgtcagggtattgcccagacatacaatgaaaagatgagtcaacagagaatgagggctcaaaaaatcacca

SEQ ID NO: 14626 - DNA, 80 bp, synthetic construct
  source 1..80: mol_type = other DNA
aaacaagcattaaaaagttgttaaaatataagaaatctaggaaggttgatggatgattatgaataaaatggaaaaccgga

SEQ ID NO: 14627 - DNA, 80 bp, synthetic construct
  source 1..80: mol_type = other DNA
actatctatacaggtcatttgcccatttcattactgcatgatctcacttatatgtggaacctgaacaagtcaaactcata

SEQ ID NO: 14628 - DNA, 80 bp, synthetic construct
  source 1..80: mol_type = other DNA
cagtctgtattttgctattgctattataggggagcagaaatatcatcacccatcctgtgttaatggctgtactccctgta

SEQ ID NO: 14629 - DNA, 80 bp, synthetic construct
  source 1..80: mol_type = other DNA
gtcatttttagctttaggcaaatgttcagagacatgagtgctatattagctcaggaaaattttagaagtctgtcccttaa

SEQ ID NO: 14630 - DNA, 80 bp, synthetic construct
  source 1..80: mol_type = other DNA
ttgtgtcttctgaattgggggacaccagcaaggcttttagccataggaacataagaaattcttgtggtcacagagcaaag

SEQ ID NO: 14631 - DNA, 80 bp, synthetic construct
  source 1..80: mol_type = other DNA
gttctcttctttattatctccctctttctgccccatattgtaaactcccttgtagacagttcctcatctgtcttgttcag

SEQ ID NO: 14632 - DNA, 80 bp, synthetic construct
  source 1..80: mol_type = other DNA
attccttttgaatagatattcatctgtctggtatggtttggaagagggtagagggtatggctagagggtaagagactact

SEQ ID NO: 14633 - DNA, 80 bp, synthetic construct
  source 1..80: mol_type = other DNA
gactgttagaatgattttgtttggttggaaagctgcgtgatctctgcatataattccaagtataaaatgtacttgatgca

SEQ ID NO: 14634 - DNA, 80 bp, synthetic construct
  source 1..80: mol_type = other DNA
acatctttgtgaggagtagttggtatcaggaaaagttaatttcatcaggttagggagagtgttaggagaaaagcaaactg

SEQ ID NO: 14635 - DNA, 80 bp, synthetic construct
  source 1..80: mol_type = other DNA
aaattatactgttttctgctctttgcttattagttactgtaactaattcctcatgagattccaaaaccccttaacttaaa

SEQ ID NO: 14636 - DNA, 80 bp, synthetic construct
  source 1..80: mol_type = other DNA
aatcagatgcttactagtagacttcctggagactaagaatcagaaggctgaatggaatttaggtgacaatgctgaagatt

SEQ ID NO: 14637 - DNA, 80 bp, synthetic construct
  source 1..80: mol_type = other DNA
actggggaccattgtcaattaattgatggctcacagatttctttctgacctctattaccttttctgaacttcttgtatca

SEQ ID NO: 14638 - DNA, 80 bp, synthetic construct
  source 1..80: mol_type = other DNA
agaagtgcagctcaatgaaatgtaaaagcatgccacttcaacataatttagctagttgctttatcttgacacatttcttg

SEQ ID NO: 14639 - DNA, 80 bp, synthetic construct
  source 1..80: mol_type = other DNA
tcatcttgaatatttatgaattatcatattcccttctaacaaggatagcaatgacagtttctaatcctaaatgactgata

SEQ ID NO: 14640 - DNA, 80 bp, synthetic construct
  source 1..80: mol_type = other DNA
gtgctggcaggagagagaagtgcagagcgaaaaggggaaaagccccttaaaaaactatcagatcttgtgagaactcactc

SEQ ID NO: 14641 - DNA, 80 bp, synthetic construct
  source 1..80: mol_type = other DNA
tgtatctatttaatggactttttaaccacatgtcggtatctttaacgccacagatatacagtgagatcataataaccagt

SEQ ID NO: 14642 - DNA, 80 bp, synthetic construct
  source 1..80: mol_type = other DNA
attagaagttaatagtcaaataagtattcccctcccctaagcttccaggctaactcatgtctccctaactttggccacag

SEQ ID NO: 14643 - DNA, 80 bp, synthetic construct
  source 1..80: mol_type = other DNA
cttgttagccctttcaaatagaatcttgctgccaactggttagccatttcaaagtctttaaacatgtgcaatacatttgt

SEQ ID NO: 14644 - DNA, 80 bp, synthetic construct
  source 1..80: mol_type = other DNA
cccaagttttagaagagtggctaaatccattgacagagtactcaatgctgtataacagagaaagaaataggtgtatttag

SEQ ID NO: 14645 - DNA, 80 bp, synthetic construct
  source 1..80: mol_type = other DNA
aaagttttaagattcagcagtaaagcttttattctcctaccacaatcactatggctgccactggttgtgaaaatcacctc

SEQ ID NO: 14646 - DNA, 80 bp, synthetic construct
  source 1..80: mol_type = other DNA
tatcgcaaatagaacaagcactcccactgtgcaatggcagaacagtgagtttcataagggggtacaaggtaacagaacaa

SEQ ID NO: 14647 - DNA, 80 bp, synthetic construct
  source 1..80: mol_type = other DNA
ttagttgctgatatgtcttctttttcgcaggtatacccttgtaggaaattaaagcccactttctccattattatctcttt

SEQ ID NO: 14648 - DNA, 80 bp, synthetic construct
  source 1..80: mol_type = other DNA
attggatctttaaattcaatagggaaatctcaggaaatgtactgtaagttacttccctatgcttgtcttgaataatcttt

SEQ ID NO: 14649 - DNA, 80 bp, synthetic construct
  source 1..80: mol_type = other DNA
ccaaacgtgtttcacaaatccaaggcagttatagaagaagtaagaatgtgtgtcctgattatgagccagaaacatgacct

SEQ ID NO: 14650 - DNA, 80 bp, synthetic construct
  source 1..80: mol_type = other DNA
aacatgctcttacataaccctcctgctttggaggatctaaagcacaaaatggaagagagattatatagccacagtttttc

SEQ ID NO: 14651 - DNA, 80 bp, synthetic construct
  source 1..80: mol_type = other DNA
agcgagactccgtctctcacttctatcttttaagcactaagttaaaagagtacttttacacaataaactaggggtgtttt

SEQ ID NO: 14652 - DNA, 80 bp, synthetic construct
  source 1..80: mol_type = other DNA
gcaagcctagcatgtagcaacacactttttatggttttgctaatctgatagtgtaagttcaatgtttataatgaagatgt

SEQ ID NO: 14653 - DNA, 80 bp, synthetic construct
  source 1..80: mol_type = other DNA
tttacatttccactgagattgacttgtataacaacatggtgtttatttcaattgttaagttgatctgtgatggcttcgaa

SEQ ID NO: 14654 - DNA, 80 bp, synthetic construct
  source 1..80: mol_type = other DNA
ctataagacttgggcaatttacttagtttccctgtaaaatggaatattctttacctataaaatgggtattccttaccttt

SEQ ID NO: 14655 - DNA, 80 bp, synthetic construct
  source 1..80: mol_type = other DNA
taaggtcattatgattcaacctttccttccctataaactttcagaaaaccctctttgctactctctcttctcgggatctt

SEQ ID NO: 14656 - DNA, 80 bp, synthetic construct
  source 1..80: mol_type = other DNA
tgaacttatagcttgttatggagagtagagaagagaatggctgtgttctcagcagttgtgtttttccaaagaccatgcct

SEQ ID NO: 14657 - DNA, 80 bp, synthetic construct
  source 1..80: mol_type = other DNA
atttatctaaacttcgaagaaatacggaagtatagttaatatgattagagctaaatgtctcaggcactgggccagttgct

SEQ ID NO: 14658 - DNA, 80 bp, synthetic construct
  source 1..80: mol_type = other DNA
ccgcgctcagcctttaagactttttgataaccatatctcatattgtgtaggtaaataagaaccctgaaaatcatctgcct

SEQ ID NO: 14659 - DNA, 80 bp, synthetic construct
  source 1..80: mol_type = other DNA
gtgcttgttgtgtacttgcagggcccgtgttgaagggggaaatgagaagtaggttgtggaaattttgtttaagatctaaa

SEQ ID NO: 14660 - DNA, 80 bp, synthetic construct
  source 1..80: mol_type = other DNA
ctaagcttcttgcaattgttttctgcctactcaaatagaacataagagagctcagtcccgtgtacccaaggttaggaaaa

SEQ ID NO: 14661 - DNA, 80 bp, synthetic construct
  source 1..80: mol_type = other DNA
aggtctaggtaacaacatttcagaagatataggaattttcatctcccaccccccattcagtttctcacggattgctttga

SEQ ID NO: 14662 - DNA, 80 bp, synthetic construct
  source 1..80: mol_type = other DNA
aagcgaagatgaccttggagataatccagtgagaaaatcacactcaactggaatgtaaactccatgaaataagccatttc

SEQ ID NO: 14663 - DNA, 80 bp, synthetic construct
  source 1..80: mol_type = other DNA
gacaaaaagtaataagctgtgaaaatgtgacaaggcaaaagttctagggctatgggacttgtttgggtggagatgtgggc

SEQ ID NO: 14664 - DNA, 80 bp, synthetic construct
  source 1..80: mol_type = other DNA
aaagatgaaacaattgatgcttcaagagaacgacttatcctagatcaactagtggcagagcaagttttagcaatgagtaa

SEQ ID NO: 14665 - DNA, 80 bp, synthetic construct
  source 1..80: mol_type = other DNA
ttttctttctctttaaaagtctatttcatgagctttctgctgtttaagttttacagtagggctcctgacattcttcatag

SEQ ID NO: 14666 - DNA, 80 bp, synthetic construct
  source 1..80: mol_type = other DNA
ctatccctagtaaatgtaagctgaagtttcatcctggtatcgggggagagggataaagggactcatcatccataaaactt

SEQ ID NO: 14667 - DNA, 80 bp, synthetic construct
  source 1..80: mol_type = other DNA
cataagcgaagagctttatattgagagccctttgagataaactgtatcaatagatttcacaagctactcagttgttatta

SEQ ID NO: 14668 - DNA, 80 bp, synthetic construct
  source 1..80: mol_type = other DNA
gtagtttgatgcactgaaagggaaacaagagcagtaatacaatttgtatactgcagtcatgacattttagtgaccttcaa

SEQ ID NO: 14669 - DNA, 80 bp, synthetic construct
  source 1..80: mol_type = other DNA
cttcagctgaaggaataatttttagctaccccacttcatggcatgttccagaaataattccccactgggtcaacatcccc

SEQ ID NO: 14670 - DNA, 80 bp, synthetic construct
  source 1..80: mol_type = other DNA
tgctttggaaaatgctatgcagaacagttacttagcatgtgtagcaagatacgaagtgggaaatacagatgaaaaacaag

SEQ ID NO: 14671 - DNA, 80 bp, synthetic construct
  source 1..80: mol_type = other DNA
tgttgaaactttccttaagtaggtaatatttgttatccaacgtctcagaggaatttccatttgcttcataaagcatggca

SEQ ID NO: 14672 - DNA, 80 bp, synthetic construct
  source 1..80: mol_type = other DNA
gttttgtttaacaaatcagactgaacagagttagtacaatttggctggccagggcctagcattaaagagaaaactgagaa

SEQ ID NO: 14673 - DNA, 80 bp, synthetic construct
  source 1..80: mol_type = other DNA
gacaaccatttctgtgtgacttcaaagacagcatcacttcctccaaatgaaagtgagtataggatttgtagtagtgaaat

SEQ ID NO: 14674 - DNA, 80 bp, synthetic construct
  source 1..80: mol_type = other DNA
tagggcaggtgctctcctttatattagttgagtatcagcttgagatgaatgttataaaaatagaactcaatacggattaa

SEQ ID NO: 14675 - DNA, 80 bp, synthetic construct
  source 1..80: mol_type = other DNA
tcatagaagtcaagcttattttgctctgttacagactaatgagagatgcaatttagaaaggatttctgtatgaaaccaaa

SEQ ID NO: 14676 - DNA, 80 bp, synthetic construct
  source 1..80: mol_type = other DNA
acaattagtgagttctacagtcaacgacatggacaatgccagttcttgtgaacatttccaagaggatatttatgcttaac

SEQ ID NO: 14677 - DNA, 80 bp, synthetic construct
  source 1..80: mol_type = other DNA
taaaggaagggatagagaaaggaaaatgcaaagaatggacagaggaaagagatacggaagaaggataagggaagtatgga

SEQ ID NO: 14678 - DNA, 80 bp, synthetic construct
  source 1..80: mol_type = other DNA
acattccatctacttgtgcgttatgaaaccatggattatatgtattccaaactctgttcattctattcctcaactaaata

SEQ ID NO: 14679 - DNA, 80 bp, synthetic construct
  source 1..80: mol_type = other DNA
tggccttttaaaaataagaatgtggtgactacagactcatccccttagggaaatttgtcacgcaaaccgattacctaact

SEQ ID NO: 14680 - DNA, 80 bp, synthetic construct
  source 1..80: mol_type = other DNA
gaacagcattatataggcatcggtacttttctctgacttcaagcaagaccatacattaagcataccaggaaaaaatgaac

SEQ ID NO: 14681 - DNA, 80 bp, synthetic construct
  source 1..80: mol_type = other DNA
ggaagccatcagctctttgccttttctcgaatttaagattttaattgcctcagtgtttcaataacaattacagcctattc

SEQ ID NO: 14682 - DNA, 80 bp, synthetic construct
  source 1..80: mol_type = other DNA
atgaagtctaggtgccagctgggcccagctcttatctagaggctctggaaaaaatctgctttcatgctaattcaagtcaa

SEQ ID NO: 14683 - DNA, 80 bp, synthetic construct
  source 1..80: mol_type = other DNA
agtgtctttgtcatgtgcacttaaatttagtttcaatgcgaaaaaagaggcttaggaattcaattggtactcacatagct

SEQ ID NO: 14684 - DNA, 80 bp, synthetic construct
  source 1..80: mol_type = other DNA
tgggcattcatgttactgccacttcaatggaaagcaaccacacatagttatactttgaaagtctacctccacaacttcac

SEQ ID NO: 14685 - DNA, 80 bp, synthetic construct
  source 1..80: mol_type = other DNA
agcctcaaggatgttttgctgatgggatctgaatcaatataatggctttaaatgaattggacatgctcattttacccaca

SEQ ID NO: 14686 - DNA, 80 bp, synthetic construct
  source 1..80: mol_type = other DNA
agaacgggcagactgcctcctcaagtgggtccctgacacctgacccccgaacagcctaactgggaggcacccccaagtag

SEQ ID NO: 14687 - DNA, 80 bp, synthetic construct
  source 1..80: mol_type = other DNA
aaatacagagaatgccacaaagatactcctcgagaaaagcaactccaagacacataattgtcagattcaccaaagttgaa

SEQ ID NO: 14688 - DNA, 80 bp, synthetic construct
  source 1..80: mol_type = other DNA
gaaagttaacaaggatacccaggaattgaactcagctctgcaccaagaggacctaatagacatctacagaactctccacc

SEQ ID NO: 14689 - DNA, 80 bp, synthetic construct
  source 1..80: mol_type = other DNA
tctactggaggtacaaggaggaactggtaccattcattctgaaactattccaatcaatagaaaaagagggaatcctccca

SEQ ID NO: 14690 - DNA, 80 bp, synthetic construct
  source 1..80: mol_type = other DNA
ctacagtaaccaaaacaacatggtactggcaccaaaacagagatatagatcaatggaacagaacagagccctcagaaata

SEQ ID NO: 14691 - DNA, 80 bp, synthetic construct
  source 1..80: mol_type = other DNA
gctataaagacacatgcacacgtatgtttattgcagcactattcacaatagcaaagacttggaaccaacccaaatgtcca

SEQ ID NO: 14692 - DNA, 80 bp, synthetic construct
  source 1..80: mol_type = other DNA
caattactattgcatataaagagcaattataatctgtcaatgactacaagccagccatcttaacatcaactgagaacaaa

SEQ ID NO: 14693 - DNA, 80 bp, synthetic construct
  source 1..80: mol_type = other DNA
ataaccgttttaacttggtttgtctcccactctttaatgaagccaaagtaaaaaatccagttaaaataaatttttgctga

SEQ ID NO: 14694 - DNA, 80 bp, synthetic construct
  source 1..80: mol_type = other DNA
atttaatggaccaaagactttctctggttacttaactatatggcttagagagaaaaggcattctttggcaaatcttaaat

SEQ ID NO: 14695 - DNA, 80 bp, synthetic construct
  source 1..80: mol_type = other DNA
ccttcatttgttcctttcttcatgcctgcctttctgcctgagttccttctttgaatatttgcagagccaagtgttcagaa

SEQ ID NO: 14696 - DNA, 80 bp, synthetic construct
  source 1..80: mol_type = other DNA
tgggaggctaatgactacgtttccacaaatattggcatgagctggatacttgattcatgagagcaacttcccaatttttg

SEQ ID NO: 14697 - DNA, 80 bp, synthetic construct
  source 1..80: mol_type = other DNA
gggcagagctctttgccttattcactcatatatccctagtatatagaacattaccaagcacatacttggcattaaataaa

SEQ ID NO: 14698 - DNA, 80 bp, synthetic construct
  source 1..80: mol_type = other DNA
ttatatctgcagctgtcagaaaactttatttacagtcagttgcctttctctgaataatcatattgttgtcctgaaagata

SEQ ID NO: 14699 - DNA, 80 bp, synthetic construct
  source 1..80: mol_type = other DNA
tggtctatattatagaacaagtctgtgtgatagaaactgtctccatggcactcaagtgagtggaatgatcgtgactgaat

SEQ ID NO: 14700 - DNA, 80 bp, synthetic construct
  source 1..80: mol_type = other DNA
atgtgtagactgagttatgagaatactcaagttaaaagtcactttcgcattcctttcaaacaaaaggctttgtcaggtga

SEQ ID NO: 14701 - DNA, 80 bp, synthetic construct
  source 1..80: mol_type = other DNA
ttgaagtagctttttgtttgtttctttcccctttatataggatgtcttgaagccgagaaggaagagctgttggagagacg

SEQ ID NO: 14702 - DNA, 80 bp, synthetic construct
  source 1..80: mol_type = other DNA
ttgaaaaccttcagtttgttgtgctatgtgcatactaacactgagataattcccagatagttctgctaccacctatggag

SEQ ID NO: 14703 - DNA, 80 bp, synthetic construct
  source 1..80: mol_type = other DNA
attttttgtattttttgtagacatggggttttgccattttgtccaggctggtcttgaactcctgagctcaagcaatccac

SEQ ID NO: 14704 - DNA, 80 bp, synthetic construct
  source 1..80: mol_type = other DNA
tggagattcgattttggttcagttgttttggagtgttcacactattttggatgacatatgctgtatgacacatggcatat

SEQ ID NO: 14705 - DNA, 80 bp, synthetic construct
  source 1..80: mol_type = other DNA
cgctatgtttttcagtttctgttattgattgatcttatccaagacaagaagttttgcatcaccttcccttttagtagaat

SEQ ID NO: 14706 - DNA, 80 bp, synthetic construct
  source 1..80: mol_type = other DNA
ctctcacacagaatattttgagttcctagatattggaaggccatattttatgtattacggtagtaaggggatgatttgga

SEQ ID NO: 14707 - DNA, 80 bp, synthetic construct
  source 1..80: mol_type = other DNA
agtcatttgggtatatacccagtaatgggatggctgggtcaaatggtatttccagttctagatctctgaggaatcgccac

SEQ ID NO: 14708 - DNA, 80 bp, synthetic construct
  source 1..80: mol_type = other DNA
attttcacgatattgattcttcctacctatgagcatagaatgttcttccatttgtttgtatcctcttttatttctttgag

SEQ ID NO: 14709 - DNA, 80 bp, synthetic construct
  source 1..80: mol_type = other DNA
attctctgatggtagtttgtatttctgtgggatcagtggtaatatcccctttgtcattttttattgcgtctatttgattc

SEQ ID NO: 14710 - DNA, 80 bp, synthetic construct
  source 1..80: mol_type = other DNA
ctttgtctcttttgatctttgttggtttaaagtctgttttatcagagactcggattgcaacccctgcctttttcgttttc

SEQ ID NO: 14711 - DNA, 80 bp, synthetic construct
  source 1..80: mol_type = other DNA
agttgctcttctcgaggagtatctttgtggcgttctctgtatttcctgaatctgaatgttggcctgccttgctagattgg

SEQ ID NO: 14712 - DNA, 80 bp, synthetic construct
  source 1..80: mol_type = other DNA
tgcaggatataatctcctggtgcgccgttttttaagcctgttggaaaagcgcagtattggggtgggagtgacccgatttt

SEQ ID NO: 14713 - DNA, 80 bp, synthetic construct
  source 1..80: mol_type = other DNA
gcttaagactgaagcaatcatggtgaacctgaggaatgcggtgcattcattcctgtaaggatgttactacttattatttt

SEQ ID NO: 14714 - DNA, 80 bp, synthetic construct
  source 1..80: mol_type = other DNA
tatggaagagtccaagagaactagagcagacaactgggaaagaaaagagtgaaggacagtgataaagaagggaaaagaag

SEQ ID NO: 14715 - DNA, 80 bp, synthetic construct
  source 1..80: mol_type = other DNA
tttaaaacagaacattgttttttaaaatgccagcaggacaagttttttatcagctaggccagaaaggactctggaaaacg

SEQ ID NO: 14716 - DNA, 80 bp, synthetic construct
  source 1..80: mol_type = other DNA
gaattacgatttctctgataatggtagtcagcaatgagtccattaaatcacacatatattatccctgcctggagatacta

SEQ ID NO: 14717 - DNA, 80 bp, synthetic construct
  source 1..80: mol_type = other DNA
gccggaatttgatctgatggcaacttaattccttcttagccttggatcaatagaatgcaacttccagtttccttgttagg

SEQ ID NO: 14718 - DNA, 80 bp, synthetic construct
  source 1..80: mol_type = other DNA
gtgatcatggcagtaagcatggaaaagaaactgcacaatgccaccaattacttcttaatgtccctagccattgctgatat

SEQ ID NO: 14719 - DNA, 80 bp, synthetic construct
  source 1..80: mol_type = other DNA
agttggagagcccagtttgaatttaattgctaatatgcttatctcacaaaggagtaaaatagacttccagttgcctggag

SEQ ID NO: 14720 - DNA, 80 bp, synthetic construct
  source 1..80: mol_type = other DNA
tctagaaggtcagctttcagataaggtactgaaaagtatgcataagactcaagaaagcagccttggaaaattaactcttt

SEQ ID NO: 14721 - DNA, 80 bp, synthetic construct
  source 1..80: mol_type = other DNA
catattgataggttcaacccagtgctagaaaattgacctgaaacaatgaactctgagataaatctgagacactggatttt

SEQ ID NO: 14722 - DNA, 80 bp, synthetic construct
  source 1..80: mol_type = other DNA
aaccggatttctttagtagagacccagtatctactaaaaatacaaaaaaattatctgggtatggtgctgcctgcccgtaa

SEQ ID NO: 14723 - DNA, 80 bp, synthetic construct
  source 1..80: mol_type = other DNA
gacccaagtatattccatatacaaaagtaacccttacaacccagggattagtaagcgctaaaaataaaggggtaggtgaa

SEQ ID NO: 14724 - DNA, 80 bp, synthetic construct
  source 1..80: mol_type = other DNA
aaaataataaagataagagcagtaattgactgggtagagaacagtagagaataaaaggacagtatacctaatcaagaaat

SEQ ID NO: 14725 - DNA, 80 bp, synthetic construct
  source 1..80: mol_type = other DNA
acagaatccaatgtcatgtgaattgaaaaaactcaaagttgtagaagcagagagtagaacagtgtcttccagaggctggg

SEQ ID NO: 14726 - DNA, 80 bp, synthetic construct
  source 1..80: mol_type = other DNA
acctaatgcatgcagggcttaaaacctggatgatgggttgatgggtgcaggaaaccaccacaggacatgtatacctatgt

SEQ ID NO: 14727 - DNA, 80 bp, synthetic construct
  source 1..80: mol_type = other DNA
cactcaatagaagaaatgaactaaagatgtgagtaggcaatttggattttttaaatatattttataggccaggtgcggca

SEQ ID NO: 14728 - DNA, 80 bp, synthetic construct
  source 1..80: mol_type = other DNA
ttttaactcagaaaactaacatctaaagtgttcactggatgataaacgtgtgttaatagcaacatatatatgtgtgagat

SEQ ID NO: 14729 - DNA, 80 bp, synthetic construct
  source 1..80: mol_type = other DNA
gaataatggaaacattaaaaaaaaaaaaaacccacaggagccagcttaacagagcccccactgaccaaatgtgggaacat

SEQ ID NO: 14730 - DNA, 80 bp, synthetic construct
  source 1..80: mol_type = other DNA
cattgaatccactcaccacagaggcaagactgaactctaagtctgaatttaactgggttttcaatgcctactaaatcaaa

SEQ ID NO: 14731 - DNA, 80 bp, synthetic construct
  source 1..80: mol_type = other DNA
gttccaagtctttgctattgtgaatagtgccgcaataaacatacgtgtgcatgtgtctttatagcagcatgatttatagt

SEQ ID NO: 14732 - DNA, 80 bp, synthetic construct
  source 1..80: mol_type = other DNA
gaaagtaaggacggtctcaaatcagtaatctaaacctctactcttagaaactagaaatgaagagcaaattaaacccagtg

SEQ ID NO: 14733 - DNA, 80 bp, synthetic construct
  source 1..80: mol_type = other DNA
tcaacatcactgatcatcagagacaagcaaatcaaaactacaaattaaactacaatctcgccccagttaaaatgacttgt

SEQ ID NO: 14734 - DNA, 80 bp, synthetic construct
  source 1..80: mol_type = other DNA
tggatagcttcactggcaaattctactgtacatttcgggaagaaaaaaataagaattctatacaacctctcccagaaaat

SEQ ID NO: 14735 - DNA, 80 bp, synthetic construct
  source 1..80: mol_type = other DNA
caacatcatactgcaggtcctagccagtgtagtaacataagaaaaattaatgaaatgcacactggaaagaaaagaacaga

SEQ ID NO: 14736 - DNA, 80 bp, synthetic construct
  source 1..80: mol_type = other DNA
attattaagatgtcagtttgcccccaaatgatctgtagattcaacacaattgcaaccaaaactctcagcaggttttttta

SEQ ID NO: 14737 - DNA, 80 bp, synthetic construct
  source 1..80: mol_type = other DNA
aaatggctaattaaaaataagaagttatttgaacagacacttcaccaaggaagatatgtagctatcaaataaatagacaa

SEQ ID NO: 14738 - DNA, 80 bp, synthetic construct
  source 1..80: mol_type = other DNA
aacttttaaacattcttattggtttaggagctcagatcacacccattttccttgtggccgattggcatgtttttgtctga

SEQ ID NO: 14739 - DNA, 80 bp, synthetic construct
  source 1..80: mol_type = other DNA
gctatgttgcccaggctggtctcagactcctggctcaaggttattttaaattctcacaaaaacataacattatagacatg

SEQ ID NO: 14740 - DNA, 80 bp, synthetic construct
  source 1..80: mol_type = other DNA
gaccgttaaacttaagagatgcaaactgatacctgggagcagacatatcagatatataacagcatcttcaaattgctaat

SEQ ID NO: 14741 - DNA, 80 bp, synthetic construct
  source 1..80: mol_type = other DNA
aaggggcattataatgttgcatttagttagctaccactgaagtcacaatatcaccctatttctctcccaacagaacgcaa

SEQ ID NO: 14742 - DNA, 80 bp, synthetic construct
  source 1..80: mol_type = other DNA
atatgtgcggaatttatagttaacattacaaaatgttgatgcatgaaatcaaagacctaaataaatcaagaggcataccc

SEQ ID NO: 14743 - DNA, 80 bp, synthetic construct
  source 1..80: mol_type = other DNA
acacaggtaggtccttgaagaactaaaataaccttgaaaaagaatgcattaagaggaatcactgtacctgatattaagga

SEQ ID NO: 14744 - DNA, 80 bp, synthetic construct
  source 1..80: mol_type = other DNA
ctgaaatcaacttgtctgcaaggtcatgctccctccctccagagattctaggagaatatcctttctttgggagttttaga

SEQ ID NO: 14745 - DNA, 80 bp, synthetic construct
  source 1..80: mol_type = other DNA
aacactttggcagtttattacaaacctaaacaaacaactaacatgcaatccagcagttgcactcctgggcttttatccca

SEQ ID NO: 14746 - DNA, 80 bp, synthetic construct
  source 1..80: mol_type = other DNA
acaactggagttaatggtccttgtcatcattctattatggattaactcagttttcaattaaattgtgaaaagaaaaccct

SEQ ID NO: 14747 - DNA, 80 bp, synthetic construct
  source 1..80: mol_type = other DNA
ataagcctttgcccagccacataccatgtaatcctatgcctctttttcctgcagatttgctactctaagttttaataatg

SEQ ID NO: 14748 - DNA, 80 bp, synthetic construct
  source 1..80: mol_type = other DNA
ctcacagcttcctcatgcctacagttcaaattaaatttcctcttttatattcctagggcttctctagttgcatgtcaaac

SEQ ID NO: 14749 - DNA, 80 bp, synthetic construct
  source 1..80: mol_type = other DNA
tttggaaattggcagtcattcataagacacagatatattcggagtaaggagagggaagcaactgggaaaatatcctttcc

SEQ ID NO: 14750 - DNA, 80 bp, synthetic construct
  source 1..80: mol_type = other DNA
gtgggagacataggtttctcacttcattactagcatgcaacccatgcaatcaaacatctgtgccagaagtagattttagg

SEQ ID NO: 14751 - DNA, 80 bp, synthetic construct
  source 1..80: mol_type = other DNA
aataactacattaaaacatagaactgataaataaggcaccctccccccaaaagattactctctatctctctctctctata

SEQ ID NO: 14752 - DNA, 80 bp, synthetic construct
  source 1..80: mol_type = other DNA
gagttccaactttgctatcttttctaccactccccatcttcttatacccagctgtcctacccactgatattacctacctg

SEQ ID NO: 14753 - DNA, 80 bp, synthetic construct
  source 1..80: mol_type = other DNA
tacactgatgccttaattcctgtcctcaggcattcacccaaaaaacatccctctgaaaagcttagcaggtaacttgtcag

SEQ ID NO: 14754 - DNA, 80 bp, synthetic construct
  source 1..80: mol_type = other DNA
tctggttgcaaaaataatttcactacaggcagataggcagcactgtcaaagctaaataacaacggccaacacttgagttt

SEQ ID NO: 14755 - DNA, 80 bp, synthetic construct
  source 1..80: mol_type = other DNA
tctcagtccttacttcatgaacttttccctcaaagcctgtatgtctatgccaagagccttttaactgggttgaatgatgg

SEQ ID NO: 14756 - DNA, 80 bp, synthetic construct
  source 1..80: mol_type = other DNA
ttatccttgttgccatctaagtgaacataaaagaaaacttgcttagaatgaatggactatatatccataatcctcactct

SEQ ID NO: 14757 - DNA, 80 bp, synthetic construct
  source 1..80: mol_type = other DNA
ggataattagaacaggctgtcttctgcagagcaagaggtttccttattctagatcatattcattcttggaacccaaaagc

SEQ ID NO: 14758 - DNA, 80 bp, synthetic construct
  source 1..80: mol_type = other DNA
cttttactgtgcatctatcttgataagtattttaacctacagtatctcacttagcatctgcttcacaggtatttgtgaat

SEQ ID NO: 14759 - DNA, 80 bp, synthetic construct
  source 1..80: mol_type = other DNA
tgctattatttattcaatgactactacagcaaagctgtggccttgaggaaatgattttatgctatgaatacaataacaat

SEQ ID NO: 14760 - DNA, 80 bp, synthetic construct
  source 1..80: mol_type = other DNA
caatgctttctggctctcacagcttctgatgaagtcaactgttaatcttatttgggtccctttgtatatattgagtcatt

SEQ ID NO: 14761 - DNA, 80 bp, synthetic construct
  source 1..80: mol_type = other DNA
acctctagtgtttattgttgtttatgagattttgtcctcattgctgcttgcctcagttactttcctagaatacttctata

SEQ ID NO: 14762 - DNA, 80 bp, synthetic construct
  source 1..80: mol_type = other DNA
agtgttctaaggatggggctttacatgaagctccaaaacaaatcagtccccactcaactggctggttactgtgctctgtt

SEQ ID NO: 14763 - DNA, 80 bp, synthetic construct
  source 1..80: mol_type = other DNA
cattttccttcagttggttaaaactacgggatggtagagtactgaagtcctagcttcaatttccagcttttccagtaact

SEQ ID NO: 14764 - DNA, 80 bp, synthetic construct
  source 1..80: mol_type = other DNA
tgttaaattattataacccgtgggtcaaaccacaatcaatataaagacacttattgagtatctgctctttgtcagcactg

SEQ ID NO: 14765 - DNA, 80 bp, synthetic construct
  source 1..80: mol_type = other DNA
agtacagtgcttataaagtgcaatgttatttccctcccctgtgcacatgttgcatattcaagtattgagaattcctagta

SEQ ID NO: 14766 - DNA, 80 bp, synthetic construct
  source 1..80: mol_type = other DNA
gataggctgtcagaaggtctctgtctgcttggtaggaatggtagtactatgcttgatgaggacaggaggacagtcatgac

SEQ ID NO: 14767 - DNA, 80 bp, synthetic construct
  source 1..80: mol_type = other DNA
tgatcattggtaattatctctacttttccatgctggaaaacacccacacaagagtatgcagtgtcaagatcaataccaac

SEQ ID NO: 14768 - DNA, 80 bp, synthetic construct
  source 1..80: mol_type = other DNA
aagcattgcacttggcattatggaatacagagatgtgtaccagggccctagcctccaagaaaatgcttcacttttagaaa

SEQ ID NO: 14769 - DNA, 80 bp, synthetic construct
  source 1..80: mol_type = other DNA
cattttctcacccacattagcagggaaatagcatggtattgagggttagaggttaagctcataaagtatctggattttag

SEQ ID NO: 14770 - DNA, 80 bp, synthetic construct
  source 1..80: mol_type = other DNA
aagtgaataaaataggcaattttctcaaattttagacaggaaaactagattttgaaattacagatagtatgtggcagaac

SEQ ID NO: 14771 - DNA, 80 bp, synthetic construct
  source 1..80: mol_type = other DNA
gctgacaccctaaagagctataccataagtataaggataaaacagaggtaaacatgaaccacaacctcacccttagggtc

SEQ ID NO: 14772 - DNA, 80 bp, synthetic construct
  source 1..80: mol_type = other DNA
ttaagagcagtttaggcaaagctgaagagagaattcataaacagaaaattatcagaagaaagtgtcaaaaatgcaaaaga

SEQ ID NO: 14773 - DNA, 80 bp, synthetic construct
  source 1..80: mol_type = other DNA
aaataaatctacacctagatatgtcacagtggaactgcagataaccaaagacaaaattaaatcacaaaagcagtctgaca

SEQ ID NO: 14774 - DNA, 80 bp, synthetic construct
  source 1..80: mol_type = other DNA
accagtaaaagaaaaggaaaaatgtgtacaactttgaaagagaggcagacagaaaaactgagatgttaaaaaaggattaa

SEQ ID NO: 14775 - DNA, 80 bp, synthetic construct
  source 1..80: mol_type = other DNA
ctgaactataacaaaatactagatatcaaaacttgccagatgaatctaaagcagtgtttaaagcaaaattatcaggctta

SEQ ID NO: 14776 - DNA, 80 bp, synthetic construct
  source 1..80: mol_type = other DNA
ggttctagatggacatgaatttgaagggacactattcaactgagaacactgacttaatgggtcacagaaaatgttaatgc

SEQ ID NO: 14777 - DNA, 80 bp, synthetic construct
  source 1..80: mol_type = other DNA
ttcaataaaagatggggaaaattcaaaaactgtatgacacctggcagggtcaaaaaacaagccacagaggtggcaaacat

SEQ ID NO: 14778 - DNA, 80 bp, synthetic construct
  source 1..80: mol_type = other DNA
aagtattgtgcaggtgaagaagctgaggtgcaaagaaatgcaaatgtttaccccaaatcacaataattaagtgacagagg

SEQ ID NO: 14779 - DNA, 80 bp, synthetic construct
  source 1..80: mol_type = other DNA
tgaaagccagggttttcttttcatgcagaaataaagacatcaaaactaaattagaagtcttcaaaataggccaggcgcgg

SEQ ID NO: 14780 - DNA, 80 bp, synthetic construct
  source 1..80: mol_type = other DNA
tcaagcaattctcctgcctcagcctcccaggtagctgggattagaggtgtccatcagctgcccagctaaattttttgtat

SEQ ID NO: 14781 - DNA, 80 bp, synthetic construct
  source 1..80: mol_type = other DNA
atgttttatcatactttacacttacaaggaacggaatatcctcgtgcttctcactgactgcaggcatacaccctataaaa

SEQ ID NO: 14782 - DNA, 80 bp, synthetic construct
  source 1..80: mol_type = other DNA
cctctttttacagatctctagggacaagatcccatcccactcttctttttcaggataatcaaaaaccttatggtattcaa

SEQ ID NO: 14783 - DNA, 80 bp, synthetic construct
  source 1..80: mol_type = other DNA
acaggaaatgaaactattattactttaagaagagataatccattgcattggtatgagggagagggagggtatggggtaga

SEQ ID NO: 14784 - DNA, 80 bp, synthetic construct
  source 1..80: mol_type = other DNA
tcccatacgtaaacttgatgcgtgatctttagatggccattttcattcattgtagtcacaattcttagaacatgaccatg

SEQ ID NO: 14785 - DNA, 80 bp, synthetic construct
  source 1..80: mol_type = other DNA
gatgataggatttgtgtgtgtgtgctgtgcaggagctctttagtttaattggatcccatttttcaatttttgcttttgtt

SEQ ID NO: 14786 - DNA, 80 bp, synthetic construct
  source 1..80: mol_type = other DNA
agaatagcgagtatcagagagagagagagaagtatgtacagtgttttgttagtgatgcctgtacaagatcacttgatcat

SEQ ID NO: 14787 - DNA, 80 bp, synthetic construct
  source 1..80: mol_type = other DNA
ggctgcataaatgtcttcttttgtgaagtgtctgttcatatcctttgcccactttttgatggggttgtttgtttttttct

SEQ ID NO: 14788 - DNA, 80 bp, synthetic construct
  source 1..80: mol_type = other DNA
atctatgttccagactggaaggatttttctcatatttgttgtgctgacagagagctgttgtttctcagctaagaatactg

SEQ ID NO: 14789 - DNA, 80 bp, synthetic construct
  source 1..80: mol_type = other DNA
ggatagaatgcccccgtcacctcactgaggataagtctttagttagttgtatctggtcatgcagatgcatattccaagaa

SEQ ID NO: 14790 - DNA, 80 bp, synthetic construct
  source 1..80: mol_type = other DNA
acactgtgtcttgaatttctaacctatgccacagtgtatataaactaaacatccatgggcacagaagtggccttcagatt

SEQ ID NO: 14791 - DNA, 80 bp, synthetic construct
  source 1..80: mol_type = other DNA
atgttagcagaaggctgcataacttaacgggatttgactgatgtttcaggccagaagtaggttgcctacacaaagagaaa

SEQ ID NO: 14792 - DNA, 80 bp, synthetic construct
  source 1..80: mol_type = other DNA
tttcaccccttgtgagttacaaagagttagcatgaaccataagtccaaaggtcactcgaaatccctcctctctggaaaaa

SEQ ID NO: 14793 - DNA, 80 bp, synthetic construct
  source 1..80: mol_type = other DNA
ggaattaatgaaaatgtaagagtgtgatgtcatcagggaacctagccctttgagtcaatgtcagaggaagctggaaaagg

SEQ ID NO: 14794 - DNA, 80 bp, synthetic construct
  source 1..80: mol_type = other DNA
tggccgtctttattgggagtggggagaagcagacctgtatattcacatagctaccaaggcctaattcaggatttttttcc

SEQ ID NO: 14795 - DNA, 80 bp, synthetic construct
  source 1..80: mol_type = other DNA
aaccacaaagaaacagtctctgatgaaagtagtagtgcaatgagatacaggggcaacaaagaattctcccccacttcaaa

SEQ ID NO: 14796 - DNA, 80 bp, synthetic construct
  source 1..80: mol_type = other DNA
gcgtgtgtctttatagcagcatgatttatagtcctttgggtatatacccagtaatgggatggctgggtcaaatggcattt

SEQ ID NO: 14797 - DNA, 80 bp, synthetic construct
  source 1..80: mol_type = other DNA
gttccaagaaaggatttgtggaggtggttacacctaagctactgatattctgtctcaaacttaggtttttctagtctcaa

SEQ ID NO: 14798 - DNA, 80 bp, synthetic construct
  source 1..80: mol_type = other DNA
cacctagatctaaaatccaggccacaggctttttccagactttcccttcaagtgttatgaagattttttatgccaagagg

SEQ ID NO: 14799 - DNA, 80 bp, synthetic construct
  source 1..80: mol_type = other DNA
catatatataccacatatatacaccatatataccatatatgcaccatatgtatacatatatacaccctatatatacacca

SEQ ID NO: 14800 - DNA, 80 bp, synthetic construct
  source 1..80: mol_type = other DNA
tataaattattgttgactatagtcaccctgttgtgctgtcaaatactagatcttactcattcttcctaactatattattg

SEQ ID NO: 14801 - DNA, 80 bp, synthetic construct
  source 1..80: mol_type = other DNA
acccaagctacgggacaaagttcttcccattcttcccttccctttcatccagcagaggaatcacttcccatggccgccac

SEQ ID NO: 14802 - DNA, 80 bp, synthetic construct
  source 1..80: mol_type = other DNA
caaggcccatggcaaattctgctcggctaccactgctgattattcagggacaaaaggttctttagtcaggaggtgatgag

SEQ ID NO: 14803 - DNA, 80 bp, synthetic construct
  source 1..80: mol_type = other DNA
tgtcattgaatggccagttgtgttctttgaaggcttggagttcttgaagttccaagaaagcctctgagctggtgtgattt

SEQ ID NO: 14804 - DNA, 80 bp, synthetic construct
  source 1..80: mol_type = other DNA
atgttttgtgtgagtgtgtatctaaatgcatagtctgaaaagaagatagggggcaagttattgcaggaaaattcttcgtg

SEQ ID NO: 14805 - DNA, 80 bp, synthetic construct
  source 1..80: mol_type = other DNA
catctctactaaaactacgaaaattagccgggcgtggtggtgagccctgtaatcccagctacttgtgatgctgaggcagg

SEQ ID NO: 14806 - DNA, 80 bp, synthetic construct
  source 1..80: mol_type = other DNA
agaagatgtaacccaggcgaagattttaatgtagaggaatctggaactgaggtgagatctggaaagccaaatgtaggtac

SEQ ID NO: 14807 - DNA, 80 bp, synthetic construct
  source 1..80: mol_type = other DNA
tgctgtcatcataaggactttcctgtgaagtcatggaacctaaaactataatttgtatacatctatccagtgttaacaat

SEQ ID NO: 14808 - DNA, 80 bp, synthetic construct
  source 1..80: mol_type = other DNA
tcctttcctccaaccccaggccacaactaaaactgcttcttttgaattaccttcaagtaacagagtatgtaaacgtggtg

SEQ ID NO: 14809 - DNA, 80 bp, synthetic construct
  source 1..80: mol_type = other DNA
agatagatagatagatattcaaatccaaatgaccaaccgcatcactttgggcatttaatattgccaaatctcagtttgtt

SEQ ID NO: 14810 - DNA, 80 bp, synthetic construct
  source 1..80: mol_type = other DNA
tatttcgggactttgaaaattaactaaatgcttgcagcaacccagaatgtgtttgtttaagaaaatggctgaatgttgtt

SEQ ID NO: 14811 - DNA, 80 bp, synthetic construct
  source 1..80: mol_type = other DNA
caagagctttgtgaaaagtgaggctttgtgtaaagtgaaggacacacgtatatgagtttgttgtgtttatttgattagag

SEQ ID NO: 14812 - DNA, 80 bp, synthetic construct
  source 1..80: mol_type = other DNA
gaggaggtgtgggggtaggtgctttatgatgaacaggttagctaaacatacatattcagcagattacaggatgatctgtg

SEQ ID NO: 14813 - DNA, 80 bp, synthetic construct
  source 1..80: mol_type = other DNA
acccagggggaggtaattgaatcatggggcccagtctttcttgtgatagtgaataagtctcatgagatctcatgagttta

SEQ ID NO: 14814 - DNA, 80 bp, synthetic construct
  source 1..80: mol_type = other DNA
cggtctaaaagcatgattgctacatgatgctttaagaaatctgcctagtacctgacagcatattgttcatactagtatct

SEQ ID NO: 14815 - DNA, 80 bp, synthetic construct
  source 1..80: mol_type = other DNA
cttgcttaggcaagaattcatgattgcttctttgtccttatcccttttccaccactcaagatccatacaatagaagaaat

SEQ ID NO: 14816 - DNA, 80 bp, synthetic construct
  source 1..80: mol_type = other DNA
tacaggttgactaaattggaagtggagctgggcagtgtttgtaacccagaaaatatcttggtacctataagtgtcaggag

SEQ ID NO: 14817 - DNA, 80 bp, synthetic construct
  source 1..80: mol_type = other DNA
caaaatccagccaatcctagcggcccttctacttctggattggtacaggaaggatataatctcagaatagaaataagcca

SEQ ID NO: 14818 - DNA, 80 bp, synthetic construct
  source 1..80: mol_type = other DNA
tgtggcttctacctttaattcttagtcgatctgttgagaggtttatcagttttattgatctattcccaataaagtgcagc

SEQ ID NO: 14819 - DNA, 80 bp, synthetic construct
  source 1..80: mol_type = other DNA
cacctttatcattataaaatggtctgtgttacctctggtgatatccgatgatctgcaatttactttatctgttattaata

SEQ ID NO: 14820 - DNA, 80 bp, synthetic construct
  source 1..80: mol_type = other DNA
taccgtgttttgttttctatttatcccttgtcttttccactcttttatttcctataggaatgggaaacattcttttgttt

SEQ ID NO: 14821 - DNA, 80 bp, synthetic construct
  source 1..80: mol_type = other DNA
gatatggaattttgaattgatagctcctttctttcaggcttttaaatttgtggttacactaccttctggttttcatggtt

SEQ ID NO: 14822 - DNA, 80 bp, synthetic construct
  source 1..80: mol_type = other DNA
tgcatctggcttctttcacttagcatgatgctttcaaagttcaaccataatgtgccatgtatttgtaattcactcttttt

SEQ ID NO: 14823 - DNA, 80 bp, synthetic construct
  source 1..80: mol_type = other DNA
attatttgttgaagggactgttgttttccattggaaggtattgtcacaagtgtaaaactcagctgactgcagataaatag

SEQ ID NO: 14824 - DNA, 80 bp, synthetic construct
  source 1..80: mol_type = other DNA
gttttgggtatatgtgcacaggttttagttgtaatctataggagagataggatgaaatgtgcttacttcagttttgccag

SEQ ID NO: 14825 - DNA, 80 bp, synthetic construct
  source 1..80: mol_type = other DNA
gctgtgcagaagctctttagtttaattagatcccatttgtcaattttggcttttgttgccattgcttttgatgttttaga

SEQ ID NO: 14826 - DNA, 80 bp, synthetic construct
  source 1..80: mol_type = other DNA
tctgcaaacaggggcaatttgacttcctcttttcctaattgaataccctttatttctttctcctgcctaattgtcctggc

SEQ ID NO: 14827 - DNA, 80 bp, synthetic construct
  source 1..80: mol_type = other DNA
attattgccacaatttcagatcctgttattggtctgttcagagattcaacttcttcctggtttagtcttgtgagagtgta

SEQ ID NO: 14828 - DNA, 80 bp, synthetic construct
  source 1..80: mol_type = other DNA
attaatgtgtgggagtctaagtctctttgtaggtcactcaggacttgctttatgaatctgggtgctcctgtattgggtgc

SEQ ID NO: 14829 - DNA, 80 bp, synthetic construct
  source 1..80: mol_type = other DNA
ttcttcaggtagttctcgagccttggttttcagttccatcagctcctttaagcacttccctgtattggttattctagtta

SEQ ID NO: 14830 - DNA, 80 bp, synthetic construct
  source 1..80: mol_type = other DNA
ttcgagcttcctggctgctttgtttacctaatcaagcctgggcaatggcgggcgcccctcccccagcctcgctgccgcct

SEQ ID NO: 14831 - DNA, 80 bp, synthetic construct
  source 1..80: mol_type = other DNA
ttactgtgatacatcttcaagctttattttcaaagttatactggcctcatgaagtatgttgggaaataatccccttattt

SEQ ID NO: 14832 - DNA, 80 bp, synthetic construct
  source 1..80: mol_type = other DNA
gttaacttagagattgattataattttttgtttccaagtgctagctttgggattacttcacagttgtccccacattccca

SEQ ID NO: 14833 - DNA, 80 bp, synthetic construct
  source 1..80: mol_type = other DNA
gtattggacaggaatccaaaacagagatattggcaatcacaacacttggaaaaaagaaacaacagaggttgagtttccaa

SEQ ID NO: 14834 - DNA, 80 bp, synthetic construct
  source 1..80: mol_type = other DNA
aatgaactgaattgacatttgagctgtagcccaaatgaaagagactgcagtttgagtccaaccaagctgattgctggaaa

SEQ ID NO: 14835 - DNA, 80 bp, synthetic construct
  source 1..80: mol_type = other DNA
ctggaagaaaccaaaaatgtccaaaggaaggatgctggttaaccttccagaatatttcaacagccacatttcaccttact

SEQ ID NO: 14836 - DNA, 80 bp, synthetic construct
  source 1..80: mol_type = other DNA
ttacttgaaatgttctgctaatttcggcaccagctcaaagtcagacttaatgccacaccagagactatcatgaaaatggc

SEQ ID NO: 14837 - DNA, 80 bp, synthetic construct
  source 1..80: mol_type = other DNA
gagttataaacaacctcattaagcattgaaggaaggtcccaaacagacccaacctgcaaaaagtaagaaagcattcattc

SEQ ID NO: 14838 - DNA, 80 bp, synthetic construct
  source 1..80: mol_type = other DNA
tgaataaagacatgactataaatccaggaagctcaatgaactctaagcaagaattactccaaaatatccaaaccaaggtg

SEQ ID NO: 14839 - DNA, 80 bp, synthetic construct
  source 1..80: mol_type = other DNA
aggcagacactagcaaaatggataaaaatacatgatccaattatatgctttcaataagagactcactttagacataagga

SEQ ID NO: 14840 - DNA, 80 bp, synthetic construct
  source 1..80: mol_type = other DNA
ggggtattactactaaccttacagaaattaaaaggattggctggccaatcctcctggtgtggtatctcatgcctgtaatc

SEQ ID NO: 14841 - DNA, 80 bp, synthetic construct
  source 1..80: mol_type = other DNA
aactaggaataaaagaaaatgtccttgacaggcatttataaaaaacaaaaacaaaacccagtcaatagtgaaagactgat

SEQ ID NO: 14842 - DNA, 80 bp, synthetic construct
  source 1..80: mol_type = other DNA
aaaaaaagataaaaagcaaattagagattgccaggagctggttgatgggagaatgggaagtaactgcttaacggtatgca

SEQ ID NO: 14843 - DNA, 80 bp, synthetic construct
  source 1..80: mol_type = other DNA
gtacagacgtcgactggtaacatttgcgtttgatcgggttcttttatttagtaattattcttaacctatttatctgatat

SEQ ID NO: 14844 - DNA, 80 bp, synthetic construct
  source 1..80: mol_type = other DNA
ctagttcacttttgccaatgatgcattataaacctgaagatatgactgacaggtggagacgatcatttcagactcgcaag

SEQ ID NO: 14845 - DNA, 80 bp, synthetic construct
  source 1..80: mol_type = other DNA
atgaaaacctaagaactctgtggcagattagagatggcgaatttccaaatttacagaagattattataaaatattaaaaa

SEQ ID NO: 14846 - DNA, 80 bp, synthetic construct
  source 1..80: mol_type = other DNA
caatcatcgcataagatcttagcacatccttctcagcgattgtatgaaaacaattaacaaacctgaactcactgacaagt

SEQ ID NO: 14847 - DNA, 80 bp, synthetic construct
  source 1..80: mol_type = other DNA
actaggcaaataaaatactcagagaagagtcagttcctcttctattccgtggttaacccattcattagtttctagggcat

SEQ ID NO: 14848 - DNA, 80 bp, synthetic construct
  source 1..80: mol_type = other DNA
cattcccaccagcaatgcaagaaagcctctgtttccccaaagccttgctaatgaagtttattttcaaactttttagattt

SEQ ID NO: 14849 - DNA, 80 bp, synthetic construct
  source 1..80: mol_type = other DNA
aatctgtatactaatttaggtggtggccactctgtcttccaaactttactgccaaacctatatgtcactctcatgtcttc

SEQ ID NO: 14850 - DNA, 80 bp, synthetic construct
  source 1..80: mol_type = other DNA
aatccagagtctataaggaactcaaacaactcaacaacaacaaaagacaaccccattaaaaactggggaacagacatgac

SEQ ID NO: 14851 - DNA, 80 bp, synthetic construct
  source 1..80: mol_type = other DNA
ctagtgtgtctaacagtcaagtaaagatgttagtctatgaaaaaatacatggctagttaatcttgcaactctaacaattg

SEQ ID NO: 14852 - DNA, 80 bp, synthetic construct
  source 1..80: mol_type = other DNA
agcatggtactggtatcaaagcaaccatcttatatcagtatgcagaagatgcgctcttcctgtacttctcattttcttac

SEQ ID NO: 14853 - DNA, 80 bp, synthetic construct
  source 1..80: mol_type = other DNA
aatggccagtgattttttatccggtttatgaaaagttttctcatccagagttcaagaggatattcaagaggataacctcc

SEQ ID NO: 14854 - DNA, 80 bp, synthetic construct
  source 1..80: mol_type = other DNA
ttcacttaacatttcttggagtttgttaaaagattcattggaattttcagcgtacctagtggtgtcacttgtgaatgacg

SEQ ID NO: 14855 - DNA, 80 bp, synthetic construct
  source 1..80: mol_type = other DNA
attttaaaatgtttggaagaattaatgaatgtagtcatttgatactgtcaccatctgagcctgcagggtggtatgtgtct

SEQ ID NO: 14856 - DNA, 80 bp, synthetic construct
  source 1..80: mol_type = other DNA
actcccactgttttattctctatctctgtatatttcaatttttctttagtttccacatagaagtgagatcatacaaaatg

SEQ ID NO: 14857 - DNA, 80 bp, synthetic construct
  source 1..80: mol_type = other DNA
tatccttttcctattgggctttattgatgcccttgtcaaaaacaaattgacaatttgtgtttggatttatctctgggctc

SEQ ID NO: 14858 - DNA, 80 bp, synthetic construct
  source 1..80: mol_type = other DNA
ttgaacttcttaaccaacttctcgtcatctccctcaactcccctacccttctaagcttctggtaacctgtcttactatgc

SEQ ID NO: 14859 - DNA, 80 bp, synthetic construct
  source 1..80: mol_type = other DNA
acttgaagtctacgttaccagatataagtatagccacctgctccctcttttggtacatttgcatggaatatcgtcttcca

SEQ ID NO: 14860 - DNA, 80 bp, synthetic construct
  source 1..80: mol_type = other DNA
gattcccttatatggactcaggatcatgaaaacatccatccccatcaaaagtttcctcaagcacatttgtaatactcccc

SEQ ID NO: 14861 - DNA, 80 bp, synthetic construct
  source 1..80: mol_type = other DNA
ggcatgcaccacaacagcctggctaacttttgtgtttttagtagagacgggatttcaccatattgatcaggctggtctcg

SEQ ID NO: 14862 - DNA, 80 bp, synthetic construct
  source 1..80: mol_type = other DNA
ggttgcttccaaatcttagatattgaaaacaatgctgcaaaaacatagaagtgaagatatctctttgatatattgatttc

SEQ ID NO: 14863 - DNA, 80 bp, synthetic construct
  source 1..80: mol_type = other DNA
tgctagtaccatgctgttttgtttaccttaggtctgtagtataatttgaagtcagacaatgtgattcctctagtttagtt

SEQ ID NO: 14864 - DNA, 80 bp, synthetic construct
  source 1..80: mol_type = other DNA
tgccactggaataactttgcattcaatgcctcatgcataaatatgcctttatctactggtgctgttatttcttcgggaca

SEQ ID NO: 14865 - DNA, 80 bp, synthetic construct
  source 1..80: mol_type = other DNA
ctgaattttatcaaatgctatttcaacatcaattcaaatgatcatattgtttttgttcttcattctgttgatgtgatgta

SEQ ID NO: 14866 - DNA, 80 bp, synthetic construct
  source 1..80: mol_type = other DNA
ctttttgctgtttttgctgtatcccataggttttggtatgttgtatttccattatcatttgtttcaagaaatttttcaat

SEQ ID NO: 14867 - DNA, 80 bp, synthetic construct
  source 1..80: mol_type = other DNA
tcctcctcccatttattcacattattagtaattggtgacttcacactttattctagctaatctagttaaaggtatcaatg

SEQ ID NO: 14868 - DNA, 80 bp, synthetic construct
  source 1..80: mol_type = other DNA
tgttcttgaaagctgggtattaaagcctccagctatcactgtggaactgtgtacttctcatttcaattatgttagttttg

SEQ ID NO: 14869 - DNA, 80 bp, synthetic construct
  source 1..80: mol_type = other DNA
gaccccagaatggatttatcttataacaaaaatttgtacattttgaccaatatttccccaacccccaaccccagccccag

SEQ ID NO: 14870 - DNA, 80 bp, synthetic construct
  source 1..80: mol_type = other DNA
tctggtaagggcccactttctcatagtctgcaccctcttgcagtgtcctcacatggtagaagaggtaagggtttctctgg

SEQ ID NO: 14871 - DNA, 80 bp, synthetic construct
  source 1..80: mol_type = other DNA
tgaacacaggatcttttttcatttatttgtgactccaatgtcttttgtcaatgttttatagttttcagtgtacagttatt

SEQ ID NO: 14872 - DNA, 80 bp, synthetic construct
  source 1..80: mol_type = other DNA
tgaacaagtttgagaaggtttggtgctagttcttcatgaaatgtttggcagaactcaccagtaacaccatgtagtcttgg

SEQ ID NO: 14873 - DNA, 80 bp, synthetic construct
  source 1..80: mol_type = other DNA
attaatgtggacatttatcactctctacttcctattagaactactattgctactattactactattgctgcatttcataa

SEQ ID NO: 14874 - DNA, 80 bp, synthetic construct
  source 1..80: mol_type = other DNA
tcccttgtgattgcctctttgacccataagtcactgaaaagtgtgtcatttaaactcctaatacatgggagtttcccaag

SEQ ID NO: 14875 - DNA, 80 bp, synthetic construct
  source 1..80: mol_type = other DNA
taggaaaatagtctgcagttccatccagttcgctgcaaatgccattaatttgttcctttttatggctgagtagtattcca

SEQ ID NO: 14876 - DNA, 80 bp, synthetic construct
  source 1..80: mol_type = other DNA
tttagctatcaccaccctacttacccagaacaccatgcctaagcaagaacgaattgactatctgtctctgtagatttgcc

SEQ ID NO: 14877 - DNA, 80 bp, synthetic construct
  source 1..80: mol_type = other DNA
gtaacaaatattctggatgaaagacacataatgatttgaaattattgtctcccattattttagttgtccttgatggcatc

SEQ ID NO: 14878 - DNA, 80 bp, synthetic construct
  source 1..80: mol_type = other DNA
ctgtagaacctctagtacaatgataaatgaaaggggccagactgaatattcttgacttgctccttatcttacgaggaaag

SEQ ID NO: 14879 - DNA, 80 bp, synthetic construct
  source 1..80: mol_type = other DNA
ctttacaagtttcttccttcagcttgctttatgtttattttgctgttcttcaagtgtcttagatggaagctcaggttatt

SEQ ID NO: 14880 - DNA, 80 bp, synthetic construct
  source 1..80: mol_type = other DNA
ccatatcttggctactgtgaataatgctgcaatgaacatgggagtgcaggtgtctcttcaacatattgatttcatttcct

SEQ ID NO: 14881 - DNA, 80 bp, synthetic construct
  source 1..80: mol_type = other DNA
tcacacagtaacaaaatcacctaacaacacatttctcagaagatgtggccatcattaagccacacgcaactgtaattaga

SEQ ID NO: 14882 - DNA, 80 bp, synthetic construct
  source 1..80: mol_type = other DNA
atagtttgatttaggtctgccatgttacattttgtttctatatgtctcatgtcttttttccttatatttttcttttactg

SEQ ID NO: 14883 - DNA, 80 bp, synthetic construct
  source 1..80: mol_type = other DNA
gaaggcaggtctgctagcaaaattctctcagggaatgtgcttatgttgcttttgtttttaaaaatagctttgctggatat

SEQ ID NO: 14884 - DNA, 80 bp, synthetic construct
  source 1..80: mol_type = other DNA
taggaatataaatccttgactgggaactggggataaggggaaccttgtgcattagctctaccaatctgagtgaagtttcc

SEQ ID NO: 14885 - DNA, 80 bp, synthetic construct
  source 1..80: mol_type = other DNA
agcaatccgactgtttggggaatgcatacaatcctacacatgcaggtgtccttttagattatgaagaatcatgttggagc

SEQ ID NO: 14886 - DNA, 80 bp, synthetic construct
  source 1..80: mol_type = other DNA
caatttttctgttgcttttatagagaggcaaatttttgaagggacttactctaacattttcacagatgccactctctgct

SEQ ID NO: 14887 - DNA, 80 bp, synthetic construct
  source 1..80: mol_type = other DNA
tcacaaatttgtgaagttattggccactatttcttcaaacatttattctgcttctttcctttctgtctggggcccaaatt

SEQ ID NO: 14888 - DNA, 80 bp, synthetic construct
  source 1..80: mol_type = other DNA
ggataatttctttgactggtatacattcttgaaacatccttgcattcttgggaacaatctagagattaaacccccatctg

SEQ ID NO: 14889 - DNA, 80 bp, synthetic construct
  source 1..80: mol_type = other DNA
tttagcaagctttctgagtaacagatcgtataacacacaaacatagatggtatttccatatactcacaacaagtaattga

SEQ ID NO: 14890 - DNA, 80 bp, synthetic construct
  source 1..80: mol_type = other DNA
ctgaggcttatgtacaaattggtataaaagaattaaccttgacttcaacctcatagtatatacaaaattaccttaagcca

SEQ ID NO: 14891 - DNA, 80 bp, synthetic construct
  source 1..80: mol_type = other DNA
ggtgaagtgataaccattatgatgagcaaaagcatccagatatttaagtgtagatcttatatgattccatttatgtaaag

SEQ ID NO: 14892 - DNA, 80 bp, synthetic construct
  source 1..80: mol_type = other DNA
ctcctcatttatctgttttcttctttgtatgtaggatgtaatttcctcttctttttttcaagtttcttactgcagaaact

SEQ ID NO: 14893 - DNA, 80 bp, synthetic construct
  source 1..80: mol_type = other DNA
gaagctgtgtcactgggggaaacacatttaggatttgtatgccttttgaatttgtccttttattattgtgaatacccact

SEQ ID NO: 14894 - DNA, 80 bp, synthetic construct
  source 1..80: mol_type = other DNA
taaaaagtagtctgtttacttacatgtttaccattttgggtgctcctctttcctccagtagttgtgagtttccacctggt

SEQ ID NO: 14895 - DNA, 80 bp, synthetic construct
  source 1..80: mol_type = other DNA
tattcagaatggtattgcctaggttttcttctgagatttttagtttggggttttacatttaagtctttaatccatcttga

SEQ ID NO: 14896 - DNA, 80 bp, synthetic construct
  source 1..80: mol_type = other DNA
gtctctgtgtgtgcctgagcagctgctttgctgtgactccacacagctctgtgttggacccaaggccctggtggcatagg

SEQ ID NO: 14897 - DNA, 80 bp, synthetic construct
  source 1..80: mol_type = other DNA
tccaacagccttcttgtcccttgctttgatgacacataatcaagatatgatgtctatctcatatcataaagagcaaaatg

SEQ ID NO: 14898 - DNA, 80 bp, synthetic construct
  source 1..80: mol_type = other DNA
agttattcagaccagtttcacacatgtactgacaatgacaactatctaatgactagtttctggccaacaatgattgtaag

SEQ ID NO: 14899 - DNA, 80 bp, synthetic construct
  source 1..80: mol_type = other DNA
tttcaatggtagttcatatctagttttcctctttggccaaatcaggaatttcaaaaatattgaagattgcctcatgatat

SEQ ID NO: 14900 - DNA, 80 bp, synthetic construct
  source 1..80: mol_type = other DNA
taaagacagttaggaaaggaaaacctagcaagctttctaacagtctcagacacccccctagggtccttgaatcacacttt

SEQ ID NO: 14901 - DNA, 80 bp, synthetic construct
  source 1..80: mol_type = other DNA
caggtggttgaatgtttctatttagggatccaaatgtttttttgctctggaaggaatcacttccaagattagcagtggcc

SEQ ID NO: 14902 - DNA, 80 bp, synthetic construct
  source 1..80: mol_type = other DNA
aagtcttgtcatatctgttgtggcttcctcaccctgttacttggcttcctactctaggaaaaggccagtcattttagaaa

SEQ ID NO: 14903 - DNA, 80 bp, synthetic construct
  source 1..80: mol_type = other DNA
tcagtctctgcttattgactatttctgcatagtagttagactcagcccagccatccctaataggctattattactattac

SEQ ID NO: 14904 - DNA, 80 bp, synthetic construct
  source 1..80: mol_type = other DNA
agacgtcctaggggcaccatgcaggctatcaacaatgaaagaaaagcttcgaaagtccttgggattgttttctttgtgtt

SEQ ID NO: 14905 - DNA, 80 bp, synthetic construct
  source 1..80: mol_type = other DNA
gcatttgcaggtgaccagaatgaggcacatgacagtggttatatttcaaccacacctaaattaacaaattcagtggacat

SEQ ID NO: 14906 - DNA, 80 bp, synthetic construct
  source 1..80: mol_type = other DNA
tacaataagtgttggccatcatttcattcgtgggcctgctgctctctaagaattcagtagcattttaatagtttctaaac

SEQ ID NO: 14907 - DNA, 80 bp, synthetic construct
  source 1..80: mol_type = other DNA
gtagggcagaatagctgatagaagaaggactgaagaaaatccttcagcaatccttaaaaagaccatgcattcagatctga

SEQ ID NO: 14908 - DNA, 80 bp, synthetic construct
  source 1..80: mol_type = other DNA
ggggctgtctgggttctgggctcccagtggctccccagacctcagtccctctcttcccgggtcactcaccttttttgggg

SEQ ID NO: 14909 - DNA, 80 bp, synthetic construct
  source 1..80: mol_type = other DNA
gatggctgacaacaggataggggaggttaactgctgggaggatggtagaggaccctcttcttcaggaaaacatgagtcag

SEQ ID NO: 14910 - DNA, 80 bp, synthetic construct
  source 1..80: mol_type = other DNA
ccgctgctcgcagcctcagtcccgtccttgtcagcctcgcctggtcctccctgcgggctaaccctgtattgcctgttgca

SEQ ID NO: 14911 - DNA, 80 bp, synthetic construct
  source 1..80: mol_type = other DNA
ccggatttcaggacacccagaggacccgactccggtctggatgggtttttccgctaagcaggacagattggcaaagcgct

SEQ ID NO: 14912 - DNA, 80 bp, synthetic construct
  source 1..80: mol_type = other DNA
actgcggcccagacactcggccgcatctctgcttctgcagcaggcgagagacgtcagggaagccaaagagagggtccagc

SEQ ID NO: 14913 - DNA, 80 bp, synthetic construct
  source 1..80: mol_type = other DNA
acaagcagtctctgtgttgggacagaagctgggacagaaaaagagacaagattccttcccgcaatccagaaagaactcgg

SEQ ID NO: 14914 - DNA, 80 bp, synthetic construct; identical to SEQ ID NO: 14913
  source 1..80: mol_type = other DNA

SEQ ID NO: 14915 - DNA, 80 bp, synthetic construct
  source 1..80: mol_type = other DNA
gccgggtctccagcctggggcaggaagtgggggatgctcagagaagtggggacaccagtgacagcctccaccgggagtgg

SEQ ID NO: 14916 - DNA, 80 bp, synthetic construct
  source 1..80: mol_type = other DNA
agtcgcttcttctgctatcttgcacccactgtcaagccgaccaagaactcccaggaccccctgactgcccaagcactggc

SEQ ID NO: 14917 - DNA, 80 bp, synthetic construct
  source 1..80: mol_type = other DNA
aggctggaccagaagtggtcggagaactcagggtacatgtccagcacctccagcaggtcgtcccgatggatcttgtgtag

SEQ ID NO: 14918 - DNA, 80 bp, synthetic construct
  source 1..80: mol_type = other DNA
agcttccaggctagcatttcttcctctactgcccaggctagaggatctagatttgatcctactttaaggaagcaaaaagt

SEQ ID NO: 14919 - DNA, 80 bp, synthetic construct
  source 1..80: mol_type = other DNA
cttatttgtaaggcatagagaccattcccgccctgggctgtcacaaggatttaaccccatcgcctatgtgacatatacct

SEQ ID NO: 14920 - DNA, 80 bp, synthetic construct
  source 1..80: mol_type = other DNA
tgtagggtttgcctatctggtcgcccaggttgtgcagccagccgatgcgtgagtccatgtgtggctgctccatgttgccg

SEQ ID NO: 14921 - DNA, 80 bp, synthetic construct
  source 1..80: mol_type = other DNA
cgcggtgcctgcagcttgtactcaggcagcacgtcggcgcccagggacaggacctgcacccggggaaggcggaggtgtgg

SEQ ID NO: 14922 - DNA, 80 bp, synthetic construct
  source 1..80: mol_type = other DNA
ccaacttatacagagggacgtgcacacagggactgctcagcagtgacacacacagcccctgtaccagctcacactcacac

SEQ ID NO: 14923 - DNA, 80 bp, synthetic construct
  source 1..80: mol_type = other DNA
agacttagccctgagccacctcccactcctcctccactgtcggcccaagcctgccccaggctgacagaagagcggctgga

SEQ ID NO: 14924 - DNA, 80 bp, synthetic construct
  source 1..80: mol_type = other DNA
gcctttctgggccctgggccgcagagcccctgtcctgctcgccttcccggctggggccgccatggaggacttggctccct

SEQ ID NO: 14925 - DNA, 80 bp, synthetic construct
  source 1..80: mol_type = other DNA
ggggtcttctctggcccaggattcagggacctgacccttccatatctttgtacccaccacctccctatgagaagaaaact

SEQ ID NO: 14926 - DNA, 80 bp, synthetic construct
  source 1..80: mol_type = other DNA
gtgggcgaagccaagaaggggtcgcccttgaggtccacaaagttgagggtgatttggggaatcttgctaatggtgcggta

SEQ ID NO: 14927 - DNA, 80 bp, synthetic construct
  source 1..80: mol_type = other DNA
cctgtcattccacccctatgtgtccatcctgggccaggggaaccaagccacatcctcagggtacagggttcacttcccac

SEQ ID NO: 14928 - DNA, 80 bp, synthetic construct
  source 1..80: mol_type = other DNA
gatctctgggttcatagcccggatctgctgcttaatcacttatgcttttttcctaaattatttaacatccttgtgcctca

SEQ ID NO: 14929 - DNA, 80 bp, synthetic construct
  source 1..80: mol_type = other DNA
aggcaagggtgacaaaccatgcagtcccactccatcttagcaacccagcctcactttttttttttttttttttctgagac

SEQ ID NO: 14930 - DNA, 80 bp, synthetic construct
  source 1..80: mol_type = other DNA
agcggcctgaacagggatgcgcctcaccaggactgaggagaggctggagaccaggaagccttagcccaagagaccccagc

SEQ ID NO: 14931 - DNA, 80 bp, synthetic construct
  source 1..80: mol_type = other DNA
ccagctcttcagccaggcctcccagccagactccatcccaccactggctgggttatggggggatgggagtcccttcactt

SEQ ID NO: 14932 - DNA, 80 bp, synthetic construct
  source 1..80: mol_type = other DNA
ggcaggtacagcgccatcctgctaccacagaaggtgtccatcacttctcagaacacaacgccggcttgctttcatttggt

SEQ ID NO: 14933 - DNA, 80 bp, synthetic construct
  source 1..80: mol_type = other DNA
agacagggagagagtgtgtgtgtgcgcgcgtgtgtgtgtgtgtgctgaatgagagagagaccagtcctaagctcctgcct

SEQ ID NO: 14934 - DNA, 80 bp, synthetic construct
  source 1..80: mol_type = other DNA
cagatggagcaaccatgggaattaaggtgccttttgatgaagcaaaattcaacctggtcatcagttttcatggaacacag

SEQ ID NO: 14935 - DNA, 80 bp, synthetic construct
  source 1..80: mol_type = other DNA
tccaatcaagaatctagtgggtgttttctttccaagaattcaataaactttctctaaagtttatgaagaaaaagggaggc

SEQ ID NO: 14936 - DNA, 80 bp, synthetic construct
  source 1..80: mol_type = other DNA
ttaacagtatgcattggtatctctagagtacacaagcaactcctgcaaatcaacaaggacaaaagacggcgacgtcaaaa

SEQ ID NO: 14937 - DNA, 80 bp, synthetic construct
  source 1..80: mol_type = other DNA
ttgaacggttgcctatggggagggtaatgagactggagagtgagataaaagggaaaaggaaaaaaatgaaagagaaagga

SEQ ID NO: 14938 - DNA, 80 bp, synthetic construct
  source 1..80: mol_type = other DNA
tgcctggctcccaaggtgtttctcatcctggataagcacccaaaaaggagaggggtttatctgaggccaaccacaggcca

SEQ ID NO: 14939 - DNA, 80 bp, synthetic construct
  source 1..80: mol_type = other DNA
tcaggaatgacccccgtggagcccctccaacaggcctctgatccagctagagaagggaaaggtggagggaaggtgctgca

SEQ ID NO: 14940 - DNA, 80 bp, synthetic construct
  source 1..80: mol_type = other DNA
ataaagaccaagggacagagagtaagccaggcaggcagaagacaaaggcaaggagatgtggggagtgagagaggagccga

SEQ ID NO: 14941 - DNA, 80 bp, synthetic construct
  source 1..80: mol_type = other DNA
acagccccattttttggagttgtaacctggagaggggacaagtttgaacttgggctggggatctgggttctaatcccact

SEQ ID NO: 14942 - DNA, 80 bp, synthetic construct
  source 1..80: mol_type = other DNA
tgactgtgtgaacttcagtttcttcatcccccaaaatgaagacaacagtagtgtctacctccctgggttgtgaagagtgc

SEQ ID NO: 14943 - DNA, 80 bp, synthetic construct
  source 1..80: mol_type = other DNA
tcagcgcacaactgccaatctgacctttaacctccatccacgcacgtacctgccatcccagctcggtctaactctagtcc

SEQ ID NO: 14944 - DNA, 80 bp, synthetic construct
  source 1..80: mol_type = other DNA
aggccagagatggcggccaggattccctttgcatcggctctctggattctgcttttaatttccctgctctccagactggg

SEQ ID NO: 14945 - DNA, 80 bp, synthetic construct
  source 1..80: mol_type = other DNA
aaagttgccttttggaactggttcatcttttggccagttcccaaggccccccagacctcccaggcagccatcaattccag

SEQ ID NO: 14946 - DNA, 80 bp, synthetic construct
  source 1..80: mol_type = other DNA
ccccaccgcccatacagggtctaactcacgggtgacacatgggctcagggttatatacacacggcacacacaagaagaga

SEQ ID NO: 14947 - DNA, 80 bp, synthetic construct
  source 1..80: mol_type = other DNA
ttgtcggagttactgcttaagtacttctactggtttatgactccagcagcttctgcatgaggtgatttgatcttagctgt

SEQ ID NO: 14948 - DNA, 80 bp, synthetic construct
  source 1..80: mol_type = other DNA
atttttaaagagtaggcatcctgtgttttttgtcttatctggctacaggagcagtgatgcatagctgtgagggtatggta

SEQ ID NO: 14949 - DNA, 80 bp, synthetic construct
  source 1..80: mol_type = other DNA
aggtccactgtaaactgttggctggtagaggctgactcagtagtcttgtcttttttttttttttgagatggagtttcgct

SEQ ID NO: 14950 - DNA, 80 bp, synthetic construct
  source 1..80: mol_type = other DNA
gttttattaattgttttgattccttggaaaaaggtaaggggctccaaagcaaagttcagccctgtgtcttgggctagtaa

SEQ ID NO: 14951 - DNA, 80 bp, synthetic construct
  source 1..80: mol_type = other DNA
gccctcaattatttatgggcctgtcaaggcaaaatctgcacaacagccagtacatctcattataaataatttaggagaag

SEQ ID NO: 14952 - DNA, 80 bp, synthetic construct
  source 1..80: mol_type = other DNA
ttcttgtcctcagattttttcctgaagactgaacaaaacactgggccagttaaaagcttttagagcggctgccaacctta

SEQ ID NO: 14953 - DNA, 80 bp, synthetic construct
  source 1..80: mol_type = other DNA
cctgggaagacatattttagcctcagtgttatccccattggagggagaacagccattcaatttttacattcttttgaggc

SEQ ID NO: 14954 - DNA, 80 bp, synthetic construct
  source 1..80: mol_type = other DNA
gttgtagaattgaccctgctctcctaacagttacatcaggcaagtccatagatgataattccacaaagtctgagaaacaa

SEQ ID NO: 14955 - DNA, 80 bp, synthetic construct
  source 1..80: mol_type = other DNA
gaggaaacacaagaaaaaggcagagactctggtggccactttgtataaaacccagtatccccaaggtacacctgctagtt

SEQ ID NO: 14956 - DNA, 80 bp, synthetic construct
  source 1..80: mol_type = other DNA
atccagtagatcccagtccctatactttgctaactcaaatatccaagggaactaaatggttcacagttctgggcctaaag

SEQ ID NO: 14957 - DNA, 80 bp, synthetic construct
  source 1..80: mol_type = other DNA
ttttgtaggacagggagtctgaaaagtgggatatgcagtagtcaccctaaataacattgaaaatgtgcctctctcaccag

SEQ ID NO: 14958 - DNA, 80 bp, synthetic construct
  source 1..80: mol_type = other DNA
ttccaaaacaacaatggtccctcatttaaagaagcctctacccagtagggccgagtctgctaggactttttattgggttt

SEQ ID NO: 14959 - DNA, 80 bp, synthetic construct
  source 1..80: mol_type = other DNA
ttctcatttagcatgtaaaattccaaatggcatcgtgagtgactatcctgagtatagatatccccatcccaaagatgttc

SEQ ID NO: 14960 - DNA, 80 bp, synthetic construct
  source 1..80: mol_type = other DNA
gccctagatatccttatggccaaagtagggggtacctgtgcacttttaaaaagaagcatgtcacttctagatcaatacct

SEQ ID NO: 14961 - DNA, 80 bp, synthetic construct
  source 1..80: mol_type = other DNA
aagcctctgtattcaactgtgaaatggcgacactcttttgggccccctcttggcagtggggagctttcttttttcacttt

SEQ ID NO: 14962 - DNA, 80 bp, synthetic construct
  source 1..80: mol_type = other DNA
atctcggggatctggggtggccaagactttctcagagtgtatattaggtgctagaataacatcattttatttgatgtcat

SEQ ID NO: 14963 - DNA, 80 bp, synthetic construct
  source 1..80: mol_type = other DNA
tcaactccattaagtgaggacttactgtactgtagcctgaggctcatcttagtcttccctcatcccccctgcctttcctt

SEQ ID NO: 14964 - DNA, 80 bp, synthetic construct
  source 1..80: mol_type = other DNA
ttcaagctggaatcaatctgttgttcttcggacctgaggtcaacatgactttgatgaacggaattcatgtcttcttgcta

SEQ ID NO: 14965 - DNA, 80 bp, synthetic construct
  source 1..80: mol_type = other DNA
attagacagactttggctgaaatcttggacctgcctcctactagctgtgagatcttagcaaattacttcctgctataggc

SEQ ID NO: 14966 - DNA, 80 bp, synthetic construct
  source 1..80: mol_type = other DNA
tgcaatcctggaggcagaatatcacaaacaaaattatcacagaagttcctgctgggctgagtagtgctcaggtgaacttc

SEQ ID NO: 14967 - DNA, 80 bp, synthetic construct
  source 1..80: mol_type = other DNA
atcagggaaggtttcgaggaggcatcactcagcctggatttttatggatttcaacagacagagatgaggcctgggcagtc

SEQ ID NO: 14968 - DNA, 80 bp, synthetic construct
  source 1..80: mol_type = other DNA
ttgaagggggtggcagctgccagtccctgcctcccttcccaccagcatgcttgctgcctccccagcaagaaaagcccaga

SEQ ID NO: 14969 - DNA, 80 bp, synthetic construct
  source 1..80: mol_type = other DNA
aataacccagtacaggttcctgctgaggccagaaatagcatagtgacaagtgccttgtaacaccctggatgagcagcagg

SEQ ID NO: 14970 - DNA, 80 bp, synthetic construct
  source 1..80: mol_type = other DNA
caaagccaatagtcacttggacctcaatggagaaaaggaaggcagacgagaaggagtggatgctggtgacacagggctca

SEQ ID NO: 14971 - DNA, 80 bp, synthetic construct
  source 1..80: mol_type = other DNA
cttcccccaccagctgaccacccctgggcctcccgctaagagcccttctccccgcccagcctgccttcccagcccagctc

SEQ ID NO: 14972 - DNA, 80 bp, synthetic construct
  source 1..80: mol_type = other DNA
gtctccacacaagtcccggcaggggcttcttgggcggaggccacgccgaccaataggaacccactgtgttcctacaggtt

SEQ ID NO: 14973 - DNA, 80 bp, synthetic construct
  source 1..80: mol_type = other DNA
cggccgcagcttccttttgttaaaagttgcgtgtgtgtgaccggcgcccgggaggacctgcctgcaggttctccgccgcg

SEQ ID NO: 14974 - DNA, 80 bp, synthetic construct
  source 1..80: mol_type = other DNA
gtaaggatagaaagtgagtcttagctggaatcaagcgcttgaaaggaagcggcgcaatgaacggttttgagactgtcgac

SEQ ID NO: 14975 - DNA, 80 bp, synthetic construct
  source 1..80: mol_type = other DNA
ccaggccttttgcttggggctttacctatttctagtagtctcaatgagcctaggaagtagtactattattacccctaaca

SEQ ID NO: 14976 - DNA, 80 bp, synthetic construct
  source 1..80: mol_type = other DNA
agatgttgtggtggtgatgaattttgctgctgttgttgacagcccttcgaagttacccttagggttttgactcatttcct

SEQ ID NO: 14977 - DNA, 80 bp, synthetic construct
  source 1..80: mol_type = other DNA
tgttggtctgatggcttcatgactgacagcttgatggccttagagcaaattgtttaacctttttgagctttcattgtcca

SEQ ID NO: 14978 - DNA, 80 bp, synthetic construct
  source 1..80: mol_type = other DNA
attattcaggacatgtggcatcagttaattacgagcttgggctctgaaattgacacgctggatttttattccagttctgc

SEQ ID NO: 14979 - DNA, 80 bp, synthetic construct
  source 1..80: mol_type = other DNA
agcctcaaggagcatggagggaatgtgtatttagtgctgagtttggtctaggttatgaagaatgctttgaagtcaaggct

SEQ ID NO: 14980 - DNA, 80 bp, synthetic construct
  source 1..80: mol_type = other DNA
caggtaactcgcaaatgcagaaccatactgaatttgtctgttttttgactggtttatttcacataccgtaacatcctcaa

SEQ ID NO: 14981 - DNA, 80 bp, synthetic construct
  source 1..80: mol_type = other DNA
tctcagaataaaatggccatactgggtatagaggaggacatagaattgacgaaagctttgggaaataggtcctttgaaag

SEQ ID NO: 14982 - DNA, 80 bp, synthetic construct
  source 1..80: mol_type = other DNA
ggtctagagaaatccataatctatcatttagccctaccctaagaatcgctgtgctataacgcagcatgtaggcagaaagt

SEQ ID NO: 14983 - DNA, 80 bp, synthetic construct
  source 1..80: mol_type = other DNA
tgaagcaaagatagcaacaaacaagcctgcaaaccttgataaggagcctgtgtggtttggaacatcttgagattcttccc

SEQ ID NO: 14984 - DNA, 80 bp, synthetic construct
  source 1..80: mol_type = other DNA
tctggggaaaatatttactggagattttagaagtgtgaaaggtggcaggagacgttggctgtctgttattctacttggct

SEQ ID NO: 14985 - DNA, 80 bp, synthetic construct
  source 1..80: mol_type = other DNA
gtggttagttaaggaagaaagagaaaagaaaggtgatgcagagggtcagagggtaccagttcaaaaaagaggaaagccaa

SEQ ID NO: 14986 - DNA, 80 bp, synthetic construct
  source 1..80: mol_type = other DNA
aaccaggctttgctataaagtcctgtgaaattgggggactgaaagctaattacttggatcacaagttgcctgtgaaaact

SEQ ID NO: 14987 - DNA, 80 bp, synthetic construct
  source 1..80: mol_type = other DNA
aatcttgaggtgcttgtctgggtgtcagttgacaatttcaatgaaattagcagcattaggtctataggtggctgcttaac

SEQ ID NO: 14988 - DNA, 80 bp, synthetic construct
  source 1..80: mol_type = other DNA
tctttactctcctgagctggggattggaagtaatattcttttacttccagttaatatctaaaaggcaatcagcaagcata

SEQ ID NO: 14989 - DNA, 80 bp, synthetic construct
  source 1..80: mol_type = other DNA
cattattcatgttagaccttcttagcctgtattctgtatctgccactttctctcaaatccttttaaccgcgtcataattc

SEQ ID NO: 14990 - DNA, 80 bp, synthetic construct
  source 1..80: mol_type = other DNA
aactctactttcctatatcctaagactttttttttgtccctacccacactgcttacctgcccagactttcccttaccttt

SEQ ID NO: 14991 - DNA, 80 bp, synthetic construct
  source 1..80: mol_type = other DNA
gaattgacctcttacccctctgcttttgggaatggccattatcctaaagccatatgaagaataaggacagatttctcaat

SEQ ID NO: 14992 - DNA, 80 bp, synthetic construct
  source 1..80: mol_type = other DNA
caagaaaatctgtttttgcaggtttgctttgagttccaagatacagatcctggtaaaattgtttgctgcgctaatgccct

SEQ ID NO: 14993 - DNA, 80 bp, synthetic construct
  source 1..80: mol_type = other DNA
cagggtaggtcagatcagccctcattgtacagcgtgcttgttcgaacttatcacattgtaattacctaattgtataatta

SEQ ID NO: 14994 - DNA, 80 bp, synthetic construct
  source 1..80: mol_type = other DNA
caagacctagagggtaaagaggctgacgtgcttaatgggaatgttgcttttgatagaggaactggtaatctgttcactat

SEQ ID NO: 14995 - DNA, 80 bp, synthetic construct
  source 1..80: mol_type = other DNA
tccaaaacccacacctgttttcataatattcctcttgttttcatctgctcacccaagctcagagaagcaccttaatttcc

SEQ ID NO: 14996 - DNA, 80 bp, synthetic construct
  source 1..80: mol_type = other DNA
aggtgcaattttccctatttgacaggcccattaaagcaggatttcagagtatgttcactagcaaaatgtactgatttacc

SEQ ID NO: 14997 - DNA, 80 bp, synthetic construct
  source 1..80: mol_type = other DNA
aaaactccatttcccctcctgagcctgcagggaattgacattttgcagaagcttgagtttcctgataggaggaaatttgg

SEQ ID NO: 14998 - DNA, 80 bp, synthetic construct
  source 1..80: mol_type = other DNA
gcttgtcacatccagaccttatccaactccccaaagactgacttcataatggcagagaaaggtttcctcttagtctgtct

SEQ ID NO: 14999 - DNA, 80 bp, synthetic construct
  source 1..80: mol_type = other DNA
caaatttctgggattaaaggcatgggccaccgtgcctggcccaagcactgaatttttattaatgtaagagatttctttgt

SEQ ID NO: 15000 - DNA, 80 bp, synthetic construct
  source 1..80: mol_type = other DNA
ttctccaccaaaaggtgggggggtggggaagacaaaacccccaaaacccaagtgtaactacctgcaaaagtatgcattta

SEQ ID NO: 15001 - DNA, 80 bp, synthetic construct
  source 1..80: mol_type = other DNA
atccctctggctatccctcccctcagttccttctttctttattgccatcttcctctgtggatgttcatctccccaactct

SEQ ID NO: 15002 - DNA, 80 bp, synthetic construct
  source 1..80: mol_type = other DNA
attacttttgcaccaaccttctatagaaggccctgtgcactgtctgatctggaatttcctggttctcctttagcagtgga

SEQ ID NO: 15003 - DNA, 80 bp, synthetic construct
  source 1..80: mol_type = other DNA
gctcagttctacataatactctgccctgttttagcctgtacttgcttcattgtatggtaattatgtgagtctgtcttccc

SEQ ID NO: 15004 - DNA, 80 bp, synthetic construct
  source 1..80: mol_type = other DNA
attggaggtaccactggtttgagtgggacatttgggaatatgtggttgtaaagtaattcagtttcttcgaaagctcattt

SEQ ID NO: 15005 - DNA, 80 bp, synthetic construct
  source 1..80: mol_type = other DNA
acacagtacatgcgtgatgaaaggtaagactttaatgacgacggtgcattgagctccccatagtagaacagggacatttt

SEQ ID NO: 15006 - DNA, 80 bp, synthetic construct
  source 1..80: mol_type = other DNA
gcttccacagatcactgcacctagaattgcagtctcaactagtctgtgaattgacatgttaaaaaaatactacaggtatg

SEQ ID NO: 15007 - DNA, 80 bp, synthetic construct
  source 1..80: mol_type = other DNA
ggctcacagaggctaataatagaggccagtgtgatcagataaaaaagtgtcaagatagctgaggcaggttttaggtttag

SEQ ID NO: 15008 - DNA, 80 bp, synthetic construct
  source 1..80: mol_type = other DNA
tgctagttggtctccagagtgttgggttttgccacctatcctttttttgggttaattaattaacatgtgttcagggaaca

SEQ ID NO: 15009 - DNA, 80 bp, synthetic construct
  source 1..80: mol_type = other DNA
aagatgtgtcccagggacacaggcagaagggatgatgggcatgacaacggatgaagaatgttctcaggatccttagccag

SEQ ID NO: 15010 - DNA, 80 bp, synthetic construct
  source 1..80: mol_type = other DNA
gctagacttagctgcattggcctggtgtgtctcaggaagtcaaggatgtttatttgactggattgtaattatctatatcc

SEQ ID NO: 15011 - DNA, 80 bp, synthetic construct
  source 1..80: mol_type = other DNA
ttcctacaccgtcttggctggaagagccctttaagatcaatgcttggttggttcctcaaacccttttctttaatgatctg

SEQ ID NO: 15012 - DNA, 80 bp, synthetic construct
  source 1..80: mol_type = other DNA
tatgatatggttacactccagcccacctcttgctttttcttcagattgacagtaaacctcatagctatgttttacttcag

SEQ ID NO: 15013 - DNA, 80 bp, synthetic construct
  source 1..80: mol_type = other DNA
tgagattttgtttctgttgtttctaagctgggtgtctgcatgtccacactgcgaagatggcccatattcagaatgaaaac

SEQ ID NO: 15014 - DNA, 80 bp, synthetic construct
  source 1..80: mol_type = other DNA
caggactgtgatactcttcctaatgagattacagtaggtttagcccatttgtgctggtgctttgagtaaaccctgagaat

SEQ ID NO: 15015 - DNA, 80 bp, synthetic construct
  source 1..80: mol_type = other DNA
tacaaagagtagataaaacagtaactagctatggcctgggaccatccatagttcaaccatcatgaggtcatttatttgca

SEQ ID NO: 15016 - DNA, 80 bp, synthetic construct
  source 1..80: mol_type = other DNA
gatcatgggaggggcaatttgaagattaaatgagattaagtgtaatggtccaagcttagtgcgtgatacatggaaagcgt

SEQ ID NO: 15017 - DNA, 80 bp, synthetic construct
  source 1..80: mol_type = other DNA
gaattgactttcccttcagctgatcaattgcaatgcatcctcaaactgtttgagatctgagaaggaaaattccagttgac

SEQ ID NO: 15018 - DNA, 80 bp, synthetic construct
  source 1..80: mol_type = other DNA
aagctatcttcttagggaaggggaagaattcacagtgacgtgcacaataaaagatgtgtctagttctgtgtactcaacgt

SEQ ID NO: 15019 - DNA, 80 bp, synthetic construct
  source 1..80: mol_type = other DNA
gatattcatgtagacctgtgatggatgatatcttgctaaatgaagcctgccattgactggtagaatggattgtaccatag

SEQ ID NO: 15020 - DNA, 80 bp, synthetic construct
  source 1..80: mol_type = other DNA
ctttgatatgttatctgtccattgtcactctgcctttgtggagaagtctgtgaaactatgaactgggaaaagccagtttg

SEQ ID NO: 15021 - DNA, 80 bp, synthetic construct
  source 1..80: mol_type = other DNA
gagcaatttccttgagttaaatttgctgcagttgatcagagggtatgaacatcctggtaagctcctttccagaaggattt

SEQ ID NO: 15022 - DNA, 80 bp, synthetic construct
  source 1..80: mol_type = other DNA
ttattgttattagcaatgtgttcgctctcagtcattgggacatagaagagaaaaagacatgacaaaaatatgctgactca

SEQ ID NO: 15023 - DNA, 80 bp, synthetic construct
  source 1..80: mol_type = other DNA
agaatttatcaaggaacacaaatgcttagagcctgaagtatttctctgaaacttttggtaggggctgtgccccttggttt

SEQ ID NO: 15024 - DNA, 80 bp, synthetic construct
  source 1..80: mol_type = other DNA
gtaattttttagtggctgggaggagggtttggatccatgatggagtgatgaagagaacagggctttggtatcactctttt

SEQ ID NO: 15025 - DNA, 80 bp, synthetic construct
  source 1..80: mol_type = other DNA
tgtgccaatttacagtgtgtaattcagcatactacttttaccacacttgcaaaattattgagtttagttaaaattagttt

SEQ ID NO: 15026 - DNA, 80 bp, synthetic construct
  source 1..80: mol_type = other DNA
cagatcttatttctgtaacccgtaaatccacgagaagatacctggtaaagaagaaagtctggggctgcctcctatgtcct

SEQ ID NO: 15027 - DNA, 80 bp, synthetic construct
  source 1..80: mol_type = other DNA
ggtttgttggatttgagattgatagtgggatcttgagtgggattgtttaggtaggaagtatcttttgccaaacgccctag

SEQ ID NO: 15028 - DNA, 80 bp, synthetic construct
  source 1..80: mol_type = other DNA
gatgggggtgttgcaagaaggaaggtgagcagtgtggacctcgctgagggcccagagtgtctgtgtgagggcagtgagca

SEQ ID NO: 15029 - DNA, 80 bp, synthetic construct
  source 1..80: mol_type = other DNA
tgctatcgagccctgacgtgatttctttgttcagtgctgtctcttttgaggctgtgatgttacttgtgtttagattgttc

SEQ ID NO: 15030 - DNA, 80 bp, synthetic construct
  source 1..80: mol_type = other DNA
acaaacatgtttttgttttcaaacatgttgacaaacatgttgagccagcatctgtctctgtcacccaggctggagtgatc

SEQ ID NO: 15031 - DNA, 80 bp, synthetic construct
  source 1..80: mol_type = other DNA
aagagatgaccgtaggtaaatcggtatccttgcaagcataatatgcatattgttcatacagaattttattgtggctgctc

SEQ ID NO: 15032 - DNA, 80 bp, synthetic construct
  source 1..80: mol_type = other DNA
ccttccaaaaggatatcttcttggattgcctgtaagtaggaggtcttttctgcattctagggtatgggtctctaataccc

SEQ ID NO: 15033 - DNA, 80 bp, synthetic construct
  source 1..80: mol_type = other DNA
aactgactcagtgacatttaaggtggtttataatggccaagagccattataacatggttgccatctttgagtagaacttc

SEQ ID NO: 15034 - DNA, 80 bp, synthetic construct
  source 1..80: mol_type = other DNA
actgaagggctccctttgatcattagccttacataggatgcctttaatgttgagctagattggaagcccaagtgactgct

SEQ ID NO: 15035 - DNA, 80 bp, synthetic construct
  source 1..80: mol_type = other DNA
agagaggagaagaagggtgccaggttgtttttaaaaatcggatctcgagggagctaatagtgtgaggagtcactcattac

SEQ ID NO: 15036 - DNA, 80 bp, synthetic construct
  source 1..80: mol_type = other DNA
tgctttataacctggatttttggtgctgcacaacaaaagcattgtgaatatctttctataacatcattttggcatctcag

SEQ ID NO: 15037 - DNA, 80 bp, synthetic construct
  source 1..80: mol_type = other DNA
ggtatgtagccatgtaaacttctgctggaattgactctaaacttgggtacatagacttcgctaaaagcagtgagtggtcc

SEQ ID NO: 15038 - DNA, 80 bp, synthetic construct
  source 1..80: mol_type = other DNA
gttttattgaaaacagccatgcctatttgattatataatgtctatgggcacatttgtactacagctgcagagttgagttg

SEQ ID NO: 15039 - DNA, 80 bp, synthetic construct
  source 1..80: mol_type = other DNA
acctccaacttgggaggaattagagaatgtgtcatttgctatactgcttattgcagaatatctaagaagccacagctcag

SEQ ID NO: 15040 - DNA, 80 bp, synthetic construct
  source 1..80: mol_type = other DNA
gcctcaggttatgacccacctgggatagaaacttaacaaaactgcttaattaaccggcacatgggaacaagtaggccagc

SEQ ID NO: 15041 - DNA, 80 bp, synthetic construct
  source 1..80: mol_type = other DNA
tcttcttgctctatttgtaaagctggcattggatccaaactctcaaggatgcccctaccttgagattgttttggagagtt

SEQ ID NO: 15042 - DNA, 80 bp, synthetic construct
  source 1..80: mol_type = other DNA
attgtttcatttctataagtcattcttagctctctgtatgtgccatctcatttaattgtctcaatatccctatgagaggg

SEQ ID NO: 15043 - DNA, 80 bp, synthetic construct
  source 1..80: mol_type = other DNA
ttctagcttccctgtaaatagagtgattcggcttttaatcggcaccacccttccacccccaaaaaggagaaaattcatgt

SEQ ID NO: 15044 - DNA, 80 bp, synthetic construct
  source 1..80: mol_type = other DNA
acaattacaacatacatatggcatttgcaagcgaccgcttttaaaaagggtttcttcttgataatgtgcccagcccctga

SEQ ID NO: 15045 - DNA, 80 bp, synthetic construct
  source 1..80: mol_type = other DNA
gtataactaggccttcctgcttagaactcaaacttcagtcctcactttgactattttctggtctacatccttgattttgt

SEQ ID NO: 15046 - DNA, 80 bp, synthetic construct
  source 1..80: mol_type = other DNA
ccttctcttccccagtgcttttttcactcactaggtcaccaaagtgcttattcttagacacttgtaaaaggacattttct

SEQ ID NO: 15047 - DNA, 80 bp, synthetic construct
  source 1..80: mol_type = other DNA
agttaaaagatcttttgggcaaactgatgaattggtacaaagtgggaagacaaagaaactgggcacttactttttaggcc

SEQ ID NO: 15048 - DNA, 80 bp, synthetic construct
  source 1..80: mol_type = other DNA
gtgatctatttttccctttctccccacagaaacccatgtatgaagtacagtggaaggttgttgaggagataaatggaaac

SEQ ID NO: 15049 - DNA, 80 bp, synthetic construct
  source 1..80: mol_type = other DNA
tatttgtaacatcaacgacatcagcctcttgaatatctcatcccgaccagaaggcttctgttatcttgtaagctttatac

SEQ ID NO: 15050 - DNA, 80 bp, synthetic construct
  source 1..80: mol_type = other DNA
attcaaaggagtcttcctggtaagactgatttacataaatagttagctgttgacaggcagttcatggggtcataagggtt

SEQ ID NO: 15051 - DNA, 80 bp, synthetic construct
  source 1..80: mol_type = other DNA
ttctcatatcttgcctattctttctttggaaatgctcttaagggccaccatttgagaagacttcctagatgtacccagtc

SEQ ID NO: 15052 - DNA, 80 bp, synthetic construct
  source 1..80: mol_type = other DNA
tacatggacatgaaacctggagtttcttatgttgtcccaaccaaggccgacaaaaggagatctgtgagaataggtgagta

SEQ ID NO: 15053 - DNA, 80 bp, synthetic construct
  source 1..80: mol_type = other DNA
cctagagaacagaatcattttatcagtaaaagcagagggcacctcatagttacaaggcttggggtgaagcatagacttga

SEQ ID NO: 15054 - DNA, 80 bp, synthetic construct
  source 1..80: mol_type = other DNA
aaaatgaatttaaatggttttcttttctcctccaacctaatagtgtattcacagagacttggcagccagaaatatcctcc

SEQ ID NO: 15055 - DNA, 80 bp, synthetic construct
  source 1..80: mol_type = other DNA
atttattcctggaggtggatttttgtgccccttatgataatgtaatgttttccccccatcactgtggcgtctctattggt

SEQ ID NO: 15056 - DNA, 80 bp, synthetic construct
  source 1..80: mol_type = other DNA
ccttttagagcctggtaaagcctatgggacccttatcagaacactgttttcaacgcctatgatgaaatacataggaatac

SEQ ID NO: 15057 - DNA, 80 bp, synthetic construct
  source 1..80: mol_type = other DNA
gagggcacgtgccagctatattgtaaggaggttttcctgaagctgctatacagcacttacaacttagtggccaaaaccga

SEQ ID NO: 15058 - DNA, 80 bp, synthetic construct
  source 1..80: mol_type = other DNA
ggatgctcagccctgaacacgcacctgctgaaatgtaagagccaaaaaatttttcctttaggtcacgttttcccttttat

SEQ ID NO: 15059 - DNA, 80 bp, synthetic construct
  source 1..80: mol_type = other DNA
tagaaaagacagcttgttactgcagtgaaataagccttctgatcaaacaagcatagccagaaaatggcagatagctgtca

SEQ ID NO: 15060 - DNA, 80 bp, synthetic construct
  source 1..80: mol_type = other DNA
gatcttgacactgtaagtatgccttttgttgctatgttcgttgtagggactgctgtattgactatgggcttgttttctcc

SEQ ID NO: 15061 - DNA, 80 bp, synthetic construct
  source 1..80: mol_type = other DNA
gcattgaattggagagaaggcctccctagccagcacttgtatatacgcatctataaattgtccgtgttcatacatttgag

SEQ ID NO: 15062 - DNA, 80 bp, synthetic construct
  source 1..80: mol_type = other DNA
tgtcttgaaagattcaggtatgttgcctttatggtttcccccttctacatttcttagactacatttagagaactgtggcc

SEQ ID NO: 15063 - DNA, 80 bp, synthetic construct
  source 1..80: mol_type = other DNA
ggtgtggggggagagatgggccctcaacatatctgcagataacttttttttcccctaaattcatctaaattacctatcat

SEQ ID NO: 15064 - DNA, 80 bp, synthetic construct
  source 1..80: mol_type = other DNA
ttcctgaagtatggccatttctttctctgtgtagaaacgaggtactgtgtaagtcttaacaccctacctaaacagtgttc

SEQ ID NO: 15065 - DNA, 80 bp, synthetic construct
  source 1..80: mol_type = other DNA
accacctgaaaattagtgattaggtcaaatccctttatggtatctgtcagattctcttgagccctgaggaaataagatgt

SEQ ID NO: 15066 - DNA, 80 bp, synthetic construct
  source 1..80: mol_type = other DNA
aacaaaagcaatgctcttgatttgtcagcaggaccaccacagagtgagattgtatcttgttgagctatccaaactgccct

SEQ ID NO: 15067 - DNA, 80 bp, synthetic construct
  source 1..80: mol_type = other DNA
caaaagccccaagacagaaatcttaggtattcagtttctttttcacaggcattgctagttcaaaaaccaaaactctggga

SEQ ID NO: 15068 - DNA, 80 bp, synthetic construct
  source 1..80: mol_type = other DNA
cacaaaagacaaggataaccaatggcacagaattttaaataaggtaacgactttttcacaggagaacttaatttgctact

SEQ ID NO: 15069 - DNA, 80 bp, synthetic construct
  source 1..80: mol_type = other DNA
agacagcagagggagtcttagaaacaaatacccaacacattaagttgtataaatcaagccactttaggaacaatgaaaac

SEQ ID NO: 15070 - DNA, 80 bp, synthetic construct
  source 1..80: mol_type = other DNA
cataaacccttagaatgtgatagaatcttaaaagaggatctaactcccttaccctgaatgaataaattccctctgatcac

SEQ ID NO: 15071 - DNA, 80 bp, synthetic construct
  source 1..80: mol_type = other DNA
tcttttatatgaattacttccacgtgtactgaaaaacaaggattcgtcacatcaaacaattgtgacattcacctacagtc

SEQ ID NO: 15072 - DNA, 80 bp, synthetic construct
  source 1..80: mol_type = other DNA
ttttagatataagaccaaaaaagagctggagtggtgggaaggtagtaaggactatctgcaacacatgtggaacatgagat

SEQ ID NO: 15073 - DNA, 80 bp, synthetic construct
  source 1..80: mol_type = other DNA
atacatttaagagtggctttttcccaccttctgggccattcaatattactgctgtctactatagctcatatctttttctc

SEQ ID NO: 15074 - DNA, 80 bp, synthetic construct
  source 1..80: mol_type = other DNA
ggagagattatgacaagcctaaacacaggtattagcatctgtttgtcaattaatgcaaccattttagtttgctagtcctg

SEQ ID NO: 15075 - DNA, 80 bp, synthetic construct
  source 1..80: mol_type = other DNA
ctagtttgttcagaaaagcataccatcaaagtaggggcacagagaaatacacagaaatattaatctatatatagtgcaaa

SEQ ID NO: 15076 - DNA, 80 bp, synthetic construct
  source 1..80: mol_type = other DNA
agcctgaagtcccagctactcaaaaggctgaggcaggagggttgcctgggcccaggagtttgaggcttcattgagctatg

SEQ ID NO: 15077 - DNA, 80 bp, synthetic construct
  source 1..80: mol_type = other DNA
actgacatcaagagaacatgagaacattatccttgtgtacactgtaaaccactggcactggctcttatttttaaaatgcc

SEQ ID NO: 15078 - DNA, 80 bp, synthetic construct
  source 1..80: mol_type = other DNA
cacatcaaataccctaactatatacaaatgcaagactaccagccttttggtggggaagggcatggaggaacaagatgtat

SEQ ID NO: 15079 - DNA, 80 bp, synthetic construct
  source 1..80: mol_type = other DNA
cactgcactccagcctggcaacagtgagaccgtctcaaaaaaaaaaaaaatactagagaccaggcacagtgactcacgtc

SEQ ID NO: 15080 - DNA, 80 bp, synthetic construct
  source 1..80: mol_type = other DNA
caacgatttttgcattttaaagggtcataattaaaaaaaaatgcaacagataccacttgtggccctcaaagcctaaaaca

SEQ ID NO: 15081 - DNA, 80 bp, synthetic construct
  source 1..80: mol_type = other DNA
ctgaataacagatgagtaacaaaatactctgcagaaaggaggacttgacattttcaccagtaactggagatgtaaaattt

SEQ ID NO: 15082 - DNA, 80 bp, synthetic construct
  source 1..80: mol_type = other DNA
tctctcctaagaaaagtcaaggagactgtaaagacagtaaaaagaaaaacaaaaaccaagcctcttcctggtctttggaa

SEQ ID NO: 15083 - DNA, 80 bp, synthetic construct
  source 1..80: mol_type = other DNA
ataatggagtttaaaagttcctattgcttagtgatgttatagccatcctaacactgtagtacgacacattgctcacgtgt

SEQ ID NO: 15084 - DNA, 80 bp, synthetic construct
  source 1..80: mol_type = other DNA
aacgtttaacctagaaacatgacataatggtttaaaagtactaccgaaatagaaaacgcaaaaatttgttgccctgttct

SEQ ID NO: 15085 - DNA, 80 bp, synthetic construct
  source 1..80: mol_type = other DNA
ggggtgaaattacattccctcacaattttaggtgactttcaaagacacagcacaaaagaaggagcagagcagacaacaga

SEQ ID NO: 15086 - DNA, 80 bp, synthetic construct
  source 1..80: mol_type = other DNA
aggaatcctgagaagggagaaacacagtctggattattacagtgcaccttttacttcaaaaaaggtgttatatacaactc

SEQ ID NO: 15087 - DNA, 80 bp, synthetic construct
  source 1..80: mol_type = other DNA
atattccaaaatccaaaaaaaaaatctgaaatccaaaccacttctggtcacaaccattttggataacggatgcttcaacc

SEQ ID NO: 15088 - DNA, 80 bp, synthetic construct
  source 1..80: mol_type = other DNA
aaaggcacacataaggaaatgggcaatactcaagattctaatggcctcatccacttctgaaaactgtggaaaaataatct

SEQ ID NO: 15089 - DNA, 80 bp, synthetic construct
  source 1..80: mol_type = other DNA
tacatcaaaatgttataaaggttatgtctttaatggagataatttaaaagacatttatcttggccgggtgcgatggctca

SEQ ID NO: 15090 - DNA, 80 bp, synthetic construct
  source 1..80: mol_type = other DNA
aaccatcgcgcccagcctgtcacctcacattctttacttaccaatgtaggctgagtatccctactctgaaaaaccaaaat

SEQ ID NO: 15091 - DNA, 80 bp, synthetic construct
  source 1..80: mol_type = other DNA
tatatgaaaagtcagccctccatatctgcatttggttgggaaaaaaacgtgtatcacaagtggacccatggtcactcaaa

SEQ ID NO: 15092 - DNA, 80 bp, synthetic construct
  source 1..80: mol_type = other DNA
gcatttaaaactgacccataatcttgcaccatttacctatcttcaaaatatatcctacatccaaccacctaccaccacca

SEQ ID NO: 15093 - DNA, 80 bp, synthetic construct
  source 1..80: mol_type = other DNA
atgttcacgacaaatgccccactttcaatgtaacagtgtgcaaaggcagattttttaatctttcaacaatttgttttaaa

SEQ ID NO: 15094 - DNA, 80 bp, synthetic construct
  source 1..80: mol_type = other DNA
tcgagtatgggttttccaactcaggcagtgactctgacacagagacatattccatgtatcaaaacaaaacaatatataca

SEQ ID NO: 15095 - DNA, 80 bp, synthetic construct
  source 1..80: mol_type = other DNA
caggaaggagcaaacagaatgtaaaaaacatagaacagcatgttgaggacacagaaccaaggagctccatataactttag

SEQ ID NO: 15096 - DNA, 80 bp, synthetic construct
  source 1..80: mol_type = other DNA
tgagctacgaattattacaagaaatgacaaaatctgaactaaggcagcaacagcagtatggaccgaaaagattaaataga

SEQ ID NO: 15097 - DNA, 80 bp, synthetic construct
  source 1..80: mol_type = other DNA
agccgaagaacttcacttatttgtgctatgggcttgggcaaactactttatctcacatcttctctaagctattgttcctt

SEQ ID NO: 15098 - DNA, 80 bp, synthetic construct
  source 1..80: mol_type = other DNA
atctgaaactttagtgcccttttctctctccaaaacgagtatttacttttcccccagcccaatggtataagcttatttta

SEQ ID NO: 15099 - DNA, 80 bp, synthetic construct
  source 1..80: mol_type = other DNA
ccagggttctcactgcgggagaaagaaggtgaaaaatagttaactcttgatttcttagtaacatgcatttctaagctctg

SEQ ID NO: 15100 - DNA, 80 bp, synthetic construct
  source 1..80: mol_type = other DNA
atacctaaaactaataagctccatgaaggcaggaatctggtctgttttgcgcctcagtgtatctctagcccacaggaaga

SEQ ID NO: 15101 - DNA, 80 bp, synthetic construct
  source 1..80: mol_type = other DNA
ccagtagagggcactcacaaaagtggggagagcttcacagccttgaagagaaatgatttataaaattgctgtgtgtctct

SEQ ID NO: 15102 - DNA, 80 bp, synthetic construct
  source 1..80: mol_type = other DNA
aacactaaagatgaaacaaaccaatccaatgattaatctggtcttccttactgaataggaaactgttccatcaaagaggg

SEQ ID NO: 15103 - DNA, 80 bp, synthetic construct
  source 1..80: mol_type = other DNA
aacttgggagataagagataatctcagataccttttcccaggtgactaaactacgtcagggaccgtcagtttcaaagttc

SEQ ID NO: 15104 - DNA, 80 bp, synthetic construct
  source 1..80: mol_type = other DNA
tagttatctaatcaattctccaggttctaaactgcataaatatcttcccaaggccacccaatgccctcagaacttgcctc

SEQ ID NO: 15105 - DNA, 80 bp, synthetic construct
  source 1..80: mol_type = other DNA
aatttctaccctctcacgaaactctgaaatacacttccaatcaaaatgcacagagagtgaacatcatggaccctgacata

SEQ ID NO: 15106 - DNA, 80 bp, synthetic construct
  source 1..80: mol_type = other DNA
atctccactcttattgttacagttttcctagtggacccccacctctaagtgttagaagtcaatatgcaacagctacagaa

SEQ ID NO: 15107 - DNA, 80 bp, synthetic construct
  source 1..80: mol_type = other DNA
aagatgcaagtgaatatatctcagtaatcagtaatccatgtgactgttactctttgcttttcatacactgtctcccaaga

SEQ ID NO: 15108 - DNA, 80 bp, synthetic construct
  source 1..80: mol_type = other DNA
ctaaaacagttctcaaaatgtggtctaggaacccctcaggttactaagacttttctggtgtgcaagaggtcaaaactgtt

SEQ ID NO: 15109 - DNA, 80 bp, synthetic construct
  source 1..80: mol_type = other DNA
ctcaccgagagttagaaaagctagtaaggagtggactggactcgaatccaacaattttgtaatggaagaaaattcatttt

SEQ ID NO: 15110 - DNA, 80 bp, synthetic construct
  source 1..80: mol_type = other DNA
ctggtggattgctacaattcctctgtaagtttaaaaaatcatgtaagtgctgttttggagtactgtaataactcttgaga

SEQ ID NO: 15111 - DNA, 80 bp, synthetic construct
  source 1..80: mol_type = other DNA
cgccgcgggagtaacctccaccgcaccccaccgctccgaggggcagccggcccggcccgagtttctccccagaagcctcc

SEQ ID NO: 15112 - DNA, 80 bp, synthetic construct
  source 1..80: mol_type = other DNA
tgaggtagtgtccctaagatcaacaggcatcatcatgaatcctatttcagaatgccacaaagaatacgttttagagaaga

SEQ ID NO: 15113 - DNA, 80 bp, synthetic construct
  source 1..80: mol_type = other DNA
ctattccattcttgtcagtaaagacaaggatcccataagctgatggagaaactgaggcctctagaaactaaacgctggga

SEQ ID NO: 15114 - DNA, 80 bp, synthetic construct
  source 1..80: mol_type = other DNA
taagagcagctgccttcctggacccaccttaacctcttgtgactcaactcccctttccagggtgcagggaacattccctc

SEQ ID NO: 15115 - DNA, 80 bp, synthetic construct
  source 1..80: mol_type = other DNA
cagcaggaagatgggtgggtcctttcccaggtactgccctcttccctgcattccactcagccagccttccagaagtctgt

SEQ ID NO: 15116 - DNA, 80 bp, synthetic construct
  source 1..80: mol_type = other DNA
cccacaattgcgtccacccccttggccatcaggctgctcttccactacacgaaacagcccatctgcacctgccagtcact

SEQ ID NO: 15117 - DNA, 80 bp, synthetic construct
  source 1..80: mol_type = other DNA
tggatgtactggatgatggtgcgggacggggactcctcctcatacagctttccccaccgctcaatccacagggcaaaggc

SEQ ID NO: 15118 - DNA, 80 bp, synthetic construct
  source 1..80: mol_type = other DNA
tgcctaaaataaagcaggaaccaagccaccccactgctggagaaaggcttcccttgcattgagggaaaactcaaattcca

SEQ ID NO: 15119 - DNA, 80 bp, synthetic construct
  source 1..80: mol_type = other DNA
aagctgacaatgacattgacatctcctctagaaccagtgcctatcagggattaagctgggtttactcaaactcatttgct

SEQ ID NO: 15120 - DNA, 80 bp, synthetic construct
  source 1..80: mol_type = other DNA
caaatatggcttactggaggctcaacctctcggactcaagcgatcctctcaccccagccccctaagtacctgggactaca

SEQ ID NO: 15121 - DNA, 80 bp, synthetic construct
  source 1..80: mol_type = other DNA
cttgggggacttgctcttcaggtagaagaggtagtagtccttcagctccccaaaggcaggggaagaggaattgcccctgg

SEQ ID NO: 15122 - DNA, 80 bp, synthetic construct
  source 1..80: mol_type = other DNA
aaatacttctcccccttccatcatccatgccaaccacagtgtcaggcagagggacccacgaaagtccgatcatattctag

SEQ ID NO: 15123 - DNA, 80 bp, synthetic construct
  source 1..80: mol_type = other DNA
aaagaaaagctgcgtgatgatgaaatcggctcccgcagacaccttctccttcaagtgcttcaggtcagcctcaaagctcc

SEQ ID NO: 15124 - DNA, 80 bp, synthetic construct
  source 1..80: mol_type = other DNA
aaagaatacagaaactcctttcaaatgtccaaaggtctgtcctggggaaaaaggatccaccataggtgagtttgttttgt

SEQ ID NO: 15125 - DNA, 80 bp, synthetic construct
  source 1..80: mol_type = other DNA
aaggccaagctgctttgctctgataaggcagttccgttcttaagaaacccagagtcatcaaaaaatgaatataaaaacta

SEQ ID NO: 15126 - DNA, 80 bp, synthetic construct
  source 1..80: mol_type = other DNA
tttaatataaaaatggtaggatttctcccagaatattggcaaaaaaactgtcatcccagaaaatgtgccaatcccgggac

SEQ ID NO: 15127 - DNA, 80 bp, synthetic construct
  source 1..80: mol_type = other DNA
gcccaggaggggagtgggtgatacaaaaggagcaaggacatggtgcagttcacctctgcatgtccttcatccagcatgga

SEQ ID NO: 15128 - DNA, 80 bp, synthetic construct
  source 1..80: mol_type = other DNA
gggagaattttctactcatctcaagtgaaggggtcttgtggtagggagcacgaggccataggatcccacccatcaggctc

SEQ ID NO: 15129 - DNA, 80 bp, synthetic construct
  source 1..80: mol_type = other DNA
aaggttggagacagaccaatcagcgttcatatcctggctttgctacttatagctgtgtgatcttgggtacattacttaat

SEQ ID NO: 15130 - DNA, 80 bp, synthetic construct
  source 1..80: mol_type = other DNA
cagcccccaagttccctcaaagaatacagtgtgagaatcaacatttttaacccattgaagagtgtgtctaaaataccttg

SEQ ID NO: 15131 - DNA, 80 bp, synthetic construct
  source 1..80: mol_type = other DNA
agaggcaccttccccagcgggtgtgttcaactgggcggagctgcgacaaaggaagaggcttgagctccagccagcacaag

SEQ ID NO: 15132 - DNA, 80 bp, synthetic construct
  source 1..80: mol_type = other DNA
cagacaggccaacagagggcatagggtcatctggcagtctggttaagaaaataagacaaacacttaaaaacaaacaaaac

SEQ ID NO: 15133 - DNA, 80 bp, synthetic construct
  source 1..80: mol_type = other DNA
tgagacaggaccggtgtcctgcctggggtatccccagagtttggcacacggtgatagccaacattcactgagcgccaaag

SEQ ID NO: 15134 - DNA, 80 bp, synthetic construct
  source 1..80: mol_type = other DNA
tggtctcagtcccagagctcgagagggccacgtgaccgtcccggggccagtcacgtgaggcgcagatcctggctgggagg

SEQ ID NO: 15135 - DNA, 80 bp, synthetic construct
  source 1..80: mol_type = other DNA
aggacatgaagaaagaggggtgcagtttgaccgaattaaccctgttttgcttcctacatgtttttacctcaagtttctga

SEQ ID NO: 15136 - DNA, 80 bp, synthetic construct
  source 1..80: mol_type = other DNA
ttctccattagctaatcgggagttaatgctttgtgttaatgggtcttaagccaaacactagaagaagagaatagcaggca

SEQ ID NO: 15137 - DNA, 80 bp, synthetic construct
  source 1..80: mol_type = other DNA
ttagaatcagggtgtctcgttcctcgaatgagttcatactatctagcattttcattcttgccatctgtcttctacaatag

SEQ ID NO: 15138 - DNA, 80 bp, synthetic construct
  source 1..80: mol_type = other DNA
ctgttcagtgactggacttatatccaccatcactgattacaacattctcagcaagccgtatttcatctggacacattcag

SEQ ID NO: 15139 - DNA, 80 bp, synthetic construct
  source 1..80: mol_type = other DNA
acggtctccccacacctctgggcaacacaatctcagaacaagtatgtacaacgctgtgttgatcttcttatattcctgct

SEQ ID NO: 15140 - DNA, 80 bp, synthetic construct
  source 1..80: mol_type = other DNA
aagggtttcctattctccagatccttgctaacacttatcattcctcttttggataatagctattttaacagatgtaaggc

SEQ ID NO: 15141 - DNA, 80 bp, synthetic construct
  source 1..80: mol_type = other DNA
aaatcaggaaatgtgatgccttctactttgttctttttgctcaagattgttttggctattcagggtctttgtggttccat

SEQ ID NO: 15142 - DNA, 80 bp, synthetic construct
  source 1..80: mol_type = other DNA
cgttgtccaggagaatccaaaaggcagcttagaagacggatgtttctaattatctgagtgactttgggcaccttttattt

SEQ ID NO: 15143 - DNA, 80 bp, synthetic construct
  source 1..80: mol_type = other DNA
ggagtagataaaatatcaggactgtaaccagtttccctaacagatgagtgagtgttaggagaaggaatgccgggttttga

SEQ ID NO: 15144 - DNA, 80 bp, synthetic construct
  source 1..80: mol_type = other DNA
tgtgttctcaaatgtctataagggatcaagtttcagaggcgtgggagacagaatcagagcataaagcatacttctttagt

SEQ ID NO: 15145 - DNA, 80 bp, synthetic construct
  source 1..80: mol_type = other DNA
atgaagggaaaatgaattttgtcaagggggatgctatttgactagggtctgaggggttgagaaatggtttttgcagtcca

SEQ ID NO: 15146 - DNA, 80 bp, synthetic construct
  source 1..80: mol_type = other DNA
atatatagcctttattgttgtgagatattttccttccatatccagtttgttgagacatttcaccatgaagggacgttgta

SEQ ID NO: 15147 - DNA, 80 bp, synthetic construct
  source 1..80: mol_type = other DNA
tgatttctagaactaactaagtcatgttttctagcagagtaattctccccacattgttcttctctaagactgtctcacta

SEQ ID NO: 15148 - DNA, 80 bp, synthetic construct
  source 1..80: mol_type = other DNA
tagccctgaggagtcagaagaatcttcctagattaatggttcatcattttctgtgttcccttacagaacggaagatatgg

SEQ ID NO: 15149 - DNA, 80 bp, synthetic construct
  source 1..80: mol_type = other DNA
gacctccaaaatgcctttgggatcattctcccactttcttgatgagtaacacttggctttcttttatccatttaatctac

SEQ ID NO: 15150 - DNA, 80 bp, synthetic construct
  source 1..80: mol_type = other DNA
atgttatttttttcaggtttcaggagtgcttgtttcggtttcaggagtgcttgtttcagtttcaggagtgattgttctgt

SEQ ID NO: 15151 - DNA, 80 bp, synthetic construct
  source 1..80: mol_type = other DNA
tagtcaaagcacacagtacgtatgatttcaaccctttggaactggttaacacttgcgttacacgtttgggaacatttgta

SEQ ID NO: 15152 - DNA, 80 bp, synthetic construct
  source 1..80: mol_type = other DNA
tgacaccggtcactgtggttattattaaaacattaaaaaataacacatgctggcgaggctgtggagaaaaggaaacactt

SEQ ID NO: 15153 - DNA, 80 bp, synthetic construct
  source 1..80: mol_type = other DNA
tatgccccggaacctaaaagtttaacagatcctgaaagaaactgctacttttaatccatttattccctctcaatttgtat

SEQ ID NO: 15154 - DNA, 80 bp, synthetic construct
  source 1..80: mol_type = other DNA
gtgtattttttgcctatcacatctgcagagtatttgtcccttacttagagatctcagtaagaaatatttattacaacaca

SEQ ID NO: 15155 - DNA, 80 bp, synthetic construct
  source 1..80: mol_type = other DNA
catgatgactgtgaagcttagaagtcacagagttctgtggttgttgtttaggatcactgttatgtagtattgacatttga

SEQ ID NO: 15156 - DNA, 80 bp, synthetic construct
  source 1..80: mol_type = other DNA
tttatgccttctgtcttggacaaagaaagcaagctggccctgacatccagttgtcatactttaagaataaaaaataaata

SEQ ID NO: 15157 - DNA, 80 bp, synthetic construct
  source 1..80: mol_type = other DNA
ataaaaaccctagaagaagacctaggcattaccatttaggacataggcatgggcaaggacttcatgtctaaaacacaaaa

SEQ ID NO: 15158 - DNA, 80 bp, synthetic construct
  source 1..80: mol_type = other DNA
ttgtggggtgggggaaggggggagggatagcattaggagatatacctaatgctaaatgatgagttaatgggtgcagcaca

SEQ ID NO: 15159 - DNA, 80 bp, synthetic construct
  source 1..80: mol_type = other DNA
ttaaagagacagtccttctatcatgtaattcctgtgaaaaacgggatattgtaataatgctacctgtaaacctgcttttt

SEQ ID NO: 15160 - DNA, 80 bp, synthetic construct
  source 1..80: mol_type = other DNA
agtccacttgtgatggtggaggtctgttatctccatatagagagtttaatggccctgtagacacaatataaagcatggcc

SEQ ID NO: 15161 - DNA, 80 bp, synthetic construct
  source 1..80: mol_type = other DNA
ggtaattagatatgctcagaagtaacttctgacttttcccatcaatttctaggctcccttaacacctgtaatagctggac

SEQ ID NO: 15162 - DNA, 80 bp, synthetic construct
  source 1..80: mol_type = other DNA
ggaaaaaagaaaaaaaaaataagttgtgcctctataaaagccacccaccaaacacaggacaaacatgaaagtagatgatg

SEQ ID NO: 15163 - DNA, 80 bp, synthetic construct
  source 1..80: mol_type = other DNA
ccagtcggagtgtcagtagtgttgagattcagaaacactggtatgttctacactttcattagggtcctgatgaaactctt

SEQ ID NO: 15164 - DNA, 80 bp, synthetic construct
  source 1..80: mol_type = other DNA
ctcttgtagtaaattaggattcctaaagggagtatcaagagctctcagtagtgttgaggttaaatcactctttccagcaa

SEQ ID NO: 15165 - DNA, 80 bp, synthetic construct
  source 1..80: mol_type = other DNA
ttcttgttggcgtgatttttgcctctgtaacttgttcttccatttccttccatgcctgttcttccttccttttgccatct

SEQ ID NO: 15166 - DNA, 80 bp, synthetic construct
  source 1..80: mol_type = other DNA
aaaatgtcaaaaagtaacagatgctggtgaggttgtggagaaaaggtaacacttatcaggttgtggagaaaaggtagcac

SEQ ID NO: 15167 - DNA, 80 bp, synthetic construct
  source 1..80: mol_type = other DNA
atggtggctttgcaggctgcgaaggataatgggtaatatggatgctaaaatgaaatgtaaattcaaggttataaggatgc

SEQ ID NO: 15168 - DNA, 80 bp, synthetic construct
  source 1..80: mol_type = other DNA
ccttgcccttttcatcaaaggactccaccttgaagtcagtaatctcatgaataaacaagctaagtggaaaagaccacata

SEQ ID NO: 15169 - DNA, 80 bp, synthetic construct; identical to SEQ ID NO: 8870
  source 1..80: mol_type = other DNA

SEQ ID NO: 15170 - DNA, 80 bp, synthetic construct
  source 1..80: mol_type = other DNA
atgctggcaggaaatatgggctagacacgttaaagatggtggctccatcttcccttctctgccagtcacctgtactgtaa

SEQ ID NO: 15171 - DNA, 80 bp, synthetic construct
  source 1..80: mol_type = other DNA
catgaagttttgattgcggtgtaaagtggaatgaagtgactgacctcatttctagaagattctagtgggccaatgctcag

SEQ ID NO: 15172 - DNA, 80 bp, synthetic construct
  source 1..80: mol_type = other DNA
aagcaggtgtggccaggctggggccctgggagaggccggcagactgaggggtgctcaggttggactggccctatttgatg

SEQ ID NO: 15173 - DNA, 80 bp, synthetic construct
  source 1..80: mol_type = other DNA
tttttgagtttctctattctgttacattggtctatgtgtccgtttttgtatcagtaccacgctgttttggttattgtaac

SEQ ID NO: 15174 - DNA, 80 bp, synthetic construct
  source 1..80: mol_type = other DNA
aaatagctaatgcatgatgggcttaatacttagatgataggttgataggtgcagcaaaccaccatggcacacattgacct

SEQ ID NO: 15175 - DNA, 80 bp, synthetic construct
  source 1..80: mol_type = other DNA
taactaaagtggccttccgccagaccctaaaacaaagatttgcattcaggtagattatttggaagatgatttaaggacgt

SEQ ID NO: 15176 - DNA, 80 bp, synthetic construct
  source 1..80: mol_type = other DNA
gaaagtataccataaacttggagtgtgattaaagccttccatcttcctcttttgcctcctctaggttaccagttctgctt

SEQ ID NO: 15177 - DNA, 80 bp, synthetic construct
  source 1..80: mol_type = other DNA
ctgctcctcttgcactagctgataaaaagcccctaatgatcctggatgtccaggaagattgaattctgttgtttgcaatg

SEQ ID NO: 15178 - DNA, 80 bp, synthetic construct
  source 1..80: mol_type = other DNA
tgtaattcttctaatcattaatgccagaaatctatgcagcaggcgtagatgattttatctcagtccacaattgtacttgt

SEQ ID NO: 15179 - DNA, 80 bp, synthetic construct
  source 1..80: mol_type = other DNA
acacagaaggcaggccaggggcactgtgagatggtaaaagagatctgaagggatccaggtaagttattgaaagtattctt

SEQ ID NO: 15180 - DNA, 80 bp, synthetic construct
  source 1..80: mol_type = other DNA
gttaaaaatcttttcattggcgggccatcagactgggtgactcctgtggtttcattttcactcattttactgtttaccag

SEQ ID NO: 15181 - DNA, 80 bp, synthetic construct
  source 1..80: mol_type = other DNA
atattcatgttgcctttatgatcaagtgaaatactagccagaatatttggagcaaactctttcccttcaatactttgaag

SEQ ID NO: 15182 - DNA, 80 bp, synthetic construct
  source 1..80: mol_type = other DNA
tttttgcattctccacttcggaagcaccaattgtctttgcattggcttgtccttgactgcgttctattttattctatctt

SEQ ID NO: 15183 - DNA, 80 bp, synthetic construct
  source 1..80: mol_type = other DNA
tgccaaacgttttggttttagagtagcttctaacagcgctgatacttgctgcccattttctatgggttgccctgagtagg

SEQ ID NO: 15184 - DNA, 80 bp, synthetic construct
  source 1..80: mol_type = other DNA
agggagaaaggcaacttgtagattgggtgctgtgagtctggggaattagtgagaatttcctttatttgttatataactgg

SEQ ID NO: 15185 - DNA, 80 bp, synthetic construct
  source 1..80: mol_type = other DNA
cactactagtactaaattgtggtacgttgtcaggacattttgtaattcggtattcttggtctcctggccccaattctaaa

SEQ ID NO: 15186 - DNA, 80 bp, synthetic construct
  source 1..80: mol_type = other DNA
gatggtccttgtttcttttgagtagcatcatacattaagggccttaccttgtttatctgcctcaacatgccgaattatag

SEQ ID NO: 15187 - DNA, 80 bp, synthetic construct
  source 1..80: mol_type = other DNA
tggttacaacatattgctctatccaggcctctaacaaaactgacttctttcaaatggacttgcagttgctgaattccaaa

SEQ ID NO: 15188 - DNA, 80 bp, synthetic construct
  source 1..80: mol_type = other DNA
atgtgactatccataaggcgcaatatgggcagcctgttctctacacagtatccagaaacatcactttgattgtggcaaac

SEQ ID NO: 15189 - DNA, 80 bp, synthetic construct
  source 1..80: mol_type = other DNA
tgagcgggaaactttgtataaggctcagctaaaagggaaattgagtgggtcaggtaccacggatactatacactctattg

SEQ ID NO: 15190 - DNA, 80 bp, synthetic construct
  source 1..80: mol_type = other DNA
tcaccctcacccataggagattcaattataaggacaatacagatctaatagagttcaagactctgagtgaggaagaaata

SEQ ID NO: 15191 - DNA, 80 bp, synthetic construct
  source 1..80: mol_type = other DNA
tgctacataatttttcctcgatgctctcttcctctcatctttcttgtctcttaaattactttacttccttgcacactttg

SEQ ID NO: 15192 - DNA, 80 bp, synthetic construct
  source 1..80: mol_type = other DNA
actttattacagaccttggaagcaagaggattgcattcagcctagttcctggttgctggccaaagtaagtagaactttgt

SEQ ID NO: 15193 - DNA, 80 bp, synthetic construct
  source 1..80: mol_type = other DNA
aaagatgtaggctgggagactaagccagtctagtctttccacattcttctgcctactttcattctggctgtgctggcagc

SEQ ID NO: 15194 - DNA, 80 bp, synthetic construct
  source 1..80: mol_type = other DNA
aaggcctcacatcagcagatatgcatgaaggttgtttataagttactgttattttctcctgataccttcagtttgcaaga

SEQ ID NO: 15195 - DNA, 80 bp, synthetic construct
  source 1..80: mol_type = other DNA
tttatctgtttctacgagatacctgtatgaattaagtgaattctctctcaaggtcccaaaataagttggggttcctgggc

SEQ ID NO: 15196 - DNA, 80 bp, synthetic construct
  source 1..80: mol_type = other DNA
cctttttaaaagcaccaaagtagaacaactgtcaatgacagaagtcttaggacagccatggtcaaggacacacttaacaa

SEQ ID NO: 15197 - DNA, 80 bp, synthetic construct
  source 1..80: mol_type = other DNA
aaaatttttttttgttcttttgagaccgaatctcactctgtcagccaggctggagtgcctgcctccagggttcaagtgat

SEQ ID NO: 15198 - DNA, 80 bp, synthetic construct
  source 1..80: mol_type = other DNA
taggatttcatgtttcctaggtttaaggtcactaaaaataaaaattccacttaatatataattctgtttataaagtctgt

SEQ ID NO: 15199 - DNA, 80 bp, synthetic construct
  source 1..80: mol_type = other DNA
gacctacaatccaacaaggtaagttggataatttctttatggctaattcatacacagaaagggagagggcaaattagagt

SEQ ID NO: 15200 - DNA, 80 bp, synthetic construct
  source 1..80: mol_type = other DNA
cttagtgagcctttctttaaccaccttgtttgaattcagtgctctccctgtgcacccactaacccctctttttgttttca

SEQ ID NO: 15201 - DNA, 80 bp, synthetic construct
  source 1..80: mol_type = other DNA
tggctataagaagtctaggaacaaattggacttggaaacattaactgacattcttcaacaccagatccgagctgttccct

SEQ ID NO: 15202 - DNA, 80 bp, synthetic construct
  source 1..80: mol_type = other DNA
aaacccttgtgtatgtatcacccaactcactaattatcaacttatgtgctatcagatatcctctctaccctcacgttatt

SEQ ID NO: 15203 - DNA, 80 bp, synthetic construct
  source 1..80: mol_type = other DNA
actcaggtctccctattttaaagccaccagttgcccgcttatgataactcattaattcatgagtagtgggttaatctatt

SEQ ID NO: 15204 - DNA, 80 bp, synthetic construct
  source 1..80: mol_type = other DNA
tttcttcgcttggctttcgggacaccacactcagctctcctgcatctctgaacaccagttttgtttttttttttcatgtc

SEQ ID NO: 15205 - DNA, 80 bp, synthetic construct
  source 1..80: mol_type = other DNA
ctataccactctctttcctttgaattccctgagaggactgaataggttgttctattaccatttagtaggaagcagccctg

SEQ ID NO: 15206 - DNA, 80 bp, synthetic construct
  source 1..80: mol_type = other DNA
tttattagctcttcctttcaaggtatctgtgtactgtatataaacaacaaaagctgaccaagagtggtacttgtgctagg

SEQ ID NO: 15207 - DNA, 80 bp, synthetic construct
  source 1..80: mol_type = other DNA
tcttttttcattaagaatcctgcctggaagtttaggtcaaagaggctgcttggagcaaaatacagtggtgtctcatccca

SEQ ID NO: 15208 - DNA, 80 bp, synthetic construct
  source 1..80: mol_type = other DNA
ataagcccaccccaggcttcagttttatccatgtataaactggctggactaaattatttcctttttcttcgaaacagggt

SEQ ID NO: 15209 - DNA, 80 bp, synthetic construct
  source 1..80: mol_type = other DNA
ttgctgtttatattacttcatactttggctcccctgagctacataatatgactctgcaggagtgccagcctagatggtct

SEQ ID NO: 15210 - DNA, 80 bp, synthetic construct
  source 1..80: mol_type = other DNA
ttgcctcagcctcccgagtacctgggactacaggcacgtgccaccgcacccggctaagtttttttgtatttttagtagag

SEQ ID NO: 15211 - DNA, 80 bp, synthetic construct
  source 1..80: mol_type = other DNA
cttcacacctttcccattcctcctggggagttagcactttaaggaaagagatcattattgtccttggtcagccaacttga

SEQ ID NO: 15212 - DNA, 80 bp, synthetic construct
  source 1..80: mol_type = other DNA
atcatatcacttagaataaacaaaatcactcaaaaatgcaaactaataatcagtgtgatggctgagtgtggttgctcatg

SEQ ID NO: 15213 - DNA, 80 bp, synthetic construct
  source 1..80: mol_type = other DNA
atggtgagaccctatttgtacaaaaaaattaaaaaattagcagggcatggtggtgtgcactgatagtcccagctattcgg

SEQ ID NO: 15214 - DNA, 80 bp, synthetic construct
  source 1..80: mol_type = other DNA
tggccttgcagttgcatttacacatgcaacagtaatacagccagattcccaatatctgtgaaatccatgtaatactgcac

SEQ ID NO: 15215 - DNA, 80 bp, synthetic construct
  source 1..80: mol_type = other DNA
gcgtgacctgtcaggaaaagcaaaattaaaatgagacatttacccattcgtttacatgggtactgtgtttacatttaccg

SEQ ID NO: 15216 - DNA, 80 bp, synthetic construct
  source 1..80: mol_type = other DNA
agcatagtgacaccttgtcataaaaaaaaatttttagagactgttgaccaggtacggttgctcacgcttctaattccagc

SEQ ID NO: 15217 - DNA, 80 bp, synthetic construct
  source 1..80: mol_type = other DNA
tgcttcaatttgcaagaacagtatttagtggatccttagtgctaggcactgccctaagtgctttgcattccttttttttc

SEQ ID NO: 15218 - DNA, 80 bp, synthetic construct
  source 1..80: mol_type = other DNA
gtgagacttacaaacagtgagaaatacaaacaacagcgtacaagggcatagagcgaattgccagagaaaggacgcttacc

SEQ ID NO: 15219 - DNA, 80 bp, synthetic construct
  source 1..80: mol_type = other DNA
caggggatttccaaacttggtcctagggttttggactcttaaaactaagactcagtggaataggtgtctggtgatgattt

SEQ ID NO: 15220 - DNA, 80 bp, synthetic construct
  source 1..80: mol_type = other DNA
aaacaaacaaaaagatgcttgtgaataggcaatttaaaagttttctgggccctggagggttcattttcccttcctgccac

SEQ ID NO: 15221 - DNA, 80 bp, synthetic construct
  source 1..80: mol_type = other DNA
agtatgataaagataagcctttgtatcagtttcatgcattctccttctgccttctcttctcacttgagtgctccagggaa

SEQ ID NO: 15222 - DNA, 80 bp, synthetic construct
  source 1..80: mol_type = other DNA
atagcgccattgcactacagcctgggcgacaagagcaaaactccgtctcaaacaaaacaaaacaaaacaaaacaaaacaa

SEQ ID NO: 15223 - DNA, 80 bp, synthetic construct
  source 1..80: mol_type = other DNA
gtgggagtcgcgtgtgtagtgcacggtgcattctctcttatatatcctgtccggcccgtttgaggtggacagcctacaag

SEQ ID NO: 15224 - DNA, 80 bp, synthetic construct
  source 1..80: mol_type = other DNA
aagtcaactttctgtccagtgggatttgtaatccaatacctcctagccctagcagaatcccatgtggataatcagaaatg

SEQ ID NO: 15225 - DNA, 80 bp, synthetic construct
  source 1..80: mol_type = other DNA
attaatgttgcccctagtggtaaaggacagagaccctcagactgatgaaatgcactcagaattacttagacaaagcggat

SEQ ID NO: 15226 - DNA, 80 bp, synthetic construct
  source 1..80: mol_type = other DNA
cctcatttctagggtggaaaaaaaaaagcatgaaaacaatcacttaatgttgagccccattactgatgctctctggtcct

SEQ ID NO: 15227 - DNA, 80 bp, synthetic construct
  source 1..80: mol_type = other DNA
gcccattcgttatgtattgtatatggctgtttttgccctacaacatcctttcaactctggccatatcattagaggccatg

SEQ ID NO: 15228 - DNA, 80 bp, synthetic construct
  source 1..80: mol_type = other DNA
tactcccaccagcagagaaggatagttactgttcctccacactccaaacaatgcttgctgtttattcagtattttattat

SEQ ID NO: 15229 - DNA, 80 bp, synthetic construct
  source 1..80: mol_type = other DNA
gttctatactgcacaattctaggagatactctttacaaacacttagatgtcctaggaattcttgtcatgttcctgatttc

SEQ ID NO: 15230 - DNA, 80 bp, synthetic construct
  source 1..80: mol_type = other DNA
taggacccttggaatgcagacccatgatttttccattaaaaagaacaataaattcagggaacgtggacaacattaattca

SEQ ID NO: 15231 - DNA, 80 bp, synthetic construct
  source 1..80: mol_type = other DNA
ggctatctgagtttcctctggaggcctgccccatgccagggccagtgaggaggttttgttaataatacttgatttgtttc

SEQ ID NO: 15232 - DNA, 80 bp, synthetic construct
  source 1..80: mol_type = other DNA
ttgtgctttgactcatttgaagactaaatttatctgtatgtcctccccacatccttttcctgggaaggaactatctcacc

SEQ ID NO: 15233 - DNA, 80 bp, synthetic construct
  source 1..80: mol_type = other DNA
tgagatgctgaagctcagacccaccacagacctactgaatgggaatttgcattttcataagctcctgggtgatctgtatg

SEQ ID NO: 15234 - DNA, 80 bp, synthetic construct
  source 1..80: mol_type = other DNA
gccatgcacagggcaggactgaggcaccccaaccagtctactattttggcttccttttcaatttaaattcaatttaaata

SEQ ID NO: 15235 - DNA, 80 bp, synthetic construct
  source 1..80: mol_type = other DNA
cacacaacttcttggaaggcatgtttaagtgttcacataataaaacagtacatttcttccttgcaaacagccctacacca

SEQ ID NO: 15236 - DNA, 80 bp, synthetic construct
  source 1..80: mol_type = other DNA
aattagatgtggagttcagagtggaaacaggtgtgagagggttcaacagaagaaaacatagctgccaagtgtttgagtcc

SEQ ID NO: 15237 - DNA, 80 bp, synthetic construct
  source 1..80: mol_type = other DNA
cagagtgggtgacagaggaagactccgtctcaaaaacaaaaaacaaacaaaaaaaaagaaacgtggcctccaatgttgga

SEQ ID NO: 15238 - DNA, 80 bp, synthetic construct
  source 1..80: mol_type = other DNA
tcaaagccagcaacttagcatctgaccctttttccacattacgtctctttctctgatcaaacccaggaaagcttttctaa

SEQ ID NO: 15239 - DNA, 80 bp, synthetic construct
  source 1..80: mol_type = other DNA
cacccagcctttttttttttttttttaagagatagggtcttgctatattgtccaggctggtctcatactcctcacaattg

SEQ ID NO: 15240 - DNA, 80 bp, synthetic construct
  source 1..80: mol_type = other DNA
tttctttcacttggcttcttgactctttctaaactacaatccccccattctcactgccttagttttccctctctctgtgt

SEQ ID NO: 15241 - DNA, 80 bp, synthetic construct
  source 1..80: mol_type = other DNA
ttctttcaaattctcctccattgctatctccagttgcaccgctcttcttcatttctttccctccacattcaaacttgtct

SEQ ID NO: 15242 - DNA, 80 bp, synthetic construct
  source 1..80: mol_type = other DNA
tactgaaaatcagcattcacagaaaggaaatggcctcatgaggaagcagcaggaacaatctgtttatgggagagctcagt

SEQ ID NO: 15243 - DNA, 80 bp, synthetic construct
  source 1..80: mol_type = other DNA
ttcactgagtctcgtgtgtctcttacgccctgttcttttcttaatgctcttttttgtttgtttctgtgcttcggtttata

SEQ ID NO: 15244 - DNA, 80 bp, synthetic construct
  source 1..80: mol_type = other DNA
ctcttgggtggatatgtagaagtggaattgctgagttatggtgaatgtgtttaacattttaggtaactgagcaattgttt

SEQ ID NO: 15245 - DNA, 80 bp, synthetic construct
  source 1..80: mol_type = other DNA
acacacaaagacatataatacccgaagccttcacgcttttggtgtcacatctaagaaatctttccctaaccataagaact

SEQ ID NO: 15246 - DNA, 80 bp, synthetic construct
  source 1..80: mol_type = other DNA
taagaacacaggttttggagtcagactgacatgggttgagattctggctccacctcctcccagctaaataatgtcaatga

SEQ ID NO: 15247 - DNA, 80 bp, synthetic construct
  source 1..80: mol_type = other DNA
gcatggctcctgggggccaccttggataacagctgtaatgggttctctagcgggggcttcataagcatatgagagaagga

SEQ ID NO: 15248 - DNA, 80 bp, synthetic construct
  source 1..80: mol_type = other DNA
ttgagcaatatgataaatgctatgatgattgttatgaggaataaatgagtgccatgttctgaatgtttatgtttccccca

SEQ ID NO: 15249 - DNA, 80 bp, synthetic construct
  source 1..80: mol_type = other DNA
caccacatccagtcccacagtgtcttttaatatatttacatttaatggccaggcacggtggctcacgcctgtaatcccag

SEQ ID NO: 15250 - DNA, 80 bp, synthetic construct
  source 1..80: mol_type = other DNA
ccatacatctgtgttttctattcgtctcaccctttcagtttcttaactctctaattgccttcttttgaacttttttcctt

SEQ ID NO: 15251 - DNA, 80 bp, synthetic construct
  source 1..80: mol_type = other DNA
gagggccagggtcagagacagattaattccttatttactcttacaggtgaaactgtcagatgtcacctgtcatgatgttg

SEQ ID NO: 15252 - DNA, 80 bp, synthetic construct
  source 1..80: mol_type = other DNA
atccgacccagacagcctgctctcttttcttctcatttcttcctccctcttacccttatctttcccatgctcctgttcac

SEQ ID NO: 15253 - DNA, 80 bp, synthetic construct
  source 1..80: mol_type = other DNA
aaggtctccttccattaagatatcccttggtttctccatgtgctcttgaataaaatggaaaatgactcagtgaaagataa

SEQ ID NO: 15254 - DNA, 80 bp, synthetic construct
  source 1..80: mol_type = other DNA
tcatttgggtactattcctgggactctcagaaaaaggcaacatgttgtagtgggcaaaagctaaatccagtatcaggcag

SEQ ID NO: 15255 - DNA, 80 bp, synthetic construct
  source 1..80: mol_type = other DNA
ggaagaagggaaggcgctgaggatgggcctggagaggaagtgtccctgaaagtggttttggggctgcccgcgccagcgaa

SEQ ID NO: 15256 - DNA, 80 bp, synthetic construct
  source 1..80: mol_type = other DNA
gtgccctctgtctcccctcagttgctcctgcatcattctttttgtccccttcataattgttgtaatggtttgaaaccaca

SEQ ID NO: 15257 - DNA, 80 bp, synthetic construct
  source 1..80: mol_type = other DNA
agcagcggatgatgatcagggagctgatggacgctcagatgaaaacctttgacactaccttctcccatttcaagaatttc

SEQ ID NO: 15258 - DNA, 80 bp, synthetic construct
  source 1..80: mol_type = other DNA
accattaattcatagatccccaaagcaccttcatctgatagagaacaccagagagaagaaacaaatgctgtgtgtgtata

SEQ ID NO: 15259 - DNA, 80 bp, synthetic construct
  source 1..80: mol_type = other DNA
gccagtgtctctgcctcttcacctgctcaatggaagctaaaaatgcctcccctgcagggctgttctgtgaaataagaaca

SEQ ID NO: 15260 - DNA, 80 bp, synthetic construct
  source 1..80: mol_type = other DNA
ctaagctgggcaatggggaggcacagaagaataagatcaattacatggcatttgtagctcagtgttagggatctaaaaga

SEQ ID NO: 15261 - DNA, 80 bp, synthetic construct
  source 1..80: mol_type = other DNA
aacaagatattggtgagggatgattagatcttggtcagcttgctgagaagctgcccctccatcctgttaccatccacagg

SEQ ID NO: 15262 - DNA, 80 bp, synthetic construct
  source 1..80: mol_type = other DNA
cacagctttctttttggcttggtgtcctgggatgctgggagtggccatgtctttatttgctcaacccttccttgtatgga

SEQ ID NO: 15263 - DNA, 80 bp, synthetic construct
  source 1..80: mol_type = other DNA
agaagcttacggaattcagccaagccttgtctcttggctgacctgaaatgtccagagattatgcttgtgcagcctcagag

SEQ ID NO: 15264 - DNA, 80 bp, synthetic construct
  source 1..80: mol_type = other DNA
catccatttgaacacattattaagcaccgataataggtagcctgctgtggggtatacagcattgactcagatatagatcc

SEQ ID NO: 15265 - DNA, 80 bp, synthetic construct
  source 1..80: mol_type = other DNA
ctcacaagctctggaatggtaaaaaaaccccacatatctctaaagtgtttctctatccttgctttcaagtcatgacaaaa

SEQ ID NO: 15266 - DNA, 80 bp, synthetic construct
  source 1..80: mol_type = other DNA
ccagaaggagcagaaacagaaaagcagaatttccatttacaaatgatgacagtactgtgaaagctcccagaattagcagt

SEQ ID NO: 15267 - DNA, 80 bp, synthetic construct
  source 1..80: mol_type = other DNA
catgtgctttcagtttcatctttctcctgggaaagccccaaaacaggcctctggaaaaccaatttcatacatgtacaaaa

SEQ ID NO: 15268 - DNA, 80 bp, synthetic construct
  source 1..80: mol_type = other DNA
aacttctcaaatagagattattgtactaaactactgagagctggggaagtagcaggagcttctctgtgagactgaagaca

SEQ ID NO: 15269 - DNA, 80 bp, synthetic construct
  source 1..80: mol_type = other DNA
agtaagttcattttgggtttaaacaagcgttaagaaaaagaacactactaaaaatgcctaacaacaggctgggcgtggtg

SEQ ID NO: 15270 - DNA, 80 bp, synthetic construct
  source 1..80: mol_type = other DNA
ttactcgcttaatctgctccctaaaaacgggaatatattatcagaacataagaaaaacaagattaggctgggtacagtgg

SEQ ID NO: 15271 - DNA, 80 bp, synthetic construct
  source 1..80: mol_type = other DNA
tgcttttttctaccacttagagaagacattgtatactaaggagactgctttagacttgttgcagcagccatcaggaagcc

SEQ ID NO: 15272 - DNA, 80 bp, synthetic construct
  source 1..80: mol_type = other DNA
gatgatggaaatggtctatatctgtactgttcaacatggtacctactagtggctattgagcatttggtagtcaaggaact

SEQ ID NO: 15273 - DNA, 80 bp, synthetic construct
  source 1..80: mol_type = other DNA
gaggtaggtattattatttccatattataggttaggaaagccacatagcccctgagtcacgtcgctaataaacagagcta

SEQ ID NO: 15274 - DNA, 80 bp, synthetic construct
  source 1..80: mol_type = other DNA
ccactgtgcctggcctatcttttccattacatactgaaagatgtttcttggagatgttttcctctctgaaattccttcgt

SEQ ID NO: 15275 - DNA, 80 bp, synthetic construct
  source 1..80: mol_type = other DNA
ttacttgtattttaatgtcatcacacttggagaactctctggagtactggaagtgctctatactgttatctgggtggtag

SEQ ID NO: 15276 - DNA, 80 bp, synthetic construct
  source 1..80: mol_type = other DNA
tgtgtggtaggcaggacaagtttatggtaatttaaaacatgaggaaaatgaggttgggagagattcagttgctcaatatc

SEQ ID NO: 15277 - DNA, 80 bp, synthetic construct
  source 1..80: mol_type = other DNA
atgcatgagataaacttacctcaagctccactgcctctgctttggacagatttaggaccacagccgggaaaaatgttgga

SEQ ID NO: 15278 - DNA, 80 bp, synthetic construct
  source 1..80: mol_type = other DNA
caggtgtgtgtaaacctccagcagcccgatattgtcagctaagacattgcaccgtttccatgtgattgattgattgatcg

SEQ ID NO: 15279 - DNA, 80 bp, synthetic construct
  source 1..80: mol_type = other DNA
tgatatccacatgtgtgctttctcagggtatgtttgtcagttgttgggaagtcccacagagattttcctgacataggtga

SEQ ID NO: 15280 - DNA, 80 bp, synthetic construct
  source 1..80: mol_type = other DNA
tctgctcttaatgcactaaactgcctccttgttacacacaggttccagggctgtaaattagtgctgagatggctaaatgt

SEQ ID NO: 15281 - DNA, 80 bp, synthetic construct
  source 1..80: mol_type = other DNA
ttctttcaggagagcaagtggtctggaggaatattacagtatgttgccatatgaagagaatgctattgtctgaatgcttg

SEQ ID NO: 15282 - DNA, 80 bp, synthetic construct
  source 1..80: mol_type = other DNA
aaagagtttaataatcacagggcagctgcatgaggaggacgggagataattcttaaatcctacccatagagaattcagag

SEQ ID NO: 15283 - DNA, 80 bp, synthetic construct
  source 1..80: mol_type = other DNA
caaaggtggtttcattatctgttaccctctatgttgaattgagtgcactgaaagtttatttaccgtgtgctaagcattgt

SEQ ID NO: 15284 - DNA, 80 bp, synthetic construct
  source 1..80: mol_type = other DNA
cattcttcagtcctctttttgccctgtctagcctctgtagggatttgagttggggaatcctgatgcaagttataattttg

SEQ ID NO: 15285 - DNA, 80 bp, synthetic construct
  source 1..80: mol_type = other DNA
caaccatctaattatagttcggaggctcatccagacacttcattttctaggggatggggtaaacttcatggatgggtttt

SEQ ID NO: 15286 - DNA, 80 bp, synthetic construct
  source 1..80: mol_type = other DNA
tggaccagcttttctggggactgcgttgtttaaaagaacaaggctatgatccatttaaagaagatctgaaccatctggtg

SEQ ID NO: 15287 - DNA, 80 bp, synthetic construct
  source 1..80: mol_type = other DNA
cttactctttctgaggtccagggtccttatatgaagagattcatatatatgaagagattcgtctagagcagtggttgtca

SEQ ID NO: 15288 - DNA, 80 bp, synthetic construct
  source 1..80: mol_type = other DNA
cttgtggttgctacatgcaataaatgtaattctatgagaaggaccagcccttacatcccatcaaaatgtttcctggaaac

SEQ ID NO: 15289 - DNA, 80 bp, synthetic construct
  source 1..80: mol_type = other DNA
gttggcagtttggacaacttatagagaaatctaggactcccagctaaggaaattaatatttacaaaaatcagccaatagc

SEQ ID NO: 15290 - DNA, 80 bp, synthetic construct
  source 1..80: mol_type = other DNA
ctttcttccaggtttatagatagccgtcctttgctgtgtcttcacatgacatacacagggagagaggaagaaagccttct

SEQ ID NO: 15291 - DNA, 80 bp, synthetic construct
  source 1..80: mol_type = other DNA
ccagctcattctattggggaaagaaagtcatattgttgatcctagagtcaaagaacagagcaggtcatcctacgcattga

SEQ ID NO: 15292 - DNA, 80 bp, synthetic construct
  source 1..80: mol_type = other DNA
cataagctatgtccttgaatacgttactgctgggcccactgagcacagatatcctttcatttatgtggtatatgcatttc

SEQ ID NO: 15293 - DNA, 80 bp, synthetic construct
  source 1..80: mol_type = other DNA
ttctataatctgagagtgggaaaactgccacgctactactcgaagtccagaagtaatacaggaaaaaattgatgaatatg

SEQ ID NO: 15294 - DNA, 80 bp, synthetic construct
  source 1..80: mol_type = other DNA
aatacacaacagctatgttggcatgtgtgaaaacacatacgtgtggactgtatttttcactgtgataagagctccagtat

SEQ ID NO: 15295 - DNA, 80 bp, synthetic construct
  source 1..80: mol_type = other DNA
cagagacttaggacagaacctatctcatgtggttattcaaggaaagtacccaatacactgtctggcagacagtcaagaaa

SEQ ID NO: 15296 - DNA, 80 bp, synthetic construct
  source 1..80: mol_type = other DNA
tgggagaccgaggtggatggatcacttgaggtcaggagtttgagaccagcctggccaacatggtgaaactctctctcttc

SEQ ID NO: 15297 - DNA, 80 bp, synthetic construct
  source 1..80: mol_type = other DNA
tcatgccaaatcgagcacccaacctctcgcgcatttatttttgtgttacaaacaatccaattacattattttagtaattt

SEQ ID NO: 15298 - DNA, 80 bp, synthetic construct
  source 1..80: mol_type = other DNA
cattcacctactgagagacaatttagttgcttccaattttgacaattatgaataaagctgctataaacatctgtatgcag

SEQ ID NO: 15299 - DNA, 80 bp, synthetic construct
  source 1..80: mol_type = other DNA
gccacgtgtatgtcttctttggtaagtttttagagtactttggacaccaacctttatcaaaagtattttgcaaatgtttt

SEQ ID NO: 15300 - DNA, 80 bp, synthetic construct
  source 1..80: mol_type = other DNA
aaggtcttatatattttcgttagctttatgcctaagtatttaacttgggggaactattgtaaatgggattttgtttttaa

SEQ ID NO: 15301 - DNA, 80 bp, synthetic construct
  source 1..80: mol_type = other DNA
agttttcccagcaccatttattgaagagactgtctttctcccaatgtatgttcttgacacctttgtaaaaaactgagttc

SEQ ID NO: 15302 - DNA, 80 bp, synthetic construct
  source 1..80: mol_type = other DNA
aacaaggataatttgacttctttttttccaatttggatgcactttctttctcttgtctgattgctctagcaagtacttcc

SEQ ID NO: 15303 - DNA, 80 bp, synthetic construct
  source 1..80: mol_type = other DNA
agtactgctttggctatatcccacaggttttggtatgttgtgtttccattatcatttgtttcaagaatttttttcaatct

SEQ ID NO: 15304 - DNA, 80 bp, synthetic construct
  source 1..80: mol_type = other DNA
tggttttgtttgttgctttctattttttgtgtatcctgtgtattttggggaggggttatgttaccacgaggcttgcaaat

SEQ ID NO: 15305 - DNA, 80 bp, synthetic construct
  source 1..80: mol_type = other DNA
gcattacattgaatttgcttcagtttctccaacatagctattttaaattatttgtctgatatgtcacatatctttgtttc

SEQ ID NO: 15306 - DNA, 80 bp, synthetic construct
  source 1..80: mol_type = other DNA
ctcaggccctgggcatgtgcagagatgttgtccaagagccacgttctagagtcaaaaaccttagaactctatctggtatt

SEQ ID NO: 15307 - DNA, 80 bp, synthetic construct
  source 1..80: mol_type = other DNA
gttgcagtccttgtggcctagatagtcttttgagtttatttaaggccccagcgccctttagcccacagtggtgaggcttg

SEQ ID NO: 15308 - DNA, 80 bp, synthetic construct
  source 1..80: mol_type = other DNA
tctatcctcaaaaaataaagacttaaacacttgcagctatattaaaggatatgttaatatacaaggaagcacatttccag

SEQ ID NO: 15309 - DNA, 80 bp, synthetic construct
  source 1..80: mol_type = other DNA
agagagattagagaagaaatttgggtaacagaccttgttctatatcaattttggcaatctcttcactgaaaagaggaaac

SEQ ID NO: 15310 - DNA, 80 bp, synthetic construct
  source 1..80: mol_type = other DNA
agctgctatattctataactgccagtctataatgtcaacagaaccagtgccttacagtgagtcaagcaatgtttattggc

SEQ ID NO: 15311 - DNA, 80 bp, synthetic construct
  source 1..80: mol_type = other DNA
caagcgtgcaccacaacacttggataattttttgtttttgtagagatgggattctgctatgttgcccaagctggtctcaa

SEQ ID NO: 15312 - DNA, 80 bp, synthetic construct
  source 1..80: mol_type = other DNA
aagggaagctgtgaaaaacagagagaaagttgaaggcaggccttgggttagagatgaaaacatgaataaagtgccagttt

SEQ ID NO: 15313 - DNA, 80 bp, synthetic construct
  source 1..80: mol_type = other DNA
aagaaaagcgcatgttgcctgtttgagctgtgaactaaattaaccactttttccgtggatcactatttttatttaaagaa

SEQ ID NO: 15314 - DNA, 80 bp, synthetic construct
  source 1..80: mol_type = other DNA
acaatccagtgatcaaggataatattgtatcacaatgcatttgcattctcattagctatgcccatttaaaagttagataa

SEQ ID NO: 15315 - DNA, 80 bp, synthetic construct
  source 1..80: mol_type = other DNA
tgcagtccatctccttttatgagagacttgaactttcacaacagacttcagaccaattgagtaggaaatgaacaattatg

SEQ ID NO: 15316 - DNA, 80 bp, synthetic construct
  source 1..80: mol_type = other DNA
ttcatatatgtttaatatagaaagaaacacagagagtgagggagggagtccactatgtattaagtactgtgttagtgagc

SEQ ID NO: 15317 - DNA, 80 bp, synthetic construct
  source 1..80: mol_type = other DNA
tagcctaccctcgccttttttaagtaatgagaagactgtcatcctgtagggtaaagtaacatgtccaaactcatacagct

SEQ ID NO: 15318 - DNA, 80 bp, synthetic construct
  source 1..80: mol_type = other DNA
gactttactggatgccacaaccttctgatttctgtaaccacttcttatgcctcctacccactgaaacaaaatcagaggca

SEQ ID NO: 15319 - DNA, 80 bp, synthetic construct
  source 1..80: mol_type = other DNA
tccctccatgatcacggccatcacgatcatggccctctactccatcgtgtgcgtggtggggctcttcggaaacttcctgg

SEQ ID NO: 15320 - DNA, 80 bp, synthetic construct
  source 1..80: mol_type = other DNA
ccaactcttcctttcatcctgaggcaacactaggtagaggaagttttcctagcatctctccatgacagttttcctctgtt

SEQ ID NO: 15321 - DNA, 80 bp, synthetic construct
  source 1..80: mol_type = other DNA
aaaagagcaccatctattgagaggaaggctaacaacagaaggaaaaatgcaagaagatcgatggaagtatttatttttaa

SEQ ID NO: 15322 - DNA, 80 bp, synthetic construct
  source 1..80: mol_type = other DNA
agcaagtatgtctatttagctgagaacatttaactgactgtctccaggctgcggtgtttaaactacaaaatgatcagttc

SEQ ID NO: 15323 - DNA, 80 bp, synthetic construct
  source 1..80: mol_type = other DNA
ggctagaaactttgagatttctgtgggctgcgtaaaccatccttccagtaaatttccaatgaagagtgccaagtaatagt

SEQ ID NO: 15324 - DNA, 80 bp, synthetic construct
  source 1..80: mol_type = other DNA
agatagacagactgaaacagttgaagtctcttctctgctcctaataccctcctgtcactgagactaccactatcataaat

SEQ ID NO: 15325 - DNA, 80 bp, synthetic construct
  source 1..80: mol_type = other DNA
gtctactaaaaataaaaaaaattagccagactgggtggcgcatgcttgtaatcccaactactggggaggctgaggcacaa

SEQ ID NO: 15326 - DNA, 80 bp, synthetic construct
  source 1..80: mol_type = other DNA
ctcttctagtttcccactccttgccaagcaaccacttttcaaaatggttcaccttcacacaaggtcgtatctcacactct

SEQ ID NO: 15327 - DNA, 80 bp, synthetic construct
  source 1..80: mol_type = other DNA
tcaagcctttattcatatgcttcgagagtacaggcaagtggttaagtgggaaaaggtgcaaccccatcatgtttcattcc

SEQ ID NO: 15328 - DNA, 80 bp, synthetic construct
  source 1..80: mol_type = other DNA
cagtgctggaggcttgaggagttcatgatgaaagcaccagcagattctgcatttgctgaggaccttcttgcagagacaac

SEQ ID NO: 15329 - DNA, 80 bp, synthetic construct
  source 1..80: mol_type = other DNA
gctttgcttctaggggatatatagggcaggttcctgtgagcctctgattataaaattttcatcagctaatgcattcgtaa

SEQ ID NO: 15330 - DNA, 80 bp, synthetic construct
  source 1..80: mol_type = other DNA
ccactgggttacaaggagtgatttttctaatgtgttattgaattctgtttgctagtattatgttgaagatttttgcatta

SEQ ID NO: 15331 - DNA, 80 bp, synthetic construct
  source 1..80: mol_type = other DNA
ctcatgacatgtttatttcacattgtctgcctgtatcaaaacattccaagtaccccgtaaatatatacacctactacata

SEQ ID NO: 15332 - DNA, 80 bp, synthetic construct
  source 1..80: mol_type = other DNA
ttattaaaacatcaagaaacaatagatactggtgaggccatggagaaagaggaacgcttttacactgttggtgggaatgc

SEQ ID NO: 15333 - DNA, 80 bp, synthetic construct
  source 1..80: mol_type = other DNA
tggtaggctgggttctgcccacaagctgtcatttgccaaactctgacacagaacatcttaaataaaattttattcttgca

SEQ ID NO: 15334 - DNA, 80 bp, synthetic construct
  source 1..80: mol_type = other DNA
ggaaaatgctattacttattctttagaactcagactgtctagctgggtaaaaaggagtgctagggtaggccaaggtattc

SEQ ID NO: 15335 - DNA, 80 bp, synthetic construct
  source 1..80: mol_type = other DNA
aaaagttcccctggtgactctaccatgcagccaagatcaagaaggacaggtctggtccaacctatccattttatggatga

SEQ ID NO: 15336 - DNA, 80 bp, synthetic construct
  source 1..80: mol_type = other DNA
aaaataaaagctagagagttttattagctcctaattttcttccctcccactgcactcacaccatcagtatgcaacctacc

SEQ ID NO: 15337 - DNA, 80 bp, synthetic construct
  source 1..80: mol_type = other DNA
aatttcatccctataaagagtcatcctgacccctgttgagtctgattctctaatcacagtaaaattggtcaaatgatgga

SEQ ID NO: 15338 - DNA, 80 bp, synthetic construct
  source 1..80: mol_type = other DNA
agatccaaggccactgaaattggtagtcctattaaaagcagatagcattaattgaaatccttcaaatagtctttccttct

SEQ ID NO: 15339 - DNA, 80 bp, synthetic construct
  source 1..80: mol_type = other DNA
tacttatgaataccctgtcacacgaagacaggcaagagaaaaatcaagccggaagtccaacctgaaactttcacatttta

SEQ ID NO: 15340 - DNA, 80 bp, synthetic construct
  source 1..80: mol_type = other DNA
caaggagaggttttcaaaccagttattgagggttcatttggatggctgacaggtatattaaggtagcttttatatcttac

SEQ ID NO: 15341 - DNA, 80 bp, synthetic construct
  source 1..80: mol_type = other DNA
tattttccaaggttattttctacattcgagttgagaagagaacctaagcccatgaagtgtctgccttttcctcttcccaa

SEQ ID NO: 15342 - DNA, 80 bp, synthetic construct
  source 1..80: mol_type = other DNA
tctgaaaactgacaaacactgagagaagaattcttagttgtatgagttttttcccccgaaaaatcagtggatttctgcct

SEQ ID NO: 15343 - DNA, 80 bp, synthetic construct
  source 1..80: mol_type = other DNA
aaataatagttggaaaaaaaaaaggtgttaaggaaatgtatgttgactcaatgttgacactaagaagattttatggcgaa

SEQ ID NO: 15344 - DNA, 80 bp, synthetic construct
  source 1..80: mol_type = other DNA
gcaggaattcattaaatgtcaaaatattcagacatcagcaggtactaagacacactaaaatggataaacagaaatgctca

SEQ ID NO: 15345 - DNA, 80 bp, synthetic construct
  source 1..80: mol_type = other DNA
tgcaacataaagtttccattttaaccgcttgtaagtatacaattcagtggtctgaagtacatccatgtcattgtgcaatc

SEQ ID NO: 15346 - DNA, 80 bp, synthetic construct
  source 1..80: mol_type = other DNA
aacttctatacatcaggttaggtaaggtgccaaagttattctcttgcatgtgaatgtccaattttcccaacaccatttgt

SEQ ID NO: 15347 - DNA, 80 bp, synthetic construct
  source 1..80: mol_type = other DNA
ttgaccttgtgacccacctgctttggtctcccaaagtgctggggttacaggcgtgagccacaatttcctttagcaatgtt

SEQ ID NO: 15348 - DNA, 80 bp, synthetic construct
  source 1..80: mol_type = other DNA
aattgaattatgcaccctcccatcccccccaaaaaaaatcatttgttgaaaccctaactttgatgtgactgtaattggag

SEQ ID NO: 15349 - DNA, 80 bp, synthetic construct
  source 1..80: mol_type = other DNA
ctgctccaatttttccttccttctgctagctttctgcttactttgttctttctctagttccttaagtttttaagttgtta

SEQ ID NO: 15350 - DNA, 80 bp, synthetic construct
  source 1..80: mol_type = other DNA
acctttactgagacctttatttctctgcatgactttggatattgtctactgtactttcctttcaacctgcaagactccct

SEQ ID NO: 15351 - DNA, 80 bp, synthetic construct
  source 1..80: mol_type = other DNA
tttccaccaacattgtgtgaggatttccatttctctccatccttgccaccacttaccttttgtattttttgtaatcatca

SEQ ID NO: 15352 - DNA, 80 bp, synthetic construct
  source 1..80: mol_type = other DNA
gtttacttagcacctttgttgaaagtcactgagatataaacttaaggtcttctcaggcttttttctggcctgtgcctctc

SEQ ID NO: 15353 - DNA, 80 bp, synthetic construct
  source 1..80: mol_type = other DNA
gccaactttgctcttaagatgagtaagcagttggtatgactcaggaatctctaagaatgtttctaccttaaaaggcaggt

SEQ ID NO: 15354 - DNA, 80 bp, synthetic construct
  source 1..80: mol_type = other DNA
aggaaagggagatgcttggcatttttatggttgtgggtgattttggttttatctcttttccaggcatggttacaaagtta

SEQ ID NO: 15355 - DNA, 80 bp, synthetic construct
  source 1..80: mol_type = other DNA
gaacaagcatgagactccactcctggtccccaagctccagaacacaatagaaactattttttagagaatataaagcaata

SEQ ID NO: 15356 - DNA, 80 bp, synthetic construct
  source 1..80: mol_type = other DNA
ttttattgaaaactgcatagtgtgtaaactcaggagctaattctaacctttatccccagccaggctgcacaagcagaagc

SEQ ID NO: 15357 - DNA, 80 bp, synthetic construct
  source 1..80: mol_type = other DNA
ttaatttttggcgttcaggattttatgggtgagccgaaaagcagaaagagagaaggcgaagagcatgttaatgagctgga

SEQ ID NO: 15358 - DNA, 80 bp, synthetic construct
  source 1..80: mol_type = other DNA
cgaagagctgggattatgagtgcaggccaccatgcatagctgatttttgtaattttagtagaaatggggtttcaccattt

SEQ ID NO: 15359 - DNA, 80 bp, synthetic construct
  source 1..80: mol_type = other DNA
ataagtaagacctttacgaaaaacatgtacaaacacacccaccacaggtagtcaaaatgtaatactcctaagggacaaaa

SEQ ID NO: 15360 - DNA, 80 bp, synthetic construct
  source 1..80: mol_type = other DNA
tccaaaccccaccccctttcagtttctcagggacattgcacatactctattttccctgcttcttcaagtttccattgcta

SEQ ID NO: 15361 - DNA, 80 bp, synthetic construct
  source 1..80: mol_type = other DNA
ttccttagttcctctacctttctcagagctttaacctagtccctcttctcttctgtgcatatactttctccttaagtttt

SEQ ID NO: 15362 - DNA, 80 bp, synthetic construct
  source 1..80: mol_type = other DNA
actgatcatctcattccctcactccaggaaaaactctttatggggaaataaacaaaaggaatccaaaacagtaagagatg

SEQ ID NO: 15363 - DNA, 80 bp, synthetic construct
  source 1..80: mol_type = other DNA
attgatcctggaattctcatttaaatgtttaagattgtcacatttggggacatttctatcaagatcatttcttatatgag

SEQ ID NO: 15364 - DNA, 80 bp, synthetic construct
  source 1..80: mol_type = other DNA
tgtattttgagaagtattgtctctgagaaaccaacacggcaagcaagcacagatgtccaaacaaaaggagaaaatgtagt

SEQ ID NO: 15365 - DNA, 80 bp, synthetic construct
  source 1..80: mol_type = other DNA
ggattcagaggtctgctatcacccctcgttctcttagacaatgtgatcttgaaagtctcattgggatcttctcattattc

SEQ ID NO: 15366 - DNA, 80 bp, synthetic construct
  source 1..80: mol_type = other DNA
acttctgatacgtgctatccatgtcctgaagtaaaattttcagaaatcgaataatgcaggaaatgggcacttccggaaag

SEQ ID NO: 15367 - DNA, 80 bp, synthetic construct
  source 1..80: mol_type = other DNA
agactgatattcatcccactctggtgacacacaggaatggaaacggccacttgccctctggatggaaatgcctctttgct

SEQ ID NO: 15368 - DNA, 80 bp, synthetic construct
  source 1..80: mol_type = other DNA
agccccaaaagagatgaaactcttccgtccatcaccattgactctattgtgaacttatgaaaaaggtagttgagcaatat

SEQ ID NO: 15369 - DNA, 80 bp, synthetic construct
  source 1..80: mol_type = other DNA
aactctgagtcctatgctcctgtgcaaggcccatgatgtgactctgagcattcattgaactttgctgggacaacattcat

SEQ ID NO: 15370 - DNA, 80 bp, synthetic construct
  source 1..80: mol_type = other DNA
accattaaagataagccacgaaatgtaaggtctgctgggtaggaaagtggcaaatgcaatgaagcatgtctttagatcat

SEQ ID NO: 15371 - DNA, 80 bp, synthetic construct
  source 1..80: mol_type = other DNA
ggtgtgggtcctgcaggaaaactaatacactctttgtccataagtctcaaaataaactctcactggctctggttggaaca

SEQ ID NO: 15372 - DNA, 80 bp, synthetic construct
  source 1..80: mol_type = other DNA
atgcaaactaatctataagaacagaaagcaaaccaagatcagcaattgcctgaggaatagtgagggttggatatgaggac

SEQ ID NO: 15373 - DNA, 80 bp, synthetic construct
  source 1..80: mol_type = other DNA
gtccctacaaaagttttttaaaattaacagggtatggtggcatgcacctgggatcccagttattcaggaggtgaggcaag

SEQ ID NO: 15374 - DNA, 80 bp, synthetic construct
  source 1..80: mol_type = other DNA
cagcctgatatgttggtgatgtcataagcaaagcagtatttatggagtgccccattgtcttagtcacattgtaattttaa

SEQ ID NO: 15375 - DNA, 80 bp, synthetic construct
  source 1..80: mol_type = other DNA
aaaacttcaaacgatgcttcagagagttctgtatcccaacctcttccaacattgagcaacaaaactccactcgaattcgt

SEQ ID NO: 15376 - DNA, 80 bp, synthetic construct
  source 1..80: mol_type = other DNA
aaaaaatgaccatccctaacttttcttaagctattggtttgctacctgaactctagcacaaatatcaaacatattagact

SEQ ID NO: 15377 - DNA, 80 bp, synthetic construct
  source 1..80: mol_type = other DNA
agccctcctattcagtggctgctagaatcttgtaagtaactttaaaagggcagggatttaaatagattttcaccaacctg

SEQ ID NO: 15378 - DNA, 80 bp, synthetic construct
  source 1..80: mol_type = other DNA
gagacttgatggctgtgtctataggacatgttaagttagttgtacaaatccagaatgtgataaacaggtgtttggtcgtt

SEQ ID NO: 15379 - DNA, 80 bp, synthetic construct
  source 1..80: mol_type = other DNA
ggaaagcgtcttttggcatagagtaggaattggcatacggtcaactctgtggttttataggtcaaataaagtcatcctgc

SEQ ID NO: 15380 - DNA, 80 bp, synthetic construct
  source 1..80: mol_type = other DNA
tttctccacacacgccctacactgctgttgtcctattgaactccactttgctttcaaacccttcccttgtttatttcgat

SEQ ID NO: 15381 - DNA, 80 bp, synthetic construct
  source 1..80: mol_type = other DNA
gctttcctacacaatgctactttgcactcaattattatcacatggtctcagccagattctcaacatttactatgagctcc

SEQ ID NO: 15382 - DNA, 80 bp, synthetic construct
  source 1..80: mol_type = other DNA
acatcactctcaaaagttgatctcagttttttttacaagacatctgtggagagttaatttgggaaagtaattgtttcaat

SEQ ID NO: 15383 - DNA, 80 bp, synthetic construct
  source 1..80: mol_type = other DNA
taaacttaagtggtgaattgctattttacagccattttttgtaaaaatactctcactgagatttagtgttttggaacatg

SEQ ID NO: 15384 - DNA, 80 bp, synthetic construct
  source 1..80: mol_type = other DNA
tcgtctatgacttctactctactgcaataaaatctcttaaataaagatcatacacatatatacacacatatatatacaca

SEQ ID NO: 15385 - DNA, 80 bp, synthetic construct
  source 1..80: mol_type = other DNA
tatcaaaaagtcacagagctcatgcaagcccagtcatccccattgccagtggtgtgtgctaaaggaatacacccataaat

SEQ ID NO: 15386 - DNA, 80 bp, synthetic construct
  source 1..80: mol_type = other DNA
tgagctactctttggaaatagaagggaaatgggaggaacaattctctcatagaatttttaaatgcttcagctaaggcttg

SEQ ID NO: 15387 - DNA, 80 bp, synthetic construct
  source 1..80: mol_type = other DNA
cagcctcctgagtagctaaaactatgggcacacaccatcacaccatgctaatttttgtactttttgtagagacagggttt

SEQ ID NO: 15388 - DNA, 80 bp, synthetic construct
  source 1..80: mol_type = other DNA
taatctctgaagcaaataagaatggaaggactcctggaaaatgagggtaaagaaatagaatcccaagtttaatgggaata

SEQ ID NO: 15389 - DNA, 80 bp, synthetic construct
  source 1..80: mol_type = other DNA
attttgtgctgacctcttatctcagcctgtgacttagaatcccttcactgtctaggaatgcagcccaataggtttcagcc

SEQ ID NO: 15390 - DNA, 80 bp, synthetic construct
  source 1..80: mol_type = other DNA
cctcaaatacctataagttgggtaaatttctttcctcttgaggtcccaaagtaacttcagtcttctggacctgacagaaa

SEQ ID NO: 15391 - DNA, 80 bp, synthetic construct
  source 1..80: mol_type = other DNA
atatgttcacacacagaatctcttacaattaatccttataaaccttccacagcttgtttaaatctttagatttttttctt

SEQ ID NO: 15392 - DNA, 80 bp, synthetic construct
  source 1..80: mol_type = other DNA
aagaggcataaaatattctatttttctgctgaaatacttcatttaaaggcttatatttctaagccaattaatcagagccc

SEQ ID NO: 15393 - DNA, 80 bp, synthetic construct
  source 1..80: mol_type = other DNA
ccaagcccgtgttttatcctgaagtatccctcaacacagaaaaacgacctcataacacaaaatacaccagcttaaaaata

SEQ ID NO: 15394 - DNA, 80 bp, synthetic construct
  source 1..80: mol_type = other DNA
aattgactcccatcttaacagttgcaatccatggaggaatgcttgataacctcggtgataagataaaaaaccaagcatac

SEQ ID NO: 15395 - DNA, 80 bp, synthetic construct
  source 1..80: mol_type = other DNA
cttattttggtcatggggactgataatatgtataagcatttaaaaggctgtgaaaagccctactctctctccctctctct

SEQ ID NO: 15396 - DNA, 80 bp, synthetic construct
  source 1..80: mol_type = other DNA
aaaaaaaaaaaaaagagagaattaggactcatttctgggtttgactgattacaccattcagactccagggccagcttctg

SEQ ID NO: 15397 - DNA, 80 bp, synthetic construct
  source 1..80: mol_type = other DNA
agttccaaaagtgcaggaaatacacaccaacctttgcgtggataaagattaaaagtgccttaaatcagcttccatttgaa

SEQ ID NO: 15398 - DNA, 80 bp, synthetic construct
  source 1..80: mol_type = other DNA
acaatgagttgcacagcagctgaggagttcagagatatgggttcagtgtcttttgtagcaagcagtaaacaaatcaatcc

SEQ ID NO: 15399 - DNA, 80 bp, synthetic construct
  source 1..80: mol_type = other DNA
tcagtgtcaggagaagcacatgaatcagtatgagctgtctgagtgattgtgcaggtaaaaagggtgattaattttgggga

SEQ ID NO: 15400 - DNA, 80 bp, synthetic construct
  source 1..80: mol_type = other DNA
tactgacttgggtggctggtcctgtatcttatcagaattaagagcctttctgggacttcatgtgatttagcattggctaa

SEQ ID NO: 15401 - DNA, 80 bp, synthetic construct
  source 1..80: mol_type = other DNA
gaaggacctcggagaacctagtgcagtccctcaggagaacctagtacttagtcatttgagcatggatatcaaaaagagac

SEQ ID NO: 15402 - DNA, 80 bp, synthetic construct
  source 1..80: mol_type = other DNA
caagtctagggcagcttcagccctcaggctttaaatagcttcctccatggggtttcatgagattttattgacttaagaaa

SEQ ID NO: 15403 - DNA, 80 bp, synthetic construct
  source 1..80: mol_type = other DNA
gacccagggagttcacaaatgtccctgaatccagcttatgagttcttgcctttttattcttccaaaaagttgttgtctgt

SEQ ID NO: 15404 - DNA, 80 bp, synthetic construct
  source 1..80: mol_type = other DNA
cttacctgaaaatagcaggccacatttccatgtgtctgagcaaatgttattgttcaacacatatgccagctttacagtgg

SEQ ID NO: 15405 - DNA, 80 bp, synthetic construct
  source 1..80: mol_type = other DNA
ctctctggccactctgctctgcacattagagggacagccaaaagtaagtggagcatttggaaggaaaggaatataccaca

SEQ ID NO: 15406 - DNA, 80 bp, synthetic construct
  source 1..80: mol_type = other DNA
ggcccatgcctagaagctctccattttgaacttttgtcagcattgattaaaagaatcaaataccttgtagttatctatga

SEQ ID NO: 15407 - DNA, 80 bp, synthetic construct
  source 1..80: mol_type = other DNA
accagctcctagtacgaattatctggcatgttgagagcaactttgtcttcaagtaggacctgatctatctttttccacaa

SEQ ID NO: 15408 - DNA, 80 bp, synthetic construct
  source 1..80: mol_type = other DNA
ctccatctactggcaattaccaagataagatggcactagaaatttctccagcttacgccatgaatactgcagaagctgat

SEQ ID NO: 15409 - DNA, 80 bp, synthetic construct
  source 1..80: mol_type = other DNA
gagtaaagtgaaagtgaaatgggtcaggatcaatggtctcattgtctaaggtgttatccgagctcgttgtctcacaacca

SEQ ID NO: 15410 - DNA, 80 bp, synthetic construct
  source 1..80: mol_type = other DNA
gttttagtggggtttggccggcttctttaccacatccttttatcagtaagatcttcgtgacctgtaccttgtgccaacct

SEQ ID NO: 15411 - DNA, 80 bp, synthetic construct
  source 1..80: mol_type = other DNA
acagtcctctgacctcctgtgacacatggggtgagcccttcctttttgtctcaatctcaaaaaacagtaagtctttaatc

SEQ ID NO: 15412 - DNA, 80 bp, synthetic construct
  source 1..80: mol_type = other DNA
ggtggtttccaatattacctacaacttcctttgcaatttgatttttgaaaggacctaaaagttgaaaacaggctatcaca

SEQ ID NO: 15413 - DNA, 80 bp, synthetic construct
  source 1..80: mol_type = other DNA
tttaagcacagcaaaactgctttaattaacaagaccagagagaagggagaggagactacatttgtgtgacctaatggttg

SEQ ID NO: 15414 - DNA, 80 bp, synthetic construct
  source 1..80: mol_type = other DNA
catgtggcttttctttgctgtgttctgagatgtcatgctttgaaatcagtggccattatcatctaaggattccgccagag

SEQ ID NO: 15415 - DNA, 80 bp, synthetic construct
  source 1..80: mol_type = other DNA
accatttatttgaagcaatgttcaccatagcaaaattccagtgaagtctaagaactgggacagtccgttgaggatccttg

SEQ ID NO: 15416 - DNA, 80 bp, synthetic construct
  source 1..80: mol_type = other DNA
ctactgtctcaaaatccaagctccctgagtacacaatttctgtcccttttaagggctcacaacactagatttcacatgaa

SEQ ID NO: 15417 - DNA, 80 bp, synthetic construct
  source 1..80: mol_type = other DNA
acctccttatttgaaactccagcatcaataatttacttgcactcttgttatttacatttgtactctggaagtaaacttaa

SEQ ID NO: 15418 - DNA, 80 bp, synthetic construct
  source 1..80: mol_type = other DNA
ccctggcaatacatttcctgaacttttacatacttaaatagccagttatgaaaatgtaaaacaatgagtgatcttgttgt

SEQ ID NO: 15419 - DNA, 80 bp, synthetic construct
  source 1..80: mol_type = other DNA
cttcatttaaagtagagacaaagctactatttcacatttccaggtaggacaggatgatcagatgcagctttcaaaagaac

SEQ ID NO: 15420 - DNA, 80 bp, synthetic construct
  source 1..80: mol_type = other DNA
agagtttgataaggtgaaattcagagcatgctctgggttgttaggtacaattttttgaagtggaaacgtctcaacatgaa

SEQ ID NO: 15421 - DNA, 80 bp, synthetic construct
  source 1..80: mol_type = other DNA
aaaaggccaaagggattgtgataaagataaactgttgtccactggaaatggcctatggtttggttgactgggacataggg

SEQ ID NO: 15422 - DNA, 80 bp, synthetic construct
  source 1..80: mol_type = other DNA
gaccatcaaacacaacagaacaggaacttgttaaaagatattcaaccagggctcagactcctcaccctcaagcttctgac

SEQ ID NO: 15423 - DNA, 80 bp, synthetic construct
  source 1..80: mol_type = other DNA
atgtgggggaaactttgttttttaactctgtcttcttcctagtggcaggctccctggccaacttgaaaaggctatataaa

SEQ ID NO: 15424 - DNA, 80 bp, synthetic construct
  source 1..80: mol_type = other DNA
agacagtgtctgaaattcaggtacaacaaaaatatacatctcctttacttcaaatacatggggagagtggtgaaaactgg

SEQ ID NO: 15425 - DNA, 80 bp, synthetic construct
  source 1..80: mol_type = other DNA
ataagtactctataccaggggccaccttgggtattttaagagattcaaaaagagaagattctggtgatatttacagtctt

SEQ ID NO: 15426 - DNA, 80 bp, synthetic construct
  source 1..80: mol_type = other DNA
ttgagcatatggaaggaataaggagctctgcccatgtgtttgccgggaaggagcgtgtcaagatgaaaccacctttgcaa

SEQ ID NO: 15427 - DNA, 80 bp, synthetic construct
  source 1..80: mol_type = other DNA
atggatgattcctgacttgtgtcgctggtatcagagtctgacagacaagaagggaagaggataagatgtgtaccaaacat

SEQ ID NO: 15428 - DNA, 80 bp, synthetic construct
  source 1..80: mol_type = other DNA
cattatcgcaacaaaagaaccacagcttttatcctccccagaggaagtaagactttagaactcttcaactttcaagctta

SEQ ID NO: 15429 - DNA, 80 bp, synthetic construct
  source 1..80: mol_type = other DNA
agatttgtcactctcaaactagaatcagatccacccctgactgttattggatgcaatacatttagctattctgagcctag

SEQ ID NO: 15430 - DNA, 80 bp, synthetic construct
  source 1..80: mol_type = other DNA
ttgatttctcctctccagagtgctcaagcatttgaaagttggaaaagatgcaaatagcccaactctcacgctctggacct

SEQ ID NO: 15431 - DNA, 80 bp, synthetic construct
  source 1..80: mol_type = other DNA
actccctgaacattctctgcctggagtagaggaattccagccagactaatagagtctcatttctaatatatatataaaaa

SEQ ID NO: 15432 - DNA, 80 bp, synthetic construct
  source 1..80: mol_type = other DNA
aaatttggcagcttacatgaaatgagccaattccccaaaaatcacaaactaccacaagtcacccaatatgaaacagataa

SEQ ID NO: 15433 - DNA, 80 bp, synthetic construct
  source 1..80: mol_type = other DNA
aactacagctacaattatatttaatggtgaaagactggatgttttctccctaaacactggaaacaaagcaaggatgtcca

SEQ ID NO: 15434 - DNA, 80 bp, synthetic construct
  source 1..80: mol_type = other DNA
cactgtattcaaaaagtatcatactgtccttgatgaaatagcccaacaagaaggcaatatttgcatggggcatctcagca

SEQ ID NO: 15435 - DNA, 80 bp, synthetic construct
  source 1..80: mol_type = other DNA
gagggtggggcgtgggaagtaagctaattaacaaaacagtctggatagaaactagcttccatctagtcttgagggcagct

SEQ ID NO: 15436 - DNA, 80 bp, synthetic construct
  source 1..80: mol_type = other DNA
ttcaaggctctttcaggccaacagcttctgaatggaaaagcatgtgaaagaaccacatgatcccatgattatgtgcccac

SEQ ID NO: 15437 - DNA, 80 bp, synthetic construct
  source 1..80: mol_type = other DNA
tcatcaccagctttcagagtcacccataagtgaggctgtagggcagtcatagcccatttttggcttgaacatttagaaac

SEQ ID NO: 15438 - DNA, 80 bp, synthetic construct
  source 1..80: mol_type = other DNA
cttatgactatacagtgctgccatctggcctctactattccagaattctgttatccccgttgcttctagatagttatttt

SEQ ID NO: 15439 - DNA, 80 bp, synthetic construct
  source 1..80: mol_type = other DNA
tgctttaaattgttaatagacctgagcctgttatctaagcctgttcctctcttcgatgcgtcaatggcactcagcgacta

SEQ ID NO: 15440 - DNA, 80 bp, synthetic construct
  source 1..80: mol_type = other DNA
acaagcagactggcatcaaggaattagctataaatccaggttcgttcgtttgtttgaagagaaacaacaaatagagggcc

SEQ ID NO: 15441 - DNA, 80 bp, synthetic construct
  source 1..80: mol_type = other DNA
cagtctgacatggcaccaagcagatcataaacctaagatgttaaggcctaaattatcctttgcttgatgatacttgattc

SEQ ID NO: 15442 - DNA, 80 bp, synthetic construct
  source 1..80: mol_type = other DNA
caacacggcgaagtcccgtctctactgaaaatacgaaaaattagccaggagtgatgacgggtgcctgtaatcccagctac

SEQ ID NO: 15443 - DNA, 80 bp, synthetic construct
  source 1..80: mol_type = other DNA
gtaaccttgttgtagacgatcaaaacgcagccattaaacacttccagccacatgtttatttctttgagaaagcaacactg

SEQ ID NO: 15444 - DNA, 80 bp, synthetic construct
  source 1..80: mol_type = other DNA
aaggagacgagtggctttctgtgaggagagaaattatcccccttccacagtccatttcatacaggctgcaaacatttagt

SEQ ID NO: 15445 - DNA, 80 bp, synthetic construct
  source 1..80: mol_type = other DNA
tccaaggatcacacagcacctcccaagtagtctaatgtacagaaagaaaagaaaggaaacacagcatgattaggtgaaac

SEQ ID NO: 15446 - DNA, 80 bp, synthetic construct
  source 1..80: mol_type = other DNA
taccccaaatgcatttcagagatgacccggtctcaagaaatatactgaaagtaatccagttttcccaatattctttggac

SEQ ID NO: 15447 - DNA, 80 bp, synthetic construct
  source 1..80: mol_type = other DNA
actttgaagctataaaacaaaataggttgtgtgaacaatttgttacgggtaggcagggccaacatgggtacttggtgggt

SEQ ID NO: 15448 - DNA, 80 bp, synthetic construct
  source 1..80: mol_type = other DNA
acatattcctatctcctaccattgagtaggaaagctcaaaggaagtagaggtctccaattgtgatgagatgttttctcta

SEQ ID NO: 15449 - DNA, 80 bp, synthetic construct
  source 1..80: mol_type = other DNA
catctttagatgggaagctgatgcttgaaggactgggtttcagttttccttttaaggaaaaatgtaagcttttgcaacat

SEQ ID NO: 15450 - DNA, 80 bp, synthetic construct
  source 1..80: mol_type = other DNA
cttccatcaaaacagtatgtattccaataatgctaataaacaacctattggtgctattccattctgcctcctctgtaacc

SEQ ID NO: 15451 - DNA, 80 bp, synthetic construct
  source 1..80: mol_type = other DNA
aatctatacttgaggcatcacattgtccaggaaaccttccctgcactcccaaaattggactgataagcttttaagttttt

SEQ ID NO: 15452 - DNA, 80 bp, synthetic construct
  source 1..80: mol_type = other DNA
tcactggagtgttctaaagccccagcttgtatcctgttctctgctctatctatgttcatgctgttggtaatcacaagaaa

SEQ ID NO: 15453 - DNA, 80 bp, synthetic construct
  source 1..80: mol_type = other DNA
ttatctgacatgcccagtgctatagccccaagtgcctgaaagaatgactgcacatgtagactgtttacacatgtagacat

SEQ ID NO: 15454 - DNA, 80 bp, synthetic construct
  source 1..80: mol_type = other DNA
actttcacaacatccgctctgctttctggcaggcaagcaaggtttggcagggattccaaaaataccatgaaagagagaat

SEQ ID NO: 15455 - DNA, 80 bp, synthetic construct
  source 1..80: mol_type = other DNA
tctcctttgaataggttgatgcactttgcttttgttcagcttcttcagcaagaccaatttccacatcagcatgtcctcct

SEQ ID NO: 15456 - DNA, 80 bp, synthetic construct
  source 1..80: mol_type = other DNA
ttggagttgctaagctttgggataatttgttacctagcactggataaccgatacactgacagaaaagcaaaagctgctga

SEQ ID NO: 15457 - DNA, 80 bp, synthetic construct
  source 1..80: mol_type = other DNA
gaaaatagcttcagtacttcctgtacactttcccttattcccattgtgaaaacatctgctggtctattaccacagagtgt

SEQ ID NO: 15458 - DNA, 80 bp, synthetic construct
  source 1..80: mol_type = other DNA
ttttacaccgcttaacaaaggattttctcaactcctttttagtcgaaggtcgtcggtccccaagaggagatagactagct

SEQ ID NO: 15459 - DNA, 80 bp, synthetic construct
  source 1..80: mol_type = other DNA
ggatcgcctgagctcaggagtttgagaccacacttgacaacatggtaaaacccgttgtctactaaaatacaaaaaattag

SEQ ID NO: 15460 - DNA, 80 bp, synthetic construct
  source 1..80: mol_type = other DNA
ctggctttggtttccaatcatatgcacctggaagggcctcaaatgatacagaggttactcaaagaaaatcttcatccttt

SEQ ID NO: 15461 - DNA, 80 bp, synthetic construct
  source 1..80: mol_type = other DNA
tcatgagatgtcccttcacacccagggtggctacaattaaaaagacagacagtagtaagtgtggatgaggatgtggataa

SEQ ID NO: 15462 - DNA, 80 bp, synthetic construct
  source 1..80: mol_type = other DNA
gaaatactaagcatggccacagtcatggggtcaagctggagacactggaaagtcttaaagaagttaagtggaaagaaatc

SEQ ID NO: 15463 - DNA, 80 bp, synthetic construct
  source 1..80: mol_type = other DNA
tctgaacaaaaggcagcagacaacttctgcagatttaagtgtccttgcctgacagctctgaagagagcagtggttctccc

SEQ ID NO: 15464 - DNA, 80 bp, synthetic construct
  source 1..80: mol_type = other DNA
ccagtgtagagaagagtttaaatgatcttttggtgctgaaaaccacagtacaagaacttcgtgaagcatacacaagcttc

SEQ ID NO: 15465 - DNA, 80 bp, synthetic construct
  source 1..80: mol_type = other DNA
caggagacccatctcacgtgcagagacacacacaggctcaaaataaagggaaggaggaagatctatcaagcaaatggaaa

SEQ ID NO: 15466 - DNA, 80 bp, synthetic construct
  source 1..80: mol_type = other DNA
aatccaggagcttttttttttttgaaaagatcaacaaaatagatagaatggtagcaatactaataaagaagaaagaagaa

SEQ ID NO: 15467 - DNA, 80 bp, synthetic construct
  source 1..80: mol_type = other DNA
gagaaagaaataaagtgtattcaattaggaaaagaggaggtcaaattgtctttgtttgtggatcacatgattgtatattt

SEQ ID NO: 15468 - DNA, 80 bp, synthetic construct
  source 1..80: mol_type = other DNA
attaaactaagaagcttctgcacagcaaaagaaactatcatcaaagtgaacaggcaacctacagaatgggagaaaatctt

SEQ ID NO: 15469 - DNA, 80 bp, synthetic construct
  source 1..80: mol_type = other DNA
tcttcctccccctcttccatttctttttctaacttaaactttgggttgggcaactgtgtatatgtaaatacaacttgatc

SEQ ID NO: 15470 - DNA, 80 bp, synthetic construct
  source 1..80: mol_type = other DNA
cataaagagcgaggaaaaaagattggcagagaagaccgcttgtctctctcccattggagacgggagccaaattaattatt

SEQ ID NO: 15471 - DNA, 80 bp, synthetic construct
  source 1..80: mol_type = other DNA
agactagcttaggatgtctcaaggggtcagactcctaaactttcttcaaacttaggtcagctacctaactagttagactc

SEQ ID NO: 15472 - DNA, 80 bp, synthetic construct
  source 1..80: mol_type = other DNA
cacttctatgagaagtgttaaattaaaattctttcaccaaattcacaaagagacaaacctaggttgtgactccaaagctc

SEQ ID NO: 15473 - DNA, 80 bp, synthetic construct
  source 1..80: mol_type = other DNA
atctaagacaagagtagcttcattttgatttccctcattttcctctatttgttttaccttctctgccagagtcatgtacg

SEQ ID NO: 15474 - DNA, 80 bp, synthetic construct
  source 1..80: mol_type = other DNA
atggcgctctcattcacttatcgctatgactattatctactgcaatctatgtacttgcataacatgacctaaataggtag

SEQ ID NO: 15475 - DNA, 80 bp, synthetic construct
  source 1..80: mol_type = other DNA
atttaagcaaatttcaagtacacaatgtagtactgctaactctagtcactatgctgcatattcgatcccctgagcttatt

SEQ ID NO: 15476 - DNA, 80 bp, synthetic construct
  source 1..80: mol_type = other DNA
cccctgagcctcttaccatgatatactcagctgtatgtgaaaggattttgagaaaacagagcctagcaaggggtctcatg

SEQ ID NO: 15477 - DNA, 80 bp, synthetic construct
  source 1..80: mol_type = other DNA
tgagccacaagttggataagcttgtttaatcttggctttttgctaaaagctaaagcatttggctgatacctttcctgact

SEQ ID NO: 15478 - DNA, 80 bp, synthetic construct
  source 1..80: mol_type = other DNA
tcttcctgccgctagtcttcaatcacctctagcactgtctgactgcacttgttgtgtttttgcctggaagactcttcccc

SEQ ID NO: 15479 - DNA, 80 bp, synthetic construct
  source 1..80: mol_type = other DNA
acacagaaacctttcactctgagatcaagcaaccacaaaaatgcccatgattgccatttctatcagcattgtactttggg

SEQ ID NO: 15480 - DNA, 80 bp, synthetic construct
  source 1..80: mol_type = other DNA
atgagccagggtagaaaaagtggcccactgggtagatgaaagtctaaaaagcaccagcactcgattcatgagaaagatga

SEQ ID NO: 15481 - DNA, 80 bp, synthetic construct
  source 1..80: mol_type = other DNA
atatggtattacccagatttgatcattacactagtataatgaatatattcatgcattgaaacatcacaccgggccaggcg

SEQ ID NO: 15482 - DNA, 80 bp, synthetic construct
  source 1..80: mol_type = other DNA
gctatttaccccaaagagttgaaaacttgcatccatgcaataatctgcacccacatgttgctagcagggttattcataat

SEQ ID NO: 15483 - DNA, 80 bp, synthetic construct
  source 1..80: mol_type = other DNA
agagtgagactttgcctcaacaacaacaacaacaacaacaacaacaacaacaacaaagagtgaaccctaatgtaaaccat

SEQ ID NO: 15484 - DNA, 80 bp, synthetic construct
  source 1..80: mol_type = other DNA
ataatgtgataccaccttattactgcaagaatgtccgtaactaaaaaataatagatgttggtgtggaggtggtgaacagg

SEQ ID NO: 15485 - DNA, 80 bp, synthetic construct
  source 1..80: mol_type = other DNA
ttggctcaaagccacattaatttagaaatgaccccagcatcaaacatgacaatactccctatttttttcttccaatgctg

SEQ ID NO: 15486 - DNA, 80 bp, synthetic construct
  source 1..80: mol_type = other DNA
tttgccccagtgacttcctaccacctaccactcctaactcctagcttcaggaaaaattgtaggaagtaggatgaaaaaca

SEQ ID NO: 15487 - DNA, 80 bp, synthetic construct
  source 1..80: mol_type = other DNA
aatggtcatccattagctgtttaaattaaggaacacctatcccagtattcaacctcaaccaaatgtcctttccatcccct

SEQ ID NO: 15488 - DNA, 80 bp, synthetic construct
  source 1..80: mol_type = other DNA
cctaaaatctggctcattcatgtcactttcctgaaacatcatgcatgctctagaatgcctgcctcttctttaacaatgtt

SEQ ID NO: 15489 - DNA, 80 bp, synthetic construct
  source 1..80: mol_type = other DNA
agttattaatctttaagaatctttgctaggatgaaagcctcttcttccagcaaatgcatcctgagactgggacttaatct

SEQ ID NO: 15490 - DNA, 80 bp, synthetic construct
  source 1..80: mol_type = other DNA
gtttcaccagtcctatatctggaagtctcttctaagcatcaagatagaggtcatctagttcaagatgcttaaattctctc

SEQ ID NO: 15491 - DNA, 80 bp, synthetic construct
  source 1..80: mol_type = other DNA
ctttcactgctcagtatcttccatcaggtaagcgtgttttacagcagaatgaatagcgcacaatcagaaaagatacgtca

SEQ ID NO: 15492 - DNA, 80 bp, synthetic construct
  source 1..80: mol_type = other DNA
aacgttattggttgtccctcatcttcagcagcagacaaactgttaactgtgtcaggcaaggattgtctctctttagataa

SEQ ID NO: 15493 - DNA, 80 bp, synthetic construct
  source 1..80: mol_type = other DNA
aaagccttggcgacattttcatcagtacacagagaaaacatcaaagcaacatcaccaatgatatggttggttctgtgtcc

SEQ ID NO: 15494 - DNA, 80 bp, synthetic construct
  source 1..80: mol_type = other DNA
acagttgaccttcttccaaatcaatatggtccccaggaaatttgtagattctgagctctgagttttgatgggagaagcca

SEQ ID NO: 15495 - DNA, 80 bp, synthetic construct
  source 1..80: mol_type = other DNA
taaagtatcaagacctgttaaatgagcattagaaatatctgtgaagtgtcatcgtgtttgtgctatgactcaaacacagt

SEQ ID NO: 15496 - DNA, 80 bp, synthetic construct
  source 1..80: mol_type = other DNA
ctgagtgatttatccgaatcccaggatcaaggggctatcggtgccaattacaatgcaaatagcctgacaaaatgttctca

SEQ ID NO: 15497 - DNA, 80 bp, synthetic construct
  source 1..80: mol_type = other DNA
aactgcccatcttaagtagaaaaatatccatagtattcattagagcttagaaggtccacatgaacccctaaggactcctc

SEQ ID NO: 15498 - DNA, 80 bp, synthetic construct
  source 1..80: mol_type = other DNA
aactgcaattaggacaaggtgcacattttccatttttgtttaccccaggctgccacttaaaatcaaatgctatcatattt

SEQ ID NO: 15499 - DNA, 80 bp, synthetic construct
  source 1..80: mol_type = other DNA
tcatgaaggaatctacatctgaagctaccattttgaaagatacttagaaggtgggattggggtgggagtcaggggcaagt

SEQ ID NO: 15500 - DNA, 80 bp, synthetic construct
  source 1..80: mol_type = other DNA
gcctggtggaaactttgacttcctcctctgtcgctggccaagggccacagtttgcaggatttatttttccttattgcttc

SEQ ID NO: 15501 - DNA, 80 bp, synthetic construct
  source 1..80: mol_type = other DNA
tggctccatgatgaacatgaatcacagtccactttattcactgatgtgttccaagtatttagaatgctggctctcaataa

SEQ ID NO: 15502 - DNA, 80 bp, synthetic construct
  source 1..80: mol_type = other DNA
aaaacttggggaaaaaaatatttttgcccctaggcttgtatatctaagtcatcgctagcctatactgtattgggccaaac

SEQ ID NO: 15503 - DNA, 80 bp, synthetic construct
  source 1..80: mol_type = other DNA
ttgtgcatcaggttagactgtcattatataatgcaattgagccatgaccccttgtctaagaaggcaatttggttgctttt

SEQ ID NO: 15504 - DNA, 80 bp, synthetic construct
  source 1..80: mol_type = other DNA
tactgtaacctgtcagaacttgccatcatttgggtctataatggacaggtgtcatggttcagtagaaacagcatgtcctg

SEQ ID NO: 15505 - DNA, 80 bp, synthetic construct
  source 1..80: mol_type = other DNA
ttaaatcatactacttccagggttgcctggagaattaaaagtttatgcatttaaagcacctacatacatcctagtacatg

SEQ ID NO: 15506 - DNA, 80 bp, synthetic construct
  source 1..80: mol_type = other DNA
ttcctattcaattggaagaaatgacatccacatgtctgatcgatgaccaacagactacttatgtcggtacataccaaaga

SEQ ID NO: 15507 - DNA, 80 bp, synthetic construct
  source 1..80: mol_type = other DNA
gcagctaaatcctccctcttctcaacactaaggtgtaatcacatcattaagaattagactcctgtagcttttgaaccctg

SEQ ID NO: 15508 - DNA, 80 bp, synthetic construct
  source 1..80: mol_type = other DNA
actcaaggtatcttttgtaaggtaagatgtgaggtggcccattactcagttggttcatgagggcagctaaattaggtatt

SEQ ID NO: 15509 - DNA, 80 bp, synthetic construct
  source 1..80: mol_type = other DNA
tctaaagaacaaagatgagctccagcctttgttaagaaatcaccttcagcacataataatcacaaactccttagtagcca

SEQ ID NO: 15510 - DNA, 80 bp, synthetic construct
  source 1..80: mol_type = other DNA
ggactaagatgggggtggggggtggttgtaatgacctggaaaagatatgaacaaattatgaacaaatatatcttctgtaa

SEQ ID NO: 15511 - DNA, 80 bp, synthetic construct
  source 1..80: mol_type = other DNA
ggtggcccaacaagaatgctgcatttttcctgcacatgtttaaaagtgcagagagtgatgctgaattcaagggtttagat

SEQ ID NO: 15512 - DNA, 80 bp, synthetic construct
  source 1..80: mol_type = other DNA
gaaaggcagctcccgtctttgctgagaaacgaactctttcattacccttaattacttacccctgtacttttaaattgaga

SEQ ID NO: 15513 - DNA, 80 bp, synthetic construct
  source 1..80: mol_type = other DNA
atctgggatttacagagcaaacgtgcatgaaatacaacggattcagataaacatggaagggtctcacactttcatcggtt

SEQ ID NO: 15514 - DNA, 80 bp, synthetic construct
  source 1..80: mol_type = other DNA
aagactcaactgtccgttccttgccttgttatttctaacacagagcttcccgactttctacagtacaaagccattctgtc

SEQ ID NO: 15515 - DNA, 80 bp, synthetic construct
  source 1..80: mol_type = other DNA
ccactcctttttcaacttagtggttccccgaaatagccactttgatacatgtaattctccaaaccgtttccaaatactag

SEQ ID NO: 15516 - DNA, 80 bp, synthetic construct
  source 1..80: mol_type = other DNA
agaatttttataggagaataatcaggtatggaacgtccactctgcagcaacacatcagaaatcttattcaaggcaccctt

SEQ ID NO: 15517 - DNA, 80 bp, synthetic construct
  source 1..80: mol_type = other DNA
gaaaattcaattccaagtgtgcatctgacaactccatgaactaagaaagaaaagctggtcttgctggcgtatctgcaact

SEQ ID NO: 15518 - DNA, 80 bp, synthetic construct
  source 1..80: mol_type = other DNA
agtcagctagcacacaggaagaaacctaactagcattcttgatatatatggtgcccagagccctggagttagcaaatcta

SEQ ID NO: 15519 - DNA, 80 bp, synthetic construct
  source 1..80: mol_type = other DNA
catctctactaaaaattcaaaaaatattagctggtcatggtggtgggcccctgtaatttcagctacttgggaagctgagg

SEQ ID NO: 15520 - DNA, 80 bp, synthetic construct
  source 1..80: mol_type = other DNA
gtggaaatccagagagacagaacacagctaattggtagctaccagggtcccaggcagtaggaaatagggagcaactgctc

SEQ ID NO: 15521 - DNA, 80 bp, synthetic construct
  source 1..80: mol_type = other DNA
ctgcatctgctcaggtcttcaatccacccattacctactgcctccttcaacttacctttaatgttttgttgaattaccgc

SEQ ID NO: 15522 - DNA, 80 bp, synthetic construct
  source 1..80: mol_type = other DNA
atcacttgagcccaagagttcaagaccagcctgggcaacatggtgaaatcccatctctgcaaaagtataaaaattagccg

SEQ ID NO: 15523 - DNA, 80 bp, synthetic construct
  source 1..80: mol_type = other DNA
ggggaaatgtaaaggttgctgatcatctctttgatctcatgaatcacctctagagtatttgtctcctttaaacactctgc

SEQ ID NO: 15524 - DNA, 80 bp, synthetic construct
  source 1..80: mol_type = other DNA
aagtttgccggtttttttttttttttttttttgagacggagtctctctctgtcgcccaggctggactgcagtggcgcgat

SEQ ID NO: 15525 - DNA, 80 bp, synthetic construct
  source 1..80: mol_type = other DNA
agttataacaaatctcccatgcagatggggatattgataatggggaggttgtacatgagtatgggcggggatcatatggg

SEQ ID NO: 15526 - DNA, 80 bp, synthetic construct
  source 1..80: mol_type = other DNA
ttgtatttacaaaggattgcaaagaatgcaaatgtctgtcatcaggtgacagttgaatacactgtggtatccacacacag

SEQ ID NO: 15527 - DNA, 80 bp, synthetic construct
  source 1..80: mol_type = other DNA
ctcatctgccccttcctttcagaaaaggaaatacgaagattagcacaccaacacaatctacatcctgcaactatcacaga

SEQ ID NO: 15528 - DNA, 80 bp, synthetic construct
  source 1..80: mol_type = other DNA
gtgcattgtaagctgagccatccgactagctgtttctgtgtctcggctctcctctcttttctttgcatcagattaatggt

SEQ ID NO: 15529 - DNA, 80 bp, synthetic construct
  source 1..80: mol_type = other DNA
taaacaaatcaatatcccagttcctttttcccttagcgtgaaaactctgcggtacatgtttttcacaggctcccagggtt

SEQ ID NO: 15530 - DNA, 80 bp, synthetic construct
  source 1..80: mol_type = other DNA
taagatggaaacctcaaatttaaaagaattttgtgtgattgtcctctgccgtgtaaaatccttagcttctgctcagtctc

SEQ ID NO: 15531 - DNA, 80 bp, synthetic construct
  source 1..80: mol_type = other DNA
ggaaaaggcaaatcaaagccaccgtgtgatggtacctcacagccattaggatggcgactgtaaataattaattaattaag

SEQ ID NO: 15532 - DNA, 80 bp, synthetic construct
  source 1..80: mol_type = other DNA
aaaatatcagtggctgacctgctgttaatgagcaccatctctttcacaggtaacagacatctattcatgcttctgttgaa

SEQ ID NO: 15533 - DNA, 80 bp, synthetic construct
  source 1..80: mol_type = other DNA
acatttacttgcaagaaaatagacgcatagacatttgcatcactgacttagagctacaagacctcataataaagtacagg

SEQ ID NO: 15534 - DNA, 80 bp, synthetic construct
  source 1..80: mol_type = other DNA
gattacaggcgtgagccaccatgcctggccctattgtataatcttttaaagcatttttcagttactttaaatttccaaaa

SEQ ID NO: 15535 - DNA, 80 bp, synthetic construct
  source 1..80: mol_type = other DNA
actaagcaagcatttttacccctttgatccatgagtcattgtcttgcggtaaaccggtcacctacagctgctgaaatgtc

SEQ ID NO: 15536 - DNA, 80 bp, synthetic construct
  source 1..80: mol_type = other DNA
acattttccaaaatgtatgctaatctatgcctactgatgaaaggttcagaagacttaatgtcactttcccagggaaaatt

SEQ ID NO: 15537 - DNA, 80 bp, synthetic construct
  source 1..80: mol_type = other DNA
agagagagagaaacagatagttggatgattcattttttctagtcaaggctcaggggcctcaagcttccttgaactggtga

SEQ ID NO: 15538 - DNA, 80 bp, synthetic construct
  source 1..80: mol_type = other DNA
tatattttcattcctttgttcccattagtccccagaatgcgcatctcccacctctacttctcaaagatcctaataatgtg

SEQ ID NO: 15539 - DNA, 80 bp, synthetic construct
  source 1..80: mol_type = other DNA
aagaagtgccatctttaactgggtagggctgacaagtgtgaggaaataagaaaggttaccagttaaggtgattcccacaa

SEQ ID NO: 15540 - DNA, 80 bp, synthetic construct
  source 1..80: mol_type = other DNA
gtggagacaactactacctctcagggtgattttgaggagtaaatgagagcatatatgcaaggtaccttgaatcacctacc

SEQ ID NO: 15541 - DNA, 80 bp, synthetic construct
  source 1..80: mol_type = other DNA
tctctcatgttataaaagatgtagaggactatcgcttgccacaactaccccaaaacaaaggcctgaaataatatgagaca

SEQ ID NO: 15542 - DNA, 80 bp, synthetic construct
  source 1..80: mol_type = other DNA
gcttataagcaactcctaagtacttttcccttaattgactaaaggccctccagtgctgatcttcacagtactacaaaggg

SEQ ID NO: 15543 - DNA, 80 bp, synthetic construct
  source 1..80: mol_type = other DNA
tttaacgtatccctcattaaaacggctgggaataggaggaagaaagcagactcaccatttgattgctataccagtacagt

SEQ ID NO: 15544 - DNA, 80 bp, synthetic construct
  source 1..80: mol_type = other DNA
cttagttaatttgtttacattggagtctcttcatttgggtcaccaccatcctgttcttttttcctattgtcctgggacag

SEQ ID NO: 15545 - DNA, 80 bp, synthetic construct
  source 1..80: mol_type = other DNA
ggttggatgttttaaatggcctggtggtcttctggtagcgatcgatagttatcagtcccaggaatgaaatactgatatac

SEQ ID NO: 15546 - DNA, 80 bp, synthetic construct
  source 1..80: mol_type = other DNA
aagctgaccttttttctttatatttggaagatattcctgcctctatattgctcactcattcaaagattggcctcacggag

SEQ ID NO: 15547 - DNA, 80 bp, synthetic construct
  source 1..80: mol_type = other DNA
ctgttgattctggagggtttgaatgtatccagtaagtagtagttattgcaacctgcagagtggcatctggtattttcctt

SEQ ID NO: 15548 - DNA, 80 bp, synthetic construct
  source 1..80: mol_type = other DNA
ttacagttgtttaactttgaaaccagaagggcaaaaaatatgttaggggtgagattgaagggcaaagtgttttgctgctt

SEQ ID NO: 15549 - DNA, 80 bp, synthetic construct
  source 1..80: mol_type = other DNA
tgctttaactttatgtaaatattgctttgcagaaacacacctccctggtgtctcaaactgcagtgtccttctgttatcag

SEQ ID NO: 15550 - DNA, 80 bp, synthetic construct
  source 1..80: mol_type = other DNA
gtgggatggttgtacgtctttcaataaaataaggaccatactctcctttacagcaaattgtaaatgctaaaggatgttta

SEQ ID NO: 15551 - DNA, 80 bp, synthetic construct
  source 1..80: mol_type = other DNA
aatatttcgcaaaaatgaatgccgtcttttgtgacctagttatctgacatcccagtcttaagtgttctgcttgcaagaag

SEQ ID NO: 15552 - DNA, 80 bp, synthetic construct
  source 1..80: mol_type = other DNA
gtagtacaacaagcctgccagggttttgggcatgcatgtttctagtttcttcatctattaagtttctgtgagtatgagat

SEQ ID NO: 15553 - DNA, 80 bp, synthetic construct
  source 1..80: mol_type = other DNA
tggcccaactccctgagcatatcaaggccaaggaatgatttgagcttcttaagtgtcttcttcacctcaaaatgtctttt

SEQ ID NO: 15554 - DNA, 80 bp, synthetic construct
  source 1..80: mol_type = other DNA
ctctgtgttagggcccatatcaaaccaattactggacatttacacatttctacctacccttcaaattccttgcaattaca

SEQ ID NO: 15555 - DNA, 80 bp, synthetic construct
  source 1..80: mol_type = other DNA
ctttccttcaccacccctctttggacttctaggtctgtaaatactactttgatgacattgaatctgtgctccttgaagac

SEQ ID NO: 15556 - DNA, 80 bp, synthetic construct
  source 1..80: mol_type = other DNA
agtctgaggtttttgttctttgttgctgccactgctaattaggaacacagtgcagtttgttttctctgtgaggaattctt

SEQ ID NO: 15557 - DNA, 80 bp, synthetic construct
  source 1..80: mol_type = other DNA
attttctgtttttcaggatgaatcttcaagtcatgaatgtaaccagcgcacaatccttctctatggagtcggcaaagagc

SEQ ID NO: 15558 - DNA, 80 bp, synthetic construct
  source 1..80: mol_type = other DNA
ttgctctataatgtcttctttagttgaaatgctctttcctcatccttttgacatagtttttacagtgaagctgtgccttt

SEQ ID NO: 15559 - DNA, 80 bp, synthetic construct
  source 1..80: mol_type = other DNA
aactcacaaagcgaaaaacattgttgttctgtgctgccttttgagaaacaggtgaggtattccttatacgaagtgcttgg

SEQ ID NO: 15560 - DNA, 80 bp, synthetic construct
  source 1..80: mol_type = other DNA
atttctgggaacacatgaaaataatattttgaggaaccaactcatttaggagtgttgtcagatcagccaggtcttgccta

SEQ ID NO: 15561 - DNA, 80 bp, synthetic construct
  source 1..80: mol_type = other DNA
ctttgttctctgaaattaaactttcctaaagaagacgacagtgtgaggagtagaactcttgtcttggtagcctttaacta

SEQ ID NO: 15562 - DNA, 80 bp, synthetic construct
  source 1..80: mol_type = other DNA
tgtgtcagaaaagtaacaagatgagtctccaaagaagatgccaagcaagtgtttgattaagtcaaagtgagcccaggaga

SEQ ID NO: 15563 - DNA, 80 bp, synthetic construct
  source 1..80: mol_type = other DNA
tgccttcctcgaaggattaatttttattatgtactttttttgtccttatgataataatcggtgacatataaagtaatagc

SEQ ID NO: 15564 - DNA, 80 bp, synthetic construct
  source 1..80: mol_type = other DNA
ttgggaggctgaggcaggagactcacttaagcccaggaggtcaaggatgcaataagccatgatcatacaactgcactcaa

SEQ ID NO: 15565 - DNA, 80 bp, synthetic construct
  source 1..80: mol_type = other DNA
cctgttacagttactaaatgaactgagtgttgtggaagctgaactgctcctaaaatcctccagcctggcaggaagttata

SEQ ID NO: 15566 - DNA, 80 bp, synthetic construct
  source 1..80: mol_type = other DNA
ggaaattgagattcaggcctgttaagtgtttggtgaagtgatgtaccctatatcacatagctaataaatctcacagattt

SEQ ID NO: 15567 - DNA, 80 bp, synthetic construct
  source 1..80: mol_type = other DNA
tacttttcttcttaattgtgtgacacttttgttctaattggcagcttttacctgctgctaggtagtcccatctgttgatg

SEQ ID NO: 15568 - DNA, 80 bp, synthetic construct
  source 1..80: mol_type = other DNA
ggttttccagattgactgctttgaagcattgctcctttacaaaggagaaaacttgggaatctttgcacgctgatggaatt

SEQ ID NO: 15569 - DNA, 80 bp, synthetic construct
  source 1..80: mol_type = other DNA
cacaaaaacaattttgctgtttagcaggtaactttttcatgtgttaatgagtttttttaaaatgaccagtaccctcactg

SEQ ID NO: 15570 - DNA, 80 bp, synthetic construct
  source 1..80: mol_type = other DNA
attgcagagttcttctaactggtttccttgcttccacccttaactctaaaacacattttcaacatccactaaagtgatcc

SEQ ID NO: 15571 - DNA, 80 bp, synthetic construct
  source 1..80: mol_type = other DNA
gagtggcacatcatagtgattggcactgtctaaagtttcctctatttgaaaaaatgaaagagaaatacaactttcttggg

SEQ ID NO: 15572 - DNA, 80 bp, synthetic construct
  source 1..80: mol_type = other DNA
ctctgttttcttaaagctattgacagtggcaatagtttagaatagagagtctttgtgacttttcatcttcgagggactca

SEQ ID NO: 15573 - DNA, 80 bp, synthetic construct
  source 1..80: mol_type = other DNA
aaccatatataataacgtgatgcctgcaaattcgaacttgcgatgggatccagacttcatgatggattttattgagaatc

SEQ ID NO: 15574 - DNA, 80 bp, synthetic construct
  source 1..80: mol_type = other DNA
gttctgaaggctctttgttgttcttcaaatcacgtgtgggggtttaatgatgtactttgcactgtagatgtaagttttct

SEQ ID NO: 15575 - DNA, 80 bp, synthetic construct
  source 1..80: mol_type = other DNA
ctcagttgaaggttgacttctgaattctgctaatcaggactggttggataatcctatctctatatcttcattatatgaag

SEQ ID NO: 15576 - DNA, 80 bp, synthetic construct
  source 1..80: mol_type = other DNA
aaggtgagtgacctttcattccatgattcattagctactttcattgctattctgatagcacgacagtgtttttccctgga

SEQ ID NO: 15577 - DNA, 80 bp, synthetic construct
  source 1..80: mol_type = other DNA
ggtcctctcacgtactgtgtgtgttggttctgaaccacatcacagcagcttagggcaatggtgatttattttattttatt

SEQ ID NO: 15578 - DNA, 80 bp, synthetic construct
  source 1..80: mol_type = other DNA
ctgtcttaaaagcaattatgatgcttggtaagattattctgaccctaagcttcttggttaatcaccagaaatgaaggcaa

SEQ ID NO: 15579 - DNA, 80 bp, synthetic construct
  source 1..80: mol_type = other DNA
aataaataaatgtagggaccatagagatagggactggcttttttacctgtggtatttctagtgctcatcagagaagctag

SEQ ID NO: 15580 - DNA, 80 bp, synthetic construct
  source 1..80: mol_type = other DNA
tttaaaaggctttttccattaacttgggcattgttttgcccacttgctgcaagcagtgaaggcctactgtaaaagcattt

SEQ ID NO: 15581 - DNA, 80 bp, synthetic construct
  source 1..80: mol_type = other DNA
ttaggagatgccaaaattggcaataacagtgtcagctctttaaagaatgatgacttcaccatgagaggtttgcgatgtga

SEQ ID NO: 15582 - DNA, 80 bp, synthetic construct
  source 1..80: mol_type = other DNA
gatttgtctgaggtttcctgtagattagcttcagattatgcatccctggccaagatactacagaaataatcttgagttct

SEQ ID NO: 15583 - DNA, 80 bp, synthetic construct
  source 1..80: mol_type = other DNA
tatcaccttcttccctagtaagaatgctgattcccaaaaacgtcaatttacttgtttgtttaattctatgatacatctga

SEQ ID NO: 15584 - DNA, 80 bp, synthetic construct
  source 1..80: mol_type = other DNA
ttttagtgggcaaccagcattgagccactggtatggtggttaaaaaacagacttcacccgaaatagatctgggttcaaat

SEQ ID NO: 15585 - DNA, 80 bp, synthetic construct
  source 1..80: mol_type = other DNA
aattactgcagcttatctgttatcctcatggcattaaagaatgtaccgagggggacaatctgcaaagacagcacattaag

SEQ ID NO: 15586 - DNA, 80 bp, synthetic construct
  source 1..80: mol_type = other DNA
gtggccgaaatgaacaacttactggacaatattgcaaaggcaacaatagaggtattccagcagtctgcagacctaaataa

SEQ ID NO: 15587 - DNA, 80 bp, synthetic construct
  source 1..80: mol_type = other DNA
atcaaagtttcgctttggagtttctgttataactgtgagagcaggggaaaggatgctttctccggtgtaacacctgtttc

SEQ ID NO: 15588 - DNA, 80 bp, synthetic construct
  source 1..80: mol_type = other DNA
tctgaactagttgctcatatttttaacatttagggctcctgttctagactagacattaagactcctcggccaccacaact

SEQ ID NO: 15589 - DNA, 80 bp, synthetic construct
  source 1..80: mol_type = other DNA
ttaaaatgccaatttaaaacagaatttttaaccaaatgccttgacacctctttaccagtggatgctgcgggctatgttgg

SEQ ID NO: 15590 - DNA, 80 bp, synthetic construct
  source 1..80: mol_type = other DNA
agtagacgctgagaaacaatccatgccttattcttctacctggcattgtagacaccacaagattaacaactttatattaa

SEQ ID NO: 15591 - DNA, 80 bp, synthetic construct
  source 1..80: mol_type = other DNA
cagtatacctagtataaaaaattcgggctgataaggccagacatgatttgacactggctctctctcctaccttgtctcct

SEQ ID NO: 15592 - DNA, 80 bp, synthetic construct
  source 1..80: mol_type = other DNA
agattttcttcctccacctagaacggcaaatgcacaaataaatagccagatttctttctgcatggaggaagaagaaagct

SEQ ID NO: 15593 - DNA, 80 bp, synthetic construct
  source 1..80: mol_type = other DNA
agcctcctgcccaccactgctgtgatagtggatgtttccatatggtattatgatagcaggcttagattcaatagtaattg

SEQ ID NO: 15594 - DNA, 80 bp, synthetic construct
  source 1..80: mol_type = other DNA
ctgggggatctgaagagaacaagcgtgcatacatgaatttagtaaagaaactgaaagtaagtttgagatcagcctgtatt

SEQ ID NO: 15595 - DNA, 80 bp, synthetic construct
  source 1..80: mol_type = other DNA
actacttcaataaaacagactggatcttcggggatgccatgtgtaaactgcagaggttcatctttcatgtgaacctctat

SEQ ID NO: 15596 - DNA, 80 bp, synthetic construct
  source 1..80: mol_type = other DNA
aagtagaaatgcccacatccacacttagcttgtttgggtttgctttcacagtctctcttccttctgactagaagtatgta

SEQ ID NO: 15597 - DNA, 80 bp, synthetic construct
  source 1..80: mol_type = other DNA
gggcagaagacattttagaatgagggctttagtttaaattaaagtcatggtggagaagactcttgcttcctccaagtgtt

SEQ ID NO: 15598 - DNA, 80 bp, synthetic construct
  source 1..80: mol_type = other DNA
agtagcttcactttacccaatctctggccactaagatcaatgaagaaaagctgtatttaaccttccaaagcagtgattct

SEQ ID NO: 15599 - DNA, 80 bp, synthetic construct
  source 1..80: mol_type = other DNA
taagaagaaatacagcatgcaagttggaattcagagttaaaaccatgatgttgccgctcagccagctatgtgactgttga

SEQ ID NO: 15600 - DNA, 80 bp, synthetic construct
  source 1..80: mol_type = other DNA
taaacaacgttacaatgtaaggaaaatctttaaggagatggggagagaaaaaggcagctggtataatcggttactgctgc

SEQ ID NO: 15601 - DNA, 80 bp, synthetic construct
  source 1..80: mol_type = other DNA
aatggtaaggaaacacttcattagatcaacttaagagtattttattcttggctgggcgcggtggctcacacctgtaatcc

SEQ ID NO: 15602 - DNA, 80 bp, synthetic construct
  source 1..80: mol_type = other DNA
agcgcatagcaggtagctaacccactcatctctccctcttttctttatagcttctattttttttaaagagaaaaataacg

SEQ ID NO: 15603 - DNA, 80 bp, synthetic construct
  source 1..80: mol_type = other DNA
atgctgtgaggagtagacatactgtctgtagggtctctcgcaggcatttaaagggtctcaataaacaggactttatatta

SEQ ID NO: 15604 - DNA, 80 bp, synthetic construct
  source 1..80: mol_type = other DNA
aagcagatcttctaagggactcctttggttttagctagtttaaggattattgggggactgactgctgaatgacatcaatg

SEQ ID NO: 15605 - DNA, 80 bp, synthetic construct
  source 1..80: mol_type = other DNA
agtctgactccaactttgagtaaagtgaggagaggagtgaggaagtagaagaaacgcatttgctgctcaccacatttgcc

SEQ ID NO: 15606 - DNA, 80 bp, synthetic construct
  source 1..80: mol_type = other DNA
agataaaaataacaacaaattagctaatttattggaacactgtgcgctaggcaccatctaagcatttagtacccgctatc

SEQ ID NO: 15607 - DNA, 80 bp, synthetic construct
  source 1..80: mol_type = other DNA
gctgtattatgttcataattgactccattttcttgaggaaactgaggctaaaggtttatgtaacgtgcccactcacttag

SEQ ID NO: 15608 - DNA, 80 bp, synthetic construct
  source 1..80: mol_type = other DNA
cccatccttgtaaaagtctttcttctctgatccgtcagggttcaggaatcggttgtatttaaatacctgaaataggaaga

SEQ ID NO: 15609 - DNA, 80 bp, synthetic construct
  source 1..80: mol_type = other DNA
cgactgaaagatgggtggaaggataggtgaatgaaccagtggatagactaagagatggaaatgtggatggaaagatggat

SEQ ID NO: 15610 - DNA, 80 bp, synthetic construct
  source 1..80: mol_type = other DNA
ttagggtctgacacacagtaaacacccaatctgttagcaattgtgaaagtttacttcttctcaaagtctggggcaaggca

SEQ ID NO: 15611 - DNA, 80 bp, synthetic construct
  source 1..80: mol_type = other DNA
gagatatcagaaggctggggagagagtagggccatcaatctctgttcctgtctgcccggcatatatttctcttctggaaa

SEQ ID NO: 15612 - DNA, 80 bp, synthetic construct
  source 1..80: mol_type = other DNA
aacagtgtcagtaataggaacagggtatatcagttaagactgttcacatctgagaatgatcacattgttggccccaattc

SEQ ID NO: 15613 - DNA, 80 bp, synthetic construct
  source 1..80: mol_type = other DNA
gcttcagtcttagctgaacattttcatacacattttagcctcagctctttggtatgtggctaaaatgtgtatatggcacc

SEQ ID NO: 15614 - DNA, 80 bp, synthetic construct
  source 1..80: mol_type = other DNA
tatgtttcccaggctgtatccaaatcatttctacagtgatgtacaatgtcatgagagatgctcatgttacaatattaaac

SEQ ID NO: 15615 - DNA, 80 bp, synthetic construct
  source 1..80: mol_type = other DNA
tgacacagcaaggtcacctgctgtccatcacttaaatagccaggcaaatgcggatgataaataattcaacaccagcttag

SEQ ID NO: 15616 - DNA, 80 bp, synthetic construct
  source 1..80: mol_type = other DNA
tggcagaagaagggagacctgagggatgggggtcacagattgtgtttcttttaatttttatgatttagaagattccaacg

SEQ ID NO: 15617 - DNA, 80 bp, synthetic construct
  source 1..80: mol_type = other DNA
tggtggttgcaaagtgctcaacaggatgcttggcccagggtaagtgctcagtatcttttgagattattattcctgactca

SEQ ID NO: 15618 - DNA, 80 bp, synthetic construct
  source 1..80: mol_type = other DNA
cctgggaaacttcattctatatatttacatggttcacccctcacttccttcagtctctgctcagatgtcacctttcagtg

SEQ ID NO: 15619 - DNA, 80 bp, synthetic construct
  source 1..80: mol_type = other DNA
gcacttgttatctgcaaggcacagttacaaaattgcacatgtattcctgcctcctttcatcttcacaaccacgtcttgaa

SEQ ID NO: 15620 - DNA, 80 bp, synthetic construct
  source 1..80: mol_type = other DNA
ttccaaaatctatccacgtcctcatcacctccatggccaccacctgaccctgccaccacagtttcctccttgttgccctg

SEQ ID NO: 15621 - DNA, 80 bp, synthetic construct
  source 1..80: mol_type = other DNA
gaaccaaaaaggacattattgagacaactggcaaaactggaatacagattgtttattagataatgatcatgtatttgggc

SEQ ID NO: 15622 - DNA, 80 bp, synthetic construct
  source 1..80: mol_type = other DNA
aaaagaataccgaatgaatgtttctgttcgtgatgctatttgacagtaaaggaagtcagggaactggtttgggcagtggg

SEQ ID NO: 15623 - DNA, 80 bp, synthetic construct
  source 1..80: mol_type = other DNA
cctcataatcatagtggaaggtgaaaggcacatcttacatggcggcaagcaagagaaaatgaaagccaagcaaaaggaga

SEQ ID NO: 15624 - DNA, 80 bp, synthetic construct
  source 1..80: mol_type = other DNA
tttggattgctctgaagtttcaaagtattggaaactccctcactgactcttctgaaccacaagccgtgtttcaggaagac

SEQ ID NO: 15625 - DNA, 80 bp, synthetic construct
  source 1..80: mol_type = other DNA
ggcactctatatttgcacaatcaatgaataattaagcaaaaaaggtaatgcagtatgaaaagacagctgacagaaagtga

SEQ ID NO: 15626 - DNA, 80 bp, synthetic construct
  source 1..80: mol_type = other DNA
gcgacagagactctgtctccaaaatctcatataatgagaatcctagaacaggaaattcagagacagaaagtacaatagaa

SEQ ID NO: 15627 - DNA, 80 bp, synthetic construct
  source 1..80: mol_type = other DNA
tttaaattacatgctgttctgagtagtgtgttgaaatcttgtgccatcctgctctgtcctgcctggcaaaaaacacagga

SEQ ID NO: 15628 - DNA, 80 bp, synthetic construct
  source 1..80: mol_type = other DNA
tcaaagtttataccctcaaccaacacacccccatttccccacctcctgagccctggtaaccactgttctactgttcctct

SEQ ID NO: 15629 - DNA, 80 bp, synthetic construct
  source 1..80: mol_type = other DNA
gcagacatctcttcaagacagtgatttcatttcctttgaatatatacctagaagagggattgctggatcatgtggtagct

SEQ ID NO: 15630 - DNA, 80 bp, synthetic construct
  source 1..80: mol_type = other DNA
gtgtagttaaagggggagtctgcataaagccccctcctgaaatgtggtcgtgggaagaaagcaaatgttcgaaatggtta

SEQ ID NO: 15631 - DNA, 80 bp, synthetic construct
  source 1..80: mol_type = other DNA
ctatgtacagcactgttctagaaggataacagcaaacagatagcaatagttacctggggatagatttagagggaatgtgg

SEQ ID NO: 15632 - DNA, 80 bp, synthetic construct
  source 1..80: mol_type = other DNA
atgctacttgctacattctctccattattacgaggtatttcttattggtgtgataaccggatgccatgaatgagggctgc

SEQ ID NO: 15633 - DNA, 80 bp, synthetic construct
  source 1..80: mol_type = other DNA
cttgctcttttttgtaacagtagatttcattcactaccagtatgtcccactctgttttagatgcatagatggcctttaga

SEQ ID NO: 15634 - DNA, 80 bp, synthetic construct
  source 1..80: mol_type = other DNA
ataagctcaaatgagttcctctaaaaagataataaaggacacaaacagccggctcataaacaggaaatgcaaatggctac

SEQ ID NO: 15635 - DNA, 80 bp, synthetic construct
  source 1..80: mol_type = other DNA
ttgctggagtttgttttattattgattttctggggttctccaggtacaatatcagatcatctgcaaataggaatagtttt

SEQ ID NO: 15636 - DNA, 80 bp, synthetic construct
  source 1..80: mol_type = other DNA
tcttgttacctcagccaattctaacagctgccctctaggaagatcctgctgttccccccattttgcagatgagatcgctg

SEQ ID NO: 15637 - DNA, 80 bp, synthetic construct
  source 1..80: mol_type = other DNA
atgaggtagatttttacaaatcgatgtggaaatgctgtagacagggagttgagtgaaagctgtaagcggtacaacaattc

SEQ ID NO: 15638 - DNA, 80 bp, synthetic construct
  source 1..80: mol_type = other DNA
aggagttcaagaccagtataggtaacatagcaagactccgtctcaaaaaaattgtttttaagacaaaaaacaaaaaataa

SEQ ID NO: 15639 - DNA, 80 bp, synthetic construct
  source 1..80: mol_type = other DNA
tttaaagcaactcaaaccttaaaacacaaaaaggaacacacacacacacagagattctccagccccactctaaatgtgct

SEQ ID NO: 15640 - DNA, 80 bp, synthetic construct
  source 1..80: mol_type = other DNA
ggaacgtgttcaggcaacaggcacagcctgtgcaaaggcccagagctgagagtgcaaccgtgcctggtgggagaggtgcc

SEQ ID NO: 15641 - DNA, 80 bp, synthetic construct
  source 1..80: mol_type = other DNA
gtgacactgcagttgacactggtcatcatttatcatcacacttgcactgttgttttttgctaactcagagaaccatttcc

SEQ ID NO: 15642 - DNA, 80 bp, synthetic construct
  source 1..80: mol_type = other DNA
gaaccggcacccctttcacctctgtgtccctcccatccaactggcccattctctttgtatttcaggggctgctgattgat

SEQ ID NO: 15643 - DNA, 80 bp, synthetic construct
  source 1..80: mol_type = other DNA
tgcccatatgtgtcaacgaatgactgccctttatcctagaactatgttgctctaatttcttggaggggttgaaatgtcct

SEQ ID NO: 15644 - DNA, 80 bp, synthetic construct
  source 1..80: mol_type = other DNA
ggttaaggtcccaagttgatctcccaaacattttgttttctgttctgtgaaatcccaaagtctggaagccacaggacaag

SEQ ID NO: 15645 - DNA, 80 bp, synthetic construct
  source 1..80: mol_type = other DNA
ctggaagagaaggaactgaaaagcaactcatctctccctgaaatctaaagataggaagatctgttggaatagctgtggtg

SEQ ID NO: 15646 - DNA, 80 bp, synthetic construct
  source 1..80: mol_type = other DNA
actcctgggtatgaaaaggtttgggatgttcaagttggaacatagtgggaaaaacgacagacatggctcatgactcatgt

SEQ ID NO: 15647 - DNA, 80 bp, synthetic construct
  source 1..80: mol_type = other DNA
tcatctgtaaaataaggataaaaatgcccacctctttaggctaatgcacagatatgaaagtgagcctatcagacacctgg

SEQ ID NO: 15648 - DNA, 80 bp, synthetic construct
  source 1..80: mol_type = other DNA
caaaaaaacccgccagagatgagagacaaagagttcttcttccacccaattcttttgggttgttttttgttttgtttctg

SEQ ID NO: 15649 - DNA, 80 bp, synthetic construct
  source 1..80: mol_type = other DNA
gctgttgggtaaattccagtgggtggattgtagaagagtaaatgggcagatggatggattggtgaatgggtaaatgaatg

SEQ ID NO: 15650 - DNA, 80 bp, synthetic construct
  source 1..80: mol_type = other DNA
ctgggtagatctgggcagacacatgaagggatagaagatggataaatgaattgacagatgtcgggtgaatctatggaaaa

SEQ ID NO: 15651 - DNA, 80 bp, synthetic construct
  source 1..80: mol_type = other DNA
ggcacagaccacagactgtttctgtgattctgtggtttttcttctccctggcattgtccttaaccttggtaaaataaaca

SEQ ID NO: 15652 - DNA, 80 bp, synthetic construct
  source 1..80: mol_type = other DNA
ggtcttcacaacctcttattataacccagacatttatttctattgacaataactcttgcaaccaattgccaatcagaaag

SEQ ID NO: 15653 - DNA, 80 bp, synthetic construct
  source 1..80: mol_type = other DNA
gagatatacatttccctatctgattttcacccaagagttgttcctttagtatgcaagtttggctgacaattgcctagggt

SEQ ID NO: 15654 - DNA, 80 bp, synthetic construct
  source 1..80: mol_type = other DNA
aaggtgacaaaatttggcatgaggattatgaagctataaatccagcccaaaagagaattatcattgtgtaactttttgat

SEQ ID NO: 15655 - DNA, 80 bp, synthetic construct
  source 1..80: mol_type = other DNA
tctctcctctttgagaaggactgagagaataattctctccatcaacattttcgtcagctcatataaattttttccctcag

SEQ ID NO: 15656 - DNA, 80 bp, synthetic construct
  source 1..80: mol_type = other DNA
tacaaaaaaattggctgggtgtggtggcaggtgcctataatcccagctagtcgggagtctgaggcacaagaattgcttga

SEQ ID NO: 15657 - DNA, 80 bp, synthetic construct
  source 1..80: mol_type = other DNA
ttcagactactttgagaaaataaggctgaactatagagctaataaaagcaccttggaaaaactggcttcatataccctgt

SEQ ID NO: 15658 - DNA, 80 bp, synthetic construct
  source 1..80: mol_type = other DNA
ctttctccaaaagatcttaaatagaaaaggggggcaggcatacatggtggttcatgcctgtaatcccagcactttgggag

SEQ ID NO: 15659 - DNA, 80 bp, synthetic construct
  source 1..80: mol_type = other DNA
aataaaaacaaaaattttaaaaaaggaaaataaggctgggcatggtgtctcatgcctataatcccaacactctgggaggc

SEQ ID NO: 15660 - DNA, 80 bp, synthetic construct
  source 1..80: mol_type = other DNA
cgcaggatgtttacgatcaagggaacacgttaaatcatgcttacccaacagacccaagacttaacagatccaggacttaa

SEQ ID NO: 15661 - DNA, 80 bp, synthetic construct
  source 1..80: mol_type = other DNA
aggagggggaaatggggagtgactgctaatgggtacatggtttcttttaggggtgatgaaaatattctggaattagatga

SEQ ID NO: 15662 - DNA, 80 bp, synthetic construct
  source 1..80: mol_type = other DNA
gagccagtaagtgatgtgaccacacctttaaagggtcataccagagaaagacaagaggaaggaaggagatgtgtcaggga

SEQ ID NO: 15663 - DNA, 80 bp, synthetic construct
  source 1..80: mol_type = other DNA
gtgtgggagacaccacactgaggactttatcccagtgactcaatgaatcctccccctaaccttatgaggaagcaattatt

SEQ ID NO: 15664 - DNA, 80 bp, synthetic construct
  source 1..80: mol_type = other DNA
ttcactagatggaagagccatgaagggagggcgtgttgttcactccagcactcagaacagtggctggtctgaatgaatca

SEQ ID NO: 15665 - DNA, 80 bp, synthetic construct
  source 1..80: mol_type = other DNA
aatctagatttttgtgtatggaatcccccaattttctccccatgtcccacacagcacaaacccagcccatccagggctga

SEQ ID NO: 15666 - DNA, 80 bp, synthetic construct
  source 1..80: mol_type = other DNA
gaaagtcacttcatctttttaaacctcagctgtatgataagggtgatggaaattacctcaaggcttggtcaggataaaga

SEQ ID NO: 15667 - DNA, 80 bp, synthetic construct
  source 1..80: mol_type = other DNA
cctctgtaaaatggagataaccagagtgtccctagctgaactggaaggagaaagtgagattggggatctaaactggggtc

SEQ ID NO: 15668 - DNA, 80 bp, synthetic construct
  source 1..80: mol_type = other DNA
tttccggaattttcagacacgaatgtaaactaactctctcttacgtggctctgtattagctacaagctcatgtctatgta

SEQ ID NO: 15669 - DNA, 80 bp, synthetic construct
  source 1..80: mol_type = other DNA
cgttctgtccaggctgtgggacctcaggggaaggtagagacttcataggcctcagtttctccctggcaaatgaaattact

SEQ ID NO: 15670 - DNA, 80 bp, synthetic construct
  source 1..80: mol_type = other DNA
ttttccagtcacaaaccccgtacagttctctctgaggcactagcctctttgcatccatcttggttacagatagctaaaat

SEQ ID NO: 15671 - DNA, 80 bp, synthetic construct
  source 1..80: mol_type = other DNA
atgtgatatggactgctaaattaaactgtacaacagaaaatctgagaaaacatatcattattcaagcacagcttggtact

SEQ ID NO: 15672 - DNA, 80 bp, synthetic construct
  source 1..80: mol_type = other DNA
gttttaatgagctctggatctggaacactgaatgaagtaaagggacagcccttcacgttattgcagatgagagactgaat

SEQ ID NO: 15673 - DNA, 80 bp, synthetic construct
  source 1..80: mol_type = other DNA
acgaagaagtttagaaactgtttcttacctgtaagttcttcaaatgattcatagggcttcagcataaagcgtttgcggta

SEQ ID NO: 15674 - DNA, 80 bp, synthetic construct
  source 1..80: mol_type = other DNA
tgagttttcatttaccacatcttgtcatttactcaaaacataacaaagatagcacactaattttccctggggaagagggt

SEQ ID NO: 15675 - DNA, 80 bp, synthetic construct
  source 1..80: mol_type = other DNA
gacgctcatttgcttttacataatagtttatatagactcatactttaaaaaatacccatagataaccatgctaaaagtaa

SEQ ID NO: 15676 - DNA, 80 bp, synthetic construct
  source 1..80: mol_type = other DNA
gcatttcgaaggaagggaatgttattcacaacgttccaaaatcccttgaagtgggtaagtatgtagtgcactgtgtttgg

SEQ ID NO: 15677 - DNA, 80 bp, synthetic construct
  source 1..80: mol_type = other DNA
aatgatcagtgcttgtgggaaagctggaatatccacggagttctttcgaactctagcggtccaagctctttcccaagtca

SEQ ID NO: 15678 - DNA, 80 bp, synthetic construct
  source 1..80: mol_type = other DNA
ctgtcactctgtcttttagtctccttcacctttctcactacagagaattagtaggattggggactccagaatgggaaagg

SEQ ID NO: 15679 - DNA, 80 bp, synthetic construct
  source 1..80: mol_type = other DNA
ctcctgagacatctaattatatccttgctgccctgtcttctgaggtagggtcctatctttatctccctgacagatttgag

SEQ ID NO: 15680 - DNA, 80 bp, synthetic construct
  source 1..80: mol_type = other DNA
tgcatagacatgactaaaaaccaactttattgaggtataattgacctgcaataaattttacccagtttatgtgttcaatg

SEQ ID NO: 15681 - DNA, 80 bp, synthetic construct
  source 1..80: mol_type = other DNA
ctgtgattttctattcttgctccattttgcttcgtttggttaagtatgatggccacagcccccccaaactgatttcactt

SEQ ID NO: 15682 - DNA, 80 bp, synthetic construct
  source 1..80: mol_type = other DNA
atggagaggatcactcagcctaggagtccaaggctgcagtgagctatgatcgtaccactgcactccaccccaggagacag

SEQ ID NO: 15683 - DNA, 80 bp, synthetic construct
  source 1..80: mol_type = other DNA
cttgtgaccctcccaccttgtcctccgaaagtgctgggattacaggcgtgagccgccgtgcctggccccaggctggtctt

SEQ ID NO: 15684 - DNA, 80 bp, synthetic construct
  source 1..80: mol_type = other DNA
tactgtcctttatggtacttccaggatccagcccgggctgtcacattgcattcaggtgccattagaaagcagtctataaa

SEQ ID NO: 15685 - DNA, 80 bp, synthetic construct
  source 1..80: mol_type = other DNA
tgctggcttgtatctcaaggagttgtcaggagcaggtagagggcttgggtgggttgatcttgtcagtcactgtctttttc

SEQ ID NO: 15686 - DNA, 80 bp, synthetic construct
  source 1..80: mol_type = other DNA
gccgagggccttggatccaaggcaaaggggcctggagggtcaggggacacccgcaggggcctgacttgggagactggggg

SEQ ID NO: 15687 - DNA, 80 bp, synthetic construct
  source 1..80: mol_type = other DNA
caggaaggaaggaaggggatgggggcttctgagcccctgtccccgacgcctgctcctttctcctctttccagtcctttcc

SEQ ID NO: 15688 - DNA, 80 bp, synthetic construct
  source 1..80: mol_type = other DNA
tggtattttacagggagcatcttgtcacctgtgactaggccagacctcttggggatctggagagtccggggatctgtgct

SEQ ID NO: 15689 - DNA, 80 bp, synthetic construct
  source 1..80: mol_type = other DNA
aaacttagaccccaaagtattagcccccaaggctcctaaactcagattcaaatcttaaaacatcaagtttaaagcttgtt

SEQ ID NO: 15690 - DNA, 80 bp, synthetic construct
  source 1..80: mol_type = other DNA
cagatggtttttgaccctcaaactcagaccctgaaactcagactcatcaacttctaactacaaagctcagatcgttccta

SEQ ID NO: 15691 - DNA, 80 bp, synthetic construct
  source 1..80: mol_type = other DNA
gagggctgggaccctatgagtaggattagggaccagattccggggagctgaacccttgacttcactctcttctgtgtccc

SEQ ID NO: 15692 - DNA, 80 bp, synthetic construct
  source 1..80: mol_type = other DNA
aggagttccagaccaggctggctaacgtggtgaaaccctgtctctactaaagatacaaaaatttgcctggtgtggtggtg

SEQ ID NO: 15693 - DNA, 80 bp, synthetic construct
  source 1..80: mol_type = other DNA
gactgtaatgtccatgggagaactggggggtcctctgactccccttggctctcaccctccacagctggagtgggagccac

SEQ ID NO: 15694 - DNA, 80 bp, synthetic construct
  source 1..80: mol_type = other DNA
aatctgtagacagacagggaaaggcagagataaagaggcatggaaacagagaaatagagaaagatagagacagagaaaca

SEQ ID NO: 15695 - DNA, 80 bp, synthetic construct
  source 1..80: mol_type = other DNA
ttgtttgtttgttttttgtagagacgaggtctcattatattacacaggctggtctcaaactcctggggctcaagtgatcc

SEQ ID NO: 15696 - DNA, 80 bp, synthetic construct
  source 1..80: mol_type = other DNA
ctatcggcacattcccccatgcaagcttgtagctcgattttccaggctgctctttgttagaaaagaaattattttggggg

SEQ ID NO: 15697 - DNA, 80 bp, synthetic construct
  source 1..80: mol_type = other DNA
ccgctgccagcaggaggagtcccaggccgcccgcatgatccacagcaccaatggcctatacaaccagttcatcaagtgag

SEQ ID NO: 15698 - DNA, 80 bp, synthetic construct
  source 1..80: mol_type = other DNA
cttggccattgtgtgacctcggacaaatgcttttccctctctgcgtctcggtctccctctctgtaaaacgggtgggtctg

SEQ ID NO: 15699 - DNA, 80 bp, synthetic construct
  source 1..80: mol_type = other DNA
tggcatattagatggtaataactgttaaagagaaaaattcagcaggtaaggggtagggagtgttggggttttgcagttta

SEQ ID NO: 15700 - DNA, 80 bp, synthetic construct
  source 1..80: mol_type = other DNA
aggttatgtaataagtggttgatgaaaatactgtcacagactctcagggactccctgtatttcccctagaagcagtggtt

SEQ ID NO: 15701 - DNA, 80 bp, synthetic construct
  source 1..80: mol_type = other DNA
actgtgtcctcattgagagtccagaggttctgaacatcatccaggagaatcacatcaagtccatcatctccctcctggac

SEQ ID NO: 15702 - DNA, 80 bp, synthetic construct
  source 1..80: mol_type = other DNA
aaatattacagcctctaggtggactgtatatatatacacacactctgtagtttgccatagccctacaagttcctgttgca

SEQ ID NO: 15703 - DNA, 80 bp, synthetic construct
  source 1..80: mol_type = other DNA
gtcaaaattgccacatcttatcccgatgcgctgtcctttcctcctggcttccctccctcccagggttcttctgtagatcc

SEQ ID NO: 15704 - DNA, 80 bp, synthetic construct
  source 1..80: mol_type = other DNA
ttgaccccagcatttctaagtctctgaccatacaccttggggttctcaggatcctgactccctgaaaaggtcaacttttg

SEQ ID NO: 15705 - DNA, 80 bp, synthetic construct
  source 1..80: mol_type = other DNA
agggacctccacgtgactccagactctttccaatgacctcagattctccctaaccccacgtccttccagtaacctctgag

SEQ ID NO: 15706 - DNA, 80 bp, synthetic construct
  source 1..80: mol_type = other DNA
tcttaattcccttatgatattcctttgactctagactttcttttatgacttctaaatgacctccaggacactatgactgc

SEQ ID NO: 15707 - DNA, 80 bp, synthetic construct
  source 1..80: mol_type = other DNA
ggagctgccctagaagctgggaacctcgttgtttaacagatggagaaactgagcacagagaggcaaaggattctgtcaga

SEQ ID NO: 15708 - DNA, 80 bp, synthetic construct
  source 1..80: mol_type = other DNA
tctcaaaagaagaaagaaagaaaggactgtttttgccttccctccaagcatgtccctataggagggaatataggttaggt

SEQ ID NO: 15709 - DNA, 80 bp, synthetic construct
  source 1..80: mol_type = other DNA
gtgctgggattacagatgtgagccactacggctggccctggataattccttaattctgagaatgctaagccctcacccat

SEQ ID NO: 15710 - DNA, 80 bp, synthetic construct
  source 1..80: mol_type = other DNA
gtgcggtgggggagggaggcatggagagacagggcaggaggtagagactgagagagagaaggatggaggggacagggatt

SEQ ID NO: 15711 - DNA, 80 bp, synthetic construct
  source 1..80: mol_type = other DNA
gtcgttggagtcgtctaagtaagggatcctgaaattataggtgagcagttacacgtcctgagttcagaggtcaaggactc

SEQ ID NO: 15712 - DNA, 80 bp, synthetic construct
  source 1..80: mol_type = other DNA
aaaacaaagagagagaaaaacctcaaagttagtggtgagaggtctgagagagttccggggttagagataggggtcccaaa

SEQ ID NO: 15713 - DNA, 80 bp, synthetic construct
  source 1..80: mol_type = other DNA
agcctaggaacccaatgagtgccaaccccacctttgactctgattcctgacctctagctttgatccctaatcactaatct

SEQ ID NO: 15714 - DNA, 80 bp, synthetic construct
  source 1..80: mol_type = other DNA
ctgtgcctcactctgtccccacttcatgcatctactgtaccactcatccacccatctatccatccattcaaccaatgatt

SEQ ID NO: 15715 - DNA, 80 bp, synthetic construct
  source 1..80: mol_type = other DNA
cctgaacctgacacttcgaatgtctgtcttcatatatctctccctccctgcttccttatctctccatttctctgtgtgtc

SEQ ID NO: 15716 - DNA, 80 bp, synthetic construct
  source 1..80: mol_type = other DNA
agtgctcttctttgagtttctcttttccctccatgttaggacacaaaccacatggaagcaagtgtcagagtgatgggctc

SEQ ID NO: 15717 - DNA, 80 bp, synthetic construct
  source 1..80: mol_type = other DNA
actctgcaaaaggagttttaagtatgggaacgtccagttgaggtctgagttttggaaaggtccctattggcagtggattg

SEQ ID NO: 15718 - DNA, 80 bp, synthetic construct
  source 1..80: mol_type = other DNA
agaaaaaaagagtgaatgcagaaaccagatttataagacagaggggagaaagaggagagaaaaaagacccctaaagagtc

SEQ ID NO: 15719 - DNA, 80 bp, synthetic construct
  source 1..80: mol_type = other DNA
tgactttattcatcaaaactagtcatggagaagtgaccggattcccatccgaagcaaccacttcaaatctaggggggaaa

SEQ ID NO: 15720 - DNA, 80 bp, synthetic construct
  source 1..80: mol_type = other DNA
tggttactggttacagaatgacagagtagattgttagatggatgtagggaggttttggaagttaccccaagtgattccag

SEQ ID NO: 15721 - DNA, 80 bp, synthetic construct
  source 1..80: mol_type = other DNA
tcacaaatgtaccccccgaaatctaacttaaagggagattctgagaaggtactaaatctgctttttccctacaatggcag

SEQ ID NO: 15722 - DNA, 80 bp, synthetic construct
  source 1..80: mol_type = other DNA
attcccagaaggcgcctttaatttgggtaactcagcatccacaagcgcagagcatagcacttctagaatggattagtctg

SEQ ID NO: 15723 - DNA, 80 bp, synthetic construct
  source 1..80: mol_type = other DNA
aacaaaaattcataattgtcttaatatagttttgggatttccccaaatccaaaatatttcatagacagacagcctagtgc

SEQ ID NO: 15724 - DNA, 80 bp, synthetic construct
  source 1..80: mol_type = other DNA
tctatgccttctctcctatggaggtgctatggttttccatcagtagaatgggggtaaaaattatacctacctgatatgga

SEQ ID NO: 15725 - DNA, 80 bp, synthetic construct
  source 1..80: mol_type = other DNA
agggagcccgagtccctgacttccagactgaccactagttcccctccttgtgtcaccagtactattactccgtgagggtc

SEQ ID NO: 15726 - DNA, 80 bp, synthetic construct
  source 1..80: mol_type = other DNA
aatggcaaagagagcaacacctttttccaggtgagtccaggccacagcaatttagcgagagcatcatgtcccagcatccc

SEQ ID NO: 15727 - DNA, 80 bp, synthetic construct
  source 1..80: mol_type = other DNA
ctaagtagctgggactataggcatgcaccaccttgactagctgattttttgtgtgtattgtttgtagagatgggttttcc

SEQ ID NO: 15728 - DNA, 80 bp, synthetic construct
  source 1..80: mol_type = other DNA
tttgaaggaaattgcagacatcagatagtttcctctgttttcagtgtgtagctttaaaagataaggatgatcttaaagag

SEQ ID NO: 15729 - DNA, 80 bp, synthetic construct
  source 1..80: mol_type = other DNA
catatattttaggtggttgctctgtaccttgagtttcatttcatatgtagatttccccctccattccttcttctttccca

SEQ ID NO: 15730 - DNA, 80 bp, synthetic construct
  source 1..80: mol_type = other DNA
tcgctaattttttatgttttgtagagatggggtctcactacgttgcccaggctgctcttgaactcttaggctcaggtgac

SEQ ID NO: 15731 - DNA, 80 bp, synthetic construct
  source 1..80: mol_type = other DNA
tctgggtcccactcagtgcccctcctcaacacaaccccgggattccagactacaccccaggaatctccagacctacctca

SEQ ID NO: 15732 - DNA, 80 bp, synthetic construct
  source 1..80: mol_type = other DNA
caaaaaatagaattctgaacgtgggaggaatcccagactcacccaggaggcttctgacatgcctctttctttctttcctt

SEQ ID NO: 15733 - DNA, 80 bp, synthetic construct
  source 1..80: mol_type = other DNA
gggtggatagtgatgaaggaaatggaggaagagatggtggcttgactgatgcaggaggctcattcatctgtccctgtctg

SEQ ID NO: 15734 - DNA, 80 bp, synthetic construct
  source 1..80: mol_type = other DNA
ttcctcctgctttcctctgtcccattcttctcccacattcccaaaactccagagatacatgcatcaatcctcctctattt

SEQ ID NO: 15735 - DNA, 80 bp, synthetic construct
  source 1..80: mol_type = other DNA
atgtattaatctatctttccttccgtaggtccaataatcatctcctcccacctatgcgtccatccatacctacatccaca

SEQ ID NO: 15736 - DNA, 80 bp, synthetic construct
  source 1..80: mol_type = other DNA
atttacttcctcatgcatctatcaacccatccatcacctactcacctacctatacatcatttatccttctctcatccatc

SEQ ID NO: 15737 - DNA, 80 bp, synthetic construct
  source 1..80: mol_type = other DNA
ggaggccttgcaggccacagtgaagaaccgagactttgtcctgtaggtgatgggcatctttggcgatgaggatgtgaaac

SEQ ID NO: 15738 - DNA, 80 bp, synthetic construct
  source 1..80: mol_type = other DNA
ctcccacacggctgtccttccacagatgtgccacctgctggagtatttctgtgaccaagagctgcagcaccgtgtggagt

SEQ ID NO: 15739 - DNA, 80 bp, synthetic construct
  source 1..80: mol_type = other DNA
tttctctcgagacctctccagaagtttccctaagatttcctgacaaccctctacagtatcggtgctatgtaactattggt

SEQ ID NO: 15740 - DNA, 80 bp, synthetic construct
  source 1..80: mol_type = other DNA
tttttcttcattcttttacttttctgttcttcaggctagacaatctctatgtcctatcttcaagttcactgactgtttct

SEQ ID NO: 15741 - DNA, 80 bp, synthetic construct
  source 1..80: mol_type = other DNA
cactggggagagggcaggggtggggtgggtagccccatgcctgcggagcctctgggtcccaaagagggcatgaggacaga

SEQ ID NO: 15742 - DNA, 80 bp, synthetic construct
  source 1..80: mol_type = other DNA
cacccagccaaatccacagtatttttatagaacaagtgggattgtgacatgtgccttcaaaggtgcatggcgaagtgctt

SEQ ID NO: 15743 - DNA, 80 bp, synthetic construct
  source 1..80: mol_type = other DNA
tttgcatatccccttgggtaatgaataccctcaggatacaataacattcccttccccaacttctggcccatcctctgggt

SEQ ID NO: 15744 - DNA, 80 bp, synthetic construct
  source 1..80: mol_type = other DNA
ggctggaattacaaggcaaaagccaccatgctgggacaacatttgacaaagggcaacatggcaaagatctctgccctaga

SEQ ID NO: 15745 - DNA, 80 bp, synthetic construct
  source 1..80: mol_type = other DNA
cccagaacccactcctggcaccccgtccaggcctgccccactttccaccagctcactcattcaacaaacactccctctca

SEQ ID NO: 15746 - DNA, 80 bp, synthetic construct
  source 1..80: mol_type = other DNA
tcatggagtcattctgaggattaaatgaattaatccagtaaagtgtttgtaaaggggcagtcagtaacgttagctgctgt

SEQ ID NO: 15747 - DNA, 80 bp, synthetic construct
  source 1..80: mol_type = other DNA
catctcatcggtcacaacaagggctctggcttttaccctgagtgagaggaggccaggattctgagcagaggagggacgtg

SEQ ID NO: 15748 - DNA, 80 bp, synthetic construct
  source 1..80: mol_type = other DNA
ccagacattggctggaacccctgtggtggagagcgctacctggacttcctgcgctttgctgtcttcgtcaacggtgagga

SEQ ID NO: 15749 - DNA, 80 bp, synthetic construct
  source 1..80: mol_type = other DNA
ctagcaatgttggggacacaacagtgaccaagacagccccagggcctggtctcacagagctcccagtccaatgggggaga

SEQ ID NO: 15750 - DNA, 80 bp, synthetic construct
  source 1..80: mol_type = other DNA
tcacggtagagcagcagcagctgcttttgtttttcttgggattgtggacatatcataatccccaataccatcatcaagat

SEQ ID NO: 15751 - DNA, 80 bp, synthetic construct
  source 1..80: mol_type = other DNA
tgtattacaggaagaaagatgagggttagagaggagataagcgtgcagaccattgatatttacagaagagccaaatctgt

SEQ ID NO: 15752 - DNA, 80 bp, synthetic construct
  source 1..80: mol_type = other DNA
gggcagcgtccccgtagaaatctcttagcatccttatttgcatactaggattcccagaacattcactttgcttcattgat

SEQ ID NO: 15753 - DNA, 80 bp, synthetic construct
  source 1..80: mol_type = other DNA
tcaaaaaaaaaaaaaaaatttgcattttggatagtggaggccctcttcccaattaccatatatttgcatggggtgcagcc

SEQ ID NO: 15754 - DNA, 80 bp, synthetic construct
  source 1..80: mol_type = other DNA
atggggatgatttgagcatacaattgggactgacatttgggtttcaaggagagggaccataattcaggtttggggttcag

SEQ ID NO: 15755 - DNA, 80 bp, synthetic construct
  source 1..80: mol_type = other DNA
ctttgccttctctcaaacttggtagagtgggtagagactccgagagagtgggtttgattccttggctgtagtaagacttc

SEQ ID NO: 15756 - DNA, 80 bp, synthetic construct
  source 1..80: mol_type = other DNA
gaataataacagcgtttaccaccatggggtaatgagatgagcaccagcaagcaatgtttccgttattcgtatcttcttta

SEQ ID NO: 15757 - DNA, 80 bp, synthetic construct
  source 1..80: mol_type = other DNA
ggactcagagtggagccccaacctggggtgaagccaaagctgatagagacggggccagcaggagcagaggcggacctgag

SEQ ID NO: 15758 - DNA, 80 bp, synthetic construct
  source 1..80: mol_type = other DNA
gtgagccaccgcacccggcttgccagttgtaattttaaatagggtgttccagaaagactttgatgagaatgtgatatctg

SEQ ID NO: 15759 - DNA, 80 bp, synthetic construct
  source 1..80: mol_type = other DNA
agtttcctcacctgtgatatgggcatatgttcaccataactagccatggttctgttacttactgggtgacctggggttag

SEQ ID NO: 15760 - DNA, 80 bp, synthetic construct
  source 1..80: mol_type = other DNA
tgtctgggtgacaagaaaaaaaaaaggagttgggggaatcagatgaaagataggagaaaggtttatctcaaagccaacac

SEQ ID NO: 15761 - DNA, 80 bp, synthetic construct
  source 1..80: mol_type = other DNA
cgggactgaagggtttcccaggatgtgggactctcaggcaacttgggacaaatcgatcaccctgtccaggaaggccaact

SEQ ID NO: 15762 - DNA, 80 bp, synthetic construct
  source 1..80: mol_type = other DNA
ggtcaactgtcttcacatcctggcccgctccctggatgccaggtagggccataggcagtggcgcccactcccaccatcat

SEQ ID NO: 15763 - DNA, 80 bp, synthetic construct
  source 1..80: mol_type = other DNA
ttgggcaacatagcgagaccctgtctctactaaaaaaaaaaagaaaaatttaaagattagccaggcatggaggcacatgc

SEQ ID NO: 15764 - DNA, 80 bp, synthetic construct
  source 1..80: mol_type = other DNA
tgtgtgcctacccttcactgtatggttgaaagtatttagttttttttgttgaacttttgggtgtaagttgcacacaccag

SEQ ID NO: 15765 - DNA, 80 bp, synthetic construct
  source 1..80: mol_type = other DNA
gaaggtactataactatccccatgttacaggtagggaagctgaggctgagagagagttggtaacttgctcaagtcacaag

SEQ ID NO: 15766 - DNA, 80 bp, synthetic construct
  source 1..80: mol_type = other DNA
tacagcaagagcgaggctgcggctgtttccaccagctctgaagttattcagatttcaagtgacaccagcggtgcgcggtg

SEQ ID NO: 15767 - DNA, 80 bp, synthetic construct
  source 1..80: mol_type = other DNA
ctatggaatttattttagtgatggtgacatttgagggcatcatcaagcttggagacatagggtgaggggtatttgagcat

SEQ ID NO: 15768 - DNA, 80 bp, synthetic construct
  source 1..80: mol_type = other DNA
tggagggtgagatgggaagaatagggtttgggagactgtttaaggggggtggcaattcaatggtgtctgatgtattgcgg

SEQ ID NO: 15769 - DNA, 80 bp, synthetic construct
  source 1..80: mol_type = other DNA
ggaaggaaggaaggaagaaatggatcctcaaagcgttaggtttcctgattcagaagtttcatgtcagggccaggcacaat

SEQ ID NO: 15770 - DNA, 80 bp, synthetic construct
  source 1..80: mol_type = other DNA
caggatagggactgggtcttaggttcaggttaggggctatggctgggatcagtgttcagggactatatccaaggttaggg

SEQ ID NO: 15771 - DNA, 80 bp, synthetic construct
  source 1..80: mol_type = other DNA
tatagactcacaccaacatgctcggctaattcttgtatttttatggggtctcactatgttgcccaggttggtcttgaatt

SEQ ID NO: 15772 - DNA, 80 bp, synthetic construct
  source 1..80: mol_type = other DNA
agaaataaactacatattttaccatctgtttaatgttcacgagcagataagaataagtttggggccgggtgcagtggctt

SEQ ID NO: 15773 - DNA, 80 bp, synthetic construct
  source 1..80: mol_type = other DNA
tttcttgacttcggtgctggctacacaagtgtgttcatttgtgataattcaccaggttgatatttcttaatatgtaggtt

SEQ ID NO: 15774 - DNA, 80 bp, synthetic construct
  source 1..80: mol_type = other DNA
gagacagagaaaaaaaatttttttaatgttcatctgcatggccagatgaccctagaaaccccatccctctgactggatgt

SEQ ID NO: 15775 - DNA, 80 bp, synthetic construct
  source 1..80: mol_type = other DNA
ctgcccttctcaggtctcagagaacgaccccccaccccgagccaaggcctggaaatgcccagctagagaatacatggcgg

SEQ ID NO: 15776 - DNA, 80 bp, synthetic construct
  source 1..80: mol_type = other DNA
tgcatctttggtcttcctgtctccttgtctttttcagtctctcagtgtctttttcttgcaacttctcttgtcgcttgaac

SEQ ID NO: 15777 - DNA, 80 bp, synthetic construct
  source 1..80: mol_type = other DNA
gatgctgaggactcactgtgcccctgggatgccctgaggaccccgttcaagatattgccagggcaccacagacctaagag

SEQ ID NO: 15778 - DNA, 80 bp, synthetic construct
  source 1..80: mol_type = other DNA
ccttttgtttctctcagacccccacccccaccccagaaaaacctcttcagttcctggggtgctgggcctggaaggaaagg

SEQ ID NO: 15779 - DNA, 80 bp, synthetic construct
  source 1..80: mol_type = other DNA
agaaaggcctcaacatgcactcacccattgagtcctcccaaaaacggaaaggggacatccggcggacactgtgggaaggg

SEQ ID NO: 15780 - DNA, 80 bp, synthetic construct
  source 1..80: mol_type = other DNA
taacatgttcctggagagctacaaggctgcatggatcctgactgaagaccacagttttgaggaccgcatgatagatgacc

SEQ ID NO: 15781 - DNA, 80 bp, synthetic construct
  source 1..80: mol_type = other DNA
gccaatatggcaaaaccccgtttctacaaaaatacaataaatagccaggcttggtggtgggcacttgtaatcccatctac

SEQ ID NO: 15782 - DNA, 80 bp, synthetic construct
  source 1..80: mol_type = other DNA
cgtgcctccatgcctggctattttttttttttttttctggtagagatgggggtctcactatgttgcccaggccggtctca

SEQ ID NO: 15783 - DNA, 80 bp, synthetic construct
  source 1..80: mol_type = other DNA
gccttctttggtctctttatctctctggtgagcttccacacagatctcattggccagaaattctgacataaggccatctc

SEQ ID NO: 15784 - DNA, 80 bp, synthetic construct
  source 1..80: mol_type = other DNA
ctcccagaatggattttactggacagcatggacaacatgaccatttcttacctgtcatcatggccacacagataaaagtc

SEQ ID NO: 15785 - DNA, 80 bp, synthetic construct
  source 1..80: mol_type = other DNA
ggcttctcggaggaggggacttctgagcagaaggataaaaggagcctgccagttgaagaaaaagagaaaaatgttctacg

SEQ ID NO: 15786 - DNA, 80 bp, synthetic construct
  source 1..80: mol_type = other DNA
gtctctcttcctggaccaaaagagcagaatttgaataggaaatggttctaattctgcaacaataatgtgatatggaatat

SEQ ID NO: 15787 - DNA, 80 bp, synthetic construct
  source 1..80: mol_type = other DNA
gtgagttgtggatgtggctggaacagggagggcagaagtgagaatgtgagggggaaaggctgggctggaaagcctggact

SEQ ID NO: 15788 - DNA, 80 bp, synthetic construct
  source 1..80: mol_type = other DNA
ttcatcctggcccaaccatatgtcctagcttctgccaactcttcatttctgcttcctcttgatttcagcgcatagatggt

SEQ ID NO: 15789 - DNA, 80 bp, synthetic construct
  source 1..80: mol_type = other DNA
ccctctgcttttaccctcatttcctaccctcttccctgctaatccatttccttctgtctccttatcactctgcctttctc

SEQ ID NO: 15790 - DNA, 80 bp, synthetic construct
  source 1..80: mol_type = other DNA
acccccataatccattaacctccacggtctgaaggggggctgagggcattaccagctgcctgaatgtctgctaggtcagc

SEQ ID NO: 15791 - DNA, 80 bp, synthetic construct
  source 1..80: mol_type = other DNA
catctcctctggccagtccaattccccaaaagcaacctgccaaaaaccaatttggccaaaaatcaatttgcccaaatgga

SEQ ID NO: 15792 - DNA, 80 bp, synthetic construct
  source 1..80: mol_type = other DNA
caggactacaggcatgcatcaccatgtctggctaagttttttattttttgtagagatgagatctcactgtgttgcccagg

SEQ ID NO: 15793 - DNA, 80 bp, synthetic construct
  source 1..80: mol_type = other DNA
ataaggagaccctgtctctaccaaaaaaaaaaaaaatcatatactacagtataataaacctccaatcatatactacagta

SEQ ID NO: 15794 - DNA, 80 bp, synthetic construct
  source 1..80: mol_type = other DNA
caaggttgagaggatgagaagcacacacttcttcttttgtagttaactagagcagtacaggacagaaaagaacagaatgc

SEQ ID NO: 15795 - DNA, 80 bp, synthetic construct
  source 1..80: mol_type = other DNA
gttggtggtcaatatacaaatttgttggaaaaaactgaatgaataaatgacgctccaccacatttgacacatagcaggcc

SEQ ID NO: 15796 - DNA, 80 bp, synthetic construct
  source 1..80: mol_type = other DNA
cttttcatctccccagatttccagaactacctacggacacagacagggaacacgaccactattaacatcatcatttgcac

SEQ ID NO: 15797 - DNA, 80 bp, synthetic construct
  source 1..80: mol_type = other DNA
ggaaatgttttgcttctttatcttacttgcggcagatgacacccatatcaggcattcatgatgtaaggtccctgttgagc

SEQ ID NO: 15798 - DNA, 80 bp, synthetic construct
  source 1..80: mol_type = other DNA
atttatcagttcatattacagatccagggcttagagtgatgtcagcagaactgcctcctctttgactgcatttgcaagca

SEQ ID NO: 15799 - DNA, 80 bp, synthetic construct
  source 1..80: mol_type = other DNA
cacatgttggcaattttatgtgactcaacctaacataaataggggccatgaggcaaaactttgtattggaggtttctatg

SEQ ID NO: 15800 - DNA, 80 bp, synthetic construct
  source 1..80: mol_type = other DNA
acaaaccaaatgtccaaatgtggcaaaagataaacaattgatgaatgtggatatattaggatcccttttttttttttttc

SEQ ID NO: 15801 - DNA, 80 bp, synthetic construct
  source 1..80: mol_type = other DNA
cccactttactggctatgtaactttgagtgcatgactttctctatgtctcagtttctcttcctaaaagtagagtcacaca

SEQ ID NO: 15802 - DNA, 80 bp, synthetic construct
  source 1..80: mol_type = other DNA
tggctgcctcaggcaagagacatctctgcaagcctcactttccttgtttgtaaaatgaggataaaacagtccttgggtta

SEQ ID NO: 15803 - DNA, 80 bp, synthetic construct
  source 1..80: mol_type = other DNA
ttgaaataacttcaggtttatagagacgttgcaagaacagcacatagaatttctgaatacctttcacccacattgcccaa

SEQ ID NO: 15804 - DNA, 80 bp, synthetic construct
  source 1..80: mol_type = other DNA
aatttctttcgtcaatgtcttttctttgccaacccagaaccagggattgtatttaggtgttctgtctgttttcctccttc

SEQ ID NO: 15805 - DNA, 80 bp, synthetic construct
  source 1..80: mol_type = other DNA
ctgcacctggcccatggcttcttagtctatgggttgcagctgtgactggccatctgcacttaggtaagctcagggttccc

SEQ ID NO: 15806 - DNA, 80 bp, synthetic construct
  source 1..80: mol_type = other DNA
gtgtgtgccaccacacccggctacttttatttatttatttattttagagacggggtttgacatgttgccctagctggtct

SEQ ID NO: 15807 - DNA, 80 bp, synthetic construct
  source 1..80: mol_type = other DNA
ctacctgacattttacagctcaacatctgttacacaaagttataatctgcaactgggaaaagtgtattcattttattttt

SEQ ID NO: 15808 - DNA, 80 bp, synthetic construct
  source 1..80: mol_type = other DNA
ttacatttgtacatgttttactgcagagttccagcagatggagggaaatgtgctgaggaaggctgtagtatttgggccta

SEQ ID NO: 15809 - DNA, 80 bp, synthetic construct
  source 1..80: mol_type = other DNA
cagaaaccacattttaggttactgatttattcctggtcagtaaacagtcttgaggttatcttcattgttttcctatctgc

SEQ ID NO: 15810 - DNA, 80 bp, synthetic construct
  source 1..80: mol_type = other DNA
tccaaacaagggccacccattgcaattggctgatactttttaaaatcatctttcatctcttgcttcccctctattatctt

SEQ ID NO: 15811 - DNA, 80 bp, synthetic construct
  source 1..80: mol_type = other DNA
ttttttcacactaagtctatcagtggatagtgctgtcctagttgtagagcttcccatagtctggacctgaccaatgcgtc

SEQ ID NO: 15812 - DNA, 80 bp, synthetic construct
  source 1..80: mol_type = other DNA
taaaccggctggtggcggaaggccttctgcaggaggggacagcgaagctgagagttgaaagataccatatgactcagcga

SEQ ID NO: 15813 - DNA, 80 bp, synthetic construct
  source 1..80: mol_type = other DNA
atgtgagtacgtattgcatgcctatatcaaaatagttcatctaccccataaataaatacaactactatgtacccacaaaa

SEQ ID NO: 15814 - DNA, 80 bp, synthetic construct
  source 1..80: mol_type = other DNA
aggtgaggggttccggtgtgattatgtctccatgctctgtggtttctagagcccttcatgatttgcaaagcatgttactc

SEQ ID NO: 15815 - DNA, 80 bp, synthetic construct
  source 1..80: mol_type = other DNA
tactcaggaggctgaagcacgagactcatttgaccctgggaggtggaggctgcaatgagctgagatcgtgccactgcacc

SEQ ID NO: 15816 - DNA, 80 bp, synthetic construct
  source 1..80: mol_type = other DNA
cagttcagcggtccagaaatccagttcctgctttcgtgctccgaagcggatgagaacgaaatgatcaactgcgaagagtt

SEQ ID NO: 15817 - DNA, 80 bp, synthetic construct
  source 1..80: mol_type = other DNA
acacctcttgcacacacaccctgaggatgccaatgagccctctcagaaccctggcatgcttcatttgttcactgtccact

SEQ ID NO: 15818 - DNA, 80 bp, synthetic construct
  source 1..80: mol_type = other DNA
tatgcccatgtggccttggagcacctgtggggcagtataataataggtaacactacggtgttgttgttgtttgagacaga

SEQ ID NO: 15819 - DNA, 80 bp, synthetic construct
  source 1..80: mol_type = other DNA
gagttcgacaccagcctgaccaacacagacagaccctgtctctgcaaaaaaattttttttagaaattagcaggccagtca

SEQ ID NO: 15820 - DNA, 80 bp, synthetic construct
  source 1..80: mol_type = other DNA
ctgcgctgtcgctgctgtccgagcccccgctgacggcgccctatcctgtctgccgcccctcgcttcaggtgaaggagtcc

SEQ ID NO: 15821 - DNA, 80 bp, synthetic construct
  source 1..80: mol_type = other DNA
agaaaatgatacctgcagagccagagagagtaagaaacccagagaccaaattagagggcaggaaagaccaaaactaagcc

SEQ ID NO: 15822 - DNA, 80 bp, synthetic construct
  source 1..80: mol_type = other DNA
atgagcctcagtttcccctctgtaaaacgggaatcataatctgcctctttctggtggagggaagtgtaaaacttagatta

SEQ ID NO: 15823 - DNA, 80 bp, synthetic construct
  source 1..80: mol_type = other DNA
ggtgtcactgtcactgcctgtctcccacattggactggagccccataagggcaagtcctgattatctcatcatcccatgt

SEQ ID NO: 15824 - DNA, 80 bp, synthetic construct
  source 1..80: mol_type = other DNA
actaaaaatacaaaaaaaaaaaaaaaaaaaaattagccagccatagtggtgcatgcctgcaattccagctactcaggatg

SEQ ID NO: 15825 - DNA, 80 bp, synthetic construct
  source 1..80: mol_type = other DNA
aacagtagtgcccacttcacaggggtgtactgagaattaaacaagctcatgcaaataaagttcttagcccagatgttggt

SEQ ID NO: 15826 - DNA, 80 bp, synthetic construct
  source 1..80: mol_type = other DNA
ttgtaggaaagatattgagagcccaggtactttgattgcaggtaaatgatgggatgaattctccagggaagaggctgatc

SEQ ID NO: 15827 - DNA, 80 bp, synthetic construct
  source 1..80: mol_type = other DNA
aactccctcatctgtaaaatggaatacctcttagagctgtggggattgaaagaggataaggcaccaggcacagtggctca

SEQ ID NO: 15828 - DNA, 80 bp, synthetic construct
  source 1..80: mol_type = other DNA
gcttatagctgaggaaccaggttctggaccactgtcttgatactttgctattgaactagagttctttgggcttaaaactt

SEQ ID NO: 15829 - DNA, 80 bp, synthetic construct
  source 1..80: mol_type = other DNA
tggcccggaagctggagtttgatggcctgtacatcacggagcagcctgaggacgatgacgtgaaggggcagtgggaccga

SEQ ID NO: 15830 - DNA, 80 bp, synthetic construct
  source 1..80: mol_type = other DNA
gtgcctgtggtcctagctactccggaggctgaggcatgagaatcacttaaacctgcgaggtggaggttgcagtgagccga

SEQ ID NO: 15831 - DNA, 80 bp, synthetic construct
  source 1..80: mol_type = other DNA
aatttgtcacttggaaaactggtgaataaagggccagaatcatgaaattaaatgaaatcaaccagtatgaggaagcaggc

SEQ ID NO: 15832 - DNA, 80 bp, synthetic construct
  source 1..80: mol_type = other DNA
gaccttgggcaagaggtttttttgcctttctgagtagcacctcagtttccccatggggagatgggcatagtaagcttgct

SEQ ID NO: 15833 - DNA, 80 bp, synthetic construct
  source 1..80: mol_type = other DNA
ttattgacctttctgtacctcatactcaaagtggggtaataatacggccaaccctacagggttgttgtattatgtactac

SEQ ID NO: 15834 - DNA, 80 bp, synthetic construct
  source 1..80: mol_type = other DNA
tacacagcctgatgctctcttgtgcaggtcctggacaaacatggggacatctacgggcgggagcggattgctgagctact

SEQ ID NO: 15835 - DNA, 80 bp, synthetic construct
  source 1..80: mol_type = other DNA
acagaatgagaatccatctcaacaacaacaacaacaaaaacacaaaaaattagccaggcagacaggcacagtggctcagg

SEQ ID NO: 15836 - DNA, 80 bp, synthetic construct
  source 1..80: mol_type = other DNA
tgtgcccacagtccttcctgtacctgggctggtatatggtgatgtccctcttgggacactacaacaacttcttctttgct

SEQ ID NO: 15837 - DNA, 80 bp, synthetic construct
  source 1..80: mol_type = other DNA
ggagttggaaaccagcctgggcaacaaagcaaaaatcctgtctctataaaaaaaaatttaaacgttagctgggtgttgtg

SEQ ID NO: 15838 - DNA, 80 bp, synthetic construct
  source 1..80: mol_type = other DNA
acagtgccaggcatatgagtgctccacacctcttcgccattgtttcaatattatttgagctgaggttttttgttgttgtt

SEQ ID NO: 15839 - DNA, 80 bp, synthetic construct
  source 1..80: mol_type = other DNA
gatcataacccaaattgatgcgaacttactagagacacaggccacaatccacaattaaaagaatcatttctggggtttat

SEQ ID NO: 15840 - DNA, 80 bp, synthetic construct
  source 1..80: mol_type = other DNA
gcaaaccctcttgctttttgctttctagccgcctggtcctctttcagttcccctaggactgtgtgttttctcccaattca

SEQ ID NO: 15841 - DNA, 80 bp, synthetic construct
  source 1..80: mol_type = other DNA
tgccccactatcctggccctaacctctcagcctgtaccctccatcctggccctgacccctctgcctgtgccccccaccca

SEQ ID NO: 15842 - DNA, 80 bp, synthetic construct
  source 1..80: mol_type = other DNA
tcataggttgtgatcaggattaagtcagttcataggcgctcggtgtctggctcatatgagtgctcaataaaggcctgaga

SEQ ID NO: 15843 - DNA, 80 bp, synthetic construct
  source 1..80: mol_type = other DNA
tctctactataaatgaaaaataaaataaggtaagggtggttctgacttgtctcctgtggtcctctcaccctcaggttttt

SEQ ID NO: 15844 - DNA, 80 bp, synthetic construct
  source 1..80: mol_type = other DNA
tatgtctggaagatgtaccaagagagatgttgggatttcttcccagctggtgattgtttccgtaagcagtatgaggacca

SEQ ID NO: 15845 - DNA, 80 bp, synthetic construct
  source 1..80: mol_type = other DNA
gcctgaaggggggttaggagggaacttggtgaaagggcaaggaagagtgttctggctggggagaacagcctgtgcaaagg

SEQ ID NO: 15846 - DNA, 80 bp, synthetic construct
  source 1..80: mol_type = other DNA
tgttagtagccacctaacaataatagattcagggaaaaatcaattgattctaaaactagtgggcaggccaggtgcgttgg

SEQ ID NO: 15847 - DNA, 80 bp, synthetic construct
  source 1..80: mol_type = other DNA
aaaaaagcaacttcacagtggagagaactggctgattctaccttaaccaaatgaccgaagttaatatcaccagtaatggg

SEQ ID NO: 15848 - DNA, 80 bp, synthetic construct
  source 1..80: mol_type = other DNA
ggccaactggtgaaattgagtaggggtatgaattagaaggttgtgatgtttcagtgttgttttcttgattttgacagctg

SEQ ID NO: 15849 - DNA, 80 bp, synthetic construct
  source 1..80: mol_type = other DNA
aaaaaaaaaaaaaaaatgcagccaggtgtggtggctcatgccagtaatcctaacattttgggaggccaaggtaggaagat

SEQ ID NO: 15850 - DNA, 80 bp, synthetic construct
  source 1..80: mol_type = other DNA
ataaataaataaataaaagaattgctgggcatggtggcacatgccggtagttccagatactcaggaagctgaggtgggtg

SEQ ID NO: 15851 - DNA, 80 bp, synthetic construct
  source 1..80: mol_type = other DNA
gagattgcgccactgggcgtgccactggagccgagatctccagctgagataatttttgtatttctactgaaaatacaaaa

SEQ ID NO: 15852 - DNA, 80 bp, synthetic construct
  source 1..80: mol_type = other DNA
ttacctgggcatgatggagtgtacctgtaatcccagctactcgggaggctgaggcaggagaatcacttggacccaggagg

SEQ ID NO: 15853 - DNA, 80 bp, synthetic construct
  source 1..80: mol_type = other DNA
tagtaaaatatttttccctgaaaaagccttttcacaagacctatgggaccacctggatcttgccccaaagaggtcctctg

SEQ ID NO: 15854 - DNA, 80 bp, synthetic construct
  source 1..80: mol_type = other DNA
ccgtgaatggggcttgcacccttgtgtcctttggttttgttaatactcttacaggaggggaagaaaaggcaactatcagt

SEQ ID NO: 15855 - DNA, 80 bp, synthetic construct
  source 1..80: mol_type = other DNA
gcctgctgacggaagaggaaggaggcatgcttcaaagagcgttgcagcaggtgcctgcggaaggctctctggataaccat

SEQ ID NO: 15856 - DNA, 80 bp, synthetic construct
  source 1..80: mol_type = other DNA
aacatgtcgtcgatgccagcctcccacttgacataagcgaagttggccatgccaaagatggagtagatgaacatgacgag

SEQ ID NO: 15857 - DNA, 80 bp, synthetic construct
  source 1..80: mol_type = other DNA
cattgtcctaggaagtgagcagatgccatcatccttatcttccagaagaggaaacagaggtgaggtaacttacccaagtt

SEQ ID NO: 15858 - DNA, 80 bp, synthetic construct
  source 1..80: mol_type = other DNA
tccctcaaaactttagataagtggttttcaggggtgagggagaggggaaatgaatggggattgactattaaatgggtaga

SEQ ID NO: 15859 - DNA, 80 bp, synthetic construct
  source 1..80: mol_type = other DNA
gtgaagatggccacaaagagcaggttgatcttggccaagatgttgattttctcaggactttggtcatctgtctccaccat

SEQ ID NO: 15860 - DNA, 80 bp, synthetic construct
  source 1..80: mol_type = other DNA
agagctcttggctctccccaccaggtgactcaggaatccggctccctgactgttctggggttccaaggatgaggctgtga

SEQ ID NO: 15861 - DNA, 80 bp, synthetic construct
  source 1..80: mol_type = other DNA
gtggggagctggtgctctacgtatctttttcttctgttggttgaagttgtcaatgatgacaccaataaagaggttcaggg

SEQ ID NO: 15862 - DNA, 80 bp, synthetic construct
  source 1..80: mol_type = other DNA
taatgtccatccagcctttaaatgttgcctgggaggaaaagacaagattaagacaatcatttaattctgtacctcgcttg

SEQ ID NO: 15863 - DNA, 80 bp, synthetic construct
  source 1..80: mol_type = other DNA
tggtactcccactgtacagacataatagaagtaaaaagcctcaagagcatagatgataatactaaaatgtaatgatgaat

SEQ ID NO: 15864 - DNA, 80 bp, synthetic construct
  source 1..80: mol_type = other DNA
tggaaaggtcagcagttcttagtctacaaaaggaggccttttcttccaaagttctgacattctgagggacaattgcagga

SEQ ID NO: 15865 - DNA, 80 bp, synthetic construct
  source 1..80: mol_type = other DNA
gaacatggtatcggttctagaactgaaagtctggggatttcccaaggagccaaatccctggagagtcctgagcctccttt

SEQ ID NO: 15866 - DNA, 80 bp, synthetic construct
  source 1..80: mol_type = other DNA
agttctccagtgctcccataagagcagagccagaaagcaggtggcatgggtactccctgtgatacccgctccccagtgag

SEQ ID NO: 15867 - DNA, 80 bp, synthetic construct
  source 1..80: mol_type = other DNA
ttgaaaaatgcatagggatctgcactaggaaaatggtgcacaggagatcactaagcacgtggttatttcctctacagcct

SEQ ID NO: 15868 - DNA, 80 bp, synthetic construct
  source 1..80: mol_type = other DNA
tctccacattctttccttcaattccaattcttggacctgtctccttcgccaaagaagccttttttggggaagaagaggca

SEQ ID NO: 15869 - DNA, 80 bp, synthetic construct
  source 1..80: mol_type = other DNA
gtgtctaacccatcaggatttcctgttggctctgccttcaaaatacatctgaagtccaagtgtttctcaccacttctact

SEQ ID NO: 15870 - DNA, 80 bp, synthetic construct
  source 1..80: mol_type = other DNA
ctgccgattccctttcccttgccttggctctgagctccccaaggtggccagcggctggtgggtgggtttccccagaagtc

SEQ ID NO: 15871 - DNA, 80 bp, synthetic construct
  source 1..80: mol_type = other DNA
tcacagctacctgatcatctagggcagcaacccagagcccctgagccagtgttcatggcttcctcctcctctggggtgac

SEQ ID NO: 15872 - DNA, 80 bp, synthetic construct
  source 1..80: mol_type = other DNA
tacaggcatgagccactgtgcctggcctaggcaccgtttctgacaacacctcccttccggggagagcagaaacaggaact

SEQ ID NO: 15873 - DNA, 80 bp, synthetic construct
  source 1..80: mol_type = other DNA
atacatatggcccactgaggcactgtagatggcacaacaggataattcaggtcccaaaatggattttgggagttgttcaa

SEQ ID NO: 15874 - DNA, 80 bp, synthetic construct
  source 1..80: mol_type = other DNA
cctggtttgtgacaccaacctgcctttaaatctcacttgcttttgtttaccataccgaagttccatgtacttcattttca

SEQ ID NO: 15875 - DNA, 80 bp, synthetic construct
  source 1..80: mol_type = other DNA
cagtgcttggcatgtaagaaatatttgagagatgttacttgtgactaaacggtttctcttaggataatacaataatagca

SEQ ID NO: 15876 - DNA, 80 bp, synthetic construct
  source 1..80: mol_type = other DNA
tggaattattttcttccttgagaatgtgaaagatctgtttttggggatgtgagaaattagattagctagtggttatcaat

SEQ ID NO: 15877 - DNA, 80 bp, synthetic construct
  source 1..80: mol_type = other DNA
gccaccgcgcccggccaggtgtttgtttttatctattttttccatttctagcactttccatatctgtaaaataggattaa

SEQ ID NO: 15878 - DNA, 80 bp, synthetic construct
  source 1..80: mol_type = other DNA
aatcaatcctcccacctcagcctcctgagaaactgggactacagacatgtgccatcatgtttggctaatttttctttttt

SEQ ID NO: 15879 - DNA, 80 bp, synthetic construct
  source 1..80: mol_type = other DNA
atatcattgacgtggttttttaacaacagagcttggctgtctaccctgattagattcaccagatgcttgccaaaactcct

SEQ ID NO: 15880 - DNA, 80 bp, synthetic construct
  source 1..80: mol_type = other DNA
ctcaacctcccaagtagcttggattacaggtgagtgccaccacactcagcaaattgttgtatttttagtagagatgggct

SEQ ID NO: 15881 - DNA, 80 bp, synthetic construct
  source 1..80: mol_type = other DNA
aggaggctggtgatctggggcaaatcatttcccttttgtggaacaaagacaaaggcctggacacatgccctctgtgagcc

SEQ ID NO: 15882 - DNA, 80 bp, synthetic construct
  source 1..80: mol_type = other DNA
tatccccagctcattttatccccagctatcctccaaatataccaccaatccataaaagctatagatgccaatcaacatgg

SEQ ID NO: 15883 - DNA, 80 bp, synthetic construct
  source 1..80: mol_type = other DNA
gcaacctggacacacagtgggacatggacacatcgtggtggtgtggcacacacagtggaaacaggcatgtcacatccaga

SEQ ID NO: 15884 - DNA, 80 bp, synthetic construct
  source 1..80: mol_type = other DNA
ttgtctgaattcttgggcatggctatgctcctacagctgccttctctcttctcttttcctttgatgaatcaatctgctga

SEQ ID NO: 15885 - DNA, 80 bp, synthetic construct
  source 1..80: mol_type = other DNA
cctcccaaagtattaaaattacaggcgtgagccaccgtgcccagcctcctgaagtcttctttggatggggagattcacag

SEQ ID NO: 15886 - DNA, 80 bp, synthetic construct
  source 1..80: mol_type = other DNA
acccccacacacaccacacacacccaggagccagagtcaatgggctcaagagaaggaacagagaagggaaatgagagaca

SEQ ID NO: 15887 - DNA, 80 bp, synthetic construct
  source 1..80: mol_type = other DNA
caagtctctcttgccatgcctccgtttccctgtctgtacaatgagctccccatgcccagccagggcatgagtggtggata

SEQ ID NO: 15888 - DNA, 80 bp, synthetic construct
  source 1..80: mol_type = other DNA
aaatttgaatccctctttccaagggcccagacacagtctgaattgaggatgtcgtgtcctggctcaggttcaatgggaga

SEQ ID NO: 15889 - DNA, 80 bp, synthetic construct
  source 1..80: mol_type = other DNA
ttggcttaaaagtaatacatattcatgtggaatatgtacagaaggtgaagaggtagcctctcccgtactatctctacgga

SEQ ID NO: 15890 - DNA, 80 bp, synthetic construct
  source 1..80: mol_type = other DNA
tctggaatctatagcccatagtacttgccccacagcagcctgaaaaagtgaatgtaaaacctctctgtgagctgatgtga

SEQ ID NO: 15891 - DNA, 80 bp, synthetic construct
  source 1..80: mol_type = other DNA
ttgcctctgtattcccaacagcatgtggcacaatgttttccatgcaataagggcttagaaaatgtttaagataaattgaa

SEQ ID NO: 15892 - DNA, 80 bp, synthetic construct
  source 1..80: mol_type = other DNA
ttcattggtgggtgggtgattgataagtggatgatcaatagatagatggctgtatgagcatataggtgcaagaataaatg

SEQ ID NO: 15893 - DNA, 80 bp, synthetic construct
  source 1..80: mol_type = other DNA
ctattacctcatttgacagaagaagctgccaaccctcacaggtggagtaacttgtctaagtcccttggttcatagcagct

SEQ ID NO: 15894 - DNA, 80 bp, synthetic construct
  source 1..80: mol_type = other DNA
ccctgttggaagtagtagtaggggtcgagggcaatgatcttgaaggtcatctctgctgtgaaaatccctgtgaagacctg

SEQ ID NO: 15895 - DNA, 80 bp, synthetic construct
  source 1..80: mol_type = other DNA
gaggttaagtaacttgtctggggtcatgtagctattaagtttgagaatgaggagaggaaactagtgctgctcttcagaat

SEQ ID NO: 15896 - DNA, 80 bp, synthetic construct
  source 1..80: mol_type = other DNA
ttcgtttccctctgcttcacgccaccatctaacaactatttgtttattgagcctcttctgtttagaagataagctgtgtg

SEQ ID NO: 15897 - DNA, 80 bp, synthetic construct
  source 1..80: mol_type = other DNA
accaggttcctgggattcgaacttcaagtgctgtttttgaccatgagctctgaaacttggtgcactctgtaatcacctag

SEQ ID NO: 15898 - DNA, 80 bp, synthetic construct
  source 1..80: mol_type = other DNA
atcctaggagaaaggttttaaccaagtccacaagctgcatgtgagtaactgcttccctttaactatgctaacactgggta

SEQ ID NO: 15899 - DNA, 80 bp, synthetic construct
  source 1..80: mol_type = other DNA
atcatgtgccatcacagataaaccaggagccacccatagtactatattcattccaaggtaatcactatcccaaatttgat

SEQ ID NO: 15900 - DNA, 80 bp, synthetic construct
  source 1..80: mol_type = other DNA
gcatctaatttatgaatgtgatgtgaggtagggatctaaattgattttcttccatgcagataaccattctcccagcatca

SEQ ID NO: 15901 - DNA, 80 bp, synthetic construct
  source 1..80: mol_type = other DNA
tacttggaatactgaggctgtaccccctaatattgttgaactctcgtattagttctaacagcctctctgtagattttcta

SEQ ID NO: 15902 - DNA, 80 bp, synthetic construct
  source 1..80: mol_type = other DNA
ccttttaggggccccaagacatcattctaggatcactttctatgttaattttttagatgtaggttccaggactactcagg

SEQ ID NO: 15903 - DNA, 80 bp, synthetic construct
  source 1..80: mol_type = other DNA
ggtgaccatgggtaactgaaaccatgtttccatggtttcaaaattgtggataagaggaactactgtactttctcatgcac

SEQ ID NO: 15904 - DNA, 80 bp, synthetic construct
  source 1..80: mol_type = other DNA
attacagcaagttgactcaaattggtgaaaaaatctgaataggccctgcagagaactacctagagtcctgggtttggaaa

SEQ ID NO: 15905 - DNA, 80 bp, synthetic construct
  source 1..80: mol_type = other DNA
gagaactacttccttctgcacgcattctcctccacctacaaattacaaaatctcaagtctccacacatttcaggtttacc

SEQ ID NO: 15906 - DNA, 80 bp, synthetic construct
  source 1..80: mol_type = other DNA
agggatgtggagttgcctagggcaggaatggctgggaaagatgtaggatgcctggaatagtctgaagtagatatgggaat

SEQ ID NO: 15907 - DNA, 80 bp, synthetic construct
  source 1..80: mol_type = other DNA
tccctcccagttaagaactccctccacccctcctcccaatcactgtctccttcattctcctttcttcttcactgcctctc

SEQ ID NO: 15908 - DNA, 80 bp, synthetic construct
  source 1..80: mol_type = other DNA
ggccagcttaactcacaagcaagttttaaattctcccaacttctcccctccttctttgccatctatgatagtttggttat

SEQ ID NO: 15909 - DNA, 80 bp, synthetic construct
  source 1..80: mol_type = other DNA
cctgagtattctaatagccctcatcctcatccctccccttagcagctttctatcacatgacttattgctacctgaaaata

SEQ ID NO: 15910 - DNA, 80 bp, synthetic construct
  source 1..80: mol_type = other DNA
catgtgcagtacaatgagatgattttctccttaatgagattaggaaattctattagcgctcccagctgctgacccgattc

SEQ ID NO: 15911 - DNA, 80 bp, synthetic construct
  source 1..80: mol_type = other DNA
ctggaacaggcttccccagatgatggtaatgaaggctttactagttgtgacatagttaactatcatccctctttatcacc

SEQ ID NO: 15912 - DNA, 80 bp, synthetic construct
  source 1..80: mol_type = other DNA
tgctcccgcggctggaacgtggcttcatagaagtcctgctgaggccacgggtgaggctgagatgattctaagggcatgag

SEQ ID NO: 15913 - DNA, 80 bp, synthetic construct
  source 1..80: mol_type = other DNA
caggcaactctcagtgacttggttttccctatcagtaagtggacttgcacacctaccccaaaatgaggacatcatggaga

SEQ ID NO: 15914 - DNA, 80 bp, synthetic construct
  source 1..80: mol_type = other DNA
gcacgtcttaacccagcaggttccaaatttttactcagcgataccacattcacagaaaatatctttacccagcaggcact

SEQ ID NO: 15915 - DNA, 80 bp, synthetic construct
  source 1..80: mol_type = other DNA
gcaacccagtttatgccccacagctcagtgaagctgagcttcacaaacctagtgccacgctgctggatcctgcctccgtg

SEQ ID NO: 15916 - DNA, 80 bp, synthetic construct
  source 1..80: mol_type = other DNA
tttggtgacaggaaggaggcaacaaacttggtacttctcctttgaggtggccctctgtgacccccttctccaacactcca

SEQ ID NO: 15917 - DNA, 80 bp, synthetic construct
  source 1..80: mol_type = other DNA
tttgtcttaggcgacagttgtcaaagcatggtcctcgaaccagcatcatcagcatcaagtggaaactgcttagaaatgca

SEQ ID NO: 15918 - DNA, 80 bp, synthetic construct
  source 1..80: mol_type = other DNA
cactctagggtcagtcccatctccaaatgccgcagccaactggccctctatctaactccatactttccactcctcaagca

SEQ ID NO: 15919 - DNA, 80 bp, synthetic construct
  source 1..80: mol_type = other DNA
aatgtagtccatggaaaaggagatggaggcaattgaggggcctcagccttgatcttgagatggggagaaatagagccatt

SEQ ID NO: 15920 - DNA, 80 bp, synthetic construct
  source 1..80: mol_type = other DNA
gacatagtggccaagggtaactcacccctttgaacatttctcatactgatgatagatttcacttctggcaagaatggttg

SEQ ID NO: 15921 - DNA, 80 bp, synthetic construct
  source 1..80: mol_type = other DNA
tagctcaatgcaggcctgggagccaccaggttccacatcaggtgcggatgtagccatctggttcaaccgatgcttccgtc

SEQ ID NO: 15922 - DNA, 80 bp, synthetic construct
  source 1..80: mol_type = other DNA
caaccaggctcagaaatcacaagtcttttcagagttttcctagatggatggatggaatggtttctagagatgttatctgg

SEQ ID NO: 15923 - DNA, 80 bp, synthetic construct
  source 1..80: mol_type = other DNA
tgtagctgagatctgagaggcaaacctgggcatcttacctgggataactgaaatagtttttagagctctcaggactctga

SEQ ID NO: 15924 - DNA, 80 bp, synthetic construct
  source 1..80: mol_type = other DNA
gacatttaatcaaaggctttgcatccagggtgtgtgacatttaaccgaaggtgtctggtatttaacaaaggacattggac

SEQ ID NO: 15925 - DNA, 80 bp, synthetic construct
  source 1..80: mol_type = other DNA
atactggtttcgcggctgtctcttctagttacagggagtgagtggaatactgtgcaggttagagagggaaccaaccgtcc

SEQ ID NO: 15926 - DNA, 80 bp, synthetic construct
  source 1..80: mol_type = other DNA
ataacaaccccagaaggtgggaggctatgctaactagcaggtaatgcccttctgtgagtggggccacaggaagagctctg

SEQ ID NO: 15927 - DNA, 80 bp, synthetic construct
  source 1..80: mol_type = other DNA
acttttcctgggatctggggctgcctctgtggtgatactgtcttgcccaggctccaggttggggagctaggaaaggctca

SEQ ID NO: 15928 - DNA, 80 bp, synthetic construct
  source 1..80: mol_type = other DNA
acaggctacactcatgcctaggtgatctcatctggtctcctggctttaaataccatctgtatccccatagcttctaaatt

SEQ ID NO: 15929 - DNA, 80 bp, synthetic construct
  source 1..80: mol_type = other DNA
ccttcaataggtagattcagggattccaagcatcctagaaagtgagagctgaattgagcttctgataccacagcacacaa

SEQ ID NO: 15930 - DNA, 80 bp, synthetic construct
  source 1..80: mol_type = other DNA
tctcttggctgcaatttcattcttaatcatcttggaatccaggtcaccattcgcagtgggccaggggttgaaatattggt

SEQ ID NO: 15931 - DNA, 80 bp, synthetic construct
  source 1..80: mol_type = other DNA
ttattccatattatcgtgtaactgccatgtgtccatctgaactctctgtattctctctcggttgtcttggtggaagaaga

SEQ ID NO: 15932 - DNA, 80 bp, synthetic construct
  source 1..80: mol_type = other DNA
gggtggccatgagggttaaaggagatgatgcttattgttcttatgacagtgcctggcgtgtacaaaatgctcaataaatt

SEQ ID NO: 15933 - DNA, 80 bp, synthetic construct
  source 1..80: mol_type = other DNA
ctaggggagcagcccaggccaggcgttgtctagaagttctctgcagaatgccctgctgccaaacaactgcacacctggcc

SEQ ID NO: 15934 - DNA, 80 bp, synthetic construct
  source 1..80: mol_type = other DNA
ctcaaaccagcctccagtttataattatttagtttctcatctgggacgagaggaaattaggctttgggactctcccttag

SEQ ID NO: 15935 - DNA, 80 bp, synthetic construct
  source 1..80: mol_type = other DNA
tatccaggtagactcagtataatcacaggggtccttttaagcaaaagagaggcagagtgttgtgacatgaaattcaaccg

SEQ ID NO: 15936 - DNA, 80 bp, synthetic construct
  source 1..80: mol_type = other DNA
ctgagtgggagccaggggggcaatggagccatgtccccaaaacgctctgacatgggatattatgaaaaaaccaaacatgc

SEQ ID NO: 15937 - DNA, 80 bp, synthetic construct
  source 1..80: mol_type = other DNA
ctctctgaatgtgactgcggtaggatatggagttcagttggtttcttttatttaatcccagcaggaacacattctgcagg

SEQ ID NO: 15938 - DNA, 80 bp, synthetic construct
  source 1..80: mol_type = other DNA
tatatgaagtagtatacctcaagttaaaaaaaaatcatggagcacttacagatttctaggcctcacactggtgattctgg

SEQ ID NO: 15939 - DNA, 80 bp, synthetic construct
  source 1..80: mol_type = other DNA
cataactatttgcgaagctgccttatcacttttaggggaactataaaattcccaaggggcccagacggggtcttattcgg

SEQ ID NO: 15940 - DNA, 80 bp, synthetic construct
  source 1..80: mol_type = other DNA
attacgctgcatcactccaatggctctcctctgcaggctggagcttttttcagctgtggtttatataatttaatgctaac

SEQ ID NO: 15941 - DNA, 80 bp, synthetic construct
  source 1..80: mol_type = other DNA
gtacgatgaaagtctggggacagacagtagcattaggcccttgtgtagaaaggcttttgggggcagcttttggctcagag

SEQ ID NO: 15942 - DNA, 80 bp, synthetic construct
  source 1..80: mol_type = other DNA
cttcagcctaatcgccactcatcctctccccataagcttgactcacactaccagctgtggccttaaccctaaccccaatt

SEQ ID NO: 15943 - DNA, 80 bp, synthetic construct
  source 1..80: mol_type = other DNA
ggaagcccaagtctccctgccctagcagacaaaagccacttcccttccctatgatcagaagggacaatggcagaacatca

SEQ ID NO: 15944 - DNA, 80 bp, synthetic construct
  source 1..80: mol_type = other DNA
aagtttgccatcttctcatcctgcttctgggcacaggctctcctcacgttgcctgtggggaagctggaagacacagacaa

SEQ ID NO: 15945 - DNA, 80 bp, synthetic construct
  source 1..80: mol_type = other DNA
ggcacccgttcaagagggcacggtggacacctgttggacatctctgccagaacagaatcctttcccctcacgagggtcag

SEQ ID NO: 15946 - DNA, 80 bp, synthetic construct
  source 1..80: mol_type = other DNA
acagagtgtgcgtgtgcgggtgcaagcttacacctgcacatacgtctgttctagtaaaggtgtgtttttaatttgtatta

SEQ ID NO: 15947 - DNA, 80 bp, synthetic construct
  source 1..80: mol_type = other DNA
ttggtttcctttttaatcctatgtgttttattttgtctcaaaatatgtgcttctgagatgggcttcgctcaactggtaga

SEQ ID NO: 15948 - DNA, 80 bp, synthetic construct
  source 1..80: mol_type = other DNA
gttggtctcacatagccccagagtttggggaggctggacctggcttgattgtaagaccacagtcgctcatcccctagatg

SEQ ID NO: 15949 - DNA, 80 bp, synthetic construct
  source 1..80: mol_type = other DNA
ccttggaatcggagcctctggaacacagcatgcaaataatattctttgccatgtaaatttatgcaaagcattgtgtggaa

SEQ ID NO: 15950 - DNA, 80 bp, synthetic construct
  source 1..80: mol_type = other DNA
tacatggtcctaaaaatgactacacagaatacttttcttcccaaagtgatggatcccaaatcaacaagagataatgaggg

SEQ ID NO: 15951 - DNA, 80 bp, synthetic construct
  source 1..80: mol_type = other DNA
ccttgcaacaatcctaggaagacgggggttattagcctcgctttacagatgggaaatctgactgtaggagagatgaagtg

SEQ ID NO: 15952 - DNA, 80 bp, synthetic construct
  source 1..80: mol_type = other DNA
tgcccatcctggtttctggcagtggctgtgggtggttgtggaggctcaagccacaggttgggatggtgggggatgtaagt

SEQ ID NO: 15953 - DNA, 80 bp, synthetic construct
  source 1..80: mol_type = other DNA
ttgtcagcccctttacacatgcccaggtccatccacagggtatctagaatatgctgagtggcacttcgctgtcagccaag

SEQ ID NO: 15954 - DNA, 80 bp, synthetic construct
  source 1..80: mol_type = other DNA
cccagaaagtcccactattcctttcagtcaactgctctgatttctatcacctaggttggttttgcctgttctggaacttc

SEQ ID NO: 15955 - DNA, 80 bp, synthetic construct
  source 1..80: mol_type = other DNA
gatggctaatgtagcttgagtaccctgagaactgatttggtgcctgaagccagattacctctctctgctctgccaactct

SEQ ID NO: 15956 - DNA, 80 bp, synthetic construct
  source 1..80: mol_type = other DNA
tcattccatattgatcatcttaaaaagacacggtatgttctaggcccacggataggagagttgtgtctaaaaatagtctc

SEQ ID NO: 15957 - DNA, 80 bp, synthetic construct
  source 1..80: mol_type = other DNA
tccacaggctactcactggccctgctttttcctctctctgccttcttcatgtatttagccgcagggcttttactccagct

SEQ ID NO: 15958 - DNA, 80 bp, synthetic construct
  source 1..80: mol_type = other DNA
ctgcactctcgctgggcaatctaactcagtgccacatctccaatgaccaacctctgctgaaagctctaagtttccatttc

SEQ ID NO: 15959 - DNA, 80 bp, synthetic construct
  source 1..80: mol_type = other DNA
ccagtgtggaaggttatttttgttagaataagattcttgactattccggccaaaggtaaccacctctcctgtgaatgggc

SEQ ID NO: 15960 - DNA, 80 bp, synthetic construct
  source 1..80: mol_type = other DNA
ccatgctcctgcaacagcagcctgaccaccctcattccacctcgcactcattaccaccgattcatatgcacctgcccaat

SEQ ID NO: 15961 - DNA, 80 bp, synthetic construct
  source 1..80: mol_type = other DNA
tctggaaccacattcatggcgcgcctagtcgccgctctgaccttggggtctccggcctccggtatccgggtcccaatccc

SEQ ID NO: 15962 - DNA, 80 bp, synthetic construct
  source 1..80: mol_type = other DNA
tccttgggctctggagcttccagctgagctgtattagggtattaaaatgcttctctcttggatttagaattcacctgaaa

SEQ ID NO: 15963 - DNA, 80 bp, synthetic construct
  source 1..80: mol_type = other DNA
acatttaattttacaggatttaagaactctgcctaaagtcaaggtgatcaattagcttacccttaggaatctctgtcctc

SEQ ID NO: 15964 - DNA, 80 bp, synthetic construct
  source 1..80: mol_type = other DNA
cttcattgtggtgaatgaattctgcgagcgcttttcctattatggaatgaaaggtaattttgtgtccaagagtcctacct

SEQ ID NO: 15965 - DNA, 80 bp, synthetic construct
  source 1..80: mol_type = other DNA
gtttcacaggttgtgcagaaggctatcacttctagcctcttgcttctgagtaagaacatacctatgtcatgcgtgaaaaa

SEQ ID NO: 15966 - DNA, 80 bp, synthetic construct
  source 1..80: mol_type = other DNA
cgtggttatcccctgcccaattattttctatggacctgtcatccatagatttgtctaaatgagcatttctcaaagggcat

SEQ ID NO: 15967 - DNA, 80 bp, synthetic construct
  source 1..80: mol_type = other DNA
cttgccttcaaattctcccagagaaccagagtcttttccttcaactagaagcaggagcaaatctttaatagctttaaatg

SEQ ID NO: 15968 - DNA, 80 bp, synthetic construct
  source 1..80: mol_type = other DNA
tcctcaaattccagtgaattacatattggcattcacctccacaaatctgttctttcttctgtcttctctacattcccacc

SEQ ID NO: 15969 - DNA, 80 bp, synthetic construct
  source 1..80: mol_type = other DNA
agataggcccacagtaaatcttcgaattcataaatttattcaccctcagaccctcaaatgtagccacatgactgcagata

SEQ ID NO: 15970 - DNA, 80 bp, synthetic construct
  source 1..80: mol_type = other DNA
tgctatcccagaataatagatatgttaagaggaaatgggcatccagagtccctgactcttgtttaaggaactccctatgc

SEQ ID NO: 15971 - DNA, 80 bp, synthetic construct
  source 1..80: mol_type = other DNA
gtttttttcttgtaaatttgtttaagttctttgtagattctagatattagccctttgtcagatgggtagattgcaaaaat

SEQ ID NO: 15972 - DNA, 80 bp, synthetic construct
  source 1..80: mol_type = other DNA
atctataaattaccttgggcagtatggccattttcacgatattgactcttcctatccatgagcatggaatgttcttccat

SEQ ID NO: 15973 - DNA, 80 bp, synthetic construct
  source 1..80: mol_type = other DNA
tctagtttatttgcatagaggtgtttatagtattctctgatggtagtttgtattactgtggaatcggtggtgatatcccc

SEQ ID NO: 15974 - DNA, 80 bp, synthetic construct
  source 1..80: mol_type = other DNA
ctctatgtcttttaattggggcattcagcccatttacatttaaggttaatattgttatgtgttaatttgatccaatcatt

SEQ ID NO: 15975 - DNA, 80 bp, synthetic construct
  source 1..80: mol_type = other DNA
gtaatgggttcaaacattctcctttagcttgaagaagtttgttattaccaaccttctgaagcctacttctgtcagctcat

SEQ ID NO: 15976 - DNA, 80 bp, synthetic construct
  source 1..80: mol_type = other DNA
cacagtatttgggtgggagtgttgcgattttccaggtacagtctgtcacggcttcccttggctaggaaagggaaatcccc

SEQ ID NO: 15977 - DNA, 80 bp, synthetic construct
  source 1..80: mol_type = other DNA
ccaggagtttgagaccagcctggtcaacatagcaagaccccatctctacaataaaaaaaaagtcactgttcatttattta

SEQ ID NO: 15978 - DNA, 80 bp, synthetic construct
  source 1..80: mol_type = other DNA
tgatttagtccatcaattggataccgatcttactacccagactatatcactccagctcaaactcctttttttttcctcta

SEQ ID NO: 15979 - DNA, 80 bp, synthetic construct
  source 1..80: mol_type = other DNA
tgtttgggttagccattcctgtttacttggagttcttccttgacccttcttgctctctacagcagaagatattccttgag

SEQ ID NO: 15980 - DNA, 80 bp, synthetic construct
  source 1..80: mol_type = other DNA
ttatgaccagttgaactctttcctactttatctgagctcatctgtttttgggacttgtagaatgcctagttagtatcctc

SEQ ID NO: 15981 - DNA, 80 bp, synthetic construct
  source 1..80: mol_type = other DNA
ataaggggtaaatggaactaccagggatgaaatcttcccacataatgcatactttcttgcagaggccgaaggatcataaa

SEQ ID NO: 15982 - DNA, 80 bp, synthetic construct
  source 1..80: mol_type = other DNA
ctgtcaacatttctggcttcctcagttttgcttccagttttcagttttgtctgtcttcatgtatccattctctcttctat

SEQ ID NO: 15983 - DNA, 80 bp, synthetic construct
  source 1..80: mol_type = other DNA
agttgactccactgtcctatgttctggtactattcctaccacacactcctaccacaaaatctattatttaactaaatcag

SEQ ID NO: 15984 - DNA, 80 bp, synthetic construct
  source 1..80: mol_type = other DNA
aggtgatgggaggaaagagggtggttatgtctattctacaagctcaggtttattcaacaacctgagcttgtagaataaaa

SEQ ID NO: 15985 - DNA, 80 bp, synthetic construct
  source 1..80: mol_type = other DNA
gctcagtgtattttctaccagggagttgatgggagggcactgatagtagtactcagaattcccaatgccaaggaaattta

SEQ ID NO: 15986 - DNA, 80 bp, synthetic construct
  source 1..80: mol_type = other DNA
gagtttgagaccatcctggacaacacagcatgactccatctatacaaacatttaaaaattagccgagtatgatggcgcac

SEQ ID NO: 15987 - DNA, 80 bp, synthetic construct
  source 1..80: mol_type = other DNA
gttaaaaaaaaaagtggggtggggggataggttcaaacttcaagaaacgccaggatttaaaagacaggcaaagaggaaaa

SEQ ID NO: 15988 - DNA, 80 bp, synthetic construct
  source 1..80: mol_type = other DNA
gaaaaagtaccactagattggttaaaaggcatcatccaaaaggaaccaatggagagagaggataagacggagatagaagt

SEQ ID NO: 15989 - DNA, 80 bp, synthetic construct
  source 1..80: mol_type = other DNA
gtgtccagcctctttctaggatcattcttagtttcaggagcagtttattccctacccaaaattttcctttgtccaggtat

SEQ ID NO: 15990 - DNA, 80 bp, synthetic construct
  source 1..80: mol_type = other DNA
ccttacaattagctgtggatatgtggttaaaggacagagatatgggctgaaagaaacagaatgagctcaagaacagaaat

SEQ ID NO: 15991 - DNA, 80 bp, synthetic construct
  source 1..80: mol_type = other DNA
acctttgcaccaacctaataaatgagaagctaagaaccttgtttgtgtatcaactgcagttgtgtttgcaatgggaagca

SEQ ID NO: 15992 - DNA, 80 bp, synthetic construct
  source 1..80: mol_type = other DNA
attcctttatatcccattgcccatgttctgggctcttttggatcagcaggtaagaatagttcttttggacattaccgctc

SEQ ID NO: 15993 - DNA, 80 bp, synthetic construct
  source 1..80: mol_type = other DNA
aacaactttggaaacactatgtgtcagggagagtcttcaccctaaccatgatgtcttgcccttcatattattacaaccta

SEQ ID NO: 15994 - DNA, 80 bp, synthetic construct
  source 1..80: mol_type = other DNA
aagaaattgtaaggcttattttgtgagcaatgaagtcatgagaggaaagagctcacaataaggctggcagaaagacaggc

SEQ ID NO: 15995 - DNA, 80 bp, synthetic construct
  source 1..80: mol_type = other DNA
ggtaaaataagtgtcctaagaagggaagatcaagtgccaaggagaggtagaaaagaaaaagtccctcccctgccaaagcc

SEQ ID NO: 15996 - DNA, 80 bp, synthetic construct
  source 1..80: mol_type = other DNA
agaatgcttggcacccttcacctagatttcagaggctgtatgagaaagtgtgggtgttcatgcagaaaccggctgcaggg

SEQ ID NO: 15997 - DNA, 80 bp, synthetic construct
  source 1..80: mol_type = other DNA
aaagtttagatataattgtttctcctttccaccacagatcacttaggaaaatggctgttggtatgatcctagcatgcctg

SEQ ID NO: 15998 - DNA, 80 bp, synthetic construct
  source 1..80: mol_type = other DNA
ttgccattgtatctgaaggattatttgttggtgattctgacatgtgttctttgctctaaggaaatggccccagcccagcc

SEQ ID NO: 15999 - DNA, 80 bp, synthetic construct
  source 1..80: mol_type = other DNA
ttctcatgtgggattcgaagatgactctatctgtgtatgccccctgtactctggggcataaatcctttctgctgaatttt

SEQ ID NO: 16000 - DNA, 80 bp, synthetic construct
  source 1..80: mol_type = other DNA
cagtgtagaatgatctaaagtctaggaatcaacattcaggactctaaagggaaatgtccttcttattcctggggccagag

SEQ ID NO: 16001 - DNA, 80 bp, synthetic construct
  source 1..80: mol_type = other DNA
taagtgctatctttgtatataggtggggaacttaggtgcatgtggtctaattttgagtatagacgcactactgatctttt

SEQ ID NO: 16002 - DNA, 80 bp, synthetic construct
  source 1..80: mol_type = other DNA
gctctacagtgactttagaaagcccactgtctctgtaggggttgttaagagataacatcaacaacaagcaaagggtcttg

SEQ ID NO: 16003 - DNA, 80 bp, synthetic construct
  source 1..80: mol_type = other DNA
aagatagtgaataaaaaaaagagagaacatttctagaggtttgatgagaacccaatctacaaagttctatttattttact

SEQ ID NO: 16004 - DNA, 80 bp, synthetic construct
  source 1..80: mol_type = other DNA
ggcattatttctgagggctctgttctgttccattgatctatatctctgttttggtaccagtaacatgctgttttgattac

SEQ ID NO: 16005 - DNA, 80 bp, synthetic construct
  source 1..80: mol_type = other DNA
tttctgtttatatgctggattacatttattgattttcgtatattgaaccagccttgcatcccagggatgaagcccacttg

SEQ ID NO: 16006 - DNA, 80 bp, synthetic construct
  source 1..80: mol_type = other DNA
tgtgtctttgttctcgttggtttcaaagaacatctttatttctgccttcatttcgtgatgtacccagtagtcattcagga

SEQ ID NO: 16007 - DNA, 80 bp, synthetic construct
  source 1..80: mol_type = other DNA
tttagcacttccttcaggagctcttttagggcaggcctggtggtgacaaaatctctcagcatttgcttgcctgtaaagga

SEQ ID NO: 16008 - DNA, 80 bp, synthetic construct
  source 1..80: mol_type = other DNA
ttggttattttagttatacattcctctaaatttttttcaaagttttcaatttctttgcctttggtttgaatgtcctctca

SEQ ID NO: 16009 - DNA, 80 bp, synthetic construct
  source 1..80: mol_type = other DNA
ctcttttaaccctcctggccaaaagcagcaacactttaacccttgttgcaaaagaatctgttcttctaatcttgttcatt

SEQ ID NO: 16010 - DNA, 80 bp, synthetic construct
  source 1..80: mol_type = other DNA
gaagagctgcagagtcagacttcccgtgttcaaattttggctgcatgacctattgtgtaaccttgagcaagtaaattact

SEQ ID NO: 16011 - DNA, 80 bp, synthetic construct
  source 1..80: mol_type = other DNA
catctctctgcttcccacattccccattcagtgctgtgacatgaaatgggttagatatacagactttaccaggaaaatag

SEQ ID NO: 16012 - DNA, 80 bp, synthetic construct
  source 1..80: mol_type = other DNA
gagctggcctggtgtctccaaatgaccatgaaaatacacacgtataatggagatcattctctgtgggtatgcaaagttat

SEQ ID NO: 16013 - DNA, 80 bp, synthetic construct
  source 1..80: mol_type = other DNA
ctctaggtttgaggttctaaaatggaaatgtcaatagaggagcatggtcctatgtgaggttcctatcaaaatttgtggga

SEQ ID NO: 16014 - DNA, 80 bp, synthetic construct
  source 1..80: mol_type = other DNA
ctatttggggagaactttcatggctcttccctaatcatcaagtattcaaggtaaagattctcggttcctgtaatggttcc

SEQ ID NO: 16015 - DNA, 80 bp, synthetic construct
  source 1..80: mol_type = other DNA
atgtggacacacaaattggaaaagaggtataaatgcagtattataatctaatgggaccaccatcacatatttggtctgtc

SEQ ID NO: 16016 - DNA, 80 bp, synthetic construct
  source 1..80: mol_type = other DNA
tttttttgctcagggagagccgggcttccgaggacccccggtaagtcggtccctggctttctctgcactgagctcgggca

SEQ ID NO: 16017 - DNA, 80 bp, synthetic construct
  source 1..80: mol_type = other DNA
acggccgccgcacccactgtcctcccccaagaaccggccctgcctgagcgcagctcttgtcctggatgtggctggcagta

SEQ ID NO: 16018 - DNA, 80 bp, synthetic construct
  source 1..80: mol_type = other DNA
gcatacacaccaatacacatatatgcacacatgtgcacccatatacacacatacaacaggcccctgtggattctcagcag

SEQ ID NO: 16019 - DNA, 80 bp, synthetic construct
  source 1..80: mol_type = other DNA
aggctgctatgtggcctcatacaggggctggtgcttctgggcttggggacccctgagtggtggtggcctccatttcagaa

SEQ ID NO: 16020 - DNA, 80 bp, synthetic construct
  source 1..80: mol_type = other DNA
agccccacctccattgagggtggcagggctgcttggatgtcctgccaagaccactgagaacagctggataaaatgtgaga

SEQ ID NO: 16021 - DNA, 80 bp, synthetic construct
  source 1..80: mol_type = other DNA
gtgacgagatttctcaacaaaacgggagaagccagaagaccataaatggtttccaaaatatccaagaaagtcaattgcca

SEQ ID NO: 16022 - DNA, 80 bp, synthetic construct
  source 1..80: mol_type = other DNA
cacacagagtagatccaaaagaaggcaaaacatgagagaaaaaggaatgcagaacacgtgggatgaatagaaactaggga

SEQ ID NO: 16023 - DNA, 80 bp, synthetic construct
  source 1..80: mol_type = other DNA
tgtgtagtgtgggggtgtgttttggtgtgtgtgtgttgggtgtgtagtgtgggggtgtggtttggtgtgtgtgtgttggg

SEQ ID NO: 16024 - DNA, 80 bp, synthetic construct
  source 1..80: mol_type = other DNA
gccttgccctgcacaatccccggtctcccaggtggtggggcctccacagccggtcacctccctctgcagaaggaccccca

SEQ ID NO: 16025 - DNA, 80 bp, synthetic construct
  source 1..80: mol_type = other DNA
aaaaatccaaagttaattctttgcaaaggcgaacaacattcctgcacctctgccgggactgaggaaaaggagagaagcag

SEQ ID NO: 16026 - DNA, 80 bp, synthetic construct
  source 1..80: mol_type = other DNA
ggggttgtttgtggcacatatacaccatggaatactacgcagccataaaaaatgatgagttcatgtcctttgtagggaca

SEQ ID NO: 16027 - DNA, 80 bp, synthetic construct
  source 1..80: mol_type = other DNA
ccgagggcaggtccagcccggccttcgacacccgcgaaggccggagctgcccctgcaagctcagcagccccgacatgtcc

SEQ ID NO: 16028 - DNA, 80 bp, synthetic construct
  source 1..80: mol_type = other DNA
cacacctctgcatttggtcccagcaggtgaggctctgggctacacgccaggccatgctgggccaggtgcacgaggttccc

SEQ ID NO: 16029 - DNA, 80 bp, synthetic construct
  source 1..80: mol_type = other DNA
ggctcctcagacacacctgggattgccccttccaggacaggccagcccctttcctgctttcccaaaatggtctgggtggc

SEQ ID NO: 16030 - DNA, 80 bp, synthetic construct
  source 1..80: mol_type = other DNA
ctgtcccctgtttgaggaacaacacgtggtcctttggagtcctggagctgaacatgtggctcaccatcagcccctgctgc

SEQ ID NO: 16031 - DNA, 80 bp, synthetic construct
  source 1..80: mol_type = other DNA
ggatggatggtgggcagatggatggtggataggtagatgagtggatgaatgggtggatggatggtgggtaagtgggtgag

SEQ ID NO: 16032 - DNA, 80 bp, synthetic construct
  source 1..80: mol_type = other DNA
acaggtgatagggctcacatacaagcctggaatcaggaaccgtcctttgggcctctagtgccatgcgggctggtggcccc

SEQ ID NO: 16033 - DNA, 80 bp, synthetic construct
  source 1..80: mol_type = other DNA
cctatctgcagtttccccccgagtttttggacaaatcttatacatgctcattactttaaaattacaaaatccaaaagagc

SEQ ID NO: 16034 - DNA, 80 bp, synthetic construct
  source 1..80: mol_type = other DNA
gacctggctgccatactttcctgtatagttcacgtttcatgtaatcctcaagaaataaaaggaagccaaagagtgtattt

SEQ ID NO: 16035 - DNA, 80 bp, synthetic construct
  source 1..80: mol_type = other DNA
aggcaaataaaagtgaccttttacactgactcttggtttgcaagcagccttcactgtcacaggaaggacacaattctcca

SEQ ID NO: 16036 - DNA, 80 bp, synthetic construct
  source 1..80: mol_type = other DNA
gcagcccctccccagccagagattctctccccagctctccgtgctgagcagccagccattcacctggggccgctgagatg

SEQ ID NO: 16037 - DNA, 80 bp, synthetic construct
  source 1..80: mol_type = other DNA
atgcactgagggccgcctgcaaagttaccacaggggcgcccgagagtcactggttcacattctgaacaccgtcgcttgga

SEQ ID NO: 16038 - DNA, 80 bp, synthetic construct
  source 1..80: mol_type = other DNA
atgagggccagaacgtcccgcctggcagagcagggtgaggagagccacagcaggtgaccaggagctgatccccagggctt

SEQ ID NO: 16039 - DNA, 80 bp, synthetic construct
  source 1..80: mol_type = other DNA
atgcagaaaaaagagcccatggaagcagctctctctggcctaagacccagggaagggtcagcccaacatgaggaaagacc

SEQ ID NO: 16040 - DNA, 80 bp, synthetic construct
  source 1..80: mol_type = other DNA
caacatgatctaacatttgtgacatgggggatctagaaaaagaggagaaaaggagtggggttcaaaaagcatttcaggaa

SEQ ID NO: 16041 - DNA, 80 bp, synthetic construct
  source 1..80: mol_type = other DNA
agaggaaataccacagtaggcaacattatgggtaaataaaacagactttccttctttagtttcctaaaatatgtttgatg

SEQ ID NO: 16042 - DNA, 80 bp, synthetic construct
  source 1..80: mol_type = other DNA
ctagacagaaaatccacaagaactgagaggaaatcaataccatcagccaacaggatctgatcagcatttacagaacactc

SEQ ID NO: 16043 - DNA, 80 bp, synthetic construct
  source 1..80: mol_type = other DNA
ctccatctcaaaaaaaaaaaaaacaaacgaaaaaaagataccagggaggaccatacacagaaaaaaaagaccatatgaag

SEQ ID NO: 16044 - DNA, 80 bp, synthetic construct
  source 1..80: mol_type = other DNA
aacttgctgtaaagcttcataaccaagacagtgtgatattggtacaagagtaaacacatagttcaatggaacaggataaa

SEQ ID NO: 16045 - DNA, 80 bp, synthetic construct
  source 1..80: mol_type = other DNA
atgttcagagaacagtgttgagtgaaaagagccaatccctaaacgatacacaatgcatagccgtgtttatacaacactcc

SEQ ID NO: 16046 - DNA, 80 bp, synthetic construct
  source 1..80: mol_type = other DNA
tcctctagacccaacaggatgtccagccatgagcaaaatgccccactagttaactttttaacctagaaatcaaaccagcc

SEQ ID NO: 16047 - DNA, 80 bp, synthetic construct
  source 1..80: mol_type = other DNA
ggctcacccgccctgagtgttcacccctgggcctcggagactcacctgccctaagcgttcacccctgggccttggaggct

SEQ ID NO: 16048 - DNA, 80 bp, synthetic construct
  source 1..80: mol_type = other DNA
gcagaggcctgcgcactgacactgctgagtggctctgctcagctctccttcctgaagaggacaaaggtcacgtggcctcc

SEQ ID NO: 16049 - DNA, 80 bp, synthetic construct
  source 1..80: mol_type = other DNA
atatgcactgtacacacacagccagaaggtgattttatataatacctgacaaacatttgcaagccaaaggggttgcctgc

SEQ ID NO: 16050 - DNA, 80 bp, synthetic construct
  source 1..80: mol_type = other DNA
aatgaaagtctttcacggttaaatgtttgataaattagaagagcagtgaaaccacagagtcggtgaatgagcagcagcca

SEQ ID NO: 16051 - DNA, 80 bp, synthetic construct
  source 1..80: mol_type = other DNA
aatgtcctaaagttcacctgaagaaaaaataaacaaaaatgcccaggaaccctttggagaagggcagaggtgtctgtgct

SEQ ID NO: 16052 - DNA, 80 bp, synthetic construct
  source 1..80: mol_type = other DNA
gttttctgctttgcacgctgcggcaccgtgttggatttttttgcgatgggcatcaatgactttataactaaaacctttca

SEQ ID NO: 16053 - DNA, 80 bp, synthetic construct
  source 1..80: mol_type = other DNA
tccatgtgtaagtatgtgatgcattcatgtgagtgtagtgggtgtccatctgtgagcatgtggtgtgtgttcgtgtgtgg

SEQ ID NO: 16054 - DNA, 80 bp, synthetic construct
  source 1..80: mol_type = other DNA
cctgcccgcccccggcttcccacccttctggaactcacgtggcgatgggcacgaggaactggtaggagccgcggaacagc

SEQ ID NO: 16055 - DNA, 80 bp, synthetic construct
  source 1..80: mol_type = other DNA
tagcgcgcgggccgcacgagagagaagatgtaggaggaataggcgatgcgcgcggccatggtgacgctgtagaagagctc

SEQ ID NO: 16056 - DNA, 80 bp, synthetic construct
  source 1..80: mol_type = other DNA
atttcattttaaacaatatggaaaacacagctgtaacccatacacattcacaccagcacaagcttcttccatccttcctg

SEQ ID NO: 16057 - DNA, 80 bp, synthetic construct
  source 1..80: mol_type = other DNA
acccctgtgaggccaagccgcttgccttgcccctccctggggactgatgtgggagccaccctatgcttggagcctcccct

SEQ ID NO: 16058 - DNA, 80 bp, synthetic construct
  source 1..80: mol_type = other DNA
ctggccggggcacaggttctgcccacagcccagagtcaaaatggtagacagccagcagagaggctctccccagaccccac

SEQ ID NO: 16059 - DNA, 80 bp, synthetic construct
  source 1..80: mol_type = other DNA
ctcagctgacactcaaagcagaaaccctggagggaaatttggccaaattcaaaatgactccagagaaacaccgtatgtaa

SEQ ID NO: 16060 - DNA, 80 bp, synthetic construct
  source 1..80: mol_type = other DNA
gcagatgggatttaaacatttttgctctagagacttttcttattttgttattttaagggaaacgccacacataatgctca

SEQ ID NO: 16061 - DNA, 80 bp, synthetic construct
  source 1..80: mol_type = other DNA
gggtggggcaggctctctctctgcaggacacaatatcactttttatctagcctggttactaggccgaagccaggcccctc

SEQ ID NO: 16062 - DNA, 80 bp, synthetic construct
  source 1..80: mol_type = other DNA
gcagaccccagacccatcctcaccccgtagcaccaaactgggagccacccacacctgagctgctccggagtcccccaggc

SEQ ID NO: 16063 - DNA, 80 bp, synthetic construct
  source 1..80: mol_type = other DNA
ccctggttttccattaaggcctcggtgtaaagttctccttcaagtaagtcaaaagtgaactgccataaacaagtgtgtca

SEQ ID NO: 16064 - DNA, 80 bp, synthetic construct
  source 1..80: mol_type = other DNA
ggccctgggactccctgtcaagttcactttcccacctgtcagcaggtttagacaggcgcaccgatccccagacaaccaga

SEQ ID NO: 16065 - DNA, 80 bp, synthetic construct
  source 1..80: mol_type = other DNA
cgccacctatcattccgtgtttaaaccagctcctactctggaaggctaaccaagaatgttcgttatgttttttagaacgc

SEQ ID NO: 16066 - DNA, 80 bp, synthetic construct
  source 1..80: mol_type = other DNA
caggctgggggccgggactccccaccccattcgcaggctgcggcggaaagcgagcggcgggaaacccgctgcacagcaac

SEQ ID NO: 16067 - DNA, 80 bp, synthetic construct
  source 1..80: mol_type = other DNA
accccccctcctcgacgaggccttgtgcgttttccttttggcaccctggaacacctgcattcctggccgcaagctggatc

SEQ ID NO: 16068 - DNA, 80 bp, synthetic construct
  source 1..80: mol_type = other DNA
cttaaaaaggatttgttggctggaaatgggggatctggggtagcttgcagaatttaagggaacactacaggatggagcgc

SEQ ID NO: 16069 - DNA, 80 bp, synthetic construct
  source 1..80: mol_type = other DNA
ccacccactgccttctgagaccaaccggccagtcctctgccttggctggagagacgcagggctgtccctgtggttaaggt

SEQ ID NO: 16070 - DNA, 80 bp, synthetic construct
  source 1..80: mol_type = other DNA
accaccaagacatatgcacagatacagagacgtaaacatacagacatacacatgacacagagatacagagacatacacat

SEQ ID NO: 16071 - DNA, 80 bp, synthetic construct
  source 1..80: mol_type = other DNA
aaatcatgcttaaatagcccatctttactagggaaagggggaggtttgaacctctttggaatcacaggcagctgtttaga

SEQ ID NO: 16072 - DNA, 80 bp, synthetic construct
  source 1..80: mol_type = other DNA
cgtcaacacagaccttaagtctgataagaatcatttagaatctagtctttgaagcctgcgacccagagacttcatctgct

SEQ ID NO: 16073 - DNA, 80 bp, synthetic construct
  source 1..80: mol_type = other DNA
tatctgatacaggacttgtatccagacacgtaagtgacgcttacaactgagtaataagaaaatagcccacttcttaaaac

SEQ ID NO: 16074 - DNA, 80 bp, synthetic construct
  source 1..80: mol_type = other DNA
gctcggggtcagtggaattgttctgtgtctgatgggggtagaggttaatggttgtgttcatctgtcagacatgtttaaca

SEQ ID NO: 16075 - DNA, 80 bp, synthetic construct
  source 1..80: mol_type = other DNA
ggaaagggctggttctccagctggaatttccttgactacacggtcttattagatccagaatggaactgcatgaaataaac

SEQ ID NO: 16076 - DNA, 80 bp, synthetic construct
  source 1..80: mol_type = other DNA
acagtcccagctacgcctgggttggttgcactctctgttcctcttattttctttcaaggaactaccttttggatctaaaa

SEQ ID NO: 16077 - DNA, 80 bp, synthetic construct
  source 1..80: mol_type = other DNA
ggctgtttcaggtgcgttcctcagagcatggggtggaatttgcttttctacaaaaggtgtctgcccgagtgtctgaccca

SEQ ID NO: 16078 - DNA, 80 bp, synthetic construct
  source 1..80: mol_type = other DNA
atgtgctcacttttacacaagacctcgcgcaatggaagctcttcctcctggcaaatcgcagggggcagattccactaaaa

SEQ ID NO: 16079 - DNA, 80 bp, synthetic construct
  source 1..80: mol_type = other DNA
ccacaccccctcccagtcccccacaccccctcccagtcctccacgccccatcccagtcccccgagcccccctcccagtcc

SEQ ID NO: 16080 - DNA, 80 bp, synthetic construct
  source 1..80: mol_type = other DNA
cacgggacagacgatcctctgaggtttccaggaagacccccgccctaatcctctgaaggtcggaggtcacaggtcaaagc

SEQ ID NO: 16081 - DNA, 80 bp, synthetic construct
  source 1..80: mol_type = other DNA
ggaggctgggccctggggctgctgaagccctggcagcaggaagggatttgagatagagaacccgaggccagagcactggg

SEQ ID NO: 16082 - DNA, 80 bp, synthetic construct
  source 1..80: mol_type = other DNA
agtggcgtggggagtgatagtgtgatgctcacctttgcctcctgcgtgtctgacggaatcattcctgtttagacatgagc

SEQ ID NO: 16083 - DNA, 80 bp, synthetic construct
  source 1..80: mol_type = other DNA
gaacaaggtggagctgtgttccaatttctcagcacacagggaaacacatttcagttaaattgaattttctttttcttttt

SEQ ID NO: 16084 - DNA, 80 bp, synthetic construct
  source 1..80: mol_type = other DNA
atggagtttgctgtcaaaatggcccccagtgtgacaagcagatttatttttactgtgacatccatttctgatgatgatgg

SEQ ID NO: 16085 - DNA, 80 bp, synthetic construct
  source 1..80: mol_type = other DNA
gcaccatggtaggaagcgaaatcagagtccaaacaaagagacacacactcctccagaacaggagggaagagacaacacca

SEQ ID NO: 16086 - DNA, 80 bp, synthetic construct
  source 1..80: mol_type = other DNA
aaataaataataaataattaaaaaattaaataaaaagtgaaggtgggaacctgcacagcaaagaaagataagacttccag

SEQ ID NO: 16087 - DNA, 80 bp, synthetic construct
  source 1..80: mol_type = other DNA
ccatgaaacaactgaaaaaaacaggcaaatatgtgaagcaaaatgttttcagagcctggtctccggcagcgtggtgcagt

SEQ ID NO: 16088 - DNA, 80 bp, synthetic construct
  source 1..80: mol_type = other DNA
tagacattgaagaagaacagatgcgtgaacctgaagacacagcaacagcaatagagactgtacaaaataaaacacacaga

SEQ ID NO: 16089 - DNA, 80 bp, synthetic construct
  source 1..80: mol_type = other DNA
tttttaggaatccaaagactgaaagatttcatcaacagtagacaaatgtcatatgacatgttaaaggcagtcgtcggaca

SEQ ID NO: 16090 - DNA, 80 bp, synthetic construct
  source 1..80: mol_type = other DNA
aataagccaacaaagaagataaatggaattaaaaacacaatgcaaaagaaggcagaaaaaagaaaaaataacagatggaa

SEQ ID NO: 16091 - DNA, 80 bp, synthetic construct
  source 1..80: mol_type = other DNA
taacccaccagtcaaagaaacgacgaacaaggaaattagaaagtattttaaactggttgaagatgaaaacacaatttgag

SEQ ID NO: 16092 - DNA, 80 bp, synthetic construct
  source 1..80: mol_type = other DNA
ctggagaaggcaaaaccattgtgctagtaaaaagatcagtggtaaagagtttgtgggaagggctggaggactgaatagct

SEQ ID NO: 16093 - DNA, 80 bp, synthetic construct
  source 1..80: mol_type = other DNA
acatgtatactgaaaattgaacaattaaatacatggatagcagatggtaggagccaggtttctcactattaggaggttac

SEQ ID NO: 16094 - DNA, 80 bp, synthetic construct
  source 1..80: mol_type = other DNA
ttgtctgaagatggtgggttacctcaatggtcttctttcaaaaccccatattcccagtttaatcatgagaaaacctcaga

SEQ ID NO: 16095 - DNA, 80 bp, synthetic construct
  source 1..80: mol_type = other DNA
acagagactccatctcaaaagaaaaaaaaaaggatttaaaaataaataaaaggaaaaactacactagaaaaaataataaa

SEQ ID NO: 16096 - DNA, 80 bp, synthetic construct
  source 1..80: mol_type = other DNA
aagtgtgtgggttttttctggagtttaaaatgattaattctccagtctataaacacagaccgtccacagtggcacattcc

SEQ ID NO: 16097 - DNA, 80 bp, synthetic construct
  source 1..80: mol_type = other DNA
cggactctgattcggtgtttctacaaagtacacgaaaaagagaccgtttattttctatcgtgtgaaagaaagaagcaact

SEQ ID NO: 16098 - DNA, 80 bp, synthetic construct
  source 1..80: mol_type = other DNA
ctctcctctggactttctagttatgagtcaatattaatcaacaaattcatgtttaagctggtttgagttgggcattcttg

SEQ ID NO: 16099 - DNA, 80 bp, synthetic construct
  source 1..80: mol_type = other DNA
atcgtcactgaggtaaaaaagcctctgtaacatgggagttcctgggacagggagaaatataaagcaaatcctatgaagtt

SEQ ID NO: 16100 - DNA, 80 bp, synthetic construct
  source 1..80: mol_type = other DNA
gctgtgccccttattagctgagcatcactgggtaagtcactgcctctctaagcctcatttcctcatcagtcaaccaggga

SEQ ID NO: 16101 - DNA, 80 bp, synthetic construct
  source 1..80: mol_type = other DNA
gaggtccctcaaggagtctgcagtcttgtggggactgagaggggaagaggatggcaagaatgagaccagtgttcgtttaa

SEQ ID NO: 16102 - DNA, 80 bp, synthetic construct
  source 1..80: mol_type = other DNA
tagagccctggggaggattgtgggaatcctggaactctgatgggcagagatggtgaagaggatatggtttgtattgtacc

SEQ ID NO: 16103 - DNA, 80 bp, synthetic construct
  source 1..80: mol_type = other DNA
attttcctggcttttgactctcccaacaagaggatctcctctggtgctaagatcacgaggtccactcgggggggatgtgg

SEQ ID NO: 16104 - DNA, 80 bp, synthetic construct; identical to SEQ ID NO: 16103
  source 1..80: mol_type = other DNA

SEQ ID NO: 16105 - DNA, 80 bp, synthetic construct
  source 1..80: mol_type = other DNA
cagggtactcatggttgggctggtgtttgggagcagaggaagcatggcaggtttacaagctttgcaggtggctctagaaa

SEQ ID NO: 16106 - DNA, 80 bp, synthetic construct
  source 1..80: mol_type = other DNA
catgtctgactaattttttaatattttgtagagatgaggcctcactctgttgccccagcctggtctcaagctcctgggct

SEQ ID NO: 16107 - DNA, 80 bp, synthetic construct
  source 1..80: mol_type = other DNA
agaggcagaaaaggtggaagaggtagaagaagagacaggcacactcggtgtaaattttattgaaaaaaaaaaatctgtaa

SEQ ID NO: 16108 - DNA, 80 bp, synthetic construct
  source 1..80: mol_type = other DNA
ttaaggctgtacagcatatcaggatgtgctggaagagggtgtcgagagagaactgcaatgcagaaaggtaggcagggaaa

SEQ ID NO: 16109 - DNA, 80 bp, synthetic construct
  source 1..80: mol_type = other DNA
tggagaacatggggtgtggtcaaaaaattgggtgggaacagtgcaatcccagcgagtaatttgcccatttcattcccgga

SEQ ID NO: 16110 - DNA, 80 bp, synthetic construct
  source 1..80: mol_type = other DNA
tatttatgtgactagggcaggacatgggctagaatggcctcctctctttttgtgtctgagacacttaaattatcacttag

SEQ ID NO: 16111 - DNA, 80 bp, synthetic construct
  source 1..80: mol_type = other DNA
gtaccaggtccccaggaggcactcaaagatatttgctaaatgaatgaacacccctggggtcctgacaaatattccagctg

SEQ ID NO: 16112 - DNA, 80 bp, synthetic construct
  source 1..80: mol_type = other DNA
ggctgcgctttctgtcctctcgagggaccagtctcttggagtggggggcgcctacaggccgtcttccaaaggccatggtg

SEQ ID NO: 16113 - DNA, 80 bp, synthetic construct
  source 1..80: mol_type = other DNA
ctctggggactgtgtaccctgagccattatgacacagaatcagtccaaacaaggtgttaatcatattagctgtgagtgct

SEQ ID NO: 16114 - DNA, 80 bp, synthetic construct
  source 1..80: mol_type = other DNA
tacataggaagcgatggctcccttttggtctataaatcttaggtgacactaggagtctgagtgacccacagagctgtgac

SEQ ID NO: 16115 - DNA, 80 bp, synthetic construct
  source 1..80: mol_type = other DNA
gggattgaataataaggaaaaggcttcattttagtgaggagcatttgttacctttgggagatcaccagtgggatgagaga

SEQ ID NO: 16116 - DNA, 80 bp, synthetic construct
  source 1..80: mol_type = other DNA
aggcaaaggcatcccttagagctcaacagaccttgtctctccctgtttaccctctgctggcttcctaatcactgagaata

SEQ ID NO: 16117 - DNA, 80 bp, synthetic construct
  source 1..80: mol_type = other DNA
tttcatctcagttttggagctgataggcaatctgcatgctgggatgagacagtaatttcttattgacccaaatctgttct

SEQ ID NO: 16118 - DNA, 80 bp, synthetic construct
  source 1..80: mol_type = other DNA
tttatctcacctggtaagttggtaagttgtctgctttcatcatttcccaggcaatcgaagtgtggggaaagtgttgtgac

SEQ ID NO: 16119 - DNA, 80 bp, synthetic construct
  source 1..80: mol_type = other DNA
cacagattgtgcctgttcttgagcttcatatagatggcaccataccaaatatactgtttttgttattgttgttgtgtttt

SEQ ID NO: 16120 - DNA, 80 bp, synthetic construct
  source 1..80: mol_type = other DNA
gctgatttagtgagtcattttggcaggctttcgtgcagggtattgtagagactgttctgtgaaatctgtatgcccaagaa

SEQ ID NO: 16121 - DNA, 80 bp, synthetic construct
  source 1..80: mol_type = other DNA
cgggtgaggggcactctcatttggaccctcacactggctgagtgagatgatacaagatttccataaatagccagtatctg

SEQ ID NO: 16122 - DNA, 80 bp, synthetic construct
  source 1..80: mol_type = other DNA
ttccagacctgcactggttaaacatcataatcatgtgtgttggccgaatgggaatcaccattgcaatacaaatgatctgc

SEQ ID NO: 16123 - DNA, 80 bp, synthetic construct
  source 1..80: mol_type = other DNA
ggaccacatcttcctgacctggaaccctgtggtttttccattatggcacattactgttctgtaaactgaggaacttttca

SEQ ID NO: 16124 - DNA, 80 bp, synthetic construct
  source 1..80: mol_type = other DNA
aggtacaattgacagagtaaaattcactgcttctaacatgcagttagattagtttgacgacacacacacacacatacact

SEQ ID NO: 16125 - DNA, 80 bp, synthetic construct
  source 1..80: mol_type = other DNA
gtgtgagccaccacacctggtctggtgtcagctttctaaaagtcattttggtaggtaatggtattattgtgacttgactt

SEQ ID NO: 16126 - DNA, 80 bp, synthetic construct
  source 1..80: mol_type = other DNA
gggaagctagatgttcagaaaaaactctcaacttcttatgtacacacgcgcacacacacaaggtaaggcagtcattcaag

SEQ ID NO: 16127 - DNA, 80 bp, synthetic construct
  source 1..80: mol_type = other DNA
atggcctggctgcttccccacaaacccttctagaaatggctgatagaggaagaaataacagtatgaaaagatgagtaata

SEQ ID NO: 16128 - DNA, 80 bp, synthetic construct
  source 1..80: mol_type = other DNA
cacacacatacgcaataaatatacttcgggaatacatctgaaaataaaagaatgcttgaatctataaattaaagggacac

SEQ ID NO: 16129 - DNA, 80 bp, synthetic construct
  source 1..80: mol_type = other DNA
ctacaaaacaatataatatcacaaatctgaaaataaagaaatgttataactcacaaagactgaaaagagaaaagagaaag

SEQ ID NO: 16130 - DNA, 80 bp, synthetic construct
  source 1..80: mol_type = other DNA
ggaaactacagacatatatttatgaatatggatctagaaatcctaaacaatatattatcaaacagtggagaacattaaaa

SEQ ID NO: 16131 - DNA, 80 bp, synthetic construct
  source 1..80: mol_type = other DNA
atcaaaaaggaaagacagagagaatcagtgagctgtgatacaattcaatgaatgtaattggagtctgtagaagtgagtag

SEQ ID NO: 16132 - DNA, 80 bp, synthetic construct
  source 1..80: mol_type = other DNA
aaaagacaatgaactgtttaaagcaggcattggcaaacttttccagtacagagctggatagctaatgttttaggctttgt

SEQ ID NO: 16133 - DNA, 80 bp, synthetic construct
  source 1..80: mol_type = other DNA
ttctctacatgtttccccactaactttctttcttcgattcctcaataccttctatctacccttccctatgtttccatgca

SEQ ID NO: 16134 - DNA, 80 bp, synthetic construct
  source 1..80: mol_type = other DNA
gtattatacacctaagagctaaatatttgaatgtgtagttaaaaagaggtaggctctctgccattgcatgggcaacggat

SEQ ID NO: 16135 - DNA, 80 bp, synthetic construct
  source 1..80: mol_type = other DNA
tctctccaaacctaggccagagaacttccaagaccctgcttacccacttgatagaagacaacagttgctggttgtttgca

SEQ ID NO: 16136 - DNA, 80 bp, synthetic construct
  source 1..80: mol_type = other DNA
accccaagagttaatgactctgagtggggaacattttaaaatcaatcttctgtcctctgagcaattgttgtctcagattc

SEQ ID NO: 16137 - DNA, 80 bp, synthetic construct
  source 1..80: mol_type = other DNA
gatgatttccttctttttgatcccaagtgttgtgttatctgatttaaagatatttcattctagtgtgttaacagccactt

SEQ ID NO: 16138 - DNA, 80 bp, synthetic construct
  source 1..80: mol_type = other DNA
ccctgcattggaaaagcagctatagacaatgcatgaaggaatggttgtgtctggataccagtaaaatgctatttatggat

SEQ ID NO: 16139 - DNA, 80 bp, synthetic construct
  source 1..80: mol_type = other DNA
ttccagttggcaaaagctgggaaggaagaaatgatgaatcttgtccaggacttgttgagtttgagcaaagatgtccaatg

SEQ ID NO: 16140 - DNA, 80 bp, synthetic construct
  source 1..80: mol_type = other DNA
gagtagttttataaaacatttttttgttgttgttgtcgttgttatagagacagagtctccctatgttgtgcaggctggtc

SEQ ID NO: 16141 - DNA, 80 bp, synthetic construct
  source 1..80: mol_type = other DNA
gccaaatctttcagaggctcaatccaaattgaagatgatacatttggaattgagaatgtagacctgctttgccccaatgg

SEQ ID NO: 16142 - DNA, 80 bp, synthetic construct
  source 1..80: mol_type = other DNA
gctgaccactgaggaggtcaaaatggtcaccatcgttgtcaaattggaaaacagtaatcagatgtatgcacttaaaacaa

SEQ ID NO: 16143 - DNA, 80 bp, synthetic construct
  source 1..80: mol_type = other DNA
tgagacctagcctgccacaaaaggaagaggtatctatgacctaaaccaagggcatgaagaaaattgtctggagatttggg

SEQ ID NO: 16144 - DNA, 80 bp, synthetic construct
  source 1..80: mol_type = other DNA
tagagaacaacaaaggcacgatctcttgccttcattgaatttatattctagttgggggagacagactaaagacattaaga

SEQ ID NO: 16145 - DNA, 80 bp, synthetic construct
  source 1..80: mol_type = other DNA
tgtgtgactgtggcagtgaccttgtccatgggtcttctacaaaatcatatttatgtgtcattgagaaaaccatctcatct

SEQ ID NO: 16146 - DNA, 80 bp, synthetic construct
  source 1..80: mol_type = other DNA
gcctggagcaccacctaaacattggagtattccatcaatactctccaacttacatgacaatattctggtagaattattta

SEQ ID NO: 16147 - DNA, 80 bp, synthetic construct
  source 1..80: mol_type = other DNA
cctcagaaaatgattgcaagtaaaaatgtaaagtaactgccctaaagacagttcagtgtttccctccatccccctctctc

SEQ ID NO: 16148 - DNA, 80 bp, synthetic construct
  source 1..80: mol_type = other DNA
aaacattcagaccatagcacctcctaacaagccatggctaaaagaaaaaagctacctaccctcttggctgtgagaacaca

SEQ ID NO: 16149 - DNA, 80 bp, synthetic construct
  source 1..80: mol_type = other DNA
cccagagtagtcaaattcatagagacagggtagaatggtggttgccaggggttggggaaggggagaatggagagctattg

SEQ ID NO: 16150 - DNA, 80 bp, synthetic construct
  source 1..80: mol_type = other DNA
tttggggactgactctgctgtgtttcttctaggcttctaaagacttaactaaatagaagatggccattaatgtccttcct

SEQ ID NO: 16151 - DNA, 80 bp, synthetic construct
  source 1..80: mol_type = other DNA
cttttttgtagtttctgaggttagcagaaagcttggtatgttgtttaatcttactgatatagttaggttgcaacatatgc

SEQ ID NO: 16152 - DNA, 80 bp, synthetic construct
  source 1..80: mol_type = other DNA
tctttaagaatgttgaatattggcccccagtctcttctggcctgtagagtttctgccaagagatcagctgttagtctgat

SEQ ID NO: 16153 - DNA, 80 bp, synthetic construct
  source 1..80: mol_type = other DNA
aaagcaggaaagatctaaaattgacactctaacatcacaattaaaagaactagagaaccaagagcaaacacattcaaaag

SEQ ID NO: 16154 - DNA, 80 bp, synthetic construct
  source 1..80: mol_type = other DNA
ggcaaaccgaatccagcagcacatcaaaaagcttatccaccatgatcaagtgggcttcgtccctgggatgcaaggctggt

SEQ ID NO: 16155 - DNA, 80 bp, synthetic construct
  source 1..80: mol_type = other DNA
gcatcacactacctgacttcaaactatactacaaggctacagtaaccaaaacagcatggcactggtaccaaaacagaggt

SEQ ID NO: 16156 - DNA, 80 bp, synthetic construct
  source 1..80: mol_type = other DNA
taaagacacatgcacacgtatgtttattgcggcactacacacaacagcaaagacttggaaccaacccaaatgtccaacag

SEQ ID NO: 16157 - DNA, 80 bp, synthetic construct
  source 1..80: mol_type = other DNA
tgagtggttaaatgcttcaccacaagaaaacatcagctagatggctttgaaggcaagccccactaaactttcaggcagca

SEQ ID NO: 16158 - DNA, 80 bp, synthetic construct
  source 1..80: mol_type = other DNA
aatcactcaggaatggactatctgagtctccctgcaagctcagtcatcatctgggagcagcccaagggaagcaaggcctt

SEQ ID NO: 16159 - DNA, 80 bp, synthetic construct
  source 1..80: mol_type = other DNA
caggtattgacagaatcatgttgatgtagggattgaaagccaaaacaggaaagagagctcaaaaacagatgacatctatt

SEQ ID NO: 16160 - DNA, 80 bp, synthetic construct
  source 1..80: mol_type = other DNA
ttccaaatgtggggaaaggaaagcagaagatcccaaccagcccccattgccattgcaaacactaacagcttttactacag

SEQ ID NO: 16161 - DNA, 80 bp, synthetic construct
  source 1..80: mol_type = other DNA
gcaaagttaaactgccaacacaaatggtcatagcctaggccactgagacactcataaacatcactggtgtggattatagc

SEQ ID NO: 16162 - DNA, 80 bp, synthetic construct
  source 1..80: mol_type = other DNA
cagattcaacccaaacaggtcctctccaaggaacactatattcaaattggtaaaatgtagagacatagaaagaattctaa

SEQ ID NO: 16163 - DNA, 80 bp, synthetic construct
  source 1..80: mol_type = other DNA
tattagatcaaaagggagacataaaactcaatacaataatagctgacaacttcagcacttcactgtcagcattggacaga

SEQ ID NO: 16164 - DNA, 80 bp, synthetic construct
  source 1..80: mol_type = other DNA
gagagaaaacccaactaaataaaattagaaacaagaaaggggaatacaaaagatcattagagactactatgaacaactac

SEQ ID NO: 16165 - DNA, 80 bp, synthetic construct
  source 1..80: mol_type = other DNA
tttttcacctttatttccacaggtgttgatacaaccctttcaacatagtactggaagtcctagccagagcaattggtcaa

SEQ ID NO: 16166 - DNA, 80 bp, synthetic construct
  source 1..80: mol_type = other DNA
tatgtttaatgaagacagcacggtactggcataaaaacagacacaaaggccaatggaacagaatagaggatccagaaatt

SEQ ID NO: 16167 - DNA, 80 bp, synthetic construct
  source 1..80: mol_type = other DNA
tcagcaatcccacaactggtcatttatccaaaggataggaaattggtgtatcagagacatctgcaaccaccaccctcccc

SEQ ID NO: 16168 - DNA, 80 bp, synthetic construct
  source 1..80: mol_type = other DNA
caaaacacttaggcaagcatttcacagaaaagagaatacaaatggcaaatatgcccgtgaaaagatgcttaacctcctta

SEQ ID NO: 16169 - DNA, 80 bp, synthetic construct
  source 1..80: mol_type = other DNA
tatttagccagcagaaggggaagaaccactgacatatacaacaacatacatgacaaatctcacaataattatgctgagcg

SEQ ID NO: 16170 - DNA, 80 bp, synthetic construct
  source 1..80: mol_type = other DNA
cttgaacctatttttatgttttctgattatttttggtaccaaagttactgtatcgtgctctgcgatactggtgatctcag

SEQ ID NO: 16171 - DNA, 80 bp, synthetic construct
  source 1..80: mol_type = other DNA
cttgcttatcttgttgcggtgcctagtgcaatgctggggttactattccaacatccaggattattgaatagaaaagacca

SEQ ID NO: 16172 - DNA, 80 bp, synthetic construct
  source 1..80: mol_type = other DNA
gactagtccttgtggaaggagtgacgttgtgtgctctgtgactgaggaaaagcattaatggcacaagatttattatattc

SEQ ID NO: 16173 - DNA, 80 bp, synthetic construct
  source 1..80: mol_type = other DNA
gtttttgataaatgggcattggatccgagggattctcctgagctagtcatgagtagtctgttgaccttccatttgtaagt

SEQ ID NO: 16174 - DNA, 80 bp, synthetic construct
  source 1..80: mol_type = other DNA
tattttgaaataattatgggtttataggaagttgcagagatagtacagagggctcctggttatccttcacctagtctcct

SEQ ID NO: 16175 - DNA, 80 bp, synthetic construct
  source 1..80: mol_type = other DNA
tgaaagcataaaaatgcaagaacttcaggaaaatctaaaatgtctccttgcccactgcccagtcccagatgccctcttca

SEQ ID NO: 16176 - DNA, 80 bp, synthetic construct
  source 1..80: mol_type = other DNA
gtgtagccaaatggatcaatcttttgctttaagtctcctggattttgttcttacctgagaagctcttcctcattataaat

SEQ ID NO: 16177 - DNA, 80 bp, synthetic construct
  source 1..80: mol_type = other DNA
tgttcaagcaagggaagttcgtttttctcaaaaggaaaagaaaggttgcatcttttggcaaaagagattcagggggtttg

SEQ ID NO: 16178 - DNA, 80 bp, synthetic construct
  source 1..80: mol_type = other DNA
tgcaggctcaacaccaaatggaagctgccaaggattgggacttgcaccctctgaagccacacgctgagctgtatcttggc

SEQ ID NO: 16179 - DNA, 80 bp, synthetic construct
  source 1..80: mol_type = other DNA
tatattgtgacttactttccaacctgactttggcataacattacaagacaaggaataaaatacaaatattttaccccaaa

SEQ ID NO: 16180 - DNA, 80 bp, synthetic construct
  source 1..80: mol_type = other DNA
gcatctgttgtttcctgactttttaatgattgccattctaacttgtgtgagatggtatctcattgtggttttgatttgca

SEQ ID NO: 16181 - DNA, 80 bp, synthetic construct
  source 1..80: mol_type = other DNA
ctatccatgagcatggaatgttcttccattgtttgtgtcctcttttatttccttgagccgtggtttgtatctctccttga

SEQ ID NO: 16182 - DNA, 80 bp, synthetic construct
  source 1..80: mol_type = other DNA
gatgaagccaacttgatcgtgctgggtaagctttttgatgtgctgctggattcggttttccagtattttattgaggattt

SEQ ID NO: 16183 - DNA, 80 bp, synthetic construct
  source 1..80: mol_type = other DNA
aagtcctggatatccttgttaaccttctgtctcgtttatctgtctaatattgacagtggggtgttaaagtctcccattat

SEQ ID NO: 16184 - DNA, 80 bp, synthetic construct
  source 1..80: mol_type = other DNA
cgaggagtatctttgtggtgttctctgtatttcctgaatttgaatgttggcctgtcttgctaggtttgggaagttctcct

SEQ ID NO: 16185 - DNA, 80 bp, synthetic construct
  source 1..80: mol_type = other DNA
agttaggctacatgggggtcatggacccacttgagaaggcagtctgtccattctcagagctcaaaaactgtgctgggaga

SEQ ID NO: 16186 - DNA, 80 bp, synthetic construct
  source 1..80: mol_type = other DNA
acctgaacattccctttctatcaattccagatctttagacaaacccaaccaattgtcaaccagaaaatgtttaacttcac

SEQ ID NO: 16187 - DNA, 80 bp, synthetic construct
  source 1..80: mol_type = other DNA
gagtgcaggaggacaggcatacctgctttctcaggaagctattggaaattatgcttctttaaaatgtgacaaaaatcaag

SEQ ID NO: 16188 - DNA, 80 bp, synthetic construct
  source 1..80: mol_type = other DNA
ttgaactcttctcaaggtcttttgtagaaaatacacattcatgcttacccaatctaaatatggaaggacctcatgatcac

SEQ ID NO: 16189 - DNA, 80 bp, synthetic construct
  source 1..80: mol_type = other DNA
gacagaacttgttgataactcatgtcgacagagttattcctaaaattatcttgttgaattggtactggcctaaataagtt

SEQ ID NO: 16190 - DNA, 80 bp, synthetic construct
  source 1..80: mol_type = other DNA
aatagcaacaataggatcctcagtagtaacagcaatagcaacagtagcaacacgagcaacagcagcagcaacaatagtat

SEQ ID NO: 16191 - DNA, 80 bp, synthetic construct
  source 1..80: mol_type = other DNA
aattcatgggccacaaaatctagctgccaggattgaaactttggctttgtcactgattggctgtgtggttttgagcaagt

SEQ ID NO: 16192 - DNA, 80 bp, synthetic construct
  source 1..80: mol_type = other DNA
agaaggtttttcaatgtactttgcctagaacaatcagaggaattaccatctacggtagctatagccttataaagtatatt

SEQ ID NO: 16193 - DNA, 80 bp, synthetic construct
  source 1..80: mol_type = other DNA
tatacttccttcaagaacttttcctgtgcattctcgacttggctacctggtacaagagtcctcactttcagcttatgctg

SEQ ID NO: 16194 - DNA, 80 bp, synthetic construct
  source 1..80: mol_type = other DNA
tttagatgaaaggtctccaactcaaatgtctgcatgcaccaagcagatcatacaatgtaccaaagacaataggaaacagt

SEQ ID NO: 16195 - DNA, 80 bp, synthetic construct
  source 1..80: mol_type = other DNA
attgccttaatgactagtcctgtacatatatcactttgtacacgtaaacttctagaggtgtagagttactaggttaaagg

SEQ ID NO: 16196 - DNA, 80 bp, synthetic construct
  source 1..80: mol_type = other DNA
tgtccattatagaggcatctaattcctaccagcaacacgggagactacatttctccccattcttccccaacatagtgtgt

SEQ ID NO: 16197 - DNA, 80 bp, synthetic construct
  source 1..80: mol_type = other DNA
ttaacattttgagtcaaggttattctagggtagaggacattgccaccatattaagatactttggagttagaaaataactc

SEQ ID NO: 16198 - DNA, 80 bp, synthetic construct
  source 1..80: mol_type = other DNA
attctgaccctttctaaactgctgctaaaatcagtgcttgaggcattttgcagaccctgcactcagtggatcagctgaca

SEQ ID NO: 16199 - DNA, 80 bp, synthetic construct
  source 1..80: mol_type = other DNA
actgattgaattgaactgaaaaacttcaaggtttttcacccccaccccttcccattcaagccctgatggaaaggggtggg

SEQ ID NO: 16200 - DNA, 80 bp, synthetic construct
  source 1..80: mol_type = other DNA
catgtcagaggcatttgaaacacaacaactttctcttgaatagggactgggtaaaataaggctgagacttacaggattgc

SEQ ID NO: 16201 - DNA, 80 bp, synthetic construct
  source 1..80: mol_type = other DNA
cccaccagagaacaaccccctttgactgtaattttccattacctacccaaatcctataaaacggccccacccctatctcc

SEQ ID NO: 16202 - DNA, 80 bp, synthetic construct
  source 1..80: mol_type = other DNA
tctgcaacactgcttgaccccaatacaaactcgacagtggttccaaatagccagaaaatggcacttttgatttttccatc

SEQ ID NO: 16203 - DNA, 80 bp, synthetic construct
  source 1..80: mol_type = other DNA
tggcctctgggccaaggaatgcctgcagcctgggcttcctcctagccatgtcccatctgtgcaggaccccactggaaatt

SEQ ID NO: 16204 - DNA, 80 bp, synthetic construct
  source 1..80: mol_type = other DNA
tgctttaaaaggattaaagcctgttatcactcacctgctacagcatgggcttctaaaacctataaattctgcttacaata

SEQ ID NO: 16205 - DNA, 80 bp, synthetic construct
  source 1..80: mol_type = other DNA
ctacaaatcaatattaatactgactctaaatatgccttccatatcctgcaccaccatatgggcagaaagaaatttctcac

SEQ ID NO: 16206 - DNA, 80 bp, synthetic construct
  source 1..80: mol_type = other DNA
tcaggaaaggtaaaatggactaatggtcttttaaaaacacacctcacgaagctcagccaccaactttaaaaaaaggactc

SEQ ID NO: 16207 - DNA, 80 bp, synthetic construct
  source 1..80: mol_type = other DNA
cttgaacttgtaaccacatggcagttctttctcttggtttccaccatccaacagataggaatttgggggttcatgtcata

SEQ ID NO: 16208 - DNA, 80 bp, synthetic construct
  source 1..80: mol_type = other DNA
ggaaatgggctgatttcctctttttgggttagaggatatggtataaaaatgagacccttaatttcagggaatctgaaatt

SEQ ID NO: 16209 - DNA, 80 bp, synthetic construct
  source 1..80: mol_type = other DNA
aacttttcttttgagctattagtatttacagcttgtagcaattaagtcaagtatattcctgtgaaaaactttggagcaca

SEQ ID NO: 16210 - DNA, 80 bp, synthetic construct
  source 1..80: mol_type = other DNA
cagttgttttaagcttttcttcctgcactttagactgaccctgctcattccaacgagtgattcctgcagttcagaagaaa

SEQ ID NO: 16211 - DNA, 80 bp, synthetic construct
  source 1..80: mol_type = other DNA
aagtgcctattaaataattaacctctcaaaatgtctccaagcctcccaagattcacttggttattgtattgtaagtaatg

SEQ ID NO: 16212 - DNA, 80 bp, synthetic construct
  source 1..80: mol_type = other DNA
tccaggaactgcccatccctttcctggaaaactcacgaataatccactccttgtttagcatataatccagaagtaactat

SEQ ID NO: 16213 - DNA, 80 bp, synthetic construct
  source 1..80: mol_type = other DNA
ttaaactggatcatggaggaattcattgcatctgttttgcaggtaagttccatcagtggtttggaacttttgctggcaga

SEQ ID NO: 16214 - DNA, 80 bp, synthetic construct
  source 1..80: mol_type = other DNA
ctgagagtgaaatctcttcttcttctcttcccctaaattgagtgctatatgcccatgggaaaaagcatcacatattcaat

SEQ ID NO: 16215 - DNA, 80 bp, synthetic construct
  source 1..80: mol_type = other DNA
tatcacagtgcagtagttatctcccatccacccctgaataaacacttcctcaaataattaaaatgttcaagagctatagt

SEQ ID NO: 16216 - DNA, 80 bp, synthetic construct
  source 1..80: mol_type = other DNA
acagagtggtatgtttgttacttgatgaaccttcagtggcaacgataatcaccccaaatctatagctggcattagggttc

SEQ ID NO: 16217 - DNA, 80 bp, synthetic construct
  source 1..80: mol_type = other DNA
atttgctcagaagggtcccagatactgccctccaatttgtctttccaaattgatttggatgacaaattacatggttttcc

SEQ ID NO: 16218 - DNA, 80 bp, synthetic construct
  source 1..80: mol_type = other DNA
ggttgtgagttatttctctctttggggtattctagtgcaattgggatcgaaagaactgactacttaattcaaattttagg

SEQ ID NO: 16219 - DNA, 80 bp, synthetic construct
  source 1..80: mol_type = other DNA
taataccgggatgaggtcatgttttcttcccttccttactatggatgactgtgattaaaacaatttggaggcatttcaaa

SEQ ID NO: 16220 - DNA, 80 bp, synthetic construct
  source 1..80: mol_type = other DNA
tattttcgaataagcttaatcttctcttttctacccgctgtggaatgaaaatgtttgaggtcaacgtggtgagatctact

SEQ ID NO: 16221 - DNA, 80 bp, synthetic construct
  source 1..80: mol_type = other DNA
cacctgaagggaggcgggtagagattttccatttttctttgcgatgtgcttaatgattctcatggcttcagcattcttat

SEQ ID NO: 16222 - DNA, 80 bp, synthetic construct
  source 1..80: mol_type = other DNA
aagtacccggtccatggcattttgtcactgcagtctgagctggtaaaacacagagttttattggcttttggataagaaac

SEQ ID NO: 16223 - DNA, 80 bp, synthetic construct
  source 1..80: mol_type = other DNA
aatccccactgttctccgatatctccgcccaacaaattctgtaactgcagagagaatttgaatggttaatgcaattcaat

SEQ ID NO: 16224 - DNA, 80 bp, synthetic construct
  source 1..80: mol_type = other DNA
aactgtaactctggctactaaggaataggatgtaagttatattcctcgtcctaaaaatggctggctgagtaacctaggtt

SEQ ID NO: 16225 - DNA, 80 bp, synthetic construct
  source 1..80: mol_type = other DNA
gtgtaagttttcagcatgataagccccattcaccccagggttcaagtactttctcagtcccacactgtggcaggtattca

SEQ ID NO: 16226 - DNA, 80 bp, synthetic construct
  source 1..80: mol_type = other DNA
tatcaacccatcacctaggtaacgatgtaatttcttaattctcagtcaatggctccctgctgtaaatatacaacctcttg

SEQ ID NO: 16227 - DNA, 80 bp, synthetic construct
  source 1..80: mol_type = other DNA
aatcagtggtgaacgtgttttggaagatcccatatagttgggtaagtatgactgcaacccactgggactttagttctgct

SEQ ID NO: 16228 - DNA, 80 bp, synthetic construct
  source 1..80: mol_type = other DNA
gtgcacacttctagccaactctatgtcctgtgatgtcatttttgtaggctgaagtgaaccacagtgggtatatttacacc

SEQ ID NO: 16229 - DNA, 80 bp, synthetic construct
  source 1..80: mol_type = other DNA
gaccagggcttataacacaggaatgcactgtcagtagggatttatgaccaatctcctacttgttgagtgggatgtgaata

SEQ ID NO: 16230 - DNA, 80 bp, synthetic construct
  source 1..80: mol_type = other DNA
gagtgtgggattccaaaatgctggataagtaagagacatagcaatagcttgatccatacaaacactgactactagcttgc

SEQ ID NO: 16231 - DNA, 80 bp, synthetic construct
  source 1..80: mol_type = other DNA
tgtttaaattccaccacaggtgattcaacctacctgtctgctatgtagccgatactcatagagccaataaagaatcctac

SEQ ID NO: 16232 - DNA, 80 bp, synthetic construct
  source 1..80: mol_type = other DNA
catgagctgccacatttcctgtaaatatctgaccactttagacccttcaaattagactctacctacccatctgttcacac

SEQ ID NO: 16233 - DNA, 80 bp, synthetic construct
  source 1..80: mol_type = other DNA
aggtagccgagagcagagccaagaggaaaaacatttgcttctggaaaaagtgaaactcccctccatgctccaggacatcg

SEQ ID NO: 16234 - DNA, 80 bp, synthetic construct
  source 1..80: mol_type = other DNA
cgggatgcatgctggggctgcttgttttgatgttgtccagattttataactctgcttttaaaaagtgtttgctccaatct

SEQ ID NO: 16235 - DNA, 80 bp, synthetic construct
  source 1..80: mol_type = other DNA
tctctttaggatgatgttgttgcatctaaatgcaagacaaacaggaaatttgtctttcctggtggacaaaaggattctta

SEQ ID NO: 16236 - DNA, 80 bp, synthetic construct
  source 1..80: mol_type = other DNA
cctacggtttgagtccaggtatcttgggaaattgtcacttcttttatgggggtgcttacatattcagaagcatgactgga

SEQ ID NO: 16237 - DNA, 80 bp, synthetic construct
  source 1..80: mol_type = other DNA
cagaactttggatatttgaagcttctgtttacctccaactcttgtcttttcagagtaaatgttcccagctccccacatag

SEQ ID NO: 16238 - DNA, 80 bp, synthetic construct
  source 1..80: mol_type = other DNA
cttcacaccaagcctgtagctctagaaatcacaaaaggactggaccctgttctttaaaaggcaaagcatgagtctaacac

SEQ ID NO: 16239 - DNA, 80 bp, synthetic construct
  source 1..80: mol_type = other DNA
caaatacagtttgagttttcttgggctttatcctctccagaaacccaggagtgtgtcaacttcttggttgcattgctttc

SEQ ID NO: 16240 - DNA, 80 bp, synthetic construct
  source 1..80: mol_type = other DNA
tgttgacaggaataaggggccatctgaaaatgctcccattggcctaaagtgggggaatttggacattaaaaaaaattaac

SEQ ID NO: 16241 - DNA, 80 bp, synthetic construct
  source 1..80: mol_type = other DNA
cctctgggggcatccttggtcagctttcagtggctttcttactttattagtttcaaaagaccttcctaaatccatccact

SEQ ID NO: 16242 - DNA, 80 bp, synthetic construct
  source 1..80: mol_type = other DNA
tgaatatctttggtttggaatgctgcagagtggaagagcgtgtttgggttcatgcagtacccacagcttgctatggaaca

SEQ ID NO: 16243 - DNA, 80 bp, synthetic construct
  source 1..80: mol_type = other DNA
gagaaatgctctaatgggaatggcagtaccctagaagagtcctgtaataaaatggaagtggtttattcaggatcatgctg

SEQ ID NO: 16244 - DNA, 80 bp, synthetic construct
  source 1..80: mol_type = other DNA
tcttgccaagggagaagtacccaggcataatgactgcaattttttttccttccctctccacatcacgttaactttttttc

SEQ ID NO: 16245 - DNA, 80 bp, synthetic construct
  source 1..80: mol_type = other DNA
gtaatttcctgggcaataggggtgctaggtgcatcttttattctgatgtttggtctttgactctggttcctgacacaaaa

SEQ ID NO: 16246 - DNA, 80 bp, synthetic construct
  source 1..80: mol_type = other DNA
ctgagagcataggaggggaaatcagtttgcttgtgttttcctgccacgtaacagagcctcttctgggagaacctaggatt

SEQ ID NO: 16247 - DNA, 80 bp, synthetic construct
  source 1..80: mol_type = other DNA
tgagtgagcttcctcgcccttgctgccatgtgagaaggcagcaacaggacaccatctatgaaacctcacaagacccttaa

SEQ ID NO: 16248 - DNA, 80 bp, synthetic construct
  source 1..80: mol_type = other DNA
tctgtaagcatcttgctgtataatggagcaagtcctgacccagaaaagaatctgtactttgtcccagatgggctataact

SEQ ID NO: 16249 - DNA, 80 bp, synthetic construct
  source 1..80: mol_type = other DNA
ttgaaaacagacccacttaaaatatttttcacattcccttatttttctgttcctgggagtgagttacccccaactcttag

SEQ ID NO: 16250 - DNA, 80 bp, synthetic construct
  source 1..80: mol_type = other DNA
gcatttttgtggggaaagcattttggctttattttctttttaaatctgtgtgtaggccctaaacccacagtcgtacacgg

SEQ ID NO: 16251 - DNA, 80 bp, synthetic construct
  source 1..80: mol_type = other DNA
cctggtccagattctttattctagagctaagaaatgaaggctcagaaagggagggtgatatggcttagacagccagtgag

SEQ ID NO: 16252 - DNA, 80 bp, synthetic construct
  source 1..80: mol_type = other DNA
gaaagaccacccgagccagcgagtgatcagtgacattcaagctaagctcaatttatgtcagtatgccagtgacgaaattc

SEQ ID NO: 16253 - DNA, 80 bp, synthetic construct
  source 1..80: mol_type = other DNA
actatggttagctcagactcagttgtagcttccccaaactgtcatcctactgtttttatcttacagctgaaggaactgaa

SEQ ID NO: 16254 - DNA, 80 bp, synthetic construct
  source 1..80: mol_type = other DNA
ttcgcacacacatacacatgcacccaattcaccttgactttgagtgtccatgtcttttcttggccccacctgcagtcttg

SEQ ID NO: 16255 - DNA, 80 bp, synthetic construct
  source 1..80: mol_type = other DNA
tttcttctgagttactacatcttctgaactgctcccaggatggtgtttgtgataagttggtttgcccagtaaaactgtcg

SEQ ID NO: 16256 - DNA, 80 bp, synthetic construct
  source 1..80: mol_type = other DNA
tgatcacactagactccttatttctttgatgtcttcttaactggatgaaggcagccaagggtgggagtagagggaagagt

SEQ ID NO: 16257 - DNA, 80 bp, synthetic construct
  source 1..80: mol_type = other DNA
atagcagcatgatttataatcccttgggtatatatccacttatgggatggctgggtcaaatggtatttccagttctagat

SEQ ID NO: 16258 - DNA, 80 bp, synthetic construct
  source 1..80: mol_type = other DNA
ccagctttgttcttttcgcttaggattgacttggtatgcgggctcttttttggttccatatgaactttaaagtagttttt

SEQ ID NO: 16259 - DNA, 80 bp, synthetic construct
  source 1..80: mol_type = other DNA
ttgttggtaagctattgagtattgcctcaatttcagagcctgttattggtctattcagagatgcaacttcttcctggttt

SEQ ID NO: 16260 - DNA, 80 bp, synthetic construct
  source 1..80: mol_type = other DNA
agaaacagtttgttataatttctgttcttttccatttgctgaggagagctttacttccaactatgtggtcaatttcagag

SEQ ID NO: 16261 - DNA, 80 bp, synthetic construct
  source 1..80: mol_type = other DNA
tggtccccactctcttctggcttgtagagtttctgccgagagatcagctgttagtctgatgggcttccctttgtgggtaa

SEQ ID NO: 16262 - DNA, 80 bp, synthetic construct
  source 1..80: mol_type = other DNA
tgggtttcagcctcagtggctgtagaagagcggatattggtgaaccacaaatgctgctgcctgatcgttcctctggaagt

SEQ ID NO: 16263 - DNA, 80 bp, synthetic construct
  source 1..80: mol_type = other DNA
tgtttttattgtgaaagtgaggtggagatgggggattgtctctcctataaaaggtctaagaagttagcaaatgctgtttt

SEQ ID NO: 16264 - DNA, 80 bp, synthetic construct
  source 1..80: mol_type = other DNA
tgcataggatagaaagaaaggtgggagacaggacaaacagaagttaatcaattgaaataaaccaggtttggagtggtggg

SEQ ID NO: 16265 - DNA, 80 bp, synthetic construct
  source 1..80: mol_type = other DNA
ccacatttttggcatttttgtgttttgtgtttctgagttgaatgtttcgaatgggccccaaagatagtgctgaagtgctc

SEQ ID NO: 16266 - DNA, 80 bp, synthetic construct
  source 1..80: mol_type = other DNA
catcatgatggtggtaaggtcaagcaataccagagttgctctgagaagtacttggagtacactttgctctttttaacaaa

SEQ ID NO: 16267 - DNA, 80 bp, synthetic construct
  source 1..80: mol_type = other DNA
tgaataaaacagcagaggcacaaccttcagagaataagaaaacaagatactgcaatggattgaaggtagaataagtttta

SEQ ID NO: 16268 - DNA, 80 bp, synthetic construct
  source 1..80: mol_type = other DNA
ataaagccttctctgatgaaatatttgagtaacatttaggccaagtggcagtcataaggaaaaagtattggttaatgcaa

SEQ ID NO: 16269 - DNA, 80 bp, synthetic construct
  source 1..80: mol_type = other DNA
cctagatatagacagggcaaatgtcttctcctaggtctcaaagttggtaattggtacactgaaggtctgaactcaggcaa

SEQ ID NO: 16270 - DNA, 80 bp, synthetic construct
  source 1..80: mol_type = other DNA
tcccagtcttgctagagaggtggatatgcaagttcaaaaaattcaaagaatcccttcaagatactatacaagatggtcat

SEQ ID NO: 16271 - DNA, 80 bp, synthetic construct
  source 1..80: mol_type = other DNA
ggatatttataaggtgcttagcacagtgttacatagaaactcaataaattggaaagttccaacatagtagcattatagtt

SEQ ID NO: 16272 - DNA, 80 bp, synthetic construct
  source 1..80: mol_type = other DNA
atattggatctgtagttatgtccccgcctttatttctgttattagtaatttgtgccttccctcatcttcttaggtaacct

SEQ ID NO: 16273 - DNA, 80 bp, synthetic construct
  source 1..80: mol_type = other DNA
gttaaggtcaatcatgttcttcctgtttttacctgctggatctttccatttctagagagatgtagagtctccaaatacca

SEQ ID NO: 16274 - DNA, 80 bp, synthetic construct
  source 1..80: mol_type = other DNA
agatagtatctcattgcagttttgatttgcattctctaatgaccagtgatgatgagcttttttaatatgtttgttggcca

SEQ ID NO: 16275 - DNA, 80 bp, synthetic construct
  source 1..80: mol_type = other DNA
ttatttgtgtcctctcttatttcattgagcagtggtttgtagttctcgttgaagaggtccctcacaccccttgtaagttg

SEQ ID NO: 16276 - DNA, 80 bp, synthetic construct
  source 1..80: mol_type = other DNA
ggacaccagcaagacagaacccttcactcccctggaaaaggggctgaagctagggaaccaagtggtctagctcagtggat

SEQ ID NO: 16277 - DNA, 80 bp, synthetic construct
  source 1..80: mol_type = other DNA
agcgtgtacatacataaacctagatattatagcctactacacacctaagcttatggtataggctattactttgatgctac

SEQ ID NO: 16278 - DNA, 80 bp, synthetic construct
  source 1..80: mol_type = other DNA
acaccttgcaaggctgatctaaaggcaaaacatttctttcagtttcatttctcagaggaagttttatttctccttcatgt

SEQ ID NO: 16279 - DNA, 80 bp, synthetic construct
  source 1..80: mol_type = other DNA
gttctgcctaagggcaagcactaaaagtcctattaaaaacagagggctctagtctatttcaaaaatgagtcttgtctcct

SEQ ID NO: 16280 - DNA, 80 bp, synthetic construct
  source 1..80: mol_type = other DNA
agttgagacttctctatgtcctagtacatcattgatgtttgtaagtctccctgatgtacttaataaaaatgcatattcca

SEQ ID NO: 16281 - DNA, 80 bp, synthetic construct
  source 1..80: mol_type = other DNA
ttacagcaccccaaacagactgagacatatgttcacatactcttttatatgcctctttaccctctatacaatatgatgct

SEQ ID NO: 16282 - DNA, 80 bp, synthetic construct
  source 1..80: mol_type = other DNA
gaaaaaggggagggaaatgagcctcaaggtgatgaccagtaaccaataaatcacgtcactctgccctttgacaaacattt

SEQ ID NO: 16283 - DNA, 80 bp, synthetic construct
  source 1..80: mol_type = other DNA
ttaaaatttgtaagcagctaaatctaatgatataggcaactgctaggatatcacaaaagaatgggattttaatagtgaac

SEQ ID NO: 16284 - DNA, 80 bp, synthetic construct
  source 1..80: mol_type = other DNA
tattgtatcacatacgatctcagtccacagatgggttcctgatttagccaagaatatagtaaagtgagtgtaaagtagaa

SEQ ID NO: 16285 - DNA, 80 bp, synthetic construct
  source 1..80: mol_type = other DNA
tgtatacccatcctatgttcgttttatccaacttcttatcattcctaagtatattaagtaaagtaatagctattaatatg

SEQ ID NO: 16286 - DNA, 80 bp, synthetic construct
  source 1..80: mol_type = other DNA
atagtaaacacatgcataaattaattctataaagtgttattgcattttctcaaaatacattgaagttctgtagtcaaagt

SEQ ID NO: 16287 - DNA, 80 bp, synthetic construct
  source 1..80: mol_type = other DNA
attaggccgcatgcctatgaacatttgatcttcaacaaagctcacaaaaacaagcaatggggaaaaaaaaccctgttcaa

SEQ ID NO: 16288 - DNA, 80 bp, synthetic construct
  source 1..80: mol_type = other DNA
tggagggtggagggtgggaagagagagagaagcagaagaaataactattgagtactaggcttaatacctgagtgatgaaa

SEQ ID NO: 16289 - DNA, 80 bp, synthetic construct
  source 1..80: mol_type = other DNA
acaaaacaaattcctactaggggaaataaagcttcagtaaggaggtggcattaagctgggctttaaaattcatgcagaat

SEQ ID NO: 16290 - DNA, 80 bp, synthetic construct
  source 1..80: mol_type = other DNA
gttagcttctggtgacagttctcttcttgctttcctgacatggctaaaagagaaagagaatggaagtgagttctcttctt

SEQ ID NO: 16291 - DNA, 80 bp, synthetic construct
  source 1..80: mol_type = other DNA
atgcaacaggcctgccttagttgtgtctactgggtacttgtttatttttaggcatgtcaaattcgacttgtgaaaagatg

SEQ ID NO: 16292 - DNA, 80 bp, synthetic construct
  source 1..80: mol_type = other DNA
atttagggagccacacatatgtccaaggcaagacatatgctcataaaacgtctgagaagattgtatccttttacctaatg

SEQ ID NO: 16293 - DNA, 80 bp, synthetic construct
  source 1..80: mol_type = other DNA
aaaacatacggaactgtgggacactatcaggtgaaccagcataacaattacagtagttctagaaagagaagagacagaga

SEQ ID NO: 16294 - DNA, 80 bp, synthetic construct
  source 1..80: mol_type = other DNA
cttggactactttaaatatttcatatgatagaatcatacagtatctctcctttcgtgactggcttatttagcttagcata

SEQ ID NO: 16295 - DNA, 80 bp, synthetic construct
  source 1..80: mol_type = other DNA
ggctgtccgcttccttgtactaaatgaatggtgttttgctgcttcttttaagagtctctgtttgtgtgtaacttttgaca

SEQ ID NO: 16296 - DNA, 80 bp, synthetic construct
  source 1..80: mol_type = other DNA
cagtcaactctcccagattttgtgagatgattttccataaggagaactctcctcactaattctgaatagagattctgtgg

SEQ ID NO: 16297 - DNA, 80 bp, synthetic construct
  source 1..80: mol_type = other DNA
gatagcatatatcatttgatagtttcttatgcagaaaggaacacacccacattttgtcggctatcaaagagttttgttgg

SEQ ID NO: 16298 - DNA, 80 bp, synthetic construct
  source 1..80: mol_type = other DNA
tagctactttgttgagaagagactgttaggcagatgtgcacagaagtagaaacatggctcaggaggctcttgcaataatt

SEQ ID NO: 16299 - DNA, 80 bp, synthetic construct
  source 1..80: mol_type = other DNA
ttctgatttttcttagatgttcttggcagctctgtcactcagctttattgctaagacactaggtgcaattattatgaaaa

SEQ ID NO: 16300 - DNA, 80 bp, synthetic construct
  source 1..80: mol_type = other DNA
ttatatttacaacagcactttattattcccttattatttttaggctgccagttctgatttcatggatgcaatgtgccctt

SEQ ID NO: 16301 - DNA, 80 bp, synthetic construct
  source 1..80: mol_type = other DNA
tgaattcaccttctcaattaaatcacattgtctttgagggaaggcactatgtcttggactctatttgcatccattctggg

SEQ ID NO: 16302 - DNA, 80 bp, synthetic construct
  source 1..80: mol_type = other DNA
ggcaacgtatttccaggcaacaagatagaagaagaaaagaataagaagcaacaaacagtccacacaggctgaggcttaag

SEQ ID NO: 16303 - DNA, 80 bp, synthetic construct
  source 1..80: mol_type = other DNA
tctagctctttgaagcttagcataatgcctggaatacagtaggctgcctttagagctcacgtggtacctaattatttatg

SEQ ID NO: 16304 - DNA, 80 bp, synthetic construct
  source 1..80: mol_type = other DNA
ggtttaaactacgcgttttcacttctatgcaaattttgtccatctgaactggatgataaacctgccggtaagaatatctg

SEQ ID NO: 16305 - DNA, 80 bp, synthetic construct
  source 1..80: mol_type = other DNA
acagataatttttacttgtttgtgcttttctgtatgatatggcttgactgtgtccccactcaaatatcaccttgattgta

SEQ ID NO: 16306 - DNA, 80 bp, synthetic construct
  source 1..80: mol_type = other DNA
cactttccctttgtctacttttgaaatagtagagttactaaacttattattttacctattagaacatatatttgggtata

SEQ ID NO: 16307 - DNA, 80 bp, synthetic construct
  source 1..80: mol_type = other DNA
tggaaaatatatacatctgtatccaatgttgatagatctagctggagcttagattctcccttcccgcttctttatctcca

SEQ ID NO: 16308 - DNA, 80 bp, synthetic construct
  source 1..80: mol_type = other DNA
cattaggccttcaatagatcattccaaagagatcaaaggattcatttccaagatgggatagacatcacagtgggccagca

SEQ ID NO: 16309 - DNA, 80 bp, synthetic construct
  source 1..80: mol_type = other DNA
acatacagtggacccatgaacaataggtttaaattatgctcgtccacttatgcacagacttttttcaataaatatattga

SEQ ID NO: 16310 - DNA, 80 bp, synthetic construct
  source 1..80: mol_type = other DNA
agaacgcagccataggcgcccaacatccaaggctctctttcttccaccaagtagctctcaactcacctgacttctgagcg

SEQ ID NO: 16311 - DNA, 80 bp, synthetic construct
  source 1..80: mol_type = other DNA
gcttgagccactgtgcctgacttcaaaaatagtttgtcagtatacattgcatatgaaactgagagcaagaatctagctat

SEQ ID NO: 16312 - DNA, 80 bp, synthetic construct
  source 1..80: mol_type = other DNA
tccacatgaaagaaataaatattttaagatttttttggggggcagctagagagatggatcaagtcactgtcaaggggaac

SEQ ID NO: 16313 - DNA, 80 bp, synthetic construct
  source 1..80: mol_type = other DNA
atatatgcagtcaaaagtggaggacccagatttacaaaaaagattcttagagacctaaggaaactaaaaacagacagcca

SEQ ID NO: 16314 - DNA, 80 bp, synthetic construct
  source 1..80: mol_type = other DNA
tgtaatatatacgttactgctgtaataatttcatagcacctcctgtaattgtagtaataaggttgtgttgaaagcacctg

SEQ ID NO: 16315 - DNA, 80 bp, synthetic construct
  source 1..80: mol_type = other DNA
aatgcagatgaaagtgtcctatcctggggaaaagaaagccacgaaggacgtttattaataaagaagagaagtgagcacca

SEQ ID NO: 16316 - DNA, 80 bp, synthetic construct
  source 1..80: mol_type = other DNA
agaagcagcagtgccagaaacaaattgttattaggcaatctagcagaaggattctgataattcaagactgtttttggctt

SEQ ID NO: 16317 - DNA, 80 bp, synthetic construct
  source 1..80: mol_type = other DNA
tgctcaaaagtgtgtaatacctcccccctctcttcttcctgtagagactgcagaactgcataactgaaactttataccca

SEQ ID NO: 16318 - DNA, 80 bp, synthetic construct
  source 1..80: mol_type = other DNA
ctgggattacaggttatcagccactgactgacatatataaaattgtatttttatcatgtacactctaatgttttgaaata

SEQ ID NO: 16319 - DNA, 80 bp, synthetic construct
  source 1..80: mol_type = other DNA
tactaaataaaagtgagcagctccagcttgttgggactgctactcactctttggcagtcccctagccactctttcaccac

SEQ ID NO: 16320 - DNA, 80 bp, synthetic construct
  source 1..80: mol_type = other DNA
atcctgcaactttacagaatgtgtttattcaattctaacaggtgtgtgtgtgtgtgcatgtgtcatctttagggttttct

SEQ ID NO: 16321 - DNA, 80 bp, synthetic construct
  source 1..80: mol_type = other DNA
ttcaatttttggcaagagattggaatggattgccattaatattttctttagctatttagtaacacgcaccagtaaagcca

SEQ ID NO: 16322 - DNA, 80 bp, synthetic construct
  source 1..80: mol_type = other DNA
atgtgtctgttacgttcaattggtctataatgttgttgaagtcctctgtttcctcattgattttctctctagtcattcta

SEQ ID NO: 16323 - DNA, 80 bp, synthetic construct
  source 1..80: mol_type = other DNA
agccaccgtgcccggccaagtcatcaccctttatttcagacttccacagatcccctagggtatgaacaaaatgcagccaa

SEQ ID NO: 16324 - DNA, 80 bp, synthetic construct
  source 1..80: mol_type = other DNA
tccaacattggatattacatttcagcaggagatttgaacaagacaaatacccaaaccatatcagcctccaagtcttcatg

SEQ ID NO: 16325 - DNA, 80 bp, synthetic construct
  source 1..80: mol_type = other DNA
tatgttgagccagggaatagagctattgcaagtgttcataggcacttgcaaatttctagttcctcttgaatgcatggtat

SEQ ID NO: 16326 - DNA, 80 bp, synthetic construct
  source 1..80: mol_type = other DNA
ttttgactggcttctataattatttattctaggcactatcaggataactcctactgattctcgatgggttggagcttggt

SEQ ID NO: 16327 - DNA, 80 bp, synthetic construct
  source 1..80: mol_type = other DNA
actaagtaatgtaaattaggatgcatcagcatttgacagtgcctcctcttttgaatataaaccctgggactaatggagaa

SEQ ID NO: 16328 - DNA, 80 bp, synthetic construct
  source 1..80: mol_type = other DNA
caactcacttataatacttacaaatcagggatggtttttcatgactggggagacctgtggagagaaatgtggcacttttg

SEQ ID NO: 16329 - DNA, 80 bp, synthetic construct
  source 1..80: mol_type = other DNA
atcgtgctggccaatgtttgtatttttagtagagttggggtttcaccatgttggccaggctggtctcgaattcctgaccc

SEQ ID NO: 16330 - DNA, 80 bp, synthetic construct
  source 1..80: mol_type = other DNA
tttcaatggcacatttagatgtgcttattaaggaaagtttccttgtattattcttcccacaactctagtattgtagacac

SEQ ID NO: 16331 - DNA, 80 bp, synthetic construct
  source 1..80: mol_type = other DNA
actctatctgagagaggcaaaaggctttagatgaagttccataggcagaaagatggtgttttgttgttgtttatttccag

SEQ ID NO: 16332 - DNA, 80 bp, synthetic construct
  source 1..80: mol_type = other DNA
tactgctgtgatgtcattgtccttttacctattatattttttcatactctgtgaaaacaaatcagttgccggactaacca

SEQ ID NO: 16333 - DNA, 80 bp, synthetic construct
  source 1..80: mol_type = other DNA
tactggtgctgagctttcaaagtctggatcccatgaggtgttggttttaacttgtcaaatattcccacattttcttctat

SEQ ID NO: 16334 - DNA, 80 bp, synthetic construct
  source 1..80: mol_type = other DNA
gtgccagaattaatataaacacagatgtgactgattgcaatatctggactgggtcattgtcttagtccattcaggctgca

SEQ ID NO: 16335 - DNA, 80 bp, synthetic construct
  source 1..80: mol_type = other DNA
agcttttctagcctttttcaactgattctattcttgatttttcattttgtagaggttctgctttaagcatgtctgttttt

SEQ ID NO: 16336 - DNA, 80 bp, synthetic construct
  source 1..80: mol_type = other DNA
cttactaagacaacagtcaatatgcaatgttatatacagattctgatctgtttagctctgggatcactaccctttttact

SEQ ID NO: 16337 - DNA, 80 bp, synthetic construct
  source 1..80: mol_type = other DNA
ggttttctgttcctatgttaattcacttaagataatgacctccagctgcatccaggttgctgcaagggacattatttcat

SEQ ID NO: 16338 - DNA, 80 bp, synthetic construct
  source 1..80: mol_type = other DNA
agttattccagcaccatttactgaataatgagtactttccccattgcattctttttgctaacttcattgaagatcagatg

SEQ ID NO: 16339 - DNA, 80 bp, synthetic construct
  source 1..80: mol_type = other DNA
atactttaagttttagggtacatgtgcacattgtgcaggttagttacatatgtatacatgtgccatgctggtgcactgaa

SEQ ID NO: 16340 - DNA, 80 bp, synthetic construct
  source 1..80: mol_type = other DNA
tttttgctgtgcagaagctctttagtttaattagatcccatttgtcaattttgtcttttgttgccattgcttttggtgtt

SEQ ID NO: 16341 - DNA, 80 bp, synthetic construct
  source 1..80: mol_type = other DNA
tgtcatctgcaaacagggacaatttgacttcctcttttcctaattgaataccatttatttccttctcctgcctaattgcc

SEQ ID NO: 16342 - DNA, 80 bp, synthetic construct
  source 1..80: mol_type = other DNA
ttttctttattagtcttgctagcggtctatcaattttgttgatcctttcaaaaaaccagctcctggattcactaattttt

SEQ ID NO: 16343 - DNA, 80 bp, synthetic construct
  source 1..80: mol_type = other DNA
tagtcttgatggtctttacattttgccatgattttgcagtggctggtaccagttgttcctttccatgtttagcgcttcct

SEQ ID NO: 16344 - DNA, 80 bp, synthetic construct
  source 1..80: mol_type = other DNA
ttcctttggaggaggagaggtgctctgctttctatagtttccagtttttctgttctgttttttccccatctttgtggttt

SEQ ID NO: 16345 - DNA, 80 bp, synthetic construct
  source 1..80: mol_type = other DNA
atcttggctcctccaaccagggtttttgagatatagaatcatatcatagtgcagagagataatgtgagttcatttcctat

SEQ ID NO: 16346 - DNA, 80 bp, synthetic construct
  source 1..80: mol_type = other DNA
tccctctttgcacactagcgaaggcctgaaagtgatagaatattagaaccctaaaaagaattgtgtctaccacaagacat

SEQ ID NO: 16347 - DNA, 80 bp, synthetic construct
  source 1..80: mol_type = other DNA
ttctttggataattcctcctcagggcatgtctctgaaacttagagattgtccaaaagagtatgtgctctgcagagggtaa

SEQ ID NO: 16348 - DNA, 80 bp, synthetic construct
  source 1..80: mol_type = other DNA
catacgtttcttctcttactaagaatctgaagacacagactgacaattctctcagttgtaaaagaatcgccctaggatcc

SEQ ID NO: 16349 - DNA, 80 bp, synthetic construct
  source 1..80: mol_type = other DNA
tttagctttttattttaaactcatgagtttgaaaaaacactgttccatcatcgatgataacaatatcatatctgtttcag

SEQ ID NO: 16350 - DNA, 80 bp, synthetic construct
  source 1..80: mol_type = other DNA
acaagtgcagcaagagagctagcctagttcagatcctatgggtcacaggaaagactttgaaatatattctaaatgtgttg

SEQ ID NO: 16351 - DNA, 80 bp, synthetic construct
  source 1..80: mol_type = other DNA
tattcaagcaatcccccaaggcggtattaaaatccatggaactaatgagatcttctagggactgagtacagatagaaaca

SEQ ID NO: 16352 - DNA, 80 bp, synthetic construct
  source 1..80: mol_type = other DNA
caatcaggcaatagaaagaaagaaaaggtatccaaattagaaaagaggaactcaaataaactctgttcactgatgatatg

SEQ ID NO: 16353 - DNA, 80 bp, synthetic construct
  source 1..80: mol_type = other DNA
ctcataggattttcataagtaccatatgagaaaatattttaagccatcttgaaatcatgatgcattgaataaataaggga

SEQ ID NO: 16354 - DNA, 80 bp, synthetic construct
  source 1..80: mol_type = other DNA
agatgctatagtattctgttggttttcttccctccgttccgttttgtgtgtctctaatctcccagactctgtacattctg

SEQ ID NO: 16355 - DNA, 80 bp, synthetic construct
  source 1..80: mol_type = other DNA
aaaacttatcattgtgatcagaacactaacacaaacaaaattcagtaccacaagccctaacttagcctaagctgcttcag

SEQ ID NO: 16356 - DNA, 80 bp, synthetic construct
  source 1..80: mol_type = other DNA
tgactttgcatgcagtatggtatcaagcaatctcgtatctcattttagtactcatagaaactataggaaatggatatttt

SEQ ID NO: 16357 - DNA, 80 bp, synthetic construct
  source 1..80: mol_type = other DNA
acagacacaggcaaatatcccgaatatatacggaactcttaaacatcagcaaaaaaaccatccaatgctggcaaggatgc

SEQ ID NO: 16358 - DNA, 80 bp, synthetic construct
  source 1..80: mol_type = other DNA
tgtaacaaagttacacactaatacaaactgttaatgataggggaaactgtatgtgtggggcggggagtatatgggacttc

SEQ ID NO: 16359 - DNA, 80 bp, synthetic construct
  source 1..80: mol_type = other DNA
aatcatcatgtatttccaggacacctggcaagatgctcctcagaatttccccaaagcaatgaccacaacttcaagtatta

SEQ ID NO: 16360 - DNA, 80 bp, synthetic construct
  source 1..80: mol_type = other DNA
ctaaaaaataaaaagaggaggtcagaaggatgtgatgtgagaaagactcagtctattgttgctgggtttgaagatggaag

SEQ ID NO: 16361 - DNA, 80 bp, synthetic construct
  source 1..80: mol_type = other DNA
attccttcctcctctaaaacccctggagaccactgtgctttttactgttttcatagttttgcgttttccagaatcataca

SEQ ID NO: 16362 - DNA, 80 bp, synthetic construct
  source 1..80: mol_type = other DNA
atgtaatgaactgtaagaattcattttgaatgttgaaccagtcttggaaacctgagggaaatcccacttagtcatgatgt

SEQ ID NO: 16363 - DNA, 80 bp, synthetic construct
  source 1..80: mol_type = other DNA
gaaggttattaaatatggattcatttttagagagttctatcctccttcaatgcctggggttccatgaggaaatcagagct

SEQ ID NO: 16364 - DNA, 80 bp, synthetic construct
  source 1..80: mol_type = other DNA
ttaaaaagtaggcttataggaatcctaagcctactttctacattctttcctatgacacccctctccattacagaacaaca

SEQ ID NO: 16365 - DNA, 80 bp, synthetic construct
  source 1..80: mol_type = other DNA
gcttccttcaggactcactgaatgtgaccagacaaataatgagggttttctgagttaggtgtcctagacttccatcagta

SEQ ID NO: 16366 - DNA, 80 bp, synthetic construct
  source 1..80: mol_type = other DNA
agttctgattggtcaggtgagagatgaaatcatagggagttgatactgtcctctcgtgctgagtcacttcctgggagggg

SEQ ID NO: 16367 - DNA, 80 bp, synthetic construct
  source 1..80: mol_type = other DNA
atgatgtgcctgcctagtgctgtcagtctggtgtcgaagcttattactcattgtattactttctatctctttgcttaggt

SEQ ID NO: 16368 - DNA, 80 bp, synthetic construct
  source 1..80: mol_type = other DNA
tgtatagtatctcatacactgttgcacccacaacagtgtacagtggagagagtgggaaattaccctctatccagattcat

SEQ ID NO: 16369 - DNA, 80 bp, synthetic construct
  source 1..80: mol_type = other DNA
tgagtctctctaaaaagcttctcttaacatttcttacaaggaagatgtactggaaaaacatttcttcaattgttgtttgt

SEQ ID NO: 16370 - DNA, 80 bp, synthetic construct
  source 1..80: mol_type = other DNA
gcttttcagttttggaggttttcattgatatatcctcaaattagagagtcttcatcagttgtgttctatctactaataag

SEQ ID NO: 16371 - DNA, 80 bp, synthetic construct
  source 1..80: mol_type = other DNA
ggcttaacagggcttgagttgtatatttttctcgttttatgaagaaggccagaggcaactagagtatagtttctatggct

SEQ ID NO: 16372 - DNA, 80 bp, synthetic construct
  source 1..80: mol_type = other DNA
cgagatgttatgtatgaaagtaactaaaagacttgggcacttgggctgaaataacccatatggagtgcaacagttaagag

SEQ ID NO: 16373 - DNA, 80 bp, synthetic construct
  source 1..80: mol_type = other DNA
cctgtgtaagatcagctccctgtgtttctcaaaaacagactatatcataaaccatagcatcctgtgcttacactagtgat

SEQ ID NO: 16374 - DNA, 80 bp, synthetic construct
  source 1..80: mol_type = other DNA
tacaaaaaaatgaagccctcaaagttgaaattagacaaagttatgcagatcattcaggaaataaaaggaggataaaagga

SEQ ID NO: 16375 - DNA, 80 bp, synthetic construct
  source 1..80: mol_type = other DNA
ctcatcctatatgtctctgttcttttctctcatctcctcttctcaatgacttttccacaccttctcttcactcctcagtc

SEQ ID NO: 16376 - DNA, 80 bp, synthetic construct
  source 1..80: mol_type = other DNA
gcacaacaccttgtatagtagtagactatagtagactactattcattcagaaggagtggaaatataactctatagtcata

SEQ ID NO: 16377 - DNA, 80 bp, synthetic construct
  source 1..80: mol_type = other DNA
agaagggacccagataactgaaagctgtagctgtccaaagagaagcctgtctcaaagttttcagggattgttctgaaaac

SEQ ID NO: 16378 - DNA, 80 bp, synthetic construct
  source 1..80: mol_type = other DNA
gcaattccattattgggtatatatccaaaggaataatcactctaccataaaggcacatgcacatacgtgttcatcacagc

SEQ ID NO: 16379 - DNA, 80 bp, synthetic construct
  source 1..80: mol_type = other DNA
caatagaaaggttttcaatgcacccaaaacgatgcaaactgcacttccctggacattgctgcagtcagagtgtgagtcat

SEQ ID NO: 16380 - DNA, 80 bp, synthetic construct
  source 1..80: mol_type = other DNA
ctctctgagccttttggccctgatctgtgacctcatgggattttctttatgtagagaatgcttaggtatgcttacaaaga

SEQ ID NO: 16381 - DNA, 80 bp, synthetic construct
  source 1..80: mol_type = other DNA
agagattaagggcacagcgtccagaattagaaagccctgggtttgaatatcagttataatacattttagctatgtcacct

SEQ ID NO: 16382 - DNA, 80 bp, synthetic construct
  source 1..80: mol_type = other DNA
tctctctacccttcaatacatcattgtccttttagcaacatcctccaatcccacagttcttaaggtttttacttctgcca

SEQ ID NO: 16383 - DNA, 80 bp, synthetic construct
  source 1..80: mol_type = other DNA
aagcaatgtagacttctgctttcatgaagatggagtagatgtacttttctctgttcctcctgctaagtacaacctaaaat

SEQ ID NO: 16384 - DNA, 80 bp, synthetic construct
  source 1..80: mol_type = other DNA
aacagaagaataaacagaggaagaatcaataaagagaaagatagaataaaagaaatcaccagtctgaacagtgataaaca

SEQ ID NO: 16385 - DNA, 80 bp, synthetic construct
  source 1..80: mol_type = other DNA
gctttccaagttatgtttgacaatagaagcaaaaattataaacaccgctgatatggtcttaagtgtatatagaggaaaga

SEQ ID NO: 16386 - DNA, 80 bp, synthetic construct
  source 1..80: mol_type = other DNA
ctctgagctaaaacactttcagaccagcctaacagaatctctctgaacaactcctctcaggctgtagtcctcattctaca

SEQ ID NO: 16387 - DNA, 80 bp, synthetic construct
  source 1..80: mol_type = other DNA
aagggtcaactgtgacatttacagaatgctccactcaacaagaaaagagtacacatttttttcaggccaggtgtggtgtt

SEQ ID NO: 16388 - DNA, 80 bp, synthetic construct
  source 1..80: mol_type = other DNA
agaaataattccaaaggctctggcttccattgtcactattgagcagtctttttttatctggctacttctaagttttctct

SEQ ID NO: 16389 - DNA, 80 bp, synthetic construct
  source 1..80: mol_type = other DNA
gtcttccagttcactaactcttttttcaattgtatcaaacttactattaaagttgttcattgagttttgagtctcagctg

SEQ ID NO: 16390 - DNA, 80 bp, synthetic construct
  source 1..80: mol_type = other DNA
atgatcctgggatccagatcttcagaaggtctatcataattctggctcactgattaaaggatgtagcccattgaagttca

SEQ ID NO: 16391 - DNA, 80 bp, synthetic construct
  source 1..80: mol_type = other DNA
ctgtcatgcaaacctacaactatatgattgctaatgcccaaattagaaattcatcacatgcattgtaaaaactgcagctt

SEQ ID NO: 16392 - DNA, 80 bp, synthetic construct
  source 1..80: mol_type = other DNA
caggtcactcccaccctaatactgcgcttttccaacagtcttcacaaacggcacaccaagagattatatcccgggcctgg

SEQ ID NO: 16393 - DNA, 80 bp, synthetic construct
  source 1..80: mol_type = other DNA
acatccacaccaaaaccccatctgtacgtcaccatcatcaaagaccaaaggtagataaaaccacaaaaatggggaaaaaa

SEQ ID NO: 16394 - DNA, 80 bp, synthetic construct
  source 1..80: mol_type = other DNA
tcagattcaccaaggttgaaattaaggaaaaaatgttaagggcagccagagagaaaggttgggttacccacaaagggaag

SEQ ID NO: 16395 - DNA, 80 bp, synthetic construct
  source 1..80: mol_type = other DNA
aacattagacagatcaatgagacagaaagtcaacaagatatccaggaattgaactcagctctgcaccaagcggacctaat

SEQ ID NO: 16396 - DNA, 80 bp, synthetic construct
  source 1..80: mol_type = other DNA
agcagcacatcaaaaagcttatccaccacgatcaagtgggcttcatccctgggatgcaagtctggttcaacatatgcaaa

SEQ ID NO: 16397 - DNA, 80 bp, synthetic construct
  source 1..80: mol_type = other DNA
ctgactttaaactatactacaaggctacagtaaccaaaacagcatggtactggtaccaaaacagagatatagaccaatgg

SEQ ID NO: 16398 - DNA, 80 bp, synthetic construct
  source 1..80: mol_type = other DNA
gcacatgtatgtttattgcggcactattcacaatagcgaagacttcgaaccaacccaaatgtccaaaaatgatagactgg

SEQ ID NO: 16399 - DNA, 80 bp, synthetic construct
  source 1..80: mol_type = other DNA
tcagttctgaatgaattgtgggtctgaacaaaagcagagggcatgtaatatcactaggttgaaggacatggcatatatcc

SEQ ID NO: 16400 - DNA, 80 bp, synthetic construct
  source 1..80: mol_type = other DNA
gcaaaggaagtttggcaatcttatcaagcaagacagagagacaattctgaagtctgagacagtctgtcattaaacctaag

SEQ ID NO: 16401 - DNA, 80 bp, synthetic construct
  source 1..80: mol_type = other DNA
tggtctacccatctcagcctcttccacattttccaattaatatatatttggtatttatttattcctcatctccaccacta

SEQ ID NO: 16402 - DNA, 80 bp, synthetic construct
  source 1..80: mol_type = other DNA
actaaaaactaccaagaatccgtggctctaagaaagtctttgatcttagacttgcctgtattcctcatctctcacagagt

SEQ ID NO: 16403 - DNA, 80 bp, synthetic construct
  source 1..80: mol_type = other DNA
tcctcctgtcttgtgaactaggcaaggtggaggggaggagggcagcaggagtagtagtggtctccttccttagcaggaag

SEQ ID NO: 16404 - DNA, 80 bp, synthetic construct
  source 1..80: mol_type = other DNA
gagttcaagaccagcctggccaacgtggtgaaaccccatctcaattaaaaatacaaaaattggggtggggggagggggga

SEQ ID NO: 16405 - DNA, 80 bp, synthetic construct
  source 1..80: mol_type = other DNA
aggcctggaccacagccagatgatcacagaagcagtggtagatgtcagcaatgctgtcaaatgccatctgggaggtctgt

SEQ ID NO: 16406 - DNA, 80 bp, synthetic construct
  source 1..80: mol_type = other DNA
aaaagaaaggaaaagaaaagaaaaaaggaaagaagaaagaaaaccacaaagacgggagttgggggaagagggactctggc

SEQ ID NO: 16407 - DNA, 80 bp, synthetic construct
  source 1..80: mol_type = other DNA
cataatgcaaaaacaggcttgataattagtgaagtccatgtaactagaggttgcaaggctgaggtctttttctggaatgc

SEQ ID NO: 16408 - DNA, 80 bp, synthetic construct
  source 1..80: mol_type = other DNA
cactagcacaggtgaagtaatcttctaggtatggtaatgttgatgaatacacttaccaggttttgcccactctaagcacc

SEQ ID NO: 16409 - DNA, 80 bp, synthetic construct
  source 1..80: mol_type = other DNA
ctttgatagaaggagttatttcctgaatggaacccaagttgaaaatgaattcactccctattaagataaagcagacctgg

SEQ ID NO: 16410 - DNA, 80 bp, synthetic construct
  source 1..80: mol_type = other DNA
agaacaacaagattaatagtgcttagtgggacacagaactttatggtctatggggactttcctatgtgtggagcaaccat

SEQ ID NO: 16411 - DNA, 80 bp, synthetic construct
  source 1..80: mol_type = other DNA
aggggtttccacttttgaatcttcctcattctctctttgcctgccaccatccatgtaagacgagacttgctcttccttgc

SEQ ID NO: 16412 - DNA, 80 bp, synthetic construct
  source 1..80: mol_type = other DNA
atggctgtgccctggtagtcacatacttcatttcatttaatccaaggagcaatttccattacccttgttttatggatgag

SEQ ID NO: 16413 - DNA, 80 bp, synthetic construct
  source 1..80: mol_type = other DNA
gaacagtgagcgtggaaggttgggagtgagtaaatggagagagaatagataacatcttcaagatgtttagctgaaaagag

SEQ ID NO: 16414 - DNA, 80 bp, synthetic construct
  source 1..80: mol_type = other DNA
ggaattttgttgtactttaaaaattggagatattttagcatatttcccacaattcgtgggtaggaagcagccagtagaga

SEQ ID NO: 16415 - DNA, 80 bp, synthetic construct
  source 1..80: mol_type = other DNA
aaatgtcttcagcaggagcccgtgtatttcaggaatacttttaagctaagaacaaaaaaatagcccaacccttgaagttc

SEQ ID NO: 16416 - DNA, 80 bp, synthetic construct
  source 1..80: mol_type = other DNA
ctgaggtttctcaccctgcaaagcctgagactcttgcactcagtttctcttttggattatgccagtcctgtgacaggtga

SEQ ID NO: 16417 - DNA, 80 bp, synthetic construct
  source 1..80: mol_type = other DNA
taggagggaaacctgagatttgacaaggaaagtaaaatgcccagggtcagtcaaaggcagcagcttagtacttggatcat

SEQ ID NO: 16418 - DNA, 80 bp, synthetic construct
  source 1..80: mol_type = other DNA
ctgaggcctggtctctcccctagttccacctaggggacaaaaaaaagacatgcatttaaatgaggacagtgccacttgga

SEQ ID NO: 16419 - DNA, 80 bp, synthetic construct
  source 1..80: mol_type = other DNA
tctgtctcaaaaaaaaaaaaaaaaaccgcaaactaagaattaaataacacagctactaaggggggaagccagcagtcaca

SEQ ID NO: 16420 - DNA, 80 bp, synthetic construct
  source 1..80: mol_type = other DNA
aaggagacacattaataactgtaatcccacacttgacactttaggaaaacagtggcacagccattagctcatgtgggcca

SEQ ID NO: 16421 - DNA, 80 bp, synthetic construct
  source 1..80: mol_type = other DNA
ggctcatatctgctcagctctcagaattttggaagcactaatctatccatcagctcatccaagccatatgacagctctgg

SEQ ID NO: 16422 - DNA, 80 bp, synthetic construct
  source 1..80: mol_type = other DNA
gaatatgtatatttggtcaatgcgttcagcttaaatttctgtccaacccctcctcccttgaagtgtctgtctctggactc

SEQ ID NO: 16423 - DNA, 80 bp, synthetic construct
  source 1..80: mol_type = other DNA
ctccacactctcctggccccagtctaccaatctgaaaaaaggaaaggttgaattaaatgagctccatattccttccacct

SEQ ID NO: 16424 - DNA, 80 bp, synthetic construct
  source 1..80: mol_type = other DNA
tgggaatccacagatggtgttgtgatccacacgcatcgtggcgctctgtaaaatgcaccttcatataatacttgaacaaa

SEQ ID NO: 16425 - DNA, 80 bp, synthetic construct
  source 1..80: mol_type = other DNA
gattcacaatgctgacgttcgtcagaaggatttggagagatagacccaatttggttttctcaagtagggtctgatcaggt

SEQ ID NO: 16426 - DNA, 80 bp, synthetic construct
  source 1..80: mol_type = other DNA
ccttctttatagatgagagaatggacgctcagggagatgctgggacttgcctgagatcacttgaccagcaaataacaact

SEQ ID NO: 16427 - DNA, 80 bp, synthetic construct
  source 1..80: mol_type = other DNA
caggcacatggccggagttcagtgaaggtgtgttaaatgaatgagtgaatgactggaggagcaggaagggacacgattta

SEQ ID NO: 16428 - DNA, 80 bp, synthetic construct
  source 1..80: mol_type = other DNA
tgggtagaagaaacaaaggatctttctactgggagtactccaggttagacgccctatagcagtcacctttggcctctttc

SEQ ID NO: 16429 - DNA, 80 bp, synthetic construct
  source 1..80: mol_type = other DNA
aaccagcagtcccaggttcaaattccagcactgcatcactggctttaagagaactcagtgaaatgtccttccccttttca

SEQ ID NO: 16430 - DNA, 80 bp, synthetic construct
  source 1..80: mol_type = other DNA
gagttcgagaccagcctgaccaacatggtgaaacacccccatctctactaaaaaaaaaatacaaaaaattagctgtgtgt

SEQ ID NO: 16431 - DNA, 80 bp, synthetic construct
  source 1..80: mol_type = other DNA
tgttttaggcatagagagactctccctccaggccctagttgctattttttaggtcatcctgggtctagatggggtagcca

SEQ ID NO: 16432 - DNA, 80 bp, synthetic construct
  source 1..80: mol_type = other DNA
ataccaggcataggacattttcctttaatcctaataaaaacactgggagatagacactgctcactcacttacagagaaga

SEQ ID NO: 16433 - DNA, 80 bp, synthetic construct
  source 1..80: mol_type = other DNA
tttcatgatgatatgctaaacaaggggtggattattcatgcctcccttttagaccatatagggtaacttcctgacattgc

SEQ ID NO: 16434 - DNA, 80 bp, synthetic construct
  source 1..80: mol_type = other DNA
aaaatttaatttacttattattatttttacatagagatggggtatcaccatgtcacccaggctactctggaactactggg

SEQ ID NO: 16435 - DNA, 80 bp, synthetic construct
  source 1..80: mol_type = other DNA
tcaaatgagaatcttatgacctatttcagggtgaaaggtgggagaaggtcagagtggggtgactatcctaggttttatga

SEQ ID NO: 16436 - DNA, 80 bp, synthetic construct
  source 1..80: mol_type = other DNA
gcagtcctggactggaccatccttccaaggggagttccgccctgagtcagggaggcgaaggtttgctgtcagcgcgtcag

SEQ ID NO: 16437 - DNA, 80 bp, synthetic construct
  source 1..80: mol_type = other DNA
ctccctagccacacgcacttccatttcctcagccaaattcctcaacctgtttgtatagacatttctccaaagcaagatat

SEQ ID NO: 16438 - DNA, 80 bp, synthetic construct
  source 1..80: mol_type = other DNA
ggagatagttgtatggctttgtaaatgtactaaaacccactggattgtgcacttttaaaagggtggattttatggctatg

SEQ ID NO: 16439 - DNA, 80 bp, synthetic construct
  source 1..80: mol_type = other DNA
accttggttctgaggtctagggctatctaatcaggtcagggccattctcggggattctatctattctctttccctggttt

SEQ ID NO: 16440 - DNA, 80 bp, synthetic construct
  source 1..80: mol_type = other DNA
aatcctttgaagtttttcttctcttaggaattctcttagagtttcaggaggagactccaggcaggttgcgatgtttgggg

SEQ ID NO: 16441 - DNA, 80 bp, synthetic construct
  source 1..80: mol_type = other DNA
ctcccactttgtgtcctttaccttttcaggcacccaactattgcctgtcccaggaaggaatcaaagaaagccacttcaac

SEQ ID NO: 16442 - DNA, 80 bp, synthetic construct
  source 1..80: mol_type = other DNA
cactgaagtcacctcctgaactcacatcctaggattgtgatcctaaggctcaaaaggtcaagccttgggccaggcacggt

SEQ ID NO: 16443 - DNA, 80 bp, synthetic construct
  source 1..80: mol_type = other DNA
gcctggcatgcagtagaccctccggaattgcgtgtgtaataataatagtgtcatacactacttactatgcaccagacact

SEQ ID NO: 16444 - DNA, 80 bp, synthetic construct
  source 1..80: mol_type = other DNA
agaggcaggaaaatgggaaaactcagcgcgtgcatgaagaatgcagagtcgttctctaggcctgcgtggaaacttgtcaa

SEQ ID NO: 16445 - DNA, 80 bp, synthetic construct
  source 1..80: mol_type = other DNA
cacacccaggtagccctgccttagctgctgttctgaactgccgaattcttccacttctgaattccttatctggagaactt

SEQ ID NO: 16446 - DNA, 80 bp, synthetic construct
  source 1..80: mol_type = other DNA
atcagtttcctcacctatgaaacaggcataatgagagcactcacccttgaggtttgttgtggggctcaaattatttttat

SEQ ID NO: 16447 - DNA, 80 bp, synthetic construct
  source 1..80: mol_type = other DNA
ataatctctgtcctgtctgtctcctaaagctgtgatcagagtccagcgagatggtggagataaactgtaaagtgccatca

SEQ ID NO: 16448 - DNA, 80 bp, synthetic construct
  source 1..80: mol_type = other DNA
ctccatgcaagggggtgtgttttctgactctgttgacattgtccaggcagacggggtatctccacaggcagatgtgacat

SEQ ID NO: 16449 - DNA, 80 bp, synthetic construct
  source 1..80: mol_type = other DNA
taaggccaggtattttttgacaaacatccctggggatattaatcatcatgaaggtctgagaaacacaacagtaatcctaa

SEQ ID NO: 16450 - DNA, 80 bp, synthetic construct
  source 1..80: mol_type = other DNA
ttcttccccaaggaaatgcccaaggaaaaacgtgagcttcagtttcggcgaaaggtcttagcagtcacagactcacctgc

SEQ ID NO: 16451 - DNA, 80 bp, synthetic construct
  source 1..80: mol_type = other DNA
ggcaggatagccattctgggccagggacttccaagtttttcagatacccacaaaaacacgaggcctgaaaaacaacaaat

SEQ ID NO: 16452 - DNA, 80 bp, synthetic construct
  source 1..80: mol_type = other DNA
gcctttctgattctgcctagttcaggccaaagtttcgagaagatgaaattcctagaacttaaaggtggagtgatgtttat

SEQ ID NO: 16453 - DNA, 80 bp, synthetic construct
  source 1..80: mol_type = other DNA
gtatcttctgcagggcgagagaatgggcaagaggagaaagtgaagggcagagctaactctgaaatctcaccaggcgtccc

SEQ ID NO: 16454 - DNA, 80 bp, synthetic construct
  source 1..80: mol_type = other DNA
tccacatttctaaatggctgcaattttggctaagagtctgtaagcctgtgatgtccactgtctcccagtcgttaacttcc

SEQ ID NO: 16455 - DNA, 80 bp, synthetic construct
  source 1..80: mol_type = other DNA
taaagactaaatctaaagaataagatttcagttgggaaaagggttctgttcctaaaaaccagctgagctagtccaatact

SEQ ID NO: 16456 - DNA, 80 bp, synthetic construct
  source 1..80: mol_type = other DNA
tccaaacgcaagttctgtttagaccaatcattctcagggtatgcttaagaagctagtactgtcaggtgcgtctaccatgc

SEQ ID NO: 16457 - DNA, 80 bp, synthetic construct
  source 1..80: mol_type = other DNA
cttggctactgtgaatggtgctgcaataagcgtgagagtgcagatctctctcctttctttcatttaaatacattctttta

SEQ ID NO: 16458 - DNA, 80 bp, synthetic construct
  source 1..80: mol_type = other DNA
ctgaccttagatgatccacctgcctctgcctcccaaagtgtcttagctatttttaagtgtataataaatccagctctgtc

SEQ ID NO: 16459 - DNA, 80 bp, synthetic construct
  source 1..80: mol_type = other DNA
catggacccataaagattaattcagttgataccattgagccatttatttggttctgaggtttctggtagcccaaagggaa

SEQ ID NO: 16460 - DNA, 80 bp, synthetic construct
  source 1..80: mol_type = other DNA
gcagaggcacgtttcctgtttctggagcccgttattactcagctgtcctcaaaacagatgagggggcaagcggcagaaat

SEQ ID NO: 16461 - DNA, 80 bp, synthetic construct
  source 1..80: mol_type = other DNA
gaccaaataggaatgtacacgtgggagcagacgacattgtggttgtttctactctttatgagaacaaggaacccaagcaa

SEQ ID NO: 16462 - DNA, 80 bp, synthetic construct
  source 1..80: mol_type = other DNA
cttgagctcggatctgagtcctgccactctctagttatgtgatgctgaacaagttgcctaccttcagaacttgtttgctc

SEQ ID NO: 16463 - DNA, 80 bp, synthetic construct
  source 1..80: mol_type = other DNA
acagactgctctgtctctgccccatcctcttttccaggctttattttagggaagatggtattcttttcctctcatcctca

SEQ ID NO: 16464 - DNA, 80 bp, synthetic construct
  source 1..80: mol_type = other DNA
gctcgcttcctcccagggtagcctcttccaaactgctgtccccattgggtataagtctcttttttttttttttttttttt

SEQ ID NO: 16465 - DNA, 80 bp, synthetic construct
  source 1..80: mol_type = other DNA
acacccggcctaggcataagtcttcttccagctaattttttgcttttaattctgacctcagcctacatagcaaaataact

SEQ ID NO: 16466 - DNA, 80 bp, synthetic construct
  source 1..80: mol_type = other DNA
ttagtaggcattaaccgttatttatcattatttcctttcttatttctgacagtcagaagatggtgattgtgccccctccc

SEQ ID NO: 16467 - DNA, 80 bp, synthetic construct
  source 1..80: mol_type = other DNA
tctactccttgtgagtctttgcacatgcaatcctctctgcctggaccatcattttttattgctttcaaaaccttccctat

SEQ ID NO: 16468 - DNA, 80 bp, synthetic construct
  source 1..80: mol_type = other DNA
gttagtttccttttctaaattgagtttcctcatctggaagattgggtcaataatccttgctctgcctgtctcaagggcta

SEQ ID NO: 16469 - DNA, 80 bp, synthetic construct
  source 1..80: mol_type = other DNA
gggcttggactccatgcatggtgctgggcctagacgcagcggccgggactccctagcctcaggccacccccagatgctat

SEQ ID NO: 16470 - DNA, 80 bp, synthetic construct
  source 1..80: mol_type = other DNA
cctgtccctctctagactctaccatgcagtaggggcacctgtacaacctggaccatgccagattgaaattcatggctcaa

SEQ ID NO: 16471 - DNA, 80 bp, synthetic construct
  source 1..80: mol_type = other DNA
aggcaccattttaggagctagcaggagactggggaggtaattttttgccaaaacagtcactttttttcctaactccaagc

SEQ ID NO: 16472 - DNA, 80 bp, synthetic construct
  source 1..80: mol_type = other DNA
ggactagagtaaatggaatggagtcaagtgggataaaattgattgcaatagaattaagtggaatggggcgggttagaaga

SEQ ID NO: 16473 - DNA, 80 bp, synthetic construct
  source 1..80: mol_type = other DNA
tcaggcaccactggaaggggcatggatgagacttcaggggcagaaactctcaagcccaggagggtgtggaggctgagata

SEQ ID NO: 16474 - DNA, 80 bp, synthetic construct
  source 1..80: mol_type = other DNA
ggaagtccctggtctgaggagggagccaggtcctcaatcaaatgatttttagagtaaaaagtaaatggatattttatcac

SEQ ID NO: 16475 - DNA, 80 bp, synthetic construct
  source 1..80: mol_type = other DNA
gcctctgccccacacccaccccaagcccaagacagggacatccagcttccgcctttggcctcctctgcagcctggccact

SEQ ID NO: 16476 - DNA, 80 bp, synthetic construct
  source 1..80: mol_type = other DNA
tgcatgctctcactctgtagctctcgtctctctgtctctctctgttggcagatgtagaacattattctcacaataagctt

SEQ ID NO: 16477 - DNA, 80 bp, synthetic construct
  source 1..80: mol_type = other DNA
gataggacacagaaggctagcgagcattcagtcagtcagtcagtcaacaaacttcactgatctcttcctctgtgccaggc

SEQ ID NO: 16478 - DNA, 80 bp, synthetic construct
  source 1..80: mol_type = other DNA
cacagtgcctaggcaattttaaatactcagtaatacacatttctattacgcccattgtacagatgagaaatggaggccca

SEQ ID NO: 16479 - DNA, 80 bp, synthetic construct
  source 1..80: mol_type = other DNA
gctcccagaacaccctttgtaccacccagtctcatctaccccttgcttaaaattttcccaaggcccccagcatccacctc

SEQ ID NO: 16480 - DNA, 80 bp, synthetic construct
  source 1..80: mol_type = other DNA
gggcaggggcaggtggataccaggaggtccttaaccacaggcagaacaaggaattccaaggacggagttcaagaaaggag

SEQ ID NO: 16481 - DNA, 80 bp, synthetic construct
  source 1..80: mol_type = other DNA
cagctatccggaagctcgccaaagcttcattatgtaggcatgattgattaaatcactggatattggcagtcacctcaacc

SEQ ID NO: 16482 - DNA, 80 bp, synthetic construct
  source 1..80: mol_type = other DNA
gtgaccagaaacatacagaggtcagcacaggaccctgatggtcagtgggtgtgttgtcttgtatatgggaccaggctctg

SEQ ID NO: 16483 - DNA, 80 bp, synthetic construct
  source 1..80: mol_type = other DNA
gagctcaccagtccttcaagctaaacactgcccccctccttttatagatgaggaaagtgacagttaaagcaagtagccca

SEQ ID NO: 16484 - DNA, 80 bp, synthetic construct
  source 1..80: mol_type = other DNA
gaggtcaatgtctccctgaggcctcagtatctctgatttcacaatgagtgatgactgctgacgtccatgccctggcctgg

SEQ ID NO: 16485 - DNA, 80 bp, synthetic construct
  source 1..80: mol_type = other DNA
ttgggtattttctaatttcagacaaacacacactcagcgcgcactcactgattcctacacattgccaagatttcacacat

SEQ ID NO: 16486 - DNA, 80 bp, synthetic construct
  source 1..80: mol_type = other DNA
ttcccacatgataaaagaaaagggaggtacagaagttccaattccctttttattttgctggttggtatctgtaaatgttt

SEQ ID NO: 16487 - DNA, 80 bp, synthetic construct
  source 1..80: mol_type = other DNA
gcccaccatcacgtacagataattttctcaaatttttgtagggatgatgtcttgtaatgttgaacaggctggtcccaaac

SEQ ID NO: 16488 - DNA, 80 bp, synthetic construct
  source 1..80: mol_type = other DNA
agaattgctgtctgccctgtgatcccatcatgagctgggcttggctcctatgggtgaggaccgtgatggtcttcttctgt

SEQ ID NO: 16489 - DNA, 80 bp, synthetic construct
  source 1..80: mol_type = other DNA
cagggcctccttccctggattcacatgccccacacctggacctttgctttttctttttattgtgggatttattttatttt

SEQ ID NO: 16490 - DNA, 80 bp, synthetic construct
  source 1..80: mol_type = other DNA
ctttgaactcaaggaagggcacccgcatgaagatgggagctcggtgacacttctccaggtcaccaccctggtagatcatg

SEQ ID NO: 16491 - DNA, 80 bp, synthetic construct
  source 1..80: mol_type = other DNA
actctgatgactcagcaaaagcacaggcctaggcagggtggctcccacctataatcccagaccctagggaggctgaggcc

SEQ ID NO: 16492 - DNA, 80 bp, synthetic construct
  source 1..80: mol_type = other DNA
aggccctggaaaggtcacctacctgctggctccaggccagtcttgaaggtgccaggggttctggcccagtgcagcccaca

SEQ ID NO: 16493 - DNA, 80 bp, synthetic construct
  source 1..80: mol_type = other DNA
aggttcccttgactaagactttgtattgcactctagtaacaacctgtcggacccacacggggtgacacagaaaagaggcg

SEQ ID NO: 16494 - DNA, 80 bp, synthetic construct
  source 1..80: mol_type = other DNA
ccaaagcccactcacgtcttctaattccgagtcttccactatttcccccgtgctcatccatcacagccagatcaggtcac

SEQ ID NO: 16495 - DNA, 80 bp, synthetic construct
  source 1..80: mol_type = other DNA
ctctactcactcactattagcgggtgctcagtagaaggcacccgttttccattattttattaactatttcttggctatcg

SEQ ID NO: 16496 - DNA, 80 bp, synthetic construct
  source 1..80: mol_type = other DNA
cggcaggatacggaggagttagggcggctccaggcaggggggcggaccccaagcccttgcccgcctgccgccgcctggtc

SEQ ID NO: 16497 - DNA, 80 bp, synthetic construct
  source 1..80: mol_type = other DNA
tctacataaaagtaaaatcaaaagtctctggagagaattgtgttggtccagctcgggttagttgtccattcaaccggtga

SEQ ID NO: 16498 - DNA, 80 bp, synthetic construct
  source 1..80: mol_type = other DNA
aactaatcttttatataacttttgggaccaccttgaaccctactgaaatgttatagttcttcaacaattctaaatttcat

SEQ ID NO: 16499 - DNA, 80 bp, synthetic construct
  source 1..80: mol_type = other DNA
ggtggatcacttgaggtcaggagttcatgaccagcctggccaagatggtgaaactctgtctctactaaaaatacaaaatg

SEQ ID NO: 16500 - DNA, 80 bp, synthetic construct
  source 1..80: mol_type = other DNA
cagcataagtccacaaacttaccaaacaacctttcaatttcagcatgtggaacataaaatggtggacctaggtaaaagag

SEQ ID NO: 16501 - DNA, 80 bp, synthetic construct
  source 1..80: mol_type = other DNA
taggtctcatcttttaatgagtttttaagaccccaatttattcaagcagaaacaaaatactagctgggaacggtggctca

SEQ ID NO: 16502 - DNA, 80 bp, synthetic construct
  source 1..80: mol_type = other DNA
ccaacaactttacctggatgtttagttggatcataagaaagaacacacaggagatactgaaacttctttcccaggaggga

SEQ ID NO: 16503 - DNA, 80 bp, synthetic construct
  source 1..80: mol_type = other DNA
gaaactgaattaagagaccaaagaggaattgctaattagctgtggtcctactgaaagttggagcttttgtattgtatggt

SEQ ID NO: 16504 - DNA, 80 bp, synthetic construct
  source 1..80: mol_type = other DNA
actggtttacattaggcaagaactcgagagtcacagcagaaaatacatcagtacttgacaatgtacaatctaaggagaag

SEQ ID NO: 16505 - DNA, 80 bp, synthetic construct
  source 1..80: mol_type = other DNA
agaaagaacagagctggaaatgtaaagactgtcagagcgaataccatgtataatctgttcagttacttgccccgcctctg

SEQ ID NO: 16506 - DNA, 80 bp, synthetic construct
  source 1..80: mol_type = other DNA
agcctcctttttggccaagtgatgagtctgctccatacaactaagtaattcaatatttccatgctatatccaagtaagca

SEQ ID NO: 16507 - DNA, 80 bp, synthetic construct
  source 1..80: mol_type = other DNA
gttttgaatctcaactctgtcacataccagctgcttaactttggacaagtaacttaatctctttgacctcagtttcctca

SEQ ID NO: 16508 - DNA, 80 bp, synthetic construct
  source 1..80: mol_type = other DNA
agcctctggctcaggtatcagggactttcaggagatgagctcttatctcccttggctacttgaaattcatttctattaca

SEQ ID NO: 16509 - DNA, 80 bp, synthetic construct
  source 1..80: mol_type = other DNA
cagccaatgagcatttatttgctgagtacctaatagacaagacatctatcctgggttcttgacagtagatttgaattcga

SEQ ID NO: 16510 - DNA, 80 bp, synthetic construct
  source 1..80: mol_type = other DNA
taattggcctggggtaagacctttggattgggaatttttataagatccagagatgatttcaaatgtgcagcctgggcggg

SEQ ID NO: 16511 - DNA, 80 bp, synthetic construct
  source 1..80: mol_type = other DNA
ataaaatccggcgcttctacacctggcaggttttttcctctcggaagtcccctctctctcactaaagagagagctgtttt

SEQ ID NO: 16512 - DNA, 80 bp, synthetic construct
  source 1..80: mol_type = other DNA
aggaagcaccgccaggttgggcaggtaactcccatctcttcccttaataccctgtgtctttacacttagctccatgcatt

SEQ ID NO: 16513 - DNA, 80 bp, synthetic construct
  source 1..80: mol_type = other DNA
aaatcagcactgcccattaaaattttctgcattgatgaaaatgtctatatctgtcgctgtccaataaaataggcattagc

SEQ ID NO: 16514 - DNA, 80 bp, synthetic construct
  source 1..80: mol_type = other DNA
tctcaggatcttggactcaagagaaaacagtaccagtggtacaaatatctaggcacagttatgattttatgtcaagtgaa

SEQ ID NO: 16515 - DNA, 80 bp, synthetic construct
  source 1..80: mol_type = other DNA
acctaaatatcttaaacattttgttttaatgctttttggccttagctcatggtcagtttttctattcacatctcatgtct

SEQ ID NO: 16516 - DNA, 80 bp, synthetic construct
  source 1..80: mol_type = other DNA
gaggccaccacacctggcgcatttactaaccttttcatacattcttttttctttcctgctcagtggtcaaagttctcaac

SEQ ID NO: 16517 - DNA, 80 bp, synthetic construct
  source 1..80: mol_type = other DNA
agataattctgttaatgtttatctgctcataccatttcatctcaaccgcttttccgcaaagaggaaaaaataccctcagt

SEQ ID NO: 16518 - DNA, 80 bp, synthetic construct
  source 1..80: mol_type = other DNA
cattgcttgagcacctgttgtaggtataaatattcagggccaatacataggtgccgtagggatcaaagaacatattttat

SEQ ID NO: 16519 - DNA, 80 bp, synthetic construct
  source 1..80: mol_type = other DNA
cactgcaccttgccatttcaacatccaataagaagtgataacaaaaaattactttcagtgcgtctggtggtagaataata

SEQ ID NO: 16520 - DNA, 80 bp, synthetic construct
  source 1..80: mol_type = other DNA
aatctgccctgattattctctaatcttggtagacagctagctttctgggatcgctcttcatcatcattctggagatttcc

SEQ ID NO: 16521 - DNA, 80 bp, synthetic construct
  source 1..80: mol_type = other DNA
gcttgggcaacatagtgagactccatctctacaaaagcagttttaaaattggccaggcatggtggtgcatgcctgtaatc

SEQ ID NO: 16522 - DNA, 80 bp, synthetic construct
  source 1..80: mol_type = other DNA
cacttgtccatttgcctttccaaaattttactaattttgtctctcctgtcctggctatcctagtactttatgccttaaaa

SEQ ID NO: 16523 - DNA, 80 bp, synthetic construct
  source 1..80: mol_type = other DNA
tctgaaaccattcatgagaaagagttctcctttctaaattatgaacttctcattcttcagctgacagaccataactgcag

SEQ ID NO: 16524 - DNA, 80 bp, synthetic construct
  source 1..80: mol_type = other DNA
ggaaatttcacaaaaatttctgcccacaaacaaagtcctcaagttgttctagtctccattctcaccttttcaaaagcttc

SEQ ID NO: 16525 - DNA, 80 bp, synthetic construct
  source 1..80: mol_type = other DNA
ttccctttctcacccgcaccctccgcgcccgagtgagcctacctcgcttacagctggttgccggccattgcctccgccac

SEQ ID NO: 16526 - DNA, 80 bp, synthetic construct
  source 1..80: mol_type = other DNA
agctttcctcttaaaccttgaaaagagaaattcgggagttcgagtataagttcttagtcgtcctttcctctttcctttcc

SEQ ID NO: 16527 - DNA, 80 bp, synthetic construct
  source 1..80: mol_type = other DNA
ctctctgttgtctgaatataaactgtaccacaagcgagtgcggatgaacgaggactgcatttaaagataagtttttacac

SEQ ID NO: 16528 - DNA, 80 bp, synthetic construct
  source 1..80: mol_type = other DNA
caaaaaaagacaccaccaaaggtcaaagcatatcattcctcaccctcaagcccttagtggctccatttcactcagtaaga

SEQ ID NO: 16529 - DNA, 80 bp, synthetic construct
  source 1..80: mol_type = other DNA
acctcagaagacaacattcttaaactggctagagcctggtctgaatggatgaaaaggagagacttttgaagcaatatgta

SEQ ID NO: 16530 - DNA, 80 bp, synthetic construct
  source 1..80: mol_type = other DNA
gaaactctcaaaaaacaaaaaaaaggatgggttccatatgggtggtgtcaagtgcccacctcctagcaagtcagcagggg

SEQ ID NO: 16531 - DNA, 80 bp, synthetic construct
  source 1..80: mol_type = other DNA
gtcccaccaacagtataaaagtgttcctatttctccacatcctctccagcacctgttgtttcctgactttttaatgattg

SEQ ID NO: 16532 - DNA, 80 bp, synthetic construct
  source 1..80: mol_type = other DNA
gatcagatagttgtagatatgcggtgttatttctgagggctctgttctgttccattgatctatatgtctgttttggtacc

SEQ ID NO: 16533 - DNA, 80 bp, synthetic construct
  source 1..80: mol_type = other DNA
gttgaattttgtcaaaggccttttctgcatctattgagataatcatgtggtttttgtctttggatctgtttatatgctgg

SEQ ID NO: 16534 - DNA, 80 bp, synthetic construct
  source 1..80: mol_type = other DNA
ctgaggagagctttacttccaactatgtggtcaattttggaataggtgtggtgcggtgctgaaaaaaatgtatattctgt

SEQ ID NO: 16535 - DNA, 80 bp, synthetic construct
  source 1..80: mol_type = other DNA
cacctccagccacctggaggaatttgggcctggtgatgtcagaattcttcaataaaagcctaaaatctatattttatgtg

SEQ ID NO: 16536 - DNA, 80 bp, synthetic construct
  source 1..80: mol_type = other DNA
agatgggtgatggtgatggttgcctaacatcaggaacgtgcttaatgcttctgaattgcacacaaaaatggcaagtttaa

SEQ ID NO: 16537 - DNA, 80 bp, synthetic construct
  source 1..80: mol_type = other DNA
tggaagaaattaagattgttgagattggaaagggttagctatggggggaacaggaggaggtgactccatgacagaccaaa

SEQ ID NO: 16538 - DNA, 80 bp, synthetic construct
  source 1..80: mol_type = other DNA
cagcctcccaaccagatgatcttaatttgtgtatttatactcattcttacaccaaaaagggttttaaattgcctagaaac

SEQ ID NO: 16539 - DNA, 80 bp, synthetic construct
  source 1..80: mol_type = other DNA
catatgagttggcttctgtttctctcctgttttactttgcctttagctgtggtctttcaaaccaccatccctccttatct

SEQ ID NO: 16540 - DNA, 80 bp, synthetic construct
  source 1..80: mol_type = other DNA
tttgggtttggtaccttctcttgataaaaggttgactgtggaacaggcatctgctcaatgctgtgtccaagataaagatg

SEQ ID NO: 16541 - DNA, 80 bp, synthetic construct
  source 1..80: mol_type = other DNA
gtttttagacatagtaataggttgtgacctgtcttcacatcctaattgccactgtctgttcatcccaggaatcctggctt

SEQ ID NO: 16542 - DNA, 80 bp, synthetic construct
  source 1..80: mol_type = other DNA
attcgtccacgctttgttcattctgtactgccacttatctgctcagttccttcctaaaatagattaaagaactctcctta

SEQ ID NO: 16543 - DNA, 80 bp, synthetic construct
  source 1..80: mol_type = other DNA
aatatgcacatcaaagaagagaaatttttcaccctgacagcctatgctgttccatggacccagaaggaatttgatcgcgt

SEQ ID NO: 16544 - DNA, 80 bp, synthetic construct
  source 1..80: mol_type = other DNA
catgtgatcagagaatgaaacatggagttcagtttccagagagggatctgtcctgagaaaagtttttctgaccaggagtt

SEQ ID NO: 16545 - DNA, 80 bp, synthetic construct
  source 1..80: mol_type = other DNA
ccactgctcctggcaatttttttttttttttttttagtagagatgaggtttcgcaatgttagccaggctggtcttgaact

SEQ ID NO: 16546 - DNA, 80 bp, synthetic construct
  source 1..80: mol_type = other DNA
gaaatggtgcacactgcttccataaagtgacatccttcagacacttggtggctctttgtatatgcatacattgatggcct

SEQ ID NO: 16547 - DNA, 80 bp, synthetic construct
  source 1..80: mol_type = other DNA
tcttaatgaagcattgagggctcgagtaaaagatttcttttacttaggttttggtaaaaattgctgttcttttcattgct

SEQ ID NO: 16548 - DNA, 80 bp, synthetic construct
  source 1..80: mol_type = other DNA
taatttatttttttattgataattcttgggtgtttctcacagagggggatttggcagggtcatgggacaatagtggaggg

SEQ ID NO: 16549 - DNA, 80 bp, synthetic construct
  source 1..80: mol_type = other DNA
cagagacgctcctcacctcccagatggggtctcgccgggcagaggcgctcctcacatcccagatggggcggcggggcaga

SEQ ID NO: 16550 - DNA, 80 bp, synthetic construct
  source 1..80: mol_type = other DNA
cttttctagtgggcatgttagaaaccagcaaaaagaaaccactgaaattaattttactaaggcattgtttaaccagacat

SEQ ID NO: 16551 - DNA, 80 bp, synthetic construct
  source 1..80: mol_type = other DNA
agatacccaggacaatctccccatcttaaaactcttaatttaatcatatctgtgaagtctcttccacctgtaacggaaca

SEQ ID NO: 16552 - DNA, 80 bp, synthetic construct
  source 1..80: mol_type = other DNA
tctgggagtcccagacatgtgacaagaaatcagatgacttcactgtctaaataaaacactactacttggaggtagaacat

SEQ ID NO: 16553 - DNA, 80 bp, synthetic construct
  source 1..80: mol_type = other DNA
gagaaagctggcttagcaatgttgtatggtttttggatgcgctgcgttactcatacatgagaagaaagtttcaagggtta

SEQ ID NO: 16554 - DNA, 80 bp, synthetic construct
  source 1..80: mol_type = other DNA
tttcagaagtatggcaatgttgaacaatatgtctttggtctatcataggtcttgtgtggagctactacataatgaggccc

SEQ ID NO: 16555 - DNA, 80 bp, synthetic construct
  source 1..80: mol_type = other DNA
tttaaatggtcactgagaggaagaggaagtagacacgaatgtttgtaaaaggatggacaaggactggtgtgactcataga

SEQ ID NO: 16556 - DNA, 80 bp, synthetic construct
  source 1..80: mol_type = other DNA
attgtttcttattccttgctgtgccatgtacatcgtgagagaatcagcctttttatgtcatattcaccgaatgtgtatga

SEQ ID NO: 16557 - DNA, 80 bp, synthetic construct
  source 1..80: mol_type = other DNA
tccaacatctgttgtttcctgactttttaatggtcaccattctaactggcgtgagatggtatctcattgtggttttgatt

SEQ ID NO: 16558 - DNA, 80 bp, synthetic construct
  source 1..80: mol_type = other DNA
tgtgatttttgcacattgattttgtatcctgggactttgctgaagttgcttatcagcttaaggagactttgggctgagac

SEQ ID NO: 16559 - DNA, 80 bp, synthetic construct
  source 1..80: mol_type = other DNA
taaagtataataataataataataataaaaagaatttggctgtgaatccatctggtcctggactttttttggttggtagg

SEQ ID NO: 16560 - DNA, 80 bp, synthetic construct
  source 1..80: mol_type = other DNA
gtgcgattttgagtgagtttcttaatccagagttctaatttgactgcactatggtctgagagacagtttgttgtgatttc

SEQ ID NO: 16561 - DNA, 80 bp, synthetic construct
  source 1..80: mol_type = other DNA
ttgtggtgttctctgtatttcctgaatttgaatgttggcctgccttgctaggtttgggaagttctcctggataatatcct

SEQ ID NO: 16562 - DNA, 80 bp, synthetic construct
  source 1..80: mol_type = other DNA
gtcaagatacacagaggtcagggacccgcttgaggaggcagtctgtccattctcagagctcaaatgccatactaggagaa

SEQ ID NO: 16563 - DNA, 80 bp, synthetic construct
  source 1..80: mol_type = other DNA
gtgtggtaaagaacaggctagtgtatttagtagtgagtccattgactgtttcccaacatgaggtcacactagatttaata

SEQ ID NO: 16564 - DNA, 80 bp, synthetic construct
  source 1..80: mol_type = other DNA
tggggaaaatggctccagggcatgtcagagacctttgcagcagaccctcccatcacaggcctggaggcctaggaaggaaa

SEQ ID NO: 16565 - DNA, 80 bp, synthetic construct
  source 1..80: mol_type = other DNA
ttaaatgtgaaaagacatgagatttgggatgggccagagggcagaatgatatgatttgactgtgtgtttccacccaaatc

SEQ ID NO: 16566 - DNA, 80 bp, synthetic construct
  source 1..80: mol_type = other DNA
ggatttcaagagggtcatctttgcaccacaggaaatgcccccttttacactctgaaaaccttatcaaaccgttgtataaa

SEQ ID NO: 16567 - DNA, 80 bp, synthetic construct
  source 1..80: mol_type = other DNA
gtgtagatacacaccaactcattctactctacccagagtagtgatttccaacacacaaaaccacaatgaaactgcccatg

SEQ ID NO: 16568 - DNA, 80 bp, synthetic construct
  source 1..80: mol_type = other DNA
cccttattccagtaaactcacaaccttcagcataggcatcatggctatcatgaacacgtcacagtgctgcagagattttg

SEQ ID NO: 16569 - DNA, 80 bp, synthetic construct
  source 1..80: mol_type = other DNA
agggagccaaaggaacgaaatcctgtatcaaaagaagaaaaaacacccccaaaagctggaaattcactgaaggcagagaa

SEQ ID NO: 16570 - DNA, 80 bp, synthetic construct
  source 1..80: mol_type = other DNA
ttgcatctctctctttagtacttggctctatagagaggtggattctcatgtcagcttctgcattctatctattgtgatat

SEQ ID NO: 16571 - DNA, 80 bp, synthetic construct
  source 1..80: mol_type = other DNA
caccagaacaaacttctaagtttatatagcctctagtgacataacctgagacccggacttggcacttggtaagcacacaa

SEQ ID NO: 16572 - DNA, 80 bp, synthetic construct
  source 1..80: mol_type = other DNA
gctatagtctaatagcaaggacagatatgcaaactgctaaaagatacaaggcagaacagaacaaaatgctgtttttctgg

SEQ ID NO: 16573 - DNA, 80 bp, synthetic construct
  source 1..80: mol_type = other DNA
cttccaattacatgatgatttgctaagtggctcagtgacaaggtaattaagatgaagaaaacaaatgtaggaggcacagc

SEQ ID NO: 16574 - DNA, 80 bp, synthetic construct
  source 1..80: mol_type = other DNA
tgtatttacttacaattgcttccatatctacttatctttctggtgcttttatttctgcttgtcgtaatagccttcagtga

SEQ ID NO: 16575 - DNA, 80 bp, synthetic construct
  source 1..80: mol_type = other DNA
agagaattcagcctttttatgtcatattcactgaatgcatatgaacttccatgacttgatccttttgtatttttatttct

SEQ ID NO: 16576 - DNA, 80 bp, synthetic construct
  source 1..80: mol_type = other DNA
ccttcacttgcaagctattcctctttctctctttcatgtaagacgtgtctttgcctctctctcactttctgccaggatta

SEQ ID NO: 16577 - DNA, 80 bp, synthetic construct
  source 1..80: mol_type = other DNA
ttgtgagaaggcggccaccatcctccagaatcccaaatagtagatccaatagcttgcactgtgtgcctggaaaagacaca

SEQ ID NO: 16578 - DNA, 80 bp, synthetic construct
  source 1..80: mol_type = other DNA
gctcttcctccttcactcacaagtgaactcttcctctctgtttctctcttgcttgctgccatgtgagacatgactttgct

SEQ ID NO: 16579 - DNA, 80 bp, synthetic construct
  source 1..80: mol_type = other DNA
tacagatccacctctgagtgacactggtatgccactctttgctgaccactgaacaatgggatttatgtaaccaattgtgt

SEQ ID NO: 16580 - DNA, 80 bp, synthetic construct
  source 1..80: mol_type = other DNA
caactcttcctacatcacgagcatttatgtgcaattaaaagccatcattaaattaagccagagtattaatatattcatag

SEQ ID NO: 16581 - DNA, 80 bp, synthetic construct; identical to SEQ ID NO: 16569
  source 1..80: mol_type = other DNA

SEQ ID NO: 16582 - DNA, 80 bp, synthetic construct; identical to SEQ ID NO: 16570
  source 1..80: mol_type = other DNA

SEQ ID NO: 16583 - DNA, 80 bp, synthetic construct
  source 1..80: mol_type = other DNA
ccagaacaaacttctgagtttatataacctctagttacataacctgaaacccggacttggcacttggtaagcacgcaatg

SEQ ID NO: 16584 - DNA, 80 bp, synthetic construct; identical to SEQ ID NO: 16572
  source 1..80: mol_type = other DNA

SEQ ID NO: 16585 - DNA, 80 bp, synthetic construct
  source 1..80: mol_type = other DNA
aagtatggctggccagtgatgtgtatggttcaaatgttgggatctgtgcagttatcttggaattgtatagtacagcagta

SEQ ID NO: 16586 - DNA, 80 bp, synthetic construct
  source 1..80: mol_type = other DNA
acctgttcatttccttcttagcatgcttcacgatttctaagttcctgctcatgtgtttaaattgtgagtctggctcacct

SEQ ID NO: 16587 - DNA, 80 bp, synthetic construct
  source 1..80: mol_type = other DNA
accttgaagacgtaccctgtgccattccaaagggaggatgtgaaagagtcttttgttagtctcgggcataatgtttttga

SEQ ID NO: 16588 - DNA, 80 bp, synthetic construct
  source 1..80: mol_type = other DNA
gctccttcagatggagcgttagggaattactctttgaggaggtgacatttcagagagcgttcattcacttatcctgcaaa

SEQ ID NO: 16589 - DNA, 80 bp, synthetic construct
  source 1..80: mol_type = other DNA
ttaaactatgaaatagtatttcatggtacttgtgtaccacagtgtattctgctggagatctagtctagttccccacagag

SEQ ID NO: 16590 - DNA, 80 bp, synthetic construct
  source 1..80: mol_type = other DNA
gccactctgcactaccattcctcttgtgttgatggtcctattctcaatactcttgataaaactcctgaactttaagaata

SEQ ID NO: 16591 - DNA, 80 bp, synthetic construct
  source 1..80: mol_type = other DNA
tcatgaagagcaaaggtcctaggaaatttaagtaagccatttaccaacgctcagaagaaagaacttgaagagcacttgga

SEQ ID NO: 16592 - DNA, 80 bp, synthetic construct
  source 1..80: mol_type = other DNA
cactgaaaatctacagtgagaaaagaattgccatgttgatgaaacaggaaaactttccttgtccccctcacagagcatgt

SEQ ID NO: 16593 - DNA, 80 bp, synthetic construct
  source 1..80: mol_type = other DNA
cttttggaaaactagcacattacctggattttgcatctcaaggataattctgtaagcaggaacccttcctcctttagaag

SEQ ID NO: 16594 - DNA, 80 bp, synthetic construct
  source 1..80: mol_type = other DNA
ggtatgttgggcggattggatgtataggtcaaaccagggtcaaattaagaaaatggcttaagcacagctattctaaagga

SEQ ID NO: 16595 - DNA, 80 bp, synthetic construct
  source 1..80: mol_type = other DNA
ttaagagaaaaacaactcaaatgcttagaagtacagctttttgcagcactggaacctgtgagaaattttgtccatggagt

SEQ ID NO: 16596 - DNA, 80 bp, synthetic construct
  source 1..80: mol_type = other DNA
tgagctggggatagtgcctacacaaaataaaaagaagtggaaaattttcaaacatcagtttatgctgacaaccaggccat

SEQ ID NO: 16597 - DNA, 80 bp, synthetic construct
  source 1..80: mol_type = other DNA
ccaaactgtatcagtcaacagcgatcataattagtcctgaataggagtgcctttttttttctttcttctcccttttcttt

SEQ ID NO: 16598 - DNA, 80 bp, synthetic construct
  source 1..80: mol_type = other DNA
gtttggaaaatctggtagtcttcttaagcagccatgagcataaagagaggattgttcataccacaggtgttccaggcata

SEQ ID NO: 16599 - DNA, 80 bp, synthetic construct
  source 1..80: mol_type = other DNA
ccttgtgtgtttaaagaagggaagctttgtacctttagagtgtaggtgaaatgaatgaatggcttggagtgcactgagaa

SEQ ID NO: 16600 - DNA, 80 bp, synthetic construct
  source 1..80: mol_type = other DNA
aattggagttttatcactgacaaatacctttaaaaatgaaaaatggaattttcggtgggaaagttaatgttttctggagc

SEQ ID NO: 16601 - DNA, 80 bp, synthetic construct
  source 1..80: mol_type = other DNA
acctacttgtcctaaccctttccccctgtacactttcttctagagacaatggccttctgttgttctttaaactcctgaag

SEQ ID NO: 16602 - DNA, 80 bp, synthetic construct
  source 1..80: mol_type = other DNA
attgacaaagaccacagatgatctcttcattttgtgattaatggatatttgtgttgttaacattttttgaccttactaat

SEQ ID NO: 16603 - DNA, 80 bp, synthetic construct
  source 1..80: mol_type = other DNA
tgcttttttgtttttttttgagatggagtctcgctctgtcaccaggagttcagtggcactatctcggctcactgcaacct

SEQ ID NO: 16604 - DNA, 80 bp, synthetic construct
  source 1..80: mol_type = other DNA
ttcaccaggatctgttgttttttgactttttaatcatcgccattctgactggcatgagattgtatctcattgtggttttg

SEQ ID NO: 16605 - DNA, 80 bp, synthetic construct
  source 1..80: mol_type = other DNA
tgttccattggtcaatacatctttttggtaccagtaccattctgttttggttatgtagcctaatagtatagtttgacatc

SEQ ID NO: 16606 - DNA, 80 bp, synthetic construct
  source 1..80: mol_type = other DNA
tggtaccaccttacatcataataatattggtaggattaatagactctgaattgatggtagctggtgtagtcacagcattt

SEQ ID NO: 16607 - DNA, 80 bp, synthetic construct
  source 1..80: mol_type = other DNA
tacttaaaatatttaaaatatttaattttttttaaaaggcagcagggagtagggtggaggtggggctgaggaaggaccgg

SEQ ID NO: 16608 - DNA, 80 bp, synthetic construct
  source 1..80: mol_type = other DNA
aagaaataatgacatttctaacataatagctagacacatgagattgtgaaaggaaaataaatcttggcaacccaaactct

SEQ ID NO: 16609 - DNA, 80 bp, synthetic construct
  source 1..80: mol_type = other DNA
cctgtctttaaaaaaacaaatgttcttttgtttacttttcctccaccctatacctccttttgccttttgccatttgcagt

SEQ ID NO: 16610 - DNA, 80 bp, synthetic construct
  source 1..80: mol_type = other DNA
caagaagaatgaccccctgatatcacttggtaggttttatgacacctctacttggcagagtttatgtaaaatgaaggtaa

SEQ ID NO: 16611 - DNA, 80 bp, synthetic construct
  source 1..80: mol_type = other DNA
tactttaaggtgtcaaaatttgacataggggttacaaaactgtaaaccaagcccaaaacagaatgatcttcacttgtgta

SEQ ID NO: 16612 - DNA, 80 bp, synthetic construct
  source 1..80: mol_type = other DNA
tgggaaactcctataattctgatatgacttagtgtgtacgttatcagtaacaattatatgtgttaagttattgtgtgcca

SEQ ID NO: 16613 - DNA, 80 bp, synthetic construct
  source 1..80: mol_type = other DNA
tataagacaaagttccatcaaagccactttaaaagcctatgtaaataaaaaattattcttcctcctctgtatacaataat

SEQ ID NO: 16614 - DNA, 80 bp, synthetic construct
  source 1..80: mol_type = other DNA
cttggagaggctaatcagaaagtcaaaggaatgcctcctccctgcttcaagttggcaaaaataaactttctaaatgtact

SEQ ID NO: 16615 - DNA, 80 bp, synthetic construct
  source 1..80: mol_type = other DNA
aggcactaatctgattcttagagcatagtctttgttgggccacatttaataatgcacatagtctaccctaaaagcaggat

SEQ ID NO: 16616 - DNA, 80 bp, synthetic construct
  source 1..80: mol_type = other DNA
ctctgcacaaactcttccatttcctgtgaagaaagaatttgttctatcagaaaagagcaacagcacagaaaacactattg

SEQ ID NO: 16617 - DNA, 80 bp, synthetic construct
  source 1..80: mol_type = other DNA
aatgaccaaccccttctatcataacaaatatactttctggtcctaatcattgggggaaatttctttataaaactgtttac

SEQ ID NO: 16618 - DNA, 80 bp, synthetic construct
  source 1..80: mol_type = other DNA
gtttttttaatgagtatttgctaccgatattgaatcttaccatcatgatttattctctgtacagtttcatgtgagtatat

SEQ ID NO: 16619 - DNA, 80 bp, synthetic construct
  source 1..80: mol_type = other DNA
gaacattgggattttttttgaaaggaaatctgatcatatctcttcatttcttaactcttttcagtagctctccattgtcc

SEQ ID NO: 16620 - DNA, 80 bp, synthetic construct
  source 1..80: mol_type = other DNA
cacctatctctgcacattattgagtactcactttaattgtcaatgagtttgggatctcttctgcatatttctttatcatt

SEQ ID NO: 16621 - DNA, 80 bp, synthetic construct
  source 1..80: mol_type = other DNA
agatccaagcttgcttccccttagcctttcaccatgattctaagtttcttgaggcatcccagtcatgtagaactgagtct

SEQ ID NO: 16622 - DNA, 80 bp, synthetic construct
  source 1..80: mol_type = other DNA
tttaaagaaatcattagtgctttacaatgaaggtttatgactctctgggtgtcctgtagtagtgatggccccagggttct

SEQ ID NO: 16623 - DNA, 80 bp, synthetic construct
  source 1..80: mol_type = other DNA
ccagagctaaagtaacaactgagctgtatcagcagaaagactgacgtccatttcagagacatcctggtcttatgcaatgc

SEQ ID NO: 16624 - DNA, 80 bp, synthetic construct
  source 1..80: mol_type = other DNA
cactacaataatcagtattatctccaaaagattctatacaatagcctctaaccccccactctgaaattttgcatccatcc

SEQ ID NO: 16625 - DNA, 80 bp, synthetic construct
  source 1..80: mol_type = other DNA
gccattctaagtgctataagtaagatagtggaaatagaatctgggaatgatcattttgatatttttagtttttttttttt

SEQ ID NO: 16626 - DNA, 80 bp, synthetic construct
  source 1..80: mol_type = other DNA
tttctgtttttgtttagcagttgtttaattgcactggtgtagagtattcagttgattgacaaagaccacagatctcttca

SEQ ID NO: 16627 - DNA, 80 bp, synthetic construct
  source 1..80: mol_type = other DNA
ctctctctgtcacccaggcttgagtatgacggagcgatcttggctgactgcaacttacgtctcctgggttcaagtgattc

SEQ ID NO: 16628 - DNA, 80 bp, synthetic construct
  source 1..80: mol_type = other DNA
tatttgtcctgatactctcactcccattccatgccccgaatggccccggtgtgttttgctcccctccctgagtccatgta

SEQ ID NO: 16629 - DNA, 80 bp, synthetic construct
  source 1..80: mol_type = other DNA
ggttttgggttttacatttaagtctttaatccatcttgagttaatttttgtataaggtgtaaggcaggggactagtttcc

SEQ ID NO: 16630 - DNA, 80 bp, synthetic construct
  source 1..80: mol_type = other DNA
aagcggcccagaagcttgaactgggtggagcccaccgcagctcaaggacgcctgcctgcctctgtagatccacctctggg

SEQ ID NO: 16631 - DNA, 80 bp, synthetic construct
  source 1..80: mol_type = other DNA
gattcaccaaagttgaaatgaaggaaaaaatgttaagtgcagcaagagagaaaggtcaggttacccacaaagggaagccc

SEQ ID NO: 16632 - DNA, 80 bp, synthetic construct
  source 1..80: mol_type = other DNA
ctctgcaccccaaatcaacagaatgtacattcttttcagcaccacaccacaccaactccaaaactgaccacatagttgga

SEQ ID NO: 16633 - DNA, 80 bp, synthetic construct
  source 1..80: mol_type = other DNA
agaaaatcaagaagaaatggataaattcctcgacacacacaccctcccaagactaaaccaggaagaagttgaatctctga

SEQ ID NO: 16634 - DNA, 80 bp, synthetic construct
  source 1..80: mol_type = other DNA
acacccataacagacaaacagagagccaaatcatgagtgaactcccattcacaattgcttcaaagagaataaaataccta

SEQ ID NO: 16635 - DNA, 80 bp, synthetic construct
  source 1..80: mol_type = other DNA
aaaacaaacaacctcatcagcttgtgggtgaaggaaatgaacagacacttctcaaaagaagacatttaggcagccaaaag

SEQ ID NO: 16636 - DNA, 80 bp, synthetic construct
  source 1..80: mol_type = other DNA
tatttctccttgaagaggtccttcacgtaccttgttaggcatattcctaggtattttattctctttgttgcaattgcaaa

SEQ ID NO: 16637 - DNA, 80 bp, synthetic construct
  source 1..80: mol_type = other DNA
gaaagacaggtgataacaagtgttgggaagagtgtgaagaaattagagccctcctatccagctggtggtaatgaaaaatg

SEQ ID NO: 16638 - DNA, 80 bp, synthetic construct
  source 1..80: mol_type = other DNA
ctctacttgacatggtcctgatgtccacactgagggctgctcccttggctttcatgtgagcaatgttatcatgttgatcc

SEQ ID NO: 16639 - DNA, 80 bp, synthetic construct
  source 1..80: mol_type = other DNA
agttaaaatatttaaaatacttaaatttttttttaaaggcagcaaggagtagggtggaggtggtgctgaggaaggacagg

SEQ ID NO: 16640 - DNA, 80 bp, synthetic construct
  source 1..80: mol_type = other DNA
ttgattgatgtctcatgtatccctaaaatgtataaaaccaaactgtccccccaccaccttgggacacatgtcaccaggac

SEQ ID NO: 16641 - DNA, 80 bp, synthetic construct; identical to SEQ ID NO: 16609
  source 1..80: mol_type = other DNA

SEQ ID NO: 16642 - DNA, 80 bp, synthetic construct
  source 1..80: mol_type = other DNA
caaataatctaagaatgatgagaaaagaagaagaatgatcccctgatatcgcctgtttggatttatgacacctctacttg

SEQ ID NO: 16643 - DNA, 80 bp, synthetic construct; identical to SEQ ID NO: 16611
  source 1..80: mol_type = other DNA

SEQ ID NO: 16644 - DNA, 80 bp, synthetic construct
  source 1..80: mol_type = other DNA
gggcttgatgtaaaaaaagcacttatgcactaaataattggttagaacaataacattttcttaagggattgatttactct

SEQ ID NO: 16645 - DNA, 80 bp, synthetic construct
  source 1..80: mol_type = other DNA
tcttgaaaaaaagtttttgataattttggagattgtgacattagaatggaagaaaaactttcaggactcatggagaacta

SEQ ID NO: 16646 - DNA, 80 bp, synthetic construct
  source 1..80: mol_type = other DNA
cctatattaattttaaaggattgttcttttgtttttgtttttctcacttcctccctttattttgtcttcacagtacatga

SEQ ID NO: 16647 - DNA, 80 bp, synthetic construct
  source 1..80: mol_type = other DNA
ttatttatagttcctgctccttcctcaatgtggagaaggcactaatctgattcttagagcatagtctttgttgggccaca

SEQ ID NO: 16648 - DNA, 80 bp, synthetic construct; identical to SEQ ID NO: 16616
  source 1..80: mol_type = other DNA

SEQ ID NO: 16649 - DNA, 80 bp, synthetic construct; identical to SEQ ID NO: 16617
  source 1..80: mol_type = other DNA

SEQ ID NO: 16650 - DNA, 80 bp, synthetic construct; identical to SEQ ID NO: 16618
  source 1..80: mol_type = other DNA

SEQ ID NO: 16651 - DNA, 80 bp, synthetic construct; identical to SEQ ID NO: 16619
  source 1..80: mol_type = other DNA

SEQ ID NO: 16652 - DNA, 80 bp, synthetic construct; identical to SEQ ID NO: 16620
  source 1..80: mol_type = other DNA

SEQ ID NO: 16653 - DNA, 80 bp, synthetic construct
  source 1..80: mol_type = other DNA
ctcatatgtatatataaggaaggcaaagtgttcagagagctgtaagaagaaatcacatctttaatgtaacatcagtatat

SEQ ID NO: 16654 - DNA, 80 bp, synthetic construct
  source 1..80: mol_type = other DNA
atttttcagaatttattgacatagagatatgtgctcttccttattttggcccctattttctttgatggagagatgcagtt

SEQ ID NO: 16655 - DNA, 80 bp, synthetic construct
  source 1..80: mol_type = other DNA
cacagggattaacggcatctgccagaaggacatcaaattttgactcttgtagttttctcataagtttcttgttcaaaact

SEQ ID NO: 16656 - DNA, 80 bp, synthetic construct; identical to SEQ ID NO: 16624
  source 1..80: mol_type = other DNA

SEQ ID NO: 16657 - DNA, 80 bp, synthetic construct
  source 1..80: mol_type = other DNA
cgtgttgtctgttggcatgctctcagggatcaaaccaattcaagaaccttatatctggtgccaaaacctgggtggggctc

SEQ ID NO: 16658 - DNA, 80 bp, synthetic construct
  source 1..80: mol_type = other DNA
ctttctaaacatggcttcagggttgaatccgtgctacacttgcacaggtacatgtgccagttttgtcatatttttaacta

SEQ ID NO: 16659 - DNA, 80 bp, synthetic construct
  source 1..80: mol_type = other DNA
ctccaccatgtgactgtttttgtggtactattatagagcttttgtctaagacagctaagctgccttacaggatgagtgaa

SEQ ID NO: 16660 - DNA, 80 bp, synthetic construct
  source 1..80: mol_type = other DNA
gtccgtgatattagtgttagtcagttttgttgtgagtgttagaaagagggcatatagaaccaggaagctgataagaaaga

SEQ ID NO: 16661 - DNA, 80 bp, synthetic construct
  source 1..80: mol_type = other DNA
tttggcagagtgcctagtaaaggtccaccacaatactaccacacatctgctcagggatgaacaagggctgattgattgat

SEQ ID NO: 16662 - DNA, 80 bp, synthetic construct
  source 1..80: mol_type = other DNA
cttatgcctccttataatcttctcattaaagttatattttacttttttatacacctgcacataaactgtttcttcaatag

SEQ ID NO: 16663 - DNA, 80 bp, synthetic construct
  source 1..80: mol_type = other DNA
aaaagggcacacacaaacatttcagtttacaccaaaccaaaatcaaaaccaaaatcagagtatccagaaatccaagccag

SEQ ID NO: 16664 - DNA, 80 bp, synthetic construct
  source 1..80: mol_type = other DNA
caatttctgtcctttttaagggctcactacactaaagatttcacatgaaagggtcgtgattgatttgagcaagcagtggg

SEQ ID NO: 16665 - DNA, 80 bp, synthetic construct
  source 1..80: mol_type = other DNA
aacgtgactgacagacagctgaggcagccccttaggcaacttaagcctgccttgtggagtgcccctgtgggggactccag

SEQ ID NO: 16666 - DNA, 80 bp, synthetic construct
  source 1..80: mol_type = other DNA
gaaagaccagcagagagaaaaaaaaggccatctataccaattctaagttaatttagactaaacaaggtcttattaatagc

SEQ ID NO: 16667 - DNA, 80 bp, synthetic construct
  source 1..80: mol_type = other DNA
ctttctttggtctaaaaactaatacaaattggtgctaaaggaaacattcattttactagaagatcacagaagttaaagac

SEQ ID NO: 16668 - DNA, 80 bp, synthetic construct
  source 1..80: mol_type = other DNA
accaaagcttgctctgtgaaaatccccacataaccattgaagtttgcaacaccctaaccctgccaccttactcctggtat

SEQ ID NO: 16669 - DNA, 80 bp, synthetic construct
  source 1..80: mol_type = other DNA
taaaaaggatcctgtttgactccaaaaaaaaaaaaaggtcagcccctcccctcctgcatgagtaggagctgcaacctttt

SEQ ID NO: 16670 - DNA, 80 bp, synthetic construct
  source 1..80: mol_type = other DNA
ttggcaccattaagccttctttcttcttactgcccataaaaacaggtaaacttctaggcttcccagtctatgcttcccac

SEQ ID NO: 16671 - DNA, 80 bp, synthetic construct
  source 1..80: mol_type = other DNA
tattcataaattccagacattgtatagaagaacatggtgaaactccctgccctgttctgtttctctctgaccaccagtgc

SEQ ID NO: 16672 - DNA, 80 bp, synthetic construct
  source 1..80: mol_type = other DNA
aagtgaaaacagagttaaagggaaagtcacaggagcttgtagcctgagctgagctgaaagtgaaatcttctctggcaaac

SEQ ID NO: 16673 - DNA, 80 bp, synthetic construct
  source 1..80: mol_type = other DNA
attgaagtggccacaagttgtacattaacggagatcaggaggcaaagacagaggctaatcaaaggcttaagaaaaaggct

SEQ ID NO: 16674 - DNA, 80 bp, synthetic construct
  source 1..80: mol_type = other DNA
atccagttcaggtccaacagtacctgctactccctgaggccatactgggtgtccgcaaatatttagagtcttcataaaca

SEQ ID NO: 16675 - DNA, 80 bp, synthetic construct
  source 1..80: mol_type = other DNA
cactcagttataactttgatggaccaaagggggcaccattggttttcgaatccgagaataactcaataccaagggctcct

SEQ ID NO: 16676 - DNA, 80 bp, synthetic construct
  source 1..80: mol_type = other DNA
ttagggtgtcatttctatgtgcaatggctcaccgctattacttgagccatttgtaaacagcgtttaacttgtgcccaaaa

SEQ ID NO: 16677 - DNA, 80 bp, synthetic construct
  source 1..80: mol_type = other DNA
gaatgcctataagtctggcagacccagtacaccctttcaaacctgaagactttgtttaggttaagaaatagactccaact

SEQ ID NO: 16678 - DNA, 80 bp, synthetic construct
  source 1..80: mol_type = other DNA
ttataccatacatactataggtacctgggcacaagataggtcagggggtactgtacccctatttacatgcttaatcacat

SEQ ID NO: 16679 - DNA, 80 bp, synthetic construct
  source 1..80: mol_type = other DNA
gggtgcagcccagacccagggaaagtcctgatactactgtctaaaaagccaggagatgcaccaaaaaaatgtggtctgta

SEQ ID NO: 16680 - DNA, 80 bp, synthetic construct
  source 1..80: mol_type = other DNA
ccctaattttgaaataggtctattcagtgtatttttcagagggctatttagaaaaaaggaagcccaaactcacccaccct

SEQ ID NO: 16681 - DNA, 80 bp, synthetic construct
  source 1..80: mol_type = other DNA
acagatatgctatcatttcaatttcactcatagaacaaggtacatacttttttaaaacttttaagttcaggcgtacatgt

SEQ ID NO: 16682 - DNA, 80 bp, synthetic construct
  source 1..80: mol_type = other DNA
atactatgccttatcatactcagtgacttcaccatttctctaagagaacaagttctggcatgcatcctgcttcttttgtg

SEQ ID NO: 16683 - DNA, 80 bp, synthetic construct
  source 1..80: mol_type = other DNA
gcagaaaaccataaatattattacagtactgactaattttcagcacacttatgttgtctttcagaatgagaactcatcaa

SEQ ID NO: 16684 - DNA, 80 bp, synthetic construct
  source 1..80: mol_type = other DNA
aatcacaatacaagaaaaatagtaataacagtgaacatttactgacaatcactttatgacaagaataattctaccaagta

SEQ ID NO: 16685 - DNA, 80 bp, synthetic construct
  source 1..80: mol_type = other DNA
gagtacatctttttgagatctaaggcaggcaggcatgatacagaaaatcatgccatttaatgtcaccactatgtatcaag

SEQ ID NO: 16686 - DNA, 80 bp, synthetic construct
  source 1..80: mol_type = other DNA
taattttgcaatttggcaggatcacattttattgagcaaagcctcagcatgaaggctagggtcaccttctaggacaaatc

SEQ ID NO: 16687 - DNA, 80 bp, synthetic construct
  source 1..80: mol_type = other DNA
tattttactttactaaactttgaacacatagtcttgccactagaaagaaacaaatagccaagtacaagaaaaaaagtgta

SEQ ID NO: 16688 - DNA, 80 bp, synthetic construct
  source 1..80: mol_type = other DNA
atttggatgagtaggagacatggctttcttttgaaaataacatttttgaaagtgggggaatgtagaggttctgagaaaga

SEQ ID NO: 16689 - DNA, 80 bp, synthetic construct
  source 1..80: mol_type = other DNA
tcggtcaaataaggtgaactttgcagttggattaatccaccataatgaggacatgcaggttgcaagagttaagtcagaat

SEQ ID NO: 16690 - DNA, 80 bp, synthetic construct
  source 1..80: mol_type = other DNA
tatttatgatccttgggtgaaaatcttccaactgcgtgtcactggttatttcctcatatggttttcttgaggaaatcttc

SEQ ID NO: 16691 - DNA, 80 bp, synthetic construct
  source 1..80: mol_type = other DNA
tgtatgaaccacctgactgaggctacccaacactcaggctatgggagttgtaataaaacgcttgctgtttttcaaaatcc

SEQ ID NO: 16692 - DNA, 80 bp, synthetic construct
  source 1..80: mol_type = other DNA
atccttcacccactttttgatagggttgtttgattttttctggtaaatttgtttaagtcctttgtagattctggatatta

SEQ ID NO: 16693 - DNA, 80 bp, synthetic construct
  source 1..80: mol_type = other DNA
agtcaatgatagcttgatggcaatagcattgaatttataaattacttttgtcagtatggccattttcacgatattgattc

SEQ ID NO: 16694 - DNA, 80 bp, synthetic construct
  source 1..80: mol_type = other DNA
ggaataagatgaattcagttgactatctttgattctagtccactcctgggtttagaggagccccttctgattactttctc

SEQ ID NO: 16695 - DNA, 80 bp, synthetic construct
  source 1..80: mol_type = other DNA
agaagtgagactgctgggccggaagctctagcaaggatgatagcaatacaagttgattcttaattaattaaagcacattg

SEQ ID NO: 16696 - DNA, 80 bp, synthetic construct
  source 1..80: mol_type = other DNA
aaacaaaaaatattgtgaaatatgaaatatctgatcctttctccctctctcaaaaattctgtctgccaggtgtggtggct

SEQ ID NO: 16697 - DNA, 80 bp, synthetic construct
  source 1..80: mol_type = other DNA
tgtttagctgtcagagtggcttgctaaagaaacaaaacaaaaatgaccttttgactggctttccttaaaactagattaaa

SEQ ID NO: 16698 - DNA, 80 bp, synthetic construct
  source 1..80: mol_type = other DNA
taattggtttgcggcatcacaaattatgcccatataagatgtccaacttaataaatgggtgtctcctgagtgccctacat

SEQ ID NO: 16699 - DNA, 80 bp, synthetic construct
  source 1..80: mol_type = other DNA
ggaatgtacaaagagattaatgttgttttcatgcccaccaacattgcatctattctgcagcccactaataaaggtgtaaa

SEQ ID NO: 16700 - DNA, 80 bp, synthetic construct
  source 1..80: mol_type = other DNA
gagtggtcaacgtggacatctttgtcttgttccagatcttagagacaaagctttccaactttccttttttactctgatgt

SEQ ID NO: 16701 - DNA, 80 bp, synthetic construct
  source 1..80: mol_type = other DNA
ggttggttctaaatccttgctattgtgaataatgctgcaataaaaatacttgtgcatgtgtctttaaaatagtatgactt

SEQ ID NO: 16702 - DNA, 80 bp, synthetic construct
  source 1..80: mol_type = other DNA
tccattgtatttctgtgtatcagttgttatgtatccttttcatctctcattttatttgagtcatctctttttgtagttaa

SEQ ID NO: 16703 - DNA, 80 bp, synthetic construct
  source 1..80: mol_type = other DNA
tctcgctctgtctctctttctctctctctctctctgtctctctctctctgtgtcttcctttctctctcactctgtctctc

SEQ ID NO: 16704 - DNA, 80 bp, synthetic construct
  source 1..80: mol_type = other DNA
gaagaattgcttcggtaggctcagtatttttgcatggcagatttttttcagcactttaaatgtatatcttattgtcttct

SEQ ID NO: 16705 - DNA, 80 bp, synthetic construct
  source 1..80: mol_type = other DNA
aagctccgtatgagtatctgggaattataaaaatacctgccaaagattcaggccttcctttggattttggcccctgcagt

SEQ ID NO: 16706 - DNA, 80 bp, synthetic construct
  source 1..80: mol_type = other DNA
ttatgatgcagaaattattttctttgtaggaaatgaaagcatttgtccagatctctggcaaagatggcactgtggtgttt

SEQ ID NO: 16707 - DNA, 80 bp, synthetic construct
  source 1..80: mol_type = other DNA
cagaaagtaaagacaactaactatccaaaaacaaacagcaaagtctaaagcaaagtttttctatgaggagaaaagcatgg

SEQ ID NO: 16708 - DNA, 80 bp, synthetic construct
  source 1..80: mol_type = other DNA
aatgtattatcagctaattagtcggggtccacataggtgaagcaatgtaaaatatttgttttccaaaaccaccttgtacc

SEQ ID NO: 16709 - DNA, 80 bp, synthetic construct
  source 1..80: mol_type = other DNA
ttctgggattacaggttgagccactatatttggcttgtagacccagttctcagtatctttcctggcttatcatctggtaa

SEQ ID NO: 16710 - DNA, 80 bp, synthetic construct
  source 1..80: mol_type = other DNA
ggcccatatctctgtgagctctgtcccagggagttttcaaatctctgctggcctaagaacaatggtggaaatgactggag

SEQ ID NO: 16711 - DNA, 80 bp, synthetic construct
  source 1..80: mol_type = other DNA
agtcatcctggccactcctccagcttaaaatatttttagagtatatctcatattaagtgttttcactaatacaaggcata

SEQ ID NO: 16712 - DNA, 80 bp, synthetic construct
  source 1..80: mol_type = other DNA
gtccaataatagtccaattacactgagacgtcagatttggcagcaaagaaggagtttaataattgcagggcactgagcaa

SEQ ID NO: 16713 - DNA, 80 bp, synthetic construct
  source 1..80: mol_type = other DNA
gagaaaaaggctaaggactatagggcttattttggggagataaaagggctctccaactgattgttatggtagatgcacaa

SEQ ID NO: 16714 - DNA, 80 bp, synthetic construct
  source 1..80: mol_type = other DNA
aaatttatgaaaaaagtacaagagtcaagatttgacgtcatttttgcagatgctatttttccctgtagtgagctgctggc

SEQ ID NO: 16715 - DNA, 80 bp, synthetic construct
  source 1..80: mol_type = other DNA
agatgttcccatattaccagaaggtttccttcacagtaaagagagataatgtctatacctcagatgcaaaaatcaataag

SEQ ID NO: 16716 - DNA, 80 bp, synthetic construct
  source 1..80: mol_type = other DNA
gagtgtttgacttacactgaaagaaagatgggaaatgggtggggtaaagcagataccaattagaaactcatgtgcacgtt

SEQ ID NO: 16717 - DNA, 80 bp, synthetic construct
  source 1..80: mol_type = other DNA
agtttgcagggagagactaagactcggatgatggtgagaggcaaattagagccagatacgtattaggagttgaaatattt

SEQ ID NO: 16718 - DNA, 80 bp, synthetic construct
  source 1..80: mol_type = other DNA
ggcgcccttagtttagattccagggaattctgtcagcatataagattatattttttatgaaggaacacaataaactcata

SEQ ID NO: 16719 - DNA, 80 bp, synthetic construct
  source 1..80: mol_type = other DNA
tgttatcacagaagaagaaacaaccagtccatatcagtgatgaatctgtaaagaggctcgattccttcaacactgggtgg

SEQ ID NO: 16720 - DNA, 80 bp, synthetic construct
  source 1..80: mol_type = other DNA
aatcacctgaaaaatatgatcattcaactatgtaactatatacaattctgtatgataaatgagactcctggactaattca

SEQ ID NO: 16721 - DNA, 80 bp, synthetic construct
  source 1..80: mol_type = other DNA
tggaaaactactgaaagaggctgttaaagtttgaagtaatccaattatagaaacttctgataaatgtgaagttgaccaaa

SEQ ID NO: 16722 - DNA, 80 bp, synthetic construct
  source 1..80: mol_type = other DNA
tttaggaataataaccaacacatgtgaggagtaggggactaaggagaatgaattccaatcctgtgattaaaagtgtaaac

SEQ ID NO: 16723 - DNA, 80 bp, synthetic construct
  source 1..80: mol_type = other DNA
atccagcctcttgtacttcctgtacattttggaagaggtgtatctgagtaatgttcagggtactattcagagacagaaca

SEQ ID NO: 16724 - DNA, 80 bp, synthetic construct
  source 1..80: mol_type = other DNA
tcaaaggacaacaggctctaatataacaacctacacacaagtagatacatgtgaactacttcccaaattactcaaaaaga

SEQ ID NO: 16725 - DNA, 80 bp, synthetic construct
  source 1..80: mol_type = other DNA
gatgctatctcattatggttttgatttgcatttctctaatgatgttaagcttttttctttttttttttcatatgatggtt

SEQ ID NO: 16726 - DNA, 80 bp, synthetic construct
  source 1..80: mol_type = other DNA
caccccatatatcacactctgtgactgcacttaaaataagagttcacttcatgcctatctctttgctgtcttcttttttg

SEQ ID NO: 16727 - DNA, 80 bp, synthetic construct
  source 1..80: mol_type = other DNA
caatgacacagaagtcacttcctatgaccgcttagccctggtctaactaatttgtttcctttctctatagattattctct

SEQ ID NO: 16728 - DNA, 80 bp, synthetic construct
  source 1..80: mol_type = other DNA
taagttaaatttttaataattgattttttcaaacccaaagatatcaatgtgcaaaattccttgtggagtccagctaccat

SEQ ID NO: 16729 - DNA, 80 bp, synthetic construct
  source 1..80: mol_type = other DNA
aggttgtgatatcctataccacaatctgaacagtaggtaaatcgatatcttcacctcaagataatgttcaagatgatctt

SEQ ID NO: 16730 - DNA, 80 bp, synthetic construct
  source 1..80: mol_type = other DNA
tgcattttcacgatctttctcatagcacttaaaagggctcatgatgttgagcatgttctccgtatgtctgtttgagaact

SEQ ID NO: 16731 - DNA, 80 bp, synthetic construct
  source 1..80: mol_type = other DNA
ggttttgtctgtaactcttcctgctacattactgtctttatttttatctttcagatataaagagaatgttatgaaattat

SEQ ID NO: 16732 - DNA, 80 bp, synthetic construct
  source 1..80: mol_type = other DNA
tggcaaactttttttctctttggaaatcattcagcaggcactgtttacatcctttcgctgccatatctctagctttcact

SEQ ID NO: 16733 - DNA, 80 bp, synthetic construct
  source 1..80: mol_type = other DNA
cgtttagcaacttacaagtgttttctcccactgaagagcaagctggaccaatacgttctgcagctaaaatcaaacaaggg

SEQ ID NO: 16734 - DNA, 80 bp, synthetic construct
  source 1..80: mol_type = other DNA
gacccagggcgaggaactgtgagcttggtgacagggacagctgtcatattcttctgtgaggctgtttttgtctgtttttc

SEQ ID NO: 16735 - DNA, 80 bp, synthetic construct
  source 1..80: mol_type = other DNA
ctgtcctagtcaggagatctcattgccaaacacttcgagcacaaggggcgttagcttcatgctgcactcaggctggaagg

SEQ ID NO: 16736 - DNA, 80 bp, synthetic construct
  source 1..80: mol_type = other DNA
gtcactgcacattgcctccaaaatcaatcaggtaaactatataggcagaaccatctctcaggctccaaagttttgtaccc

SEQ ID NO: 16737 - DNA, 80 bp, synthetic construct
  source 1..80: mol_type = other DNA
agccacacaaatcagtttagtgctttgacaggtatacacctgctgggcaccaacatgcaccctgggtctttcatcgagga

SEQ ID NO: 16738 - DNA, 80 bp, synthetic construct
  source 1..80: mol_type = other DNA
taatttcttttattagtatttttagagacagtgtcctgttctgtcacacaagctggagtgcaacagaatgattatggctt

SEQ ID NO: 16739 - DNA, 80 bp, synthetic construct
  source 1..80: mol_type = other DNA
cagttagggccatgtcattgtgatgccttgaacattgctggtgctcttattttgcccgtctcctccagttctgctcttta

SEQ ID NO: 16740 - DNA, 80 bp, synthetic construct
  source 1..80: mol_type = other DNA
tggggttgttagcgccgagattaatgacctcttctattgagctacaatccacgtgatagtacactcatttgtggtttaca

SEQ ID NO: 16741 - DNA, 80 bp, synthetic construct
  source 1..80: mol_type = other DNA
gacatcctgctgctaggaacacaaacccaaaacgaccccaaatgactgcccacagcctggaaatacagggcctttctaaa

SEQ ID NO: 16742 - DNA, 80 bp, synthetic construct
  source 1..80: mol_type = other DNA
catttagatgctgctgctgatgccacctcctccatgcatttcatttgcagtgccagcagggagggagatttgtggggtga

SEQ ID NO: 16743 - DNA, 80 bp, synthetic construct
  source 1..80: mol_type = other DNA
ctttttagggcagctttcccgtgtatgcaatctcagccaccattggaatcactgaacctggaatcactgtatctggaaag

SEQ ID NO: 16744 - DNA, 80 bp, synthetic construct
  source 1..80: mol_type = other DNA
acataaatatagccatttcccaacacatctattaaatgtgtcaatactctattgttttaagaatattggccggcagtggc

SEQ ID NO: 16745 - DNA, 80 bp, synthetic construct
  source 1..80: mol_type = other DNA
tccagtagaactccttatacttatatattttggcaaaaatgtatcagtatggttaggaaatggtctttatttttttcttt

SEQ ID NO: 16746 - DNA, 80 bp, synthetic construct
  source 1..80: mol_type = other DNA
cgatggctcatgcctgtaatcccagcactttgggagaccaaggtggttggatcacgaggtcaggtgatcgagagcagcct

SEQ ID NO: 16747 - DNA, 80 bp, synthetic construct
  source 1..80: mol_type = other DNA
actcagagcaatgagacttcctcaagcagactgtgtgctgttcctatggatctcaatcaagaaagaatttgggacccatc

SEQ ID NO: 16748 - DNA, 80 bp, synthetic construct
  source 1..80: mol_type = other DNA
ggctgttgtgaagacgctgcatagcgcacagtatttatgtaagtttccattagggagccttccacctccttccatccagc

SEQ ID NO: 16749 - DNA, 80 bp, synthetic construct
  source 1..80: mol_type = other DNA
agcagatgctcactaaatgttagttctcttctcttccctaccctgatgttccatgatcctgaagaagatatcagggtgaa

SEQ ID NO: 16750 - DNA, 80 bp, synthetic construct
  source 1..80: mol_type = other DNA
cctcgcttggggagcccaagattaggtgtcttgtctttcctgctcacctggggaccagagttagggagacctgtttctgc

SEQ ID NO: 16751 - DNA, 80 bp, synthetic construct
  source 1..80: mol_type = other DNA
tatagacggagcccaagaagttcaaggtctctttctctagattacaagttacttaagggcagggtccatgtcttacaatt

SEQ ID NO: 16752 - DNA, 80 bp, synthetic construct
  source 1..80: mol_type = other DNA
gctttggagttcttgggctgcttttcttgcttccagtgtccacctccctgttaaactatgcgttgtcttcttattggtgt

SEQ ID NO: 16753 - DNA, 80 bp, synthetic construct
  source 1..80: mol_type = other DNA
ggcatgtggactttgtaaaacctacatggctgctcagaagctttttttgacttcattttaagctccttgctgagtgtgaa

SEQ ID NO: 16754 - DNA, 80 bp, synthetic construct
  source 1..80: mol_type = other DNA
cctgggcttttagctttcttcctgtggttttacaaatattgagacactcaattgtctctgggatgctatgccttggggac

SEQ ID NO: 16755 - DNA, 80 bp, synthetic construct
  source 1..80: mol_type = other DNA
tgcctctgtgtcccaacaacagataatttttttcccattaacggagaaatttgctatcctctaagccctgttctgtgact

SEQ ID NO: 16756 - DNA, 80 bp, synthetic construct
  source 1..80: mol_type = other DNA
ctctcttcccaagcccatagaacctgggggtccttgaacctcattcttccctctaggtccgagtaacagggagctgtgaa

SEQ ID NO: 16757 - DNA, 80 bp, synthetic construct
  source 1..80: mol_type = other DNA
aattttttgatttttttgtaaaaatggggtctcactatgttgcccaggctagtctggaactcctgggctgaagcaatcct

SEQ ID NO: 16758 - DNA, 80 bp, synthetic construct
  source 1..80: mol_type = other DNA
aaatctccagagtagccagcataataacatttaatgagccgctatgagaagtaaggatgctagtctcagcatgaagtctt

SEQ ID NO: 16759 - DNA, 80 bp, synthetic construct
  source 1..80: mol_type = other DNA
acttttctgacatagttagatggggaaagatggtggcagaatcactgtctgcatgagcagcagcatcttccaaggaactg

SEQ ID NO: 16760 - DNA, 80 bp, synthetic construct
  source 1..80: mol_type = other DNA
ccctgcagtagctaacaagaaagaagttatacgccaggcttttttccatcttcgtagaaacaaaaagccttttgccgttc

SEQ ID NO: 16761 - DNA, 80 bp, synthetic construct
  source 1..80: mol_type = other DNA
aaaagagattccactgcttcgccatctttctctcatttttctcatgtcactttaaatatgaagctccatctcagatgtct

SEQ ID NO: 16762 - DNA, 80 bp, synthetic construct
  source 1..80: mol_type = other DNA
ttgtcctgaaggtctacaccctaccctgccttcctcccaatactaattgcctgtgagctggtttggatttgagaaacaag

SEQ ID NO: 16763 - DNA, 80 bp, synthetic construct
  source 1..80: mol_type = other DNA
agcactgtagaaaagagcacagacttttttttttggagggcaattggcaatgcgaagcatgttaaacacacagacatttt

SEQ ID NO: 16764 - DNA, 80 bp, synthetic construct
  source 1..80: mol_type = other DNA
agcaacatttcagagagggttgtaagaactaaataaaggaaaagggaacaggacctggacaaaggaaaccctaaataaag

SEQ ID NO: 16765 - DNA, 80 bp, synthetic construct
  source 1..80: mol_type = other DNA
cacagctagcaagtctgaaagctggaattagaatcaagaactgtttgactccaaggaatctgactgatatggtttggctc

SEQ ID NO: 16766 - DNA, 80 bp, synthetic construct
  source 1..80: mol_type = other DNA
agtgtgtgctgagtgcaaagtcatgcaaatgagccctgattagagtgctgaatttcaaaagaaataaaagaatgacaaaa

SEQ ID NO: 16767 - DNA, 80 bp, synthetic construct
  source 1..80: mol_type = other DNA
aatggcctctaatgcctgatcatagatcaatagaactgtgatccctctctaaccttctaaccatcatcacacttcagcta

SEQ ID NO: 16768 - DNA, 80 bp, synthetic construct
  source 1..80: mol_type = other DNA
aaaatcaaaaaaaggcaaaaaatgtagcactaaatagattgtgaagaccctggctgggaagataggtgccaagtcatgtg

SEQ ID NO: 16769 - DNA, 80 bp, synthetic construct
  source 1..80: mol_type = other DNA
gaatctccatattgacaactcctagcccaatgccagattataaatgcagattgaagtctggtgacggaatgagtgaaaga

SEQ ID NO: 16770 - DNA, 80 bp, synthetic construct
  source 1..80: mol_type = other DNA
atacatgcatgccattagttgagttaactaaaacctagatatgtcaaggacatccatttgagcaaggacatcccataaat

SEQ ID NO: 16771 - DNA, 80 bp, synthetic construct
  source 1..80: mol_type = other DNA
gtgttggtaaagaaactggccctgatcaaacaggaatgcaggtacattcctgacactgcctggatgttccaaggttggct

SEQ ID NO: 16772 - DNA, 80 bp, synthetic construct
  source 1..80: mol_type = other DNA
ttaatttgggtttagtggttcacctctgcatgcccccgctgtctgcattggaagaggtgttttacttccagggtgtaagg

SEQ ID NO: 16773 - DNA, 80 bp, synthetic construct
  source 1..80: mol_type = other DNA
cccatgatctctgatctagggtgtggaatatcaaagctcattaagtcttatttcaccttcataccacttcatggtgtaga

SEQ ID NO: 16774 - DNA, 80 bp, synthetic construct
  source 1..80: mol_type = other DNA
atgtacatatggacataaagatgagaacaatggacactgggaatacaagtggacaggggcaggggctgaaaaacaaccta

SEQ ID NO: 16775 - DNA, 80 bp, synthetic construct
  source 1..80: mol_type = other DNA
acccaaccctgcttgaggttatttgctgctatcaagaagccagcgcccaggaccagagtccacatgtggagatgtccaag

SEQ ID NO: 16776 - DNA, 80 bp, synthetic construct
  source 1..80: mol_type = other DNA
gctcaacacccccagctgcagtagggttgactctgctgcccagactctggatcttagcagctggctggggggccagcaag

SEQ ID NO: 16777 - DNA, 80 bp, synthetic construct
  source 1..80: mol_type = other DNA
tttcctatcctcaatccctgtggttttcagaggtcagaggtgacatccagatagacaaccaccctggaacttaaaaaaaa

SEQ ID NO: 16778 - DNA, 80 bp, synthetic construct
  source 1..80: mol_type = other DNA
agagcaaccctctcctgaccctgctttagaaataccaaacccccagcactaagcttcagagaagcagagggggaggagct

(The sequence listing continues in the following parts.)

1.-98. (canceled)

99. A method for preparing a nucleic acid library, comprising:
(a) obtaining a plurality of transposomes comprising transposon adaptors, wherein the plurality of transposomes is immobilized on a plurality of beads;
(b) contacting a plurality of nucleic acid fragments with the plurality of transposomes to obtain a plurality of polynucleotides;
(c) amplifying the plurality of polynucleotides to obtain amplified polynucleotides by:
(i) performing a mutagenesis PCR, such that mutations are introduced into amplified polynucleotides, and
(ii) performing a suppression PCR; and
(d) adding library adapters to each end of the amplified polynucleotides, thereby obtaining the nucleic acid library;
further comprising enriching for target polynucleotides in (i) the plurality of polynucleotides, (ii) the amplified polynucleotides, and/or (iii) nucleic acids of the nucleic acid library by hybridizing a plurality of selection probes to the target polynucleotides; wherein the selection probes of the plurality of selection probes comprise at least 50 different nucleotide sequences;
wherein each selection probe of the plurality of selection probes comprises a nucleotide sequence capable of hybridizing to a gene selected from: (i) TABLE 1B, (ii) a nucleotide sequence within no more than 10 kbp 5′ or no more than 10 kbp 3′ of a gene in a human genome selected from TABLE 1B, and/or (iii) a cytochrome P450 gene, an HLA gene, or a UDP-glucuronosyltransferase gene.

100. The method of claim 99, wherein each selection probe of the plurality of selection probes comprises a nucleotide sequence having at least 90% sequence identity to any one of SEQ ID NOs: 02-85141.

101. The method of claim 99, wherein the plurality of selection probes is attached to a substrate.

102. The method of claim 99, further comprising amplifying the target polynucleotides.

103. The method of claim 99, wherein the plurality of the transposomes is immobilized on the plurality of beads:
(i) at a density such that an average length of the plurality of polynucleotides is greater than about 1 kbp, and/or the average length of the plurality of polynucleotides is in a range from about 1 kbp to about 40 kbp;
(ii) such that the number of transposomes immobilized on the plurality of beads is no more than about 100 transposomes per bead;
(iii) comprise a total activity such that an average length of the plurality of polynucleotides is greater than about 1 kbp, and/or wherein the average length of the plurality of polynucleotides is in a range from about 1 kbp to about 40 kbp; and/or
(iv) comprise an activity in a range from about 0.05 AU/μl to about 0.25 AU/μl.

104. The method of claim 99, wherein the transposomes of the plurality of transposomes are the same.

105. The method of claim 99, wherein the mutagenesis PCR comprises: (i) amplifying the plurality of polynucleotides with a low bias DNA polymerase; (ii) amplifying the plurality of polynucleotides with a nucleotide analogue; and/or (iii) no more than 6 cycles.

106. The method of claim 99, wherein a first end of a polynucleotide of the plurality of polynucleotides is capable of annealing to a second end of the polynucleotide of the plurality of polynucleotides; and/or, wherein a first end of an amplified polynucleotide is capable of annealing to a second end of the amplified polynucleotide.

107. The method of claim 99, wherein the suppression PCR comprises (i) use of a single amplification primer; and/or (ii) no more than 6 cycles.

108. The method of claim 99, wherein step (d) comprises contacting the amplified polynucleotides with an additional plurality of transposomes comprising the library adapters.

109. A method for determining a sequence of a target nucleic acid, comprising:
performing the method of claim 99;
sequencing the nucleic acid library to obtain sequence reads; and
assembling sequence reads to obtain the sequence of a target nucleic acid.

110. The method of claim 109, wherein the assembling comprises determining mutations introduced into the amplified polynucleotides during the mutagenesis PCR and comparing the sequence reads to a reference sequence.

111. A kit comprising:
a first bead-linked transposomes (BLT-1) reagent, wherein the BLT-1 transposomes reagent comprises a first adaptor sequence;
a mutagenesis reagent comprising a first primer, dPTPs, dNTPs, and a polymerase;
a second bead-linked transposomes (BLT-2) reagent, wherein the BLT-2 transposomes reagent comprise the first adaptor and a second adaptor;
an amplification reagent comprising a first primer, a second primer, dNTPs, and a polymerase; and
a plurality of selection probes, wherein each selection probe of the plurality of selection probes comprises a nucleotide sequence capable of hybridizing to a gene selected from: (i) TABLE 1B, (ii) a nucleotide sequence within no more than 10 kbp 5′ or no more than 10 kbp 3′ of a gene in a human genome selected from TABLE 1B, and/or (iii) a cytochrome P450 gene, an HLA gene, or a UDP-glucuronosyltransferase gene;
wherein BLT-1 has a lower transposome density as compared to BLT-2;
wherein the first primer hybridizes to the first adaptor sequence and the second primer hybridizes to the second adaptor sequence.

112. The kit of claim 111, wherein BLT-2 has more than 10 times the transposome density as compared to BLT-1; and/or the first adaptor is B15 and the second adaptor is A14.

113. The kit of claim 111, comprising a plurality of at least 50 selection probes, wherein the selection probes are different from one another, wherein each selection probe of the plurality of selection probes comprises a nucleotide sequence having at least 90% sequence identity to any one of SEQ ID NOs: 02-85141.

114. A system for preparing a nucleic acid library, comprising:
(a) a first plurality of transposomes comprising transposon adaptors for tagmenting a plurality of nucleic acid fragments, wherein the first plurality of transposomes is immobilized on a first plurality of beads at a first density;
(b) reagents for amplifying the plurality of polynucleotides to obtain amplified polynucleotides, wherein the amplifying comprising a mutagenesis PCR and/or a suppression PCR, wherein:
(i) the first reagent for performing mutagenesis PCR comprise a low bias DNA polymerase and/or a nucleotide analogue, and
(ii) the first reagents for performing suppression PCR comprise amplification primers having the same nucleotide sequence capable of hybridizing to the transposon adaptors;
(c) a plurality of selection probes for enriching for target polynucleotides in the amplified polynucleotides, wherein each selection probe of the plurality of selection probes comprises a nucleotide sequence capable of hybridizing to a gene selected from: (i) TABLE 1B, (ii) a nucleotide sequence within no more than 10 kbp 5′ or no more than 10 kbp 3′ of a gene in a human genome selected from TABLE 1B, and/or (iii) a cytochrome P450 gene, an HLA gene, or a UDP-glucuronosyltransferase gene; and
(d) a second plurality of transposomes comprising library adaptors for adding library adaptors to each end of the amplified polynucleotides, wherein the second plurality of transposomes is immobilized on a second plurality of beads at a second density, wherein the first density is less than the second density.

115. The system of claim 114, wherein the first plurality of the transposomes is immobilized on the first plurality of beads:
(i) at a density such that an average length of the plurality of polynucleotides is greater than about 1 kbp, and/or the average length of the plurality of polynucleotides is in a range from about 1 kbp to about 40 kbp;
(ii) such that the number of transposomes immobilized on the first plurality of beads is no more than about 100 transposomes per bead;
(iii) comprise a total activity such that an average length of the plurality of polynucleotides is greater than about 1 kbp, and/or wherein the average length of the plurality of polynucleotides is in a range from about 1 kbp to about 40 kbp; and/or
(iv) comprise an activity in a range from about 0.05 AU/μl to about 0.25 AU/μl.

116. The system of claim 114, wherein:
(i) an average distance between two adjacent nucleotide sequences of the selection probes on a reference sequence of a genome is in a range from about 300 consecutive nucleotides to about 7,000 consecutive nucleotides;
(ii) an average number of sites in a genome that each selection probe of the plurality of selection probes is capable of hybridizing to is no more than 50 different sites in the genome;
(iii) each selection probe of the plurality of selection probes is capable of hybridizing to no more than 50 different sites in a genome;
(iv) the plurality of selection probes lacks sequences capable of hybridizing to a repetitive genomic DNA element;
(v) the plurality of selection probes comprises at least 50 different selection probes; and/or
(vi) each selection probe of the plurality of selection probes comprises a nucleotide sequence having at least 90% sequence identity to any one of SEQ ID NOs: 02-85141.
